United States Patent Application Publication US 2008/0113351 A1 - sequence listing, part 3

SEQ ID NO: 49400 - DNA, 19 bp, Homo sapiens
  siRNA target sequence for EIF4G3 (NM_003760.2,3956-3974).
ctacacattaatgatttta

SEQ ID NO: 49401 - DNA, 19 bp, Homo sapiens
  siRNA target sequence for EIF4G3 (NM_003760.2,4008-4026).
cccagggcctactacatgt

SEQ ID NO: 49402 - DNA, 19 bp, Homo sapiens
  siRNA target sequence for EIF4G3 (NM_003760.2,4009-4027).
ccagggcctactacatgtt

SEQ ID NO: 49403 - DNA, 19 bp, Homo sapiens
  siRNA target sequence for EIF4G3 (NM_003760.2,4010-4028).
cagggcctactacatgttt

SEQ ID NO: 49404 - DNA, 19 bp, Homo sapiens
  siRNA target sequence for EIF4G3 (NM_003760.2,4133-4151).
caggactttttcaaaggtt

SEQ ID NO: 49405 - DNA, 19 bp, Homo sapiens
  siRNA target sequence for EIF4G3 (NM_003760.2,4263-4281).
gagaacttaccatagaatt

SEQ ID NO: 49406 - DNA, 19 bp, Homo sapiens
  siRNA target sequence for EIF4G3 (NM_003760.2,4268-4286).
cttaccatagaatttagca

SEQ ID NO: 49407 - DNA, 19 bp, Homo sapiens
  siRNA target sequence for EIF4G3 (NM_003760.2,4313-4331).
ggggtcttgctatctgaaa

SEQ ID NO: 49408 - DNA, 19 bp, Homo sapiens
  siRNA target sequence for EIF4G3 (NM_003760.2,4314-4332).
gggtcttgctatctgaaat

SEQ ID NO: 49409 - DNA, 19 bp, Homo sapiens
  siRNA target sequence for EIF4G3 (NM_003760.2,4315-4333).
ggtcttgctatctgaaata

SEQ ID NO: 49410 - DNA, 19 bp, Homo sapiens
  siRNA target sequence for EIF4G3 (NM_003760.2,4316-4334).
gtcttgctatctgaaatat

SEQ ID NO: 49411 - DNA, 19 bp, Homo sapiens
  siRNA target sequence for EIF4G3 (NM_003760.2,4336-4354).
gcacctactatgcaaacaa

SEQ ID NO: 49412 - DNA, 19 bp, Homo sapiens
  siRNA target sequence for EIF4G3 (NM_003760.2,4500-4518).
cactttcaaagaaagaact

SEQ ID NO: 49413 - DNA, 19 bp, Homo sapiens
  siRNA target sequence for EIF4G3 (NM_003760.2,4521-4539).
ctgccgaagagctgtataa

SEQ ID NO: 49414 - DNA, 19 bp, Homo sapiens
  siRNA target sequence for EIF4G3 (NM_003760.2,4540-4558).
gcgactcgagaaactcatt

SEQ ID NO: 49415 - DNA, 19 bp, Homo sapiens
  siRNA target sequence for EIF4G3 (NM_003760.2,4541-4559).
cgactcgagaaactcatta

SEQ ID NO: 49416 - DNA, 19 bp, Homo sapiens
  siRNA target sequence for EIF4G3 (NM_003760.2,4542-4560).
gactcgagaaactcattat

SEQ ID NO: 49417 - DNA, 19 bp, Homo sapiens
  siRNA target sequence for EIF4G3 (NM_003760.2,4572-4590).
cgaatgatgaacagatctt

SEQ ID NO: 49418 - DNA, 19 bp, Homo sapiens
  siRNA target sequence for EIF4G3 (NM_003760.2,4577-4595).
gatgaacagatctttgact

SEQ ID NO: 49419 - DNA, 19 bp, Homo sapiens
  siRNA target sequence for EIF4G3 (NM_003760.2,4594-4612).
ctgggtagaggctaatcta

SEQ ID NO: 49420 - DNA, 19 bp, Homo sapiens
  siRNA target sequence for EIF4G3 (NM_003760.2,4596-4614).
gggtagaggctaatctaga

SEQ ID NO: 49421 - DNA, 19 bp, Homo sapiens
  siRNA target sequence for EIF4G3 (NM_003760.2,4605-4623).
ctaatctagacgaaatcca

SEQ ID NO: 49422 - DNA, 19 bp, Homo sapiens
  siRNA target sequence for EIF4G3 (NM_003760.2,4613-4631).
gacgaaatccagatgagtt

SEQ ID NO: 49423 - DNA, 19 bp, Homo sapiens
  siRNA target sequence for EIF4G3 (NM_003760.2,4642-4660).
ccttagagctttaatgact

SEQ ID NO: 49424 - DNA, 19 bp, Homo sapiens
  siRNA target sequence for EIF4G3 (NM_003760.2,4796-4814).
ctacaagcatcgatagtaa

SEQ ID NO: 49425 - DNA, 19 bp, Homo sapiens
  siRNA target sequence for EIF4G3 (NM_003760.2,4807-4825).
gatagtaaaacttgatcaa

SEQ ID NO: 49426 - DNA, 19 bp, Homo sapiens
  siRNA target sequence for EIF4G3 (NM_003760.2,4838-4856).
ctgcggatgttttttgatt

SEQ ID NO: 49427 - DNA, 19 bp, Homo sapiens
  siRNA target sequence for EIF4G3 (NM_003760.2,4840-4858).
gcggatgttttttgattgt

SEQ ID NO: 49428 - DNA, 19 bp, Homo sapiens
  siRNA target sequence for EIF4G3 (NM_003760.2,4842-4860).
ggatgttttttgattgtct

SEQ ID NO: 49429 - DNA, 19 bp, Homo sapiens
  siRNA target sequence for EIF4G3 (NM_003760.2,4882-4900).
cgaggatgccttctacaaa

SEQ ID NO: 49430 - DNA, 19 bp, Homo sapiens
  siRNA target sequence for NCBP2 (NM_007362.2,145-163).
gtacgttatatgttggaaa

SEQ ID NO: 49431 - DNA, 19 bp, Homo sapiens
  siRNA target sequence for NCBP2 (NM_007362.2,314-332).
cgccatgcggtacataaat

SEQ ID NO: 49432 - DNA, 19 bp, Homo sapiens
  siRNA target sequence for NCBP2 (NM_007362.2,340-358).
gtctggatgaccgaatcat

SEQ ID NO: 49433 - DNA, 19 bp, Homo sapiens
  siRNA target sequence for NCBP2 (NM_007362.2,370-388).
gggacgcaggctttaagga

SEQ ID NO: 49434 - DNA, 19 bp, Homo sapiens
  siRNA target sequence for NCBP2 (NM_007362.2,421-439).
gccaggttcgggatgagta

SEQ ID NO: 49435 - DNA, 19 bp, Homo sapiens
  siRNA target sequence for RNUT1 (NM_005701.2,155-173).
cgcctatcccagtacaagt

SEQ ID NO: 49436 - DNA, 19 bp, Homo sapiens
  siRNA target sequence for RNUT1 (NM_005701.2,164-182).
cagtacaagtccaagtaca

SEQ ID NO: 49437 - DNA, 19 bp, Homo sapiens
  siRNA target sequence for RNUT1 (NM_005701.2,234-252).
ccaagcggctggattatgt

SEQ ID NO: 49438 - DNA, 19 bp, Homo sapiens
  siRNA target sequence for RNUT1 (NM_005701.2,345-363).
ctgtcaagaagttaccaaa

SEQ ID NO: 49439 - DNA, 19 bp, Homo sapiens
  siRNA target sequence for RNUT1 (NM_005701.2,365-383).
cactatgctaatcaattga

SEQ ID NO: 49440 - DNA, 19 bp, Homo sapiens
  siRNA target sequence for RNUT1 (NM_005701.2,371-389).
gctaatcaattgatgcttt

SEQ ID NO: 49441 - DNA, 19 bp, Homo sapiens
  siRNA target sequence for RNUT1 (NM_005701.2,456-474).
gaaaaagagcccttatcgt

SEQ ID NO: 49442 - DNA, 19 bp, Homo sapiens
  siRNA target sequence for RNUT1 (NM_005701.2,523-541).
caacaggttttcttcactt

SEQ ID NO: 49443 - DNA, 19 bp, Homo sapiens
  siRNA target sequence for RNUT1 (NM_005701.2,578-596).
gactacaccattctagatt

SEQ ID NO: 49444 - DNA, 19 bp, Homo sapiens
  siRNA target sequence for RNUT1 (NM_005701.2,583-601).
caccattctagattgcatt

SEQ ID NO: 49445 - DNA, 19 bp, Homo sapiens
  siRNA target sequence for RNUT1 (NM_005701.2,585-603).
ccattctagattgcattta

SEQ ID NO: 49446 - DNA, 19 bp, Homo sapiens
  siRNA target sequence for RNUT1 (NM_005701.2,597-615).
gcatttacaatgaggtaaa

SEQ ID NO: 49447 - DNA, 19 bp, Homo sapiens
  siRNA target sequence for RNUT1 (NM_005701.2,653-671).
ggacaccctttttatgatt

SEQ ID NO: 49448 - DNA, 19 bp, Homo sapiens
  siRNA target sequence for RNUT1 (NM_005701.2,686-704).
cgattctactggatgcatt

SEQ ID NO: 49449 - DNA, 19 bp, Homo sapiens
  siRNA target sequence for RNUT1 (NM_005701.2,736-754).
gaaaaccaagcttaatcct

SEQ ID NO: 49450 - DNA, 19 bp, Homo sapiens
  siRNA target sequence for RNUT1 (NM_005701.2,800-818).
ctgtgtgatgtgctatcta

SEQ ID NO: 49451 - DNA, 19 bp, Homo sapiens
  siRNA target sequence for RNUT1 (NM_005701.2,806-824).
gatgtgctatctatggatt

SEQ ID NO: 49452 - DNA, 19 bp, Homo sapiens
  siRNA target sequence for RNUT1 (NM_005701.2,961-979).
gaccaccaagccagactat

SEQ ID NO: 49453 - DNA, 19 bp, Homo sapiens
  siRNA target sequence for RRP4 (NM_014285.4,62-80).
cgacactaagaaacatcta

SEQ ID NO: 49454 - DNA, 19 bp, Homo sapiens
  siRNA target sequence for RRP4 (NM_014285.4,103-121).
ctacggacacaggattcat

SEQ ID NO: 49455 - DNA, 19 bp, Homo sapiens
  siRNA target sequence for RRP4 (NM_014285.4,136-154).
cgtatatgggagaagagaa

SEQ ID NO: 49456 - DNA, 19 bp, Homo sapiens
  siRNA target sequence for RRP4 (NM_014285.4,152-170).
gaagctcattgcatctgtt

SEQ ID NO: 49457 - DNA, 19 bp, Homo sapiens
  siRNA target sequence for RRP4 (NM_014285.4,251-269).
cgtagtgggacgaatcaca

SEQ ID NO: 49458 - DNA, 19 bp, Homo sapiens
  siRNA target sequence for RRP4 (NM_014285.4,262-280).
gaatcacagaggttcaaca

SEQ ID NO: 49459 - DNA, 19 bp, Homo sapiens
  siRNA target sequence for RRP4 (NM_014285.4,410-428).
ggaaggggaccttatcagt

SEQ ID NO: 49460 - DNA, 19 bp, Homo sapiens
  siRNA target sequence for RRP4 (NM_014285.4,473-491).
cacgaggagcctgaaatat

SEQ ID NO: 49461 - DNA, 19 bp, Homo sapiens
  siRNA target sequence for RRP4 (NM_014285.4,544-562).
ggcagaagacccactttca

SEQ ID NO: 49462 - DNA, 19 bp, Homo sapiens
  siRNA target sequence for RRP4 (NM_014285.4,545-563).
gcagaagacccactttcat

SEQ ID NO: 49463 - DNA, 19 bp, Homo sapiens
  siRNA target sequence for RRP4 (NM_014285.4,583-601).
cagtgattctcggtaacaa

SEQ ID NO: 49464 - DNA, 19 bp, Homo sapiens
  siRNA target sequence for RRP4 (NM_014285.4,594-612).
ggtaacaacggcttcatct

SEQ ID NO: 49465 - DNA, 19 bp, Homo sapiens
  siRNA target sequence for RRP4 (NM_014285.4,622-640).
caacacctgagcacaaaga

SEQ ID NO: 49466 - DNA, 19 bp, Homo sapiens
  siRNA target sequence for RRP4 (NM_014285.4,648-666).
gcagggggcttcattgcaa

SEQ ID NO: 49467 - DNA, 19 bp, Homo sapiens
  siRNA target sequence for RRP4 (NM_014285.4,687-705).
gctgatcgagaggtgatat

SEQ ID NO: 49468 - DNA, 19 bp, Homo sapiens
  siRNA target sequence for RRP4 (NM_014285.4,711-729).
cttcggaactgcatcatct

SEQ ID NO: 49469 - DNA, 19 bp, Homo sapiens
  siRNA target sequence for RRP4 (NM_014285.4,743-761).
gaggatgatgctgtatgat

SEQ ID NO: 49470 - DNA, 19 bp, Homo sapiens
  siRNA target sequence for RRP4 (NM_014285.4,787-805).
catcccttccacatcagat

SEQ ID NO: 49471 - DNA, 19 bp, Homo sapiens
  siRNA target sequence for RRP4 (NM_014285.4,790-808).
cccttccacatcagatcaa

SEQ ID NO: 49472 - DNA, 19 bp, Homo sapiens
  siRNA target sequence for RRP4 (NM_014285.4,853-871).
cacgccagaggcttttgga

SEQ ID NO: 49473 - DNA, 19 bp, Homo sapiens
  siRNA target sequence for SRP19 (NM_003135.1,109-127).
gccgaccaggacaggttta

SEQ ID NO: 49474 - DNA, 19 bp, Homo sapiens
  siRNA target sequence for SRP19 (NM_003135.1,111-129).
cgaccaggacaggtttatt

SEQ ID NO: 49475 - DNA, 19 bp, Homo sapiens
  siRNA target sequence for SRP19 (NM_003135.1,115-133).
caggacaggtttatttgta

SEQ ID NO: 49476 - DNA, 19 bp, Homo sapiens
  siRNA target sequence for SRP19 (NM_003135.1,118-136).
gacaggtttatttgtatct

SEQ ID NO: 49477 - DNA, 19 bp, Homo sapiens
  siRNA target sequence for SRP19 (NM_003135.1,179-197).
ggcgaatccccataagtaa

SEQ ID NO: 49478 - DNA, 19 bp, Homo sapiens
  siRNA target sequence for SRP19 (NM_003135.1,189-207).
cataagtaaggctgttgaa

SEQ ID NO: 49479 - DNA, 19 bp, Homo sapiens
  siRNA target sequence for SRP19 (NM_003135.1,212-230).
ctacagctacagagattca

SEQ ID NO: 49480 - DNA, 19 bp, Homo sapiens
  siRNA target sequence for SRP19 (NM_003135.1,215-233).
cagctacagagattcaaga

SEQ ID NO: 49481 - DNA, 19 bp, Homo sapiens
  siRNA target sequence for SRP19 (NM_003135.1,218-236).
ctacagagattcaagatgt

SEQ ID NO: 49482 - DNA, 19 bp, Homo sapiens
  siRNA target sequence for SRP19 (NM_003135.1,223-241).
gagattcaagatgtatgtt

SEQ ID NO: 49483 - DNA, 19 bp, Homo sapiens
  siRNA target sequence for SRP19 (NM_003135.1,239-257).
gttcagcagttggacttaa

SEQ ID NO: 49484 - DNA, 19 bp, Homo sapiens
  siRNA target sequence for SRP19 (NM_003135.1,242-260).
cagcagttggacttaacgt

SEQ ID NO: 49485 - DNA, 19 bp, Homo sapiens
  siRNA target sequence for SRP19 (NM_003135.1,244-262).
gcagttggacttaacgtat

SEQ ID NO: 49486 - DNA, 19 bp, Homo sapiens
  siRNA target sequence for SRP19 (NM_003135.1,245-263).
cagttggacttaacgtatt

SEQ ID NO: 49487 - DNA, 19 bp, Homo sapiens
  siRNA target sequence for SRP19 (NM_003135.1,296-314).
ggaatcgtgatgtccaata

SEQ ID NO: 49488 - DNA, 19 bp, Homo sapiens
  siRNA target sequence for SRP19 (NM_003135.1,356-374).
gcctctgccttgtacagtt

SEQ ID NO: 49489 - DNA, 19 bp, Homo sapiens
  siRNA target sequence for SRP19 (NM_003135.1,372-390).
gttcccatcacgtaagtca

SEQ ID NO: 49490 - DNA, 19 bp, Homo sapiens
  siRNA target sequence for SRP19 (NM_003135.1,376-394).
ccatcacgtaagtcagtaa

SEQ ID NO: 49491 - DNA, 19 bp, Homo sapiens
  siRNA target sequence for SRP19 (NM_003135.1,377-395).
catcacgtaagtcagtaat

SEQ ID NO: 49492 - DNA, 19 bp, Homo sapiens
  siRNA target sequence for SRP19 (NM_003135.1,399-417).
gtatgcagcagaaatgata

SEQ ID NO: 49493 - DNA, 19 bp, Homo sapiens
  siRNA target sequence for SRP19 (NM_003135.1,403-421).
gcagcagaaatgataccta

SEQ ID NO: 49494 - DNA, 19 bp, Homo sapiens
  siRNA target sequence for SRP19 (NM_003135.1,414-432).
gatacctaaactaaaaaca

SEQ ID NO: 49495 - DNA, 19 bp, Homo sapiens
  siRNA target sequence for SRP19 (NM_003135.1,449-467).
gaggtgctgaccaaagtct

SEQ ID NO: 49496 - DNA, 19 bp, Homo sapiens
  siRNA target sequence for PTBP1 (NM_002819.3,130-148).
ggatctgacgagcttttct

SEQ ID NO: 49497 - DNA, 19 bp, Homo sapiens
  siRNA target sequence for PTBP1 (NM_002819.3,161-179).
ctaacggaccgtttatcat

SEQ ID NO: 49498 - DNA, 19 bp, Homo sapiens
  siRNA target sequence for PTBP1 (NM_002819.3,869-887).
ccagcctcaacgtcaagta

SEQ ID NO: 49499 - DNA, 19 bp, Homo sapiens
  siRNA target sequence for PTBP1 (NM_002819.3,874-892).
ctcaacgtcaagtacaaca

SEQ ID NO: 49500 - DNA, 19 bp, Homo sapiens
  siRNA target sequence for PTBP1 (NM_002819.3,876-894).
caacgtcaagtacaacaat

SEQ ID NO: 49501 - DNA, 19 bp, Homo sapiens
  siRNA target sequence for PTBP1 (NM_002819.3,975-993).
cttcggtgcacctggtata

SEQ ID NO: 49502 - DNA, 19 bp, Homo sapiens
  siRNA target sequence for PTBP1 (NM_002819.3,1262-1280).
gcgtgaagatcctgttcaa

SEQ ID NO: 49503 - DNA, 19 bp, Homo sapiens
  siRNA target sequence for PTBP1 (NM_002819.3,1263-1281).
cgtgaagatcctgttcaat

SEQ ID NO: 49504 - DNA, 19 bp, Homo sapiens
  siRNA target sequence for PTBP1 (NM_002819.3,1264-1282).
gtgaagatcctgttcaata

SEQ ID NO: 49505 - DNA, 19 bp, Homo sapiens
  siRNA target sequence for PTBP1 (NM_002819.3,1603-1621).
gtcgtcaaaggattcaagt

SEQ ID NO: 49506 - DNA, 19 bp, Homo sapiens
  siRNA target sequence for PTBP1 (NM_002819.3,1676-1694).
cggtccaggccctcattga

SEQ ID NO: 49507 - DNA, 19 bp, Homo sapiens
  siRNA target sequence for A2BP1 (NM_018723.2,1030-1048).
ccgctgcccctgacacaat

SEQ ID NO: 49508 - DNA, 19 bp, Homo sapiens
  siRNA target sequence for A2BP1 (NM_018723.2,1156-1174).
cggttcccgagcacacatt

SEQ ID NO: 49509 - DNA, 19 bp, Homo sapiens
  siRNA target sequence for A2BP1 (NM_018723.2,1157-1175).
ggttcccgagcacacatta

SEQ ID NO: 49510 - DNA, 19 bp, Homo sapiens
  siRNA target sequence for A2BP1 (NM_018723.2,1158-1176).
gttcccgagcacacattaa

SEQ ID NO: 49511 - DNA, 19 bp, Homo sapiens
  siRNA target sequence for A2BP1 (NM_018723.2,1162-1180).
ccgagcacacattaaacct

SEQ ID NO: 49512 - DNA, 19 bp, Homo sapiens
  siRNA target sequence for A2BP1 (NM_018723.2,1377-1395).
ccggacctcagacaaatgt

SEQ ID NO: 49513 - DNA, 19 bp, Homo sapiens
  siRNA target sequence for A2BP1 (NM_018723.2,1378-1396).
cggacctcagacaaatgtt

SEQ ID NO: 49514 - DNA, 19 bp, Homo sapiens
  siRNA target sequence for A2BP1 (NM_018723.2,1586-1604).
gaccgtcaacccttataca

SEQ ID NO: 49515 - DNA, 19 bp, Homo sapiens
  siRNA target sequence for A2BP1 (NM_018723.2,1588-1606).
ccgtcaacccttatacaaa

SEQ ID NO: 49516 - DNA, 19 bp, Homo sapiens
  siRNA target sequence for A2BP1 (NM_018723.2,1589-1607).
cgtcaacccttatacaaat

SEQ ID NO: 49517 - DNA, 19 bp, Homo sapiens
  siRNA target sequence for A2BP1 (NM_018723.2,1638-1656).
gtctacagtcccgaattct

SEQ ID NO: 49518 - DNA, 19 bp, Homo sapiens
  siRNA target sequence for A2BP1 (NM_018723.2,1713-1731).
gcccccagttcacttgtat

SEQ ID NO: 49519 - DNA, 19 bp, Homo sapiens
  siRNA target sequence for A2BP1 (NM_018723.2,1716-1734).
cccagttcacttgtatata

SEQ ID NO: 49520 - DNA, 19 bp, Homo sapiens
  siRNA target sequence for A2BP1 (NM_018723.2,1810-1828).
gcggtcgcaccgtgtacaa

SEQ ID NO: 49521 - DNA, 19 bp, Homo sapiens
  siRNA target sequence for A2BP1 (NM_018723.2,1812-1830).
ggtcgcaccgtgtacaaca

SEQ ID NO: 49522 - DNA, 19 bp, Homo sapiens
  siRNA target sequence for A2BP1 (NM_018723.2,1865-1883).
ggcctacggcggtgttgtt

SEQ ID NO: 49523 - DNA, 19 bp, Homo sapiens
  siRNA target sequence for A2BP1 (NM_018723.2,1866-1884).
gcctacggcggtgttgttt

SEQ ID NO: 49524 - DNA, 19 bp, Homo sapiens
  siRNA target sequence for A2BP1 (NM_018723.2,1867-1885).
cctacggcggtgttgttta

SEQ ID NO: 49525 - DNA, 19 bp, Homo sapiens
  siRNA target sequence for A2BP1 (NM_018723.2,2092-2110).
ggagccatgctgatgatgt

SEQ ID NO: 49526 - DNA, 19 bp, Homo sapiens
  siRNA target sequence for A2BP1 (NM_018723.2,2106-2124).
gatgtgggtctcgttcttt

SEQ ID NO: 49527 - DNA, 19 bp, Homo sapiens
  siRNA target sequence for A2BP1 (NM_018723.2,2109-2127).
gtgggtctcgttctttctt

SEQ ID NO: 49528 - DNA, 19 bp, Homo sapiens
  siRNA target sequence for A2BP1 (NM_018723.2,2112-2130).
ggtctcgttctttcttcat

SEQ ID NO: 49529 - DNA, 19 bp, Homo sapiens
  siRNA target sequence for A2BP1 (NM_018723.2,2113-2131).
gtctcgttctttcttcatt

SEQ ID NO: 49530 - DNA, 19 bp, Homo sapiens
  siRNA target sequence for A2BP1 (NM_018723.2,2125-2143).
cttcattgcaggctagtat

SEQ ID NO: 49531 - DNA, 19 bp, Homo sapiens
  siRNA target sequence for A2BP1 (NM_018723.2,2128-2146).
cattgcaggctagtatata

SEQ ID NO: 49532 - DNA, 19 bp, Homo sapiens
  siRNA target sequence for A2BP1 (NM_018723.2,2153-2171).
gggatacaaccgttttgct

SEQ ID NO: 49533 - DNA, 19 bp, Homo sapiens
  siRNA target sequence for A2BP1 (NM_145891.1,285-303).
cttatggcgtgcctatgat

SEQ ID NO: 49534 - DNA, 19 bp, Homo sapiens
  siRNA target sequence for A2BP1 (NM_145891.1,330-348).
gactgattcagggtaatca

SEQ ID NO: 49535 - DNA, 19 bp, Homo sapiens
  siRNA target sequence for A2BP1 (NM_145891.1,1194-1212).
cctacggcggagtagtgta

SEQ ID NO: 49536 - DNA, 19 bp, Homo sapiens
  siRNA target sequence for A2BP1 (NM_145891.1,1195-1213).
ctacggcggagtagtgtat

SEQ ID NO: 49537 - DNA, 19 bp, Homo sapiens
  siRNA target sequence for A2BP1 (NM_145891.1,1198-1216).
cggcggagtagtgtatcaa

SEQ ID NO: 49538 - DNA, 19 bp, Homo sapiens
  siRNA target sequence for A2BP1 (NM_145891.1,1200-1218).
gcggagtagtgtatcaaga

SEQ ID NO: 49539 - DNA, 19 bp, Homo sapiens
  siRNA target sequence for A2BP1 (NM_145891.1,1219-1237).
gcctgtgtatggcaataaa

SEQ ID NO: 49540 - DNA, 19 bp, Homo sapiens
  siRNA target sequence for A2BP1 (NM_145891.1,1220-1238).
cctgtgtatggcaataaat

SEQ ID NO: 49541 - DNA, 19 bp, Homo sapiens
  siRNA target sequence for A2BP1 (NM_145893.1,1331-1349).
gcagcagatgaaatttctt

SEQ ID NO: 49542 - DNA, 19 bp, Homo sapiens
  siRNA target sequence for A2BP1 (NM_145893.1,1334-1352).
gcagatgaaatttcttgta

SEQ ID NO: 49543 - DNA, 19 bp, Homo sapiens
  siRNA target sequence for ACF (NM_014576.2,257-275).
ggtccagcgcacaggatat

SEQ ID NO: 49544 - DNA, 19 bp, Homo sapiens
  siRNA target sequence for ACF (NM_014576.2,258-276).
gtccagcgcacaggatata

SEQ ID NO: 49545 - DNA, 19 bp, Homo sapiens
  siRNA target sequence for ACF (NM_014576.2,261-279).
cagcgcacaggatatagct

SEQ ID NO: 49546 - DNA, 19 bp, Homo sapiens
  siRNA target sequence for ACF (NM_014576.2,395-413).
ggatgagcttataccatta

SEQ ID NO: 49547 - DNA, 19 bp, Homo sapiens
  siRNA target sequence for ACF (NM_014576.2,396-414).
gatgagcttataccattat

SEQ ID NO: 49548 - DNA, 19 bp, Homo sapiens
  siRNA target sequence for ACF (NM_014576.2,401-419).
gcttataccattatgtgaa

SEQ ID NO: 49549 - DNA, 19 bp, Homo sapiens
  siRNA target sequence for ACF (NM_014576.2,415-433).
gtgaaaaaatcggtaaaat

SEQ ID NO: 49550 - DNA, 19 bp, Homo sapiens
  siRNA target sequence for ACF (NM_014576.2,585-603).
gtggacaactgccgattat

SEQ ID NO: 49551 - DNA, 19 bp, Homo sapiens
  siRNA target sequence for ACF (NM_014576.2,587-605).
ggacaactgccgattattt

SEQ ID NO: 49552 - DNA, 19 bp, Homo sapiens
  siRNA target sequence for ACF (NM_014576.2,590-608).
caactgccgattatttgtt

SEQ ID NO: 49553 - DNA, 19 bp, Homo sapiens
  siRNA target sequence for ACF (NM_014576.2,653-671).
gatgaaaaaggttactgaa

SEQ ID NO: 49554 - DNA, 19 bp, Homo sapiens
  siRNA target sequence for ACF (NM_014576.2,695-713).
cccaagcgctgcagataaa

SEQ ID NO: 49555 - DNA, 19 bp, Homo sapiens
  siRNA target sequence for ACF (NM_014576.2,700-718).
gcgctgcagataaaaccaa

SEQ ID NO: 49556 - DNA, 19 bp, Homo sapiens
  siRNA target sequence for ACF (NM_014576.2,701-719).
cgctgcagataaaaccaaa

SEQ ID NO: 49557 - DNA, 19 bp, Homo sapiens
  siRNA target sequence for ACF (NM_014576.2,702-720).
gctgcagataaaaccaaaa

SEQ ID NO: 49558 - DNA, 19 bp, Homo sapiens
  siRNA target sequence for ACF (NM_014576.2,830-848).
ctgggcagagccagaagta

SEQ ID NO: 49559 - DNA, 19 bp, Homo sapiens
  siRNA target sequence for ACF (NM_014576.2,869-887).
gtcttcagtgaaaatccta

SEQ ID NO: 49560 - DNA, 19 bp, Homo sapiens
  siRNA target sequence for ACF (NM_014576.2,874-892).
cagtgaaaatcctatatgt

SEQ ID NO: 49561 - DNA, 19 bp, Homo sapiens
  siRNA target sequence for ACF (NM_014576.2,993-1011).
gcttttgtgcacttcagta

SEQ ID NO: 49562 - DNA, 19 bp, Homo sapiens
  siRNA target sequence for ACF (NM_014576.2,1026-1044).
gttgaggctatgaaagctt

SEQ ID NO: 49563 - DNA, 19 bp, Homo sapiens
  siRNA target sequence for ACF (NM_014576.2,1107-1125).
gacagttatgttaggtata

SEQ ID NO: 49564 - DNA, 19 bp, Homo sapiens
  siRNA target sequence for ACF (NM_014576.2,1151-1169).
catgctgcaaggagagtat

SEQ ID NO: 49565 - DNA, 19 bp, Homo sapiens
  siRNA target sequence for ACF (NM_014576.2,1161-1179).
ggagagtatacctactctt

SEQ ID NO: 49566 - DNA, 19 bp, Homo sapiens
  siRNA target sequence for ACF (NM_014576.2,1175-1193).
ctctttgggccaagtttat

SEQ ID NO: 49567 - DNA, 19 bp, Homo sapiens
  siRNA target sequence for ACF (NM_014576.2,1177-1195).
ctttgggccaagtttatga

SEQ ID NO: 49568 - DNA, 19 bp, Homo sapiens
  siRNA target sequence for ACF (NM_014576.2,1238-1256).
ccagacctatgcagcaatt

SEQ ID NO: 49569 - DNA, 19 bp, Homo sapiens
  siRNA target sequence for ACF (NM_014576.2,1424-1442).
caaactctatgacatttta

SEQ ID NO: 49570 - DNA, 19 bp, Homo sapiens
  siRNA target sequence for ACF (NM_014576.2,1477-1495).
cattaaaaccccaaggaat

SEQ ID NO: 49571 - DNA, 19 bp, Homo sapiens
  siRNA target sequence for ACF (NM_014576.2,1502-1520).
cgctccccagatattagaa

SEQ ID NO: 49572 - DNA, 19 bp, Homo sapiens
  siRNA target sequence for ACF (NM_014576.2,1584-1602).
gaccaaagacagctattct

SEQ ID NO: 49573 - DNA, 19 bp, Homo sapiens
  siRNA target sequence for ACF (NM_014576.2,1604-1622).
gtacaaaataactattcct

SEQ ID NO: 49574 - DNA, 19 bp, Homo sapiens
  siRNA target sequence for ACF (NM_014576.2,1869-1887).
gacttagcagcatatacaa

SEQ ID NO: 49575 - DNA, 19 bp, Homo sapiens
  siRNA target sequence for ACF (NM_014576.2,1895-1913).
ggtctacccaacttttgca

SEQ ID NO: 49576 - DNA, 19 bp, Homo sapiens
  siRNA target sequence for ACO1 (NM_002197.1,128-146).
ccttgctgagccattggat

SEQ ID NO: 49577 - DNA, 19 bp, Homo sapiens
  siRNA target sequence for ACO1 (NM_002197.1,199-217).
gatatgggcgcttaccatt

SEQ ID NO: 49578 - DNA, 19 bp, Homo sapiens
  siRNA target sequence for ACO1 (NM_002197.1,204-222).
gggcgcttaccattttcga

SEQ ID NO: 49579 - DNA, 19 bp, Homo sapiens
  siRNA target sequence for ACO1 (NM_002197.1,205-223).
ggcgcttaccattttcgat

SEQ ID NO: 49580 - DNA, 19 bp, Homo sapiens
  siRNA target sequence for ACO1 (NM_002197.1,249-267).
cggaattgtgatgagtttt

SEQ ID NO: 49581 - DNA, 19 bp, Homo sapiens
  siRNA target sequence for ACO1 (NM_002197.1,250-268).
ggaattgtgatgagttttt

SEQ ID NO: 49582 - DNA, 19 bp, Homo sapiens
  siRNA target sequence for ACO1 (NM_002197.1,380-398).
gcccgctgtggttgacttt

SEQ ID NO: 49583 - DNA, 19 bp, Homo sapiens
  siRNA target sequence for ACO1 (NM_002197.1,408-426).
cgtgatgctgtgaaaaagt

SEQ ID NO: 49584 - DNA, 19 bp, Homo sapiens
  siRNA target sequence for ACO1 (NM_002197.1,461-479).
ccctgctgatcttgtaata

SEQ ID NO: 49585 - DNA, 19 bp, Homo sapiens
  siRNA target sequence for ACO1 (NM_002197.1,463-481).
ctgctgatcttgtaataga

SEQ ID NO: 49586 - DNA, 19 bp, Homo sapiens
  siRNA target sequence for ACO1 (NM_002197.1,466-484).
ctgatcttgtaatagatca

SEQ ID NO: 49587 - DNA, 19 bp, Homo sapiens
  siRNA target sequence for ACO1 (NM_002197.1,468-486).
gatcttgtaatagatcatt

SEQ ID NO: 49588 - DNA, 19 bp, Homo sapiens
  siRNA target sequence for ACO1 (NM_002197.1,483-501).
cattccatccaggttgatt

SEQ ID NO: 49589 - DNA, 19 bp, Homo sapiens
  siRNA target sequence for ACO1 (NM_002197.1,508-526).
gaagggcagacagtttaca

SEQ ID NO: 49590 - DNA, 19 bp, Homo sapiens
  siRNA target sequence for ACO1 (NM_002197.1,619-637).
cccctggctcaggaatcat

SEQ ID NO: 49591 - DNA, 19 bp, Homo sapiens
  siRNA target sequence for ACO1 (NM_002197.1,664-682).
caagagtggtatttgatca

SEQ ID NO: 49592 - DNA, 19 bp, Homo sapiens
  siRNA target sequence for ACO1 (NM_002197.1,724-742).
cgcacactaccatgattga

SEQ ID NO: 49593 - DNA, 19 bp, Homo sapiens
  siRNA target sequence for ACO1 (NM_002197.1,725-743).
gcacactaccatgattgat

SEQ ID NO: 49594 - DNA, 19 bp, Homo sapiens
  siRNA target sequence for ACO1 (NM_002197.1,763-781).
ggggtgtcggtggtattga

SEQ ID NO: 49595 - DNA, 19 bp, Homo sapiens
  siRNA target sequence for ACO1 (NM_002197.1,764-782).
gggtgtcggtggtattgaa

SEQ ID NO: 49596 - DNA, 19 bp, Homo sapiens
  siRNA target sequence for ACO1 (NM_002197.1,797-815).
gctgggtcagccaatcagt

SEQ ID NO: 49597 - DNA, 19 bp, Homo sapiens
  siRNA target sequence for ACO1 (NM_002197.1,798-816).
ctgggtcagccaatcagta

SEQ ID NO: 49598 - DNA, 19 bp, Homo sapiens
  siRNA target sequence for ACO1 (NM_002197.1,922-940).
gggtagtgggcaaatttgt

SEQ ID NO: 49599 - DNA, 19 bp, Homo sapiens
  siRNA target sequence for ACO1 (NM_002197.1,981-999).
gaccgagctacgattgcta

SEQ ID NO: 49600 - DNA, 19 bp, Homo sapiens
  siRNA target sequence for ACO1 (NM_002197.1,987-1005).
gctacgattgctaacatgt

SEQ ID NO: 49601 - DNA, 19 bp, Homo sapiens
  siRNA target sequence for ACO1 (NM_002197.1,1041-1059).
gttgatgaagttagtatca

SEQ ID NO: 49602 - DNA, 19 bp, Homo sapiens
  siRNA target sequence for ACO1 (NM_002197.1,1070-1088).
gcaaacaggtcgtgatgaa

SEQ ID NO: 49603 - DNA, 19 bp, Homo sapiens
  siRNA target sequence for ACO1 (NM_002197.1,1078-1096).
gtcgtgatgaagaaaaatt

SEQ ID NO: 49604 - DNA, 19 bp, Homo sapiens
  siRNA target sequence for ACO1 (NM_002197.1,1129-1147).
gaatgtttcgagatttcaa

SEQ ID NO: 49605 - DNA, 19 bp, Homo sapiens
  siRNA target sequence for ACO1 (NM_002197.1,1172-1190).
cacccaggttgtggaatta

SEQ ID NO: 49606 - DNA, 19 bp, Homo sapiens
  siRNA target sequence for ACO1 (NM_002197.1,1174-1192).
cccaggttgtggaattaga

SEQ ID NO: 49607 - DNA, 19 bp, Homo sapiens
  siRNA target sequence for ACO1 (NM_002197.1,1248-1266).
gctgtgtccgacatgaaaa

SEQ ID NO: 49608 - DNA, 19 bp, Homo sapiens
  siRNA target sequence for ACO1 (NM_002197.1,1249-1267).
ctgtgtccgacatgaaaaa

SEQ ID NO: 49609 - DNA, 19 bp, Homo sapiens
  siRNA target sequence for ACO1 (NM_002197.1,1288-1306).
gagccaagcaaggatttaa

SEQ ID NO: 49610 - DNA, 19 bp, Homo sapiens
  siRNA target sequence for ACO1 (NM_002197.1,1317-1335).
gttgctcctgaacatcata

SEQ ID NO: 49611 - DNA, 19 bp, Homo sapiens
  siRNA target sequence for ACO1 (NM_002197.1,1445-1463).
gttaggggcaggattgtta

SEQ ID NO: 49612 - DNA, 19 bp, Homo sapiens
  siRNA target sequence for ACO1 (NM_002197.1,1541-1559).
cacctactacctacaagaa

SEQ ID NO: 49613 - DNA, 19 bp, Homo sapiens
  siRNA target sequence for ACO1 (NM_002197.1,1563-1581).
ggagtcatgccttatctgt

SEQ ID NO: 49614 - DNA, 19 bp, Homo sapiens
  siRNA target sequence for ACO1 (NM_002197.1,1686-1704).
gtagctgttggagtactat

SEQ ID NO: 49615 - DNA, 19 bp, Homo sapiens
  siRNA target sequence for ACO1 (NM_002197.1,1761-1779).
gcctctccccccttagtaa

SEQ ID NO: 49616 - DNA, 19 bp, Homo sapiens
  siRNA target sequence for ACO1 (NM_002197.1,1762-1780).
cctctccccccttagtaat

SEQ ID NO: 49617 - DNA, 19 bp, Homo sapiens
  siRNA target sequence for ACO1 (NM_002197.1,1763-1781).
ctctccccccttagtaata

SEQ ID NO: 49618 - DNA, 19 bp, Homo sapiens
  siRNA target sequence for ACO1 (NM_002197.1,1768-1786).
cccccttagtaatagcata

SEQ ID NO: 49619 - DNA, 19 bp, Homo sapiens
  siRNA target sequence for ACO1 (NM_002197.1,1769-1787).
ccccttagtaatagcatat

SEQ ID NO: 49620 - DNA, 19 bp, Homo sapiens
  siRNA target sequence for ACO1 (NM_002197.1,1772-1790).
cttagtaatagcatatgca

SEQ ID NO: 49621 - DNA, 19 bp, Homo sapiens
  siRNA target sequence for ACO1 (NM_002197.1,1801-1819).
ccatcagaatcgactttga

SEQ ID NO: 49622 - DNA, 19 bp, Homo sapiens
  siRNA target sequence for ACO1 (NM_002197.1,1805-1823).
cagaatcgactttgagaaa

SEQ ID NO: 49623 - DNA, 19 bp, Homo sapiens
  siRNA target sequence for ACO1 (NM_002197.1,1848-1866).
ggacagcaggtatttctga

SEQ ID NO: 49624 - DNA, 19 bp, Homo sapiens
  siRNA target sequence for ACO1 (NM_002197.1,1902-1920).
gtggagcgtcagtatgtca

SEQ ID NO: 49625 - DNA, 19 bp, Homo sapiens
  siRNA target sequence for ACO1 (NM_002197.1,1927-1945).
ggatgtttaaggaagtcta

SEQ ID NO: 49626 - DNA, 19 bp, Homo sapiens
  siRNA target sequence for ACO1 (NM_002197.1,1982-2000).
cttagcaaccccatcagat

SEQ ID NO: 49627 - DNA, 19 bp, Homo sapiens
  siRNA target sequence for ACO1 (NM_002197.1,2020-2038).
ccaaatctacgtatatcaa

SEQ ID NO: 49628 - DNA, 19 bp, Homo sapiens
  siRNA target sequence for ACO1 (NM_002197.1,2021-2039).
caaatctacgtatatcaaa

SEQ ID NO: 49629 - DNA, 19 bp, Homo sapiens
  siRNA target sequence for ACO1 (NM_002197.1,2070-2088).
gatcttcagccccctaaat

SEQ ID NO: 49630 - DNA, 19 bp, Homo sapiens
  siRNA target sequence for ACO1 (NM_002197.1,2100-2118).
gcctatgtgctgctaaatt

SEQ ID NO: 49631 - DNA, 19 bp, Homo sapiens
  siRNA target sequence for ACO1 (NM_002197.1,2101-2119).
cctatgtgctgctaaattt

SEQ ID NO: 49632 - DNA, 19 bp, Homo sapiens
  siRNA target sequence for ACO1 (NM_002197.1,2120-2138).
gggagattcggtaacaact

SEQ ID NO: 49633 - DNA, 19 bp, Homo sapiens
  siRNA target sequence for ACO1 (NM_002197.1,2181-2199).
gctgctcgctacttaacta

SEQ ID NO: 49634 - DNA, 19 bp, Homo sapiens
  siRNA target sequence for ACO1 (NM_002197.1,2184-2202).
gctcgctacttaactaaca

SEQ ID NO: 49635 - DNA, 19 bp, Homo sapiens
  siRNA target sequence for ACO1 (NM_002197.1,2206-2224).
gcctaactccacgagaatt

SEQ ID NO: 49636 - DNA, 19 bp, Homo sapiens
  siRNA target sequence for ACO1 (NM_002197.1,2208-2226).
ctaactccacgagaattca

SEQ ID NO: 49637 - DNA, 19 bp, Homo sapiens
  siRNA target sequence for ACO1 (NM_002197.1,2261-2279).
catggcacggggaacattt

SEQ ID NO: 49638 - DNA, 19 bp, Homo sapiens
  siRNA target sequence for ACO1 (NM_002197.1,2270-2288).
gggaacatttgccaacatt

SEQ ID NO: 49639 - DNA, 19 bp, Homo sapiens
  siRNA target sequence for ACO1 (NM_002197.1,2280-2298).
gccaacattcgcttgttaa

SEQ ID NO: 49640 - DNA, 19 bp, Homo sapiens
  siRNA target sequence for ACO1 (NM_002197.1,2281-2299).
ccaacattcgcttgttaaa

SEQ ID NO: 49641 - DNA, 19 bp, Homo sapiens
  siRNA target sequence for ACO1 (NM_002197.1,2289-2307).
cgcttgttaaacagatttt

SEQ ID NO: 49642 - DNA, 19 bp, Homo sapiens
  siRNA target sequence for ACO1 (NM_002197.1,2344-2362).
ctggggaaatccttgatgt

SEQ ID NO: 49643 - DNA, 19 bp, Homo sapiens
  siRNA target sequence for ACO1 (NM_002197.1,2540-2558).
gggtgtgatcccacttgaa

SEQ ID NO: 49644 - DNA, 19 bp, Homo sapiens
  siRNA target sequence for ACO1 (NM_002197.1,2541-2559).
ggtgtgatcccacttgaat

SEQ ID NO: 49645 - DNA, 19 bp, Homo sapiens
  siRNA target sequence for ACO1 (NM_002197.1,2542-2560).
gtgtgatcccacttgaata

SEQ ID NO: 49646 - DNA, 19 bp, Homo sapiens
  siRNA target sequence for ACO1 (NM_002197.1,2598-2616).
gggcaagaacgatacacta

SEQ ID NO: 49647 - DNA, 19 bp, Homo sapiens
  siRNA target sequence for ACO1 (NM_002197.1,2599-2617).
ggcaagaacgatacactat

SEQ ID NO: 49648 - DNA, 19 bp, Homo sapiens
  siRNA target sequence for ACO1 (NM_002197.1,2601-2619).
caagaacgatacactatca

SEQ ID NO: 49649 - DNA, 19 bp, Homo sapiens
  siRNA target sequence for ACO1 (NM_002197.1,2604-2622).
gaacgatacactatcatta

SEQ ID NO: 49650 - DNA, 19 bp, Homo sapiens
  siRNA target sequence for ACO1 (NM_002197.1,2707-2725).
ctgatgtggagctcactta

SEQ ID NO: 49651 - DNA, 19 bp, Homo sapiens
  siRNA target sequence for ACO1 (NM_002197.1,2709-2727).
gatgtggagctcacttatt

SEQ ID NO: 49652 - DNA, 19 bp, Homo sapiens
  siRNA target sequence for AD023 (NM_020679.2,140-158).
ccagtagagaggagtataa

SEQ ID NO: 49653 - DNA, 19 bp, Homo sapiens
  siRNA target sequence for AD023 (NM_020679.2,141-159).
cagtagagaggagtataaa

SEQ ID NO: 49654 - DNA, 19 bp, Homo sapiens
  siRNA target sequence for AD023 (NM_020679.2,192-210).
gctgaagacagcactcaaa

SEQ ID NO: 49655 - DNA, 19 bp, Homo sapiens
  siRNA target sequence for AD023 (NM_020679.2,247-265).
gtttgccagaggagctata

SEQ ID NO: 49656 - DNA, 19 bp, Homo sapiens
  siRNA target sequence for AD023 (NM_020679.2,252-270).
ccagaggagctatagtaat

SEQ ID NO: 49657 - DNA, 19 bp, Homo sapiens
  siRNA target sequence for AD023 (NM_020679.2,535-553).
gtctgctatgtcaccttta

SEQ ID NO: 49658 - DNA, 19 bp, Homo sapiens
  siRNA target sequence for AD023 (NM_020679.2,548-566).
cctttatctgcaacatctt

SEQ ID NO: 49659 - DNA, 19 bp, Homo sapiens
  siRNA target sequence for AD023 (NM_020679.2,549-567).
ctttatctgcaacatcttt

SEQ ID NO: 49660 - DNA, 19 bp, Homo sapiens
  siRNA target sequence for AD023 (NM_020679.2,814-832).
ctgctggagatcattgagt

SEQ ID NO: 49661 - DNA, 19 bp, Homo sapiens
  siRNA target sequence for AD023 (NM_020679.2,858-876).
gccagctgcccacaagtat

SEQ ID NO: 49662 - DNA, 19 bp, Homo sapiens
  siRNA target sequence for AD023 (NM_020679.2,859-877).
ccagctgcccacaagtatt

SEQ ID NO: 49663 - DNA, 19 bp, Homo sapiens
  siRNA target sequence for AD023 (NM_020679.2,860-878).
cagctgcccacaagtatta

SEQ ID NO: 49664 - DNA, 19 bp, Homo sapiens
  siRNA target sequence for AD023 (NM_020679.2,863-881).
ctgcccacaagtattacta

SEQ ID NO: 49665 - DNA, 19 bp, Homo sapiens
  siRNA target sequence for ADAT1 (NM_012091.2,105-123).
gtggaccgcggatgagatt

SEQ ID NO: 49666 - DNA, 19 bp, Homo sapiens
  siRNA target sequence for ADAT1 (NM_012091.2,129-147).
gctatgctatgaacactat

SEQ ID NO: 49667 - DNA, 19 bp, Homo sapiens
  siRNA target sequence for ADAT1 (NM_012091.2,171-189).
gaagcctgagccaaaccat

SEQ ID NO: 49668 - DNA, 19 bp, Homo sapiens
  siRNA target sequence for ADAT1 (NM_012091.2,208-226).
gcggtggtgaagatacaat

SEQ ID NO: 49669 - DNA, 19 bp, Homo sapiens
  siRNA target sequence for ADAT1 (NM_012091.2,311-329).
gcataggacagtccaaaat

SEQ ID NO: 49670 - DNA, 19 bp, Homo sapiens
  siRNA target sequence for ADAT1 (NM_012091.2,339-357).
cggagacatcctcaatgat

SEQ ID NO: 49671 - DNA, 19 bp, Homo sapiens
  siRNA target sequence for ADAT1 (NM_012091.2,481-499).
cttagacgagacctcattt

SEQ ID NO: 49672 - DNA, 19 bp, Homo sapiens
  siRNA target sequence for ADAT1 (NM_012091.2,485-503).
gacgagacctcatttttgt

SEQ ID NO: 49673 - DNA, 19 bp, Homo sapiens
  siRNA target sequence for ADAT1 (NM_012091.2,548-566).
cgatgcttgagtttgaaga

SEQ ID NO: 49674 - DNA, 19 bp, Homo sapiens
  siRNA target sequence for ADAT1 (NM_012091.2,737-755).
cagctcaccatcagagttt

SEQ ID NO: 49675 - DNA, 19 bp, Homo sapiens
  siRNA target sequence for ADAT1 (NM_012091.2,822-840).
ggctactgtcaccagaata

SEQ ID NO: 49676 - DNA, 19 bp, Homo sapiens
  siRNA target sequence for ADAT1 (NM_012091.2,1034-1052).
gccaaggggcactgttgat

SEQ ID NO: 49677 - DNA, 19 bp, Homo sapiens
  siRNA target sequence for ADAT1 (NM_012091.2,1137-1155).
gattggaaggtgtcagaat

SEQ ID NO: 49678 - DNA, 19 bp, Homo sapiens
  siRNA target sequence for ADAT1 (NM_012091.2,1141-1159).
ggaaggtgtcagaatgtgt

SEQ ID NO: 49679 - DNA, 19 bp, Homo sapiens
  siRNA target sequence for ADAT1 (NM_012091.2,1174-1192).
ggcttcggagttcaagaat

SEQ ID NO: 49680 - DNA, 19 bp, Homo sapiens
  siRNA target sequence for ADAT1 (NM_012091.2,1175-1193).
gcttcggagttcaagaatt

SEQ ID NO: 49681 - DNA, 19 bp, Homo sapiens
  siRNA target sequence for ADAT1 (NM_012091.2,1176-1194).
cttcggagttcaagaatta

SEQ ID NO: 49682 - DNA, 19 bp, Homo sapiens
  siRNA target sequence for ADAT1 (NM_012091.2,1179-1197).
cggagttcaagaattaaaa

SEQ ID NO: 49683 - DNA, 19 bp, Homo sapiens
  siRNA target sequence for ADAT1 (NM_012091.2,1408-1426).
gtggaactcttcagatcat

SEQ ID NO: 49684 - DNA, 19 bp, Homo sapiens
  siRNA target sequence for ADAT1 (NM_012091.2,1435-1453).
ctgctaagcagaattgcaa

SEQ ID NO: 49685 - DNA, 19 bp, Homo sapiens
  siRNA target sequence for ADAT1 (NM_012091.2,1552-1570).
cggaagcaggtgtttggat

SEQ ID NO: 49686 - DNA, 19 bp, Homo sapiens
  siRNA target sequence for ADAT1 (NM_012091.2,1578-1596).
cagaaacccaccggattat

SEQ ID NO: 49687 - DNA, 19 bp, Homo sapiens
  siRNA target sequence for ADAT1 (NM_012091.2,1580-1598).
gaaacccaccggattatca

SEQ ID NO: 49688 - DNA, 19 bp, Homo sapiens
  siRNA target sequence for ADAT1 (NM_012091.2,1589-1607).
cggattatcaccagttcaa

SEQ ID NO: 49689 - DNA, 19 bp, Homo sapiens
  siRNA target sequence for AKAP1 (NM_003488.2,232-250).
gtggtttttctctcgtaaa

SEQ ID NO: 49690 - DNA, 19 bp, Homo sapiens
  siRNA target sequence for AKAP1 (NM_003488.2,234-252).
ggtttttctctcgtaaaaa

SEQ ID NO: 49691 - DNA, 19 bp, Homo sapiens
  siRNA target sequence for AKAP1 (NM_003488.2,483-501).
cctcgggcattcttcctaa

SEQ ID NO: 49692 - DNA, 19 bp, Homo sapiens
  siRNA target sequence for AKAP1 (NM_003488.2,533-551).
cgcagagatgacagtacaa

SEQ ID NO: 49693 - DNA, 19 bp, Homo sapiens
  siRNA target sequence for AKAP1 (NM_003488.2,572-590).
ggtggtgaagccaaatcga

SEQ ID NO: 49694 - DNA, 19 bp, Homo sapiens
  siRNA target sequence for AKAP1 (NM_003488.2,573-591).
gtggtgaagccaaatcgat

SEQ ID NO: 49695 - DNA, 19 bp, Homo sapiens
  siRNA target sequence for AKAP1 (NM_003488.2,596-614).
ctagagtgccccctttcat

SEQ ID NO: 49696 - DNA, 19 bp, Homo sapiens
  siRNA target sequence for AKAP1 (NM_003488.2,615-633).
ccccaaagggtgtactatt

SEQ ID NO: 49697 - DNA, 19 bp, Homo sapiens
  siRNA target sequence for AKAP1 (NM_003488.2,626-644).
gtactattctccagcaaat

SEQ ID NO: 49698 - DNA, 19 bp, Homo sapiens
  siRNA target sequence for AKAP1 (NM_003488.2,650-668).
gaggtgtgtaagcaagatt

SEQ ID NO: 49699 - DNA, 19 bp, Homo sapiens
  siRNA target sequence for AKAP1 (NM_003488.2,827-845).
cgggagcatgtcttggaat

SEQ ID NO: 49700 - DNA, 19 bp, Homo sapiens
  siRNA target sequence for AKAP1 (NM_003488.2,864-882).
ccagcctggcctctttaga

SEQ ID NO: 49701 - DNA, 19 bp, Homo sapiens
  siRNA target sequence for AKAP1 (NM_003488.2,1333-1351).
cccagttcaccagaaaact

SEQ ID NO: 49702 - DNA, 19 bp, Homo sapiens
  siRNA target sequence for AKAP1 (NM_003488.2,1676-1694).
ggacactgctcagattctt

SEQ ID NO: 49703 - DNA, 19 bp, Homo sapiens
  siRNA target sequence for AKAP1 (NM_003488.2,1679-1697).
cactgctcagattctttca

SEQ ID NO: 49704 - DNA, 19 bp, Homo sapiens
  siRNA target sequence for AKAP1 (NM_003488.2,1698-1716).
gcacttcagggcttgaaga

SEQ ID NO: 49705 - DNA, 19 bp, Homo sapiens
  siRNA target sequence for AKAP1 (NM_003488.2,1911-1929).
gctgttgcagtctcaagaa

SEQ ID NO: 49706 - DNA, 19 bp, Homo sapiens
  siRNA target sequence for AKAP1 (NM_003488.2,2014-2032).
cttagtcggtcggctaatt

SEQ ID NO: 49707 - DNA, 19 bp, Homo sapiens
  siRNA target sequence for AKAP1 (NM_003488.2,2045-2063).
cgctatgtgagttttctga

SEQ ID NO: 49708 - DNA, 19 bp, Homo sapiens
  siRNA target sequence for AKAP1 (NM_003488.2,2070-2088).
catctggtgccaagatcta

SEQ ID NO: 49709 - DNA, 19 bp, Homo sapiens
  siRNA target sequence for AKAP1 (NM_003488.2,2139-2157).
gctctcaacatcatgtaga

SEQ ID NO: 49710 - DNA, 19 bp, Homo sapiens
  siRNA target sequence for AKAP1 (NM_003488.2,2428-2446).
gcccaccccagtggaaata

SEQ ID NO: 49711 - DNA, 19 bp, Homo sapiens
  siRNA target sequence for AKAP1 (NM_003488.2,2543-2561).
gtggactacggcggatata

SEQ ID NO: 49712 - DNA, 19 bp, Homo sapiens
  siRNA target sequence for AKAP1 (NM_003488.2,2546-2564).
gactacggcggatataaga

SEQ ID NO: 49713 - DNA, 19 bp, Homo sapiens
  siRNA target sequence for AKAP1 (NM_003488.2,2576-2594).
gacgtgctccggcaaatca

SEQ ID NO: 49714 - DNA, 19 bp, Homo sapiens
  siRNA target sequence for AKAP1 (NM_003488.2,2729-2747).
cttgctcaggtgacaagtt

SEQ ID NO: 49715 - DNA, 19 bp, Homo sapiens
  siRNA target sequence for AKAP1 (NM_003488.2,2732-2750).
gctcaggtgacaagttaca

SEQ ID NO: 49716 - DNA, 19 bp, Homo sapiens
  siRNA target sequence for AKAP1 (NM_003488.2,2849-2867).
gtagacagctactacacaa

SEQ ID NO: 49717 - DNA, 19 bp, Homo sapiens
  siRNA target sequence for AKAP1 (NM_139275.1,1819-1837).
ggtgtcctgggtttttcga

SEQ ID NO: 49718 - DNA, 19 bp, Homo sapiens
  siRNA target sequence for ALK (NM_004304.3,1574-1592).
ggtcatagctccttggaat

SEQ ID NO: 49719 - DNA, 19 bp, Homo sapiens
  siRNA target sequence for ALK (NM_004304.3,1718-1736).
ccctgtgagctggagtatt

SEQ ID NO: 49720 - DNA, 19 bp, Homo sapiens
  siRNA target sequence for ALK (NM_004304.3,1975-1993).
gccctctggaaggtacatt

SEQ ID NO: 49721 - DNA, 19 bp, Homo sapiens
  siRNA target sequence for ALK (NM_004304.3,2111-2129).
gtggccctggaatacatct

SEQ ID NO: 49722 - DNA, 19 bp, Homo sapiens
  siRNA target sequence for ALK (NM_004304.3,2219-2237).
cagagctccttcacttgtt

SEQ ID NO: 49723 - DNA, 19 bp, Homo sapiens
  siRNA target sequence for ALK (NM_004304.3,2768-2786).
gccatcgtggcttttgaca

SEQ ID NO: 49724 - DNA, 19 bp, Homo sapiens
  siRNA target sequence for ALK (NM_004304.3,2769-2787).
ccatcgtggcttttgacaa

SEQ ID NO: 49725 - DNA, 19 bp, Homo sapiens
  siRNA target sequence for ALK (NM_004304.3,2770-2788).
catcgtggcttttgacaat

SEQ ID NO: 49726 - DNA, 19 bp, Homo sapiens
  siRNA target sequence for ALK (NM_004304.3,2845-2863).
gaatacagcacccaaatca

SEQ ID NO: 49727 - DNA, 19 bp, Homo sapiens
  siRNA target sequence for ALK (NM_004304.3,3248-3266).
gacgcctgccccagtacaa

SEQ ID NO: 49728 - DNA, 19 bp, Homo sapiens
  siRNA target sequence for ALK (NM_004304.3,3257-3275).
cccagtacaaaccagttaa

SEQ ID NO: 49729 - DNA, 19 bp, Homo sapiens
  siRNA target sequence for ALK (NM_004304.3,3261-3279).
gtacaaaccagttaatcca

SEQ ID NO: 49730 - DNA, 19 bp, Homo sapiens
  siRNA target sequence for ALK (NM_004304.3,3269-3287).
cagttaatccagaaagtct

SEQ ID NO: 49731 - DNA, 19 bp, Homo sapiens
  siRNA target sequence for ALK (NM_004304.3,3294-3312).
gagagaacaatgtgataga

SEQ ID NO: 49732 - DNA, 19 bp, Homo sapiens
  siRNA target sequence for ALK (NM_004304.3,3371-3389).
ggtggagccacctacgtat

SEQ ID NO: 49733 - DNA, 19 bp, Homo sapiens
  siRNA target sequence for ALK (NM_004304.3,3372-3390).
gtggagccacctacgtatt

SEQ ID NO: 49734 - DNA, 19 bp, Homo sapiens
  siRNA target sequence for ALK (NM_004304.3,3374-3392).
ggagccacctacgtattta

SEQ ID NO: 49735 - DNA, 19 bp, Homo sapiens
  siRNA target sequence for ALK (NM_004304.3,3375-3393).
gagccacctacgtatttaa

SEQ ID NO: 49736 - DNA, 19 bp, Homo sapiens
  siRNA target sequence for ALK (NM_004304.3,3482-3500).
gagagactggagaataact

SEQ ID NO: 49737 - DNA, 19 bp, Homo sapiens
  siRNA target sequence for ALK (NM_004304.3,3702-3720).
gaggaggcggaggatatat

SEQ ID NO: 49738 - DNA, 19 bp, Homo sapiens
  siRNA target sequence for ALK (NM_004304.3,3726-3744).
gcaatgcagcctcaaacaa

SEQ ID NO: 49739 - DNA, 19 bp, Homo sapiens
  siRNA target sequence for ALK (NM_004304.3,3727-3745).
caatgcagcctcaaacaat

SEQ ID NO: 49740 - DNA, 19 bp, Homo sapiens
  siRNA target sequence for ALK (NM_004304.3,3742-3760).
caatgaccccgaaatggat

SEQ ID NO: 49741 - DNA, 19 bp, Homo sapiens
  siRNA target sequence for ALK (NM_004304.3,3807-3825).
ccccagctttaaaagtgat

SEQ ID NO: 49742 - DNA, 19 bp, Homo sapiens
  siRNA target sequence for ALK (NM_004304.3,3830-3848).
ggccacggggaagtgaata

SEQ ID NO: 49743 - DNA, 19 bp, Homo sapiens
  siRNA target sequence for ALK (NM_004304.3,3831-3849).
gccacggggaagtgaatat

SEQ ID NO: 49744 - DNA, 19 bp, Homo sapiens
  siRNA target sequence for ALK (NM_004304.3,3833-3851).
cacggggaagtgaatatta

SEQ ID NO: 49745 - DNA, 19 bp, Homo sapiens
  siRNA target sequence for ALK (NM_004304.3,3844-3862).
gaatattaagcattatcta

SEQ ID NO: 49746 - DNA, 19 bp, Homo sapiens
  siRNA target sequence for ALK (NM_004304.3,3959-3977).
ggcgtctcctgcattgtgt

SEQ ID NO: 49747 - DNA, 19 bp, Homo sapiens
  siRNA target sequence for ALK (NM_004304.3,4058-4076).
gctttctccggcatcatga

SEQ ID NO: 49748 - DNA, 19 bp, Homo sapiens
  siRNA target sequence for ALK (NM_004304.3,4157-4175).
cgcacctcgaccatcatga

SEQ ID NO: 49749 - DNA, 19 bp, Homo sapiens
  siRNA target sequence for ALK (NM_004304.3,4738-4756).
ctacagggcgagctactat

SEQ ID NO: 49750 - DNA, 19 bp, Homo sapiens
  siRNA target sequence for ALK (NM_004304.3,4743-4761).
gggcgagctactatagaaa

SEQ ID NO: 49751 - DNA, 19 bp, Homo sapiens
  siRNA target sequence for ALK (NM_004304.3,4770-4788).
gtgccatgctgccagttaa

SEQ ID NO: 49752 - DNA, 19 bp, Homo sapiens
  siRNA target sequence for ALK (NM_004304.3,4892-4910).
ccataccccagcaaaagca

SEQ ID NO: 49753 - DNA, 19 bp, Homo sapiens
  siRNA target sequence for ALK (NM_004304.3,4974-4992).
ggcctgtataccggataat

SEQ ID NO: 49754 - DNA, 19 bp, Homo sapiens
  siRNA target sequence for ALK (NM_004304.3,4976-4994).
cctgtataccggataatga

SEQ ID NO: 49755 - DNA, 19 bp, Homo sapiens
  siRNA target sequence for ALK (NM_004304.3,5027-5045).
cccaactttgccatcattt

SEQ ID NO: 49756 - DNA, 19 bp, Homo sapiens
  siRNA target sequence for ALK (NM_004304.3,5028-5046).
ccaactttgccatcatttt

SEQ ID NO: 49757 - DNA, 19 bp, Homo sapiens
  siRNA target sequence for ALK (NM_004304.3,5072-5090).
gacccggatgtaatcaaca

SEQ ID NO: 49758 - DNA, 19 bp, Homo sapiens
  siRNA target sequence for ALK (NM_004304.3,5321-5339).
gaagggggacacgtgaata

SEQ ID NO: 49759 - DNA, 19 bp, Homo sapiens
  siRNA target sequence for ALK (NM_004304.3,5446-5464).
gaaacccaccaaaaagaat

SEQ ID NO: 49760 - DNA, 19 bp, Homo sapiens
  siRNA target sequence for ALK (NM_004304.3,5586-5604).
cttcgctgactgccaatat

SEQ ID NO: 49761 - DNA, 19 bp, Homo sapiens
  siRNA target sequence for ALK (NM_004304.3,5589-5607).
cgctgactgccaatatgaa

SEQ ID NO: 49762 - DNA, 19 bp, Homo sapiens
  siRNA target sequence for ALK (NM_004304.3,5703-5721).
ctggagctggtcattacga

SEQ ID NO: 49763 - DNA, 19 bp, Homo sapiens
  siRNA target sequence for ALK (NM_004304.3,5723-5741).
gataccattctgaaaagca

SEQ ID NO: 49764 - DNA, 19 bp, Homo sapiens
  siRNA target sequence for APOBEC1 (NM_001644.2,96-114).
gggagtttgacgtcttcta

SEQ ID NO: 49765 - DNA, 19 bp, Homo sapiens
  siRNA target sequence for APOBEC1 (NM_001644.2,97-115).
ggagtttgacgtcttctat

SEQ ID NO: 49766 - DNA, 19 bp, Homo sapiens
  siRNA target sequence for APOBEC1 (NM_001644.2,146-164).
ctgctctacgaaatcaagt

SEQ ID NO: 49767 - DNA, 19 bp, Homo sapiens
  siRNA target sequence for APOBEC1 (NM_001644.2,186-204).
ggcgaagctcaggcaaaaa

SEQ ID NO: 49768 - DNA, 19 bp, Homo sapiens
  siRNA target sequence for APOBEC1 (NM_001644.2,188-206).
cgaagctcaggcaaaaaca

SEQ ID NO: 49769 - DNA, 19 bp, Homo sapiens
  siRNA target sequence for APOBEC1 (NM_001644.2,215-233).
cacgtggaagttaatttta

SEQ ID NO: 49770 - DNA, 19 bp, Homo sapiens
  siRNA target sequence for APOBEC1 (NM_001644.2,217-235).
cgtggaagttaattttata

SEQ ID NO: 49771 - DNA, 19 bp, Homo sapiens
  siRNA target sequence for APOBEC1 (NM_001644.2,317-335).
gaatgctcccaggctatta

SEQ ID NO: 49772 - DNA, 19 bp, Homo sapiens
  siRNA target sequence for APOBEC1 (NM_001644.2,321-339).
gctcccaggctattagaga

SEQ ID NO: 49773 - DNA, 19 bp, Homo sapiens
  siRNA target sequence for APOBEC1 (NM_001644.2,376-394).
ctacgtagctcggcttttt

SEQ ID NO: 49774 - DNA, 19 bp, Homo sapiens
  siRNA target sequence for APOBEC1 (NM_001644.2,422-440).
ggtctcagggaccttgtta

SEQ ID NO: 49775 - DNA, 19 bp, Homo sapiens
  siRNA target sequence for APOBEC1 (NM_001644.2,423-441).
gtctcagggaccttgttaa

SEQ ID NO: 49776 - DNA, 19 bp, Homo sapiens
  siRNA target sequence for APOBEC1 (NM_001644.2,437-455).
gttaacagtggagtaacta

SEQ ID NO: 49777 - DNA, 19 bp, Homo sapiens
  siRNA target sequence for APOBEC1 (NM_001644.2,447-465).
gagtaactattcagattat

SEQ ID NO: 49778 - DNA, 19 bp, Homo sapiens
  siRNA target sequence for APOBEC1 (NM_001644.2,572-590).
ctggagctgcactgcataa

SEQ ID NO: 49779 - DNA, 19 bp, Homo sapiens
  siRNA target sequence for APOBEC1 (NM_001644.2,574-592).
ggagctgcactgcataatt

SEQ ID NO: 49780 - DNA, 19 bp, Homo sapiens
  siRNA target sequence for APOBEC1 (NM_001644.2,577-595).
gctgcactgcataattcta

SEQ ID NO: 49781 - DNA, 19 bp, Homo sapiens
  siRNA target sequence for APOBEC1 (NM_001644.2,670-688).
ctgccattaccaaacgatt

SEQ ID NO: 49782 - DNA, 19 bp, Homo sapiens
  siRNA target sequence for APOBEC2 (NM_006789.1,393-411).
cagccctgcggtacaatgt

SEQ ID NO: 49783 - DNA, 19 bp, Homo sapiens
  siRNA target sequence for APOBEC2 (NM_006789.1,444-462).
cgtgtgctgaccgcattat

SEQ ID NO: 49784 - DNA, 19 bp, Homo sapiens
  siRNA target sequence for BAT1 (NM_004640.3,731-749).
gagcgcttctctaaataca

SEQ ID NO: 49785 - DNA, 19 bp, Homo sapiens
  siRNA target sequence for BAT1 (NM_004640.3,844-862).
gactccaggccgtatccta

SEQ ID NO: 49786 - DNA, 19 bp, Homo sapiens
  siRNA target sequence for BAT1 (NM_004640.3,859-877).
cctagccctggctcgaaat

SEQ ID NO: 49787 - DNA, 19 bp, Homo sapiens
  siRNA target sequence for BAT1 (NM_004640.3,884-902).
ctcaacctcaaacacatta

SEQ ID NO: 49788 - DNA, 19 bp, Homo sapiens
  siRNA target sequence for BAT1 (NM_004640.3,890-908).
ctcaaacacattaaacact

SEQ ID NO: 49789 - DNA, 19 bp, Homo sapiens
  siRNA target sequence for BAT1 (NM_004640.3,892-910).
caaacacattaaacacttt

SEQ ID NO: 49790 - DNA, 19 bp, Homo sapiens
  siRNA target sequence for BAT1 (NM_004640.3,924-942).
gtgataagatgcttgaaca

SEQ ID NO: 49791 - DNA, 19 bp, Homo sapiens
  siRNA target sequence for BAT1 (NM_004640.3,954-972).
gtcgggatgtccaggaaat

SEQ ID NO: 49792 - DNA, 19 bp, Homo sapiens
  siRNA target sequence for BAT1 (NM_004640.3,956-974).
cgggatgtccaggaaattt

SEQ ID NO: 49793 - DNA, 19 bp, Homo sapiens
  siRNA target sequence for BAT1 (NM_004640.3,1016-1034).
gctaccttgagcaaagaga

SEQ ID NO: 49794 - DNA, 19 bp, Homo sapiens
  siRNA target sequence for BAT1 (NM_004640.3,1041-1059).
cagtctgccgcaagttcat

SEQ ID NO: 49795 - DNA, 19 bp, Homo sapiens
  siRNA target sequence for BAT1 (NM_004640.3,1085-1103).
gatgatgagacgaagttga

SEQ ID NO: 49796 - DNA, 19 bp, Homo sapiens
  siRNA target sequence for BAT1 (NM_004640.3,1236-1254).
ccttggcccagctactagt

SEQ ID NO: 49797 - DNA, 19 bp, Homo sapiens
  siRNA target sequence for BAT1 (NM_004640.3,1314-1332).
ctcggtatcagcagtttaa

SEQ ID NO: 49798 - DNA, 19 bp, Homo sapiens
  siRNA target sequence for BAT1 (NM_004640.3,1317-1335).
ggtatcagcagtttaaaga

SEQ ID NO: 49799 - DNA, 19 bp, Homo sapiens
  siRNA target sequence for BAT1 (NM_004640.3,1318-1336).
gtatcagcagtttaaagat

SEQ ID NO: 49800 - DNA, 19 bp, Homo sapiens
  siRNA target sequence for BAT1 (NM_004640.3,1352-1370).
cttgtggctaccaacctat

SEQ ID NO: 49801 - DNA, 19 bp, Homo sapiens
  siRNA target sequence for BAT1 (NM_004640.3,1387-1405).
catcgagcgggtgaacatt

SEQ ID NO: 49802 - DNA, 19 bp, Homo sapiens
  siRNA target sequence for BAT1 (NM_004640.3,1393-1411).
gcgggtgaacattgctttt

SEQ ID NO: 49803 - DNA, 19 bp, Homo sapiens
  siRNA target sequence for BAT1 (NM_004640.3,1394-1412).
cgggtgaacattgctttta

SEQ ID NO: 49804 - DNA, 19 bp, Homo sapiens
  siRNA target sequence for BAT1 (NM_004640.3,1395-1413).
gggtgaacattgcttttaa

SEQ ID NO: 49805 - DNA, 19 bp, Homo sapiens
  siRNA target sequence for BAT1 (NM_004640.3,1483-1501).
gggcttggctatcacattt

SEQ ID NO: 49806 - DNA, 19 bp, Homo sapiens
  siRNA target sequence for BAT1 (NM_004640.3,1497-1515).
catttgtgtccgatgagaa

SEQ ID NO: 49807 - DNA, 19 bp, Homo sapiens
  siRNA target sequence for BAT1 (NM_004640.3,1544-1562).
gatcgctttgaggtcaata

SEQ ID NO: 49808 - DNA, 19 bp, Homo sapiens
  siRNA target sequence for BAT1 (NM_004640.3,1566-1584).
gtgagctgcctgatgagat

SEQ ID NO: 49809 - DNA, 19 bp, Homo sapiens
  siRNA target sequence for BRUNOL4 (NM_020180.1,91-109).
gggcacatgaacggattaa

SEQ ID NO: 49810 - DNA, 19 bp, Homo sapiens
  siRNA target sequence for BRUNOL4 (NM_020180.1,737-755).
gccagatgggcatgttcaa

SEQ ID NO: 49811 - DNA, 19 bp, Homo sapiens
  siRNA target sequence for BRUNOL4 (NM_020180.1,1180-1198).
gctgcctatggtcagataa

SEQ ID NO: 49812 - DNA, 19 bp, Homo sapiens
  siRNA target sequence for BRUNOL4 (NM_020180.1,1211-1229).
ctcagccgcctccaatgat

SEQ ID NO: 49813 - DNA, 19 bp, Homo sapiens
  siRNA target sequence for BRUNOL5 (NM_021938.2,322-340).
cagggattccgccatcaaa

SEQ ID NO: 49814 - DNA, 19 bp, Homo sapiens
  siRNA target sequence for BRUNOL5 (NM_021938.2,1298-1316).
ctacccttcggcaatatca

SEQ ID NO: 49815 - DNA, 19 bp, Homo sapiens
  siRNA target sequence for BRUNOL5 (NM_021938.2,1301-1319).
cccttcggcaatatcattt

SEQ ID NO: 49816 - DNA, 19 bp, Homo sapiens
  siRNA target sequence for C14orf21 (NM_174913.1,238-256).
ccggaagctctgggatatt

SEQ ID NO: 49817 - DNA, 19 bp, Homo sapiens
  siRNA target sequence for C14orf21 (NM_174913.1,266-284).
cgctgtcagcattgaaaga

SEQ ID NO: 49818 - DNA, 19 bp, Homo sapiens
  siRNA target sequence for C14orf21 (NM_174913.1,313-331).
ctgatggtgcacaatataa

SEQ ID NO: 49819 - DNA, 19 bp, Homo sapiens
  siRNA target sequence for C14orf21 (NM_174913.1,442-460).
gctgctctgcgctctaact

SEQ ID NO: 49820 - DNA, 19 bp, Homo sapiens
  siRNA target sequence for C14orf21 (NM_174913.1,481-499).
cgatgcggggtccatgtat

SEQ ID NO: 49821 - DNA, 19 bp, Homo sapiens
  siRNA target sequence for C14orf21 (NM_174913.1,485-503).
gcggggtccatgtattaca

SEQ ID NO: 49822 - DNA, 19 bp, Homo sapiens
  siRNA target sequence for C14orf21 (NM_174913.1,489-507).
ggtccatgtattacaaagt

SEQ ID NO: 49823 - DNA, 19 bp, Homo sapiens
  siRNA target sequence for C14orf21 (NM_174913.1,624-642).
cgctgaggtgtgtgatgat

SEQ ID NO: 49824 - DNA, 19 bp, Homo sapiens
  siRNA target sequence for C14orf21 (NM_174913.1,699-717).
ggtgttaggagggactatt

SEQ ID NO: 49825 - DNA, 19 bp, Homo sapiens
  siRNA target sequence for C14orf21 (NM_174913.1,862-880).
gacattgcagtgtttatca

SEQ ID NO: 49826 - DNA, 19 bp, Homo sapiens
  siRNA target sequence for C14orf21 (NM_174913.1,871-889).
gtgtttatcactgataaga

SEQ ID NO: 49827 - DNA, 19 bp, Homo sapiens
  siRNA target sequence for C14orf21 (NM_174913.1,902-920).
gtcttcaagtggctttaca

SEQ ID NO: 49828 - DNA, 19 bp, Homo sapiens
  siRNA target sequence for C14orf21 (NM_174913.1,921-939).
ggttttacaccgcaaactt

SEQ ID NO: 49829 - DNA, 19 bp, Homo sapiens
  siRNA target sequence for C14orf21 (NM_174913.1,931-949).
cgcaaacttccccagtttt

SEQ ID NO: 49830 - DNA, 19 bp, Homo sapiens
  siRNA target sequence for C14orf21 (NM_174913.1,1010-1028).
gcagtcccctactgctatt

SEQ ID NO: 49831 - DNA, 19 bp, Homo sapiens
  siRNA target sequence for C14orf21 (NM_174913.1,1091-1109).
gactccagagcctctttga

SEQ ID NO: 49832 - DNA, 19 bp, Homo sapiens
  siRNA target sequence for C14orf21 (NM_174913.1,1403-1421).
ccactttgatggcttatga

SEQ ID NO: 49833 - DNA, 19 bp, Homo sapiens
  siRNA target sequence for C14orf21 (NM_174913.1,1413-1431).
ggcttatgaggtgtactat

SEQ ID NO: 49834 - DNA, 19 bp, Homo sapiens
  siRNA target sequence for C14orf21 (NM_174913.1,1553-1571).
ccactcctggtcttgtact

SEQ ID NO: 49835 - DNA, 19 bp, Homo sapiens
  siRNA target sequence for C14orf21 (NM_174913.1,1554-1572).
cactcctggtcttgtactt

SEQ ID NO: 49836 - DNA, 19 bp, Homo sapiens
  siRNA target sequence for C14orf21 (NM_174913.1,1854-1872).
ccaccatgtggctcgaaat

SEQ ID NO: 49837 - DNA, 19 bp, Homo sapiens
  siRNA target sequence for C14orf21 (NM_174913.1,1867-1885).
cgaaatgtggccttgacta

SEQ ID NO: 49838 - DNA, 19 bp, Homo sapiens
  siRNA target sequence for C15orf12 (NM_018285.1,550-568).
ggcacgtgctagagtacaa

SEQ ID NO: 49839 - DNA, 19 bp, Homo sapiens
  siRNA target sequence for C15orf12 (NM_018285.1,551-569).
gcacgtgctagagtacaat

SEQ ID NO: 49840 - DNA, 19 bp, Homo sapiens
  siRNA target sequence for C1orf25 (NM_030934.3,457-475).
ctgaggaggctaaaagcaa

SEQ ID NO: 49841 - DNA, 19 bp, Homo sapiens
  siRNA target sequence for C1orf25 (NM_030934.3,472-490).
gcaagagacacatctcaat

SEQ ID NO: 49842 - DNA, 19 bp, Homo sapiens
  siRNA target sequence for C1orf25 (NM_030934.3,500-518).
gcttgctgatctagagaat

SEQ ID NO: 49843 - DNA, 19 bp, Homo sapiens
  siRNA target sequence for C1orf25 (NM_030934.3,501-519).
cttgctgatctagagaatt

SEQ ID NO: 49844 - DNA, 19 bp, Homo sapiens
  siRNA target sequence for C1orf25 (NM_030934.3,507-525).
gatctagagaatttagctt

SEQ ID NO: 49845 - DNA, 19 bp, Homo sapiens
  siRNA target sequence for C1orf25 (NM_030934.3,546-564).
gactctgccagctcattga

SEQ ID NO: 49846 - DNA, 19 bp, Homo sapiens
  siRNA target sequence for C1orf25 (NM_030934.3,557-575).
ctcattgaactcagataat

SEQ ID NO: 49847 - DNA, 19 bp, Homo sapiens
  siRNA target sequence for C1orf25 (NM_030934.3,563-581).
gaactcagataatcttgat

SEQ ID NO: 49848 - DNA, 19 bp, Homo sapiens
  siRNA target sequence for C1orf25 (NM_030934.3,604-622).
cattgtgccctaaggaaaa

SEQ ID NO: 49849 - DNA, 19 bp, Homo sapiens
  siRNA target sequence for C1orf25 (NM_030934.3,651-669).
cgtcgtcacctccagaatt

SEQ ID NO: 49850 - DNA, 19 bp, Homo sapiens
  siRNA target sequence for C1orf25 (NM_030934.3,652-670).
gtcgtcacctccagaattt

SEQ ID NO: 49851 - DNA, 19 bp, Homo sapiens
  siRNA target sequence for C1orf25 (NM_030934.3,655-673).
gtcacctccagaatttaca

SEQ ID NO: 49852 - DNA, 19 bp, Homo sapiens
  siRNA target sequence for C1orf25 (NM_030934.3,674-692).
ctggaaagtctcagttgaa

SEQ ID NO: 49853 - DNA, 19 bp, Homo sapiens
  siRNA target sequence for C1orf25 (NM_030934.3,676-694).
ggaaagtctcagttgaatt

SEQ ID NO: 49854 - DNA, 19 bp, Homo sapiens
  siRNA target sequence for C1orf25 (NM_030934.3,677-695).
gaaagtctcagttgaattt

SEQ ID NO: 49855 - DNA, 19 bp, Homo sapiens
  siRNA target sequence for C1orf25 (NM_030934.3,730-748).
gtcgaccagtgaaaccaaa

SEQ ID NO: 49856 - DNA, 19 bp, Homo sapiens
  siRNA target sequence for C1orf25 (NM_030934.3,749-767).
cattattggagaacagata

SEQ ID NO: 49857 - DNA, 19 bp, Homo sapiens
  siRNA target sequence for C1orf25 (NM_030934.3,779-797).
gggagcccattatcattgt

SEQ ID NO: 49858 - DNA, 19 bp, Homo sapiens
  siRNA target sequence for C1orf25 (NM_030934.3,781-799).
gagcccattatcattgtat

SEQ ID NO: 49859 - DNA, 19 bp, Homo sapiens
  siRNA target sequence for C1orf25 (NM_030934.3,783-801).
gcccattatcattgtatca

SEQ ID NO: 49860 - DNA, 19 bp, Homo sapiens
  siRNA target sequence for C1orf25 (NM_030934.3,784-802).
cccattatcattgtatcat

SEQ ID NO: 49861 - DNA, 19 bp, Homo sapiens
  siRNA target sequence for C1orf25 (NM_030934.3,820-838).
ccagaagaactgatatgct

SEQ ID NO: 49862 - DNA, 19 bp, Homo sapiens
  siRNA target sequence for C1orf25 (NM_030934.3,821-839).
cagaagaactgatatgcta

SEQ ID NO: 49863 - DNA, 19 bp, Homo sapiens
  siRNA target sequence for C1orf25 (NM_030934.3,831-849).
gatatgctaggacatgtta

SEQ ID NO: 49864 - DNA, 19 bp, Homo sapiens
  siRNA target sequence for C1orf25 (NM_030934.3,846-864).
gttaggcgccacatgaata

SEQ ID NO: 49865 - DNA, 19 bp, Homo sapiens
  siRNA target sequence for C1orf25 (NM_030934.3,851-869).
gcgccacatgaataaagga

SEQ ID NO: 49866 - DNA, 19 bp, Homo sapiens
  siRNA target sequence for C1orf25 (NM_030934.3,868-886).
gagagactaaatctagtta

SEQ ID NO: 49867 - DNA, 19 bp, Homo sapiens
  siRNA target sequence for C1orf25 (NM_030934.3,932-950).
ggcagacacggatgtacaa

SEQ ID NO: 49868 - DNA, 19 bp, Homo sapiens
  siRNA target sequence for C1orf25 (NM_030934.3,934-952).
cagacacggatgtacaagt

SEQ ID NO: 49869 - DNA, 19 bp, Homo sapiens
  siRNA target sequence for C1orf25 (NM_030934.3,936-954).
gacacggatgtacaagttt

SEQ ID NO: 49870 - DNA, 19 bp, Homo sapiens
  siRNA target sequence for C1orf25 (NM_030934.3,938-956).
cacggatgtacaagtttgt

SEQ ID NO: 49871 - DNA, 19 bp, Homo sapiens
  siRNA target sequence for C1orf25 (NM_030934.3,1011-1029).
ctaaatcggcagctaatat

SEQ ID NO: 49872 - DNA, 19 bp, Homo sapiens
  siRNA target sequence for C1orf25 (NM_030934.3,1017-1035).
cggcagctaatattctgta

SEQ ID NO: 49873 - DNA, 19 bp, Homo sapiens
  siRNA target sequence for C1orf25 (NM_030934.3,1020-1038).
cagctaatattctgtacat

SEQ ID NO: 49874 - DNA, 19 bp, Homo sapiens
  siRNA target sequence for C1orf25 (NM_030934.3,1050-1068).
gctgaggaacgaaaacctt

SEQ ID NO: 49875 - DNA, 19 bp, Homo sapiens
  siRNA target sequence for C1orf25 (NM_030934.3,1060-1078).
gaaaacctttggaatgtct

SEQ ID NO: 49876 - DNA, 19 bp, Homo sapiens
  siRNA target sequence for C1orf25 (NM_030934.3,1138-1156).
cagtcaaagttacaatcaa

SEQ ID NO: 49877 - DNA, 19 bp, Homo sapiens
  siRNA target sequence for C1orf25 (NM_030934.3,1311-1329).
gccaatgtactgatgcatt

SEQ ID NO: 49878 - DNA, 19 bp, Homo sapiens
  siRNA target sequence for C1orf25 (NM_030934.3,1312-1330).
ccaatgtactgatgcattt

SEQ ID NO: 49879 - DNA, 19 bp, Homo sapiens
  siRNA target sequence for C1orf25 (NM_030934.3,1350-1368).
catctagacccttttggaa

SEQ ID NO: 49880 - DNA, 19 bp, Homo sapiens
  siRNA target sequence for C1orf25 (NM_030934.3,1366-1384).
gaacatcagtgaattatct

SEQ ID NO: 49881 - DNA, 19 bp, Homo sapiens
  siRNA target sequence for C1orf25 (NM_030934.3,1426-1444).
cagtgacttctacagatat

SEQ ID NO: 49882 - DNA, 19 bp, Homo sapiens
  siRNA target sequence for C1orf25 (NM_030934.3,1480-1498).
ggcgtcactacggatgtaa

SEQ ID NO: 49883 - DNA, 19 bp, Homo sapiens
  siRNA target sequence for C1orf25 (NM_030934.3,1482-1500).
cgtcactacggatgtaaca

SEQ ID NO: 49884 - DNA, 19 bp, Homo sapiens
  siRNA target sequence for C1orf25 (NM_030934.3,1483-1501).
gtcactacggatgtaacat

SEQ ID NO: 49885 - DNA, 19 bp, Homo sapiens
  siRNA target sequence for C1orf25 (NM_030934.3,1503-1521).
gtccgaactgaatattaca

SEQ ID NO: 49886 - DNA, 19 bp, Homo sapiens
  siRNA target sequence for C1orf25 (NM_030934.3,1576-1594).
gcaacaaaggcatagaagt

SEQ ID NO: 49887 - DNA, 19 bp, Homo sapiens
  siRNA target sequence for C1orf25 (NM_030934.3,1603-1621).
cagtggctctggaacattt

SEQ ID NO: 49888 - DNA, 19 bp, Homo sapiens
  siRNA target sequence for C1orf25 (NM_030934.3,1609-1627).
ctctggaacattttgtgtt

SEQ ID NO: 49889 - DNA, 19 bp, Homo sapiens
  siRNA target sequence for C1orf25 (NM_030934.3,1730-1748).
gaaggatggtaatatggta

SEQ ID NO: 49890 - DNA, 19 bp, Homo sapiens
  siRNA target sequence for C1orf25 (NM_030934.3,1746-1764).
gtagaagaaaacccatata

SEQ ID NO: 49891 - DNA, 19 bp, Homo sapiens
  siRNA target sequence for C1orf25 (NM_030934.3,1831-1849).
ggtcaagttcccttttcaa

SEQ ID NO: 49892 - DNA, 19 bp, Homo sapiens
  siRNA target sequence for C1orf25 (NM_030934.3,1902-1920).
gacattcagaccctaataa

SEQ ID NO: 49893 - DNA, 19 bp, Homo sapiens
  siRNA target sequence for C1orf25 (NM_030934.3,1910-1928).
gaccctaataaagacatta

SEQ ID NO: 49894 - DNA, 19 bp, Homo sapiens
  siRNA target sequence for C1orf25 (NM_030934.3,1912-1930).
ccctaataaagacattaat

SEQ ID NO: 49895 - DNA, 19 bp, Homo sapiens
  siRNA target sequence for C1orf25 (NM_030934.3,1914-1932).
ctaataaagacattaatct

SEQ ID NO: 49896 - DNA, 19 bp, Homo sapiens
  siRNA target sequence for C1orf25 (NM_030934.3,2134-2152).
ctcccttttattacaacat

SEQ ID NO: 49897 - DNA, 19 bp, Homo sapiens
  siRNA target sequence for C1orf25 (NM_030934.3,2158-2176).
gacacagcattaaaggaat

SEQ ID NO: 49898 - DNA, 19 bp, Homo sapiens
  siRNA target sequence for C1orf25 (NM_030934.3,2229-2247).
cgagtaagccgaactcatt

SEQ ID NO: 49899 - DNA, 19 bp, Homo sapiens
  siRNA target sequence for C1orf25 (NM_030934.3,2230-2248).
gagtaagccgaactcattt

SEQ ID NO: 49900 - DNA, 19 bp, Homo sapiens
  siRNA target sequence for C1orf25 (NM_030934.3,2277-2295).
cctctgatgcagtttaaat

SEQ ID NO: 49901 - DNA, 19 bp, Homo sapiens
  siRNA target sequence for C1orf25 (NM_030934.3,2359-2377).
cagcatctgaagatacagt

SEQ ID NO: 49902 - DNA, 19 bp, Homo sapiens
  siRNA target sequence for C1orf25 (NM_030934.3,2361-2379).
gcatctgaagatacagtaa

SEQ ID NO: 49903 - DNA, 19 bp, Homo sapiens
  siRNA target sequence for CGI-37 (NM_016101.2,184-202).
cccgtgtcatgtttgagaa

SEQ ID NO: 49904 - DNA, 19 bp, Homo sapiens
  siRNA target sequence for CGI-37 (NM_016101.2,215-233).
cattggggagaatcttcaa

SEQ ID NO: 49905 - DNA, 19 bp, Homo sapiens
  siRNA target sequence for CGI-37 (NM_016101.2,249-267).
cccgatggcacctactgtt

SEQ ID NO: 49906 - DNA, 19 bp, Homo sapiens
  siRNA target sequence for CGI-37 (NM_016101.2,278-296).
caacgaccgggtgtactat

SEQ ID NO: 49907 - DNA, 19 bp, Homo sapiens
  siRNA target sequence for CGI-37 (NM_016101.2,377-395).
cactaaaacccacaagttt

SEQ ID NO: 49908 - DNA, 19 bp, Homo sapiens
  siRNA target sequence for CGI-37 (NM_016101.2,416-434).
ggattaccttgcaccttat

SEQ ID NO: 49909 - DNA, 19 bp, Homo sapiens
  siRNA target sequence for CGI-37 (NM_016101.2,426-444).
gcaccttatgccaagtata

SEQ ID NO: 49910 - DNA, 19 bp, Homo sapiens
  siRNA target sequence for CGI-37 (NM_016101.2,430-448).
cttatgccaagtataaagt

SEQ ID NO: 49911 - DNA, 19 bp, Homo sapiens
  siRNA target sequence for CGI-37 (NM_016101.2,588-606).
ggggtggcagccaaatcta

SEQ ID NO: 49912 - DNA, 19 bp, Homo sapiens
  siRNA target sequence for CGI-37 (NM_016101.2,632-650).
catggcgattgtggtattt

SEQ ID NO: 49913 - DNA, 19 bp, Homo sapiens
  siRNA target sequence for CGI-37 (NM_016101.2,638-656).
gattgtggtatttcatcaa

SEQ ID NO: 49914 - DNA, 19 bp, Homo sapiens
  siRNA target sequence for CGI-79 (NM_016024.1,420-438).
cccctcaccaagtttgtct

SEQ ID NO: 49915 - DNA, 19 bp, Homo sapiens
  siRNA target sequence for CGI-79 (NM_016024.1,569-587).
gacgcaagacagtaaagga

SEQ ID NO: 49916 - DNA, 19 bp, Homo sapiens
  siRNA target sequence for CGI-79 (NM_016024.1,822-840).
gcacattctagctggtata

SEQ ID NO: 49917 - DNA, 19 bp, Homo sapiens
  siRNA target sequence for CGI-79 (NM_016024.1,823-841).
cacattctagctggtataa

SEQ ID NO: 49918 - DNA, 19 bp, Homo sapiens
  siRNA target sequence for CGI-79 (NM_016024.1,852-870).
gaagggcgtagttatagaa

SEQ ID NO: 49919 - DNA, 19 bp, Homo sapiens
  siRNA target sequence for CGI-79 (NM_016024.1,855-873).
gggcgtagttatagaagta

SEQ ID NO: 49920 - DNA, 19 bp, Homo sapiens
  siRNA target sequence for CGI-79 (NM_016024.1,857-875).
gcgtagttatagaagtaga

SEQ ID NO: 49921 - DNA, 19 bp, Homo sapiens
  siRNA target sequence for CGI-79 (NM_016024.1,874-892).
gaagtaggagccgagataa

SEQ ID NO: 49922 - DNA, 19 bp, Homo sapiens
  siRNA target sequence for CGI-79 (NM_016024.1,972-990).
cttcagctgcacagtagat

SEQ ID NO: 49923 - DNA, 19 bp, Homo sapiens
  siRNA target sequence for CGI-79 (NM_016024.1,977-995).
gctgcacagtagatttgga

SEQ ID NO: 49924 - DNA, 19 bp, Homo sapiens
  siRNA target sequence for CGI-79 (NM_016024.1,980-998).
gcacagtagatttggaaat

SEQ ID NO: 49925 - DNA, 19 bp, Homo sapiens
  siRNA target sequence for CGI-79 (NM_016024.1,981-999).
cacagtagatttggaaata

SEQ ID NO: 49926 - DNA, 19 bp, Homo sapiens
  siRNA target sequence for CGI-79 (NM_016024.1,985-1003).
gtagatttggaaataatta

SEQ ID NO: 49927 - DNA, 19 bp, Homo sapiens
  siRNA target sequence for CGI-79 (NM_016024.1,1027-1045).
cagttgggtggttactatt

SEQ ID NO: 49928 - DNA, 19 bp, Homo sapiens
  siRNA target sequence for CGI-79 (NM_016024.1,1029-1047).
gttgggtggttactatttt

SEQ ID NO: 49929 - DNA, 19 bp, Homo sapiens
  siRNA target sequence for CHERP (NM_006387.4,184-202).
ccaaattctcgtttctttt

SEQ ID NO: 49930 - DNA, 19 bp, Homo sapiens
  siRNA target sequence for CHERP (NM_006387.4,198-216).
cttttcggaggcgaattct

SEQ ID NO: 49931 - DNA, 19 bp, Homo sapiens
  siRNA target sequence for CHERP (NM_006387.4,204-222).
ggaggcgaattctacagtt

SEQ ID NO: 49932 - DNA, 19 bp, Homo sapiens
  siRNA target sequence for CHERP (NM_006387.4,205-223).
gaggcgaattctacagtta

SEQ ID NO: 49933 - DNA, 19 bp, Homo sapiens
  siRNA target sequence for CHERP (NM_006387.4,207-225).
ggcgaattctacagttact

SEQ ID NO: 49934 - DNA, 19 bp, Homo sapiens
  siRNA target sequence for CHERP (NM_006387.4,208-226).
gcgaattctacagttacta

SEQ ID NO: 49935 - DNA, 19 bp, Homo sapiens
  siRNA target sequence for CHERP (NM_006387.4,516-534).
gacatgaacgagtttgaca

SEQ ID NO: 49936 - DNA, 19 bp, Homo sapiens
  siRNA target sequence for CHERP (NM_006387.4,1015-1033).
cgcagcacgaggagtttgt

SEQ ID NO: 49937 - DNA, 19 bp, Homo sapiens
  siRNA target sequence for CHERP (NM_006387.4,2187-2205).
cagaacggcctctatgagt

SEQ ID NO: 49938 - DNA, 19 bp, Homo sapiens
  siRNA target sequence for CHERP (NM_006387.4,2387-2405).
ctcccgctccagatctaga

SEQ ID NO: 49939 - DNA, 19 bp, Homo sapiens
  siRNA target sequence for CHERP (NM_006387.4,2572-2590).
ggctcggagaagagaacaa

SEQ ID NO: 49940 - DNA, 19 bp, Homo sapiens
  siRNA target sequence for CHERP (NM_006387.4,2573-2591).
gctcggagaagagaacaaa

SEQ ID NO: 49941 - DNA, 19 bp, Homo sapiens
  siRNA target sequence for CHERP (NM_006387.4,2679-2697).
ggggacgtccgggataagt

SEQ ID NO: 49942 - DNA, 19 bp, Homo sapiens
  siRNA target sequence for CHERP (NM_006387.4,2691-2709).
gataagtgggaccagtata

SEQ ID NO: 49943 - DNA, 19 bp, Homo sapiens
  siRNA target sequence for CHERP (NM_006387.4,2790-2808).
gccagggacgagtgtaagt

SEQ ID NO: 49944 - DNA, 19 bp, Homo sapiens
  siRNA target sequence for CIRBP (NM_001280.1,147-165).
gagcaggtcttctcaaagt

SEQ ID NO: 49945 - DNA, 19 bp, Homo sapiens
  siRNA target sequence for CIRBP (NM_001280.1,248-266).
cattgacgacgctaaggat

SEQ ID NO: 49946 - DNA, 19 bp, Homo sapiens
  siRNA target sequence for CIRBP (NM_001280.1,487-505).
gaggctccagagactacta

SEQ ID NO: 49947 - DNA, 19 bp, Homo sapiens
  siRNA target sequence for CIRBP (NM_001280.1,553-571).
ggtcctacagagacagtta

SEQ ID NO: 49948 - DNA, 19 bp, Homo sapiens
  siRNA target sequence for CIZ1 (NM_012127.1,281-299).
ggactggaccagtttgcaa

SEQ ID NO: 49949 - DNA, 19 bp, Homo sapiens
  siRNA target sequence for CIZ1 (NM_012127.1,302-320).
ccaccagccacgtatgaca

SEQ ID NO: 49950 - DNA, 19 bp, Homo sapiens
  siRNA target sequence for CIZ1 (NM_012127.1,506-524).
ccttcccagttcaaccttt

SEQ ID NO: 49951 - DNA, 19 bp, Homo sapiens
  siRNA target sequence for CIZ1 (NM_012127.1,528-546).
gacggaacccccagaaaca

SEQ ID NO: 49952 - DNA, 19 bp, Homo sapiens
  siRNA target sequence for CIZ1 (NM_012127.1,564-582).
ctaccacccccaatcgaaa

SEQ ID NO: 49953 - DNA, 19 bp, Homo sapiens
  siRNA target sequence for CIZ1 (NM_012127.1,568-586).
cacccccaatcgaaaggat

SEQ ID NO: 49954 - DNA, 19 bp, Homo sapiens
  siRNA target sequence for CIZ1 (NM_012127.1,600-618).
caatgcctgtggaagacaa

SEQ ID NO: 49955 - DNA, 19 bp, Homo sapiens
  siRNA target sequence for CIZ1 (NM_012127.1,760-778).
cgagctgccagcaaagaga

SEQ ID NO: 49956 - DNA, 19 bp, Homo sapiens
  siRNA target sequence for CIZ1 (NM_012127.1,1273-1291).
ggtccagacacagacatat

SEQ ID NO: 49957 - DNA, 19 bp, Homo sapiens
  siRNA target sequence for CIZ1 (NM_012127.1,1560-1578).
cggcctgtggcctagatgt

SEQ ID NO: 49958 - DNA, 19 bp, Homo sapiens
  siRNA target sequence for CIZ1 (NM_012127.1,1968-1986).
cctgccagctctactacat

SEQ ID NO: 49959 - DNA, 19 bp, Homo sapiens
  siRNA target sequence for CIZ1 (NM_012127.1,2011-2029).
gacacaggaccacaagatt

SEQ ID NO: 49960 - DNA, 19 bp, Homo sapiens
  siRNA target sequence for CIZ1 (NM_012127.1,2020-2038).
ccacaagattgccaaacaa

SEQ ID NO: 49961 - DNA, 19 bp, Homo sapiens
  siRNA target sequence for CIZ1 (NM_012127.1,2021-2039).
cacaagattgccaaacaat

SEQ ID NO: 49962 - DNA, 19 bp, Homo sapiens
  siRNA target sequence for CIZ1 (NM_012127.1,2060-2078).
gtttgcaaccgctacttca

SEQ ID NO: 49963 - DNA, 19 bp, Homo sapiens
  siRNA target sequence for CIZ1 (NM_012127.1,2077-2095).
caaaacccctcgcaagttt

SEQ ID NO: 49964 - DNA, 19 bp, Homo sapiens
  siRNA target sequence for CIZ1 (NM_012127.1,2140-2158).
gctgaagtcgcttgagaaa

SEQ ID NO: 49965 - DNA, 19 bp, Homo sapiens
  siRNA target sequence for CIZ1 (NM_012127.1,2146-2164).
gtcgcttgagaaagaaatt

SEQ ID NO: 49966 - DNA, 19 bp, Homo sapiens
  siRNA target sequence for CIZ1 (NM_012127.1,2174-2192).
gatgaggaccacttcatta

SEQ ID NO: 49967 - DNA, 19 bp, Homo sapiens
  siRNA target sequence for CIZ1 (NM_012127.1,2291-2309).
gtgaggtccagagatatat

SEQ ID NO: 49968 - DNA, 19 bp, Homo sapiens
  siRNA target sequence for CIZ1 (NM_012127.1,2335-2353).
gacctacagccccaatact

SEQ ID NO: 49969 - DNA, 19 bp, Homo sapiens
  siRNA target sequence for CIZ1 (NM_012127.1,2344-2362).
ccccaatactgcatatggt

SEQ ID NO: 49970 - DNA, 19 bp, Homo sapiens
  siRNA target sequence for CIZ1 (NM_012127.1,2605-2623).
caacacccaggacaaaaca

SEQ ID NO: 49971 - DNA, 19 bp, Homo sapiens
  siRNA target sequence for CIZ1 (NM_012127.1,2669-2687).
cgctcaacccgcctcaaaa

SEQ ID NO: 49972 - DNA, 19 bp, Homo sapiens
  siRNA target sequence for CPSF2 (NM_017437.1,297-315).
ctatcttctccaagttgat

SEQ ID NO: 49973 - DNA, 19 bp, Homo sapiens
  siRNA target sequence for CPSF2 (NM_017437.1,340-358).
ggctgggatgagcactttt

SEQ ID NO: 49974 - DNA, 19 bp, Homo sapiens
  siRNA target sequence for CPSF2 (NM_017437.1,344-362).
gggatgagcacttttctat

SEQ ID NO: 49975 - DNA, 19 bp, Homo sapiens
  siRNA target sequence for CPSF2 (NM_017437.1,473-491).
gtctgaactgtgctatcta

SEQ ID NO: 49976 - DNA, 19 bp, Homo sapiens
  siRNA target sequence for CPSF2 (NM_017437.1,493-511).
gcaaccattcctgtttata

SEQ ID NO: 49977 - DNA, 19 bp, Homo sapiens
  siRNA target sequence for CPSF2 (NM_017437.1,522-540).
gatgttcatgtatgatctt

SEQ ID NO: 49978 - DNA, 19 bp, Homo sapiens
  siRNA target sequence for CPSF2 (NM_017437.1,592-610).
gtggatgcagcctttgata

SEQ ID NO: 49979 - DNA, 19 bp, Homo sapiens
  siRNA target sequence for CPSF2 (NM_017437.1,658-676).
ggacatggcctgtctatca

SEQ ID NO: 49980 - DNA, 19 bp, Homo sapiens
  siRNA target sequence for CPSF2 (NM_017437.1,684-702).
gccagctggtcatatgata

SEQ ID NO: 49981 - DNA, 19 bp, Homo sapiens
  siRNA target sequence for CPSF2 (NM_017437.1,777-795).
ggagatccatttaaatgga

SEQ ID NO: 49982 - DNA, 19 bp, Homo sapiens
  siRNA target sequence for CPSF2 (NM_017437.1,819-837).
gccttccctacttatcaca

SEQ ID NO: 49983 - DNA, 19 bp, Homo sapiens
  siRNA target sequence for CPSF2 (NM_017437.1,826-844).
ctacttatcacagattcat

SEQ ID NO: 49984 - DNA, 19 bp, Homo sapiens
  siRNA target sequence for CPSF2 (NM_017437.1,1015-1033).
ggattgggtgtttactcat

SEQ ID NO: 49985 - DNA, 19 bp, Homo sapiens
  siRNA target sequence for CPSF2 (NM_017437.1,1029-1047).
ctcattggcactcctaaat

SEQ ID NO: 49986 - DNA, 19 bp, Homo sapiens
  siRNA target sequence for CPSF2 (NM_017437.1,1063-1081).
gtggtggagttttctaagt

SEQ ID NO: 49987 - DNA, 19 bp, Homo sapiens
  siRNA target sequence for CPSF2 (NM_017437.1,1090-1108).
gaatggatgagtgataaat

SEQ ID NO: 49988 - DNA, 19 bp, Homo sapiens
  siRNA target sequence for CPSF2 (NM_017437.1,1193-1211).
gtgtacctagccctaaagt

SEQ ID NO: 49989 - DNA, 19 bp, Homo sapiens
  siRNA target sequence for CPSF2 (NM_017437.1,1199-1217).
ctagccctaaagttgtact

SEQ ID NO: 49990 - DNA, 19 bp, Homo sapiens
  siRNA target sequence for CPSF2 (NM_017437.1,1231-1249).
gacctggaatgcggatttt

SEQ ID NO: 49991 - DNA, 19 bp, Homo sapiens
  siRNA target sequence for CPSF2 (NM_017437.1,1233-1251).
cctggaatgcggattttca

SEQ ID NO: 49992 - DNA, 19 bp, Homo sapiens
  siRNA target sequence for CPSF2 (NM_017437.1,1234-1252).
ctggaatgcggattttcaa

SEQ ID NO: 49993 - DNA, 19 bp, Homo sapiens
  siRNA target sequence for CPSF2 (NM_017437.1,1276-1294).
caggaccctaaaaactcaa

SEQ ID NO: 49994 - DNA, 19 bp, Homo sapiens
  siRNA target sequence for CPSF2 (NM_017437.1,1281-1299).
ccctaaaaactcaatcatt

SEQ ID NO: 49995 - DNA, 19 bp, Homo sapiens
  siRNA target sequence for CPSF2 (NM_017437.1,1323-1341).
gactttagcacgtttccta

SEQ ID NO: 49996 - DNA, 19 bp, Homo sapiens
  siRNA target sequence for CPSF2 (NM_017437.1,1325-1343).
ctttagcacgtttcctaat

SEQ ID NO: 49997 - DNA, 19 bp, Homo sapiens
  siRNA target sequence for CPSF2 (NM_017437.1,1330-1348).
gcacgtttcctaattgata

SEQ ID NO: 49998 - DNA, 19 bp, Homo sapiens
  siRNA target sequence for CPSF2 (NM_017437.1,1331-1349).
cacgtttcctaattgataa

SEQ ID NO: 49999 - DNA, 19 bp, Homo sapiens
  siRNA target sequence for CPSF2 (NM_017437.1,1470-1488).
gtcaaaagaggcagatata

SEQ ID NO: 50000 - DNA, 19 bp, Homo sapiens
  siRNA target sequence for CPSF2 (NM_017437.1,1528-1546).
cagccatcagctcataaga

SEQ ID NO: 50001 - DNA, 19 bp, Homo sapiens
  siRNA target sequence for CPSF2 (NM_017437.1,1547-1565).
cgaagcatgacttgatgat

SEQ ID NO: 50002 - DNA, 19 bp, Homo sapiens
  siRNA target sequence for CPSF2 (NM_017437.1,1573-1591).
gaaggcagtcgtaaaggaa

SEQ ID NO: 50003 - DNA, 19 bp, Homo sapiens
  siRNA target sequence for CPSF2 (NM_017437.1,1577-1595).
gcagtcgtaaaggaagttt

SEQ ID NO: 50004 - DNA, 19 bp, Homo sapiens
  siRNA target sequence for CPSF2 (NM_017437.1,1578-1596).
cagtcgtaaaggaagtttt

SEQ ID NO: 50005 - DNA, 19 bp, Homo sapiens
  siRNA target sequence for CPSF2 (NM_017437.1,1606-1624).
gcaaaaaagtcctatccta

SEQ ID NO: 50006 - DNA, 19 bp, Homo sapiens
  siRNA target sequence for CPSF2 (NM_017437.1,1677-1695).
caaaccagaggatttctta

SEQ ID NO: 50007 - DNA, 19 bp, Homo sapiens
  siRNA target sequence for CPSF2 (NM_017437.1,1770-1788).
ggatcaggatttatctgat

SEQ ID NO: 50008 - DNA, 19 bp, Homo sapiens
  siRNA target sequence for CPSF2 (NM_017437.1,1808-1826).
ctacaacagagtctattga

SEQ ID NO: 50009 - DNA, 19 bp, Homo sapiens
  siRNA target sequence for CPSF2 (NM_017437.1,1837-1855).
cgggttacctacatagact

SEQ ID NO: 50010 - DNA, 19 bp, Homo sapiens
  siRNA target sequence for CPSF2 (NM_017437.1,1838-1856).
gggttacctacatagacta

SEQ ID NO: 50011 - DNA, 19 bp, Homo sapiens
  siRNA target sequence for CPSF2 (NM_017437.1,1865-1883).
gctctgatggggattccat

SEQ ID NO: 50012 - DNA, 19 bp, Homo sapiens
  siRNA target sequence for CPSF2 (NM_017437.1,1974-1992).
cgcctttggtgggaaagat

SEQ ID NO: 50013 - DNA, 19 bp, Homo sapiens
  siRNA target sequence for CPSF2 (NM_017437.1,1982-2000).
gtgggaaagatattaaagt

SEQ ID NO: 50014 - DNA, 19 bp, Homo sapiens
  siRNA target sequence for CPSF2 (NM_017437.1,2056-2074).
caggtgaggttaaaagact

SEQ ID NO: 50015 - DNA, 19 bp, Homo sapiens
  siRNA target sequence for CPSF2 (NM_017437.1,2126-2144).
ggatagatggtgtcttaga

SEQ ID NO: 50016 - DNA, 19 bp, Homo sapiens
  siRNA target sequence for CPSF2 (NM_017437.1,2127-2145).
gatagatggtgtcttagat

SEQ ID NO: 50017 - DNA, 19 bp, Homo sapiens
  siRNA target sequence for CPSF2 (NM_017437.1,2137-2155).
gtcttagatatgagagttt

SEQ ID NO: 50018 - DNA, 19 bp, Homo sapiens
  siRNA target sequence for CPSF2 (NM_017437.1,2163-2181).
ggacacaggggttatttta

SEQ ID NO: 50019 - DNA, 19 bp, Homo sapiens
  siRNA target sequence for CPSF2 (NM_017437.1,2168-2186).
caggggttattttagaaga

SEQ ID NO: 50020 - DNA, 19 bp, Homo sapiens
  siRNA target sequence for CPSF2 (NM_017437.1,2227-2245).
gtggaagctccctcagatt

SEQ ID NO: 50021 - DNA, 19 bp, Homo sapiens
  siRNA target sequence for CPSF2 (NM_017437.1,2230-2248).
gaagctccctcagattcta

SEQ ID NO: 50022 - DNA, 19 bp, Homo sapiens
  siRNA target sequence for CPSF2 (NM_017437.1,2238-2256).
ctcagattctagcgttata

SEQ ID NO: 50023 - DNA, 19 bp, Homo sapiens
  siRNA target sequence for CPSF2 (NM_017437.1,2249-2267).
gcgttatagcacaacaaaa

SEQ ID NO: 50024 - DNA, 19 bp, Homo sapiens
  siRNA target sequence for CPSF2 (NM_017437.1,2279-2297).
gtctgttcggagatgatga

SEQ ID NO: 50025 - DNA, 19 bp, Homo sapiens
  siRNA target sequence for CPSF2 (NM_017437.1,2281-2299).
ctgttcggagatgatgaaa

SEQ ID NO: 50026 - DNA, 19 bp, Homo sapiens
  siRNA target sequence for CPSF2 (NM_017437.1,2283-2301).
gttcggagatgatgaaaaa

SEQ ID NO: 50027 - DNA, 19 bp, Homo sapiens
  siRNA target sequence for CPSF2 (NM_017437.1,2421-2439).
cttacgggaggggattcaa

SEQ ID NO: 50028 - DNA, 19 bp, Homo sapiens
  siRNA target sequence for CPSF2 (NM_017437.1,2449-2467).
gtaggaggtgtacttgttt

SEQ ID NO: 50029 - DNA, 19 bp, Homo sapiens
  siRNA target sequence for CPSF2 (NM_017437.1,2453-2471).
gaggtgtacttgtttgcaa

SEQ ID NO: 50030 - DNA, 19 bp, Homo sapiens
  siRNA target sequence for CPSF2 (NM_017437.1,2501-2519).
ctggacgcattggattaga

SEQ ID NO: 50031 - DNA, 19 bp, Homo sapiens
  siRNA target sequence for CPSF2 (NM_017437.1,2531-2549).
gtcaagatttttataggat

SEQ ID NO: 50032 - DNA, 19 bp, Homo sapiens
  siRNA target sequence for CPSF2 (NM_017437.1,2547-2565).
gataagagaccttttatat

SEQ ID NO: 50033 - DNA, 19 bp, Homo sapiens
  siRNA target sequence for CPSF3 (NM_016207.2,106-124).
gaagatcatgtattattct

SEQ ID NO: 50034 - DNA, 19 bp, Homo sapiens
  siRNA target sequence for CPSF3 (NM_016207.2,115-133).
gtattattctcgagttcaa

SEQ ID NO: 50035 - DNA, 19 bp, Homo sapiens
  siRNA target sequence for CPSF3 (NM_016207.2,181-199).
gaatggatgctcttcctta

SEQ ID NO: 50036 - DNA, 19 bp, Homo sapiens
  siRNA target sequence for CPSF3 (NM_016207.2,189-207).
gctcttccttatattgatt

SEQ ID NO: 50037 - DNA, 19 bp, Homo sapiens
  siRNA target sequence for CPSF3 (NM_016207.2,222-240).
gagattgatctcctattaa

SEQ ID NO: 50038 - DNA, 19 bp, Homo sapiens
  siRNA target sequence for CPSF3 (NM_016207.2,224-242).
gattgatctcctattaatt

SEQ ID NO: 50039 - DNA, 19 bp, Homo sapiens
  siRNA target sequence for CPSF3 (NM_016207.2,320-338).
gactcatgccacaaaagct

SEQ ID NO: 50040 - DNA, 19 bp, Homo sapiens
  siRNA target sequence for CPSF3 (NM_016207.2,360-378).
gattatgtcaaagttagta

SEQ ID NO: 50041 - DNA, 19 bp, Homo sapiens
  siRNA target sequence for CPSF3 (NM_016207.2,387-405).
gcagacgacatgctgtata

SEQ ID NO: 50042 - DNA, 19 bp, Homo sapiens
  siRNA target sequence for CPSF3 (NM_016207.2,399-417).
ctgtataccgagacagatt

SEQ ID NO: 50043 - DNA, 19 bp, Homo sapiens
  siRNA target sequence for CPSF3 (NM_016207.2,468-486).
gaagttgcgggaatcaagt

SEQ ID NO: 50044 - DNA, 19 bp, Homo sapiens
  siRNA target sequence for CPSF3 (NM_016207.2,471-489).
gttgcgggaatcaagtttt

SEQ ID NO: 50045 - DNA, 19 bp, Homo sapiens
  siRNA target sequence for CPSF3 (NM_016207.2,474-492).
gcgggaatcaagttttggt

SEQ ID NO: 50046 - DNA, 19 bp, Homo sapiens
  siRNA target sequence for CPSF3 (NM_016207.2,513-531).
ctaggagccgccatgttca

SEQ ID NO: 50047 - DNA, 19 bp, Homo sapiens
  siRNA target sequence for CPSF3 (NM_016207.2,516-534).
ggagccgccatgttcatga

SEQ ID NO: 50048 - DNA, 19 bp, Homo sapiens
  siRNA target sequence for CPSF3 (NM_016207.2,517-535).
gagccgccatgttcatgat

SEQ ID NO: 50049 - DNA, 19 bp, Homo sapiens
  siRNA target sequence for CPSF3 (NM_016207.2,520-538).
ccgccatgttcatgattga

SEQ ID NO: 50050 - DNA, 19 bp, Homo sapiens
  siRNA target sequence for CPSF3 (NM_016207.2,543-561).
gcaggcgtgaagcttttgt

SEQ ID NO: 50051 - DNA, 19 bp, Homo sapiens
  siRNA target sequence for CPSF3 (NM_016207.2,544-562).
caggcgtgaagcttttgta

SEQ ID NO: 50052 - DNA, 19 bp, Homo sapiens
  siRNA target sequence for CPSF3 (NM_016207.2,546-564).
ggcgtgaagcttttgtaca

SEQ ID NO: 50053 - DNA, 19 bp, Homo sapiens
  siRNA target sequence for CPSF3 (NM_016207.2,630-648).
gatattcttatcattgaat

SEQ ID NO: 50054 - DNA, 19 bp, Homo sapiens
  siRNA target sequence for CPSF3 (NM_016207.2,658-676).
ggacccatatccatgagaa

SEQ ID NO: 50055 - DNA, 19 bp, Homo sapiens
  siRNA target sequence for CPSF3 (NM_016207.2,659-677).
gacccatatccatgagaaa

SEQ ID NO: 50056 - DNA, 19 bp, Homo sapiens
  siRNA target sequence for CPSF3 (NM_016207.2,686-704).
gcgagaagcaagattctgt

SEQ ID NO: 50057 - DNA, 19 bp, Homo sapiens
  siRNA target sequence for CPSF3 (NM_016207.2,703-721).
gtaacactgtccacgatat

SEQ ID NO: 50058 - DNA, 19 bp, Homo sapiens
  siRNA target sequence for CPSF3 (NM_016207.2,707-725).
cactgtccacgatattgta

SEQ ID NO: 50059 - DNA, 19 bp, Homo sapiens
  siRNA target sequence for CPSF3 (NM_016207.2,709-727).
ctgtccacgatattgtaaa

SEQ ID NO: 50060 - DNA, 19 bp, Homo sapiens
  siRNA target sequence for CPSF3 (NM_016207.2,711-729).
gtccacgatattgtaaaca

SEQ ID NO: 50061 - DNA, 19 bp, Homo sapiens
  siRNA target sequence for CPSF3 (NM_016207.2,713-731).
ccacgatattgtaaacaga

SEQ ID NO: 50062 - DNA, 19 bp, Homo sapiens
  siRNA target sequence for CPSF3 (NM_016207.2,779-797).
gctgctcttgattctagat

SEQ ID NO: 50063 - DNA, 19 bp, Homo sapiens
  siRNA target sequence for CPSF3 (NM_016207.2,815-833).
cccagaactacatgacatt

SEQ ID NO: 50064 - DNA, 19 bp, Homo sapiens
  siRNA target sequence for CPSF3 (NM_016207.2,819-837).
gaactacatgacattccaa

SEQ ID NO: 50065 - DNA, 19 bp, Homo sapiens
  siRNA target sequence for CPSF3 (NM_016207.2,822-840).
ctacatgacattccaatat

SEQ ID NO: 50066 - DNA, 19 bp, Homo sapiens
  siRNA target sequence for CPSF3 (NM_016207.2,872-890).
ggcagtgtaccagacatat

SEQ ID NO: 50067 - DNA, 19 bp, Homo sapiens
  siRNA target sequence for CPSF3 (NM_016207.2,906-924).
gacaaaatccgcaaacaga

SEQ ID NO: 50068 - DNA, 19 bp, Homo sapiens
  siRNA target sequence for CPSF3 (NM_016207.2,915-933).
cgcaaacagatcaacatca

SEQ ID NO: 50069 - DNA, 19 bp, Homo sapiens
  siRNA target sequence for CPSF3 (NM_016207.2,966-984).
ctcaagagcatggatcatt

SEQ ID NO: 50070 - DNA, 19 bp, Homo sapiens
  siRNA target sequence for CPSF3 (NM_016207.2,1059-1077).
gaaagctggtgtactgata

SEQ ID NO: 50071 - DNA, 19 bp, Homo sapiens
  siRNA target sequence for CPSF3 (NM_016207.2,1091-1109).
cattatagcgggatactgt

SEQ ID NO: 50072 - DNA, 19 bp, Homo sapiens
  siRNA target sequence for CPSF3 (NM_016207.2,1136-1154).
catgtctgaacctgaagaa

SEQ ID NO: 50073 - DNA, 19 bp, Homo sapiens
  siRNA target sequence for CPSF3 (NM_016207.2,1216-1234).
cagctcacacggattacca

SEQ ID NO: 50074 - DNA, 19 bp, Homo sapiens
  siRNA target sequence for CPSF3 (NM_016207.2,1262-1280).
gaaaccgcctcatgtgatt

SEQ ID NO: 50075 - DNA, 19 bp, Homo sapiens
  siRNA target sequence for CPSF3 (NM_016207.2,1267-1285).
cgcctcatgtgattttagt

SEQ ID NO: 50076 - DNA, 19 bp, Homo sapiens
  siRNA target sequence for CPSF3 (NM_016207.2,1321-1339).
cagcactgattcgagaata

SEQ ID NO: 50077 - DNA, 19 bp, Homo sapiens
  siRNA target sequence for CPSF3 (NM_016207.2,1324-1342).
cactgattcgagaatatga

SEQ ID NO: 50078 - DNA, 19 bp, Homo sapiens
  siRNA target sequence for CPSF3 (NM_016207.2,1328-1346).
gattcgagaatatgaagat

SEQ ID NO: 50079 - DNA, 19 bp, Homo sapiens
  siRNA target sequence for CPSF3 (NM_016207.2,1425-1443).
gccaaggttatgggatttt

SEQ ID NO: 50080 - DNA, 19 bp, Homo sapiens
  siRNA target sequence for CPSF3 (NM_016207.2,1426-1444).
ccaaggttatgggattttt

SEQ ID NO: 50081 - DNA, 19 bp, Homo sapiens
  siRNA target sequence for CPSF3 (NM_016207.2,1427-1445).
caaggttatgggattttta

SEQ ID NO: 50082 - DNA, 19 bp, Homo sapiens
  siRNA target sequence for CPSF3 (NM_016207.2,1430-1448).
ggttatgggatttttagca

SEQ ID NO: 50083 - DNA, 19 bp, Homo sapiens
  siRNA target sequence for CPSF3 (NM_016207.2,1469-1487).
ccagcgggtctcaggaata

SEQ ID NO: 50084 - DNA, 19 bp, Homo sapiens
  siRNA target sequence for CPSF3 (NM_016207.2,1472-1490).
gcgggtctcaggaatactt

SEQ ID NO: 50085 - DNA, 19 bp, Homo sapiens
  siRNA target sequence for CPSF3 (NM_016207.2,1474-1492).
gggtctcaggaatacttgt

SEQ ID NO: 50086 - DNA, 19 bp, Homo sapiens
  siRNA target sequence for CPSF3 (NM_016207.2,1475-1493).
ggtctcaggaatacttgtt

SEQ ID NO: 50087 - DNA, 19 bp, Homo sapiens
  siRNA target sequence for CPSF3 (NM_016207.2,1478-1496).
ctcaggaatacttgttaaa

SEQ ID NO: 50088 - DNA, 19 bp, Homo sapiens
  siRNA target sequence for CPSF3 (NM_016207.2,1524-1542).
ccttgcgacctgtccaatt

SEQ ID NO: 50089 - DNA, 19 bp, Homo sapiens
  siRNA target sequence for CPSF3 (NM_016207.2,1525-1543).
cttgcgacctgtccaatta

SEQ ID NO: 50090 - DNA, 19 bp, Homo sapiens
  siRNA target sequence for CPSF3 (NM_016207.2,1529-1547).
cgacctgtccaattatact

SEQ ID NO: 50091 - DNA, 19 bp, Homo sapiens
  siRNA target sequence for CPSF3 (NM_016207.2,1588-1606).
catatactggtccctttaa

SEQ ID NO: 50092 - DNA, 19 bp, Homo sapiens
  siRNA target sequence for CPSF3 (NM_016207.2,1600-1618).
cctttaatttgctctgtta

SEQ ID NO: 50093 - DNA, 19 bp, Homo sapiens
  siRNA target sequence for CPSF3 (NM_016207.2,1714-1732).
caggcatggtggtattaga

SEQ ID NO: 50094 - DNA, 19 bp, Homo sapiens
  siRNA target sequence for CPSF3 (NM_016207.2,1716-1734).
ggcatggtggtattagaat

SEQ ID NO: 50095 - DNA, 19 bp, Homo sapiens
  siRNA target sequence for CPSF3 (NM_016207.2,1740-1758).
gcaaacccttctaatgata

SEQ ID NO: 50096 - DNA, 19 bp, Homo sapiens
  siRNA target sequence for CPSF3 (NM_016207.2,1883-1901).
catgctccaggacatattt

SEQ ID NO: 50097 - DNA, 19 bp, Homo sapiens
  siRNA target sequence for CPSF3 (NM_016207.2,1910-1928).
ctgtgtaagtgtaaaggat

SEQ ID NO: 50098 - DNA, 19 bp, Homo sapiens
  siRNA target sequence for CPSF3 (NM_016207.2,1980-1998).
gagacacggactgtagaat

SEQ ID NO: 50099 - DNA, 19 bp, Homo sapiens
  siRNA target sequence for CPSF3 (NM_016207.2,1982-2000).
gacacggactgtagaatgt

SEQ ID NO: 50100 - DNA, 19 bp, Homo sapiens
  siRNA target sequence for CPSF5 (NM_007006.1,114-132).
cctgtaccctcttaccaat

SEQ ID NO: 50101 - DNA, 19 bp, Homo sapiens
  siRNA target sequence for CPSF5 (NM_007006.1,115-133).
ctgtaccctcttaccaatt

SEQ ID NO: 50102 - DNA, 19 bp, Homo sapiens
  siRNA target sequence for CPSF5 (NM_007006.1,117-135).
gtaccctcttaccaattat

SEQ ID NO: 50103 - DNA, 19 bp, Homo sapiens
  siRNA target sequence for CPSF5 (NM_007006.1,120-138).
ccctcttaccaattatact

SEQ ID NO: 50104 - DNA, 19 bp, Homo sapiens
  siRNA target sequence for CPSF5 (NM_007006.1,121-139).
cctcttaccaattatactt

SEQ ID NO: 50105 - DNA, 19 bp, Homo sapiens
  siRNA target sequence for CPSF5 (NM_007006.1,195-213).
gcgcatgagggaagaattt

SEQ ID NO: 50106 - DNA, 19 bp, Homo sapiens
  siRNA target sequence for CPSF5 (NM_007006.1,236-254).
ctgtagaaggggttctgat

SEQ ID NO: 50107 - DNA, 19 bp, Homo sapiens
  siRNA target sequence for CPSF5 (NM_007006.1,267-285).
ccggctaccccatgtgtta

SEQ ID NO: 50108 - DNA, 19 bp, Homo sapiens
  siRNA target sequence for CPSF5 (NM_007006.1,289-307).
ctgcagctgggaacaactt

SEQ ID NO: 50109 - DNA, 19 bp, Homo sapiens
  siRNA target sequence for CPSF5 (NM_007006.1,295-313).
ctgggaacaactttcttca

SEQ ID NO: 50110 - DNA, 19 bp, Homo sapiens
  siRNA target sequence for CPSF5 (NM_007006.1,358-376).
ggactaaaacgcttaatga

SEQ ID NO: 50111 - DNA, 19 bp, Homo sapiens
  siRNA target sequence for CPSF5 (NM_007006.1,368-386).
gcttaatgacagagatact

SEQ ID NO: 50112 - DNA, 19 bp, Homo sapiens
  siRNA target sequence for CPSF5 (NM_007006.1,441-459).
ctggtggagaccaaatttt

SEQ ID NO: 50113 - DNA, 19 bp, Homo sapiens
  siRNA target sequence for CPSF5 (NM_007006.1,443-461).
ggtggagaccaaattttga

SEQ ID NO: 50114 - DNA, 19 bp, Homo sapiens
  siRNA target sequence for CPSF5 (NM_007006.1,444-462).
gtggagaccaaattttgaa

SEQ ID NO: 50115 - DNA, 19 bp, Homo sapiens
  siRNA target sequence for CPSF5 (NM_007006.1,502-520).
cctaaggaacataagaagt

SEQ ID NO: 50116 - DNA, 19 bp, Homo sapiens
  siRNA target sequence for CPSF5 (NM_007006.1,503-521).
ctaaggaacataagaagtt

SEQ ID NO: 50117 - DNA, 19 bp, Homo sapiens
  siRNA target sequence for CPSF5 (NM_007006.1,507-525).
ggaacataagaagttgttt

SEQ ID NO: 50118 - DNA, 19 bp, Homo sapiens
  siRNA target sequence for CPSF5 (NM_007006.1,583-601).
gctgcaccattgtttgaat

SEQ ID NO: 50119 - DNA, 19 bp, Homo sapiens
  siRNA target sequence for CPSF6 (NM_007007.1,69-87).
cggatgtcggcgaagagtt

SEQ ID NO: 50120 - DNA, 19 bp, Homo sapiens
  siRNA target sequence for CPSF6 (NM_007007.1,108-126).
gtgggcatgatcagataga

SEQ ID NO: 50121 - DNA, 19 bp, Homo sapiens
  siRNA target sequence for CPSF6 (NM_007007.1,110-128).
gggcatgatcagatagatt

SEQ ID NO: 50122 - DNA, 19 bp, Homo sapiens
  siRNA target sequence for CPSF6 (NM_007007.1,111-129).
ggcatgatcagatagattt

SEQ ID NO: 50123 - DNA, 19 bp, Homo sapiens
  siRNA target sequence for CPSF6 (NM_007007.1,130-148).
gtatgacgatgtcatatct

SEQ ID NO: 50124 - DNA, 19 bp, Homo sapiens
  siRNA target sequence for CPSF6 (NM_007007.1,171-189).
ccccagaagaccgagatta

SEQ ID NO: 50125 - DNA, 19 bp, Homo sapiens
  siRNA target sequence for CPSF6 (NM_007007.1,173-191).
ccagaagaccgagattaca

SEQ ID NO: 50126 - DNA, 19 bp, Homo sapiens
  siRNA target sequence for CPSF6 (NM_007007.1,174-192).
cagaagaccgagattacat

SEQ ID NO: 50127 - DNA, 19 bp, Homo sapiens
  siRNA target sequence for CPSF6 (NM_007007.1,183-201).
gagattacatggatactct

SEQ ID NO: 50128 - DNA, 19 bp, Homo sapiens
  siRNA target sequence for CPSF6 (NM_007007.1,485-503).
ggtcagaatcctgttgtaa

SEQ ID NO: 50129 - DNA, 19 bp, Homo sapiens
  siRNA target sequence for CPSF6 (NM_007007.1,497-515).
gttgtaactccatgcaata

SEQ ID NO: 50130 - DNA, 19 bp, Homo sapiens
  siRNA target sequence for CPSF6 (NM_007007.1,520-538).
gttcctgagtcaatttgaa

SEQ ID NO: 50131 - DNA, 19 bp, Homo sapiens
  siRNA target sequence for CPSF6 (NM_007007.1,1089-1107).
cgccagctccgcatgtgaa

SEQ ID NO: 50132 - DNA, 19 bp, Homo sapiens
  siRNA target sequence for CPSF6 (NM_007007.1,1135-1153).
cagtggcatgcctacatca

SEQ ID NO: 50133 - DNA, 19 bp, Homo sapiens
  siRNA target sequence for CPSF6 (NM_007007.1,1139-1157).
ggcatgcctacatcagata

SEQ ID NO: 50134 - DNA, 19 bp, Homo sapiens
  siRNA target sequence for CPSF6 (NM_007007.1,1188-1206).
ggcgacctccaccatatga

SEQ ID NO: 50135 - DNA, 19 bp, Homo sapiens
  siRNA target sequence for CPSF6 (NM_007007.1,1189-1207).
gcgacctccaccatatgat

SEQ ID NO: 50136 - DNA, 19 bp, Homo sapiens
  siRNA target sequence for CPSF6 (NM_007007.1,1190-1208).
cgacctccaccatatgata

SEQ ID NO: 50137 - DNA, 19 bp, Homo sapiens
  siRNA target sequence for CPSF6 (NM_007007.1,1376-1394).
ctggtaactgcaatttctt

SEQ ID NO: 50138 - DNA, 19 bp, Homo sapiens
  siRNA target sequence for CPSF6 (NM_007007.1,1392-1410).
ctttaattaaacaatccaa

SEQ ID NO: 50139 - DNA, 19 bp, Homo sapiens
  siRNA target sequence for CPSF6 (NM_007007.1,1424-1442).
gatcgttgcaaagttctta

SEQ ID NO: 50140 - DNA, 19 bp, Homo sapiens
  siRNA target sequence for CPSF6 (NM_007007.1,1469-1487).
ggaattgagtccaagtctt

SEQ ID NO: 50141 - DNA, 19 bp, Homo sapiens
  siRNA target sequence for CPSF6 (NM_007007.1,1470-1488).
gaattgagtccaagtctta

SEQ ID NO: 50142 - DNA, 19 bp, Homo sapiens
  siRNA target sequence for CPSF6 (NM_007007.1,1520-1538).
gagagggaccatagtagat

SEQ ID NO: 50143 - DNA, 19 bp, Homo sapiens
  siRNA target sequence for CPSF6 (NM_007007.1,1575-1593).
gagaccgtcatgacgatta

SEQ ID NO: 50144 - DNA, 19 bp, Homo sapiens
  siRNA target sequence for CPSF6 (NM_007007.1,1577-1595).
gaccgtcatgacgattatt

SEQ ID NO: 50145 - DNA, 19 bp, Homo sapiens
  siRNA target sequence for CPSF6 (NM_007007.1,1580-1598).
cgtcatgacgattattaca

SEQ ID NO: 50146 - DNA, 19 bp, Homo sapiens
  siRNA target sequence for CPSF6 (NM_007007.1,1663-1681).
ccgagagcgcgaatatcgt

SEQ ID NO: 50147 - DNA, 19 bp, Homo sapiens
  siRNA target sequence for CSL4 (NM_016046.2,13-31).
gcgccacctgtgagatact

SEQ ID NO: 50148 - DNA, 19 bp, Homo sapiens
  siRNA target sequence for CSL4 (NM_016046.2,41-59).
gcgaacgtctgtgtaactt

SEQ ID NO: 50149 - DNA, 19 bp, Homo sapiens
  siRNA target sequence for CSL4 (NM_016046.2,92-110).
cccgccacggctacatctt

SEQ ID NO: 50150 - DNA, 19 bp, Homo sapiens
  siRNA target sequence for CSL4 (NM_016046.2,93-111).
ccgccacggctacatcttt

SEQ ID NO: 50151 - DNA, 19 bp, Homo sapiens
  siRNA target sequence for CSL4 (NM_016046.2,94-112).
cgccacggctacatctttt

SEQ ID NO: 50152 - DNA, 19 bp, Homo sapiens
  siRNA target sequence for CSL4 (NM_016046.2,97-115).
cacggctacatcttttcgt

SEQ ID NO: 50153 - DNA, 19 bp, Homo sapiens
  siRNA target sequence for CSL4 (NM_016046.2,231-249).
ggtctctagcatcaattca

SEQ ID NO: 50154 - DNA, 19 bp, Homo sapiens
  siRNA target sequence for CSL4 (NM_016046.2,248-266).
cacgctttgccaaagtaca

SEQ ID NO: 50155 - DNA, 19 bp, Homo sapiens
  siRNA target sequence for CSL4 (NM_016046.2,251-269).
gctttgccaaagtacacat

SEQ ID NO: 50156 - DNA, 19 bp, Homo sapiens
  siRNA target sequence for CSL4 (NM_016046.2,281-299).
ggtccatgcctcttaagaa

SEQ ID NO: 50157 - DNA, 19 bp, Homo sapiens
  siRNA target sequence for CSL4 (NM_016046.2,314-332).
ctatccgcaaggaagatgt

SEQ ID NO: 50158 - DNA, 19 bp, Homo sapiens
  siRNA target sequence for CSL4 (NM_016046.2,328-346).
gatgtccgagcaactgaaa

SEQ ID NO: 50159 - DNA, 19 bp, Homo sapiens
  siRNA target sequence for CSL4 (NM_016046.2,530-548).
gccctaagacccacactaa

SEQ ID NO: 50160 - DNA, 19 bp, Homo sapiens
  siRNA target sequence for CSL4 (NM_016046.2,531-549).
ccctaagacccacactaaa

SEQ ID NO: 50161 - DNA, 19 bp, Homo sapiens
  siRNA target sequence for CSL4 (NM_016046.2,533-551).
ctaagacccacactaaaga

SEQ ID NO: 50162 - DNA, 19 bp, Homo sapiens
  siRNA target sequence for CSL4 (NM_016046.2,558-576).
gaaagtagcccgagtacaa

SEQ ID NO: 50163 - DNA, 19 bp, Homo sapiens
  siRNA target sequence for CSL4 (NM_016046.2,568-586).
cgagtacaacccgaattct

SEQ ID NO: 50164 - DNA, 19 bp, Homo sapiens
  siRNA target sequence for CSTF1 (NM_001324.1,235-253).
cattagccagctgctatat

SEQ ID NO: 50165 - DNA, 19 bp, Homo sapiens
  siRNA target sequence for CSTF1 (NM_001324.1,271-289).
cgccaatggcctcatcaat

SEQ ID NO: 50166 - DNA, 19 bp, Homo sapiens
  siRNA target sequence for CSTF1 (NM_001324.1,328-346).
gctcctgcatctcatcaaa

SEQ ID NO: 50167 - DNA, 19 bp, Homo sapiens
  siRNA target sequence for CSTF1 (NM_001324.1,369-387).
ccgcagttcagtatgcaat

SEQ ID NO: 50168 - DNA, 19 bp, Homo sapiens
  siRNA target sequence for CSTF1 (NM_001324.1,370-388).
cgcagttcagtatgcaatt

SEQ ID NO: 50169 - DNA, 19 bp, Homo sapiens
  siRNA target sequence for CSTF1 (NM_001324.1,383-401).
gcaattggtcgttcagata

SEQ ID NO: 50170 - DNA, 19 bp, Homo sapiens
  siRNA target sequence for CSTF1 (NM_001324.1,417-435).
cagggattgacctggaatt

SEQ ID NO: 50171 - DNA, 19 bp, Homo sapiens
  siRNA target sequence for CSTF1 (NM_001324.1,440-458).
gcagatgttcagactatgt

SEQ ID NO: 50172 - DNA, 19 bp, Homo sapiens
  siRNA target sequence for CSTF1 (NM_001324.1,486-504).
gctatgtcacatcacataa

SEQ ID NO: 50173 - DNA, 19 bp, Homo sapiens
  siRNA target sequence for CSTF1 (NM_001324.1,514-532).
ccgtgtagctacctatagt

SEQ ID NO: 50174 - DNA, 19 bp, Homo sapiens
  siRNA target sequence for CSTF1 (NM_001324.1,515-533).
cgtgtagctacctatagta

SEQ ID NO: 50175 - DNA, 19 bp, Homo sapiens
  siRNA target sequence for CSTF1 (NM_001324.1,536-554).
gatggacagttaatagcta

SEQ ID NO: 50176 - DNA, 19 bp, Homo sapiens
  siRNA target sequence for CSTF1 (NM_001324.1,559-577).
gtctgctgatgcttcgata

SEQ ID NO: 50177 - DNA, 19 bp, Homo sapiens
  siRNA target sequence for CSTF1 (NM_001324.1,563-581).
gctgatgcttcgataaaga

SEQ ID NO: 50178 - DNA, 19 bp, Homo sapiens
  siRNA target sequence for CSTF1 (NM_001324.1,564-582).
ctgatgcttcgataaagat

SEQ ID NO: 50179 - DNA, 19 bp, Homo sapiens
  siRNA target sequence for CSTF1 (NM_001324.1,620-638).
ccaatagaggtcatgatga

SEQ ID NO: 50180 - DNA, 19 bp, Homo sapiens
  siRNA target sequence for CSTF1 (NM_001324.1,637-655).
gaatgagaccgcacaacaa

SEQ ID NO: 50181 - DNA, 19 bp, Homo sapiens
  siRNA target sequence for CSTF1 (NM_001324.1,641-659).
gagaccgcacaacaaaata

SEQ ID NO: 50182 - DNA, 19 bp, Homo sapiens
  siRNA target sequence for CSTF1 (NM_001324.1,645-663).
ccgcacaacaaaatatgga

SEQ ID NO: 50183 - DNA, 19 bp, Homo sapiens
  siRNA target sequence for CSTF1 (NM_001324.1,646-664).
cgcacaacaaaatatggaa

SEQ ID NO: 50184 - DNA, 19 bp, Homo sapiens
  siRNA target sequence for CSTF1 (NM_001324.1,671-689).
ccagtgattcgaactcttt

SEQ ID NO: 50185 - DNA, 19 bp, Homo sapiens
  siRNA target sequence for CSTF1 (NM_001324.1,672-690).
cagtgattcgaactcttta

SEQ ID NO: 50186 - DNA, 19 bp, Homo sapiens
  siRNA target sequence for CSTF1 (NM_001324.1,759-777).
gggattatactcttaaatt

SEQ ID NO: 50187 - DNA, 19 bp, Homo sapiens
  siRNA target sequence for CSTF1 (NM_001324.1,760-778).
ggattatactcttaaatta

SEQ ID NO: 50188 - DNA, 19 bp, Homo sapiens
  siRNA target sequence for CSTF1 (NM_001324.1,900-918).
ctcttcgcctttatgatat

SEQ ID NO: 50189 - DNA, 19 bp, Homo sapiens
  siRNA target sequence for CSTF1 (NM_001324.1,902-920).
cttcgcctttatgatatca

SEQ ID NO: 50190 - DNA, 19 bp, Homo sapiens
  siRNA target sequence for CSTF1 (NM_001324.1,940-958).
ctcttgcaatcctcaagat

SEQ ID NO: 50191 - DNA, 19 bp, Homo sapiens
  siRNA target sequence for CSTF1 (NM_001324.1,942-960).
cttgcaatcctcaagatca

SEQ ID NO: 50192 - DNA, 19 bp, Homo sapiens
  siRNA target sequence for CSTF1 (NM_001324.1,945-963).
gcaatcctcaagatcaaca

SEQ ID NO: 50193 - DNA, 19 bp, Homo sapiens
  siRNA target sequence for CSTF1 (NM_001324.1,962-980).
cacaccgatgctatatgtt

SEQ ID NO: 50194 - DNA, 19 bp, Homo sapiens
  siRNA target sequence for CSTF1 (NM_001324.1,971-989).
gctatatgttccgttaatt

SEQ ID NO: 50195 - DNA, 19 bp, Homo sapiens
  siRNA target sequence for CSTF1 (NM_001324.1,972-990).
ctatatgttccgttaatta

SEQ ID NO: 50196 - DNA, 19 bp, Homo sapiens
  siRNA target sequence for CSTF1 (NM_001324.1,982-1000).
cgttaattacaattctagt

SEQ ID NO: 50197 - DNA, 19 bp, Homo sapiens
  siRNA target sequence for CSTF1 (NM_001324.1,1048-1066).
ggatggtgtttcaaatcga

SEQ ID NO: 50198 - DNA, 19 bp, Homo sapiens
  siRNA target sequence for CSTF1 (NM_001324.1,1069-1087).
catcacaacttttgagaaa

SEQ ID NO: 50199 - DNA, 19 bp, Homo sapiens
  siRNA target sequence for CSTF1 (NM_001324.1,1160-1178).
gactctgtagctaaacttt

SEQ ID NO: 50200 - DNA, 19 bp, Homo sapiens
  siRNA target sequence for CSTF1 (NM_001324.1,1196-1214).
cgaacactggtcagataca

SEQ ID NO: 50201 - DNA, 19 bp, Homo sapiens
  siRNA target sequence for CSTF1 (NM_001324.1,1247-1265).
cggacacaggctgtgttta

SEQ ID NO: 50202 - DNA, 19 bp, Homo sapiens
  siRNA target sequence for CSTF1 (NM_001324.1,1251-1269).
cacaggctgtgtttaacca

SEQ ID NO: 50203 - DNA, 19 bp, Homo sapiens
  siRNA target sequence for CSTF1 (NM_001324.1,1268-1286).
cacaccgaggactatgtgt

SEQ ID NO: 50204 - DNA, 19 bp, Homo sapiens
  siRNA target sequence for CSTF1 (NM_001324.1,1298-1316).
gagaggacgatcagtcttt

SEQ ID NO: 50205 - DNA, 19 bp, Homo sapiens
  siRNA target sequence for CSTF1 (NM_001324.1,1357-1375).
gtcgttggggcacaacaat

SEQ ID NO: 50206 - DNA, 19 bp, Homo sapiens
  siRNA target sequence for CSTF1 (NM_001324.1,1359-1377).
cgttggggcacaacaatat

SEQ ID NO: 50207 - DNA, 19 bp, Homo sapiens
  siRNA target sequence for CSTF2 (NM_001325.1,113-131).
cagttgaaggacatctttt

SEQ ID NO: 50208 - DNA, 19 bp, Homo sapiens
  siRNA target sequence for CSTF2 (NM_001325.1,134-152).
gaggttggacctgttgtta

SEQ ID NO: 50209 - DNA, 19 bp, Homo sapiens
  siRNA target sequence for CSTF2 (NM_001325.1,140-158).
ggacctgttgttagtttca

SEQ ID NO: 50210 - DNA, 19 bp, Homo sapiens
  siRNA target sequence for CSTF2 (NM_001325.1,149-167).
gttagtttcagattggtat

SEQ ID NO: 50211 - DNA, 19 bp, Homo sapiens
  siRNA target sequence for CSTF2 (NM_001325.1,153-171).
gtttcagattggtatacga

SEQ ID NO: 50212 - DNA, 19 bp, Homo sapiens
  siRNA target sequence for CSTF2 (NM_001325.1,393-411).
cccctgagtccattagcaa

SEQ ID NO: 50213 - DNA, 19 bp, Homo sapiens
  siRNA target sequence for CSTF2 (NM_001325.1,394-412).
ccctgagtccattagcaaa

SEQ ID NO: 50214 - DNA, 19 bp, Homo sapiens
  siRNA target sequence for CSTF2 (NM_001325.1,466-484).
gctctgtgtccagaatagt

SEQ ID NO: 50215 - DNA, 19 bp, Homo sapiens
  siRNA target sequence for CSTF2 (NM_001325.1,488-506).
caggaggcacggaacatgt

SEQ ID NO: 50216 - DNA, 19 bp, Homo sapiens
  siRNA target sequence for CSTF2 (NM_001325.1,490-508).
ggaggcacggaacatgtta

SEQ ID NO: 50217 - DNA, 19 bp, Homo sapiens
  siRNA target sequence for CSTF2 (NM_001325.1,493-511).
ggcacggaacatgttactt

SEQ ID NO: 50218 - DNA, 19 bp, Homo sapiens
  siRNA target sequence for CSTF2 (NM_001325.1,593-611).
ctgcatcgccagacaaata

SEQ ID NO: 50219 - DNA, 19 bp, Homo sapiens
  siRNA target sequence for CSTF2 (NM_001325.1,658-676).
gcctggctcaggatccaat

SEQ ID NO: 50220 - DNA, 19 bp, Homo sapiens
  siRNA target sequence for CSTF2 (NM_001325.1,666-684).
caggatccaatgtgtcaat

SEQ ID NO: 50221 - DNA, 19 bp, Homo sapiens
  siRNA target sequence for CSTF2 (NM_001325.1,668-686).
ggatccaatgtgtcaatga

SEQ ID NO: 50222 - DNA, 19 bp, Homo sapiens
  siRNA target sequence for CSTF2 (NM_001325.1,669-687).
gatccaatgtgtcaatgaa

SEQ ID NO: 50223 - DNA, 19 bp, Homo sapiens
  siRNA target sequence for CSTF2 (NM_001325.1,718-736).
gtctttgggtggaatgcat

SEQ ID NO: 50224 - DNA, 19 bp, Homo sapiens
  siRNA target sequence for CSTF2 (NM_001325.1,724-742).
gggtggaatgcatgtcaat

SEQ ID NO: 50225 - DNA, 19 bp, Homo sapiens
  siRNA target sequence for CSTF2 (NM_001325.1,1014-1032).
gaggcactttactttctgt

SEQ ID NO: 50226 - DNA, 19 bp, Homo sapiens
  siRNA target sequence for CSTF2 (NM_001325.1,1119-1137).
gaccacccccacatgaact

SEQ ID NO: 50227 - DNA, 19 bp, Homo sapiens
  siRNA target sequence for CSTF2 (NM_001325.1,1236-1254).
gggatccccgaggaataga

SEQ ID NO: 50228 - DNA, 19 bp, Homo sapiens
  siRNA target sequence for CSTF2 (NM_001325.1,1237-1255).
ggatccccgaggaatagat

SEQ ID NO: 50229 - DNA, 19 bp, Homo sapiens
  siRNA target sequence for CSTF2 (NM_001325.1,1294-1312).
gttagatgccagaggatta

SEQ ID NO: 50230 - DNA, 19 bp, Homo sapiens
  siRNA target sequence for CSTF2 (NM_001325.1,1441-1459).
ccccagaggacctatacct

SEQ ID NO: 50231 - DNA, 19 bp, Homo sapiens
  siRNA target sequence for CSTF2 (NM_001325.1,1472-1490).
ggtcccagtccaattaaca

SEQ ID NO: 50232 - DNA, 19 bp, Homo sapiens
  siRNA target sequence for CSTF2 (NM_001325.1,1473-1491).
gtcccagtccaattaacat

SEQ ID NO: 50233 - DNA, 19 bp, Homo sapiens
  siRNA target sequence for CSTF2 (NM_001325.1,1545-1563).
gaatgcaaggagcaagtat

SEQ ID NO: 50234 - DNA, 19 bp, Homo sapiens
  siRNA target sequence for CSTF2 (NM_001325.1,1576-1594).
ccagcctggcggctttagt

SEQ ID NO: 50235 - DNA, 19 bp, Homo sapiens
  siRNA target sequence for CSTF3 (NM_001326.1,183-201).
gtgaagaaagcggaaaaga

SEQ ID NO: 50236 - DNA, 19 bp, Homo sapiens
  siRNA target sequence for CSTF3 (NM_001326.1,256-274).
cacagaatcaacctataga

SEQ ID NO: 50237 - DNA, 19 bp, Homo sapiens
  siRNA target sequence for CSTF3 (NM_001326.1,273-291).
gacaaagcacggaagactt

SEQ ID NO: 50238 - DNA, 19 bp, Homo sapiens
  siRNA target sequence for CSTF3 (NM_001326.1,275-293).
caaagcacggaagacttat

SEQ ID NO: 50239 - DNA, 19 bp, Homo sapiens
  siRNA target sequence for CSTF3 (NM_001326.1,315-333).
cccagttctggcagattct

SEQ ID NO: 50240 - DNA, 19 bp, Homo sapiens
  siRNA target sequence for CSTF3 (NM_001326.1,403-421).
gccttatgaaggttttgca

SEQ ID NO: 50241 - DNA, 19 bp, Homo sapiens
  siRNA target sequence for CSTF3 (NM_001326.1,448-466).
catatgtccgagaaaccaa

SEQ ID NO: 50242 - DNA, 19 bp, Homo sapiens
  siRNA target sequence for CSTF3 (NM_001326.1,457-475).
gagaaaccaagggtaaact

SEQ ID NO: 50243 - DNA, 19 bp, Homo sapiens
  siRNA target sequence for CSTF3 (NM_001326.1,468-486).
ggtaaactaccaagttaca

SEQ ID NO: 50244 - DNA, 19 bp, Homo sapiens
  siRNA target sequence for CSTF3 (NM_001326.1,552-570).
cagatttgggtggattaca

SEQ ID NO: 50245 - DNA, 19 bp, Homo sapiens
  siRNA target sequence for CSTF3 (NM_001326.1,628-646).
cagctgtccgaagagttta

SEQ ID NO: 50246 - DNA, 19 bp, Homo sapiens
  siRNA target sequence for CSTF3 (NM_001326.1,631-649).
ctgtccgaagagtttatca

SEQ ID NO: 50247 - DNA, 19 bp, Homo sapiens
  siRNA target sequence for CSTF3 (NM_001326.1,658-676).
gtgttaatccgatgatcaa

SEQ ID NO: 50248 - DNA, 19 bp, Homo sapiens
  siRNA target sequence for CSTF3 (NM_001326.1,660-678).
gttaatccgatgatcaaca

SEQ ID NO: 50249 - DNA, 19 bp, Homo sapiens
  siRNA target sequence for CSTF3 (NM_001326.1,667-685).
cgatgatcaacattgaaca

SEQ ID NO: 50250 - DNA, 19 bp, Homo sapiens
  siRNA target sequence for CSTF3 (NM_001326.1,684-702).
cagctctggagagactata

SEQ ID NO: 50251 - DNA, 19 bp, Homo sapiens
  siRNA target sequence for CSTF3 (NM_001326.1,691-709).
ggagagactataacaagta

SEQ ID NO: 50252 - DNA, 19 bp, Homo sapiens
  siRNA target sequence for CSTF3 (NM_001326.1,707-725).
gtatgaagagggtatcaat

SEQ ID NO: 50253 - DNA, 19 bp, Homo sapiens
  siRNA target sequence for CSTF3 (NM_001326.1,757-775).
ggagtagagattatatgaa

SEQ ID NO: 50254 - DNA, 19 bp, Homo sapiens
  siRNA target sequence for CSTF3 (NM_001326.1,781-799).
gacgtgtagcaaaggaata

SEQ ID NO: 50255 - DNA, 19 bp, Homo sapiens
  siRNA target sequence for CSTF3 (NM_001326.1,839-857).
ggtgcctcctcagaatact

SEQ ID NO: 50256 - DNA, 19 bp, Homo sapiens
  siRNA target sequence for CSTF3 (NM_001326.1,930-948).
gaggatcagacccttataa

SEQ ID NO: 50257 - DNA, 19 bp, Homo sapiens
  siRNA target sequence for CSTF3 (NM_001326.1,932-950).
ggatcagacccttataaca

SEQ ID NO: 50258 - DNA, 19 bp, Homo sapiens
  siRNA target sequence for CSTF3 (NM_001326.1,938-956).
gacccttataacaaaaaga

SEQ ID NO: 50259 - DNA, 19 bp, Homo sapiens
  siRNA target sequence for CSTF3 (NM_001326.1,940-958).
cccttataacaaaaagagt

SEQ ID NO: 50260 - DNA, 19 bp, Homo sapiens
  siRNA target sequence for CSTF3 (NM_001326.1,941-959).
ccttataacaaaaagagtt

SEQ ID NO: 50261 - DNA, 19 bp, Homo sapiens
  siRNA target sequence for CSTF3 (NM_001326.1,955-973).
gagttatgtttgcttatga

SEQ ID NO: 50262 - DNA, 19 bp, Homo sapiens
  siRNA target sequence for CSTF3 (NM_001326.1,996-1014).
catcaccctgatatttggt

SEQ ID NO: 50263 - DNA, 19 bp, Homo sapiens
  siRNA target sequence for CSTF3 (NM_001326.1,1001-1019).
ccctgatatttggtatgaa

SEQ ID NO: 50264 - DNA, 19 bp, Homo sapiens
  siRNA target sequence for CSTF3 (NM_001326.1,1082-1100).
caaattatttagtgatgaa

SEQ ID NO: 50265 - DNA, 19 bp, Homo sapiens
  siRNA target sequence for CSTF3 (NM_001326.1,1095-1113).
gatgaagctgctaatatat

SEQ ID NO: 50266 - DNA, 19 bp, Homo sapiens
  siRNA target sequence for CSTF3 (NM_001326.1,1179-1197).
gaagagagtcgcatgaagt

SEQ ID NO: 50267 - DNA, 19 bp, Homo sapiens
  siRNA target sequence for CSTF3 (NM_001326.1,1248-1266).
gaccctaccttggtatata

SEQ ID NO: 50268 - DNA, 19 bp, Homo sapiens
  siRNA target sequence for CSTF3 (NM_001326.1,1252-1270).
ctaccttggtatatatcca

SEQ ID NO: 50269 - DNA, 19 bp, Homo sapiens
  siRNA target sequence for CSTF3 (NM_001326.1,1268-1286).
ccaatatatgaaatttgca

SEQ ID NO: 50270 - DNA, 19 bp, Homo sapiens
  siRNA target sequence for CSTF3 (NM_001326.1,1351-1369).
cccgccaccatgtctatgt

SEQ ID NO: 50271 - DNA, 19 bp, Homo sapiens
  siRNA target sequence for CSTF3 (NM_001326.1,1352-1370).
ccgccaccatgtctatgtt

SEQ ID NO: 50272 - DNA, 19 bp, Homo sapiens
  siRNA target sequence for CSTF3 (NM_001326.1,1353-1371).
cgccaccatgtctatgtta

SEQ ID NO: 50273 - DNA, 19 bp, Homo sapiens
  siRNA target sequence for CSTF3 (NM_001326.1,1355-1373).
ccaccatgtctatgttact

SEQ ID NO: 50274 - DNA, 19 bp, Homo sapiens
  siRNA target sequence for CSTF3 (NM_001326.1,1377-1395).
gcactcatggaatattact

SEQ ID NO: 50275 - DNA, 19 bp, Homo sapiens
  siRNA target sequence for CSTF3 (NM_001326.1,1431-1449).
gagctggggctaaaaaaat

SEQ ID NO: 50276 - DNA, 19 bp, Homo sapiens
  siRNA target sequence for CSTF3 (NM_001326.1,1433-1451).
gctggggctaaaaaaatat

SEQ ID NO: 50277 - DNA, 19 bp, Homo sapiens
  siRNA target sequence for CSTF3 (NM_001326.1,1436-1454).
ggggctaaaaaaatatgga

SEQ ID NO: 50278 - DNA, 19 bp, Homo sapiens
  siRNA target sequence for CSTF3 (NM_001326.1,1453-1471).
gagacattccagagtatgt

SEQ ID NO: 50279 - DNA, 19 bp, Homo sapiens
  siRNA target sequence for CSTF3 (NM_001326.1,1470-1488).
gtcctggcctatattgact

SEQ ID NO: 50280 - DNA, 19 bp, Homo sapiens
  siRNA target sequence for CSTF3 (NM_001326.1,1472-1490).
cctggcctatattgactat

SEQ ID NO: 50281 - DNA, 19 bp, Homo sapiens
  siRNA target sequence for CSTF3 (NM_001326.1,1476-1494).
gcctatattgactatcttt

SEQ ID NO: 50282 - DNA, 19 bp, Homo sapiens
  siRNA target sequence for CSTF3 (NM_001326.1,1497-1515).
cacctcaatgaggacaata

SEQ ID NO: 50283 - DNA, 19 bp, Homo sapiens
  siRNA target sequence for CSTF3 (NM_001326.1,1499-1517).
cctcaatgaggacaataat

SEQ ID NO: 50284 - DNA, 19 bp, Homo sapiens
  siRNA target sequence for CSTF3 (NM_001326.1,1588-1606).
cccgatttctagcatttga

SEQ ID NO: 50285 - DNA, 19 bp, Homo sapiens
  siRNA target sequence for CSTF3 (NM_001326.1,1620-1638).
gatctagctagtatactca

SEQ ID NO: 50286 - DNA, 19 bp, Homo sapiens
  siRNA target sequence for CSTF3 (NM_001326.1,1654-1672).
ggtttacagcattcaaaga

SEQ ID NO: 50287 - DNA, 19 bp, Homo sapiens
  siRNA target sequence for CSTF3 (NM_001326.1,1694-1712).
ggctttactagtagataga

SEQ ID NO: 50288 - DNA, 19 bp, Homo sapiens
  siRNA target sequence for CSTF3 (NM_001326.1,1695-1713).
gctttactagtagatagat

SEQ ID NO: 50289 - DNA, 19 bp, Homo sapiens
  siRNA target sequence for CSTF3 (NM_001326.1,1696-1714).
ctttactagtagatagata

SEQ ID NO: 50290 - DNA, 19 bp, Homo sapiens
  siRNA target sequence for CSTF3 (NM_001326.1,1701-1719).
ctagtagatagatacaagt

SEQ ID NO: 50291 - DNA, 19 bp, Homo sapiens
  siRNA target sequence for CSTF3 (NM_001326.1,1711-1729).
gatacaagttcatggattt

SEQ ID NO: 50292 - DNA, 19 bp, Homo sapiens
  siRNA target sequence for CSTF3 (NM_001326.1,1715-1733).
caagttcatggatttatat

SEQ ID NO: 50293 - DNA, 19 bp, Homo sapiens
  siRNA target sequence for CSTF3 (NM_001326.1,1734-1752).
ccttgctctgcaagtgaat

SEQ ID NO: 50294 - DNA, 19 bp, Homo sapiens
  siRNA target sequence for CSTF3 (NM_001326.1,1785-1803).
gctaagctagcagctataa

SEQ ID NO: 50295 - DNA, 19 bp, Homo sapiens
  siRNA target sequence for CSTF3 (NM_001326.1,1786-1804).
ctaagctagcagctataat

SEQ ID NO: 50296 - DNA, 19 bp, Homo sapiens
  siRNA target sequence for CSTF3 (NM_001326.1,1828-1846).
ctatagtgcctgttctgaa

SEQ ID NO: 50297 - DNA, 19 bp, Homo sapiens
  siRNA target sequence for CSTF3 (NM_001326.1,1974-1992).
gcagctgttgttttaatga

SEQ ID NO: 50298 - DNA, 19 bp, Homo sapiens
  siRNA target sequence for CSTF3 (NM_001326.1,2018-2036).
ccagggtccttttgtacaa

SEQ ID NO: 50299 - DNA, 19 bp, Homo sapiens
  siRNA target sequence for CSTF3 (NM_001326.1,2061-2079).
cgaagatgcaagataccaa

SEQ ID NO: 50300 - DNA, 19 bp, Homo sapiens
  siRNA target sequence for CSTF3 (NM_001326.1,2068-2086).
gcaagataccaaatactgt

SEQ ID NO: 50301 - DNA, 19 bp, Homo sapiens
  siRNA target sequence for CSTF3 (NM_001326.1,2188-2206).
ggcccaacgaggattcaga

SEQ ID NO: 50302 - DNA, 19 bp, Homo sapiens
  siRNA target sequence for CSTF3 (NM_001326.1,2189-2207).
gcccaacgaggattcagat

SEQ ID NO: 50303 - DNA, 19 bp, Homo sapiens
  siRNA target sequence for CSTF3 (NM_001326.1,2228-2246).
cgttgtcccccctgttcat

SEQ ID NO: 50304 - DNA, 19 bp, Homo sapiens
  siRNA target sequence for CSTF3 (NM_001326.1,2234-2252).
cccccctgttcatgacatt

SEQ ID NO: 50305 - DNA, 19 bp, Homo sapiens
  siRNA target sequence for CSTF3 (NM_001326.1,2235-2253).
ccccctgttcatgacattt

SEQ ID NO: 50306 - DNA, 19 bp, Homo sapiens
  siRNA target sequence for CUGBP1 (NM_006560.2,178-196).
cagaccaaccagatcttga

SEQ ID NO: 50307 - DNA, 19 bp, Homo sapiens
  siRNA target sequence for CUGBP1 (NM_006560.2,187-205).
cagatcttgatgctatcaa

SEQ ID NO: 50308 - DNA, 19 bp, Homo sapiens
  siRNA target sequence for CUGBP1 (NM_006560.2,254-272).
ggaactcttcgaacagtat

SEQ ID NO: 50309 - DNA, 19 bp, Homo sapiens
  siRNA target sequence for CUGBP1 (NM_006560.2,328-346).
gcaaagggtgctgttttgt

SEQ ID NO: 50310 - DNA, 19 bp, Homo sapiens
  siRNA target sequence for CUGBP1 (NM_006560.2,329-347).
caaagggtgctgttttgtt

SEQ ID NO: 50311 - DNA, 19 bp, Homo sapiens
  siRNA target sequence for CUGBP1 (NM_006560.2,359-377).
ccgtaaagctgcattagaa

SEQ ID NO: 50312 - DNA, 19 bp, Homo sapiens
  siRNA target sequence for CUGBP1 (NM_006560.2,415-433).
ggatgcatcaccctataca

SEQ ID NO: 50313 - DNA, 19 bp, Homo sapiens
  siRNA target sequence for CUGBP1 (NM_006560.2,476-494).
caggaagctgtttattggt

SEQ ID NO: 50314 - DNA, 19 bp, Homo sapiens
  siRNA target sequence for CUGBP1 (NM_006560.2,544-562).
cgtttggacagattgaaga

SEQ ID NO: 50315 - DNA, 19 bp, Homo sapiens
  siRNA target sequence for CUGBP1 (NM_006560.2,595-613).
gccgaggttgtgcatttgt

SEQ ID NO: 50316 - DNA, 19 bp, Homo sapiens
  siRNA target sequence for CUGBP1 (NM_006560.2,688-706).
catcacccatggtggtaaa

SEQ ID NO: 50317 - DNA, 19 bp, Homo sapiens
  siRNA target sequence for CUGBP1 (NM_006560.2,701-719).
ggtaaaatttgctgataca

SEQ ID NO: 50318 - DNA, 19 bp, Homo sapiens
  siRNA target sequence for CUGBP1 (NM_006560.2,799-817).
gaaaccttgctggtctaaa

SEQ ID NO: 50319 - DNA, 19 bp, Homo sapiens
  siRNA target sequence for CUGBP1 (NM_006560.2,803-821).
ccttgctggtctaaatact

SEQ ID NO: 50320 - DNA, 19 bp, Homo sapiens
  siRNA target sequence for CUGBP1 (NM_006560.2,896-914).
cccaatgggagggttgaat

SEQ ID NO: 50321 - DNA, 19 bp, Homo sapiens
  siRNA target sequence for CUGBP1 (NM_006560.2,916-934).
caatgcagttacagaattt

SEQ ID NO: 50322 - DNA, 19 bp, Homo sapiens
  siRNA target sequence for CUGBP1 (NM_006560.2,971-989).
cacaccaagtggtaccaat

SEQ ID NO: 50323 - DNA, 19 bp, Homo sapiens
  siRNA target sequence for CUGBP1 (NM_006560.2,1014-1032).
ctcagcgtgctcactagtt

SEQ ID NO: 50324 - DNA, 19 bp, Homo sapiens
  siRNA target sequence for CUGBP1 (NM_006560.2,1114-1132).
caacggctggcctcaatgt

SEQ ID NO: 50325 - DNA, 19 bp, Homo sapiens
  siRNA target sequence for CUGBP1 (NM_006560.2,1144-1162).
caggaatggctgctttaaa

SEQ ID NO: 50326 - DNA, 19 bp, Homo sapiens
  siRNA target sequence for CUGBP1 (NM_006560.2,1232-1250).
ctcgggtatccagcaatat

SEQ ID NO: 50327 - DNA, 19 bp, Homo sapiens
  siRNA target sequence for CUGBP1 (NM_006560.2,1235-1253).
gggtatccagcaatatgct

SEQ ID NO: 50328 - DNA, 19 bp, Homo sapiens
  siRNA target sequence for CUGBP1 (NM_006560.2,1270-1288).
ctctgtacaaccagaatct

SEQ ID NO: 50329 - DNA, 19 bp, Homo sapiens
  siRNA target sequence for CUGBP1 (NM_006560.2,1292-1310).
gacacagcagagtattggt

SEQ ID NO: 50330 - DNA, 19 bp, Homo sapiens
  siRNA target sequence for CUGBP1 (NM_006560.2,1342-1360).
gagccaacctgttcatcta

SEQ ID NO: 50331 - DNA, 19 bp, Homo sapiens
  siRNA target sequence for CUGBP1 (NM_006560.2,1389-1407).
gacctgctgcagatgttta

SEQ ID NO: 50332 - DNA, 19 bp, Homo sapiens
  siRNA target sequence for CUGBP1 (NM_006560.2,1429-1447).
ctgccaaggttttcataga

SEQ ID NO: 50333 - DNA, 19 bp, Homo sapiens
  siRNA target sequence for CUGBP1 (NM_006560.2,1432-1450).
ccaaggttttcatagacaa

SEQ ID NO: 50334 - DNA, 19 bp, Homo sapiens
  siRNA target sequence for CUGBP2 (NM_006561.1,55-73).
gctcgttcctgacagaatt

SEQ ID NO: 50335 - DNA, 19 bp, Homo sapiens
  siRNA target sequence for CUGBP2 (NM_006561.1,56-74).
ctcgttcctgacagaatta

SEQ ID NO: 50336 - DNA, 19 bp, Homo sapiens
  siRNA target sequence for CUGBP2 (NM_006561.1,128-146).
ccagatgccattaagatgt

SEQ ID NO: 50337 - DNA, 19 bp, Homo sapiens
  siRNA target sequence for CUGBP2 (NM_006561.1,210-228).
gagccgtctaccagatcaa

SEQ ID NO: 50338 - DNA, 19 bp, Homo sapiens
  siRNA target sequence for CUGBP2 (NM_006561.1,250-268).
gaaccctccgcagagtaaa

SEQ ID NO: 50339 - DNA, 19 bp, Homo sapiens
  siRNA target sequence for CUGBP2 (NM_006561.1,260-278).
cagagtaaaggttgttgtt

SEQ ID NO: 50340 - DNA, 19 bp, Homo sapiens
  siRNA target sequence for CUGBP2 (NM_006561.1,269-287).
ggttgttgtttcgtaacat

SEQ ID NO: 50341 - DNA, 19 bp, Homo sapiens
  siRNA target sequence for CUGBP2 (NM_006561.1,270-288).
gttgttgtttcgtaacatt

SEQ ID NO: 50342 - DNA, 19 bp, Homo sapiens
  siRNA target sequence for CUGBP2 (NM_006561.1,280-298).
cgtaacattttatacaaga

SEQ ID NO: 50343 - DNA, 19 bp, Homo sapiens
  siRNA target sequence for CUGBP2 (NM_006561.1,317-335).
cagaatgcactgcacaata

SEQ ID NO: 50344 - DNA, 19 bp, Homo sapiens
  siRNA target sequence for CUGBP2 (NM_006561.1,377-395).
cctgcagatagtgaaaagt

SEQ ID NO: 50345 - DNA, 19 bp, Homo sapiens
  siRNA target sequence for CUGBP2 (NM_006561.1,438-456).
cgaagaaatgtaatgagaa

SEQ ID NO: 50346 - DNA, 19 bp, Homo sapiens
  siRNA target sequence for CUGBP2 (NM_006561.1,458-476).
gacatcagggtgatgttct

SEQ ID NO: 50347 - DNA, 19 bp, Homo sapiens
  siRNA target sequence for CUGBP2 (NM_006561.1,480-498).
catttggccagatagaaga

SEQ ID NO: 50348 - DNA, 19 bp, Homo sapiens
  siRNA target sequence for CUGBP2 (NM_006561.1,627-645).
cacctatcgtggtgaagtt

SEQ ID NO: 50349 - DNA, 19 bp, Homo sapiens
  siRNA target sequence for CUGBP2 (NM_006561.1,835-853).
ggcaggcatgaatgcttta

SEQ ID NO: 50350 - DNA, 19 bp, Homo sapiens
  siRNA target sequence for CUGBP2 (NM_006561.1,1001-1019).
gctggtgcagccatgaact

SEQ ID NO: 50351 - DNA, 19 bp, Homo sapiens
  siRNA target sequence for CUGBP2 (NM_006561.1,1058-1076).
gccactgttggactgaata

SEQ ID NO: 50352 - DNA, 19 bp, Homo sapiens
  siRNA target sequence for CUGBP2 (NM_006561.1,1059-1077).
ccactgttggactgaataa

SEQ ID NO: 50353 - DNA, 19 bp, Homo sapiens
  siRNA target sequence for CUGBP2 (NM_006561.1,1060-1078).
cactgttggactgaataat

SEQ ID NO: 50354 - DNA, 19 bp, Homo sapiens
  siRNA target sequence for CUGBP2 (NM_006561.1,1192-1210).
ggcctactcaggaattcaa

SEQ ID NO: 50355 - DNA, 19 bp, Homo sapiens
  siRNA target sequence for CUGBP2 (NM_006561.1,1194-1212).
cctactcaggaattcaaca

SEQ ID NO: 50356 - DNA, 19 bp, Homo sapiens
  siRNA target sequence for CUGBP2 (NM_006561.1,1305-1323).
caaacctctttatttacca

SEQ ID NO: 50357 - DNA, 19 bp, Homo sapiens
  siRNA target sequence for CUGBP2 (NM_006561.1,1324-1342).
ccttccacaggaatttgga

SEQ ID NO: 50358 - DNA, 19 bp, Homo sapiens
  siRNA target sequence for CUGBP2 (NM_006561.1,1391-1409).
gctaaagtcttcattgaca

SEQ ID NO: 50359 - DNA, 19 bp, Homo sapiens
  siRNA target sequence for CUGBP2 (NM_006561.1,1392-1410).
ctaaagtcttcattgacaa

SEQ ID NO: 50360 - DNA, 19 bp, Homo sapiens
  siRNA target sequence for DAZAP1 (NM_018959.2,261-279).
gactctgcgcagctacttt

SEQ ID NO: 50361 - DNA, 19 bp, Homo sapiens
  siRNA target sequence for DAZAP1 (NM_018959.2,273-291).
ctacttttcccaatatgga

SEQ ID NO: 50362 - DNA, 19 bp, Homo sapiens
  siRNA target sequence for DAZAP1 (NM_018959.2,290-308).
gagaagtcgtagattgtgt

SEQ ID NO: 50363 - DNA, 19 bp, Homo sapiens
  siRNA target sequence for DAZAP1 (NM_018959.2,295-313).
gtcgtagattgtgttatca

SEQ ID NO: 50364 - DNA, 19 bp, Homo sapiens
  siRNA target sequence for DAZAP1 (NM_018959.2,298-316).
gtagattgtgttatcatga

SEQ ID NO: 50365 - DNA, 19 bp, Homo sapiens
  siRNA target sequence for DAZAP1 (NM_018959.2,410-428).
cgctagatggccgaaacat

SEQ ID NO: 50366 - DNA, 19 bp, Homo sapiens
  siRNA target sequence for DAZAP1 (NM_018959.2,499-517).
ggacccaggagcgataaca

SEQ ID NO: 50367 - DNA, 19 bp, Homo sapiens
  siRNA target sequence for DAZAP1 (NM_018959.2,502-520).
cccaggagcgataacagta

SEQ ID NO: 50368 - DNA, 19 bp, Homo sapiens
  siRNA target sequence for DAZAP1 (NM_018959.2,503-521).
ccaggagcgataacagtaa

SEQ ID NO: 50369 - DNA, 19 bp, Homo sapiens
  siRNA target sequence for DAZAP1 (NM_018959.2,509-527).
gcgataacagtaaatcaaa

SEQ ID NO: 50370 - DNA, 19 bp, Homo sapiens
  siRNA target sequence for DAZAP1 (NM_018959.2,540-558).
cggtggaattcctcacaat

SEQ ID NO: 50371 - DNA, 19 bp, Homo sapiens
  siRNA target sequence for DAZAP1 (NM_018959.2,578-596).
gggaatacttcaagaagtt

SEQ ID NO: 50372 - DNA, 19 bp, Homo sapiens
  siRNA target sequence for DAZAP1 (NM_018959.2,608-626).
cggaggtagtcatgatcta

SEQ ID NO: 50373 - DNA, 19 bp, Homo sapiens
  siRNA target sequence for DAZAP1 (NM_018959.2,609-627).
ggaggtagtcatgatctat

SEQ ID NO: 50374 - DNA, 19 bp, Homo sapiens
  siRNA target sequence for DAZAP1 (NM_018959.2,649-667).
cgaggttttggatttatta

SEQ ID NO: 50375 - DNA, 19 bp, Homo sapiens
  siRNA target sequence for DAZAP1 (NM_018959.2,694-712).
caggctgtcaacatgcatt

SEQ ID NO: 50376 - DNA, 19 bp, Homo sapiens
  siRNA target sequence for DAZAP1 (NM_018959.2,696-714).
ggctgtcaacatgcatttt

SEQ ID NO: 50377 - DNA, 19 bp, Homo sapiens
  siRNA target sequence for DAZAP1 (NM_018959.2,860-878).
ccacgtggcagcaaggata

SEQ ID NO: 50378 - DNA, 19 bp, Homo sapiens
  siRNA target sequence for DAZAP1 (NM_018959.2,1082-1100).
ctccaccgccagatcagtt

SEQ ID NO: 50379 - DNA, 19 bp, Homo sapiens
  siRNA target sequence for DAZAP1 (NM_018959.2,1218-1236).
cttcccctatggtcagtat

SEQ ID NO: 50380 - DNA, 19 bp, Homo sapiens
  siRNA target sequence for DAZAP1 (NM_170711.1,1233-1251).
gtatggcctgggttcctat

SEQ ID NO: 50381 - DNA, 19 bp, Homo sapiens
  siRNA target sequence for DAZL (NM_001351.2,368-386).
caaccagccaaggctatat

SEQ ID NO: 50382 - DNA, 19 bp, Homo sapiens
  siRNA target sequence for DAZL (NM_001351.2,468-486).
cttctttgctagatatggt

SEQ ID NO: 50383 - DNA, 19 bp, Homo sapiens
  siRNA target sequence for DAZL (NM_001351.2,714-732).
gaatgtctggactaatcca

SEQ ID NO: 50384 - DNA, 19 bp, Homo sapiens
  siRNA target sequence for DAZL (NM_001351.2,730-748).
ccaaacactgaaacttata

SEQ ID NO: 50385 - DNA, 19 bp, Homo sapiens
  siRNA target sequence for DAZL (NM_001351.2,753-771).
gcccacaaccacgatgaat

SEQ ID NO: 50386 - DNA, 19 bp, Homo sapiens
  siRNA target sequence for DAZL (NM_001351.2,758-776).
caaccacgatgaatcctat

SEQ ID NO: 50387 - DNA, 19 bp, Homo sapiens
  siRNA target sequence for DAZL (NM_001351.2,764-782).
cgatgaatcctataactca

SEQ ID NO: 50388 - DNA, 19 bp, Homo sapiens
  siRNA target sequence for DAZL (NM_001351.2,773-791).
ctataactcagtatgttca

SEQ ID NO: 50389 - DNA, 19 bp, Homo sapiens
  siRNA target sequence for DAZL (NM_001351.2,891-909).
gcaaaggagctatgttgta

SEQ ID NO: 50390 - DNA, 19 bp, Homo sapiens
  siRNA target sequence for DAZL (NM_001351.2,904-922).
gttgtacctccggcttatt

SEQ ID NO: 50391 - DNA, 19 bp, Homo sapiens
  siRNA target sequence for DAZL (NM_001351.2,917-935).
cttattcagctgttaacta

SEQ ID NO: 50392 - DNA, 19 bp, Homo sapiens
  siRNA target sequence for DAZL (NM_001351.2,926-944).
ctgttaactaccactgtaa

SEQ ID NO: 50393 - DNA, 19 bp, Homo sapiens
  siRNA target sequence for DAZL (NM_001351.2,1010-1028).
ctggaaatggcccacaaaa

SEQ ID NO: 50394 - DNA, 19 bp, Homo sapiens
  siRNA target sequence for DAZL (NM_001351.2,1094-1112).
gaaactctgttgttactca

SEQ ID NO: 50395 - DNA, 19 bp, Homo sapiens
  siRNA target sequence for DAZL (NM_001351.2,1160-1178).
gggcaatgcttaaatctgt

SEQ ID NO: 50396 - DNA, 19 bp, Homo sapiens
  siRNA target sequence for DAZL (NM_001351.2,1161-1179).
ggcaatgcttaaatctgtt

SEQ ID NO: 50397 - DNA, 19 bp, Homo sapiens
  siRNA target sequence for DDX1 (NM_004939.1,353-371).
ggctcctcccaactgatat

SEQ ID NO: 50398 - DNA, 19 bp, Homo sapiens
  siRNA target sequence for DDX1 (NM_004939.1,401-419).
gaggaggtgatgtacttat

SEQ ID NO: 50399 - DNA, 19 bp, Homo sapiens
  siRNA target sequence for DDX1 (NM_004939.1,439-457).
ggcaaaactggtgctttta

SEQ ID NO: 50400 - DNA, 19 bp, Homo sapiens
  siRNA target sequence for DDX1 (NM_004939.1,441-459).
caaaactggtgcttttagt

SEQ ID NO: 50401 - DNA, 19 bp, Homo sapiens
  siRNA target sequence for DDX1 (NM_004939.1,452-470).
cttttagtattccagttat

SEQ ID NO: 50402 - DNA, 19 bp, Homo sapiens
  siRNA target sequence for DDX1 (NM_004939.1,464-482).
cagttatccagatagttta

SEQ ID NO: 50403 - DNA, 19 bp, Homo sapiens
  siRNA target sequence for DDX1 (NM_004939.1,471-489).
ccagatagtttatgaaact

SEQ ID NO: 50404 - DNA, 19 bp, Homo sapiens
  siRNA target sequence for DDX1 (NM_004939.1,560-578).
ggcagatgaacccatatga

SEQ ID NO: 50405 - DNA, 19 bp, Homo sapiens
  siRNA target sequence for DDX1 (NM_004939.1,562-580).
cagatgaacccatatgaca

SEQ ID NO: 50406 - DNA, 19 bp, Homo sapiens
  siRNA target sequence for DDX1 (NM_004939.1,579-597).
cagaggatctgcttttgca

SEQ ID NO: 50407 - DNA, 19 bp, Homo sapiens
  siRNA target sequence for DDX1 (NM_004939.1,581-599).
gaggatctgcttttgcaat

SEQ ID NO: 50408 - DNA, 19 bp, Homo sapiens
  siRNA target sequence for DDX1 (NM_004939.1,601-619).
gggtcagatggtctttgtt

SEQ ID NO: 50409 - DNA, 19 bp, Homo sapiens
  siRNA target sequence for DDX1 (NM_004939.1,653-671).
gtagagctactaaaggatt

SEQ ID NO: 50410 - DNA, 19 bp, Homo sapiens
  siRNA target sequence for DDX1 (NM_004939.1,656-674).
gagctactaaaggattaat

SEQ ID NO: 50411 - DNA, 19 bp, Homo sapiens
  siRNA target sequence for DDX1 (NM_004939.1,680-698).
ggaaacactactatgaagt

SEQ ID NO: 50412 - DNA, 19 bp, Homo sapiens
  siRNA target sequence for DDX1 (NM_004939.1,681-699).
gaaacactactatgaagta

SEQ ID NO: 50413 - DNA, 19 bp, Homo sapiens
  siRNA target sequence for DDX1 (NM_004939.1,706-724).
catgaccaagggttatgca

SEQ ID NO: 50414 - DNA, 19 bp, Homo sapiens
  siRNA target sequence for DDX1 (NM_004939.1,759-777).
cctaggtactgacaagttt

SEQ ID NO: 50415 - DNA, 19 bp, Homo sapiens
  siRNA target sequence for DDX1 (NM_004939.1,841-859).
gaattcactatgcatgata

SEQ ID NO: 50416 - DNA, 19 bp, Homo sapiens
  siRNA target sequence for DDX1 (NM_004939.1,866-884).
gatgttacctggatataga

SEQ ID NO: 50417 - DNA, 19 bp, Homo sapiens
  siRNA target sequence for DDX1 (NM_004939.1,869-887).
gttacctggatatagataa

SEQ ID NO: 50418 - DNA, 19 bp, Homo sapiens
  siRNA target sequence for DDX1 (NM_004939.1,937-955).
gaaataccaccacatatga

SEQ ID NO: 50419 - DNA, 19 bp, Homo sapiens
  siRNA target sequence for DDX1 (NM_004939.1,974-992).
ctgcctgtgttttgaagaa

SEQ ID NO: 50420 - DNA, 19 bp, Homo sapiens
  siRNA target sequence for DDX1 (NM_004939.1,994-1012).
gctgaactgaaatttaact

SEQ ID NO: 50421 - DNA, 19 bp, Homo sapiens
  siRNA target sequence for DDX1 (NM_004939.1,1064-1082).
ccaaggcaccggatggtta

SEQ ID NO: 50422 - DNA, 19 bp, Homo sapiens
  siRNA target sequence for DDX1 (NM_004939.1,1068-1086).
ggcaccggatggttacatt

SEQ ID NO: 50423 - DNA, 19 bp, Homo sapiens
  siRNA target sequence for DDX1 (NM_004939.1,1070-1088).
caccggatggttacattgt

SEQ ID NO: 50424 - DNA, 19 bp, Homo sapiens
  siRNA target sequence for DDX1 (NM_004939.1,1072-1090).
ccggatggttacattgtca

SEQ ID NO: 50425 - DNA, 19 bp, Homo sapiens
  siRNA target sequence for DDX1 (NM_004939.1,1079-1097).
gttacattgtcaaatcaca

SEQ ID NO: 50426 - DNA, 19 bp, Homo sapiens
  siRNA target sequence for DDX1 (NM_004939.1,1111-1129).
gcacaggtgacacaaacaa

SEQ ID NO: 50427 - DNA, 19 bp, Homo sapiens
  siRNA target sequence for DDX1 (NM_004939.1,1114-1132).
caggtgacacaaacaaagt

SEQ ID NO: 50428 - DNA, 19 bp, Homo sapiens
  siRNA target sequence for DDX1 (NM_004939.1,1116-1134).
ggtgacacaaacaaagttt

SEQ ID NO: 50429 - DNA, 19 bp, Homo sapiens
  siRNA target sequence for DDX1 (NM_004939.1,1148-1166).
cgaaagctctcattgttga

SEQ ID NO: 50430 - DNA, 19 bp, Homo sapiens
  siRNA target sequence for DDX1 (NM_004939.1,1149-1167).
gaaagctctcattgttgaa

SEQ ID NO: 50431 - DNA, 19 bp, Homo sapiens
  siRNA target sequence for DDX1 (NM_004939.1,1183-1201).
gctgaacaaactttgaaca

SEQ ID NO: 50432 - DNA, 19 bp, Homo sapiens
  siRNA target sequence for DDX1 (NM_004939.1,1276-1294).
cgggatcagctctctgttt

SEQ ID NO: 50433 - DNA, 19 bp, Homo sapiens
  siRNA target sequence for DDX1 (NM_004939.1,1328-1346).
cgggaagactagatgactt

SEQ ID NO: 50434 - DNA, 19 bp, Homo sapiens
  siRNA target sequence for DDX1 (NM_004939.1,1363-1381).
ctgaacttatctcaagtta

SEQ ID NO: 50435 - DNA, 19 bp, Homo sapiens
  siRNA target sequence for DDX1 (NM_004939.1,1365-1383).
gaacttatctcaagttaga

SEQ ID NO: 50436 - DNA, 19 bp, Homo sapiens
  siRNA target sequence for DDX1 (NM_004939.1,1409-1427).
ggcttctttctcaaggtta

SEQ ID NO: 50437 - DNA, 19 bp, Homo sapiens
  siRNA target sequence for DDX1 (NM_004939.1,1519-1537).
cattctttcgatgtaaaga

SEQ ID NO: 50438 - DNA, 19 bp, Homo sapiens
  siRNA target sequence for DDX1 (NM_004939.1,1544-1562).
ccgagaagataatgcattt

SEQ ID NO: 50439 - DNA, 19 bp, Homo sapiens
  siRNA target sequence for DDX1 (NM_004939.1,1564-1582).
cctacatgggttgacttaa

SEQ ID NO: 50440 - DNA, 19 bp, Homo sapiens
  siRNA target sequence for DDX1 (NM_004939.1,1565-1583).
ctacatgggttgacttaaa

SEQ ID NO: 50441 - DNA, 19 bp, Homo sapiens
  siRNA target sequence for DDX1 (NM_004939.1,1626-1644).
cccagtaaatcccaaaact

SEQ ID NO: 50442 - DNA, 19 bp, Homo sapiens
  siRNA target sequence for DDX1 (NM_004939.1,1666-1684).
ggaaagagccacattagaa

SEQ ID NO: 50443 - DNA, 19 bp, Homo sapiens
  siRNA target sequence for DDX1 (NM_004939.1,1671-1689).
gagccacattagaactgat

SEQ ID NO: 50444 - DNA, 19 bp, Homo sapiens
  siRNA target sequence for DDX1 (NM_004939.1,1674-1692).
ccacattagaactgatgat

SEQ ID NO: 50445 - DNA, 19 bp, Homo sapiens
  siRNA target sequence for DDX1 (NM_004939.1,1677-1695).
cattagaactgatgatgta

SEQ ID NO: 50446 - DNA, 19 bp, Homo sapiens
  siRNA target sequence for DDX1 (NM_004939.1,1740-1758).
gtggtctgaagctattaaa

SEQ ID NO: 50447 - DNA, 19 bp, Homo sapiens
  siRNA target sequence for DDX1 (NM_004939.1,1783-1801).
cgggcaatcaaggaacata

SEQ ID NO: 50448 - DNA, 19 bp, Homo sapiens
  siRNA target sequence for DDX1 (NM_004939.1,1786-1804).
gcaatcaaggaacataaga

SEQ ID NO: 50449 - DNA, 19 bp, Homo sapiens
  siRNA target sequence for DDX1 (NM_004939.1,1787-1805).
caatcaaggaacataagat

SEQ ID NO: 50450 - DNA, 19 bp, Homo sapiens
  siRNA target sequence for DDX1 (NM_004939.1,1807-1825).
gatcaagcaattatcttct

SEQ ID NO: 50451 - DNA, 19 bp, Homo sapiens
  siRNA target sequence for DDX1 (NM_004939.1,1810-1828).
caagcaattatcttctgta

SEQ ID NO: 50452 - DNA, 19 bp, Homo sapiens
  siRNA target sequence for DDX1 (NM_004939.1,1813-1831).
gcaattatcttctgtagaa

SEQ ID NO: 50453 - DNA, 19 bp, Homo sapiens
  siRNA target sequence for DDX1 (NM_004939.1,1857-1875).
gcagtactttatacaacaa

SEQ ID NO: 50454 - DNA, 19 bp, Homo sapiens
  siRNA target sequence for DDX1 (NM_004939.1,1979-1997).
gagatgtaagattcttgat

SEQ ID NO: 50455 - DNA, 19 bp, Homo sapiens
  siRNA target sequence for DDX1 (NM_004939.1,1984-2002).
gtaagattcttgatttgca

SEQ ID NO: 50456 - DNA, 19 bp, Homo sapiens
  siRNA target sequence for DDX1 (NM_004939.1,1992-2010).
cttgatttgcacagatgta

SEQ ID NO: 50457 - DNA, 19 bp, Homo sapiens
  siRNA target sequence for DDX1 (NM_004939.1,2031-2049).
ccacggtgttccttatgtt

SEQ ID NO: 50458 - DNA, 19 bp, Homo sapiens
  siRNA target sequence for DDX1 (NM_004939.1,2032-2050).
cacggtgttccttatgtta

SEQ ID NO: 50459 - DNA, 19 bp, Homo sapiens
  siRNA target sequence for DDX1 (NM_004939.1,2056-2074).
gtcactctgcccgatgaaa

SEQ ID NO: 50460 - DNA, 19 bp, Homo sapiens
  siRNA target sequence for DDX1 (NM_004939.1,2066-2084).
ccgatgaaaagcaaaacta

SEQ ID NO: 50461 - DNA, 19 bp, Homo sapiens
  siRNA target sequence for DDX1 (NM_004939.1,2163-2181).
ggtttggtaccatgtatgt

SEQ ID NO: 50462 - DNA, 19 bp, Homo sapiens
  siRNA target sequence for DDX1 (NM_004939.1,2164-2182).
gtttggtaccatgtatgta

SEQ ID NO: 50463 - DNA, 19 bp, Homo sapiens
  siRNA target sequence for DDX1 (NM_004939.1,2187-2205).
ccgtggaaaagggtgttat

SEQ ID NO: 50464 - DNA, 19 bp, Homo sapiens
  siRNA target sequence for DDX1 (NM_004939.1,2189-2207).
gtggaaaagggtgttataa

SEQ ID NO: 50465 - DNA, 19 bp, Homo sapiens
  siRNA target sequence for DDX1 (NM_004939.1,2224-2242).
gatggaggctgtaccatat

SEQ ID NO: 50466 - DNA, 19 bp, Homo sapiens
  siRNA target sequence for DDX1 (NM_004939.1,2227-2245).
ggaggctgtaccatatggt

SEQ ID NO: 50467 - DNA, 19 bp, Homo sapiens
  siRNA target sequence for DDX1 (NM_004939.1,2228-2246).
gaggctgtaccatatggta

SEQ ID NO: 50468 - DNA, 19 bp, Homo sapiens
  siRNA target sequence for DDX1 (NM_004939.1,2247-2265).
caacgagatgcagttacta

SEQ ID NO: 50469 - DNA, 19 bp, Homo sapiens
  siRNA target sequence for DDX1 (NM_004939.1,2250-2268).
cgagatgcagttactatct

SEQ ID NO: 50470 - DNA, 19 bp, Homo sapiens
  siRNA target sequence for DDX1 (NM_004939.1,2275-2293).
gaagaacacctgaactgta

SEQ ID NO: 50471 - DNA, 19 bp, Homo sapiens
  siRNA target sequence for DDX1 (NM_004939.1,2281-2299).
cacctgaactgtaccattt

SEQ ID NO: 50472 - DNA, 19 bp, Homo sapiens
  siRNA target sequence for DDX1 (NM_004939.1,2302-2320).
caggttgagccggatataa

SEQ ID NO: 50473 - DNA, 19 bp, Homo sapiens
  siRNA target sequence for DDX1 (NM_004939.1,2322-2340).
ggtaccagtggatgaattt

SEQ ID NO: 50474 - DNA, 19 bp, Homo sapiens
  siRNA target sequence for DDX1 (NM_004939.1,2350-2368).
gttacctacggtcagaaaa

SEQ ID NO: 50475 - DNA, 19 bp, Homo sapiens
  siRNA target sequence for DDX1 (NM_004939.1,2374-2392).
gctggtggtggaagctata

SEQ ID NO: 50476 - DNA, 19 bp, Homo sapiens
  siRNA target sequence for DDX10 (NM_004398.2,110-128).
cccggtgcggagcttcaat

SEQ ID NO: 50477 - DNA, 19 bp, Homo sapiens
  siRNA target sequence for DDX10 (NM_004398.2,146-164).
cagccataggcagaacaaa

SEQ ID NO: 50478 - DNA, 19 bp, Homo sapiens
  siRNA target sequence for DDX10 (NM_004398.2,226-244).
gccgcctcatgcagaacta

SEQ ID NO: 50479 - DNA, 19 bp, Homo sapiens
  siRNA target sequence for DDX10 (NM_004398.2,227-245).
ccgcctcatgcagaactat

SEQ ID NO: 50480 - DNA, 19 bp, Homo sapiens
  siRNA target sequence for DDX10 (NM_004398.2,258-276).
gtaaatgaaatcacaagat

SEQ ID NO: 50481 - DNA, 19 bp, Homo sapiens
  siRNA target sequence for DDX10 (NM_004398.2,332-350).
ccgtttggtgactgagata

SEQ ID NO: 50482 - DNA, 19 bp, Homo sapiens
  siRNA target sequence for DDX10 (NM_004398.2,367-385).
gattggctttgcaaggtaa

SEQ ID NO: 50483 - DNA, 19 bp, Homo sapiens
  siRNA target sequence for DDX10 (NM_004398.2,371-389).
ggctttgcaaggtaaagat

SEQ ID NO: 50484 - DNA, 19 bp, Homo sapiens
  siRNA target sequence for DDX10 (NM_004398.2,462-480).
cgtctgcaatggacttcaa

SEQ ID NO: 50485 - DNA, 19 bp, Homo sapiens
  siRNA target sequence for DDX10 (NM_004398.2,467-485).
gcaatggacttcaacagat

SEQ ID NO: 50486 - DNA, 19 bp, Homo sapiens
  siRNA target sequence for DDX10 (NM_004398.2,487-505).
ggctgggggttctcataat

SEQ ID NO: 50487 - DNA, 19 bp, Homo sapiens
  siRNA target sequence for DDX10 (NM_004398.2,488-506).
gctgggggttctcataata

SEQ ID NO: 50488 - DNA, 19 bp, Homo sapiens
  siRNA target sequence for DDX10 (NM_004398.2,491-509).
gggggttctcataatatca

SEQ ID NO: 50489 - DNA, 19 bp, Homo sapiens
  siRNA target sequence for DDX10 (NM_004398.2,655-673).
caccaggtcggcttcttca

SEQ ID NO: 50490 - DNA, 19 bp, Homo sapiens
  siRNA target sequence for DDX10 (NM_004398.2,658-676).
caggtcggcttcttcaaca

SEQ ID NO: 50491 - DNA, 19 bp, Homo sapiens
  siRNA target sequence for DDX10 (NM_004398.2,661-679).
gtcggcttcttcaacacat

SEQ ID NO: 50492 - DNA, 19 bp, Homo sapiens
  siRNA target sequence for DDX10 (NM_004398.2,702-720).
gctaccgacctccaaatgt

SEQ ID NO: 50493 - DNA, 19 bp, Homo sapiens
  siRNA target sequence for DDX10 (NM_004398.2,706-724).
ccgacctccaaatgttagt

SEQ ID NO: 50494 - DNA, 19 bp, Homo sapiens
  siRNA target sequence for DDX10 (NM_004398.2,707-725).
cgacctccaaatgttagtt

SEQ ID NO: 50495 - DNA, 19 bp, Homo sapiens
  siRNA target sequence for DDX10 (NM_004398.2,821-839).
ctcagcaacacaaactaaa

SEQ ID NO: 50496 - DNA, 19 bp, Homo sapiens
  siRNA target sequence for DDX10 (NM_004398.2,849-867).
gaccttgcacgcttgagtt

SEQ ID NO: 50497 - DNA, 19 bp, Homo sapiens
  siRNA target sequence for DDX10 (NM_004398.2,887-905).
ctgggttcatgaaaaagca

SEQ ID NO: 50498 - DNA, 19 bp, Homo sapiens
  siRNA target sequence for DDX10 (NM_004398.2,930-948).
gaacagaactacatagtct

SEQ ID NO: 50499 - DNA, 19 bp, Homo sapiens
  siRNA target sequence for DDX10 (NM_004398.2,972-990).
gtgctgtattcctttttga

SEQ ID NO: 50500 - DNA, 19 bp, Homo sapiens
  siRNA target sequence for DDX10 (NM_004398.2,1130-1148).
ggaagtctataatgagttt

SEQ ID NO: 50501 - DNA, 19 bp, Homo sapiens
  siRNA target sequence for DDX10 (NM_004398.2,1167-1185).
gtactctttgctactgata

SEQ ID NO: 50502 - DNA, 19 bp, Homo sapiens
  siRNA target sequence for DDX10 (NM_004398.2,1213-1231).
ccgtgaattgggttcttca

SEQ ID NO: 50503 - DNA, 19 bp, Homo sapiens
  siRNA target sequence for DDX10 (NM_004398.2,1223-1241).
ggttcttcagtttgattgt

SEQ ID NO: 50504 - DNA, 19 bp, Homo sapiens
  siRNA target sequence for DDX10 (NM_004398.2,1245-1263).
gaggatgccaacacatata

SEQ ID NO: 50505 - DNA, 19 bp, Homo sapiens
  siRNA target sequence for DDX10 (NM_004398.2,1247-1265).
ggatgccaacacatatatt

SEQ ID NO: 50506 - DNA, 19 bp, Homo sapiens
  siRNA target sequence for DDX10 (NM_004398.2,1251-1269).
gccaacacatatattcaca

SEQ ID NO: 50507 - DNA, 19 bp, Homo sapiens
  siRNA target sequence for DDX10 (NM_004398.2,1299-1317).
gatggtgaagctttgctaa

SEQ ID NO: 50508 - DNA, 19 bp, Homo sapiens
  siRNA target sequence for DDX10 (NM_004398.2,1396-1414).
cagaaaaacttatagatgt

SEQ ID NO: 50509 - DNA, 19 bp, Homo sapiens
  siRNA target sequence for DDX10 (NM_004398.2,1432-1450).
ctattttagctcaagatca

SEQ ID NO: 50510 - DNA, 19 bp, Homo sapiens
  siRNA target sequence for DDX10 (NM_004398.2,1486-1504).
cctatgtacgatctgtata

SEQ ID NO: 50511 - DNA, 19 bp, Homo sapiens
  siRNA target sequence for DDX10 (NM_004398.2,1487-1505).
ctatgtacgatctgtatat

SEQ ID NO: 50512 - DNA, 19 bp, Homo sapiens
  siRNA target sequence for DDX10 (NM_004398.2,1581-1599).
gtggcaccacgcgtaagat

SEQ ID NO: 50513 - DNA, 19 bp, Homo sapiens
  siRNA target sequence for DDX10 (NM_004398.2,1583-1601).
ggcaccacgcgtaagattt

SEQ ID NO: 50514 - DNA, 19 bp, Homo sapiens
  siRNA target sequence for DDX10 (NM_004398.2,1623-1641).
cccaccaaagaattggtaa

SEQ ID NO: 50515 - DNA, 19 bp, Homo sapiens
  siRNA target sequence for DDX10 (NM_004398.2,1642-1660).
ggagccaagccgataaagt

SEQ ID NO: 50516 - DNA, 19 bp, Homo sapiens
  siRNA target sequence for DDX10 (NM_004398.2,1643-1661).
gagccaagccgataaagta

SEQ ID NO: 50517 - DNA, 19 bp, Homo sapiens
  siRNA target sequence for DDX10 (NM_004398.2,1645-1663).
gccaagccgataaagtaat

SEQ ID NO: 50518 - DNA, 19 bp, Homo sapiens
  siRNA target sequence for DDX10 (NM_004398.2,1646-1664).
ccaagccgataaagtaatt

SEQ ID NO: 50519 - DNA, 19 bp, Homo sapiens
  siRNA target sequence for DDX10 (NM_004398.2,1711-1729).
gagcctacttcaatgagaa

SEQ ID NO: 50520 - DNA, 19 bp, Homo sapiens
  siRNA target sequence for DDX10 (NM_004398.2,1713-1731).
gcctacttcaatgagaaaa

SEQ ID NO: 50521 - DNA, 19 bp, Homo sapiens
  siRNA target sequence for DDX10 (NM_004398.2,1733-1751).
gtccatccttcaaaaaggt

SEQ ID NO: 50522 - DNA, 19 bp, Homo sapiens
  siRNA target sequence for DDX10 (NM_004398.2,1776-1794).
cacagacaggataatgata

SEQ ID NO: 50523 - DNA, 19 bp, Homo sapiens
  siRNA target sequence for DDX10 (NM_004398.2,1973-1991).
gaaggtgaagcggcataat

SEQ ID NO: 50524 - DNA, 19 bp, Homo sapiens
  siRNA target sequence for DDX10 (NM_004398.2,1983-2001).
cggcataatgtgtttggat

SEQ ID NO: 50525 - DNA, 19 bp, Homo sapiens
  siRNA target sequence for DDX10 (NM_004398.2,1984-2002).
ggcataatgtgtttggatt

SEQ ID NO: 50526 - DNA, 19 bp, Homo sapiens
  siRNA target sequence for DDX10 (NM_004398.2,2006-2024).
ccttaaagacgagaaaaca

SEQ ID NO: 50527 - DNA, 19 bp, Homo sapiens
  siRNA target sequence for DDX10 (NM_004398.2,2013-2031).
gacgagaaaacattacaga

SEQ ID NO: 50528 - DNA, 19 bp, Homo sapiens
  siRNA target sequence for DDX10 (NM_004398.2,2123-2141).
gaagataacatttactgat

SEQ ID NO: 50529 - DNA, 19 bp, Homo sapiens
  siRNA target sequence for DDX10 (NM_004398.2,2211-2229).
gacacaggtggtatcaact

SEQ ID NO: 50530 - DNA, 19 bp, Homo sapiens
  siRNA target sequence for DDX10 (NM_004398.2,2213-2231).
cacaggtggtatcaactta

SEQ ID NO: 50531 - DNA, 19 bp, Homo sapiens
  siRNA target sequence for DDX10 (NM_004398.2,2476-2494).
ctgaagattcagatagtga

SEQ ID NO: 50532 - DNA, 19 bp, Homo sapiens
  siRNA target sequence for DDX10 (NM_004398.2,2570-2588).
cgtgggaccaacaagtcat

SEQ ID NO: 50533 - DNA, 19 bp, Homo sapiens
  siRNA target sequence for DDX10 (NM_004398.2,2574-2592).
ggaccaacaagtcataaca

SEQ ID NO: 50534 - DNA, 19 bp, Homo sapiens
  siRNA target sequence for DDX10 (NM_004398.2,2600-2618).
ggccaggtgggacacttta

SEQ ID NO: 50535 - DNA, 19 bp, Homo sapiens
  siRNA target sequence for DDX10 (NM_004398.2,2602-2620).
ccaggtgggacactttaga

SEQ ID NO: 50536 - DNA, 19 bp, Homo sapiens
  siRNA target sequence for DDX10 (NM_004398.2,2612-2630).
cactttagagcctttggat

SEQ ID NO: 50537 - DNA, 19 bp, Homo sapiens
  siRNA target sequence for DDX10 (NM_004398.2,2627-2645).
ggataccggcctgtcttta

SEQ ID NO: 50538 - DNA, 19 bp, Homo sapiens
  siRNA target sequence for DDX17 (NM_006386.3,93-111).
gccccgattctctgtgttt

SEQ ID NO: 50539 - DNA, 19 bp, Homo sapiens
  siRNA target sequence for DDX17 (NM_006386.3,384-402).
ggccttcccccgaagaaat

SEQ ID NO: 50540 - DNA, 19 bp, Homo sapiens
  siRNA target sequence for DDX17 (NM_006386.3,385-403).
gccttcccccgaagaaatt

SEQ ID NO: 50541 - DNA, 19 bp, Homo sapiens
  siRNA target sequence for DDX17 (NM_006386.3,392-410).
cccgaagaaatttggtaat

SEQ ID NO: 50542 - DNA, 19 bp, Homo sapiens
  siRNA target sequence for DDX17 (NM_006386.3,416-434).
ggagcgtttgcgtaaaaaa

SEQ ID NO: 50543 - DNA, 19 bp, Homo sapiens
  siRNA target sequence for DDX17 (NM_006386.3,448-466).
gtgagctccccaagtttga

SEQ ID NO: 50544 - DNA, 19 bp, Homo sapiens
  siRNA target sequence for DDX17 (NM_006386.3,531-549).
cgccgaaagaaggagatta

SEQ ID NO: 50545 - DNA, 19 bp, Homo sapiens
  siRNA target sequence for DDX17 (NM_006386.3,589-607).
ccttccatcatgctaactt

SEQ ID NO: 50546 - DNA, 19 bp, Homo sapiens
  siRNA target sequence for DDX17 (NM_006386.3,632-650).
gatggatcagcactttaca

SEQ ID NO: 50547 - DNA, 19 bp, Homo sapiens
  siRNA target sequence for DDX17 (NM_006386.3,635-653).
ggatcagcactttacagaa

SEQ ID NO: 50548 - DNA, 19 bp, Homo sapiens
  siRNA target sequence for DDX17 (NM_006386.3,755-773).
gcctgcaattgttcatatt

SEQ ID NO: 50549 - DNA, 19 bp, Homo sapiens
  siRNA target sequence for DDX17 (NM_006386.3,756-774).
cctgcaattgttcatatta

SEQ ID NO: 50550 - DNA, 19 bp, Homo sapiens
  siRNA target sequence for DDX17 (NM_006386.3,757-775).
ctgcaattgttcatattaa

SEQ ID NO: 50551 - DNA, 19 bp, Homo sapiens
  siRNA target sequence for DDX17 (NM_006386.3,777-795).
caccagccatacttggaaa

SEQ ID NO: 50552 - DNA, 19 bp, Homo sapiens
  siRNA target sequence for DDX17 (NM_006386.3,797-815).
gggagatggcccaatctgt

SEQ ID NO: 50553 - DNA, 19 bp, Homo sapiens
  siRNA target sequence for DDX17 (NM_006386.3,857-875).
gcaggtggccgatgactat

SEQ ID NO: 50554 - DNA, 19 bp, Homo sapiens
  siRNA target sequence for DDX17 (NM_006386.3,866-884).
cgatgactatggcaaatgt

SEQ ID NO: 50555 - DNA, 19 bp, Homo sapiens
  siRNA target sequence for DDX17 (NM_006386.3,876-894).
ggcaaatgttctagattga

SEQ ID NO: 50556 - DNA, 19 bp, Homo sapiens
  siRNA target sequence for DDX17 (NM_006386.3,974-992).
cactcctggacgtctgata

SEQ ID NO: 50557 - DNA, 19 bp, Homo sapiens
  siRNA target sequence for DDX17 (NM_006386.3,976-994).
ctcctggacgtctgataga

SEQ ID NO: 50558 - DNA, 19 bp, Homo sapiens
  siRNA target sequence for DDX17 (NM_006386.3,978-996).
cctggacgtctgatagatt

SEQ ID NO: 50559 - DNA, 19 bp, Homo sapiens
  siRNA target sequence for DDX17 (NM_006386.3,979-997).
ctggacgtctgatagattt

SEQ ID NO: 50560 - DNA, 19 bp, Homo sapiens
  siRNA target sequence for DDX17 (NM_006386.3,982-1000).
gacgtctgatagatttcct

SEQ ID NO: 50561 - DNA, 19 bp, Homo sapiens
  siRNA target sequence for DDX17 (NM_006386.3,1027-1045).
gatgtacttaccttgtatt

SEQ ID NO: 50562 - DNA, 19 bp, Homo sapiens
  siRNA target sequence for DDX17 (NM_006386.3,1030-1048).
gtacttaccttgtattgga

SEQ ID NO: 50563 - DNA, 19 bp, Homo sapiens
  siRNA target sequence for DDX17 (NM_006386.3,1085-1103).
ccagatccgtaaaattgtt

SEQ ID NO: 50564 - DNA, 19 bp, Homo sapiens
  siRNA target sequence for DDX17 (NM_006386.3,1179-1197).
gatttccttcgtgattaca

SEQ ID NO: 50565 - DNA, 19 bp, Homo sapiens
  siRNA target sequence for DDX17 (NM_006386.3,1254-1272).
gtggatgtctgcatggaaa

SEQ ID NO: 50566 - DNA, 19 bp, Homo sapiens
  siRNA target sequence for DDX17 (NM_006386.3,1284-1302).
cacaagttgatccaactaa

SEQ ID NO: 50567 - DNA, 19 bp, Homo sapiens
  siRNA target sequence for DDX17 (NM_006386.3,1398-1416).
ggttggccagctatgtgta

SEQ ID NO: 50568 - DNA, 19 bp, Homo sapiens
  siRNA target sequence for DDX17 (NM_006386.3,1444-1462).
gagattgggtacttaatga

SEQ ID NO: 50569 - DNA, 19 bp, Homo sapiens
  siRNA target sequence for DDX17 (NM_006386.3,1446-1464).
gattgggtacttaatgagt

SEQ ID NO: 50570 - DNA, 19 bp, Homo sapiens
  siRNA target sequence for DDX17 (NM_006386.3,1474-1492).
gaaaggcacccatccttat

SEQ ID NO: 50571 - DNA, 19 bp, Homo sapiens
  siRNA target sequence for DDX17 (NM_006386.3,1487-1505).
ccttattgctacagatgta

SEQ ID NO: 50572 - DNA, 19 bp, Homo sapiens
  siRNA target sequence for DDX17 (NM_006386.3,1527-1545).
gaagatgtcaagtttgtga

SEQ ID NO: 50573 - DNA, 19 bp, Homo sapiens
  siRNA target sequence for DDX17 (NM_006386.3,1663-1681).
ccagagagcttatcaaagt

SEQ ID NO: 50574 - DNA, 19 bp, Homo sapiens
  siRNA target sequence for DDX17 (NM_006386.3,1770-1788).
cgttaccggaccacttctt

SEQ ID NO: 50575 - DNA, 19 bp, Homo sapiens
  siRNA target sequence for DDX17 (NM_006386.3,1792-1810).
ccaacaatcccaatctgat

SEQ ID NO: 50576 - DNA, 19 bp, Homo sapiens
  siRNA target sequence for DDX17 (NM_006386.3,1877-1895).
ctatcgggatcgtagtgaa

SEQ ID NO: 50577 - DNA, 19 bp, Homo sapiens
  siRNA target sequence for DDX17 (NM_006386.3,1898-1916).
cgatagagctggttatgct

SEQ ID NO: 50578 - DNA, 19 bp, Homo sapiens
  siRNA target sequence for DDX17 (NM_006386.3,1899-1917).
gatagagctggttatgcta

SEQ ID NO: 50579 - DNA, 19 bp, Homo sapiens
  siRNA target sequence for DDX17 (NM_006386.3,1991-2009).
ctatggggcagctgcttat

SEQ ID NO: 50580 - DNA, 19 bp, Homo sapiens
  siRNA target sequence for DDX17 (NM_006386.3,2020-2038).
gctatacagctcaagaata

SEQ ID NO: 50581 - DNA, 19 bp, Homo sapiens
  siRNA target sequence for DDX17 (NM_006386.3,2096-2114).
ctctagccagcagtttagt

SEQ ID NO: 50582 - DNA, 19 bp, Homo sapiens
  siRNA target sequence for DDX17 (NM_006386.3,2172-2190).
cctccgggagctaccaata

SEQ ID NO: 50583 - DNA, 19 bp, Homo sapiens
  siRNA target sequence for DDX17 (NM_006386.3,2173-2191).
ctccgggagctaccaatat

SEQ ID NO: 50584 - DNA, 19 bp, Homo sapiens
  siRNA target sequence for DDX17 (NM_006386.3,2175-2193).
ccgggagctaccaatatga

SEQ ID NO: 50585 - DNA, 19 bp, Homo sapiens
  siRNA target sequence for DDX17 (NM_006386.3,2176-2194).
cgggagctaccaatatgat

SEQ ID NO: 50586 - DNA, 19 bp, Homo sapiens
  siRNA target sequence for DDX17 (NM_006386.3,2177-2195).
gggagctaccaatatgata

SEQ ID NO: 50587 - DNA, 19 bp, Homo sapiens
  siRNA target sequence for DDX17 (NM_006386.3,2181-2199).
gctaccaatatgataggtt

SEQ ID NO: 50588 - DNA, 19 bp, Homo sapiens
  siRNA target sequence for DDX17 (NM_006386.3,2182-2200).
ctaccaatatgataggtta

SEQ ID NO: 50589 - DNA, 19 bp, Homo sapiens
  siRNA target sequence for DDX17 (NM_006386.3,2205-2223).
gggcagactgcctaccaat

SEQ ID NO: 50590 - DNA, 19 bp, Homo sapiens
  siRNA target sequence for DDX17 (NM_006386.3,2244-2262).
cctcctccttcacgtaaat

SEQ ID NO: 50591 - DNA, 19 bp, Homo sapiens
  siRNA target sequence for DDX18 (NM_006773.3,102-120).
gtcacacctgccgatgaaa

SEQ ID NO: 50592 - DNA, 19 bp, Homo sapiens
  siRNA target sequence for DDX18 (NM_006773.3,139-157).
gagaagcggaacctcaaat

SEQ ID NO: 50593 - DNA, 19 bp, Homo sapiens
  siRNA target sequence for DDX18 (NM_006773.3,161-179).
ggcagcggaacctaaagtt

SEQ ID NO: 50594 - DNA, 19 bp, Homo sapiens
  siRNA target sequence for DDX18 (NM_006773.3,162-180).
gcagcggaacctaaagttt

SEQ ID NO: 50595 - DNA, 19 bp, Homo sapiens
  siRNA target sequence for DDX18 (NM_006773.3,198-216).
gaccctatcggaaactcaa

SEQ ID NO: 50596 - DNA, 19 bp, Homo sapiens
  siRNA target sequence for DDX18 (NM_006773.3,200-218).
ccctatcggaaactcaaaa

SEQ ID NO: 50597 - DNA, 19 bp, Homo sapiens
  siRNA target sequence for DDX18 (NM_006773.3,325-343).
gaagcagtgggaaatataa

SEQ ID NO: 50598 - DNA, 19 bp, Homo sapiens
  siRNA target sequence for DDX18 (NM_006773.3,359-377).
cccagaaatccactgtatt

SEQ ID NO: 50599 - DNA, 19 bp, Homo sapiens
  siRNA target sequence for DDX18 (NM_006773.3,360-378).
ccagaaatccactgtatta

SEQ ID NO: 50600 - DNA, 19 bp, Homo sapiens
  siRNA target sequence for DDX18 (NM_006773.3,399-417).
gcagtcttccaattcagaa

SEQ ID NO: 50601 - DNA, 19 bp, Homo sapiens
  siRNA target sequence for DDX18 (NM_006773.3,460-478).
gctgagcctgatacgaaaa

SEQ ID NO: 50602 - DNA, 19 bp, Homo sapiens
  siRNA target sequence for DDX18 (NM_006773.3,461-479).
ctgagcctgatacgaaaaa

SEQ ID NO: 50603 - DNA, 19 bp, Homo sapiens
  siRNA target sequence for DDX18 (NM_006773.3,522-540).
cgagactactaaagaaaca

SEQ ID NO: 50604 - DNA, 19 bp, Homo sapiens
  siRNA target sequence for DDX18 (NM_006773.3,613-631).
ggagcttttgaggatactt

SEQ ID NO: 50605 - DNA, 19 bp, Homo sapiens
  siRNA target sequence for DDX18 (NM_006773.3,632-650).
cgtttgcttctctatgtaa

SEQ ID NO: 50606 - DNA, 19 bp, Homo sapiens
  siRNA target sequence for DDX18 (NM_006773.3,641-659).
ctctatgtaatcttgtcaa

SEQ ID NO: 50607 - DNA, 19 bp, Homo sapiens
  siRNA target sequence for DDX18 (NM_006773.3,647-665).
gtaatcttgtcaatgaaaa

SEQ ID NO: 50608 - DNA, 19 bp, Homo sapiens
  siRNA target sequence for DDX18 (NM_006773.3,804-822).
ccctgcagttgaactcatt

SEQ ID NO: 50609 - DNA, 19 bp, Homo sapiens
  siRNA target sequence for DDX18 (NM_006773.3,870-888).
ctcacctactagagaacta

SEQ ID NO: 50610 - DNA, 19 bp, Homo sapiens
  siRNA target sequence for DDX18 (NM_006773.3,895-913).
caaacctttggtgttctta

SEQ ID NO: 50611 - DNA, 19 bp, Homo sapiens
  siRNA target sequence for DDX18 (NM_006773.3,899-917).
cctttggtgttcttaagga

SEQ ID NO: 50612 - DNA, 19 bp, Homo sapiens
  siRNA target sequence for DDX18 (NM_006773.3,926-944).
ctcaccacgtgcataccta

SEQ ID NO: 50613 - DNA, 19 bp, Homo sapiens
  siRNA target sequence for DDX18 (NM_006773.3,991-1009).
cttggtaatgggatcaaca

SEQ ID NO: 50614 - DNA, 19 bp, Homo sapiens
  siRNA target sequence for DDX18 (NM_006773.3,995-1013).
gtaatgggatcaacatcat

SEQ ID NO: 50615 - DNA, 19 bp, Homo sapiens
  siRNA target sequence for DDX18 (NM_006773.3,1028-1046).
gccgtctgctggaccatat

SEQ ID NO: 50616 - DNA, 19 bp, Homo sapiens
  siRNA target sequence for DDX18 (NM_006773.3,1031-1049).
gtctgctggaccatatgca

SEQ ID NO: 50617 - DNA, 19 bp, Homo sapiens
  siRNA target sequence for DDX18 (NM_006773.3,1036-1054).
ctggaccatatgcagaata

SEQ ID NO: 50618 - DNA, 19 bp, Homo sapiens
  siRNA target sequence for DDX18 (NM_006773.3,1055-1073).
ccccaggatttatgtataa

SEQ ID NO: 50619 - DNA, 19 bp, Homo sapiens
  siRNA target sequence for DDX18 (NM_006773.3,1077-1095).
cctgcagtgtctggttatt

SEQ ID NO: 50620 - DNA, 19 bp, Homo sapiens
  siRNA target sequence for DDX18 (NM_006773.3,1163-1181).
caacacgtagacagactat

SEQ ID NO: 50621 - DNA, 19 bp, Homo sapiens
  siRNA target sequence for DDX18 (NM_006773.3,1193-1211).
ccacccaaactcgaaaagt

SEQ ID NO: 50622 - DNA, 19 bp, Homo sapiens
  siRNA target sequence for DDX18 (NM_006773.3,1255-1273).
gttggcgttgatgatgata

SEQ ID NO: 50623 - DNA, 19 bp, Homo sapiens
  siRNA target sequence for DDX18 (NM_006773.3,1286-1304).
cagtggatggtcttgaaca

SEQ ID NO: 50624 - DNA, 19 bp, Homo sapiens
  siRNA target sequence for DDX18 (NM_006773.3,1295-1313).
gtcttgaacagggatatgt

SEQ ID NO: 50625 - DNA, 19 bp, Homo sapiens
  siRNA target sequence for DDX18 (NM_006773.3,1345-1363).
ctctttacattccttaaga

SEQ ID NO: 50626 - DNA, 19 bp, Homo sapiens
  siRNA target sequence for DDX18 (NM_006773.3,1409-1427).
ctgtgaaataccactatga

SEQ ID NO: 50627 - DNA, 19 bp, Homo sapiens
  siRNA target sequence for DDX18 (NM_006773.3,1428-1446).
gttgctgaactacattgat

SEQ ID NO: 50628 - DNA, 19 bp, Homo sapiens
  siRNA target sequence for DDX18 (NM_006773.3,1449-1467).
gcccgtcttggccattcat

SEQ ID NO: 50629 - DNA, 19 bp, Homo sapiens
  siRNA target sequence for DDX18 (NM_006773.3,1458-1476).
ggccattcatggaaagcaa

SEQ ID NO: 50630 - DNA, 19 bp, Homo sapiens
  siRNA target sequence for DDX18 (NM_006773.3,1520-1538).
cagattcgggaacactatt

SEQ ID NO: 50631 - DNA, 19 bp, Homo sapiens
  siRNA target sequence for DDX18 (NM_006773.3,1522-1540).
gattcgggaacactattgt

SEQ ID NO: 50632 - DNA, 19 bp, Homo sapiens
  siRNA target sequence for DDX18 (NM_006773.3,1581-1599).
cgactggattgttcagtat

SEQ ID NO: 50633 - DNA, 19 bp, Homo sapiens
  siRNA target sequence for DDX18 (NM_006773.3,1606-1624).
ccggatgaccctaaggaat

SEQ ID NO: 50634 - DNA, 19 bp, Homo sapiens
  siRNA target sequence for DDX18 (NM_006773.3,1669-1687).
gggcatgccttgctcattt

SEQ ID NO: 50635 - DNA, 19 bp, Homo sapiens
  siRNA target sequence for DDX18 (NM_006773.3,1706-1724).
gttttcttcgctacttgaa

SEQ ID NO: 50636 - DNA, 19 bp, Homo sapiens
  siRNA target sequence for DDX18 (NM_006773.3,1711-1729).
cttcgctacttgaaacaat

SEQ ID NO: 50637 - DNA, 19 bp, Homo sapiens
  siRNA target sequence for DDX18 (NM_006773.3,1715-1733).
gctacttgaaacaatccaa

SEQ ID NO: 50638 - DNA, 19 bp, Homo sapiens
  siRNA target sequence for DDX18 (NM_006773.3,1730-1748).
ccaaggttccattaagtga

SEQ ID NO: 50639 - DNA, 19 bp, Homo sapiens
  siRNA target sequence for DDX18 (NM_006773.3,1731-1749).
caaggttccattaagtgaa

SEQ ID NO: 50640 - DNA, 19 bp, Homo sapiens
  siRNA target sequence for DDX18 (NM_006773.3,1734-1752).
ggttccattaagtgaattt

SEQ ID NO: 50641 - DNA, 19 bp, Homo sapiens
  siRNA target sequence for DDX18 (NM_006773.3,1760-1778).
cctggtctaaaatttctga

SEQ ID NO: 50642 - DNA, 19 bp, Homo sapiens
  siRNA target sequence for DDX18 (NM_006773.3,1791-1809).
gcttgagaaattgattgaa

SEQ ID NO: 50643 - DNA, 19 bp, Homo sapiens
  siRNA target sequence for DDX18 (NM_006773.3,1803-1821).
gattgaaaagaattacttt

SEQ ID NO: 50644 - DNA, 19 bp, Homo sapiens
  siRNA target sequence for DDX18 (NM_006773.3,1830-1848).
gtcagcccaggaagcatat

SEQ ID NO: 50645 - DNA, 19 bp, Homo sapiens
  siRNA target sequence for DDX18 (NM_006773.3,1832-1850).
cagcccaggaagcatataa

SEQ ID NO: 50646 - DNA, 19 bp, Homo sapiens
  siRNA target sequence for DDX18 (NM_006773.3,1874-1892).
cccattctctgaaacagat

SEQ ID NO: 50647 - DNA, 19 bp, Homo sapiens
  siRNA target sequence for DDX18 (NM_006773.3,1919-1937).
ctcaggttgctctgtcatt

SEQ ID NO: 50648 - DNA, 19 bp, Homo sapiens
  siRNA target sequence for DDX18 (NM_006773.3,1923-1941).
ggttgctctgtcatttggt

SEQ ID NO: 50649 - DNA, 19 bp, Homo sapiens
  siRNA target sequence for DDX18 (NM_006773.3,1924-1942).
gttgctctgtcatttggtt

SEQ ID NO: 50650 - DNA, 19 bp, Homo sapiens
  siRNA target sequence for DDX18 (NM_006773.3,1952-1970).
ctcccttcgttgatctgaa

SEQ ID NO: 50651 - DNA, 19 bp, Homo sapiens
  siRNA target sequence for DDX18 (NM_006773.3,1963-1981).
gatctgaacgtcaacagta

SEQ ID NO: 50652 - DNA, 19 bp, Homo sapiens
  siRNA target sequence for DDX18 (NM_006773.3,2017-2035).
ggatttggctaccagaaaa

SEQ ID NO: 50653 - DNA, 19 bp, Homo sapiens
  siRNA target sequence for DDX18 (NM_006773.3,2044-2062).
gttgagaaatccaaaatct

SEQ ID NO: 50654 - DNA, 19 bp, Homo sapiens
  siRNA target sequence for DDX18 (NM_006773.3,2047-2065).
gagaaatccaaaatcttta

SEQ ID NO: 50655 - DNA, 19 bp, Homo sapiens
  siRNA target sequence for DDX18 (NM_006773.3,2070-2088).
cattagcaagaaatcatct

SEQ ID NO: 50656 - DNA, 19 bp, Homo sapiens
  siRNA target sequence for DDX19 (NM_007242.3,165-183).
gcaacttgcatcttaagga

SEQ ID NO: 50657 - DNA, 19 bp, Homo sapiens
  siRNA target sequence for DDX19 (NM_007242.3,486-504).
ctgagcccccacagaactt

SEQ ID NO: 50658 - DNA, 19 bp, Homo sapiens
  siRNA target sequence for DDX19 (NM_007242.3,490-508).
gcccccacagaacttaatt

SEQ ID NO: 50659 - DNA, 19 bp, Homo sapiens
  siRNA target sequence for DDX19 (NM_007242.3,555-573).
ccatgcttagccaagtaga

SEQ ID NO: 50660 - DNA, 19 bp, Homo sapiens
  siRNA target sequence for DDX21 (NM_004728.1,443-461).
cctaagcccaagaagatga

SEQ ID NO: 50661 - DNA, 19 bp, Homo sapiens
  siRNA target sequence for DDX21 (NM_004728.1,579-597).
gtgagatagagcaggaaat

SEQ ID NO: 50662 - DNA, 19 bp, Homo sapiens
  siRNA target sequence for DDX21 (NM_004728.1,583-601).
gatagagcaggaaatacct

SEQ ID NO: 50663 - DNA, 19 bp, Homo sapiens
  siRNA target sequence for DDX21 (NM_004728.1,636-654).
ccatatctgaagaaactat

SEQ ID NO: 50664 - DNA, 19 bp, Homo sapiens
  siRNA target sequence for DDX21 (NM_004728.1,679-697).
gaccttcctatttcctata

SEQ ID NO: 50665 - DNA, 19 bp, Homo sapiens
  siRNA target sequence for DDX21 (NM_004728.1,727-745).
cgggaaggacttaattgca

SEQ ID NO: 50666 - DNA, 19 bp, Homo sapiens
  siRNA target sequence for DDX21 (NM_004728.1,782-800).
gccatccctttgattgaga

SEQ ID NO: 50667 - DNA, 19 bp, Homo sapiens
  siRNA target sequence for DDX21 (NM_004728.1,783-801).
ccatccctttgattgagaa

SEQ ID NO: 50668 - DNA, 19 bp, Homo sapiens
  siRNA target sequence for DDX21 (NM_004728.1,784-802).
catccctttgattgagaaa

SEQ ID NO: 50669 - DNA, 19 bp, Homo sapiens
  siRNA target sequence for DDX21 (NM_004728.1,978-996).
ggaatgggattgatatcct

SEQ ID NO: 50670 - DNA, 19 bp, Homo sapiens
  siRNA target sequence for DDX21 (NM_004728.1,1014-1032).
gtatcaaagaccacataca

SEQ ID NO: 50671 - DNA, 19 bp, Homo sapiens
  siRNA target sequence for DDX21 (NM_004728.1,1053-1071).
ccaaacttaagcatgttgt

SEQ ID NO: 50672 - DNA, 19 bp, Homo sapiens
  siRNA target sequence for DDX21 (NM_004728.1,1134-1152).
gtgtggcatacaagaaaga

SEQ ID NO: 50673 - DNA, 19 bp, Homo sapiens
  siRNA target sequence for DDX21 (NM_004728.1,1197-1215).
ctcattgggtatttaatgt

SEQ ID NO: 50674 - DNA, 19 bp, Homo sapiens
  siRNA target sequence for DDX21 (NM_004728.1,1253-1271).
gacctgattggtaaaaaga

SEQ ID NO: 50675 - DNA, 19 bp, Homo sapiens
  siRNA target sequence for DDX21 (NM_004728.1,1292-1310).
gtggagcatctggctatta

SEQ ID NO: 50676 - DNA, 19 bp, Homo sapiens
  siRNA target sequence for DDX21 (NM_004728.1,1295-1313).
gagcatctggctattaagt

SEQ ID NO: 50677 - DNA, 19 bp, Homo sapiens
  siRNA target sequence for DDX21 (NM_004728.1,1370-1388).
catcaaggacgcactatca

SEQ ID NO: 50678 - DNA, 19 bp, Homo sapiens
  siRNA target sequence for DDX21 (NM_004728.1,1376-1394).
ggacgcactatcatctttt

SEQ ID NO: 50679 - DNA, 19 bp, Homo sapiens
  siRNA target sequence for DDX21 (NM_004728.1,1425-1443).
cccagaattcagctataaa

SEQ ID NO: 50680 - DNA, 19 bp, Homo sapiens
  siRNA target sequence for DDX21 (NM_004728.1,1490-1508).
gaaatcaccctgaaaggtt

SEQ ID NO: 50681 - DNA, 19 bp, Homo sapiens
  siRNA target sequence for DDX21 (NM_004728.1,1550-1568).
gctgcacgtgggttagaca

SEQ ID NO: 50682 - DNA, 19 bp, Homo sapiens
  siRNA target sequence for DDX21 (NM_004728.1,1551-1569).
ctgcacgtgggttagacat

SEQ ID NO: 50683 - DNA, 19 bp, Homo sapiens
  siRNA target sequence for DDX21 (NM_004728.1,1571-1589).
cctgaggttgatttggtta

SEQ ID NO: 50684 - DNA, 19 bp, Homo sapiens
  siRNA target sequence for DDX21 (NM_004728.1,1576-1594).
ggttgatttggttatacaa

SEQ ID NO: 50685 - DNA, 19 bp, Homo sapiens
  siRNA target sequence for DDX21 (NM_004728.1,1609-1627).
ggatgtagagtcctacatt

SEQ ID NO: 50686 - DNA, 19 bp, Homo sapiens
  siRNA target sequence for DDX21 (NM_004728.1,1665-1683).
gggtgtgcatctgctttta

SEQ ID NO: 50687 - DNA, 19 bp, Homo sapiens
  siRNA target sequence for DDX21 (NM_004728.1,1666-1684).
ggtgtgcatctgcttttat

SEQ ID NO: 50688 - DNA, 19 bp, Homo sapiens
  siRNA target sequence for DDX21 (NM_004728.1,1690-1708).
caaggaagaatatcagtta

SEQ ID NO: 50689 - DNA, 19 bp, Homo sapiens
  siRNA target sequence for DDX21 (NM_004728.1,1693-1711).
ggaagaatatcagttagta

SEQ ID NO: 50690 - DNA, 19 bp, Homo sapiens
  siRNA target sequence for DDX21 (NM_004728.1,1758-1776).
cttctgcaacagaaataat

SEQ ID NO: 50691 - DNA, 19 bp, Homo sapiens
  siRNA target sequence for DDX21 (NM_004728.1,1819-1837).
gcctcccactgccattagt

SEQ ID NO: 50692 - DNA, 19 bp, Homo sapiens
  siRNA target sequence for DDX21 (NM_004728.1,1821-1839).
ctcccactgccattagtca

SEQ ID NO: 50693 - DNA, 19 bp, Homo sapiens
  siRNA target sequence for DDX21 (NM_004728.1,1827-1845).
ctgccattagtcacttcaa

SEQ ID NO: 50694 - DNA, 19 bp, Homo sapiens
  siRNA target sequence for DDX21 (NM_004728.1,1940-1958).
cgctccttgatcaactcaa

SEQ ID NO: 50695 - DNA, 19 bp, Homo sapiens
  siRNA target sequence for DDX21 (NM_004728.1,1942-1960).
ctccttgatcaactcaaat

SEQ ID NO: 50696 - DNA, 19 bp, Homo sapiens
  siRNA target sequence for DDX21 (NM_004728.1,1944-1962).
ccttgatcaactcaaatgt

SEQ ID NO: 50697 - DNA, 19 bp, Homo sapiens
  siRNA target sequence for DDX21 (NM_004728.1,1981-1999).
cttgcagtgctcaattgaa

SEQ ID NO: 50698 - DNA, 19 bp, Homo sapiens
  siRNA target sequence for DDX21 (NM_004728.1,2046-2064).
gcgaggagattgattccaa

SEQ ID NO: 50699 - DNA, 19 bp, Homo sapiens
  siRNA target sequence for DDX21 (NM_004728.1,2047-2065).
cgaggagattgattccaaa

SEQ ID NO: 50700 - DNA, 19 bp, Homo sapiens
  siRNA target sequence for DDX21 (NM_004728.1,2114-2132).
gtacctaccgcatcagtaa

SEQ ID NO: 50701 - DNA, 19 bp, Homo sapiens
  siRNA target sequence for DDX21 (NM_004728.1,2121-2139).
ccgcatcagtaacagaaat

SEQ ID NO: 50702 - DNA, 19 bp, Homo sapiens
  siRNA target sequence for DDX21 (NM_004728.1,2273-2291).
cgggacggaaacagaagat

SEQ ID NO: 50703 - DNA, 19 bp, Homo sapiens
  siRNA target sequence for DDX21 (NM_004728.1,2276-2294).
gacggaaacagaagattca

SEQ ID NO: 50704 - DNA, 19 bp, Homo sapiens
  siRNA target sequence for DDX21 (NM_004728.1,2345-2363).
ggcaacaaaagtaacagat

SEQ ID NO: 50705 - DNA, 19 bp, Homo sapiens
  siRNA target sequence for DDX21 (NM_004728.1,2375-2393).
ggccagaagcggagtttca

SEQ ID NO: 50706 - DNA, 19 bp, Homo sapiens
  siRNA target sequence for DDX21 (NM_004728.1,2377-2395).
ccagaagcggagtttcagt

SEQ ID NO: 50707 - DNA, 19 bp, Homo sapiens
  siRNA target sequence for DDX21 (NM_004728.1,2380-2398).
gaagcggagtttcagtaaa

SEQ ID NO: 50708 - DNA, 19 bp, Homo sapiens
  siRNA target sequence for DDX21 (NM_004728.1,2383-2401).
gcggagtttcagtaaagca

SEQ ID NO: 50709 - DNA, 19 bp, Homo sapiens
  siRNA target sequence for DDX21 (NM_004728.1,2384-2402).
cggagtttcagtaaagcat

SEQ ID NO: 50710 - DNA, 19 bp, Homo sapiens
  siRNA target sequence for DDX21 (NM_004728.1,2385-2403).
ggagtttcagtaaagcatt

SEQ ID NO: 50711 - DNA, 19 bp, Homo sapiens
  siRNA target sequence for DDX24 (NM_020414.3,156-174).
gacaaagggaatcaaagtt

SEQ ID NO: 50712 - DNA, 19 bp, Homo sapiens
  siRNA target sequence for DDX24 (NM_020414.3,193-211).
gtgaagattgacccaaata

SEQ ID NO: 50713 - DNA, 19 bp, Homo sapiens
  siRNA target sequence for DDX24 (NM_020414.3,198-216).
gattgacccaaatatgttt

SEQ ID NO: 50714 - DNA, 19 bp, Homo sapiens
  siRNA target sequence for DDX24 (NM_020414.3,434-452).
ccagtacccagaaagaatt

SEQ ID NO: 50715 - DNA, 19 bp, Homo sapiens
  siRNA target sequence for DDX24 (NM_020414.3,619-637).
cccaaaaaagcgaagacat

SEQ ID NO: 50716 - DNA, 19 bp, Homo sapiens
  siRNA target sequence for DDX24 (NM_020414.3,635-653).
catggattcctgaagttca

SEQ ID NO: 50717 - DNA, 19 bp, Homo sapiens
  siRNA target sequence for DDX24 (NM_020414.3,711-729).
ccgagcactcagctttcta

SEQ ID NO: 50718 - DNA, 19 bp, Homo sapiens
  siRNA target sequence for DDX24 (NM_020414.3,940-958).
gccggagctgagactagat

SEQ ID NO: 50719 - DNA, 19 bp, Homo sapiens
  siRNA target sequence for DDX24 (NM_020414.3,989-1007).
cattgcctgacgatactgt

SEQ ID NO: 50720 - DNA, 19 bp, Homo sapiens
  siRNA target sequence for DDX24 (NM_020414.3,993-1011).
gcctgacgatactgtaatt

SEQ ID NO: 50721 - DNA, 19 bp, Homo sapiens
  siRNA target sequence for DDX24 (NM_020414.3,995-1013).
ctgacgatactgtaattga

SEQ ID NO: 50722 - DNA, 19 bp, Homo sapiens
  siRNA target sequence for DDX24 (NM_020414.3,1145-1163).
ctgttcccaaacagaatga

SEQ ID NO: 50723 - DNA, 19 bp, Homo sapiens
  siRNA target sequence for DDX24 (NM_020414.3,1189-1207).
gagcagactggaaatctaa

SEQ ID NO: 50724 - DNA, 19 bp, Homo sapiens
  siRNA target sequence for DDX24 (NM_020414.3,1235-1253).
cctgtaaggcatatccaaa

SEQ ID NO: 50725 - DNA, 19 bp, Homo sapiens
  siRNA target sequence for DDX24 (NM_020414.3,1305-1323).
ggtcaaacagcacattgat

SEQ ID NO: 50726 - DNA, 19 bp, Homo sapiens
  siRNA target sequence for DDX24 (NM_020414.3,1401-1419).
gaaccgtcgtcctgagatt

SEQ ID NO: 50727 - DNA, 19 bp, Homo sapiens
  siRNA target sequence for DDX24 (NM_020414.3,1517-1535).
ctgaccggatggttgagaa

SEQ ID NO: 50728 - DNA, 19 bp, Homo sapiens
  siRNA target sequence for DDX24 (NM_020414.3,1564-1582).
ctagagatgctcaatgact

SEQ ID NO: 50729 - DNA, 19 bp, Homo sapiens
  siRNA target sequence for DDX24 (NM_020414.3,1573-1591).
ctcaatgactcccaataca

SEQ ID NO: 50730 - DNA, 19 bp, Homo sapiens
  siRNA target sequence for DDX24 (NM_020414.3,1584-1602).
ccaatacaacccaaagaga

SEQ ID NO: 50731 - DNA, 19 bp, Homo sapiens
  siRNA target sequence for DDX24 (NM_020414.3,1644-1662).
ggctcctgctcgaatcctt

SEQ ID NO: 50732 - DNA, 19 bp, Homo sapiens
  siRNA target sequence for DDX24 (NM_020414.3,1651-1669).
gctcgaatccttcataaga

SEQ ID NO: 50733 - DNA, 19 bp, Homo sapiens
  siRNA target sequence for DDX24 (NM_020414.3,1652-1670).
ctcgaatccttcataagaa

SEQ ID NO: 50734 - DNA, 19 bp, Homo sapiens
  siRNA target sequence for DDX24 (NM_020414.3,1672-1690).
cacaccaagaaaatggata

SEQ ID NO: 50735 - DNA, 19 bp, Homo sapiens
  siRNA target sequence for DDX24 (NM_020414.3,1674-1692).
caccaagaaaatggataaa

SEQ ID NO: 50736 - DNA, 19 bp, Homo sapiens
  siRNA target sequence for DDX24 (NM_020414.3,1697-1715).
ccaaacttgacctccttat

SEQ ID NO: 50737 - DNA, 19 bp, Homo sapiens
  siRNA target sequence for DDX24 (NM_020414.3,1705-1723).
gacctccttatgcagaaaa

SEQ ID NO: 50738 - DNA, 19 bp, Homo sapiens
  siRNA target sequence for DDX24 (NM_020414.3,1858-1876).
ccaggccgcagcttagtgt

SEQ ID NO: 50739 - DNA, 19 bp, Homo sapiens
  siRNA target sequence for DDX24 (NM_020414.3,1859-1877).
caggccgcagcttagtgtt

SEQ ID NO: 50740 - DNA, 19 bp, Homo sapiens
  siRNA target sequence for DDX24 (NM_020414.3,1884-1902).
cagtatctcctgcatcaaa

SEQ ID NO: 50741 - DNA, 19 bp, Homo sapiens
  siRNA target sequence for DDX24 (NM_020414.3,1918-1936).
ctcaaagtccttgatatca

SEQ ID NO: 50742 - DNA, 19 bp, Homo sapiens
  siRNA target sequence for DDX24 (NM_020414.3,2044-2062).
cggggtctggatattccta

SEQ ID NO: 50743 - DNA, 19 bp, Homo sapiens
  siRNA target sequence for DDX24 (NM_020414.3,2045-2063).
ggggtctggatattcctaa

SEQ ID NO: 50744 - DNA, 19 bp, Homo sapiens
  siRNA target sequence for DDX24 (NM_020414.3,2048-2066).
gtctggatattcctaaagt

SEQ ID NO: 50745 - DNA, 19 bp, Homo sapiens
  siRNA target sequence for DDX24 (NM_020414.3,2092-2110).
ccacgtacctcggagattt

SEQ ID NO: 50746 - DNA, 19 bp, Homo sapiens
  siRNA target sequence for DDX24 (NM_020414.3,2093-2111).
cacgtacctcggagattta

SEQ ID NO: 50747 - DNA, 19 bp, Homo sapiens
  siRNA target sequence for DDX24 (NM_020414.3,2096-2114).
gtacctcggagatttatgt

SEQ ID NO: 50748 - DNA, 19 bp, Homo sapiens
  siRNA target sequence for DDX24 (NM_020414.3,2182-2200).
gatgtgatcaactttaaga

SEQ ID NO: 50749 - DNA, 19 bp, Homo sapiens
  siRNA target sequence for DDX24 (NM_020414.3,2208-2226).
caaaacgctcaagaaagat

SEQ ID NO: 50750 - DNA, 19 bp, Homo sapiens
  siRNA target sequence for DDX24 (NM_020414.3,2277-2295).
ggagcgaatccgtttagct

SEQ ID NO: 50751 - DNA, 19 bp, Homo sapiens
  siRNA target sequence for DDX24 (NM_020414.3,2286-2304).
ccgtttagctcgacagatt

SEQ ID NO: 50752 - DNA, 19 bp, Homo sapiens
  siRNA target sequence for DDX24 (NM_020414.3,2288-2306).
gtttagctcgacagattga

SEQ ID NO: 50753 - DNA, 19 bp, Homo sapiens
  siRNA target sequence for DDX24 (NM_020414.3,2293-2311).
gctcgacagattgagaaat

SEQ ID NO: 50754 - DNA, 19 bp, Homo sapiens
  siRNA target sequence for DDX24 (NM_020414.3,2428-2446).
gaagaacgtcggagacaaa

SEQ ID NO: 50755 - DNA, 19 bp, Homo sapiens
  siRNA target sequence for DDX24 (NM_020414.3,2504-2522).
cggagagccagaaaaccaa

SEQ ID NO: 50756 - DNA, 19 bp, Homo sapiens
  siRNA target sequence for DDX25 (NM_013264.2,465-483).
catttgtgttggcaatgtt

SEQ ID NO: 50757 - DNA, 19 bp, Homo sapiens
  siRNA target sequence for DDX25 (NM_013264.2,526-544).
cctagctcctacttatgaa

SEQ ID NO: 50758 - DNA, 19 bp, Homo sapiens
  siRNA target sequence for DDX25 (NM_013264.2,614-632).
gccattcgagggaatcgaa

SEQ ID NO: 50759 - DNA, 19 bp, Homo sapiens
  siRNA target sequence for DDX25 (NM_013264.2,615-633).
ccattcgagggaatcgaat

SEQ ID NO: 50760 - DNA, 19 bp, Homo sapiens
  siRNA target sequence for DDX25 (NM_013264.2,639-657).
gaggcaccgacatcactaa

SEQ ID NO: 50761 - DNA, 19 bp, Homo sapiens
  siRNA target sequence for DDX25 (NM_013264.2,642-660).
gcaccgacatcactaaaca

SEQ ID NO: 50762 - DNA, 19 bp, Homo sapiens
  siRNA target sequence for DDX25 (NM_013264.2,645-663).
ccgacatcactaaacagat

SEQ ID NO: 50763 - DNA, 19 bp, Homo sapiens
  siRNA target sequence for DDX25 (NM_013264.2,646-664).
cgacatcactaaacagatt

SEQ ID NO: 50764 - DNA, 19 bp, Homo sapiens
  siRNA target sequence for DDX25 (NM_013264.2,647-665).
gacatcactaaacagatta

SEQ ID NO: 50765 - DNA, 19 bp, Homo sapiens
  siRNA target sequence for DDX25 (NM_013264.2,649-667).
catcactaaacagattata

SEQ ID NO: 50766 - DNA, 19 bp, Homo sapiens
  siRNA target sequence for DDX25 (NM_013264.2,692-710).
gattggtgttttaaactaa

SEQ ID NO: 50767 - DNA, 19 bp, Homo sapiens
  siRNA target sequence for DDX25 (NM_013264.2,780-798).
gattctcagatcatagtat

SEQ ID NO: 50768 - DNA, 19 bp, Homo sapiens
  siRNA target sequence for DDX25 (NM_013264.2,784-802).
ctcagatcatagtattcgt

SEQ ID NO: 50769 - DNA, 19 bp, Homo sapiens
  siRNA target sequence for DDX25 (NM_013264.2,786-804).
cagatcatagtattcgtat

SEQ ID NO: 50770 - DNA, 19 bp, Homo sapiens
  siRNA target sequence for DDX25 (NM_013264.2,791-809).
catagtattcgtattcaaa

SEQ ID NO: 50771 - DNA, 19 bp, Homo sapiens
  siRNA target sequence for DDX25 (NM_013264.2,819-837).
cctccgaatgccaaatgct

SEQ ID NO: 50772 - DNA, 19 bp, Homo sapiens
  siRNA target sequence for DDX25 (NM_013264.2,829-847).
ccaaatgctcctcttttca

SEQ ID NO: 50773 - DNA, 19 bp, Homo sapiens
  siRNA target sequence for DDX25 (NM_013264.2,896-914).
gaccctaatgttatcaagt

SEQ ID NO: 50774 - DNA, 19 bp, Homo sapiens
  siRNA target sequence for DDX25 (NM_013264.2,937-955).
gaacaacatccggcaatat

SEQ ID NO: 50775 - DNA, 19 bp, Homo sapiens
  siRNA target sequence for DDX25 (NM_013264.2,1025-1043).
ggtcaggccatcatcttct

SEQ ID NO: 50776 - DNA, 19 bp, Homo sapiens
  siRNA target sequence for DDX25 (NM_013264.2,1068-1086).
ggttgaccgtggagatgat

SEQ ID NO: 50777 - DNA, 19 bp, Homo sapiens
  siRNA target sequence for DDX25 (NM_013264.2,1069-1087).
gttgaccgtggagatgata

SEQ ID NO: 50778 - DNA, 19 bp, Homo sapiens
  siRNA target sequence for DDX25 (NM_013264.2,1135-1153).
gcagcgagcttccatcatt

SEQ ID NO: 50779 - DNA, 19 bp, Homo sapiens
  siRNA target sequence for DDX25 (NM_013264.2,1139-1157).
cgagcttccatcattcaga

SEQ ID NO: 50780 - DNA, 19 bp, Homo sapiens
  siRNA target sequence for DDX25 (NM_013264.2,1175-1193).
gagaaggttctcataacaa

SEQ ID NO: 50781 - DNA, 19 bp, Homo sapiens
  siRNA target sequence for DDX25 (NM_013264.2,1180-1198).
ggttctcataacaactaat

SEQ ID NO: 50782 - DNA, 19 bp, Homo sapiens
  siRNA target sequence for DDX25 (NM_013264.2,1184-1202).
ctcataacaactaatgttt

SEQ ID NO: 50783 - DNA, 19 bp, Homo sapiens
  siRNA target sequence for DDX25 (NM_013264.2,1186-1204).
cataacaactaatgtttgt

SEQ ID NO: 50784 - DNA, 19 bp, Homo sapiens
  siRNA target sequence for DDX25 (NM_013264.2,1222-1240).
gaagcaggtcacaattgtt

SEQ ID NO: 50785 - DNA, 19 bp, Homo sapiens
  siRNA target sequence for DDX25 (NM_013264.2,1271-1289).
gaggagccggactatgaga

SEQ ID NO: 50786 - DNA, 19 bp, Homo sapiens
  siRNA target sequence for DDX25 (NM_013264.2,1345-1363).
caacatgattgaagtagat

SEQ ID NO: 50787 - DNA, 19 bp, Homo sapiens
  siRNA target sequence for DDX25 (NM_013264.2,1371-1389).
cctcgctcatgaaaatcca

SEQ ID NO: 50788 - DNA, 19 bp, Homo sapiens
  siRNA target sequence for DDX41 (NM_016222.2,292-310).
caccagcaccttaaagaga

SEQ ID NO: 50789 - DNA, 19 bp, Homo sapiens
  siRNA target sequence for DDX41 (NM_016222.2,313-331).
gctgaagcgcgcaaagagt

SEQ ID NO: 50790 - DNA, 19 bp, Homo sapiens
  siRNA target sequence for DDX41 (NM_016222.2,383-401).
ccgagggccgagcattgat

SEQ ID NO: 50791 - DNA, 19 bp, Homo sapiens
  siRNA target sequence for DDX41 (NM_016222.2,385-403).
gagggccgagcattgatgt

SEQ ID NO: 50792 - DNA, 19 bp, Homo sapiens
  siRNA target sequence for DDX41 (NM_016222.2,417-435).
ggctaagggcattacgtat

SEQ ID NO: 50793 - DNA, 19 bp, Homo sapiens
  siRNA target sequence for DDX41 (NM_016222.2,458-476).
ggactccaccccgttatgt

SEQ ID NO: 50794 - DNA, 19 bp, Homo sapiens
  siRNA target sequence for DDX41 (NM_016222.2,459-477).
gactccaccccgttatgtt

SEQ ID NO: 50795 - DNA, 19 bp, Homo sapiens
  siRNA target sequence for DDX41 (NM_016222.2,728-746).
cgttgcccgtcatcatgtt

SEQ ID NO: 50796 - DNA, 19 bp, Homo sapiens
  siRNA target sequence for DDX41 (NM_016222.2,793-811).
ccctatggactcatcatct

SEQ ID NO: 50797 - DNA, 19 bp, Homo sapiens
  siRNA target sequence for DDX41 (NM_016222.2,844-862).
ggcatcctggagtactact

SEQ ID NO: 50798 - DNA, 19 bp, Homo sapiens
  siRNA target sequence for DDX41 (NM_016222.2,917-935).
ggggcatgtccgtgaaaga

SEQ ID NO: 50799 - DNA, 19 bp, Homo sapiens
  siRNA target sequence for DDX41 (NM_016222.2,1090-1108).
gacatccgtaccatcttct

SEQ ID NO: 50800 - DNA, 19 bp, Homo sapiens
  siRNA target sequence for DDX41 (NM_016222.2,1147-1165).
gccaccatgccgaagaaga

SEQ ID NO: 50801 - DNA, 19 bp, Homo sapiens
  siRNA target sequence for DDX41 (NM_016222.2,1149-1167).
caccatgccgaagaagatt

SEQ ID NO: 50802 - DNA, 19 bp, Homo sapiens
  siRNA target sequence for DDX41 (NM_016222.2,1151-1169).
ccatgccgaagaagattca

SEQ ID NO: 50803 - DNA, 19 bp, Homo sapiens
  siRNA target sequence for DDX41 (NM_016222.2,1524-1542).
ccagcacgtcatcaattat

SEQ ID NO: 50804 - DNA, 19 bp, Homo sapiens
  siRNA target sequence for DDX41 (NM_016222.2,1528-1546).
cacgtcatcaattatgaca

SEQ ID NO: 50805 - DNA, 19 bp, Homo sapiens
  siRNA target sequence for DDX41 (NM_016222.2,1554-1572).
ggagattgagaactatgta

SEQ ID NO: 50806 - DNA, 19 bp, Homo sapiens
  siRNA target sequence for DDX41 (NM_016222.2,1617-1635).
cactaccttcatcaacaaa

SEQ ID NO: 50807 - DNA, 19 bp, Homo sapiens
  siRNA target sequence for DDX43 (NM_018665.1,276-294).
gtcctgagggatatagtgt

SEQ ID NO: 50808 - DNA, 19 bp, Homo sapiens
  siRNA target sequence for DDX43 (NM_018665.1,358-376).
ggaactgccgctgtgtttt

SEQ ID NO: 50809 - DNA, 19 bp, Homo sapiens
  siRNA target sequence for DDX43 (NM_018665.1,378-396).
ctttgaagagccactttgt

SEQ ID NO: 50810 - DNA, 19 bp, Homo sapiens
  siRNA target sequence for DDX43 (NM_018665.1,409-427).
cggtcgtggtgggtcaaaa

SEQ ID NO: 50811 - DNA, 19 bp, Homo sapiens
  siRNA target sequence for DDX43 (NM_018665.1,410-428).
ggtcgtggtgggtcaaaaa

SEQ ID NO: 50812 - DNA, 19 bp, Homo sapiens
  siRNA target sequence for DDX43 (NM_018665.1,411-429).
gtcgtggtgggtcaaaaat

SEQ ID NO: 50813 - DNA, 19 bp, Homo sapiens
  siRNA target sequence for DDX43 (NM_018665.1,413-431).
cgtggtgggtcaaaaataa

SEQ ID NO: 50814 - DNA, 19 bp, Homo sapiens
  siRNA target sequence for DDX43 (NM_018665.1,414-432).
gtggtgggtcaaaaataaa

SEQ ID NO: 50815 - DNA, 19 bp, Homo sapiens
  siRNA target sequence for DDX43 (NM_018665.1,416-434).
ggtgggtcaaaaataaaga

SEQ ID NO: 50816 - DNA, 19 bp, Homo sapiens
  siRNA target sequence for DDX43 (NM_018665.1,459-477).
caatccaaataatacaaga

SEQ ID NO: 50817 - DNA, 19 bp, Homo sapiens
  siRNA target sequence for DDX43 (NM_018665.1,482-500).
ccagaatcattagtcaaaa

SEQ ID NO: 50818 - DNA, 19 bp, Homo sapiens
  siRNA target sequence for DDX43 (NM_018665.1,510-528).
gcaaggcaatgcaaacgaa

SEQ ID NO: 50819 - DNA, 19 bp, Homo sapiens
  siRNA target sequence for DDX43 (NM_018665.1,633-651).
gcacagataacaatgttgt

SEQ ID NO: 50820 - DNA, 19 bp, Homo sapiens
  siRNA target sequence for DDX43 (NM_018665.1,657-675).
gagatcggccattgataga

SEQ ID NO: 50821 - DNA, 19 bp, Homo sapiens
  siRNA target sequence for DDX43 (NM_018665.1,659-677).
gatcggccattgatagatt

SEQ ID NO: 50822 - DNA, 19 bp, Homo sapiens
  siRNA target sequence for DDX43 (NM_018665.1,777-795).
gtgccatgtcaaaagtaga

SEQ ID NO: 50823 - DNA, 19 bp, Homo sapiens
  siRNA target sequence for DDX43 (NM_018665.1,860-878).
cgacctatccccaatccta

SEQ ID NO: 50824 - DNA, 19 bp, Homo sapiens
  siRNA target sequence for DDX43 (NM_018665.1,876-894).
ctacctgcacatttgatga

SEQ ID NO: 50825 - DNA, 19 bp, Homo sapiens
  siRNA target sequence for DDX43 (NM_018665.1,890-908).
gatgacgcctttcaatgtt

SEQ ID NO: 50826 - DNA, 19 bp, Homo sapiens
  siRNA target sequence for DDX43 (NM_018665.1,906-924).
gttatcctgaggttatgga

SEQ ID NO: 50827 - DNA, 19 bp, Homo sapiens
  siRNA target sequence for DDX43 (NM_018665.1,981-999).
ccattgtgttgcaaggaat

SEQ ID NO: 50828 - DNA, 19 bp, Homo sapiens
  siRNA target sequence for DDX43 (NM_018665.1,982-1000).
cattgtgttgcaaggaata

SEQ ID NO: 50829 - DNA, 19 bp, Homo sapiens
  siRNA target sequence for DDX43 (NM_018665.1,1075-1093).
ccttcaacccagccttaaa

SEQ ID NO: 50830 - DNA, 19 bp, Homo sapiens
  siRNA target sequence for DDX43 (NM_018665.1,1087-1105).
ccttaaaggtcaaaggaat

SEQ ID NO: 50831 - DNA, 19 bp, Homo sapiens
  siRNA target sequence for DDX43 (NM_018665.1,1102-1120).
gaatagacccggcatgtta

SEQ ID NO: 50832 - DNA, 19 bp, Homo sapiens
  siRNA target sequence for DDX43 (NM_018665.1,1107-1125).
gacccggcatgttagttct

SEQ ID NO: 50833 - DNA, 19 bp, Homo sapiens
  siRNA target sequence for DDX43 (NM_018665.1,1111-1129).
cggcatgttagttctaact

SEQ ID NO: 50834 - DNA, 19 bp, Homo sapiens
  siRNA target sequence for DDX43 (NM_018665.1,1137-1155).
gggaattagcacttcaagt

SEQ ID NO: 50835 - DNA, 19 bp, Homo sapiens
  siRNA target sequence for DDX43 (NM_018665.1,1215-1233).
gtggaaatagagatgaaca

SEQ ID NO: 50836 - DNA, 19 bp, Homo sapiens
  siRNA target sequence for DDX43 (NM_018665.1,1272-1290).
caactcccggaagattgaa

SEQ ID NO: 50837 - DNA, 19 bp, Homo sapiens
  siRNA target sequence for DDX43 (NM_018665.1,1275-1293).
ctcccggaagattgaatga

SEQ ID NO: 50838 - DNA, 19 bp, Homo sapiens
  siRNA target sequence for DDX43 (NM_018665.1,1278-1296).
ccggaagattgaatgatct

SEQ ID NO: 50839 - DNA, 19 bp, Homo sapiens
  siRNA target sequence for DDX43 (NM_018665.1,1284-1302).
gattgaatgatctgcaaat

SEQ ID NO: 50840 - DNA, 19 bp, Homo sapiens
  siRNA target sequence for DDX43 (NM_018665.1,1305-1323).
gtaacttcgtcaatctgaa

SEQ ID NO: 50841 - DNA, 19 bp, Homo sapiens
  siRNA target sequence for DDX43 (NM_018665.1,1309-1327).
cttcgtcaatctgaagaat

SEQ ID NO: 50842 - DNA, 19 bp, Homo sapiens
  siRNA target sequence for DDX43 (NM_018665.1,1312-1330).
cgtcaatctgaagaatata

SEQ ID NO: 50843 - DNA, 19 bp, Homo sapiens
  siRNA target sequence for DDX43 (NM_018665.1,1313-1331).
gtcaatctgaagaatataa

SEQ ID NO: 50844 - DNA, 19 bp, Homo sapiens
  siRNA target sequence for DDX43 (NM_018665.1,1416-1434).
cagataggcagacagttat

SEQ ID NO: 50845 - DNA, 19 bp, Homo sapiens
  siRNA target sequence for DDX43 (NM_018665.1,1463-1481).
catcgcctcgcacaatctt

SEQ ID NO: 50846 - DNA, 19 bp, Homo sapiens
  siRNA target sequence for DDX43 (NM_018665.1,1466-1484).
cgcctcgcacaatcttatt

SEQ ID NO: 50847 - DNA, 19 bp, Homo sapiens
  siRNA target sequence for DDX43 (NM_018665.1,1467-1485).
gcctcgcacaatcttattt

SEQ ID NO: 50848 - DNA, 19 bp, Homo sapiens
  siRNA target sequence for DDX43 (NM_018665.1,1469-1487).
ctcgcacaatcttatttga

SEQ ID NO: 50849 - DNA, 19 bp, Homo sapiens
  siRNA target sequence for DDX43 (NM_018665.1,1471-1489).
cgcacaatcttatttgaaa

SEQ ID NO: 50850 - DNA, 19 bp, Homo sapiens
  siRNA target sequence for DDX43 (NM_018665.1,1519-1537).
ggatctagttgctgtaagt

SEQ ID NO: 50851 - DNA, 19 bp, Homo sapiens
  siRNA target sequence for DDX43 (NM_018665.1,1520-1538).
gatctagttgctgtaagtt

SEQ ID NO: 50852 - DNA, 19 bp, Homo sapiens
  siRNA target sequence for DDX43 (NM_018665.1,1614-1632).
catccacagacaaagtcat

SEQ ID NO: 50853 - DNA, 19 bp, Homo sapiens
  siRNA target sequence for DDX43 (NM_018665.1,1636-1654).
cttcgtttctcgaaaagct

SEQ ID NO: 50854 - DNA, 19 bp, Homo sapiens
  siRNA target sequence for DDX43 (NM_018665.1,1655-1673).
gttgcggatcacttatcaa

SEQ ID NO: 50855 - DNA, 19 bp, Homo sapiens
  siRNA target sequence for DDX43 (NM_018665.1,1666-1684).
cttatcaagtgacctaata

SEQ ID NO: 50856 - DNA, 19 bp, Homo sapiens
  siRNA target sequence for DDX43 (NM_018665.1,1736-1754).
cgggagaaagcattagaga

SEQ ID NO: 50857 - DNA, 19 bp, Homo sapiens
  siRNA target sequence for DDX43 (NM_018665.1,1823-1841).
gacgttacacatgtctata

SEQ ID NO: 50858 - DNA, 19 bp, Homo sapiens
  siRNA target sequence for DDX43 (NM_018665.1,1825-1843).
cgttacacatgtctataat

SEQ ID NO: 50859 - DNA, 19 bp, Homo sapiens
  siRNA target sequence for DDX43 (NM_018665.1,1849-1867).
ctttccacggaatattgaa

SEQ ID NO: 50860 - DNA, 19 bp, Homo sapiens
  siRNA target sequence for DDX43 (NM_018665.1,1857-1875).
ggaatattgaagaatacgt

SEQ ID NO: 50861 - DNA, 19 bp, Homo sapiens
  siRNA target sequence for DDX43 (NM_018665.1,1858-1876).
gaatattgaagaatacgta

SEQ ID NO: 50862 - DNA, 19 bp, Homo sapiens
  siRNA target sequence for DDX43 (NM_018665.1,1951-1969).
ggttgcctctgaattgatt

SEQ ID NO: 50863 - DNA, 19 bp, Homo sapiens
  siRNA target sequence for DDX43 (NM_018665.1,1952-1970).
gttgcctctgaattgatta

SEQ ID NO: 50864 - DNA, 19 bp, Homo sapiens
  siRNA target sequence for DDX43 (NM_018665.1,1955-1973).
gcctctgaattgattaata

SEQ ID NO: 50865 - DNA, 19 bp, Homo sapiens
  siRNA target sequence for DDX43 (NM_018665.1,1956-1974).
cctctgaattgattaatat

SEQ ID NO: 50866 - DNA, 19 bp, Homo sapiens
  siRNA target sequence for DDX5 (NM_004396.2,215-233).
gtttggtgcacctcgattt

SEQ ID NO: 50867 - DNA, 19 bp, Homo sapiens
  siRNA target sequence for DDX5 (NM_004396.2,280-298).
ctggggagaaattagttaa

SEQ ID NO: 50868 - DNA, 19 bp, Homo sapiens
  siRNA target sequence for DDX5 (NM_004396.2,434-452).
ctgcccgaagccagttcta

SEQ ID NO: 50869 - DNA, 19 bp, Homo sapiens
  siRNA target sequence for DDX5 (NM_004396.2,436-454).
gcccgaagccagttctaaa

SEQ ID NO: 50870 - DNA, 19 bp, Homo sapiens
  siRNA target sequence for DDX5 (NM_004396.2,437-455).
cccgaagccagttctaaat

SEQ ID NO: 50871 - DNA, 19 bp, Homo sapiens
  siRNA target sequence for DDX5 (NM_004396.2,438-456).
ccgaagccagttctaaatt

SEQ ID NO: 50872 - DNA, 19 bp, Homo sapiens
  siRNA target sequence for DDX5 (NM_004396.2,439-457).
cgaagccagttctaaattt

SEQ ID NO: 50873 - DNA, 19 bp, Homo sapiens
  siRNA target sequence for DDX5 (NM_004396.2,477-495).
gcaaatgtcatggatgtta

SEQ ID NO: 50874 - DNA, 19 bp, Homo sapiens
  siRNA target sequence for DDX5 (NM_004396.2,552-570).
gctctaagtggattggata

SEQ ID NO: 50875 - DNA, 19 bp, Homo sapiens
  siRNA target sequence for DDX5 (NM_004396.2,625-643).
ccattgtccacatcaatca

SEQ ID NO: 50876 - DNA, 19 bp, Homo sapiens
  siRNA target sequence for DDX5 (NM_004396.2,663-681).
ggcgatgggcctatttgtt

SEQ ID NO: 50877 - DNA, 19 bp, Homo sapiens
  siRNA target sequence for DDX5 (NM_004396.2,664-682).
gcgatgggcctatttgttt

SEQ ID NO: 50878 - DNA, 19 bp, Homo sapiens
  siRNA target sequence for DDX5 (NM_004396.2,747-765).
gcatgtcgcttgaagtcta

SEQ ID NO: 50879 - DNA, 19 bp, Homo sapiens
  siRNA target sequence for DDX5 (NM_004396.2,753-771).
cgcttgaagtctacttgta

SEQ ID NO: 50880 - DNA, 19 bp, Homo sapiens
  siRNA target sequence for DDX5 (NM_004396.2,754-772).
gcttgaagtctacttgtat

SEQ ID NO: 50881 - DNA, 19 bp, Homo sapiens
  siRNA target sequence for DDX5 (NM_004396.2,784-802).
ctcctaagggaccacaaat

SEQ ID NO: 50882 - DNA, 19 bp, Homo sapiens
  siRNA target sequence for DDX5 (NM_004396.2,793-811).
gaccacaaatacgtgattt

SEQ ID NO: 50883 - DNA, 19 bp, Homo sapiens
  siRNA target sequence for DDX5 (NM_004396.2,796-814).
cacaaatacgtgatttgga

SEQ ID NO: 50884 - DNA, 19 bp, Homo sapiens
  siRNA target sequence for DDX5 (NM_004396.2,844-862).
ctggaagactgattgactt

SEQ ID NO: 50885 - DNA, 19 bp, Homo sapiens
  siRNA target sequence for DDX5 (NM_004396.2,898-916).
cctaccttgtccttgatga

SEQ ID NO: 50886 - DNA, 19 bp, Homo sapiens
  siRNA target sequence for DDX5 (NM_004396.2,981-999).
cctgataggcaaactctaa

SEQ ID NO: 50887 - DNA, 19 bp, Homo sapiens
  siRNA target sequence for DDX5 (NM_004396.2,982-1000).
ctgataggcaaactctaat

SEQ ID NO: 50888 - DNA, 19 bp, Homo sapiens
  siRNA target sequence for DDX5 (NM_004396.2,984-1002).
gataggcaaactctaatgt

SEQ ID NO: 50889 - DNA, 19 bp, Homo sapiens
  siRNA target sequence for DDX5 (NM_004396.2,1044-1062).
gatttcctgaaagactata

SEQ ID NO: 50890 - DNA, 19 bp, Homo sapiens
  siRNA target sequence for DDX5 (NM_004396.2,1050-1068).
ctgaaagactatattcata

SEQ ID NO: 50891 - DNA, 19 bp, Homo sapiens
  siRNA target sequence for DDX5 (NM_004396.2,1052-1070).
gaaagactatattcatata

SEQ ID NO: 50892 - DNA, 19 bp, Homo sapiens
  siRNA target sequence for DDX5 (NM_004396.2,1129-1147).
gtcatgacgtagaaaagga

SEQ ID NO: 50893 - DNA, 19 bp, Homo sapiens
  siRNA target sequence for DDX5 (NM_004396.2,1145-1163).
ggatgaaaaacttattcgt

SEQ ID NO: 50894 - DNA, 19 bp, Homo sapiens
  siRNA target sequence for DDX5 (NM_004396.2,1190-1208).
ggagaataaaaccattgtt

SEQ ID NO: 50895 - DNA, 19 bp, Homo sapiens
  siRNA target sequence for DDX5 (NM_004396.2,1305-1323).
gagcgtgactgggttctaa

SEQ ID NO: 50896 - DNA, 19 bp, Homo sapiens
  siRNA target sequence for DDX5 (NM_004396.2,1339-1357).
gaaaagctcctattctgat

SEQ ID NO: 50897 - DNA, 19 bp, Homo sapiens
  siRNA target sequence for DDX5 (NM_004396.2,1426-1444).
ctaactcctcagaggatta

SEQ ID NO: 50898 - DNA, 19 bp, Homo sapiens
  siRNA target sequence for DDX5 (NM_004396.2,1430-1448).
ctcctcagaggattatatt

SEQ ID NO: 50899 - DNA, 19 bp, Homo sapiens
  siRNA target sequence for DDX5 (NM_004396.2,1439-1457).
ggattatattcatcgaatt

SEQ ID NO: 50900 - DNA, 19 bp, Homo sapiens
  siRNA target sequence for DDX5 (NM_004396.2,1483-1501).
caggcacagcatacacttt

SEQ ID NO: 50901 - DNA, 19 bp, Homo sapiens
  siRNA target sequence for DDX5 (NM_004396.2,1507-1525).
cacctaataacataaagca

SEQ ID NO: 50902 - DNA, 19 bp, Homo sapiens
  siRNA target sequence for DDX5 (NM_004396.2,1524-1542).
caagtgagcgaccttatct

SEQ ID NO: 50903 - DNA, 19 bp, Homo sapiens
  siRNA target sequence for DDX5 (NM_004396.2,1547-1565).
gcttcgtgaagctaatcaa

SEQ ID NO: 50904 - DNA, 19 bp, Homo sapiens
  siRNA target sequence for DDX5 (NM_004396.2,1552-1570).
gtgaagctaatcaagcaat

SEQ ID NO: 50905 - DNA, 19 bp, Homo sapiens
  siRNA target sequence for DDX5 (NM_004396.2,1644-1662).
gaccgtcgggacagatact

SEQ ID NO: 50906 - DNA, 19 bp, Homo sapiens
  siRNA target sequence for DDX5 (NM_004396.2,1646-1664).
ccgtcgggacagatactct

SEQ ID NO: 50907 - DNA, 19 bp, Homo sapiens
  siRNA target sequence for DDX5 (NM_004396.2,1667-1685).
gggcaaaaggggtggattt

SEQ ID NO: 50908 - DNA, 19 bp, Homo sapiens
  siRNA target sequence for DDX5 (NM_004396.2,1668-1686).
ggcaaaaggggtggattta

SEQ ID NO: 50909 - DNA, 19 bp, Homo sapiens
  siRNA target sequence for DDX5 (NM_004396.2,1720-1738).
gttactctagcctgcttaa

SEQ ID NO: 50910 - DNA, 19 bp, Homo sapiens
  siRNA target sequence for DDX5 (NM_004396.2,1798-1816).
ggagctttggaagtaattt

SEQ ID NO: 50911 - DNA, 19 bp, Homo sapiens
  siRNA target sequence for DDX5 (NM_004396.2,1818-1836).
gtgtctgctggtatacaga

SEQ ID NO: 50912 - DNA, 19 bp, Homo sapiens
  siRNA target sequence for DDX5 (NM_004396.2,1827-1845).
ggtatacagaccagtttta

SEQ ID NO: 50913 - DNA, 19 bp, Homo sapiens
  siRNA target sequence for DDX5 (NM_004396.2,1863-1881).
gggacttaccagaatggtt

SEQ ID NO: 50914 - DNA, 19 bp, Homo sapiens
  siRNA target sequence for DDX5 (NM_004396.2,1864-1882).
ggacttaccagaatggtta

SEQ ID NO: 50915 - DNA, 19 bp, Homo sapiens
  siRNA target sequence for DDX5 (NM_004396.2,1865-1883).
gacttaccagaatggttat

SEQ ID NO: 50916 - DNA, 19 bp, Homo sapiens
  siRNA target sequence for DDX5 (NM_004396.2,1867-1885).
cttaccagaatggttatga

SEQ ID NO: 50917 - DNA, 19 bp, Homo sapiens
  siRNA target sequence for DDX5 (NM_004396.2,1891-1909).
ctcagcaatacggaagtaa

SEQ ID NO: 50918 - DNA, 19 bp, Homo sapiens
  siRNA target sequence for DDX5 (NM_004396.2,1895-1913).
gcaatacggaagtaatgtt

SEQ ID NO: 50919 - DNA, 19 bp, Homo sapiens
  siRNA target sequence for DDX5 (NM_004396.2,1901-1919).
cggaagtaatgttccaaat

SEQ ID NO: 50920 - DNA, 19 bp, Homo sapiens
  siRNA target sequence for DDX5 (NM_004396.2,1914-1932).
ccaaatatgcacaatggta

SEQ ID NO: 50921 - DNA, 19 bp, Homo sapiens
  siRNA target sequence for DDX5 (NM_004396.2,1915-1933).
caaatatgcacaatggtat

SEQ ID NO: 50922 - DNA, 19 bp, Homo sapiens
  siRNA target sequence for DDX5 (NM_004396.2,1968-1986).
gctgcacctatgattggtt

SEQ ID NO: 50923 - DNA, 19 bp, Homo sapiens
  siRNA target sequence for DDX5 (NM_004396.2,1969-1987).
ctgcacctatgattggtta

SEQ ID NO: 50924 - DNA, 19 bp, Homo sapiens
  siRNA target sequence for DDX5 (NM_004396.2,1974-1992).
cctatgattggttatccaa

SEQ ID NO: 50925 - DNA, 19 bp, Homo sapiens
  siRNA target sequence for DDX5 (NM_004396.2,1975-1993).
ctatgattggttatccaat

SEQ ID NO: 50926 - DNA, 19 bp, Homo sapiens
  siRNA target sequence for DDX5 (NM_004396.2,1989-2007).
ccaatgccaacaggatatt

SEQ ID NO: 50927 - DNA, 19 bp, Homo sapiens
  siRNA target sequence for DDX56 (NM_019082.1,84-102).
cactgggcttcgaacacat

SEQ ID NO: 50928 - DNA, 19 bp, Homo sapiens
  siRNA target sequence for DDX56 (NM_019082.1,291-309).
caggtccggtggtagaaca

SEQ ID NO: 50929 - DNA, 19 bp, Homo sapiens
  siRNA target sequence for DDX56 (NM_019082.1,355-373).
gcaagcacagtccatgatt

SEQ ID NO: 50930 - DNA, 19 bp, Homo sapiens
  siRNA target sequence for DDX56 (NM_019082.1,487-505).
gaccccatctcgcatatta

SEQ ID NO: 50931 - DNA, 19 bp, Homo sapiens
  siRNA target sequence for DDX56 (NM_019082.1,517-535).
gcaagacagcctgaaactt

SEQ ID NO: 50932 - DNA, 19 bp, Homo sapiens
  siRNA target sequence for DDX56 (NM_019082.1,709-727).
cccggttacccttaagtta

SEQ ID NO: 50933 - DNA, 19 bp, Homo sapiens
  siRNA target sequence for DDX56 (NM_019082.1,711-729).
cggttacccttaagttaca

SEQ ID NO: 50934 - DNA, 19 bp, Homo sapiens
  siRNA target sequence for DDX56 (NM_019082.1,744-762).
ctgggccagaccagttaca

SEQ ID NO: 50935 - DNA, 19 bp, Homo sapiens
  siRNA target sequence for DDX56 (NM_019082.1,820-838).
gctcaagctgtcattgatt

SEQ ID NO: 50936 - DNA, 19 bp, Homo sapiens
  siRNA target sequence for DDX56 (NM_019082.1,856-874).
ctttgtcaacactctagaa

SEQ ID NO: 50937 - DNA, 19 bp, Homo sapiens
  siRNA target sequence for DDX56 (NM_019082.1,891-909).
gcctgttcttggaacagtt

SEQ ID NO: 50938 - DNA, 19 bp, Homo sapiens
  siRNA target sequence for DDX56 (NM_019082.1,988-1006).
cttctacgactgtgtcata

SEQ ID NO: 50939 - DNA, 19 bp, Homo sapiens
  siRNA target sequence for DDX56 (NM_019082.1,997-1015).
ctgtgtcatagcaactgat

SEQ ID NO: 50940 - DNA, 19 bp, Homo sapiens
  siRNA target sequence for DDX56 (NM_019082.1,1134-1152).
ctgtgctcaactttgatct

SEQ ID NO: 50941 - DNA, 19 bp, Homo sapiens
  siRNA target sequence for DDX56 (NM_019082.1,1207-1225).
caacccaggcatagtctta

SEQ ID NO: 50942 - DNA, 19 bp, Homo sapiens
  siRNA target sequence for DDX56 (NM_019082.1,1211-1229).
ccaggcatagtcttaacct

SEQ ID NO: 50943 - DNA, 19 bp, Homo sapiens
  siRNA target sequence for DDX56 (NM_019082.1,1389-1407).
ccattcgggaggcaagatt

SEQ ID NO: 50944 - DNA, 19 bp, Homo sapiens
  siRNA target sequence for DDX6 (NM_004397.3,515-533).
gtatgaccaccactattaa

SEQ ID NO: 50945 - DNA, 19 bp, Homo sapiens
  siRNA target sequence for DDX6 (NM_004397.3,519-537).
gaccaccactattaaacct

SEQ ID NO: 50946 - DNA, 19 bp, Homo sapiens
  siRNA target sequence for DDX6 (NM_004397.3,571-589).
ccaaaggatctaagaatca

SEQ ID NO: 50947 - DNA, 19 bp, Homo sapiens
  siRNA target sequence for DDX6 (NM_004397.3,577-595).
gatctaagaatcaaaactt

SEQ ID NO: 50948 - DNA, 19 bp, Homo sapiens
  siRNA target sequence for DDX6 (NM_004397.3,597-615).
ggatgtgacctccacaaaa

SEQ ID NO: 50949 - DNA, 19 bp, Homo sapiens
  siRNA target sequence for DDX6 (NM_004397.3,638-656).
gtttgaaacgggagttact

SEQ ID NO: 50950 - DNA, 19 bp, Homo sapiens
  siRNA target sequence for DDX6 (NM_004397.3,708-726).
gagcattcccattgcttta

SEQ ID NO: 50951 - DNA, 19 bp, Homo sapiens
  siRNA target sequence for DDX6 (NM_004397.3,730-748).
ggtagggatatcttagcta

SEQ ID NO: 50952 - DNA, 19 bp, Homo sapiens
  siRNA target sequence for DDX6 (NM_004397.3,840-858).
gattgttcccactagagaa

SEQ ID NO: 50953 - DNA, 19 bp, Homo sapiens
  siRNA target sequence for DDX6 (NM_004397.3,862-880).
gctctacaggtcagtcaaa

SEQ ID NO: 50954 - DNA, 19 bp, Homo sapiens
  siRNA target sequence for DDX6 (NM_004397.3,863-881).
ctctacaggtcagtcaaat

SEQ ID NO: 50955 - DNA, 19 bp, Homo sapiens
  siRNA target sequence for DDX6 (NM_004397.3,865-883).
ctacaggtcagtcaaattt

SEQ ID NO: 50956 - DNA, 19 bp, Homo sapiens
  siRNA target sequence for DDX6 (NM_004397.3,941-959).
ccaatttacgagatgacat

SEQ ID NO: 50957 - DNA, 19 bp, Homo sapiens
  siRNA target sequence for DDX6 (NM_004397.3,942-960).
caatttacgagatgacata

SEQ ID NO: 50958 - DNA, 19 bp, Homo sapiens
  siRNA target sequence for DDX6 (NM_004397.3,957-975).
cataatgaggcttgatgat

SEQ ID NO: 50959 - DNA, 19 bp, Homo sapiens
  siRNA target sequence for DDX6 (NM_004397.3,979-997).
gtgcacgtggtgattgcta

SEQ ID NO: 50960 - DNA, 19 bp, Homo sapiens
  siRNA target sequence for DDX6 (NM_004397.3,1031-1049).
gagtagcaaaggttgatca

SEQ ID NO: 50961 - DNA, 19 bp, Homo sapiens
  siRNA target sequence for DDX6 (NM_004397.3,1105-1123).
cagataatggaggatatta

SEQ ID NO: 50962 - DNA, 19 bp, Homo sapiens
  siRNA target sequence for DDX6 (NM_004397.3,1126-1144).
ctcacgctacctaaaaaca

SEQ ID NO: 50963 - DNA, 19 bp, Homo sapiens
  siRNA target sequence for DDX6 (NM_004397.3,1164-1182).
cgctactttccctcttagt

SEQ ID NO: 50964 - DNA, 19 bp, Homo sapiens
  siRNA target sequence for DDX6 (NM_004397.3,1166-1184).
ctactttccctcttagtgt

SEQ ID NO: 50965 - DNA, 19 bp, Homo sapiens
  siRNA target sequence for DDX6 (NM_004397.3,1209-1227).
gcagaaaccctatgagatt

SEQ ID NO: 50966 - DNA, 19 bp, Homo sapiens
  siRNA target sequence for DDX6 (NM_004397.3,1230-1248).
cctgatggaggaactaact

SEQ ID NO: 50967 - DNA, 19 bp, Homo sapiens
  siRNA target sequence for DDX6 (NM_004397.3,1262-1280).
cccagtactacgcatatgt

SEQ ID NO: 50968 - DNA, 19 bp, Homo sapiens
  siRNA target sequence for DDX6 (NM_004397.3,1263-1281).
ccagtactacgcatatgta

SEQ ID NO: 50969 - DNA, 19 bp, Homo sapiens
  siRNA target sequence for DDX6 (NM_004397.3,1264-1282).
cagtactacgcatatgtaa

SEQ ID NO: 50970 - DNA, 19 bp, Homo sapiens
  siRNA target sequence for DDX6 (NM_004397.3,1266-1284).
gtactacgcatatgtaact

SEQ ID NO: 50971 - DNA, 19 bp, Homo sapiens
  siRNA target sequence for DDX6 (NM_004397.3,1300-1318).
cactgcctcaacacacttt

SEQ ID NO: 50972 - DNA, 19 bp, Homo sapiens
  siRNA target sequence for DDX6 (NM_004397.3,1332-1350).
gataaaccagtcgatcatt

SEQ ID NO: 50973 - DNA, 19 bp, Homo sapiens
  siRNA target sequence for DDX6 (NM_004397.3,1339-1357).
cagtcgatcattttctgta

SEQ ID NO: 50974 - DNA, 19 bp, Homo sapiens
  siRNA target sequence for DDX6 (NM_004397.3,1359-1377).
ctcctctcagcgagttgaa

SEQ ID NO: 50975 - DNA, 19 bp, Homo sapiens
  siRNA target sequence for DDX6 (NM_004397.3,1364-1382).
ctcagcgagttgaattgct

SEQ ID NO: 50976 - DNA, 19 bp, Homo sapiens
  siRNA target sequence for DDX6 (NM_004397.3,1404-1422).
gggttattcttgcttctat

SEQ ID NO: 50977 - DNA, 19 bp, Homo sapiens
  siRNA target sequence for DDX6 (NM_004397.3,1440-1458).
gcaggaacatcgaaatcgt

SEQ ID NO: 50978 - DNA, 19 bp, Homo sapiens
  siRNA target sequence for DDX6 (NM_004397.3,1481-1499).
gcttatgccgcaatcttgt

SEQ ID NO: 50979 - DNA, 19 bp, Homo sapiens
  siRNA target sequence for DDX6 (NM_004397.3,1498-1516).
gtttgcactgatctgttta

SEQ ID NO: 50980 - DNA, 19 bp, Homo sapiens
  siRNA target sequence for DDX6 (NM_004397.3,1512-1530).
gtttacccgaggtattgat

SEQ ID NO: 50981 - DNA, 19 bp, Homo sapiens
  siRNA target sequence for DDX6 (NM_004397.3,1517-1535).
cccgaggtattgatataca

SEQ ID NO: 50982 - DNA, 19 bp, Homo sapiens
  siRNA target sequence for DDX6 (NM_004397.3,1518-1536).
ccgaggtattgatatacaa

SEQ ID NO: 50983 - DNA, 19 bp, Homo sapiens
  siRNA target sequence for DDX6 (NM_004397.3,1537-1555).
gctgtgaatgtggtaataa

SEQ ID NO: 50984 - DNA, 19 bp, Homo sapiens
  siRNA target sequence for DDX6 (NM_004397.3,1581-1599).
gacctatctccatcgtatt

SEQ ID NO: 50985 - DNA, 19 bp, Homo sapiens
  siRNA target sequence for DDX6 (NM_004397.3,1584-1602).
ctatctccatcgtattgga

SEQ ID NO: 50986 - DNA, 19 bp, Homo sapiens
  siRNA target sequence for DDX6 (NM_004397.3,1590-1608).
ccatcgtattggaagatca

SEQ ID NO: 50987 - DNA, 19 bp, Homo sapiens
  siRNA target sequence for DDX6 (NM_004397.3,1624-1642).
cttggcttagccatcaact

SEQ ID NO: 50988 - DNA, 19 bp, Homo sapiens
  siRNA target sequence for DDX6 (NM_004397.3,1627-1645).
ggcttagccatcaacttga

SEQ ID NO: 50989 - DNA, 19 bp, Homo sapiens
  siRNA target sequence for DDX6 (NM_004397.3,1634-1652).
ccatcaacttgatcacata

SEQ ID NO: 50990 - DNA, 19 bp, Homo sapiens
  siRNA target sequence for DDX6 (NM_004397.3,1635-1653).
catcaacttgatcacatat

SEQ ID NO: 50991 - DNA, 19 bp, Homo sapiens
  siRNA target sequence for DDX6 (NM_004397.3,1662-1680).
cttcaacctgaaaagtatt

SEQ ID NO: 50992 - DNA, 19 bp, Homo sapiens
  siRNA target sequence for DDX6 (NM_004397.3,1709-1727).
ctattccgagcaacattga

SEQ ID NO: 50993 - DNA, 19 bp, Homo sapiens
  siRNA target sequence for DDX6 (NM_004397.3,1714-1732).
ccgagcaacattgataaga

SEQ ID NO: 50994 - DNA, 19 bp, Homo sapiens
  siRNA target sequence for DDX6 (NM_004397.3,1757-1775).
gcgagcctgtagaagatga

SEQ ID NO: 50995 - DNA, 19 bp, Homo sapiens
  siRNA target sequence for DHX34 (NM_014681.3,515-533).
gaagttttggaccttcttt

SEQ ID NO: 50996 - DNA, 19 bp, Homo sapiens
  siRNA target sequence for DHX34 (NM_014681.3,518-536).
gttttggaccttctttgaa

SEQ ID NO: 50997 - DNA, 19 bp, Homo sapiens
  siRNA target sequence for DHX34 (NM_014681.3,1114-1132).
ggctgctcctgcgacaaat

SEQ ID NO: 50998 - DNA, 19 bp, Homo sapiens
  siRNA target sequence for DHX34 (NM_014681.3,1191-1209).
cggcatctccacaacgatt

SEQ ID NO: 50999 - DNA, 19 bp, Homo sapiens
  siRNA target sequence for DHX34 (NM_014681.3,1599-1617).
gccgaccaggacaaggtat

SEQ ID NO: 51000 - DNA, 19 bp, Homo sapiens
  siRNA target sequence for DHX34 (NM_014681.3,1600-1618).
ccgaccaggacaaggtatt

SEQ ID NO: 51001 - DNA, 19 bp, Homo sapiens
  siRNA target sequence for DHX34 (NM_014681.3,1632-1650).
cctggagtccggaaatgca

SEQ ID NO: 51002 - DNA, 19 bp, Homo sapiens
  siRNA target sequence for DHX34 (NM_014681.3,1633-1651).
ctggagtccggaaatgcat

SEQ ID NO: 51003 - DNA, 19 bp, Homo sapiens
  siRNA target sequence for DHX34 (NM_014681.3,1649-1667).
catcctctccaccaacatt

SEQ ID NO: 51004 - DNA, 19 bp, Homo sapiens
  siRNA target sequence for DHX34 (NM_014681.3,2294-2312).
ctgggtgcaggtgaaatct

SEQ ID NO: 51005 - DNA, 19 bp, Homo sapiens
  siRNA target sequence for DHX34 (NM_014681.3,2296-2314).
gggtgcaggtgaaatctga

SEQ ID NO: 51006 - DNA, 19 bp, Homo sapiens
  siRNA target sequence for DHX34 (NM_014681.3,2297-2315).
ggtgcaggtgaaatctgaa

SEQ ID NO: 51007 - DNA, 19 bp, Homo sapiens
  siRNA target sequence for DHX34 (NM_014681.3,2361-2379).
gagcatcgactgtacgaaa

SEQ ID NO: 51008 - DNA, 19 bp, Homo sapiens
  siRNA target sequence for DHX34 (NM_014681.3,3292-3310).
gcaaggaactcctgcaatt

SEQ ID NO: 51009 - DNA, 19 bp, Homo sapiens
  siRNA target sequence for DHX34 (NM_014681.3,3352-3370).
ggctagaagtccagaacat

SEQ ID NO: 51010 - DNA, 19 bp, Homo sapiens
  siRNA target sequence for DHX34 (NM_014681.3,3354-3372).
ctagaagtccagaacatgt

SEQ ID NO: 51011 - DNA, 19 bp, Homo sapiens
  siRNA target sequence for DHX34 (NM_014681.3,3474-3492).
gacttcctcacctacaact

SEQ ID NO: 51012 - DNA, 19 bp, Homo sapiens
  siRNA target sequence for DHX34 (NM_014681.3,3716-3734).
gaaggacttcctctttaca

SEQ ID NO: 51013 - DNA, 19 bp, Homo sapiens
  siRNA target sequence for DIS3 (NM_014953.2,45-63).
gtccaagacgttcttaaaa

SEQ ID NO: 51014 - DNA, 19 bp, Homo sapiens
  siRNA target sequence for DIS3 (NM_014953.2,231-249).
cttgctgcccgacactaat

SEQ ID NO: 51015 - DNA, 19 bp, Homo sapiens
  siRNA target sequence for DIS3 (NM_014953.2,235-253).
ctgcccgacactaatgtgt

SEQ ID NO: 51016 - DNA, 19 bp, Homo sapiens
  siRNA target sequence for DIS3 (NM_014953.2,237-255).
gcccgacactaatgtgtta

SEQ ID NO: 51017 - DNA, 19 bp, Homo sapiens
  siRNA target sequence for DIS3 (NM_014953.2,287-305).
ccatcaggaatgtaattgt

SEQ ID NO: 51018 - DNA, 19 bp, Homo sapiens
  siRNA target sequence for DIS3 (NM_014953.2,359-377).
gcatccgagatgtgactaa

SEQ ID NO: 51019 - DNA, 19 bp, Homo sapiens
  siRNA target sequence for DIS3 (NM_014953.2,360-378).
catccgagatgtgactaat

SEQ ID NO: 51020 - DNA, 19 bp, Homo sapiens
  siRNA target sequence for DIS3 (NM_014953.2,365-383).
gagatgtgactaataacca

SEQ ID NO: 51021 - DNA, 19 bp, Homo sapiens
  siRNA target sequence for DIS3 (NM_014953.2,381-399).
ccaagagaagcatttctat

SEQ ID NO: 51022 - DNA, 19 bp, Homo sapiens
  siRNA target sequence for DIS3 (NM_014953.2,390-408).
gcatttctatactttcact

SEQ ID NO: 51023 - DNA, 19 bp, Homo sapiens
  siRNA target sequence for DIS3 (NM_014953.2,417-435).
ccatagagaaacctatgta

SEQ ID NO: 51024 - DNA, 19 bp, Homo sapiens
  siRNA target sequence for DIS3 (NM_014953.2,484-502).
cgagtagcagcaaaatggt

SEQ ID NO: 51025 - DNA, 19 bp, Homo sapiens
  siRNA target sequence for DIS3 (NM_014953.2,491-509).
cagcaaaatggtacaatga

SEQ ID NO: 51026 - DNA, 19 bp, Homo sapiens
  siRNA target sequence for DIS3 (NM_014953.2,532-550).
gacaaccagctgcaagtta

SEQ ID NO: 51027 - DNA, 19 bp, Homo sapiens
  siRNA target sequence for DIS3 (NM_014953.2,598-616).
ggaataccagctttcactt

SEQ ID NO: 51028 - DNA, 19 bp, Homo sapiens
  siRNA target sequence for DIS3 (NM_014953.2,644-662).
ctaaccccgaactcataga

SEQ ID NO: 51029 - DNA, 19 bp, Homo sapiens
  siRNA target sequence for DIS3 (NM_014953.2,661-679).
gatcgtcttgcttgtttgt

SEQ ID NO: 51030 - DNA, 19 bp, Homo sapiens
  siRNA target sequence for DIS3 (NM_014953.2,793-811).
gctagcagggaaaattact

SEQ ID NO: 51031 - DNA, 19 bp, Homo sapiens
  siRNA target sequence for DIS3 (NM_014953.2,864-882).
cttacagggacttaaacat

SEQ ID NO: 51032 - DNA, 19 bp, Homo sapiens
  siRNA target sequence for DIS3 (NM_014953.2,893-911).
ctgttcacgaagatattgt

SEQ ID NO: 51033 - DNA, 19 bp, Homo sapiens
  siRNA target sequence for DIS3 (NM_014953.2,939-957).
gtgggtagcaccatcttct

SEQ ID NO: 51034 - DNA, 19 bp, Homo sapiens
  siRNA target sequence for DIS3 (NM_014953.2,950-968).
catcttctgtggttttaca

SEQ ID NO: 51035 - DNA, 19 bp, Homo sapiens
  siRNA target sequence for DIS3 (NM_014953.2,953-971).
cttctgtggttttacatga

SEQ ID NO: 51036 - DNA, 19 bp, Homo sapiens
  siRNA target sequence for DIS3 (NM_014953.2,1009-1027).
gagacagaacgaatgctta

SEQ ID NO: 51037 - DNA, 19 bp, Homo sapiens
  siRNA target sequence for DIS3 (NM_014953.2,1036-1054).
gtaagcgagaaaatgttga

SEQ ID NO: 51038 - DNA, 19 bp, Homo sapiens
  siRNA target sequence for DIS3 (NM_014953.2,1056-1074).
gcctacaggtagagttgta

SEQ ID NO: 51039 - DNA, 19 bp, Homo sapiens
  siRNA target sequence for DIS3 (NM_014953.2,1061-1079).
caggtagagttgtaggaat

SEQ ID NO: 51040 - DNA, 19 bp, Homo sapiens
  siRNA target sequence for DIS3 (NM_014953.2,1063-1081).
ggtagagttgtaggaataa

SEQ ID NO: 51041 - DNA, 19 bp, Homo sapiens
  siRNA target sequence for DIS3 (NM_014953.2,1064-1082).
gtagagttgtaggaataat

SEQ ID NO: 51042 - DNA, 19 bp, Homo sapiens
  siRNA target sequence for DIS3 (NM_014953.2,1099-1117).
ccatattgtggcatgcttt

SEQ ID NO: 51043 - DNA, 19 bp, Homo sapiens
  siRNA target sequence for DIS3 (NM_014953.2,1128-1146).
cattaaggagtcaagaaga

SEQ ID NO: 51044 - DNA, 19 bp, Homo sapiens
  siRNA target sequence for DIS3 (NM_014953.2,1137-1155).
gtcaagaagacatctcttt

SEQ ID NO: 51045 - DNA, 19 bp, Homo sapiens
  siRNA target sequence for DIS3 (NM_014953.2,1176-1194).
ccctcgaattcgcatagaa

SEQ ID NO: 51046 - DNA, 19 bp, Homo sapiens
  siRNA target sequence for DIS3 (NM_014953.2,1177-1195).
cctcgaattcgcatagaaa

SEQ ID NO: 51047 - DNA, 19 bp, Homo sapiens
  siRNA target sequence for DIS3 (NM_014953.2,1197-1215).
cagacaggcttccacatta

SEQ ID NO: 51048 - DNA, 19 bp, Homo sapiens
  siRNA target sequence for DIS3 (NM_014953.2,1199-1217).
gacaggcttccacattaga

SEQ ID NO: 51049 - DNA, 19 bp, Homo sapiens
  siRNA target sequence for DIS3 (NM_014953.2,1226-1244).
gaattattgttgctattga

SEQ ID NO: 51050 - DNA, 19 bp, Homo sapiens
  siRNA target sequence for DIS3 (NM_014953.2,1243-1261).
gatggttggcccagaaatt

SEQ ID NO: 51051 - DNA, 19 bp, Homo sapiens
  siRNA target sequence for DIS3 (NM_014953.2,1246-1264).
ggttggcccagaaattcca

SEQ ID NO: 51052 - DNA, 19 bp, Homo sapiens
  siRNA target sequence for DIS3 (NM_014953.2,1251-1269).
gcccagaaattccagatat

SEQ ID NO: 51053 - DNA, 19 bp, Homo sapiens
  siRNA target sequence for DIS3 (NM_014953.2,1287-1305).
gagaaatttaggtgatgtt

SEQ ID NO: 51054 - DNA, 19 bp, Homo sapiens
  siRNA target sequence for DIS3 (NM_014953.2,1398-1416).
gatgccctggagcattact

SEQ ID NO: 51055 - DNA, 19 bp, Homo sapiens
  siRNA target sequence for DIS3 (NM_014953.2,1401-1419).
gccctggagcattactgaa

SEQ ID NO: 51056 - DNA, 19 bp, Homo sapiens
  siRNA target sequence for DIS3 (NM_014953.2,1402-1420).
ccctggagcattactgaaa

SEQ ID NO: 51057 - DNA, 19 bp, Homo sapiens
  siRNA target sequence for DIS3 (NM_014953.2,1446-1464).
gaggcatctgtgtatttgt

SEQ ID NO: 51058 - DNA, 19 bp, Homo sapiens
  siRNA target sequence for DIS3 (NM_014953.2,1474-1492).
ccaccaggatgtactgata

SEQ ID NO: 51059 - DNA, 19 bp, Homo sapiens
  siRNA target sequence for DIS3 (NM_014953.2,1475-1493).
caccaggatgtactgatat

SEQ ID NO: 51060 - DNA, 19 bp, Homo sapiens
  siRNA target sequence for DIS3 (NM_014953.2,1513-1531).
cgagaactcgaaaatggaa

SEQ ID NO: 51061 - DNA, 19 bp, Homo sapiens
  siRNA target sequence for DIS3 (NM_014953.2,1536-1554).
ggaggttggtgttcatatt

SEQ ID NO: 51062 - DNA, 19 bp, Homo sapiens
  siRNA target sequence for DIS3 (NM_014953.2,1539-1557).
ggttggtgttcatattgct

SEQ ID NO: 51063 - DNA, 19 bp, Homo sapiens
  siRNA target sequence for DIS3 (NM_014953.2,1555-1573).
gctgatgtgagccatttta

SEQ ID NO: 51064 - DNA, 19 bp, Homo sapiens
  siRNA target sequence for DIS3 (NM_014953.2,1556-1574).
ctgatgtgagccattttat

SEQ ID NO: 51065 - DNA, 19 bp, Homo sapiens
  siRNA target sequence for DIS3 (NM_014953.2,1558-1576).
gatgtgagccattttatta

SEQ ID NO: 51066 - DNA, 19 bp, Homo sapiens
  siRNA target sequence for DIS3 (NM_014953.2,1583-1601).
gaaatgccttggatcaaga

SEQ ID NO: 51067 - DNA, 19 bp, Homo sapiens
  siRNA target sequence for DIS3 (NM_014953.2,1660-1678).
gagttgcttagctctaact

SEQ ID NO: 51068 - DNA, 19 bp, Homo sapiens
  siRNA target sequence for DIS3 (NM_014953.2,1666-1684).
cttagctctaacttgtgtt

SEQ ID NO: 51069 - DNA, 19 bp, Homo sapiens
  siRNA target sequence for DIS3 (NM_014953.2,1671-1689).
ctctaacttgtgttcctta

SEQ ID NO: 51070 - DNA, 19 bp, Homo sapiens
  siRNA target sequence for DIS3 (NM_014953.2,1744-1762).
gctgaaatcttaaaaacga

SEQ ID NO: 51071 - DNA, 19 bp, Homo sapiens
  siRNA target sequence for DIS3 (NM_014953.2,1745-1763).
ctgaaatcttaaaaacgaa

SEQ ID NO: 51072 - DNA, 19 bp, Homo sapiens
  siRNA target sequence for DIS3 (NM_014953.2,1760-1778).
cgaagtttaccaaaagtgt

SEQ ID NO: 51073 - DNA, 19 bp, Homo sapiens
  siRNA target sequence for DIS3 (NM_014953.2,1813-1831).
gctcagttgagaattgatt

SEQ ID NO: 51074 - DNA, 19 bp, Homo sapiens
  siRNA target sequence for DIS3 (NM_014953.2,1834-1852).
gcaaacatgaatgatgata

SEQ ID NO: 51075 - DNA, 19 bp, Homo sapiens
  siRNA target sequence for DIS3 (NM_014953.2,1862-1880).
gtctccgtggactgaataa

SEQ ID NO: 51076 - DNA, 19 bp, Homo sapiens
  siRNA target sequence for DIS3 (NM_014953.2,1866-1884).
ccgtggactgaataaacta

SEQ ID NO: 51077 - DNA, 19 bp, Homo sapiens
  siRNA target sequence for DIS3 (NM_014953.2,1934-1952).
cctctcctgaagttcgatt

SEQ ID NO: 51078 - DNA, 19 bp, Homo sapiens
  siRNA target sequence for DIS3 (NM_014953.2,1964-1982).
gtgaaactcacgatcctat

SEQ ID NO: 51079 - DNA, 19 bp, Homo sapiens
  siRNA target sequence for DIS3 (NM_014953.2,1970-1988).
ctcacgatcctatagatct

SEQ ID NO: 51080 - DNA, 19 bp, Homo sapiens
  siRNA target sequence for DIS3 (NM_014953.2,2012-2030).
caaattccatggttgaaga

SEQ ID NO: 51081 - DNA, 19 bp, Homo sapiens
  siRNA target sequence for DIS3 (NM_014953.2,2018-2036).
ccatggttgaagaatttat

SEQ ID NO: 51082 - DNA, 19 bp, Homo sapiens
  siRNA target sequence for DIS3 (NM_014953.2,2117-2135).
cacctccatcaaattatga

SEQ ID NO: 51083 - DNA, 19 bp, Homo sapiens
  siRNA target sequence for DIS3 (NM_014953.2,2180-2198).
ctgatacagccaagtcttt

SEQ ID NO: 51084 - DNA, 19 bp, Homo sapiens
  siRNA target sequence for DIS3 (NM_014953.2,2217-2235).
ggccgaatctcctactttt

SEQ ID NO: 51085 - DNA, 19 bp, Homo sapiens
  siRNA target sequence for DIS3 (NM_014953.2,2220-2238).
cgaatctcctacttttcca

SEQ ID NO: 51086 - DNA, 19 bp, Homo sapiens
  siRNA target sequence for DIS3 (NM_014953.2,2298-2316).
ctgttctggaatggataat

SEQ ID NO: 51087 - DNA, 19 bp, Homo sapiens
  siRNA target sequence for DIS3 (NM_014953.2,2333-2351).
gcttagcgtctccaatata

SEQ ID NO: 51088 - DNA, 19 bp, Homo sapiens
  siRNA target sequence for DIS3 (NM_014953.2,2344-2362).
ccaatatacacacatttta

SEQ ID NO: 51089 - DNA, 19 bp, Homo sapiens
  siRNA target sequence for DIS3 (NM_014953.2,2378-2396).
gatacgcagatgtcattgt

SEQ ID NO: 51090 - DNA, 19 bp, Homo sapiens
  siRNA target sequence for DIS3 (NM_014953.2,2382-2400).
cgcagatgtcattgttcat

SEQ ID NO: 51091 - DNA, 19 bp, Homo sapiens
  siRNA target sequence for DIS3 (NM_014953.2,2458-2476).
cacaagcttgcagatatat

SEQ ID NO: 51092 - DNA, 19 bp, Homo sapiens
  siRNA target sequence for DIS3 (NM_014953.2,2485-2503).
ctaaatttccggcacaaaa

SEQ ID NO: 51093 - DNA, 19 bp, Homo sapiens
  siRNA target sequence for DIS3 (NM_014953.2,2522-2540).
gtgcatcagtggcttttca

SEQ ID NO: 51094 - DNA, 19 bp, Homo sapiens
  siRNA target sequence for DIS3 (NM_014953.2,2562-2580).
caaaggaatagtaagtgaa

SEQ ID NO: 51095 - DNA, 19 bp, Homo sapiens
  siRNA target sequence for DIS3 (NM_014953.2,2576-2594).
gtgaagaagcctatatttt

SEQ ID NO: 51096 - DNA, 19 bp, Homo sapiens
  siRNA target sequence for DIS3 (NM_014953.2,2607-2625).
gaatgccattgtggtatta

SEQ ID NO: 51097 - DNA, 19 bp, Homo sapiens
  siRNA target sequence for DIS3 (NM_014953.2,2682-2700).
cccacagcttatttatgat

SEQ ID NO: 51098 - DNA, 19 bp, Homo sapiens
  siRNA target sequence for DIS3 (NM_014953.2,2704-2722).
gagataccctcacttaaaa

SEQ ID NO: 51099 - DNA, 19 bp, Homo sapiens
  siRNA target sequence for DIS3 (NM_014953.2,2712-2730).
ctcacttaaaatagaagat

SEQ ID NO: 51100 - DNA, 19 bp, Homo sapiens
  siRNA target sequence for DIS3 (NM_014953.2,2769-2787).
catgttagactcatctaat

SEQ ID NO: 51101 - DNA, 19 bp, Homo sapiens
  siRNA target sequence for DIS3 (NM_014953.2,2772-2790).
gttagactcatctaatctt

SEQ ID NO: 51102 - DNA, 19 bp, Homo sapiens
  siRNA target sequence for DIS3 (NM_014953.2,2778-2796).
ctcatctaatcttcaacat

SEQ ID NO: 51103 - DNA, 19 bp, Homo sapiens
  siRNA target sequence for DIS3 (NM_014953.2,2833-2851).
ccaggaataagcattccta

SEQ ID NO: 51104 - DNA, 19 bp, Homo sapiens
  siRNA target sequence for DIS3 (NM_014953.2,2871-2889).
ccttaatggaccaaagaaa

SEQ ID NO: 51105 - DNA, 19 bp, Homo sapiens
  siRNA target sequence for DKC1 (NM_001363.2,96-114).
gcggatgcggaagtaatta

SEQ ID NO: 51106 - DNA, 19 bp, Homo sapiens
  siRNA target sequence for DKC1 (NM_001363.2,97-115).
cggatgcggaagtaattat

SEQ ID NO: 51107 - DNA, 19 bp, Homo sapiens
  siRNA target sequence for DKC1 (NM_001363.2,98-116).
ggatgcggaagtaattatt

SEQ ID NO: 51108 - DNA, 19 bp, Homo sapiens
  siRNA target sequence for DKC1 (NM_001363.2,99-117).
gatgcggaagtaattattt

SEQ ID NO: 51109 - DNA, 19 bp, Homo sapiens
  siRNA target sequence for DKC1 (NM_001363.2,186-204).
cacgctgaagaatttctta

SEQ ID NO: 51110 - DNA, 19 bp, Homo sapiens
  siRNA target sequence for DKC1 (NM_001363.2,190-208).
ctgaagaatttcttatcaa

SEQ ID NO: 51111 - DNA, 19 bp, Homo sapiens
  siRNA target sequence for DKC1 (NM_001363.2,243-261).
cagtggccccttttgctaa

SEQ ID NO: 51112 - DNA, 19 bp, Homo sapiens
  siRNA target sequence for DKC1 (NM_001363.2,247-265).
ggccccttttgctaaagaa

SEQ ID NO: 51113 - DNA, 19 bp, Homo sapiens
  siRNA target sequence for DKC1 (NM_001363.2,282-300).
gtaaggacaacacactata

SEQ ID NO: 51114 - DNA, 19 bp, Homo sapiens
  siRNA target sequence for DKC1 (NM_001363.2,304-322).
ctcttgcatgtggttcaaa

SEQ ID NO: 51115 - DNA, 19 bp, Homo sapiens
  siRNA target sequence for DKC1 (NM_001363.2,334-352).
gagagattggggactatat

SEQ ID NO: 51116 - DNA, 19 bp, Homo sapiens
  siRNA target sequence for DKC1 (NM_001363.2,336-354).
gagattggggactatatca

SEQ ID NO: 51117 - DNA, 19 bp, Homo sapiens
  siRNA target sequence for DKC1 (NM_001363.2,413-431).
ctggattcgacggatactt

SEQ ID NO: 51118 - DNA, 19 bp, Homo sapiens
  siRNA target sequence for DKC1 (NM_001363.2,469-487).
ccaaggtgactggttgttt

SEQ ID NO: 51119 - DNA, 19 bp, Homo sapiens
  siRNA target sequence for DKC1 (NM_001363.2,470-488).
caaggtgactggttgttta

SEQ ID NO: 51120 - DNA, 19 bp, Homo sapiens
  siRNA target sequence for DKC1 (NM_001363.2,535-553).
gtgcaggcaaagagtatgt

SEQ ID NO: 51121 - DNA, 19 bp, Homo sapiens
  siRNA target sequence for DKC1 (NM_001363.2,561-579).
gtccggctgcacaatgcta

SEQ ID NO: 51122 - DNA, 19 bp, Homo sapiens
  siRNA target sequence for DKC1 (NM_001363.2,565-583).
ggctgcacaatgctattga

SEQ ID NO: 51123 - DNA, 19 bp, Homo sapiens
  siRNA target sequence for DKC1 (NM_001363.2,585-603).
ggggggacccagctttcta

SEQ ID NO: 51124 - DNA, 19 bp, Homo sapiens
  siRNA target sequence for DKC1 (NM_001363.2,601-619).
ctagggccctagaaactct

SEQ ID NO: 51125 - DNA, 19 bp, Homo sapiens
  siRNA target sequence for DKC1 (NM_001363.2,616-634).
ctctgacaggtgccttatt

SEQ ID NO: 51126 - DNA, 19 bp, Homo sapiens
  siRNA target sequence for DKC1 (NM_001363.2,635-653).
ccagcgacccccacttatt

SEQ ID NO: 51127 - DNA, 19 bp, Homo sapiens
  siRNA target sequence for DKC1 (NM_001363.2,638-656).
gcgacccccacttattgct

SEQ ID NO: 51128 - DNA, 19 bp, Homo sapiens
  siRNA target sequence for DKC1 (NM_001363.2,689-707).
ctacgagagcaaaatgatt

SEQ ID NO: 51129 - DNA, 19 bp, Homo sapiens
  siRNA target sequence for DKC1 (NM_001363.2,692-710).
cgagagcaaaatgattgaa

SEQ ID NO: 51130 - DNA, 19 bp, Homo sapiens
  siRNA target sequence for DKC1 (NM_001363.2,697-715).
gcaaaatgattgaatacga

SEQ ID NO: 51131 - DNA, 19 bp, Homo sapiens
  siRNA target sequence for DKC1 (NM_001363.2,761-779).
cacctacattcggacatta

SEQ ID NO: 51132 - DNA, 19 bp, Homo sapiens
  siRNA target sequence for DKC1 (NM_001363.2,781-799).
gtgtgcaccttggtttgtt

SEQ ID NO: 51133 - DNA, 19 bp, Homo sapiens
  siRNA target sequence for DKC1 (NM_001363.2,783-801).
gtgcaccttggtttgttat

SEQ ID NO: 51134 - DNA, 19 bp, Homo sapiens
  siRNA target sequence for DKC1 (NM_001363.2,866-884).
ccacatggtgacaatgcat

SEQ ID NO: 51135 - DNA, 19 bp, Homo sapiens
  siRNA target sequence for DKC1 (NM_001363.2,976-994).
ctcataaacggctggttat

SEQ ID NO: 51136 - DNA, 19 bp, Homo sapiens
  siRNA target sequence for DKC1 (NM_001363.2,978-996).
cataaacggctggttatga

SEQ ID NO: 51137 - DNA, 19 bp, Homo sapiens
  siRNA target sequence for DKC1 (NM_001363.2,1019-1037).
ctgctatggggccaagatt

SEQ ID NO: 51138 - DNA, 19 bp, Homo sapiens
  siRNA target sequence for DKC1 (NM_001363.2,1045-1063).
caggtgttcttcgatatga

SEQ ID NO: 51139 - DNA, 19 bp, Homo sapiens
  siRNA target sequence for DKC1 (NM_001363.2,1102-1120).
ccaccaaaggagaagcaat

SEQ ID NO: 51140 - DNA, 19 bp, Homo sapiens
  siRNA target sequence for DKC1 (NM_001363.2,1121-1139).
ctgcatggctattgcatta

SEQ ID NO: 51141 - DNA, 19 bp, Homo sapiens
  siRNA target sequence for DKC1 (NM_001363.2,1123-1141).
gcatggctattgcattaat

SEQ ID NO: 51142 - DNA, 19 bp, Homo sapiens
  siRNA target sequence for DKC1 (NM_001363.2,1159-1177).
ctacctgcgaccatggtat

SEQ ID NO: 51143 - DNA, 19 bp, Homo sapiens
  siRNA target sequence for DKC1 (NM_001363.2,1163-1181).
ctgcgaccatggtatagta

SEQ ID NO: 51144 - DNA, 19 bp, Homo sapiens
  siRNA target sequence for DKC1 (NM_001363.2,1173-1191).
ggtatagtagccaagatca

SEQ ID NO: 51145 - DNA, 19 bp, Homo sapiens
  siRNA target sequence for DKC1 (NM_001363.2,1174-1192).
gtatagtagccaagatcaa

SEQ ID NO: 51146 - DNA, 19 bp, Homo sapiens
  siRNA target sequence for DKC1 (NM_001363.2,1404-1422).
gttgccgaagcagcaaaaa

SEQ ID NO: 51147 - DNA, 19 bp, Homo sapiens
  siRNA target sequence for DKC1 (NM_001363.2,1476-1494).
gctcctcagttgatcaaga

SEQ ID NO: 51148 - DNA, 19 bp, Homo sapiens
  siRNA target sequence for DSCR1L2 (NM_013441.2,316-334).
gctgagggacactatgaaa

SEQ ID NO: 51149 - DNA, 19 bp, Homo sapiens
  siRNA target sequence for DSCR1L2 (NM_013441.2,317-335).
ctgagggacactatgaaat

SEQ ID NO: 51150 - DNA, 19 bp, Homo sapiens
  siRNA target sequence for DSCR1L2 (NM_013441.2,472-490).
cgtccatgaagcagtgttt

SEQ ID NO: 51151 - DNA, 19 bp, Homo sapiens
  siRNA target sequence for DSCR1L2 (NM_013441.2,612-630).
cagcaagagcgcgaataga

SEQ ID NO: 51152 - DNA, 19 bp, Homo sapiens
  siRNA target sequence for DSCR1L2 (NM_013441.2,615-633).
caagagcgcgaatagaact

SEQ ID NO: 51153 - DNA, 19 bp, Homo sapiens
  siRNA target sequence for DSCR1L2 (NM_013441.2,656-674).
cagaagctaaagctatatt

SEQ ID NO: 51154 - DNA, 19 bp, Homo sapiens
  siRNA target sequence for DSCR1L2 (NM_013441.2,658-676).
gaagctaaagctatatttt

SEQ ID NO: 51155 - DNA, 19 bp, Homo sapiens
  siRNA target sequence for DSCR1L2 (NM_013441.2,797-815).
gatgcgatgcctgttataa

SEQ ID NO: 51156 - DNA, 19 bp, Homo sapiens
  siRNA target sequence for DSCR1L2 (NM_013441.2,800-818).
gcgatgcctgttataaatt

SEQ ID NO: 51157 - DNA, 19 bp, Homo sapiens
  siRNA target sequence for DSCR1L2 (NM_013441.2,801-819).
cgatgcctgttataaatta

SEQ ID NO: 51158 - DNA, 19 bp, Homo sapiens
  siRNA target sequence for DUSP11 (NM_003584.1,160-178).
ccggagacgcgacttttca

SEQ ID NO: 51159 - DNA, 19 bp, Homo sapiens
  siRNA target sequence for DUSP11 (NM_003584.1,219-237).
ccgaaaggtggaaagacta

SEQ ID NO: 51160 - DNA, 19 bp, Homo sapiens
  siRNA target sequence for DUSP11 (NM_003584.1,263-281).
gggactcgtttcattgctt

SEQ ID NO: 51161 - DNA, 19 bp, Homo sapiens
  siRNA target sequence for DUSP11 (NM_003584.1,264-282).
ggactcgtttcattgcttt

SEQ ID NO: 51162 - DNA, 19 bp, Homo sapiens
  siRNA target sequence for DUSP11 (NM_003584.1,267-285).
ctcgtttcattgctttcaa

SEQ ID NO: 51163 - DNA, 19 bp, Homo sapiens
  siRNA target sequence for DUSP11 (NM_003584.1,270-288).
gtttcattgctttcaaagt

SEQ ID NO: 51164 - DNA, 19 bp, Homo sapiens
  siRNA target sequence for DUSP11 (NM_003584.1,287-305).
gttcctttgcaaaagagtt

SEQ ID NO: 51165 - DNA, 19 bp, Homo sapiens
  siRNA target sequence for DUSP11 (NM_003584.1,386-404).
ggactgattattgatttaa

SEQ ID NO: 51166 - DNA, 19 bp, Homo sapiens
  siRNA target sequence for DUSP11 (NM_003584.1,405-423).
catatactcaacgctatta

SEQ ID NO: 51167 - DNA, 19 bp, Homo sapiens
  siRNA target sequence for DUSP11 (NM_003584.1,574-592).
ccactgtacccatggttta

SEQ ID NO: 51168 - DNA, 19 bp, Homo sapiens
  siRNA target sequence for DUSP11 (NM_003584.1,575-593).
cactgtacccatggtttaa

SEQ ID NO: 51169 - DNA, 19 bp, Homo sapiens
  siRNA target sequence for DUSP11 (NM_003584.1,615-633).
gcagatatttgattgatgt

SEQ ID NO: 51170 - DNA, 19 bp, Homo sapiens
  siRNA target sequence for DUSP11 (NM_003584.1,616-634).
cagatatttgattgatgta

SEQ ID NO: 51171 - DNA, 19 bp, Homo sapiens
  siRNA target sequence for DUSP11 (NM_003584.1,643-661).
gaggccagatgatgcaatt

SEQ ID NO: 51172 - DNA, 19 bp, Homo sapiens
  siRNA target sequence for DUSP11 (NM_003584.1,646-664).
gccagatgatgcaattgaa

SEQ ID NO: 51173 - DNA, 19 bp, Homo sapiens
  siRNA target sequence for DUSP11 (NM_003584.1,647-665).
ccagatgatgcaattgaat

SEQ ID NO: 51174 - DNA, 19 bp, Homo sapiens
  siRNA target sequence for DUSP11 (NM_003584.1,765-783).
ggtcaagtgattttgaaga

SEQ ID NO: 51175 - DNA, 19 bp, Homo sapiens
  siRNA target sequence for DUSP11 (NM_003584.1,808-826).
ccacaataagcctgttaaa

SEQ ID NO: 51176 - DNA, 19 bp, Homo sapiens
  siRNA target sequence for DUSP11 (NM_003584.1,811-829).
caataagcctgttaaacaa

SEQ ID NO: 51177 - DNA, 19 bp, Homo sapiens
  siRNA target sequence for DUSP11 (NM_003584.1,831-849).
gacctaggtataatctaca

SEQ ID NO: 51178 - DNA, 19 bp, Homo sapiens
  siRNA target sequence for DUSP11 (NM_003584.1,834-852).
ctaggtataatctacatca

SEQ ID NO: 51179 - DNA, 19 bp, Homo sapiens
  siRNA target sequence for DUSP11 (NM_003584.1,889-907).
ccagacccaaagtttgcaa

SEQ ID NO: 51180 - DNA, 19 bp, Homo sapiens
  siRNA target sequence for DUSP11 (NM_003584.1,904-922).
gcaacaatcagtcagaaaa

SEQ ID NO: 51181 - DNA, 19 bp, Homo sapiens
  siRNA target sequence for DUSP11 (NM_003584.1,974-992).
ccccctggagaggactatt

SEQ ID NO: 51182 - DNA, 19 bp, Homo sapiens
  siRNA target sequence for EIF2S1 (NM_004094.3,96-114).
gggtctaagttgtagattt

SEQ ID NO: 51183 - DNA, 19 bp, Homo sapiens
  siRNA target sequence for EIF2S1 (NM_004094.3,97-115).
ggtctaagttgtagatttt

SEQ ID NO: 51184 - DNA, 19 bp, Homo sapiens
  siRNA target sequence for EIF2S1 (NM_004094.3,98-116).
gtctaagttgtagatttta

SEQ ID NO: 51185 - DNA, 19 bp, Homo sapiens
  siRNA target sequence for EIF2S1 (NM_004094.3,153-171).
ggtgaatgtcagatccatt

SEQ ID NO: 51186 - DNA, 19 bp, Homo sapiens
  siRNA target sequence for EIF2S1 (NM_004094.3,221-239).
gcatgattcttcttagtga

SEQ ID NO: 51187 - DNA, 19 bp, Homo sapiens
  siRNA target sequence for EIF2S1 (NM_004094.3,229-247).
cttcttagtgaattatcca

SEQ ID NO: 51188 - DNA, 19 bp, Homo sapiens
  siRNA target sequence for EIF2S1 (NM_004094.3,248-266).
gaaggcgtatccgttctat

SEQ ID NO: 51189 - DNA, 19 bp, Homo sapiens
  siRNA target sequence for EIF2S1 (NM_004094.3,251-269).
ggcgtatccgttctatcaa

SEQ ID NO: 51190 - DNA, 19 bp, Homo sapiens
  siRNA target sequence for EIF2S1 (NM_004094.3,253-271).
cgtatccgttctatcaaca

SEQ ID NO: 51191 - DNA, 19 bp, Homo sapiens
  siRNA target sequence for EIF2S1 (NM_004094.3,259-277).
cgttctatcaacaaactca

SEQ ID NO: 51192 - DNA, 19 bp, Homo sapiens
  siRNA target sequence for EIF2S1 (NM_004094.3,280-298).
cgaattggcaggaatgagt

SEQ ID NO: 51193 - DNA, 19 bp, Homo sapiens
  siRNA target sequence for EIF2S1 (NM_004094.3,309-327).
cattagggtggacaaagaa

SEQ ID NO: 51194 - DNA, 19 bp, Homo sapiens
  siRNA target sequence for EIF2S1 (NM_004094.3,331-349).
ggatatattgatttgtcaa

SEQ ID NO: 51195 - DNA, 19 bp, Homo sapiens
  siRNA target sequence for EIF2S1 (NM_004094.3,489-507).
gactgcctgggtctttgat

SEQ ID NO: 51196 - DNA, 19 bp, Homo sapiens
  siRNA target sequence for EIF2S1 (NM_004094.3,491-509).
ctgcctgggtctttgatga

SEQ ID NO: 51197 - DNA, 19 bp, Homo sapiens
  siRNA target sequence for EIF2S1 (NM_004094.3,497-515).
gggtctttgatgacaagta

SEQ ID NO: 51198 - DNA, 19 bp, Homo sapiens
  siRNA target sequence for EIF2S1 (NM_004094.3,513-531).
gtacaagagacctggatat

SEQ ID NO: 51199 - DNA, 19 bp, Homo sapiens
  siRNA target sequence for EIF2S1 (NM_004094.3,559-577).
gtctcagacccatctattt

SEQ ID NO: 51200 - DNA, 19 bp, Homo sapiens
  siRNA target sequence for EIF2S1 (NM_004094.3,604-622).
gaacgggaagtactcatta

SEQ ID NO: 51201 - DNA, 19 bp, Homo sapiens
  siRNA target sequence for EIF2S1 (NM_004094.3,607-625).
cgggaagtactcattaata

SEQ ID NO: 51202 - DNA, 19 bp, Homo sapiens
  siRNA target sequence for EIF2S1 (NM_004094.3,608-626).
gggaagtactcattaataa

SEQ ID NO: 51203 - DNA, 19 bp, Homo sapiens
  siRNA target sequence for EIF2S1 (NM_004094.3,657-675).
caaaattcgagcagatatt

SEQ ID NO: 51204 - DNA, 19 bp, Homo sapiens
  siRNA target sequence for EIF2S1 (NM_004094.3,730-748).
gcaggtttgaattgttcta

SEQ ID NO: 51205 - DNA, 19 bp, Homo sapiens
  siRNA target sequence for EIF2S1 (NM_004094.3,756-774).
catgcccattaagattaat

SEQ ID NO: 51206 - DNA, 19 bp, Homo sapiens
  siRNA target sequence for EIF2S1 (NM_004094.3,759-777).
gcccattaagattaatcta

SEQ ID NO: 51207 - DNA, 19 bp, Homo sapiens
  siRNA target sequence for EIF2S1 (NM_004094.3,782-800).
ctcctcctcggtatgtaat

SEQ ID NO: 51208 - DNA, 19 bp, Homo sapiens
  siRNA target sequence for EIF2S1 (NM_004094.3,784-802).
cctcctcggtatgtaatga

SEQ ID NO: 51209 - DNA, 19 bp, Homo sapiens
  siRNA target sequence for EIF2S1 (NM_004094.3,787-805).
cctcggtatgtaatgacta

SEQ ID NO: 51210 - DNA, 19 bp, Homo sapiens
  siRNA target sequence for EIF2S1 (NM_004094.3,845-863).
gtcaagctatggctgttat

SEQ ID NO: 51211 - DNA, 19 bp, Homo sapiens
  siRNA target sequence for EIF2S1 (NM_004094.3,885-903).
gaggggtgtgttcaatgtt

SEQ ID NO: 51212 - DNA, 19 bp, Homo sapiens
  siRNA target sequence for EIF2S1 (NM_004094.3,887-905).
ggggtgtgttcaatgttca

SEQ ID NO: 51213 - DNA, 19 bp, Homo sapiens
  siRNA target sequence for EIF2S1 (NM_004094.3,889-907).
ggtgtgttcaatgttcaaa

SEQ ID NO: 51214 - DNA, 19 bp, Homo sapiens
  siRNA target sequence for EIF2S1 (NM_004094.3,913-931).
cccaaagtggtcacagata

SEQ ID NO: 51215 - DNA, 19 bp, Homo sapiens
  siRNA target sequence for EIF2S2 (NM_003908.2,280-298).
ccaactgaggacaaggatt

SEQ ID NO: 51216 - DNA, 19 bp, Homo sapiens
  siRNA target sequence for EIF2S2 (NM_003908.2,682-700).
cgagtgttcaacatcatga

SEQ ID NO: 51217 - DNA, 19 bp, Homo sapiens
  siRNA target sequence for EIF3S4 (NM_003755.1,66-84).
gggggaggacgacaaatgt

SEQ ID NO: 51218 - DNA, 19 bp, Homo sapiens
  siRNA target sequence for EIF3S4 (NM_003755.1,173-191).
ctcccaaggaggtcatcaa

SEQ ID NO: 51219 - DNA, 19 bp, Homo sapiens
  siRNA target sequence for EIF3S4 (NM_003755.1,183-201).
ggtcatcaacggaaacata

SEQ ID NO: 51220 - DNA, 19 bp, Homo sapiens
  siRNA target sequence for EIF3S4 (NM_003755.1,184-202).
gtcatcaacggaaacataa

SEQ ID NO: 51221 - DNA, 19 bp, Homo sapiens
  siRNA target sequence for EIF3S4 (NM_003755.1,256-274).
cgcaccttcaggattgaga

SEQ ID NO: 51222 - DNA, 19 bp, Homo sapiens
  siRNA target sequence for EIF3S4 (NM_003755.1,321-339).
gttcgggaactcagagttt

SEQ ID NO: 51223 - DNA, 19 bp, Homo sapiens
  siRNA target sequence for EIF3S4 (NM_003755.1,385-403).
gtctctatgacgttcatca

SEQ ID NO: 51224 - DNA, 19 bp, Homo sapiens
  siRNA target sequence for EIF3S4 (NM_003755.1,439-457).
gaccctatgaacaaactca

SEQ ID NO: 51225 - DNA, 19 bp, Homo sapiens
  siRNA target sequence for EIF3S4 (NM_003755.1,511-529).
cgctgcccctacaaggata

SEQ ID NO: 51226 - DNA, 19 bp, Homo sapiens
  siRNA target sequence for EIF3S9 (NM_003751.2,542-560).
cgtgagcgaggaagaatta

SEQ ID NO: 51227 - DNA, 19 bp, Homo sapiens
  siRNA target sequence for EIF3S9 (NM_003751.2,591-609).
gaagcagatggaatcgatt

SEQ ID NO: 51228 - DNA, 19 bp, Homo sapiens
  siRNA target sequence for EIF3S9 (NM_003751.2,601-619).
gaatcgattcggtgattgt

SEQ ID NO: 51229 - DNA, 19 bp, Homo sapiens
  siRNA target sequence for EIF3S9 (NM_003751.2,643-661).
gacccgaccgacttgagaa

SEQ ID NO: 51230 - DNA, 19 bp, Homo sapiens
  siRNA target sequence for EIF3S9 (NM_003751.2,646-664).
ccgaccgacttgagaaact

SEQ ID NO: 51231 - DNA, 19 bp, Homo sapiens
  siRNA target sequence for EIF3S9 (NM_003751.2,845-863).
caacctctttacggatttt

SEQ ID NO: 51232 - DNA, 19 bp, Homo sapiens
  siRNA target sequence for EIF3S9 (NM_003751.2,849-867).
ctctttacggattttgaca

SEQ ID NO: 51233 - DNA, 19 bp, Homo sapiens
  siRNA target sequence for EIF3S9 (NM_003751.2,881-899).
cagtgacgagtgggatatt

SEQ ID NO: 51234 - DNA, 19 bp, Homo sapiens
  siRNA target sequence for EIF3S9 (NM_003751.2,917-935).
caaagacctggggaactta

SEQ ID NO: 51235 - DNA, 19 bp, Homo sapiens
  siRNA target sequence for EIF3S9 (NM_003751.2,921-939).
gacctggggaacttacgtt

SEQ ID NO: 51236 - DNA, 19 bp, Homo sapiens
  siRNA target sequence for EIF3S9 (NM_003751.2,993-1011).
ggagaccgcacttccatat

SEQ ID NO: 51237 - DNA, 19 bp, Homo sapiens
  siRNA target sequence for EIF3S9 (NM_003751.2,994-1012).
gagaccgcacttccatatt

SEQ ID NO: 51238 - DNA, 19 bp, Homo sapiens
  siRNA target sequence for EIF3S9 (NM_003751.2,996-1014).
gaccgcacttccatattct

SEQ ID NO: 51239 - DNA, 19 bp, Homo sapiens
  siRNA target sequence for EIF3S9 (NM_003751.2,1100-1118).
cctggctacctttcatcaa

SEQ ID NO: 51240 - DNA, 19 bp, Homo sapiens
  siRNA target sequence for EIF3S9 (NM_003751.2,1101-1119).
ctggctacctttcatcaaa

SEQ ID NO: 51241 - DNA, 19 bp, Homo sapiens
  siRNA target sequence for EIF3S9 (NM_003751.2,1103-1121).
ggctacctttcatcaaaga

SEQ ID NO: 51242 - DNA, 19 bp, Homo sapiens
  siRNA target sequence for EIF3S9 (NM_003751.2,1175-1193).
ccaaggggttcagcttatt

SEQ ID NO: 51243 - DNA, 19 bp, Homo sapiens
  siRNA target sequence for EIF3S9 (NM_003751.2,1254-1272).
gaccctcaggccataatca

SEQ ID NO: 51244 - DNA, 19 bp, Homo sapiens
  siRNA target sequence for EIF3S9 (NM_003751.2,1284-1302).
cttacggggcacaagaaga

SEQ ID NO: 51245 - DNA, 19 bp, Homo sapiens
  siRNA target sequence for EIF3S9 (NM_003751.2,1326-1344).
gcccattggcctattttta

SEQ ID NO: 51246 - DNA, 19 bp, Homo sapiens
  siRNA target sequence for EIF3S9 (NM_003751.2,1348-1366).
ggagccatgatggcaaatt

SEQ ID NO: 51247 - DNA, 19 bp, Homo sapiens
  siRNA target sequence for EIF3S9 (NM_003751.2,1381-1399).
ccctggatacgcttagcat

SEQ ID NO: 51248 - DNA, 19 bp, Homo sapiens
  siRNA target sequence for EIF3S9 (NM_003751.2,1385-1403).
ggatacgcttagcatctat

SEQ ID NO: 51249 - DNA, 19 bp, Homo sapiens
  siRNA target sequence for EIF3S9 (NM_003751.2,1419-1437).
ggtcttttggacaagaaga

SEQ ID NO: 51250 - DNA, 19 bp, Homo sapiens
  siRNA target sequence for EIF3S9 (NM_003751.2,1499-1517).
ctgggtgcctgaagacaaa

SEQ ID NO: 51251 - DNA, 19 bp, Homo sapiens
  siRNA target sequence for EIF3S9 (NM_003751.2,1570-1588).
gagtgaggaacctgttcaa

SEQ ID NO: 51252 - DNA, 19 bp, Homo sapiens
  siRNA target sequence for EIF3S9 (NM_003751.2,1628-1646).
ctacttgtgtgtgaaagta

SEQ ID NO: 51253 - DNA, 19 bp, Homo sapiens
  siRNA target sequence for EIF3S9 (NM_003751.2,1631-1649).
cttgtgtgtgaaagtagat

SEQ ID NO: 51254 - DNA, 19 bp, Homo sapiens
  siRNA target sequence for EIF3S9 (NM_003751.2,1666-1684).
cccagggtgttgtcacaaa

SEQ ID NO: 51255 - DNA, 19 bp, Homo sapiens
  siRNA target sequence for EIF3S9 (NM_003751.2,1667-1685).
ccagggtgttgtcacaaat

SEQ ID NO: 51256 - DNA, 19 bp, Homo sapiens
  siRNA target sequence for EIF3S9 (NM_003751.2,1728-1746).
gtggtcgagatgaaagaaa

SEQ ID NO: 51257 - DNA, 19 bp, Homo sapiens
  siRNA target sequence for EIF3S9 (NM_003751.2,1978-1996).
cggactgcacggtcatgaa

SEQ ID NO: 51258 - DNA, 19 bp, Homo sapiens
  siRNA target sequence for EIF3S9 (NM_003751.2,2273-2291).
gtccaaagcctcaaaggaa

SEQ ID NO: 51259 - DNA, 19 bp, Homo sapiens
  siRNA target sequence for EIF3S9 (NM_003751.2,2275-2293).
ccaaagcctcaaaggaatt

SEQ ID NO: 51260 - DNA, 19 bp, Homo sapiens
  siRNA target sequence for EIF3S9 (NM_003751.2,2355-2373).
ctctatatggagcagaaaa

SEQ ID NO: 51261 - DNA, 19 bp, Homo sapiens
  siRNA target sequence for EIF4B (NM_001417.1,1451-1469).
gggtgaagcgaagttctaa

SEQ ID NO: 51262 - DNA, 19 bp, Homo sapiens
  siRNA target sequence for EIF4G1 (NM_004953.2,421-439).
gtctggagcctcaagctaa

SEQ ID NO: 51263 - DNA, 19 bp, Homo sapiens
  siRNA target sequence for EIF4G1 (NM_004953.2,449-467).
gccccaggttgctgtcatt

SEQ ID NO: 51264 - DNA, 19 bp, Homo sapiens
  siRNA target sequence for EIF4G1 (NM_004953.2,531-549).
gagcatagcccttcagaat

SEQ ID NO: 51265 - DNA, 19 bp, Homo sapiens
  siRNA target sequence for EIF4G1 (NM_004953.2,601-619).
cggggtctgagcctaatct

SEQ ID NO: 51266 - DNA, 19 bp, Homo sapiens
  siRNA target sequence for EIF4G1 (NM_004953.2,620-638).
cgcagtcctctctattcct

SEQ ID NO: 51267 - DNA, 19 bp, Homo sapiens
  siRNA target sequence for EIF4G1 (NM_004953.2,636-654).
cctggggacactatgacaa

SEQ ID NO: 51268 - DNA, 19 bp, Homo sapiens
  siRNA target sequence for EIF4G1 (NM_004953.2,640-658).
gggacactatgacaactat

SEQ ID NO: 51269 - DNA, 19 bp, Homo sapiens
  siRNA target sequence for EIF4G1 (NM_004953.2,641-659).
ggacactatgacaactata

SEQ ID NO: 51270 - DNA, 19 bp, Homo sapiens
  siRNA target sequence for EIF4G1 (NM_004953.2,644-662).
cactatgacaactatacaa

SEQ ID NO: 51271 - DNA, 19 bp, Homo sapiens
  siRNA target sequence for EIF4G1 (NM_004953.2,650-668).
gacaactatacaaatgtct

SEQ ID NO: 51272 - DNA, 19 bp, Homo sapiens
  siRNA target sequence for EIF4G1 (NM_004953.2,748-766).
ccatactggaagtagaagt

SEQ ID NO: 51273 - DNA, 19 bp, Homo sapiens
  siRNA target sequence for EIF4G1 (NM_004953.2,1008-1026).
ccaccagctgtggacttaa

SEQ ID NO: 51274 - DNA, 19 bp, Homo sapiens
  siRNA target sequence for EIF4G1 (NM_004953.2,1292-1310).
cactcaagtggcagtatct

SEQ ID NO: 51275 - DNA, 19 bp, Homo sapiens
  siRNA target sequence for EIF4G1 (NM_004953.2,1496-1514).
gacctgggactcaaaggaa

SEQ ID NO: 51276 - DNA, 19 bp, Homo sapiens
  siRNA target sequence for EIF4G1 (NM_004953.2,1501-1519).
gggactcaaaggaagacaa

SEQ ID NO: 51277 - DNA, 19 bp, Homo sapiens
  siRNA target sequence for EIF4G1 (NM_004953.2,1548-1566).
ggggaacagaagtatgaat

SEQ ID NO: 51278 - DNA, 19 bp, Homo sapiens
  siRNA target sequence for EIF4G1 (NM_004953.2,1554-1572).
cagaagtatgaatataagt

SEQ ID NO: 51279 - DNA, 19 bp, Homo sapiens
  siRNA target sequence for EIF4G1 (NM_004953.2,1556-1574).
gaagtatgaatataagtca

SEQ ID NO: 51280 - DNA, 19 bp, Homo sapiens
  siRNA target sequence for EIF4G1 (NM_004953.2,1596-1614).
ctagaggagaaaaaacgtt

SEQ ID NO: 51281 - DNA, 19 bp, Homo sapiens
  siRNA target sequence for EIF4G1 (NM_004953.2,1673-1691).
gggattgccacatatcagt

SEQ ID NO: 51282 - DNA, 19 bp, Homo sapiens
  siRNA target sequence for EIF4G1 (NM_004953.2,1736-1754).
ggatcccactagactacaa

SEQ ID NO: 51283 - DNA, 19 bp, Homo sapiens
  siRNA target sequence for EIF4G1 (NM_004953.2,1922-1940).
gatcattgccacagtgtta

SEQ ID NO: 51284 - DNA, 19 bp, Homo sapiens
  siRNA target sequence for EIF4G1 (NM_004953.2,1945-1963).
ccgaagatataaaactgaa

SEQ ID NO: 51285 - DNA, 19 bp, Homo sapiens
  siRNA target sequence for EIF4G1 (NM_004953.2,2031-2049).
gatgctgatggcagcaaaa

SEQ ID NO: 51286 - DNA, 19 bp, Homo sapiens
  siRNA target sequence for EIF4G1 (NM_004953.2,2158-2176).
gcctcaaaggggtcattga

SEQ ID NO: 51287 - DNA, 19 bp, Homo sapiens
  siRNA target sequence for EIF4G1 (NM_004953.2,2242-2260).
gcctcatggcgctgaaagt

SEQ ID NO: 51288 - DNA, 19 bp, Homo sapiens
  siRNA target sequence for EIF4G1 (NM_004953.2,2297-2315).
ccgaaagctgttgttgaat

SEQ ID NO: 51289 - DNA, 19 bp, Homo sapiens
  siRNA target sequence for EIF4G1 (NM_004953.2,2637-2655).
ccccgaatggatcagtatt

SEQ ID NO: 51290 - DNA, 19 bp, Homo sapiens
  siRNA target sequence for EIF4G1 (NM_004953.2,2638-2656).
cccgaatggatcagtattt

SEQ ID NO: 51291 - DNA, 19 bp, Homo sapiens
  siRNA target sequence for EIF4G1 (NM_004953.2,2695-2713).
catcccgcatccgctttat

SEQ ID NO: 51292 - DNA, 19 bp, Homo sapiens
  siRNA target sequence for EIF4G1 (NM_004953.2,2698-2716).
cccgcatccgctttatgct

SEQ ID NO: 51293 - DNA, 19 bp, Homo sapiens
  siRNA target sequence for EIF4G1 (NM_004953.2,2730-2748).
gatctgcgagggagcaatt

SEQ ID NO: 51294 - DNA, 19 bp, Homo sapiens
  siRNA target sequence for EIF4G1 (NM_004953.2,2943-2961).
gttcccatcagcaaaggta

SEQ ID NO: 51295 - DNA, 19 bp, Homo sapiens
  siRNA target sequence for EIF4G1 (NM_004953.2,3004-3022).
ctggctccatcgattctaa

SEQ ID NO: 51296 - DNA, 19 bp, Homo sapiens
  siRNA target sequence for EIF4G1 (NM_004953.2,3006-3024).
ggctccatcgattctaaca

SEQ ID NO: 51297 - DNA, 19 bp, Homo sapiens
  siRNA target sequence for EIF4G1 (NM_004953.2,3007-3025).
gctccatcgattctaacaa

SEQ ID NO: 51298 - DNA, 19 bp, Homo sapiens
  siRNA target sequence for EIF4G1 (NM_004953.2,3117-3135).
gctcgcccagctactagta

SEQ ID NO: 51299 - DNA, 19 bp, Homo sapiens
  siRNA target sequence for EIF4G1 (NM_004953.2,3120-3138).
cgcccagctactagtactt

SEQ ID NO: 51300 - DNA, 19 bp, Homo sapiens
  siRNA target sequence for EIF4G1 (NM_004953.2,3121-3139).
gcccagctactagtacttt

SEQ ID NO: 51301 - DNA, 19 bp, Homo sapiens
  siRNA target sequence for EIF4G1 (NM_004953.2,3123-3141).
ccagctactagtactttga

SEQ ID NO: 51302 - DNA, 19 bp, Homo sapiens
  siRNA target sequence for EIF4G1 (NM_004953.2,3124-3142).
cagctactagtactttgaa

SEQ ID NO: 51303 - DNA, 19 bp, Homo sapiens
  siRNA target sequence for EIF4G1 (NM_004953.2,3146-3164).
cttctcagcccttcaacaa

SEQ ID NO: 51304 - DNA, 19 bp, Homo sapiens
  siRNA target sequence for EIF4G1 (NM_004953.2,3533-3551).
ggaatatctccatctcaat

SEQ ID NO: 51305 - DNA, 19 bp, Homo sapiens
  siRNA target sequence for EIF4G1 (NM_004953.2,3725-3743).
ctaccaagggttgtatgaa

SEQ ID NO: 51306 - DNA, 19 bp, Homo sapiens
  siRNA target sequence for EIF4G1 (NM_004953.2,3729-3747).
caagggttgtatgaaatct

SEQ ID NO: 51307 - DNA, 19 bp, Homo sapiens
  siRNA target sequence for EIF4G1 (NM_004953.2,3849-3867).
gagctgttcagggagatta

SEQ ID NO: 51308 - DNA, 19 bp, Homo sapiens
  siRNA target sequence for EIF4G1 (NM_004953.2,3978-3996).
gggcttagctggaaggaat

SEQ ID NO: 51309 - DNA, 19 bp, Homo sapiens
  siRNA target sequence for EIF4G1 (NM_004953.2,3980-3998).
gcttagctggaaggaattt

SEQ ID NO: 51310 - DNA, 19 bp, Homo sapiens
  siRNA target sequence for EIF4G1 (NM_004953.2,4024-4042).
cattcgtcgctgaacagaa

SEQ ID NO: 51311 - DNA, 19 bp, Homo sapiens
  siRNA target sequence for EIF4G1 (NM_004953.2,4184-4202).
gagtgagcagcagatagta

SEQ ID NO: 51312 - DNA, 19 bp, Homo sapiens
  siRNA target sequence for EIF4G1 (NM_004953.2,4229-4247).
gacggctgtctgctattct

SEQ ID NO: 51313 - DNA, 19 bp, Homo sapiens
  siRNA target sequence for EIF4G1 (NM_004953.2,4360-4378).
ccctccaggcccttgtagt

SEQ ID NO: 51314 - DNA, 19 bp, Homo sapiens
  siRNA target sequence for EIF4G1 (NM_004953.2,4507-4525).
gtgtggcccttaaatctgt

SEQ ID NO: 51315 - DNA, 19 bp, Homo sapiens
  siRNA target sequence for EIF4G1 (NM_182917.2,378-396).
cgccacaagcgacacaaat

SEQ ID NO: 51316 - DNA, 19 bp, Homo sapiens
  siRNA target sequence for EIF4G1 (NM_182917.2,380-398).
ccacaagcgacacaaatga

SEQ ID NO: 51317 - DNA, 19 bp, Homo sapiens
  siRNA target sequence for EIF4G1 (NM_182917.2,518-536).
cctgctggatcccaagtaa

SEQ ID NO: 51318 - DNA, 19 bp, Homo sapiens
  siRNA target sequence for EIF4G1 (NM_182917.2,524-542).
ggatcccaagtaatgatga

SEQ ID NO: 51319 - DNA, 19 bp, Homo sapiens
  siRNA target sequence for EIF4G1 (NM_182917.2,694-712).
ctacgctggcgcctactat

SEQ ID NO: 51320 - DNA, 19 bp, Homo sapiens
  siRNA target sequence for EIF4G1 (NM_182917.2,833-851).
caaggaggaaaggatatca

SEQ ID NO: 51321 - DNA, 19 bp, Homo sapiens
  siRNA target sequence for EIF4G2 (NM_001418.1,330-348).
gggtgcttctcgtttcagt

SEQ ID NO: 51322 - DNA, 19 bp, Homo sapiens
  siRNA target sequence for EIF4G2 (NM_001418.1,470-488).
gcactagacgagatgacaa

SEQ ID NO: 51323 - DNA, 19 bp, Homo sapiens
  siRNA target sequence for EIF4G2 (NM_001418.1,501-519).
caactccgcaaacgaaaaa

SEQ ID NO: 51324 - DNA, 19 bp, Homo sapiens
  siRNA target sequence for EIF4G2 (NM_001418.1,513-531).
cgaaaaagaacgacatgat

SEQ ID NO: 51325 - DNA, 19 bp, Homo sapiens
  siRNA target sequence for EIF4G2 (NM_001418.1,523-541).
cgacatgatgcaatcttca

SEQ ID NO: 51326 - DNA, 19 bp, Homo sapiens
  siRNA target sequence for EIF4G2 (NM_001418.1,532-550).
gcaatcttcaggaaagtaa

SEQ ID NO: 51327 - DNA, 19 bp, Homo sapiens
  siRNA target sequence for EIF4G2 (NM_001418.1,543-561).
gaaagtaagaggcatacta

SEQ ID NO: 51328 - DNA, 19 bp, Homo sapiens
  siRNA target sequence for EIF4G2 (NM_001418.1,547-565).
gtaagaggcatactaaata

SEQ ID NO: 51329 - DNA, 19 bp, Homo sapiens
  siRNA target sequence for EIF4G2 (NM_001418.1,551-569).
gaggcatactaaataagct

SEQ ID NO: 51330 - DNA, 19 bp, Homo sapiens
  siRNA target sequence for EIF4G2 (NM_001418.1,553-571).
ggcatactaaataagctta

SEQ ID NO: 51331 - DNA, 19 bp, Homo sapiens
  siRNA target sequence for EIF4G2 (NM_001418.1,617-635).
gtgtagagtctaaactcat

SEQ ID NO: 51332 - DNA, 19 bp, Homo sapiens
  siRNA target sequence for EIF4G2 (NM_001418.1,622-640).
gagtctaaactcatcctta

SEQ ID NO: 51333 - DNA, 19 bp, Homo sapiens
  siRNA target sequence for EIF4G2 (NM_001418.1,644-662).
gggtcatactgctgattgt

SEQ ID NO: 51334 - DNA, 19 bp, Homo sapiens
  siRNA target sequence for EIF4G2 (NM_001418.1,671-689).
ccctagaagagccaaagta

SEQ ID NO: 51335 - DNA, 19 bp, Homo sapiens
  siRNA target sequence for EIF4G2 (NM_001418.1,672-690).
cctagaagagccaaagtat

SEQ ID NO: 51336 - DNA, 19 bp, Homo sapiens
  siRNA target sequence for EIF4G2 (NM_001418.1,676-694).
gaagagccaaagtatagct

SEQ ID NO: 51337 - DNA, 19 bp, Homo sapiens
  siRNA target sequence for EIF4G2 (NM_001418.1,725-743).
cagaagatgcaccaaactt

SEQ ID NO: 51338 - DNA, 19 bp, Homo sapiens
  siRNA target sequence for EIF4G2 (NM_001418.1,791-809).
cattcagacgcctcctaat

SEQ ID NO: 51339 - DNA, 19 bp, Homo sapiens
  siRNA target sequence for EIF4G2 (NM_001418.1,797-815).
gacgcctcctaatttccaa

SEQ ID NO: 51340 - DNA, 19 bp, Homo sapiens
  siRNA target sequence for EIF4G2 (NM_001418.1,858-876).
ctatgataagcgtgaaaat

SEQ ID NO: 51341 - DNA, 19 bp, Homo sapiens
  siRNA target sequence for EIF4G2 (NM_001418.1,907-925).
gccattgctaagatcaaga

SEQ ID NO: 51342 - DNA, 19 bp, Homo sapiens
  siRNA target sequence for EIF4G2 (NM_001418.1,908-926).
ccattgctaagatcaagat

SEQ ID NO: 51343 - DNA, 19 bp, Homo sapiens
  siRNA target sequence for EIF4G2 (NM_001418.1,955-973).
cttggcaagcttgatctta

SEQ ID NO: 51344 - DNA, 19 bp, Homo sapiens
  siRNA target sequence for EIF4G2 (NM_001418.1,976-994).
cacgaatctatccttcata

SEQ ID NO: 51345 - DNA, 19 bp, Homo sapiens
  siRNA target sequence for EIF4G2 (NM_001418.1,979-997).
gaatctatccttcataagt

SEQ ID NO: 51346 - DNA, 19 bp, Homo sapiens
  siRNA target sequence for EIF4G2 (NM_001418.1,987-1005).
ccttcataagtgcatcaaa

SEQ ID NO: 51347 - DNA, 19 bp, Homo sapiens
  siRNA target sequence for EIF4G2 (NM_001418.1,988-1006).
cttcataagtgcatcaaaa

SEQ ID NO: 51348 - DNA, 19 bp, Homo sapiens
  siRNA target sequence for EIF4G2 (NM_001418.1,1083-1101).
gacagtgggacctagatta

SEQ ID NO: 51349 - DNA, 19 bp, Homo sapiens
  siRNA target sequence for EIF4G2 (NM_001418.1,1108-1126).
gaacgagccaagtccttaa

SEQ ID NO: 51350 - DNA, 19 bp, Homo sapiens
  siRNA target sequence for EIF4G2 (NM_001418.1,1112-1130).
gagccaagtccttaatgga

SEQ ID NO: 51351 - DNA, 19 bp, Homo sapiens
  siRNA target sequence for EIF4G2 (NM_001418.1,1121-1139).
ccttaatggatcagtactt

SEQ ID NO: 51352 - DNA, 19 bp, Homo sapiens
  siRNA target sequence for EIF4G2 (NM_001418.1,1144-1162).
cgaatgtgctccttgatgt

SEQ ID NO: 51353 - DNA, 19 bp, Homo sapiens
  siRNA target sequence for EIF4G2 (NM_001418.1,1145-1163).
gaatgtgctccttgatgtt

SEQ ID NO: 51354 - DNA, 19 bp, Homo sapiens
  siRNA target sequence for EIF4G2 (NM_001418.1,1149-1167).
gtgctccttgatgttaagt

SEQ ID NO: 51355 - DNA, 19 bp, Homo sapiens
  siRNA target sequence for EIF4G2 (NM_001418.1,1155-1173).
cttgatgttaagtaaggaa

SEQ ID NO: 51356 - DNA, 19 bp, Homo sapiens
  siRNA target sequence for EIF4G2 (NM_001418.1,1238-1256).
ctcgcaaggcttttcttga

SEQ ID NO: 51357 - DNA, 19 bp, Homo sapiens
  siRNA target sequence for EIF4G2 (NM_001418.1,1241-1259).
gcaaggcttttcttgacaa

SEQ ID NO: 51358 - DNA, 19 bp, Homo sapiens
  siRNA target sequence for EIF4G2 (NM_001418.1,1262-1280).
gaccaaagacgatcaatca

SEQ ID NO: 51359 - DNA, 19 bp, Homo sapiens
  siRNA target sequence for EIF4G2 (NM_001418.1,1264-1282).
ccaaagacgatcaatcaaa

SEQ ID NO: 51360 - DNA, 19 bp, Homo sapiens
  siRNA target sequence for EIF4G2 (NM_001418.1,1269-1287).
gacgatcaatcaaattcgt

SEQ ID NO: 51361 - DNA, 19 bp, Homo sapiens
  siRNA target sequence for EIF4G2 (NM_001418.1,1275-1293).
caatcaaattcgtcaagat

SEQ ID NO: 51362 - DNA, 19 bp, Homo sapiens
  siRNA target sequence for EIF4G2 (NM_001418.1,1286-1304).
gtcaagatgcagtaaaaga

SEQ ID NO: 51363 - DNA, 19 bp, Homo sapiens
  siRNA target sequence for EIF4G2 (NM_001418.1,1374-1392).
catgccacccaggatgaaa

SEQ ID NO: 51364 - DNA, 19 bp, Homo sapiens
  siRNA target sequence for EIF4G2 (NM_001418.1,1421-1439).
ctgatatgtttggacaaat

SEQ ID NO: 51365 - DNA, 19 bp, Homo sapiens
  siRNA target sequence for EIF4G2 (NM_001418.1,1440-1458).
gccaggtagcggaattggt

SEQ ID NO: 51366 - DNA, 19 bp, Homo sapiens
  siRNA target sequence for EIF4G2 (NM_001418.1,1441-1459).
ccaggtagcggaattggta

SEQ ID NO: 51367 - DNA, 19 bp, Homo sapiens
  siRNA target sequence for EIF4G2 (NM_001418.1,1457-1475).
gtactggtccaggagttat

SEQ ID NO: 51368 - DNA, 19 bp, Homo sapiens
  siRNA target sequence for EIF4G2 (NM_001418.1,1469-1487).
gagttatccaggatagatt

SEQ ID NO: 51369 - DNA, 19 bp, Homo sapiens
  siRNA target sequence for EIF4G2 (NM_001418.1,1500-1518).
gggacgtcatcgttcaaat

SEQ ID NO: 51370 - DNA, 19 bp, Homo sapiens
  siRNA target sequence for EIF4G2 (NM_001418.1,1502-1520).
gacgtcatcgttcaaatca

SEQ ID NO: 51371 - DNA, 19 bp, Homo sapiens
  siRNA target sequence for EIF4G2 (NM_001418.1,1505-1523).
gtcatcgttcaaatcaact

SEQ ID NO: 51372 - DNA, 19 bp, Homo sapiens
  siRNA target sequence for EIF4G2 (NM_001418.1,1511-1529).
gttcaaatcaactcttcaa

SEQ ID NO: 51373 - DNA, 19 bp, Homo sapiens
  siRNA target sequence for EIF4G2 (NM_001418.1,1613-1631).
gccagctctaccataacca

SEQ ID NO: 51374 - DNA, 19 bp, Homo sapiens
  siRNA target sequence for EIF4G2 (NM_001418.1,1657-1675).
caaggacagtcgaaggata

SEQ ID NO: 51375 - DNA, 19 bp, Homo sapiens
  siRNA target sequence for EIF4G2 (NM_001418.1,1678-1696).
ccacctcggttttctaaga

SEQ ID NO: 51376 - DNA, 19 bp, Homo sapiens
  siRNA target sequence for EIF4G2 (NM_001418.1,1679-1697).
cacctcggttttctaagaa

SEQ ID NO: 51377 - DNA, 19 bp, Homo sapiens
  siRNA target sequence for EIF4G2 (NM_001418.1,1704-1722).
gcttaatgcagatgagatt

SEQ ID NO: 51378 - DNA, 19 bp, Homo sapiens
  siRNA target sequence for EIF4G2 (NM_001418.1,1705-1723).
cttaatgcagatgagatta

SEQ ID NO: 51379 - DNA, 19 bp, Homo sapiens
  siRNA target sequence for EIF4G2 (NM_001418.1,1732-1750).
cctgctcagtcgttcctaa

SEQ ID NO: 51380 - DNA, 19 bp, Homo sapiens
  siRNA target sequence for EIF4G2 (NM_001418.1,1733-1751).
ctgctcagtcgttcctaat

SEQ ID NO: 51381 - DNA, 19 bp, Homo sapiens
  siRNA target sequence for EIF4G2 (NM_001418.1,1735-1753).
gctcagtcgttcctaatga

SEQ ID NO: 51382 - DNA, 19 bp, Homo sapiens
  siRNA target sequence for EIF4G2 (NM_001418.1,1736-1754).
ctcagtcgttcctaatgaa

SEQ ID NO: 51383 - DNA, 19 bp, Homo sapiens
  siRNA target sequence for EIF4G2 (NM_001418.1,1738-1756).
cagtcgttcctaatgaata

SEQ ID NO: 51384 - DNA, 19 bp, Homo sapiens
  siRNA target sequence for EIF4G2 (NM_001418.1,1854-1872).
gcttggtctcaaaactaat

SEQ ID NO: 51385 - DNA, 19 bp, Homo sapiens
  siRNA target sequence for EIF4G2 (NM_001418.1,1936-1954).
ctccttaaactaactgaaa

SEQ ID NO: 51386 - DNA, 19 bp, Homo sapiens
  siRNA target sequence for EIF4G2 (NM_001418.1,1955-1973).
ctgttgtgactgaatatct

SEQ ID NO: 51387 - DNA, 19 bp, Homo sapiens
  siRNA target sequence for EIF4G2 (NM_001418.1,1957-1975).
gttgtgactgaatatctaa

SEQ ID NO: 51388 - DNA, 19 bp, Homo sapiens
  siRNA target sequence for EIF4G2 (NM_001418.1,1962-1980).
gactgaatatctaaatagt

SEQ ID NO: 51389 - DNA, 19 bp, Homo sapiens
  siRNA target sequence for EIF4G2 (NM_001418.1,1995-2013).
ggctgtcaatggtgtaaga

SEQ ID NO: 51390 - DNA, 19 bp, Homo sapiens
  siRNA target sequence for EIF4G2 (NM_001418.1,1997-2015).
ctgtcaatggtgtaagaga

SEQ ID NO: 51391 - DNA, 19 bp, Homo sapiens
  siRNA target sequence for EIF4G2 (NM_001418.1,2021-2039).
gggctcctaaacactttct

SEQ ID NO: 51392 - DNA, 19 bp, Homo sapiens
  siRNA target sequence for EIF4G2 (NM_001418.1,2077-2095).
gatagaagcgatgaagata

SEQ ID NO: 51393 - DNA, 19 bp, Homo sapiens
  siRNA target sequence for EIF4G2 (NM_001418.1,2111-2129).
ctttgatcagtttactcaa

SEQ ID NO: 51394 - DNA, 19 bp, Homo sapiens
  siRNA target sequence for EIF4G2 (NM_001418.1,2214-2232).
ccctttggtgaaatcctat

SEQ ID NO: 51395 - DNA, 19 bp, Homo sapiens
  siRNA target sequence for EIF4G2 (NM_001418.1,2215-2233).
cctttggtgaaatcctatt

SEQ ID NO: 51396 - DNA, 19 bp, Homo sapiens
  siRNA target sequence for EIF4G2 (NM_001418.1,2220-2238).
ggtgaaatcctatttagca

SEQ ID NO: 51397 - DNA, 19 bp, Homo sapiens
  siRNA target sequence for EIF4G2 (NM_001418.1,2249-2267).
ctcgtgccatcatttcaga

SEQ ID NO: 51398 - DNA, 19 bp, Homo sapiens
  siRNA target sequence for EIF4G2 (NM_001418.1,2271-2289).
ggtgagcatttcagaacta

SEQ ID NO: 51399 - DNA, 19 bp, Homo sapiens
  siRNA target sequence for EIF4G2 (NM_001418.1,2287-2305).
ctagctcaaccactagaaa

SEQ ID NO: 51400 - DNA, 19 bp, Homo sapiens
  siRNA target sequence for EIF4G2 (NM_001418.1,2336-2354).
gtcttcagcagttagctaa

SEQ ID NO: 51401 - DNA, 19 bp, Homo sapiens
  siRNA target sequence for EIF4G2 (NM_001418.1,2338-2356).
cttcagcagttagctaaat

SEQ ID NO: 51402 - DNA, 19 bp, Homo sapiens
  siRNA target sequence for EIF4G2 (NM_001418.1,2343-2361).
gcagttagctaaattacaa

SEQ ID NO: 51403 - DNA, 19 bp, Homo sapiens
  siRNA target sequence for EIF4G2 (NM_001418.1,2368-2386).
gaatggttaacagaacttt

SEQ ID NO: 51404 - DNA, 19 bp, Homo sapiens
  siRNA target sequence for EIF4G2 (NM_001418.1,2389-2407).
caacaaagcaaggtcaata

SEQ ID NO: 51405 - DNA, 19 bp, Homo sapiens
  siRNA target sequence for EIF4G2 (NM_001418.1,2421-2439).
cccagaaattgatcagaat

SEQ ID NO: 51406 - DNA, 19 bp, Homo sapiens
  siRNA target sequence for EIF4G2 (NM_001418.1,2422-2440).
ccagaaattgatcagaata

SEQ ID NO: 51407 - DNA, 19 bp, Homo sapiens
  siRNA target sequence for EIF4G2 (NM_001418.1,2467-2485).
ggaaagggactgagtttct

SEQ ID NO: 51408 - DNA, 19 bp, Homo sapiens
  siRNA target sequence for EIF4G2 (NM_001418.1,2543-2561).
cccctcaaaccatatataa

SEQ ID NO: 51409 - DNA, 19 bp, Homo sapiens
  siRNA target sequence for EIF4G2 (NM_001418.1,2584-2602).
cccaaacttcatgtagata

SEQ ID NO: 51410 - DNA, 19 bp, Homo sapiens
  siRNA target sequence for EIF4G2 (NM_001418.1,2585-2603).
ccaaacttcatgtagataa

SEQ ID NO: 51411 - DNA, 19 bp, Homo sapiens
  siRNA target sequence for EIF4G2 (NM_001418.1,2596-2614).
gtagataaaggatttgtga

SEQ ID NO: 51412 - DNA, 19 bp, Homo sapiens
  siRNA target sequence for EIF4G2 (NM_001418.1,2611-2629).
gtgaacatcttaatgacta

SEQ ID NO: 51413 - DNA, 19 bp, Homo sapiens
  siRNA target sequence for EIF4G2 (NM_001418.1,2627-2645).
ctagcttcttacagtacat

SEQ ID NO: 51414 - DNA, 19 bp, Homo sapiens
  siRNA target sequence for EIF4G2 (NM_001418.1,2718-2736).
ggaaaaacaactactacta

SEQ ID NO: 51415 - DNA, 19 bp, Homo sapiens
  siRNA target sequence for EIF4G2 (NM_001418.1,2738-2756).
ctttcaagccagtaatgca

SEQ ID NO: 51416 - DNA, 19 bp, Homo sapiens
  siRNA target sequence for EIF4G2 (NM_001418.1,2809-2827).
caggtgcactgctataaca

SEQ ID NO: 51417 - DNA, 19 bp, Homo sapiens
  siRNA target sequence for EIF4G2 (NM_001418.1,2843-2861).
gcatgttacttcgcttttt

SEQ ID NO: 51418 - DNA, 19 bp, Homo sapiens
  siRNA target sequence for EIF4G2 (NM_001418.1,2844-2862).
catgttacttcgctttttt

SEQ ID NO: 51419 - DNA, 19 bp, Homo sapiens
  siRNA target sequence for EIF4G2 (NM_001418.1,2855-2873).
gcttttttgtgcacttcta

SEQ ID NO: 51420 - DNA, 19 bp, Homo sapiens
  siRNA target sequence for EIF4G2 (NM_001418.1,2942-2960).
gaaaaggcaaggctttgtt

SEQ ID NO: 51421 - DNA, 19 bp, Homo sapiens
  siRNA target sequence for EIF4G2 (NM_001418.1,2954-2972).
ctttgttccaggtgaatca

SEQ ID NO: 51422 - DNA, 19 bp, Homo sapiens
  siRNA target sequence for ERAL1 (NM_005702.1,50-68).
cttgttcaatcggtgttaa

SEQ ID NO: 51423 - DNA, 19 bp, Homo sapiens
  siRNA target sequence for ERAL1 (NM_005702.1,193-211).
ctcggcttctcgcagtaat

SEQ ID NO: 51424 - DNA, 19 bp, Homo sapiens
  siRNA target sequence for ERAL1 (NM_005702.1,445-463).
caggaaggtgcatactact

SEQ ID NO: 51425 - DNA, 19 bp, Homo sapiens
  siRNA target sequence for ERAL1 (NM_005702.1,499-517).
gacccaggtgattctactt

SEQ ID NO: 51426 - DNA, 19 bp, Homo sapiens
  siRNA target sequence for ERAL1 (NM_005702.1,520-538).
cacacctggcattatcagt

SEQ ID NO: 51427 - DNA, 19 bp, Homo sapiens
  siRNA target sequence for ERAL1 (NM_005702.1,560-578).
cacctggagctctctttgt

SEQ ID NO: 51428 - DNA, 19 bp, Homo sapiens
  siRNA target sequence for ERAL1 (NM_005702.1,708-726).
ctagtgtcctggtcatgaa

SEQ ID NO: 51429 - DNA, 19 bp, Homo sapiens
  siRNA target sequence for ERAL1 (NM_005702.1,719-737).
gtcatgaacaaggtagatt

SEQ ID NO: 51430 - DNA, 19 bp, Homo sapiens
  siRNA target sequence for ERAL1 (NM_005702.1,721-739).
catgaacaaggtagattgt

SEQ ID NO: 51431 - DNA, 19 bp, Homo sapiens
  siRNA target sequence for ERAL1 (NM_005702.1,789-807).
gtgtggtcaatggcaaaaa

SEQ ID NO: 51432 - DNA, 19 bp, Homo sapiens
  siRNA target sequence for ERAL1 (NM_005702.1,958-976).
ggaggacgtgaaaacacta

SEQ ID NO: 51433 - DNA, 19 bp, Homo sapiens
  siRNA target sequence for ERAL1 (NM_005702.1,959-977).
gaggacgtgaaaacactaa

SEQ ID NO: 51434 - DNA, 19 bp, Homo sapiens
  siRNA target sequence for ERAL1 (NM_005702.1,1055-1073).
gagatctgtgccaacatta

SEQ ID NO: 51435 - DNA, 19 bp, Homo sapiens
  siRNA target sequence for ERAL1 (NM_005702.1,1102-1120).
ccaggaggtgccttacaat

SEQ ID NO: 51436 - DNA, 19 bp, Homo sapiens
  siRNA target sequence for ERAL1 (NM_005702.1,1158-1176).
gtggggagctggttatcca

SEQ ID NO: 51437 - DNA, 19 bp, Homo sapiens
  siRNA target sequence for ETF1 (NM_004730.1,222-240).
caatggcaccagcatgata

SEQ ID NO: 51438 - DNA, 19 bp, Homo sapiens
  siRNA target sequence for ETF1 (NM_004730.1,226-244).
ggcaccagcatgatatcat

SEQ ID NO: 51439 - DNA, 19 bp, Homo sapiens
  siRNA target sequence for ETF1 (NM_004730.1,227-245).
gcaccagcatgatatcatt

SEQ ID NO: 51440 - DNA, 19 bp, Homo sapiens
  siRNA target sequence for ETF1 (NM_004730.1,233-251).
gcatgatatcattgatcat

SEQ ID NO: 51441 - DNA, 19 bp, Homo sapiens
  siRNA target sequence for ETF1 (NM_004730.1,234-252).
catgatatcattgatcatt

SEQ ID NO: 51442 - DNA, 19 bp, Homo sapiens
  siRNA target sequence for ETF1 (NM_004730.1,253-271).
cctcccaaagaccagattt

SEQ ID NO: 51443 - DNA, 19 bp, Homo sapiens
  siRNA target sequence for ETF1 (NM_004730.1,329-347).
gagtaaaccgcctttcagt

SEQ ID NO: 51444 - DNA, 19 bp, Homo sapiens
  siRNA target sequence for ETF1 (NM_004730.1,351-369).
gggagccattacatctgta

SEQ ID NO: 51445 - DNA, 19 bp, Homo sapiens
  siRNA target sequence for ETF1 (NM_004730.1,356-374).
ccattacatctgtacaaca

SEQ ID NO: 51446 - DNA, 19 bp, Homo sapiens
  siRNA target sequence for ETF1 (NM_004730.1,357-375).
cattacatctgtacaacaa

SEQ ID NO: 51447 - DNA, 19 bp, Homo sapiens
  siRNA target sequence for ETF1 (NM_004730.1,362-380).
catctgtacaacaaagact

SEQ ID NO: 51448 - DNA, 19 bp, Homo sapiens
  siRNA target sequence for ETF1 (NM_004730.1,381-399).
caaactttataacaaagta

SEQ ID NO: 51449 - DNA, 19 bp, Homo sapiens
  siRNA target sequence for ETF1 (NM_004730.1,404-422).
caaatggtctggttgtata

SEQ ID NO: 51450 - DNA, 19 bp, Homo sapiens
  siRNA target sequence for ETF1 (NM_004730.1,423-441).
ctgtggaacaattgtaaca

SEQ ID NO: 51451 - DNA, 19 bp, Homo sapiens
  siRNA target sequence for ETF1 (NM_004730.1,478-496).
gaacctttcaaaccaatta

SEQ ID NO: 51452 - DNA, 19 bp, Homo sapiens
  siRNA target sequence for ETF1 (NM_004730.1,481-499).
cctttcaaaccaattaata

SEQ ID NO: 51453 - DNA, 19 bp, Homo sapiens
  siRNA target sequence for ETF1 (NM_004730.1,490-508).
ccaattaatacgtcattgt

SEQ ID NO: 51454 - DNA, 19 bp, Homo sapiens
  siRNA target sequence for ETF1 (NM_004730.1,507-525).
gtatttgtgtgacaacaaa

SEQ ID NO: 51455 - DNA, 19 bp, Homo sapiens
  siRNA target sequence for ETF1 (NM_004730.1,537-555).
ggctcttacagcactactt

SEQ ID NO: 51456 - DNA, 19 bp, Homo sapiens
  siRNA target sequence for ETF1 (NM_004730.1,538-556).
gctcttacagcactacttt

SEQ ID NO: 51457 - DNA, 19 bp, Homo sapiens
  siRNA target sequence for ETF1 (NM_004730.1,632-650).
gagaagtcctgcacaaatt

SEQ ID NO: 51458 - DNA, 19 bp, Homo sapiens
  siRNA target sequence for ETF1 (NM_004730.1,699-717).
gcgttttgcccgtttaaga

SEQ ID NO: 51459 - DNA, 19 bp, Homo sapiens
  siRNA target sequence for ETF1 (NM_004730.1,700-718).
cgttttgcccgtttaagaa

SEQ ID NO: 51460 - DNA, 19 bp, Homo sapiens
  siRNA target sequence for ETF1 (NM_004730.1,716-734).
gaatggaaaagcgacataa

SEQ ID NO: 51461 - DNA, 19 bp, Homo sapiens
  siRNA target sequence for ETF1 (NM_004730.1,798-816).
ggctggtctagttttagct

SEQ ID NO: 51462 - DNA, 19 bp, Homo sapiens
  siRNA target sequence for ETF1 (NM_004730.1,838-856).
gaactaagtcaatctgata

SEQ ID NO: 51463 - DNA, 19 bp, Homo sapiens
  siRNA target sequence for ETF1 (NM_004730.1,841-859).
ctaagtcaatctgatatgt

SEQ ID NO: 51464 - DNA, 19 bp, Homo sapiens
  siRNA target sequence for ETF1 (NM_004730.1,858-876).
gtttgatcagaggttacaa

SEQ ID NO: 51465 - DNA, 19 bp, Homo sapiens
  siRNA target sequence for ETF1 (NM_004730.1,869-887).
ggttacaatcaaaagtttt

SEQ ID NO: 51466 - DNA, 19 bp, Homo sapiens
  siRNA target sequence for ETF1 (NM_004730.1,923-941).
gattcaaccaagctattga

SEQ ID NO: 51467 - DNA, 19 bp, Homo sapiens
  siRNA target sequence for ETF1 (NM_004730.1,927-945).
caaccaagctattgagtta

SEQ ID NO: 51468 - DNA, 19 bp, Homo sapiens
  siRNA target sequence for ETF1 (NM_004730.1,931-949).
caagctattgagttatcta

SEQ ID NO: 51469 - DNA, 19 bp, Homo sapiens
  siRNA target sequence for ETF1 (NM_004730.1,975-993).
cattcaagagaagaaatta

SEQ ID NO: 51470 - DNA, 19 bp, Homo sapiens
  siRNA target sequence for ETF1 (NM_004730.1,997-1015).
ggacgatactttgatgaaa

SEQ ID NO: 51471 - DNA, 19 bp, Homo sapiens
  siRNA target sequence for ETF1 (NM_004730.1,998-1016).
gacgatactttgatgaaat

SEQ ID NO: 51472 - DNA, 19 bp, Homo sapiens
  siRNA target sequence for ETF1 (NM_004730.1,1024-1042).
gacacgggcaagtactgtt

SEQ ID NO: 51473 - DNA, 19 bp, Homo sapiens
  siRNA target sequence for ETF1 (NM_004730.1,1038-1056).
ctgttttggcgttgaagat

SEQ ID NO: 51474 - DNA, 19 bp, Homo sapiens
  siRNA target sequence for ETF1 (NM_004730.1,1045-1063).
ggcgttgaagatacactaa

SEQ ID NO: 51475 - DNA, 19 bp, Homo sapiens
  siRNA target sequence for ETF1 (NM_004730.1,1046-1064).
gcgttgaagatacactaaa

SEQ ID NO: 51476 - DNA, 19 bp, Homo sapiens
  siRNA target sequence for ETF1 (NM_004730.1,1101-1119).
ctatgaaaatctggatata

SEQ ID NO: 51477 - DNA, 19 bp, Homo sapiens
  siRNA target sequence for ETF1 (NM_004730.1,1255-1273).
ctgttggaatggtttgcta

SEQ ID NO: 51478 - DNA, 19 bp, Homo sapiens
  siRNA target sequence for ETF1 (NM_004730.1,1266-1284).
gtttgctaacaactataaa

SEQ ID NO: 51479 - DNA, 19 bp, Homo sapiens
  siRNA target sequence for ETF1 (NM_004730.1,1270-1288).
gctaacaactataaaaaat

SEQ ID NO: 51480 - DNA, 19 bp, Homo sapiens
  siRNA target sequence for ETF1 (NM_004730.1,1292-1310).
gagctacgttggaaattgt

SEQ ID NO: 51481 - DNA, 19 bp, Homo sapiens
  siRNA target sequence for ETF1 (NM_004730.1,1294-1312).
gctacgttggaaattgtca

SEQ ID NO: 51482 - DNA, 19 bp, Homo sapiens
  siRNA target sequence for ETF1 (NM_004730.1,1327-1345).
gaagggtctcagtttgtga

SEQ ID NO: 51483 - DNA, 19 bp, Homo sapiens
  siRNA target sequence for ETF1 (NM_004730.1,1371-1389).
cttgcggtaccgagtagat

SEQ ID NO: 51484 - DNA, 19 bp, Homo sapiens
  siRNA target sequence for ETF1 (NM_004730.1,1376-1394).
ggtaccgagtagatttcca

SEQ ID NO: 51485 - DNA, 19 bp, Homo sapiens
  siRNA target sequence for ETF1 (NM_004730.1,1387-1405).
gatttccagggaatggaat

SEQ ID NO: 51486 - DNA, 19 bp, Homo sapiens
  siRNA target sequence for ETF1 (NM_004730.1,1412-1430).
gaggagacgatgaattttt

SEQ ID NO: 51487 - DNA, 19 bp, Homo sapiens
  siRNA target sequence for EWSR1 (NM_005243.1,319-337).
gtatggcactggtgcttat

SEQ ID NO: 51488 - DNA, 19 bp, Homo sapiens
  siRNA target sequence for EWSR1 (NM_005243.1,400-418).
cactcagcctgcttatcca

SEQ ID NO: 51489 - DNA, 19 bp, Homo sapiens
  siRNA target sequence for EWSR1 (NM_005243.1,475-493).
gcccactgagactagtcaa

SEQ ID NO: 51490 - DNA, 19 bp, Homo sapiens
  siRNA target sequence for EWSR1 (NM_005243.1,484-502).
gactagtcaacctcaatct

SEQ ID NO: 51491 - DNA, 19 bp, Homo sapiens
  siRNA target sequence for EWSR1 (NM_005243.1,501-519).
ctagcacagggggttacaa

SEQ ID NO: 51492 - DNA, 19 bp, Homo sapiens
  siRNA target sequence for EWSR1 (NM_005243.1,520-538).
ccagcccagcctaggatat

SEQ ID NO: 51493 - DNA, 19 bp, Homo sapiens
  siRNA target sequence for EWSR1 (NM_005243.1,533-551).
ggatatggacagagtaact

SEQ ID NO: 51494 - DNA, 19 bp, Homo sapiens
  siRNA target sequence for EWSR1 (NM_005243.1,534-552).
gatatggacagagtaacta

SEQ ID NO: 51495 - DNA, 19 bp, Homo sapiens
  siRNA target sequence for EWSR1 (NM_005243.1,539-557).
ggacagagtaactacagtt

SEQ ID NO: 51496 - DNA, 19 bp, Homo sapiens
  siRNA target sequence for EWSR1 (NM_005243.1,633-651).
ctacacagccgactagtta

SEQ ID NO: 51497 - DNA, 19 bp, Homo sapiens
  siRNA target sequence for EWSR1 (NM_005243.1,712-730).
gagtagctatggtcaacaa

SEQ ID NO: 51498 - DNA, 19 bp, Homo sapiens
  siRNA target sequence for EWSR1 (NM_005243.1,788-806).
caagctccaagtcaatata

SEQ ID NO: 51499 - DNA, 19 bp, Homo sapiens
  siRNA target sequence for EWSR1 (NM_005243.1,858-876).
ccagtagcatgggtgttta

SEQ ID NO: 51500 - DNA, 19 bp, Homo sapiens
  siRNA target sequence for EWSR1 (NM_005243.1,859-877).
cagtagcatgggtgtttat

SEQ ID NO: 51501 - DNA, 19 bp, Homo sapiens
  siRNA target sequence for EWSR1 (NM_005243.1,1116-1134).
ctgacaacagtgcaattta

SEQ ID NO: 51502 - DNA, 19 bp, Homo sapiens
  siRNA target sequence for EWSR1 (NM_005243.1,1120-1138).
caacagtgcaatttatgta

SEQ ID NO: 51503 - DNA, 19 bp, Homo sapiens
  siRNA target sequence for EWSR1 (NM_005243.1,1155-1173).
gtgtgactctagatgatct

SEQ ID NO: 51504 - DNA, 19 bp, Homo sapiens
  siRNA target sequence for EWSR1 (NM_005243.1,1281-1299).
ccacagtgtcctatgaaga

SEQ ID NO: 51505 - DNA, 19 bp, Homo sapiens
  siRNA target sequence for EWSR1 (NM_005243.1,1315-1333).
ggctgccgtggaatggttt

SEQ ID NO: 51506 - DNA, 19 bp, Homo sapiens
  siRNA target sequence for EWSR1 (NM_005243.1,1656-1674).
cagagtgcaaccagtgtaa

SEQ ID NO: 51507 - DNA, 19 bp, Homo sapiens
  siRNA target sequence for EWSR1 (NM_005243.1,1788-1806).
gtggtcccggtggaatgtt

SEQ ID NO: 51508 - DNA, 19 bp, Homo sapiens
  siRNA target sequence for EWSR1 (NM_005243.1,1790-1808).
ggtcccggtggaatgttca

SEQ ID NO: 51509 - DNA, 19 bp, Homo sapiens
  siRNA target sequence for EWSR1 (NM_005243.1,1955-1973).
ggacctggaaaaatggata

SEQ ID NO: 51510 - DNA, 19 bp, Homo sapiens
  siRNA target sequence for FBL (NM_001436.2,335-353).
gcatgagggtgtcttcatt

SEQ ID NO: 51511 - DNA, 19 bp, Homo sapiens
  siRNA target sequence for FBL (NM_001436.2,350-368).
catttgtcgaggaaaggaa

SEQ ID NO: 51512 - DNA, 19 bp, Homo sapiens
  siRNA target sequence for FBL (NM_001436.2,436-454).
cggaaggagatgacaaaat

SEQ ID NO: 51513 - DNA, 19 bp, Homo sapiens
  siRNA target sequence for FBL (NM_001436.2,441-459).
ggagatgacaaaattgagt

SEQ ID NO: 51514 - DNA, 19 bp, Homo sapiens
  siRNA target sequence for FBL (NM_001436.2,742-760).
caatggtggatgtgatctt

SEQ ID NO: 51515 - DNA, 19 bp, Homo sapiens
  siRNA target sequence for FBL (NM_001436.2,823-841).
gtaatggaggacactttgt

SEQ ID NO: 51516 - DNA, 19 bp, Homo sapiens
  siRNA target sequence for FLJ10379 (NM_018079.3,238-256).
gcctcgggtgaagaagaat

SEQ ID NO: 51517 - DNA, 19 bp, Homo sapiens
  siRNA target sequence for FLJ10379 (NM_018079.3,276-294).
gctcagaagtcgttgttgt

SEQ ID NO: 51518 - DNA, 19 bp, Homo sapiens
  siRNA target sequence for FLJ10379 (NM_018079.3,279-297).
cagaagtcgttgttgttaa

SEQ ID NO: 51519 - DNA, 19 bp, Homo sapiens
  siRNA target sequence for FLJ10379 (NM_018079.3,408-426).
cagcgcagccacatacagt

SEQ ID NO: 51520 - DNA, 19 bp, Homo sapiens
  siRNA target sequence for FLJ10379 (NM_018079.3,484-502).
gggtgagagtaatagttca

SEQ ID NO: 51521 - DNA, 19 bp, Homo sapiens
  siRNA target sequence for FLJ10379 (NM_018079.3,553-571).
gaatgacgatgactttaca

SEQ ID NO: 51522 - DNA, 19 bp, Homo sapiens
  siRNA target sequence for FLJ10379 (NM_018079.3,575-593).
ggtcagtccgctttaaaga

SEQ ID NO: 51523 - DNA, 19 bp, Homo sapiens
  siRNA target sequence for FLJ10379 (NM_018079.3,576-594).
gtcagtccgctttaaagaa

SEQ ID NO: 51524 - DNA, 19 bp, Homo sapiens
  siRNA target sequence for FLJ10379 (NM_018079.3,578-596).
cagtccgctttaaagaaaa

SEQ ID NO: 51525 - DNA, 19 bp, Homo sapiens
  siRNA target sequence for FLJ10379 (NM_018079.3,598-616).
caagactgagacatatcct

SEQ ID NO: 51526 - DNA, 19 bp, Homo sapiens
  siRNA target sequence for FLJ10379 (NM_018079.3,641-659).
gcaaatgccaatagtacta

SEQ ID NO: 51527 - DNA, 19 bp, Homo sapiens
  siRNA target sequence for FLJ10379 (NM_018079.3,681-699).
gggacatggtacaggtttt

SEQ ID NO: 51528 - DNA, 19 bp, Homo sapiens
  siRNA target sequence for FLJ10379 (NM_018079.3,685-703).
catggtacaggttttatct

SEQ ID NO: 51529 - DNA, 19 bp, Homo sapiens
  siRNA target sequence for FLJ10379 (NM_018079.3,702-720).
ctgagagaactaatattga

SEQ ID NO: 51530 - DNA, 19 bp, Homo sapiens
  siRNA target sequence for FLJ10379 (NM_018079.3,736-754).
caacatcattcgtctcttt

SEQ ID NO: 51531 - DNA, 19 bp, Homo sapiens
  siRNA target sequence for FLJ10379 (NM_018079.3,742-760).
cattcgtctctttaatgat

SEQ ID NO: 51532 - DNA, 19 bp, Homo sapiens
  siRNA target sequence for FLJ10379 (NM_018079.3,751-769).
ctttaatgatgataacaca

SEQ ID NO: 51533 - DNA, 19 bp, Homo sapiens
  siRNA target sequence for FLJ10379 (NM_018079.3,861-879).
gggctgttgcaaagaaagt

SEQ ID NO: 51534 - DNA, 19 bp, Homo sapiens
  siRNA target sequence for FLJ10379 (NM_018079.3,866-884).
gttgcaaagaaagttcata

SEQ ID NO: 51535 - DNA, 19 bp, Homo sapiens
  siRNA target sequence for FLJ10379 (NM_018079.3,916-934).
gatgtctgagtgcttgtta

SEQ ID NO: 51536 - DNA, 19 bp, Homo sapiens
  siRNA target sequence for FLJ10379 (NM_018079.3,974-992).
cacgtgtctgctccatata

SEQ ID NO: 51537 - DNA, 19 bp, Homo sapiens
  siRNA target sequence for FLJ10379 (NM_018079.3,976-994).
cgtgtctgctccatataaa

SEQ ID NO: 51538 - DNA, 19 bp, Homo sapiens
  siRNA target sequence for FLJ10379 (NM_018079.3,1054-1072).
cagggcactgcttgagaaa

SEQ ID NO: 51539 - DNA, 19 bp, Homo sapiens
  siRNA target sequence for FLJ10379 (NM_018079.3,1084-1102).
cagtctgctatcgtacatt

SEQ ID NO: 51540 - DNA, 19 bp, Homo sapiens
  siRNA target sequence for FLJ10379 (NM_018079.3,1099-1117).
cattaggcctgacgttaaa

SEQ ID NO: 51541 - DNA, 19 bp, Homo sapiens
  siRNA target sequence for FLJ10379 (NM_018079.3,1109-1127).
gacgttaaagggctttcaa

SEQ ID NO: 51542 - DNA, 19 bp, Homo sapiens
  siRNA target sequence for FLJ10379 (NM_018079.3,1125-1143).
caacgcttcaggatattga

SEQ ID NO: 51543 - DNA, 19 bp, Homo sapiens
  siRNA target sequence for FLJ10379 (NM_018079.3,1128-1146).
cgcttcaggatattgaaat

SEQ ID NO: 51544 - DNA, 19 bp, Homo sapiens
  siRNA target sequence for FLJ10379 (NM_018079.3,1259-1277).
gtatcctcaaaaaaggtaa

SEQ ID NO: 51545 - DNA, 19 bp, Homo sapiens
  siRNA target sequence for FLJ10379 (NM_018079.3,1280-1298).
gagaaagatgttgataagt

SEQ ID NO: 51546 - DNA, 19 bp, Homo sapiens
  siRNA target sequence for FLJ10379 (NM_018079.3,1336-1354).
cattcaccatcatcagatt

SEQ ID NO: 51547 - DNA, 19 bp, Homo sapiens
  siRNA target sequence for FLJ10379 (NM_018079.3,1346-1364).
catcagattctggcaatta

SEQ ID NO: 51548 - DNA, 19 bp, Homo sapiens
  siRNA target sequence for FLJ10379 (NM_018079.3,1359-1377).
caattaaccgtggagaaaa

SEQ ID NO: 51549 - DNA, 19 bp, Homo sapiens
  siRNA target sequence for FLJ10379 (NM_018079.3,1388-1406).
ctgacggttaaggtcaata

SEQ ID NO: 51550 - DNA, 19 bp, Homo sapiens
  siRNA target sequence for FLJ10379 (NM_018079.3,1390-1408).
gacggttaaggtcaatatt

SEQ ID NO: 51551 - DNA, 19 bp, Homo sapiens
  siRNA target sequence for FLJ10379 (NM_018079.3,1434-1452).
gtaggtggtgcatccaaaa

SEQ ID NO: 51552 - DNA, 19 bp, Homo sapiens
  siRNA target sequence for FLJ10379 (NM_018079.3,1456-1474).
gtggagaccacgtagcttt

SEQ ID NO: 51553 - DNA, 19 bp, Homo sapiens
  siRNA target sequence for FLJ10379 (NM_018079.3,1484-1502).
gagttaatgaagatcttat

SEQ ID NO: 51554 - DNA, 19 bp, Homo sapiens
  siRNA target sequence for FLJ10379 (NM_018079.3,1509-1527).
cactgaatgattcctttaa

SEQ ID NO: 51555 - DNA, 19 bp, Homo sapiens
  siRNA target sequence for FLJ10379 (NM_018079.3,1522-1540).
ctttaaacgccttatttat

SEQ ID NO: 51556 - DNA, 19 bp, Homo sapiens
  siRNA target sequence for FLJ10379 (NM_018079.3,1541-1559).
cctcttctctgtagagaat

SEQ ID NO: 51557 - DNA, 19 bp, Homo sapiens
  siRNA target sequence for FLJ10379 (NM_018079.3,1646-1664).
gttccagggcgcaccttaa

SEQ ID NO: 51558 - DNA, 19 bp, Homo sapiens
  siRNA target sequence for FLJ10379 (NM_018079.3,1666-1684).
gggagtggatcctggttat

SEQ ID NO: 51559 - DNA, 19 bp, Homo sapiens
  siRNA target sequence for FLJ10379 (NM_018079.3,1667-1685).
ggagtggatcctggttata

SEQ ID NO: 51560 - DNA, 19 bp, Homo sapiens
  siRNA target sequence for FLJ10379 (NM_018079.3,1668-1686).
gagtggatcctggttataa

SEQ ID NO: 51561 - DNA, 19 bp, Homo sapiens
  siRNA target sequence for FLJ10379 (NM_018079.3,1672-1690).
ggatcctggttataaacat

SEQ ID NO: 51562 - DNA, 19 bp, Homo sapiens
  siRNA target sequence for FLJ10379 (NM_018079.3,1688-1706).
catggttgcaaattagcta

SEQ ID NO: 51563 - DNA, 19 bp, Homo sapiens
  siRNA target sequence for FLJ10379 (NM_018079.3,1692-1710).
gttgcaaattagctataat

SEQ ID NO: 51564 - DNA, 19 bp, Homo sapiens
  siRNA target sequence for FLJ10379 (NM_018079.3,1713-1731).
ctcctactagtcagatact

SEQ ID NO: 51565 - DNA, 19 bp, Homo sapiens
  siRNA target sequence for FLJ10379 (NM_018079.3,1733-1751).
catactgatgtggtttact

SEQ ID NO: 51566 - DNA, 19 bp, Homo sapiens
  siRNA target sequence for FLJ10379 (NM_018079.3,1739-1757).
gatgtggtttacttgcatt

SEQ ID NO: 51567 - DNA, 19 bp, Homo sapiens
  siRNA target sequence for FLJ10379 (NM_018079.3,1777-1795).
ggcggagaaaataaagaca

SEQ ID NO: 51568 - DNA, 19 bp, Homo sapiens
  siRNA target sequence for FLJ10379 (NM_018079.3,1872-1890).
ctgacctgataatgaagaa

SEQ ID NO: 51569 - DNA, 19 bp, Homo sapiens
  siRNA target sequence for FLJ10379 (NM_018079.3,1874-1892).
gacctgataatgaagaatt

SEQ ID NO: 51570 - DNA, 19 bp, Homo sapiens
  siRNA target sequence for FLJ10379 (NM_018079.3,1876-1894).
cctgataatgaagaattat

SEQ ID NO: 51571 - DNA, 19 bp, Homo sapiens
  siRNA target sequence for FLJ10379 (NM_018079.3,1931-1949).
gaagcaggagcatcaatct

SEQ ID NO: 51572 - DNA, 19 bp, Homo sapiens
  siRNA target sequence for FLJ10379 (NM_018079.3,1934-1952).
gcaggagcatcaatctaca

SEQ ID NO: 51573 - DNA, 19 bp, Homo sapiens
  siRNA target sequence for FLJ10379 (NM_018079.3,1985-2003).
gggctggaccctaatttga

SEQ ID NO: 51574 - DNA, 19 bp, Homo sapiens
  siRNA target sequence for FLJ10379 (NM_018079.3,2002-2020).
gagaagtgcagtttccata

SEQ ID NO: 51575 - DNA, 19 bp, Homo sapiens
  siRNA target sequence for FLJ10379 (NM_018079.3,2017-2035).
catagcaaggcgtgtacaa

SEQ ID NO: 51576 - DNA, 19 bp, Homo sapiens
  siRNA target sequence for FLJ10379 (NM_018079.3,2025-2043).
ggcgtgtacaagatccatt

SEQ ID NO: 51577 - DNA, 19 bp, Homo sapiens
  siRNA target sequence for FLJ10379 (NM_018079.3,2026-2044).
gcgtgtacaagatccatta

SEQ ID NO: 51578 - DNA, 19 bp, Homo sapiens
  siRNA target sequence for FLJ10379 (NM_018079.3,2040-2058).
cattagctgagctagtgaa

SEQ ID NO: 51579 - DNA, 19 bp, Homo sapiens
  siRNA target sequence for FLJ10379 (NM_018079.3,2102-2120).
gtatcccagactttactca

SEQ ID NO: 51580 - DNA, 19 bp, Homo sapiens
  siRNA target sequence for FLJ10379 (NM_018079.3,2127-2145).
cactggacagtgttgtaga

SEQ ID NO: 51581 - DNA, 19 bp, Homo sapiens
  siRNA target sequence for FLJ10379 (NM_018079.3,2157-2175).
gctttgtgggagtggatat

SEQ ID NO: 51582 - DNA, 19 bp, Homo sapiens
  siRNA target sequence for FLJ10379 (NM_018079.3,2158-2176).
ctttgtgggagtggatatt

SEQ ID NO: 51583 - DNA, 19 bp, Homo sapiens
  siRNA target sequence for FLJ10379 (NM_018079.3,2162-2180).
gtgggagtggatattaaca

SEQ ID NO: 51584 - DNA, 19 bp, Homo sapiens
  siRNA target sequence for FLJ10379 (NM_018079.3,2165-2183).
ggagtggatattaacatct

SEQ ID NO: 51585 - DNA, 19 bp, Homo sapiens
  siRNA target sequence for FLJ10379 (NM_018079.3,2168-2186).
gtggatattaacatctgtt

SEQ ID NO: 51586 - DNA, 19 bp, Homo sapiens
  siRNA target sequence for FLJ10379 (NM_018079.3,2203-2221).
gcatattgcaggactcaat

SEQ ID NO: 51587 - DNA, 19 bp, Homo sapiens
  siRNA target sequence for FLJ10379 (NM_018079.3,2229-2247).
gggccaaaaatattattga

SEQ ID NO: 51588 - DNA, 19 bp, Homo sapiens
  siRNA target sequence for FLJ10379 (NM_018079.3,2278-2296).
ccgagaacagctgaagaaa

SEQ ID NO: 51589 - DNA, 19 bp, Homo sapiens
  siRNA target sequence for FLJ10379 (NM_018079.3,2303-2321).
gggctgggcccaaaatcct

SEQ ID NO: 51590 - DNA, 19 bp, Homo sapiens
  siRNA target sequence for FLJ10379 (NM_018079.3,2304-2322).
ggctgggcccaaaatcctt

SEQ ID NO: 51591 - DNA, 19 bp, Homo sapiens
  siRNA target sequence for FLJ10379 (NM_018079.3,2346-2364).
gaatcaaccaggattatat

SEQ ID NO: 51592 - DNA, 19 bp, Homo sapiens
  siRNA target sequence for FLJ10379 (NM_018079.3,2356-2374).
ggattatatccgaacgttt

SEQ ID NO: 51593 - DNA, 19 bp, Homo sapiens
  siRNA target sequence for FLJ10379 (NM_018079.3,2357-2375).
gattatatccgaacgtttt

SEQ ID NO: 51594 - DNA, 19 bp, Homo sapiens
  siRNA target sequence for FLJ10379 (NM_018079.3,2515-2533).
ggaccaaacttgtattcat

SEQ ID NO: 51595 - DNA, 19 bp, Homo sapiens
  siRNA target sequence for FLJ10379 (NM_018079.3,2537-2555).
gaatcatatgacatagcaa

SEQ ID NO: 51596 - DNA, 19 bp, Homo sapiens
  siRNA target sequence for FLJ10379 (NM_018079.3,2546-2564).
gacatagcaatgaggtttt

SEQ ID NO: 51597 - DNA, 19 bp, Homo sapiens
  siRNA target sequence for FLJ10379 (NM_018079.3,2557-2575).
gaggtttttgtcatccatt

SEQ ID NO: 51598 - DNA, 19 bp, Homo sapiens
  siRNA target sequence for FLJ10379 (NM_018079.3,2717-2735).
cagcctgaaagctttgact

SEQ ID NO: 51599 - DNA, 19 bp, Homo sapiens
  siRNA target sequence for FLJ10379 (NM_018079.3,2728-2746).
ctttgactttcgaacagat

SEQ ID NO: 51600 - DNA, 19 bp, Homo sapiens
  siRNA target sequence for FLJ10379 (NM_018079.3,2797-2815).
gattgggacagttcttaca

SEQ ID NO: 51601 - DNA, 19 bp, Homo sapiens
  siRNA target sequence for FLJ10379 (NM_018079.3,2876-2894).
gggctgattcccatacgaa

SEQ ID NO: 51602 - DNA, 19 bp, Homo sapiens
  siRNA target sequence for FLJ10379 (NM_018079.3,2877-2895).
ggctgattcccatacgaaa

SEQ ID NO: 51603 - DNA, 19 bp, Homo sapiens
  siRNA target sequence for FLJ10379 (NM_018079.3,2878-2896).
gctgattcccatacgaaat

SEQ ID NO: 51604 - DNA, 19 bp, Homo sapiens
  siRNA target sequence for FLJ10379 (NM_018079.3,2881-2899).
gattcccatacgaaatgta

SEQ ID NO: 51605 - DNA, 19 bp, Homo sapiens
  siRNA target sequence for FLJ10379 (NM_018079.3,2886-2904).
ccatacgaaatgtaacaga

SEQ ID NO: 51606 - DNA, 19 bp, Homo sapiens
  siRNA target sequence for FLJ10379 (NM_018079.3,2887-2905).
catacgaaatgtaacagaa

SEQ ID NO: 51607 - DNA, 19 bp, Homo sapiens
  siRNA target sequence for FLJ10379 (NM_018079.3,2961-2979).
gagtggaagtccaagtact

SEQ ID NO: 51608 - DNA, 19 bp, Homo sapiens
  siRNA target sequence for FLJ10379 (NM_018079.3,2972-2990).
caagtactcaacattgaca

SEQ ID NO: 51609 - DNA, 19 bp, Homo sapiens
  siRNA target sequence for FLJ10379 (NM_018079.3,2989-3007).
catcccccgatctaggatt

SEQ ID NO: 51610 - DNA, 19 bp, Homo sapiens
  siRNA target sequence for FLJ10379 (NM_018079.3,2992-3010).
cccccgatctaggattact

SEQ ID NO: 51611 - DNA, 19 bp, Homo sapiens
  siRNA target sequence for FLJ10379 (NM_018079.3,2994-3012).
cccgatctaggattactct

SEQ ID NO: 51612 - DNA, 19 bp, Homo sapiens
  siRNA target sequence for FLJ10379 (NM_018079.3,3014-3032).
gacctcattcgggtgttat

SEQ ID NO: 51613 - DNA, 19 bp, Homo sapiens
  siRNA target sequence for FLJ10581 (NM_018146.2,375-393).
ctgggcttcgctacgataa

SEQ ID NO: 51614 - DNA, 19 bp, Homo sapiens
  siRNA target sequence for FLJ10581 (NM_018146.2,379-397).
gcttcgctacgataaagct

SEQ ID NO: 51615 - DNA, 19 bp, Homo sapiens
  siRNA target sequence for FLJ10581 (NM_018146.2,380-398).
cttcgctacgataaagctt

SEQ ID NO: 51616 - DNA, 19 bp, Homo sapiens
  siRNA target sequence for FLJ10581 (NM_018146.2,447-465).
ggccatttcgggaaaaaca

SEQ ID NO: 51617 - DNA, 19 bp, Homo sapiens
  siRNA target sequence for FLJ10581 (NM_018146.2,486-504).
gtcgcaggctcatttcaga

SEQ ID NO: 51618 - DNA, 19 bp, Homo sapiens
  siRNA target sequence for FLJ10581 (NM_018146.2,515-533).
gctggagctgtgccaaaaa

SEQ ID NO: 51619 - DNA, 19 bp, Homo sapiens
  siRNA target sequence for FLJ10581 (NM_018146.2,516-534).
ctggagctgtgccaaaaat

SEQ ID NO: 51620 - DNA, 19 bp, Homo sapiens
  siRNA target sequence for FLJ10581 (NM_018146.2,518-536).
ggagctgtgccaaaaatgt

SEQ ID NO: 51621 - DNA, 19 bp, Homo sapiens
  siRNA target sequence for FLJ10581 (NM_018146.2,519-537).
gagctgtgccaaaaatgtt

SEQ ID NO: 51622 - DNA, 19 bp, Homo sapiens
  siRNA target sequence for FLJ10581 (NM_018146.2,538-556).
cttctttagccgtctagaa

SEQ ID NO: 51623 - DNA, 19 bp, Homo sapiens
  siRNA target sequence for FLJ10581 (NM_018146.2,546-564).
gccgtctagaatacctaaa

SEQ ID NO: 51624 - DNA, 19 bp, Homo sapiens
  siRNA target sequence for FLJ10581 (NM_018146.2,549-567).
gtctagaatacctaaagga

SEQ ID NO: 51625 - DNA, 19 bp, Homo sapiens
  siRNA target sequence for FLJ10581 (NM_018146.2,591-609).
gtgtcagcctcattaaggt

SEQ ID NO: 51626 - DNA, 19 bp, Homo sapiens
  siRNA target sequence for FLJ10581 (NM_018146.2,597-615).
gcctcattaaggtgaaatt

SEQ ID NO: 51627 - DNA, 19 bp, Homo sapiens
  siRNA target sequence for FLJ10581 (NM_018146.2,598-616).
cctcattaaggtgaaattt

SEQ ID NO: 51628 - DNA, 19 bp, Homo sapiens
  siRNA target sequence for FLJ10581 (NM_018146.2,643-661).
cgtaacgccacaaggaata

SEQ ID NO: 51629 - DNA, 19 bp, Homo sapiens
  siRNA target sequence for FLJ10581 (NM_018146.2,644-662).
gtaacgccacaaggaataa

SEQ ID NO: 51630 - DNA, 19 bp, Homo sapiens
  siRNA target sequence for FLJ10581 (NM_018146.2,675-693).
ccaagcctgaccatgttaa

SEQ ID NO: 51631 - DNA, 19 bp, Homo sapiens
  siRNA target sequence for FLJ10581 (NM_018146.2,870-888).
cgggtatgggcgcacattt

SEQ ID NO: 51632 - DNA, 19 bp, Homo sapiens
  siRNA target sequence for FLJ10581 (NM_018146.2,889-907).
ccggatgcccattatcaat

SEQ ID NO: 51633 - DNA, 19 bp, Homo sapiens
  siRNA target sequence for FLJ10581 (NM_018146.2,890-908).
cggatgcccattatcaata

SEQ ID NO: 51634 - DNA, 19 bp, Homo sapiens
  siRNA target sequence for FLJ10581 (NM_018146.2,891-909).
ggatgcccattatcaataa

SEQ ID NO: 51635 - DNA, 19 bp, Homo sapiens
  siRNA target sequence for FLJ10581 (NM_018146.2,892-910).
gatgcccattatcaataat

SEQ ID NO: 51636 - DNA, 19 bp, Homo sapiens
  siRNA target sequence for FLJ10581 (NM_018146.2,945-963).
ctgacactcgggtctatgt

SEQ ID NO: 51637 - DNA, 19 bp, Homo sapiens
  siRNA target sequence for FLJ10581 (NM_018146.2,1032-1050).
gtgatcaacgagtgatgaa

SEQ ID NO: 51638 - DNA, 19 bp, Homo sapiens
  siRNA target sequence for FLJ10581 (NM_018146.2,1034-1052).
gatcaacgagtgatgaagt

SEQ ID NO: 51639 - DNA, 19 bp, Homo sapiens
  siRNA target sequence for FLJ10581 (NM_018146.2,1040-1058).
cgagtgatgaagtttcaca

SEQ ID NO: 51640 - DNA, 19 bp, Homo sapiens
  siRNA target sequence for FLJ10581 (NM_018146.2,1290-1308).
caagcatcctgcttttcga

SEQ ID NO: 51641 - DNA, 19 bp, Homo sapiens
  siRNA target sequence for FLJ11196 (NM_018357.2,333-351).
ccggatgaggagttgatca

SEQ ID NO: 51642 - DNA, 19 bp, Homo sapiens
  siRNA target sequence for FLJ11196 (NM_018357.2,334-352).
cggatgaggagttgatcaa

SEQ ID NO: 51643 - DNA, 19 bp, Homo sapiens
  siRNA target sequence for FLJ11196 (NM_018357.2,357-375).
ctggtggatcagatcgaat

SEQ ID NO: 51644 - DNA, 19 bp, Homo sapiens
  siRNA target sequence for FLJ11196 (NM_018357.2,363-381).
gatcagatcgaattctact

SEQ ID NO: 51645 - DNA, 19 bp, Homo sapiens
  siRNA target sequence for FLJ11196 (NM_018357.2,366-384).
cagatcgaattctactttt

SEQ ID NO: 51646 - DNA, 19 bp, Homo sapiens
  siRNA target sequence for FLJ11196 (NM_018357.2,368-386).
gatcgaattctacttttct

SEQ ID NO: 51647 - DNA, 19 bp, Homo sapiens
  siRNA target sequence for FLJ11196 (NM_018357.2,371-389).
cgaattctacttttctgat

SEQ ID NO: 51648 - DNA, 19 bp, Homo sapiens
  siRNA target sequence for FLJ11196 (NM_018357.2,404-422).
ggacgcctttttgctaaaa

SEQ ID NO: 51649 - DNA, 19 bp, Homo sapiens
  siRNA target sequence for FLJ11196 (NM_018357.2,433-451).
ggaacaagctgggatatgt

SEQ ID NO: 51650 - DNA, 19 bp, Homo sapiens
  siRNA target sequence for FLJ11196 (NM_018357.2,445-463).
gatatgtgagcgttaagct

SEQ ID NO: 51651 - DNA, 19 bp, Homo sapiens
  siRNA target sequence for FLJ11196 (NM_018357.2,508-526).
gaaccacagcacatgcttt

SEQ ID NO: 51652 - DNA, 19 bp, Homo sapiens
  siRNA target sequence for FLJ11196 (NM_018357.2,511-529).
ccacagcacatgctttgaa

SEQ ID NO: 51653 - DNA, 19 bp, Homo sapiens
  siRNA target sequence for FLJ11196 (NM_018357.2,535-553).
cagtggtccttgagttgaa

SEQ ID NO: 51654 - DNA, 19 bp, Homo sapiens
  siRNA target sequence for FLJ11196 (NM_018357.2,623-641).
gatgctcctggtctatgat

SEQ ID NO: 51655 - DNA, 19 bp, Homo sapiens
  siRNA target sequence for FLJ11196 (NM_018357.2,714-732).
gaacacctgctcaagcttt

SEQ ID NO: 51656 - DNA, 19 bp, Homo sapiens
  siRNA target sequence for FLJ11196 (NM_018357.2,970-988).
ctgccaaagacaaaaatca

SEQ ID NO: 51657 - DNA, 19 bp, Homo sapiens
  siRNA target sequence for FLJ11196 (NM_018357.2,1006-1024).
cgagcatccacctgaacaa

SEQ ID NO: 51658 - DNA, 19 bp, Homo sapiens
  siRNA target sequence for FLJ11196 (NM_018357.2,1039-1057).
gagtcgaggagcttcagta

SEQ ID NO: 51659 - DNA, 19 bp, Homo sapiens
  siRNA target sequence for FLJ11196 (NM_018357.2,1159-1177).
cgtctggccaccagaatct

SEQ ID NO: 51660 - DNA, 19 bp, Homo sapiens
  siRNA target sequence for FLJ11196 (NM_018357.2,1162-1180).
ctggccaccagaatctctt

SEQ ID NO: 51661 - DNA, 19 bp, Homo sapiens
  siRNA target sequence for FLJ11196 (NM_018357.2,1165-1183).
gccaccagaatctctttct

SEQ ID NO: 51662 - DNA, 19 bp, Homo sapiens
  siRNA target sequence for FLJ11196 (NM_018357.2,1302-1320).
gagatcttccgcaagtgta

SEQ ID NO: 51663 - DNA, 19 bp, Homo sapiens
  siRNA target sequence for FLJ11196 (NM_018357.2,1307-1325).
cttccgcaagtgtatggat

SEQ ID NO: 51664 - DNA, 19 bp, Homo sapiens
  siRNA target sequence for FLJ11196 (NM_018357.2,1310-1328).
ccgcaagtgtatggattat

SEQ ID NO: 51665 - DNA, 19 bp, Homo sapiens
  siRNA target sequence for FLJ11196 (NM_018357.2,1311-1329).
cgcaagtgtatggattatt

SEQ ID NO: 51666 - DNA, 19 bp, Homo sapiens
  siRNA target sequence for FLJ11196 (NM_197958.1,299-317).
catgcttgcttcgttcatt

SEQ ID NO: 51667 - DNA, 19 bp, Homo sapiens
  siRNA target sequence for FLJ13842 (NM_024645.1,157-175).
ccgatattgatcaggattt

SEQ ID NO: 51668 - DNA, 19 bp, Homo sapiens
  siRNA target sequence for FLJ13842 (NM_024645.1,239-257).
ccactacgagagtcgaaaa

SEQ ID NO: 51669 - DNA, 19 bp, Homo sapiens
  siRNA target sequence for FLJ13842 (NM_024645.1,242-260).
ctacgagagtcgaaaacat

SEQ ID NO: 51670 - DNA, 19 bp, Homo sapiens
  siRNA target sequence for FLJ13842 (NM_024645.1,265-283).
gcaaagtccgactgtatta

SEQ ID NO: 51671 - DNA, 19 bp, Homo sapiens
  siRNA target sequence for FLJ13842 (NM_024645.1,320-338).
gaggctccggtcagaaaat

SEQ ID NO: 51672 - DNA, 19 bp, Homo sapiens
  siRNA target sequence for FLJ13842 (NM_024645.1,323-341).
gctccggtcagaaaatgga

SEQ ID NO: 51673 - DNA, 19 bp, Homo sapiens
  siRNA target sequence for FLJ13842 (NM_024645.1,324-342).
ctccggtcagaaaatggaa

SEQ ID NO: 51674 - DNA, 19 bp, Homo sapiens
  siRNA target sequence for FLJ13842 (NM_024645.1,410-428).
ggtggccgattcccattat

SEQ ID NO: 51675 - DNA, 19 bp, Homo sapiens
  siRNA target sequence for FLJ13842 (NM_024645.1,440-458).
ccacgccaagaggttaaaa

SEQ ID NO: 51676 - DNA, 19 bp, Homo sapiens
  siRNA target sequence for FLJ13842 (NM_024645.1,445-463).
ccaagaggttaaaactctt

SEQ ID NO: 51677 - DNA, 19 bp, Homo sapiens
  siRNA target sequence for FLJ13842 (NM_024645.1,471-489).
gagaagaccccattaaaga

SEQ ID NO: 51678 - DNA, 19 bp, Homo sapiens
  siRNA target sequence for FLJ13842 (NM_024645.1,545-563).
ggtcgcatctccctatcaa

SEQ ID NO: 51679 - DNA, 19 bp, Homo sapiens
  siRNA target sequence for FLJ13842 (NM_024645.1,546-564).
gtcgcatctccctatcaaa

SEQ ID NO: 51680 - DNA, 19 bp, Homo sapiens
  siRNA target sequence for FLJ13842 (NM_024645.1,548-566).
cgcatctccctatcaaaga

SEQ ID NO: 51681 - DNA, 19 bp, Homo sapiens
  siRNA target sequence for FLJ13842 (NM_024645.1,549-567).
gcatctccctatcaaagaa

SEQ ID NO: 51682 - DNA, 19 bp, Homo sapiens
  siRNA target sequence for FLJ13842 (NM_024645.1,620-638).
gatggcccagcaacattat

SEQ ID NO: 51683 - DNA, 19 bp, Homo sapiens
  siRNA target sequence for FLJ13842 (NM_024645.1,664-682).
cggcaagagttgctttgtt

SEQ ID NO: 51684 - DNA, 19 bp, Homo sapiens
  siRNA target sequence for FLJ13842 (NM_024645.1,721-739).
gaggtctgaggcgcaatta

SEQ ID NO: 51685 - DNA, 19 bp, Homo sapiens
  siRNA target sequence for FLJ13842 (NM_024645.1,723-741).
ggtctgaggcgcaattaca

SEQ ID NO: 51686 - DNA, 19 bp, Homo sapiens
  siRNA target sequence for FLJ13842 (NM_024645.1,726-744).
ctgaggcgcaattacagat

SEQ ID NO: 51687 - DNA, 19 bp, Homo sapiens
  siRNA target sequence for FLJ13842 (NM_024645.1,757-775).
gtgtctccctaaactcaat

SEQ ID NO: 51688 - DNA, 19 bp, Homo sapiens
  siRNA target sequence for FLJ13842 (NM_024645.1,761-779).
ctccctaaactcaatagaa

SEQ ID NO: 51689 - DNA, 19 bp, Homo sapiens
  siRNA target sequence for FLJ13842 (NM_024645.1,763-781).
ccctaaactcaatagaaca

SEQ ID NO: 51690 - DNA, 19 bp, Homo sapiens
  siRNA target sequence for FLJ13842 (NM_024645.1,770-788).
ctcaatagaacagtatcat

SEQ ID NO: 51691 - DNA, 19 bp, Homo sapiens
  siRNA target sequence for FLJ13842 (NM_024645.1,782-800).
gtatcatgcccatctgaaa

SEQ ID NO: 51692 - DNA, 19 bp, Homo sapiens
  siRNA target sequence for FLJ20244 (NM_017722.2,175-193).
ctagagcccggtttttcga

SEQ ID NO: 51693 - DNA, 19 bp, Homo sapiens
  siRNA target sequence for FLJ20244 (NM_017722.2,292-310).
ccgagggggctgccaaaat

SEQ ID NO: 51694 - DNA, 19 bp, Homo sapiens
  siRNA target sequence for FLJ20244 (NM_017722.2,322-340).
gtgccaacgaggtctttta

SEQ ID NO: 51695 - DNA, 19 bp, Homo sapiens
  siRNA target sequence for FLJ20244 (NM_017722.2,324-342).
gccaacgaggtcttttata

SEQ ID NO: 51696 - DNA, 19 bp, Homo sapiens
  siRNA target sequence for FLJ20244 (NM_017722.2,325-343).
ccaacgaggtcttttataa

SEQ ID NO: 51697 - DNA, 19 bp, Homo sapiens
  siRNA target sequence for FLJ20244 (NM_017722.2,609-627).
ggcctacgttccattcgat

SEQ ID NO: 51698 - DNA, 19 bp, Homo sapiens
  siRNA target sequence for FLJ20244 (NM_017722.2,610-628).
gcctacgttccattcgatt

SEQ ID NO: 51699 - DNA, 19 bp, Homo sapiens
  siRNA target sequence for FLJ20244 (NM_017722.2,611-629).
cctacgttccattcgattt

SEQ ID NO: 51700 - DNA, 19 bp, Homo sapiens
  siRNA target sequence for FLJ20244 (NM_017722.2,1076-1094).
cttctacgtgcgtgttttt

SEQ ID NO: 51701 - DNA, 19 bp, Homo sapiens
  siRNA target sequence for FLJ20244 (NM_017722.2,1438-1456).
cggacgtgcctctgtacta

SEQ ID NO: 51702 - DNA, 19 bp, Homo sapiens
  siRNA target sequence for FLJ20244 (NM_017722.2,1440-1458).
gacgtgcctctgtactaca

SEQ ID NO: 51703 - DNA, 19 bp, Homo sapiens
  siRNA target sequence for FLJ20244 (NM_017722.2,1551-1569).
ctctcccacgcctgtaaga

SEQ ID NO: 51704 - DNA, 19 bp, Homo sapiens
  siRNA target sequence for FLJ20244 (NM_017722.2,1597-1615).
ctgccctctgggacatcat

SEQ ID NO: 51705 - DNA, 19 bp, Homo sapiens
  siRNA target sequence for FLJ20244 (NM_017722.2,1643-1661).
gaaacgggagcgactatca

SEQ ID NO: 51706 - DNA, 19 bp, Homo sapiens
  siRNA target sequence for FLJ20244 (NM_017722.2,1855-1873).
gacgcaggctgcttcagaa

SEQ ID NO: 51707 - DNA, 19 bp, Homo sapiens
  siRNA target sequence for FLJ20244 (NM_017722.2,1858-1876).
gcaggctgcttcagaacaa

SEQ ID NO: 51708 - DNA, 19 bp, Homo sapiens
  siRNA target sequence for FLJ20244 (NM_017722.2,1917-1935).
cggctcaagacatttcctt

SEQ ID NO: 51709 - DNA, 19 bp, Homo sapiens
  siRNA target sequence for FLJ20244 (NM_017722.2,1933-1951).
cttgcaagaggtttaagga

SEQ ID NO: 51710 - DNA, 19 bp, Homo sapiens
  siRNA target sequence for FLJ22419 (NM_024697.1,825-843).
caataccagctctgacaaa

SEQ ID NO: 51711 - DNA, 19 bp, Homo sapiens
  siRNA target sequence for FLJ22419 (NM_024697.1,878-896).
cgacgacaactgtggaaat

SEQ ID NO: 51712 - DNA, 19 bp, Homo sapiens
  siRNA target sequence for FLJ22419 (NM_024697.1,898-916).
cgcaaaagcagtgttatga

SEQ ID NO: 51713 - DNA, 19 bp, Homo sapiens
  siRNA target sequence for FLJ22419 (NM_024697.1,1070-1088).
cgcacaacagtggtactaa

SEQ ID NO: 51714 - DNA, 19 bp, Homo sapiens
  siRNA target sequence for FLJ22419 (NM_024697.1,1089-1107).
gcacaaaaccatgttagaa

SEQ ID NO: 51715 - DNA, 19 bp, Homo sapiens
  siRNA target sequence for FLJ22419 (NM_024697.1,1159-1177).
ggcaaaggacctgttaata

SEQ ID NO: 51716 - DNA, 19 bp, Homo sapiens
  siRNA target sequence for FLJ22419 (NM_024697.1,1161-1179).
caaaggacctgttaataaa

SEQ ID NO: 51717 - DNA, 19 bp, Homo sapiens
  siRNA target sequence for FLJ22419 (NM_024697.1,1241-1259).
cggaaacgcaacttaaaca

SEQ ID NO: 51718 - DNA, 19 bp, Homo sapiens
  siRNA target sequence for FLJ22419 (NM_024697.1,1252-1270).
cttaaacagcacattagca

SEQ ID NO: 51719 - DNA, 19 bp, Homo sapiens
  siRNA target sequence for FLJ22419 (NM_024697.1,1325-1343).
cttacaacaaactacagaa

SEQ ID NO: 51720 - DNA, 19 bp, Homo sapiens
  siRNA target sequence for FLJ22419 (NM_024697.1,1351-1369).
catccactgggggtaaaat

SEQ ID NO: 51721 - DNA, 19 bp, Homo sapiens
  siRNA target sequence for FLJ22419 (NM_024697.1,1359-1377).
gggggtaaaattagtattt

SEQ ID NO: 51722 - DNA, 19 bp, Homo sapiens
  siRNA target sequence for FLJ22419 (NM_024697.1,1397-1415).
cattggctccacgaattct

SEQ ID NO: 51723 - DNA, 19 bp, Homo sapiens
  siRNA target sequence for FLJ22419 (NM_024697.1,1403-1421).
ctccacgaattctaccaaa

SEQ ID NO: 51724 - DNA, 19 bp, Homo sapiens
  siRNA target sequence for FLJ25270 (NM_152520.2,492-510).
gcggttattaaccatacat

SEQ ID NO: 51725 - DNA, 19 bp, Homo sapiens
  siRNA target sequence for FLJ25270 (NM_152520.2,567-585).
cttcgctttaactcagata

SEQ ID NO: 51726 - DNA, 19 bp, Homo sapiens
  siRNA target sequence for FLJ25270 (NM_152520.2,636-654).
gcactagacgcaacgaaaa

SEQ ID NO: 51727 - DNA, 19 bp, Homo sapiens
  siRNA target sequence for FLJ25270 (NM_152520.2,637-655).
cactagacgcaacgaaaaa

SEQ ID NO: 51728 - DNA, 19 bp, Homo sapiens
  siRNA target sequence for FLJ25270 (NM_152520.2,639-657).
ctagacgcaacgaaaaata

SEQ ID NO: 51729 - DNA, 19 bp, Homo sapiens
  siRNA target sequence for FLJ25270 (NM_152520.2,726-744).
ggcaacaactctgacaaat

SEQ ID NO: 51730 - DNA, 19 bp, Homo sapiens
  siRNA target sequence for FLJ25270 (NM_152520.2,783-801).
cagccatcaagctctgaaa

SEQ ID NO: 51731 - DNA, 19 bp, Homo sapiens
  siRNA target sequence for FLJ25270 (NM_152520.2,785-803).
gccatcaagctctgaaagt

SEQ ID NO: 51732 - DNA, 19 bp, Homo sapiens
  siRNA target sequence for FLJ25270 (NM_152520.2,883-901).
ctcccggtactgttgttga

SEQ ID NO: 51733 - DNA, 19 bp, Homo sapiens
  siRNA target sequence for FLJ25270 (NM_152520.2,887-905).
cggtactgttgttgaatca

SEQ ID NO: 51734 - DNA, 19 bp, Homo sapiens
  siRNA target sequence for FLJ25270 (NM_152520.2,889-907).
gtactgttgttgaatcaga

SEQ ID NO: 51735 - DNA, 19 bp, Homo sapiens
  siRNA target sequence for FLJ25270 (NM_152520.2,1010-1028).
catggttgaagctcgtaat

SEQ ID NO: 51736 - DNA, 19 bp, Homo sapiens
  siRNA target sequence for FLJ25270 (NM_152520.2,1029-1047).
ggggctggtccaattaaat

SEQ ID NO: 51737 - DNA, 19 bp, Homo sapiens
  siRNA target sequence for FLJ25270 (NM_152520.2,1032-1050).
gctggtccaattaaatcct

SEQ ID NO: 51738 - DNA, 19 bp, Homo sapiens
  siRNA target sequence for FLJ25270 (NM_152520.2,1033-1051).
ctggtccaattaaatccta

SEQ ID NO: 51739 - DNA, 19 bp, Homo sapiens
  siRNA target sequence for FLJ25270 (NM_152520.2,1153-1171).
cagaaattcaactcaaaca

SEQ ID NO: 51740 - DNA, 19 bp, Homo sapiens
  siRNA target sequence for FLJ25270 (NM_152520.2,1253-1271).
gcggagcccgagtattcta

SEQ ID NO: 51741 - DNA, 19 bp, Homo sapiens
  siRNA target sequence for FLJ25270 (NM_152520.2,1285-1303).
cattccagaaagatatgat

SEQ ID NO: 51742 - DNA, 19 bp, Homo sapiens
  siRNA target sequence for FLJ31121 (NM_144723.1,22-40).
cgggcagcgggacaaaaaa

SEQ ID NO: 51743 - DNA, 19 bp, Homo sapiens
  siRNA target sequence for FLJ31121 (NM_144723.1,24-42).
ggcagcgggacaaaaaact

SEQ ID NO: 51744 - DNA, 19 bp, Homo sapiens
  siRNA target sequence for FLJ31121 (NM_144723.1,25-43).
gcagcgggacaaaaaactt

SEQ ID NO: 51745 - DNA, 19 bp, Homo sapiens
  siRNA target sequence for FLJ31121 (NM_144723.1,52-70).
gccgaaagtgggacaaaga

SEQ ID NO: 51746 - DNA, 19 bp, Homo sapiens
  siRNA target sequence for FLJ31121 (NM_144723.1,53-71).
ccgaaagtgggacaaagat

SEQ ID NO: 51747 - DNA, 19 bp, Homo sapiens
  siRNA target sequence for FLJ31121 (NM_144723.1,142-160).
ctgtcaagcgagagctttt

SEQ ID NO: 51748 - DNA, 19 bp, Homo sapiens
  siRNA target sequence for FLJ31121 (NM_144723.1,193-211).
ccaagcttgggaagacaat

SEQ ID NO: 51749 - DNA, 19 bp, Homo sapiens
  siRNA target sequence for FLJ31121 (NM_144723.1,194-212).
caagcttgggaagacaatt

SEQ ID NO: 51750 - DNA, 19 bp, Homo sapiens
  siRNA target sequence for FLJ31121 (NM_144723.1,221-239).
caagacaacccctcaatct

SEQ ID NO: 51751 - DNA, 19 bp, Homo sapiens
  siRNA target sequence for FLJ31121 (NM_144723.1,249-267).
ggatattactgcaatgtct

SEQ ID NO: 51752 - DNA, 19 bp, Homo sapiens
  siRNA target sequence for FLJ31121 (NM_144723.1,296-314).
ctttctggatcacattaat

SEQ ID NO: 51753 - DNA, 19 bp, Homo sapiens
  siRNA target sequence for FLJ31121 (NM_144723.1,372-390).
gatcaggtgaagaaacgtt

SEQ ID NO: 51754 - DNA, 19 bp, Homo sapiens
  siRNA target sequence for FLJ31121 (NM_144723.1,487-505).
cgtacaagaaagagaaaca

SEQ ID NO: 51755 - DNA, 19 bp, Homo sapiens
  siRNA target sequence for FLJ31121 (NM_144723.1,525-543).
gctgaggaggacttgacat

SEQ ID NO: 51756 - DNA, 19 bp, Homo sapiens
  siRNA target sequence for FLJ31121 (NM_144723.1,526-544).
ctgaggaggacttgacatt

SEQ ID NO: 51757 - DNA, 19 bp, Homo sapiens
  siRNA target sequence for FLJ31121 (NM_144723.1,592-610).
gttccaccaagaagagtta

SEQ ID NO: 51758 - DNA, 19 bp, Homo sapiens
  siRNA target sequence for FXR1 (NM_005087.1,57-75).
ctacaagggatttatcaaa

SEQ ID NO: 51759 - DNA, 19 bp, Homo sapiens
  siRNA target sequence for FXR1 (NM_005087.1,65-83).
gatttatcaaagatgttca

SEQ ID NO: 51760 - DNA, 19 bp, Homo sapiens
  siRNA target sequence for FXR1 (NM_005087.1,88-106).
gactcccttacagttgttt

SEQ ID NO: 51761 - DNA, 19 bp, Homo sapiens
  siRNA target sequence for FXR1 (NM_005087.1,125-143).
cagaacgccaggttccatt

SEQ ID NO: 51762 - DNA, 19 bp, Homo sapiens
  siRNA target sequence for FXR1 (NM_005087.1,127-145).
gaacgccaggttccattta

SEQ ID NO: 51763 - DNA, 19 bp, Homo sapiens
  siRNA target sequence for FXR1 (NM_005087.1,131-149).
gccaggttccatttaatga

SEQ ID NO: 51764 - DNA, 19 bp, Homo sapiens
  siRNA target sequence for FXR1 (NM_005087.1,136-154).
gttccatttaatgaagtta

SEQ ID NO: 51765 - DNA, 19 bp, Homo sapiens
  siRNA target sequence for FXR1 (NM_005087.1,140-158).
catttaatgaagttagatt

SEQ ID NO: 51766 - DNA, 19 bp, Homo sapiens
  siRNA target sequence for FXR1 (NM_005087.1,161-179).
caccaccacctgatataaa

SEQ ID NO: 51767 - DNA, 19 bp, Homo sapiens
  siRNA target sequence for FXR1 (NM_005087.1,163-181).
ccaccacctgatataaaaa

SEQ ID NO: 51768 - DNA, 19 bp, Homo sapiens
  siRNA target sequence for FXR1 (NM_005087.1,164-182).
caccacctgatataaaaaa

SEQ ID NO: 51769 - DNA, 19 bp, Homo sapiens
  siRNA target sequence for FXR1 (NM_005087.1,246-264).
gtggtggttggctaaagtt

SEQ ID NO: 51770 - DNA, 19 bp, Homo sapiens
  siRNA target sequence for FXR1 (NM_005087.1,256-274).
gctaaagttcggatgatga

SEQ ID NO: 51771 - DNA, 19 bp, Homo sapiens
  siRNA target sequence for FXR1 (NM_005087.1,305-323).
cttgtgacgctacttacaa

SEQ ID NO: 51772 - DNA, 19 bp, Homo sapiens
  siRNA target sequence for FXR1 (NM_005087.1,312-330).
cgctacttacaatgaaata

SEQ ID NO: 51773 - DNA, 19 bp, Homo sapiens
  siRNA target sequence for FXR1 (NM_005087.1,349-367).
cggcctgtcaatcaaaata

SEQ ID NO: 51774 - DNA, 19 bp, Homo sapiens
  siRNA target sequence for FXR1 (NM_005087.1,350-368).
ggcctgtcaatcaaaataa

SEQ ID NO: 51775 - DNA, 19 bp, Homo sapiens
  siRNA target sequence for FXR1 (NM_005087.1,351-369).
gcctgtcaatcaaaataaa

SEQ ID NO: 51776 - DNA, 19 bp, Homo sapiens
  siRNA target sequence for FXR1 (NM_005087.1,423-441).
gagagaggcgtgtgctaat

SEQ ID NO: 51777 - DNA, 19 bp, Homo sapiens
  siRNA target sequence for FXR1 (NM_005087.1,425-443).
gagaggcgtgtgctaatga

SEQ ID NO: 51778 - DNA, 19 bp, Homo sapiens
  siRNA target sequence for FXR1 (NM_005087.1,427-445).
gaggcgtgtgctaatgaaa

SEQ ID NO: 51779 - DNA, 19 bp, Homo sapiens
  siRNA target sequence for FXR1 (NM_005087.1,429-447).
ggcgtgtgctaatgaaaat

SEQ ID NO: 51780 - DNA, 19 bp, Homo sapiens
  siRNA target sequence for FXR1 (NM_005087.1,549-567).
gagagtaaacatcttaagt

SEQ ID NO: 51781 - DNA, 19 bp, Homo sapiens
  siRNA target sequence for FXR1 (NM_005087.1,573-591).
gcatttgcgaagtattcgt

SEQ ID NO: 51782 - DNA, 19 bp, Homo sapiens
  siRNA target sequence for FXR1 (NM_005087.1,574-592).
catttgcgaagtattcgta

SEQ ID NO: 51783 - DNA, 19 bp, Homo sapiens
  siRNA target sequence for FXR1 (NM_005087.1,584-602).
gtattcgtacgaagttgat

SEQ ID NO: 51784 - DNA, 19 bp, Homo sapiens
  siRNA target sequence for FXR1 (NM_005087.1,589-607).
cgtacgaagttgatgctta

SEQ ID NO: 51785 - DNA, 19 bp, Homo sapiens
  siRNA target sequence for FXR1 (NM_005087.1,590-608).
gtacgaagttgatgcttat

SEQ ID NO: 51786 - DNA, 19 bp, Homo sapiens
  siRNA target sequence for FXR1 (NM_005087.1,624-642).
ggccactaagcatttagaa

SEQ ID NO: 51787 - DNA, 19 bp, Homo sapiens
  siRNA target sequence for FXR1 (NM_005087.1,625-643).
gccactaagcatttagaat

SEQ ID NO: 51788 - DNA, 19 bp, Homo sapiens
  siRNA target sequence for FXR1 (NM_005087.1,705-723).
cctggcaataggaacacat

SEQ ID NO: 51789 - DNA, 19 bp, Homo sapiens
  siRNA target sequence for FXR1 (NM_005087.1,715-733).
ggaacacatggtagtaaca

SEQ ID NO: 51790 - DNA, 19 bp, Homo sapiens
  siRNA target sequence for FXR1 (NM_005087.1,716-734).
gaacacatggtagtaacat

SEQ ID NO: 51791 - DNA, 19 bp, Homo sapiens
  siRNA target sequence for FXR1 (NM_005087.1,764-782).
ccgccattgagctagatga

SEQ ID NO: 51792 - DNA, 19 bp, Homo sapiens
  siRNA target sequence for FXR1 (NM_005087.1,765-783).
cgccattgagctagatgaa

SEQ ID NO: 51793 - DNA, 19 bp, Homo sapiens
  siRNA target sequence for FXR1 (NM_005087.1,835-853).
gctagaggtttcttggaat

SEQ ID NO: 51794 - DNA, 19 bp, Homo sapiens
  siRNA target sequence for FXR1 (NM_005087.1,836-854).
ctagaggtttcttggaatt

SEQ ID NO: 51795 - DNA, 19 bp, Homo sapiens
  siRNA target sequence for FXR1 (NM_005087.1,839-857).
gaggtttcttggaatttgt

SEQ ID NO: 51796 - DNA, 19 bp, Homo sapiens
  siRNA target sequence for FXR1 (NM_005087.1,882-900).
gaatctcgttggaaaagta

SEQ ID NO: 51797 - DNA, 19 bp, Homo sapiens
  siRNA target sequence for FXR1 (NM_005087.1,947-965).
gtgtggttcgagtgagaat

SEQ ID NO: 51798 - DNA, 19 bp, Homo sapiens
  siRNA target sequence for FXR1 (NM_005087.1,962-980).
gaattgaaggggacaatga

SEQ ID NO: 51799 - DNA, 19 bp, Homo sapiens
  siRNA target sequence for FXR1 (NM_005087.1,993-1011).
cagagaagacggtatggtt

SEQ ID NO: 51800 - DNA, 19 bp, Homo sapiens
  siRNA target sequence for FXR1 (NM_005087.1,1002-1020).
cggtatggttccatttgta

SEQ ID NO: 51801 - DNA, 19 bp, Homo sapiens
  siRNA target sequence for FXR1 (NM_005087.1,1053-1071).
gcaggttcttctagagtat

SEQ ID NO: 51802 - DNA, 19 bp, Homo sapiens
  siRNA target sequence for FXR1 (NM_005087.1,1056-1074).
ggttcttctagagtatcat

SEQ ID NO: 51803 - DNA, 19 bp, Homo sapiens
  siRNA target sequence for FXR1 (NM_005087.1,1068-1086).
gtatcatattgcctatcta

SEQ ID NO: 51804 - DNA, 19 bp, Homo sapiens
  siRNA target sequence for FXR1 (NM_005087.1,1106-1124).
gaatggaacgcctacagat

SEQ ID NO: 51805 - DNA, 19 bp, Homo sapiens
  siRNA target sequence for FXR1 (NM_005087.1,1110-1128).
ggaacgcctacagattgat

SEQ ID NO: 51806 - DNA, 19 bp, Homo sapiens
  siRNA target sequence for FXR1 (NM_005087.1,1143-1161).
gattggttctaggtcttat

SEQ ID NO: 51807 - DNA, 19 bp, Homo sapiens
  siRNA target sequence for FXR1 (NM_005087.1,1177-1195).
ggtcgtcggggacctaatt

SEQ ID NO: 51808 - DNA, 19 bp, Homo sapiens
  siRNA target sequence for FXR1 (NM_005087.1,1178-1196).
gtcgtcggggacctaatta

SEQ ID NO: 51809 - DNA, 19 bp, Homo sapiens
  siRNA target sequence for FXR1 (NM_005087.1,1180-1198).
cgtcggggacctaattaca

SEQ ID NO: 51810 - DNA, 19 bp, Homo sapiens
  siRNA target sequence for FXR1 (NM_005087.1,1199-1217).
cctccggttatggtacaaa

SEQ ID NO: 51811 - DNA, 19 bp, Homo sapiens
  siRNA target sequence for FXR1 (NM_005087.1,1200-1218).
ctccggttatggtacaaat

SEQ ID NO: 51812 - DNA, 19 bp, Homo sapiens
  siRNA target sequence for FXR1 (NM_005087.1,1203-1221).
cggttatggtacaaattct

SEQ ID NO: 51813 - DNA, 19 bp, Homo sapiens
  siRNA target sequence for FXR1 (NM_005087.1,1205-1223).
gttatggtacaaattctga

SEQ ID NO: 51814 - DNA, 19 bp, Homo sapiens
  siRNA target sequence for FXR1 (NM_005087.1,1225-1243).
ctgtctaacccctctgaaa

SEQ ID NO: 51815 - DNA, 19 bp, Homo sapiens
  siRNA target sequence for FXR1 (NM_005087.1,1244-1262).
cggaatctgagcgtaaaga

SEQ ID NO: 51816 - DNA, 19 bp, Homo sapiens
  siRNA target sequence for FXR1 (NM_005087.1,1434-1452).
caatccatacagcttactt

SEQ ID NO: 51817 - DNA, 19 bp, Homo sapiens
  siRNA target sequence for FXR1 (NM_005087.1,1438-1456).
ccatacagcttacttgata

SEQ ID NO: 51818 - DNA, 19 bp, Homo sapiens
  siRNA target sequence for FXR1 (NM_005087.1,1439-1457).
catacagcttacttgataa

SEQ ID NO: 51819 - DNA, 19 bp, Homo sapiens
  siRNA target sequence for FXR1 (NM_005087.1,1443-1461).
cagcttacttgataataca

SEQ ID NO: 51820 - DNA, 19 bp, Homo sapiens
  siRNA target sequence for FXR1 (NM_005087.1,1445-1463).
gcttacttgataatacaga

SEQ ID NO: 51821 - DNA, 19 bp, Homo sapiens
  siRNA target sequence for FXR1 (NM_005087.1,1484-1502).
ctgatgccagcgaatctca

SEQ ID NO: 51822 - DNA, 19 bp, Homo sapiens
  siRNA target sequence for FXR1 (NM_005087.1,1495-1513).
gaatctcatcacagtacta

SEQ ID NO: 51823 - DNA, 19 bp, Homo sapiens
  siRNA target sequence for FXR1 (NM_005087.1,1570-1588).
ggaatgactgaatctgata

SEQ ID NO: 51824 - DNA, 19 bp, Homo sapiens
  siRNA target sequence for FXR1 (NM_005087.1,1726-1744).
gagcatggtccttcagaaa

SEQ ID NO: 51825 - DNA, 19 bp, Homo sapiens
  siRNA target sequence for FXR1 (NM_005087.1,1766-1784).
gtgcttctggcgatgacat

SEQ ID NO: 51826 - DNA, 19 bp, Homo sapiens
  siRNA target sequence for FXR1 (NM_005087.1,1772-1790).
ctggcgatgacatttctaa

SEQ ID NO: 51827 - DNA, 19 bp, Homo sapiens
  siRNA target sequence for FXR1 (NM_005087.1,1776-1794).
cgatgacatttctaagcta

SEQ ID NO: 51828 - DNA, 19 bp, Homo sapiens
  siRNA target sequence for FXR2 (NM_004860.2,368-386).
gagtgagagacaaattcct

SEQ ID NO: 51829 - DNA, 19 bp, Homo sapiens
  siRNA target sequence for FXR2 (NM_004860.2,405-423).
ccacctccagctgactata

SEQ ID NO: 51830 - DNA, 19 bp, Homo sapiens
  siRNA target sequence for FXR2 (NM_004860.2,406-424).
cacctccagctgactataa

SEQ ID NO: 51831 - DNA, 19 bp, Homo sapiens
  siRNA target sequence for FXR2 (NM_004860.2,409-427).
ctccagctgactataataa

SEQ ID NO: 51832 - DNA, 19 bp, Homo sapiens
  siRNA target sequence for FXR2 (NM_004860.2,551-569).
ctgtgatgccacctacaat

SEQ ID NO: 51833 - DNA, 19 bp, Homo sapiens
  siRNA target sequence for FXR2 (NM_004860.2,587-605).
gcgacttcggccagttaat

SEQ ID NO: 51834 - DNA, 19 bp, Homo sapiens
  siRNA target sequence for FXR2 (NM_004860.2,682-700).
ccaatgaaaacgtccataa

SEQ ID NO: 51835 - DNA, 19 bp, Homo sapiens
  siRNA target sequence for FXR2 (NM_004860.2,683-701).
caatgaaaacgtccataaa

SEQ ID NO: 51836 - DNA, 19 bp, Homo sapiens
  siRNA target sequence for FXR2 (NM_004860.2,687-705).
gaaaacgtccataaagagt

SEQ ID NO: 51837 - DNA, 19 bp, Homo sapiens
  siRNA target sequence for FXR2 (NM_004860.2,693-711).
gtccataaagagttcaaga

SEQ ID NO: 51838 - DNA, 19 bp, Homo sapiens
  siRNA target sequence for FXR2 (NM_004860.2,721-739).
gagccaactgcatctttct

SEQ ID NO: 51839 - DNA, 19 bp, Homo sapiens
  siRNA target sequence for FXR2 (NM_004860.2,1002-1020).
ggggtgaccgccattgagt

SEQ ID NO: 51840 - DNA, 19 bp, Homo sapiens
  siRNA target sequence for FXR2 (NM_004860.2,1003-1021).
gggtgaccgccattgagtt

SEQ ID NO: 51841 - DNA, 19 bp, Homo sapiens
  siRNA target sequence for FXR2 (NM_004860.2,1081-1099).
cccgaagctaccttgagtt

SEQ ID NO: 51842 - DNA, 19 bp, Homo sapiens
  siRNA target sequence for FXR2 (NM_004860.2,1082-1100).
ccgaagctaccttgagttt

SEQ ID NO: 51843 - DNA, 19 bp, Homo sapiens
  siRNA target sequence for FXR2 (NM_004860.2,1083-1101).
cgaagctaccttgagtttt

SEQ ID NO: 51844 - DNA, 19 bp, Homo sapiens
  siRNA target sequence for FXR2 (NM_004860.2,1087-1105).
gctaccttgagttttctga

SEQ ID NO: 51845 - DNA, 19 bp, Homo sapiens
  siRNA target sequence for FXR2 (NM_004860.2,1130-1148).
cctggttggcaaagtgatt

SEQ ID NO: 51846 - DNA, 19 bp, Homo sapiens
  siRNA target sequence for FXR2 (NM_004860.2,1172-1190).
ggagattgtggataaatct

SEQ ID NO: 51847 - DNA, 19 bp, Homo sapiens
  siRNA target sequence for FXR2 (NM_004860.2,1436-1454).
cagcgacaaggctggatat

SEQ ID NO: 51848 - DNA, 19 bp, Homo sapiens
  siRNA target sequence for FXR2 (NM_004860.2,1440-1458).
gacaaggctggatatagca

SEQ ID NO: 51849 - DNA, 19 bp, Homo sapiens
  siRNA target sequence for FXR2 (NM_004860.2,1484-1502).
ccatgcgactcgaacctat

SEQ ID NO: 51850 - DNA, 19 bp, Homo sapiens
  siRNA target sequence for FXR2 (NM_004860.2,1719-1737).
cccacttcgagatacaatt

SEQ ID NO: 51851 - DNA, 19 bp, Homo sapiens
  siRNA target sequence for FXR2 (NM_004860.2,1721-1739).
cacttcgagatacaattct

SEQ ID NO: 51852 - DNA, 19 bp, Homo sapiens
  siRNA target sequence for FXR2 (NM_004860.2,1729-1747).
gatacaattcttcatctat

SEQ ID NO: 51853 - DNA, 19 bp, Homo sapiens
  siRNA target sequence for FXR2 (NM_004860.2,2212-2230).
ccttggagttgggtagtat

SEQ ID NO: 51854 - DNA, 19 bp, Homo sapiens
  siRNA target sequence for G3BP (NM_005754.2,250-268).
ccagacatgctgcatagat

SEQ ID NO: 51855 - DNA, 19 bp, Homo sapiens
  siRNA target sequence for G3BP (NM_005754.2,255-273).
catgctgcatagattttat

SEQ ID NO: 51856 - DNA, 19 bp, Homo sapiens
  siRNA target sequence for G3BP (NM_005754.2,292-310).
gtccatgggggattggatt

SEQ ID NO: 51857 - DNA, 19 bp, Homo sapiens
  siRNA target sequence for G3BP (NM_005754.2,384-402).
caactgccacaccaagatt

SEQ ID NO: 51858 - DNA, 19 bp, Homo sapiens
  siRNA target sequence for G3BP (NM_005754.2,395-413).
ccaagattcgccatgttga

SEQ ID NO: 51859 - DNA, 19 bp, Homo sapiens
  siRNA target sequence for G3BP (NM_005754.2,396-414).
caagattcgccatgttgat

SEQ ID NO: 51860 - DNA, 19 bp, Homo sapiens
  siRNA target sequence for G3BP (NM_005754.2,416-434).
ctcatgccacgctaaatga

SEQ ID NO: 51861 - DNA, 19 bp, Homo sapiens
  siRNA target sequence for G3BP (NM_005754.2,457-475).
gggcttctctctaacaaca

SEQ ID NO: 51862 - DNA, 19 bp, Homo sapiens
  siRNA target sequence for G3BP (NM_005754.2,488-506).
ggagattcatgcaaacgtt

SEQ ID NO: 51863 - DNA, 19 bp, Homo sapiens
  siRNA target sequence for G3BP (NM_005754.2,489-507).
gagattcatgcaaacgttt

SEQ ID NO: 51864 - DNA, 19 bp, Homo sapiens
  siRNA target sequence for G3BP (NM_005754.2,661-679).
gaggtggtacctgatgatt

SEQ ID NO: 51865 - DNA, 19 bp, Homo sapiens
  siRNA target sequence for G3BP (NM_005754.2,847-865).
gatgctcagaagagttctt

SEQ ID NO: 51866 - DNA, 19 bp, Homo sapiens
  siRNA target sequence for G3BP (NM_005754.2,977-995).
ggataccacctcatgttgt

SEQ ID NO: 51867 - DNA, 19 bp, Homo sapiens
  siRNA target sequence for G3BP (NM_005754.2,978-996).
gataccacctcatgttgtt

SEQ ID NO: 51868 - DNA, 19 bp, Homo sapiens
  siRNA target sequence for G3BP (NM_005754.2,983-1001).
cacctcatgttgttaaagt

SEQ ID NO: 51869 - DNA, 19 bp, Homo sapiens
  siRNA target sequence for G3BP (NM_005754.2,1061-1079).
ctcagcgggatcaaagagt

SEQ ID NO: 51870 - DNA, 19 bp, Homo sapiens
  siRNA target sequence for G3BP (NM_005754.2,1078-1096).
gtgcgagaacaacgaataa

SEQ ID NO: 51871 - DNA, 19 bp, Homo sapiens
  siRNA target sequence for G3BP (NM_005754.2,1081-1099).
cgagaacaacgaataaata

SEQ ID NO: 51872 - DNA, 19 bp, Homo sapiens
  siRNA target sequence for G3BP (NM_005754.2,1270-1288).
gtggagttgcgcattaaca

SEQ ID NO: 51873 - DNA, 19 bp, Homo sapiens
  siRNA target sequence for G3BP (NM_005754.2,1272-1290).
ggagttgcgcattaacagt

SEQ ID NO: 51874 - DNA, 19 bp, Homo sapiens
  siRNA target sequence for G3BP2 (NM_012297.2,189-207).
gaataaagctccggaatat

SEQ ID NO: 51875 - DNA, 19 bp, Homo sapiens
  siRNA target sequence for G3BP2 (NM_012297.2,216-234).
gttttatggcaggaattct

SEQ ID NO: 51876 - DNA, 19 bp, Homo sapiens
  siRNA target sequence for G3BP2 (NM_012297.2,281-299).
ctgtttatggccaaaatga

SEQ ID NO: 51877 - DNA, 19 bp, Homo sapiens
  siRNA target sequence for G3BP2 (NM_012297.2,283-301).
gtttatggccaaaatgata

SEQ ID NO: 51878 - DNA, 19 bp, Homo sapiens
  siRNA target sequence for G3BP2 (NM_012297.2,330-348).
cagtgaatgtcatactaaa

SEQ ID NO: 51879 - DNA, 19 bp, Homo sapiens
  siRNA target sequence for G3BP2 (NM_012297.2,405-423).
gggtttgctgtctaacagt

SEQ ID NO: 51880 - DNA, 19 bp, Homo sapiens
  siRNA target sequence for G3BP2 (NM_012297.2,467-485).
ctgaaggatctgttccaaa

SEQ ID NO: 51881 - DNA, 19 bp, Homo sapiens
  siRNA target sequence for G3BP2 (NM_012297.2,621-639).
gcaagaaaatgctaacagt

SEQ ID NO: 51882 - DNA, 19 bp, Homo sapiens
  siRNA target sequence for G3BP2 (NM_012297.2,632-650).
ctaacagtggttactatga

SEQ ID NO: 51883 - DNA, 19 bp, Homo sapiens
  siRNA target sequence for G3BP2 (NM_012297.2,910-928).
ggaattccaccccatgtta

SEQ ID NO: 51884 - DNA, 19 bp, Homo sapiens
  siRNA target sequence for G3BP2 (NM_012297.2,911-929).
gaattccaccccatgttaa

SEQ ID NO: 51885 - DNA, 19 bp, Homo sapiens
  siRNA target sequence for G3BP2 (NM_012297.2,1055-1073).
gagatatggaacagaatga

SEQ ID NO: 51886 - DNA, 19 bp, Homo sapiens
  siRNA target sequence for G3BP2 (NM_012297.2,1074-1092).
ctctgacaaccgtagaata

SEQ ID NO: 51887 - DNA, 19 bp, Homo sapiens
  siRNA target sequence for G3BP2 (NM_012297.2,1076-1094).
ctgacaaccgtagaataat

SEQ ID NO: 51888 - DNA, 19 bp, Homo sapiens
  siRNA target sequence for G3BP2 (NM_012297.2,1126-1144).
ggtaacttgccacatgata

SEQ ID NO: 51889 - DNA, 19 bp, Homo sapiens
  siRNA target sequence for G3BP2 (NM_012297.2,1127-1145).
gtaacttgccacatgatat

SEQ ID NO: 51890 - DNA, 19 bp, Homo sapiens
  siRNA target sequence for G3BP2 (NM_012297.2,1134-1152).
gccacatgatattgatgaa

SEQ ID NO: 51891 - DNA, 19 bp, Homo sapiens
  siRNA target sequence for G3BP2 (NM_012297.2,1135-1153).
ccacatgatattgatgaaa

SEQ ID NO: 51892 - DNA, 19 bp, Homo sapiens
  siRNA target sequence for G3BP2 (NM_012297.2,1192-1210).
gtggaacttcgcatcaata

SEQ ID NO: 51893 - DNA, 19 bp, Homo sapiens
  siRNA target sequence for G3BP2 (NM_012297.2,1195-1213).
gaacttcgcatcaatacca

SEQ ID NO: 51894 - DNA, 19 bp, Homo sapiens
  siRNA target sequence for G3BP2 (NM_012297.2,1384-1402).
gatgatcgcagggatatta

SEQ ID NO: 51895 - DNA, 19 bp, Homo sapiens
  siRNA target sequence for G3BP2 (NM_012297.2,1395-1413).
ggatattaggcgcaatgat

SEQ ID NO: 51896 - DNA, 19 bp, Homo sapiens
  siRNA target sequence for G3BP2 (NM_012297.2,1422-1440).
cggtggtccacgtggaatt

SEQ ID NO: 51897 - DNA, 19 bp, Homo sapiens
  siRNA target sequence for G3BP2 (NM_012297.2,1424-1442).
gtggtccacgtggaattgt

SEQ ID NO: 51898 - DNA, 19 bp, Homo sapiens
  siRNA target sequence for G3BP2 (NM_012297.2,1523-1541).
gaggaaccgggcaaatgga

SEQ ID NO: 51899 - DNA, 19 bp, Homo sapiens
  siRNA target sequence for HDLBP (NM_005336.1,207-225).
ggctggttccgcaacaaat

SEQ ID NO: 51900 - DNA, 19 bp, Homo sapiens
  siRNA target sequence for HDLBP (NM_005336.1,211-229).
ggttccgcaacaaatcaaa

SEQ ID NO: 51901 - DNA, 19 bp, Homo sapiens
  siRNA target sequence for HDLBP (NM_005336.1,226-244).
caaagttgccactctaaat

SEQ ID NO: 51902 - DNA, 19 bp, Homo sapiens
  siRNA target sequence for HDLBP (NM_005336.1,446-464).
ggtgaacaagcaaaaatct

SEQ ID NO: 51903 - DNA, 19 bp, Homo sapiens
  siRNA target sequence for HDLBP (NM_005336.1,456-474).
caaaaatctgccttgagat

SEQ ID NO: 51904 - DNA, 19 bp, Homo sapiens
  siRNA target sequence for HDLBP (NM_005336.1,492-510).
ctcacttggagctgtcttt

SEQ ID NO: 51905 - DNA, 19 bp, Homo sapiens
  siRNA target sequence for HDLBP (NM_005336.1,779-797).
cgccatgaagtcttactca

SEQ ID NO: 51906 - DNA, 19 bp, Homo sapiens
  siRNA target sequence for HDLBP (NM_005336.1,780-798).
gccatgaagtcttactcat

SEQ ID NO: 51907 - DNA, 19 bp, Homo sapiens
  siRNA target sequence for HDLBP (NM_005336.1,862-880).
catcgctgggccgtataat

SEQ ID NO: 51908 - DNA, 19 bp, Homo sapiens
  siRNA target sequence for HDLBP (NM_005336.1,865-883).
cgctgggccgtataataga

SEQ ID NO: 51909 - DNA, 19 bp, Homo sapiens
  siRNA target sequence for HDLBP (NM_005336.1,867-885).
ctgggccgtataatagact

SEQ ID NO: 51910 - DNA, 19 bp, Homo sapiens
  siRNA target sequence for HDLBP (NM_005336.1,882-900).
gactggttggcgagatcat

SEQ ID NO: 51911 - DNA, 19 bp, Homo sapiens
  siRNA target sequence for HDLBP (NM_005336.1,909-927).
caggcacgcgcatcaacat

SEQ ID NO: 51912 - DNA, 19 bp, Homo sapiens
  siRNA target sequence for HDLBP (NM_005336.1,940-958).
cgtgaaccggacagagatt

SEQ ID NO: 51913 - DNA, 19 bp, Homo sapiens
  siRNA target sequence for HDLBP (NM_005336.1,992-1010).
gctgtggctcgcatcaaga

SEQ ID NO: 51914 - DNA, 19 bp, Homo sapiens
  siRNA target sequence for HDLBP (NM_005336.1,995-1013).
gtggctcgcatcaagaaga

SEQ ID NO: 51915 - DNA, 19 bp, Homo sapiens
  siRNA target sequence for HDLBP (NM_005336.1,998-1016).
gctcgcatcaagaagattt

SEQ ID NO: 51916 - DNA, 19 bp, Homo sapiens
  siRNA target sequence for HDLBP (NM_005336.1,999-1017).
ctcgcatcaagaagattta

SEQ ID NO: 51917 - DNA, 19 bp, Homo sapiens
  siRNA target sequence for HDLBP (NM_005336.1,1068-1086).
cccaacacaagtatgtcat

SEQ ID NO: 51918 - DNA, 19 bp, Homo sapiens
  siRNA target sequence for HDLBP (NM_005336.1,1128-1146).
ctggagtttccgttgagat

SEQ ID NO: 51919 - DNA, 19 bp, Homo sapiens
  siRNA target sequence for HDLBP (NM_005336.1,1184-1202).
cgaggcgaacctgaaaagt

SEQ ID NO: 51920 - DNA, 19 bp, Homo sapiens
  siRNA target sequence for HDLBP (NM_005336.1,1185-1203).
gaggcgaacctgaaaagtt

SEQ ID NO: 51921 - DNA, 19 bp, Homo sapiens
  siRNA target sequence for HDLBP (NM_005336.1,1210-1228).
ggcgttgactgaagtctat

SEQ ID NO: 51922 - DNA, 19 bp, Homo sapiens
  siRNA target sequence for HDLBP (NM_005336.1,1272-1290).
cctggcttcaccgtttcat

SEQ ID NO: 51923 - DNA, 19 bp, Homo sapiens
  siRNA target sequence for HDLBP (NM_005336.1,1275-1293).
ggcttcaccgtttcatcat

SEQ ID NO: 51924 - DNA, 19 bp, Homo sapiens
  siRNA target sequence for HDLBP (NM_005336.1,1276-1294).
gcttcaccgtttcatcatt

SEQ ID NO: 51925 - DNA, 19 bp, Homo sapiens
  siRNA target sequence for HDLBP (NM_005336.1,1309-1327).
gaacctggccaaaatcact

SEQ ID NO: 51926 - DNA, 19 bp, Homo sapiens
  siRNA target sequence for HDLBP (NM_005336.1,1390-1408).
ccctacagaggatgtcaat

SEQ ID NO: 51927 - DNA, 19 bp, Homo sapiens
  siRNA target sequence for HDLBP (NM_005336.1,1411-1429).
ggcccaggaacagatagaa

SEQ ID NO: 51928 - DNA, 19 bp, Homo sapiens
  siRNA target sequence for HDLBP (NM_005336.1,1510-1528).
gaagagcggtgccaacata

SEQ ID NO: 51929 - DNA, 19 bp, Homo sapiens
  siRNA target sequence for HDLBP (NM_005336.1,1520-1538).
gccaacataaacagaatca

SEQ ID NO: 51930 - DNA, 19 bp, Homo sapiens
  siRNA target sequence for HDLBP (NM_005336.1,1533-1551).
gaatcaaagaccagtacaa

SEQ ID NO: 51931 - DNA, 19 bp, Homo sapiens
  siRNA target sequence for HDLBP (NM_005336.1,1652-1670).
cttgcatctcgcatggaaa

SEQ ID NO: 51932 - DNA, 19 bp, Homo sapiens
  siRNA target sequence for HDLBP (NM_005336.1,1656-1674).
catctcgcatggaaaatga

SEQ ID NO: 51933 - DNA, 19 bp, Homo sapiens
  siRNA target sequence for HDLBP (NM_005336.1,1673-1691).
gagcgtaccaaggatctaa

SEQ ID NO: 51934 - DNA, 19 bp, Homo sapiens
  siRNA target sequence for HDLBP (NM_005336.1,1676-1694).
cgtaccaaggatctaatca

SEQ ID NO: 51935 - DNA, 19 bp, Homo sapiens
  siRNA target sequence for HDLBP (NM_005336.1,1677-1695).
gtaccaaggatctaatcat

SEQ ID NO: 51936 - DNA, 19 bp, Homo sapiens
  siRNA target sequence for HDLBP (NM_005336.1,1680-1698).
ccaaggatctaatcattga

SEQ ID NO: 51937 - DNA, 19 bp, Homo sapiens
  siRNA target sequence for HDLBP (NM_005336.1,1688-1706).
ctaatcattgagcaaagat

SEQ ID NO: 51938 - DNA, 19 bp, Homo sapiens
  siRNA target sequence for HDLBP (NM_005336.1,1704-1722).
gatttcatcgcacaatcat

SEQ ID NO: 51939 - DNA, 19 bp, Homo sapiens
  siRNA target sequence for HDLBP (NM_005336.1,1734-1752).
gtgaacggatccgtgaaat

SEQ ID NO: 51940 - DNA, 19 bp, Homo sapiens
  siRNA target sequence for HDLBP (NM_005336.1,1744-1762).
ccgtgaaattcgtgacaaa

SEQ ID NO: 51941 - DNA, 19 bp, Homo sapiens
  siRNA target sequence for HDLBP (NM_005336.1,1745-1763).
cgtgaaattcgtgacaaat

SEQ ID NO: 51942 - DNA, 19 bp, Homo sapiens
  siRNA target sequence for HDLBP (NM_005336.1,1766-1784).
ccagaggtcatcattaact

SEQ ID NO: 51943 - DNA, 19 bp, Homo sapiens
  siRNA target sequence for HDLBP (NM_005336.1,1797-1815).
cacaaaaaagtgacattgt

SEQ ID NO: 51944 - DNA, 19 bp, Homo sapiens
  siRNA target sequence for HDLBP (NM_005336.1,1819-1837).
gctcagaggacctaagaat

SEQ ID NO: 51945 - DNA, 19 bp, Homo sapiens
  siRNA target sequence for HDLBP (NM_005336.1,1880-1898).
gatctggtggaaaatagct

SEQ ID NO: 51946 - DNA, 19 bp, Homo sapiens
  siRNA target sequence for HDLBP (NM_005336.1,1885-1903).
ggtggaaaatagctattca

SEQ ID NO: 51947 - DNA, 19 bp, Homo sapiens
  siRNA target sequence for HDLBP (NM_005336.1,1886-1904).
gtggaaaatagctattcaa

SEQ ID NO: 51948 - DNA, 19 bp, Homo sapiens
  siRNA target sequence for HDLBP (NM_005336.1,1889-1907).
gaaaatagctattcaattt

SEQ ID NO: 51949 - DNA, 19 bp, Homo sapiens
  siRNA target sequence for HDLBP (NM_005336.1,1921-1939).
caaacagtttcacaagaat

SEQ ID NO: 51950 - DNA, 19 bp, Homo sapiens
  siRNA target sequence for HDLBP (NM_005336.1,1927-1945).
gtttcacaagaatatcatt

SEQ ID NO: 51951 - DNA, 19 bp, Homo sapiens
  siRNA target sequence for HDLBP (NM_005336.1,1948-1966).
gaaaggaggcgcaaacatt

SEQ ID NO: 51952 - DNA, 19 bp, Homo sapiens
  siRNA target sequence for HDLBP (NM_005336.1,1956-1974).
gcgcaaacattaaaaagat

SEQ ID NO: 51953 - DNA, 19 bp, Homo sapiens
  siRNA target sequence for HDLBP (NM_005336.1,2069-2087).
gcccggagcaggattctgt

SEQ ID NO: 51954 - DNA, 19 bp, Homo sapiens
  siRNA target sequence for HDLBP (NM_005336.1,2073-2091).
ggagcaggattctgtctat

SEQ ID NO: 51955 - DNA, 19 bp, Homo sapiens
  siRNA target sequence for HDLBP (NM_005336.1,2240-2258).
ggaagcgacaccgttgtta

SEQ ID NO: 51956 - DNA, 19 bp, Homo sapiens
  siRNA target sequence for HDLBP (NM_005336.1,2241-2259).
gaagcgacaccgttgttat

SEQ ID NO: 51957 - DNA, 19 bp, Homo sapiens
  siRNA target sequence for HDLBP (NM_005336.1,2323-2341).
gcaaaccaagagtttcact

SEQ ID NO: 51958 - DNA, 19 bp, Homo sapiens
  siRNA target sequence for HDLBP (NM_005336.1,2626-2644).
ggagattgctgaagagtat

SEQ ID NO: 51959 - DNA, 19 bp, Homo sapiens
  siRNA target sequence for HDLBP (NM_005336.1,2676-2694).
gcacacagagcgacaaagt

SEQ ID NO: 51960 - DNA, 19 bp, Homo sapiens
  siRNA target sequence for HDLBP (NM_005336.1,2739-2757).
gcattcaggagatcattga

SEQ ID NO: 51961 - DNA, 19 bp, Homo sapiens
  siRNA target sequence for HDLBP (NM_005336.1,2764-2782).
ggaagctcaggtgacatta

SEQ ID NO: 51962 - DNA, 19 bp, Homo sapiens
  siRNA target sequence for HDLBP (NM_005336.1,2768-2786).
gctcaggtgacattagaat

SEQ ID NO: 51963 - DNA, 19 bp, Homo sapiens
  siRNA target sequence for HDLBP (NM_005336.1,2787-2805).
gtgctataccccagaaatt

SEQ ID NO: 51964 - DNA, 19 bp, Homo sapiens
  siRNA target sequence for HDLBP (NM_005336.1,2954-2972).
gggagagaggctaaagatt

SEQ ID NO: 51965 - DNA, 19 bp, Homo sapiens
  siRNA target sequence for HDLBP (NM_005336.1,2958-2976).
gagaggctaaagattgtga

SEQ ID NO: 51966 - DNA, 19 bp, Homo sapiens
  siRNA target sequence for HDLBP (NM_005336.1,2988-3006).
caaggaggtgtgacatcat

SEQ ID NO: 51967 - DNA, 19 bp, Homo sapiens
  siRNA target sequence for HDLBP (NM_005336.1,3098-3116).
gaccttcaccgttacgtta

SEQ ID NO: 51968 - DNA, 19 bp, Homo sapiens
  siRNA target sequence for HDLBP (NM_005336.1,3100-3118).
ccttcaccgttacgttatt

SEQ ID NO: 51969 - DNA, 19 bp, Homo sapiens
  siRNA target sequence for HDLBP (NM_005336.1,3214-3232).
cacgggcctcgctgcaaat

SEQ ID NO: 51970 - DNA, 19 bp, Homo sapiens
  siRNA target sequence for HDLBP (NM_005336.1,3216-3234).
cgggcctcgctgcaaattt

SEQ ID NO: 51971 - DNA, 19 bp, Homo sapiens
  siRNA target sequence for HDLBP (NM_005336.1,3219-3237).
gcctcgctgcaaatttgga

SEQ ID NO: 51972 - DNA, 19 bp, Homo sapiens
  siRNA target sequence for HDLBP (NM_005336.1,3295-3313).
ccgggctttaaggagtttt

SEQ ID NO: 51973 - DNA, 19 bp, Homo sapiens
  siRNA target sequence for HDLBP (NM_005336.1,3297-3315).
gggctttaaggagttttaa

SEQ ID NO: 51974 - DNA, 19 bp, Homo sapiens
  siRNA target sequence for HDLBP (NM_005336.1,3327-3345).
ctgtagaccccaaatacca

SEQ ID NO: 51975 - DNA, 19 bp, Homo sapiens
  siRNA target sequence for HDLBP (NM_005336.1,3360-3378).
ggagaaagggggcagtaat

SEQ ID NO: 51976 - DNA, 19 bp, Homo sapiens
  siRNA target sequence for HDLBP (NM_005336.1,3443-3461).
ccccaggaccaaattacca

SEQ ID NO: 51977 - DNA, 19 bp, Homo sapiens
  siRNA target sequence for HDLBP (NM_005336.1,3444-3462).
cccaggaccaaattaccat

SEQ ID NO: 51978 - DNA, 19 bp, Homo sapiens
  siRNA target sequence for HDLBP (NM_005336.1,3496-3514).
ggatgctatactgagaatt

SEQ ID NO: 51979 - DNA, 19 bp, Homo sapiens
  siRNA target sequence for HDLBP (NM_005336.1,3508-3526).
gagaattgtgggtgaactt

SEQ ID NO: 51980 - DNA, 19 bp, Homo sapiens
  siRNA target sequence for HDLBP (NM_005336.1,3521-3539).
gaacttgagcagatggttt

SEQ ID NO: 51981 - DNA, 19 bp, Homo sapiens
  siRNA target sequence for HDLBP (NM_005336.1,3682-3700).
gacggggctcccagagaat

SEQ ID NO: 51982 - DNA, 19 bp, Homo sapiens
  siRNA target sequence for HDLBP (NM_005336.1,3765-3783).
gtgaggcgctgcaggtata

SEQ ID NO: 51983 - DNA, 19 bp, Homo sapiens
  siRNA target sequence for HNRPA0 (NM_006805.2,415-433).
caagcgctcccgttgcttt

SEQ ID NO: 51984 - DNA, 19 bp, Homo sapiens
  siRNA target sequence for HNRPA0 (NM_006805.2,557-575).
ggtgcccacgccaaggtta

SEQ ID NO: 51985 - DNA, 19 bp, Homo sapiens
  siRNA target sequence for HNRPA0 (NM_006805.2,558-576).
gtgcccacgccaaggttaa

SEQ ID NO: 51986 - DNA, 19 bp, Homo sapiens
  siRNA target sequence for HNRPA0 (NM_006805.2,560-578).
gcccacgccaaggttaaga

SEQ ID NO: 51987 - DNA, 19 bp, Homo sapiens
  siRNA target sequence for HNRPA0 (NM_006805.2,583-601).
ctttgtcggaggccttaaa

SEQ ID NO: 51988 - DNA, 19 bp, Homo sapiens
  siRNA target sequence for HNRPA0 (NM_006805.2,653-671).
gtggaaaaggccgagatta

SEQ ID NO: 51989 - DNA, 19 bp, Homo sapiens
  siRNA target sequence for HNRPA0 (NM_006805.2,655-673).
ggaaaaggccgagattatt

SEQ ID NO: 51990 - DNA, 19 bp, Homo sapiens
  siRNA target sequence for HNRPA0 (NM_006805.2,701-719).
ggattcggcttcgtgtatt

SEQ ID NO: 51991 - DNA, 19 bp, Homo sapiens
  siRNA target sequence for HNRPA0 (NM_006805.2,801-819).
cagtccccaaggaggatat

SEQ ID NO: 51992 - DNA, 19 bp, Homo sapiens
  siRNA target sequence for HNRPA0 (NM_006805.2,803-821).
gtccccaaggaggatatct

SEQ ID NO: 51993 - DNA, 19 bp, Homo sapiens
  siRNA target sequence for HNRPA0 (NM_006805.2,806-824).
cccaaggaggatatctact

SEQ ID NO: 51994 - DNA, 19 bp, Homo sapiens
  siRNA target sequence for HNRPA1 (NM_031157.1,912-930).
ggtggacagggttatggaa

SEQ ID NO: 51995 - DNA, 19 bp, Homo sapiens
  siRNA target sequence for HNRPA1 (NM_031157.1,957-975).
ggcagctatgacagctata

SEQ ID NO: 51996 - DNA, 19 bp, Homo sapiens
  siRNA target sequence for HNRPA2B1 (NM_002137.2,370-388).
ggctgcaagacctcattca

SEQ ID NO: 51997 - DNA, 19 bp, Homo sapiens
  siRNA target sequence for HNRPA2B1 (NM_002137.2,372-390).
ctgcaagacctcattcaat

SEQ ID NO: 51998 - DNA, 19 bp, Homo sapiens
  siRNA target sequence for HNRPA2B1 (NM_002137.2,552-570).
ccattgagataattactga

SEQ ID NO: 51999 - DNA, 19 bp, Homo sapiens
  siRNA target sequence for HNRPA2B1 (NM_002137.2,640-658).
cgtattgcagaaataccat

SEQ ID NO: 52000 - DNA, 19 bp, Homo sapiens
  siRNA target sequence for HNRPA2B1 (NM_002137.2,649-667).
gaaataccataccatcaat

SEQ ID NO: 52001 - DNA, 19 bp, Homo sapiens
  siRNA target sequence for HNRPA2B1 (NM_002137.2,661-679).
catcaatggtcataatgca

SEQ ID NO: 52002 - DNA, 19 bp, Homo sapiens
  siRNA target sequence for HNRPA2B1 (NM_002137.2,668-686).
ggtcataatgcagaagtaa

SEQ ID NO: 52003 - DNA, 19 bp, Homo sapiens
  siRNA target sequence for HNRPA2B1 (NM_002137.2,691-709).
ggctttgtctagacaagaa

SEQ ID NO: 52004 - DNA, 19 bp, Homo sapiens
  siRNA target sequence for HNRPA2B1 (NM_002137.2,713-731).
caggaagttcagagttcta

SEQ ID NO: 52005 - DNA, 19 bp, Homo sapiens
  siRNA target sequence for HNRPA2B1 (NM_002137.2,795-813).
caggaccaggaagtaactt

SEQ ID NO: 52006 - DNA, 19 bp, Homo sapiens
  siRNA target sequence for HNRPA2B1 (NM_002137.2,976-994).
gggctacggaggtggttat

SEQ ID NO: 52007 - DNA, 19 bp, Homo sapiens
  siRNA target sequence for HNRPA2B1 (NM_002137.2,978-996).
gctacggaggtggttatga

SEQ ID NO: 52008 - DNA, 19 bp, Homo sapiens
  siRNA target sequence for HNRPA2B1 (NM_002137.2,984-1002).
gaggtggttatgacaacta

SEQ ID NO: 52009 - DNA, 19 bp, Homo sapiens
  siRNA target sequence for HNRPA2B1 (NM_002137.2,1065-1083).
ctaactacggtccaatgaa

SEQ ID NO: 52010 - DNA, 19 bp, Homo sapiens
  siRNA target sequence for HNRPA2B1 (NM_002137.2,1108-1126).
gaacatggggggaccatat

SEQ ID NO: 52011 - DNA, 19 bp, Homo sapiens
  siRNA target sequence for HNRPA2B1 (NM_002137.2,1122-1140).
catatggtggaggaaacta

SEQ ID NO: 52012 - DNA, 19 bp, Homo sapiens
  siRNA target sequence for HNRPA2B1 (NM_031243.1,172-190).
ggagaaaactttagaaact

SEQ ID NO: 52013 - DNA, 19 bp, Homo sapiens
  siRNA target sequence for HNRPAB (NM_004499.2,414-432).
gaggaggacgcgggaaaaa

SEQ ID NO: 52014 - DNA, 19 bp, Homo sapiens
  siRNA target sequence for HNRPAB (NM_004499.2,417-435).
gaggacgcgggaaaaatgt

SEQ ID NO: 52015 - DNA, 19 bp, Homo sapiens
  siRNA target sequence for HNRPAB (NM_004499.2,501-519).
gaggtcgttgactgtacaa

SEQ ID NO: 52016 - DNA, 19 bp, Homo sapiens
  siRNA target sequence for HNRPAB (NM_004499.2,503-521).
ggtcgttgactgtacaata

SEQ ID NO: 52017 - DNA, 19 bp, Homo sapiens
  siRNA target sequence for HNRPAB (NM_004499.2,504-522).
gtcgttgactgtacaataa

SEQ ID NO: 52018 - DNA, 19 bp, Homo sapiens
  siRNA target sequence for HNRPAB (NM_004499.2,506-524).
cgttgactgtacaataaaa

SEQ ID NO: 52019 - DNA, 19 bp, Homo sapiens
  siRNA target sequence for HNRPAB (NM_004499.2,559-577).
ggtttatcctgttcaaaga

SEQ ID NO: 52020 - DNA, 19 bp, Homo sapiens
  siRNA target sequence for HNRPAB (NM_004499.2,560-578).
gtttatcctgttcaaagat

SEQ ID NO: 52021 - DNA, 19 bp, Homo sapiens
  siRNA target sequence for HNRPAB (NM_004499.2,630-648).
cgtgtcattgaccctaaaa

SEQ ID NO: 52022 - DNA, 19 bp, Homo sapiens
  siRNA target sequence for HNRPAB (NM_004499.2,631-649).
gtgtcattgaccctaaaaa

SEQ ID NO: 52023 - DNA, 19 bp, Homo sapiens
  siRNA target sequence for HNRPAB (NM_004499.2,686-704).
cttcgttgggggtctgaat

SEQ ID NO: 52024 - DNA, 19 bp, Homo sapiens
  siRNA target sequence for HNRPAB (NM_004499.2,745-763).
gcgagtttggggagattga

SEQ ID NO: 52025 - DNA, 19 bp, Homo sapiens
  siRNA target sequence for HNRPAB (NM_004499.2,756-774).
gagattgaggccattgaat

SEQ ID NO: 52026 - DNA, 19 bp, Homo sapiens
  siRNA target sequence for HNRPAB (NM_004499.2,802-820).
gacgaggttttgtgtttat

SEQ ID NO: 52027 - DNA, 19 bp, Homo sapiens
  siRNA target sequence for HNRPAB (NM_004499.2,804-822).
cgaggttttgtgtttatca

SEQ ID NO: 52028 - DNA, 19 bp, Homo sapiens
  siRNA target sequence for HNRPAB (NM_004499.2,908-926).
ccagcccaaagaagtctat

SEQ ID NO: 52029 - DNA, 19 bp, Homo sapiens
  siRNA target sequence for HNRPAB (NM_004499.2,1005-1023).
ggaggtcagggtagtacaa

SEQ ID NO: 52030 - DNA, 19 bp, Homo sapiens
  siRNA target sequence for HNRPAB (NM_004499.2,1006-1024).
gaggtcagggtagtacaaa

SEQ ID NO: 52031 - DNA, 19 bp, Homo sapiens
  siRNA target sequence for HNRPAB (NM_004499.2,1009-1027).
gtcagggtagtacaaacta

SEQ ID NO: 52032 - DNA, 19 bp, Homo sapiens
  siRNA target sequence for HNRPAB (NM_004499.2,1042-1060).
gacgtggtggccatcagaa

SEQ ID NO: 52033 - DNA, 19 bp, Homo sapiens
  siRNA target sequence for HNRPAB (NM_031266.1,1145-1163).
ctacagtcagggtagtaca

SEQ ID NO: 52034 - DNA, 19 bp, Homo sapiens
  siRNA target sequence for HNRPC (NM_031314.1,498-516).
gagatgtacgggtcagtaa

SEQ ID NO: 52035 - DNA, 19 bp, Homo sapiens
  siRNA target sequence for HNRPC (NM_031314.1,500-518).
gatgtacgggtcagtaaca

SEQ ID NO: 52036 - DNA, 19 bp, Homo sapiens
  siRNA target sequence for HNRPC (NM_031314.1,503-521).
gtacgggtcagtaacagaa

SEQ ID NO: 52037 - DNA, 19 bp, Homo sapiens
  siRNA target sequence for HNRPF (NM_004966.2,416-434).
ctctgactgcacgattcat

SEQ ID NO: 52038 - DNA, 19 bp, Homo sapiens
  siRNA target sequence for HNRPF (NM_004966.2,418-436).
ctgactgcacgattcatga

SEQ ID NO: 52039 - DNA, 19 bp, Homo sapiens
  siRNA target sequence for HNRPF (NM_004966.2,442-460).
ccgcaggtgtccatttcat

SEQ ID NO: 52040 - DNA, 19 bp, Homo sapiens
  siRNA target sequence for HNRPF (NM_004966.2,445-463).
caggtgtccatttcatcta

SEQ ID NO: 52041 - DNA, 19 bp, Homo sapiens
  siRNA target sequence for HNRPF (NM_004966.2,447-465).
ggtgtccatttcatctaca

SEQ ID NO: 52042 - DNA, 19 bp, Homo sapiens
  siRNA target sequence for HNRPF (NM_004966.2,507-525).
ggatcagaagatgatgtaa

SEQ ID NO: 52043 - DNA, 19 bp, Homo sapiens
  siRNA target sequence for HNRPF (NM_004966.2,554-572).
catgggacaccggtacatt

SEQ ID NO: 52044 - DNA, 19 bp, Homo sapiens
  siRNA target sequence for HNRPF (NM_004966.2,588-606).
cacagaaccgagatggatt

SEQ ID NO: 52045 - DNA, 19 bp, Homo sapiens
  siRNA target sequence for HNRPF (NM_004966.2,888-906).
gaggaagttaggtcatact

SEQ ID NO: 52046 - DNA, 19 bp, Homo sapiens
  siRNA target sequence for HNRPF (NM_004966.2,965-983).
gactgccaggaggtacatt

SEQ ID NO: 52047 - DNA, 19 bp, Homo sapiens
  siRNA target sequence for HNRPF (NM_004966.2,1221-1239).
gcgaccgagaacgacattt

SEQ ID NO: 52048 - DNA, 19 bp, Homo sapiens
  siRNA target sequence for HNRPF (NM_004966.2,1222-1240).
cgaccgagaacgacattta

SEQ ID NO: 52049 - DNA, 19 bp, Homo sapiens
  siRNA target sequence for HNRPF (NM_004966.2,1227-1245).
gagaacgacatttacaact

SEQ ID NO: 52050 - DNA, 19 bp, Homo sapiens
  siRNA target sequence for HNRPF (NM_004966.2,1233-1251).
gacatttacaacttcttct

SEQ ID NO: 52051 - DNA, 19 bp, Homo sapiens
  siRNA target sequence for HNRPF (NM_004966.2,1304-1322).
gacgggtgaagcagatgtt

SEQ ID NO: 52052 - DNA, 19 bp, Homo sapiens
  siRNA target sequence for HNRPF (NM_004966.2,1360-1378).
ccaaagacagggccaatat

SEQ ID NO: 52053 - DNA, 19 bp, Homo sapiens
  siRNA target sequence for HNRPH2 (NM_019597.2,143-161).
gctcagccgatgaagtgat

SEQ ID NO: 52054 - DNA, 19 bp, Homo sapiens
  siRNA target sequence for HNRPH2 (NM_019597.2,193-211).
ggcacatcaggtattcgtt

SEQ ID NO: 52055 - DNA, 19 bp, Homo sapiens
  siRNA target sequence for HNRPH2 (NM_019597.2,194-212).
gcacatcaggtattcgttt

SEQ ID NO: 52056 - DNA, 19 bp, Homo sapiens
  siRNA target sequence for HNRPH2 (NM_019597.2,233-251).
gaccaagtggtgaagcatt

SEQ ID NO: 52057 - DNA, 19 bp, Homo sapiens
  siRNA target sequence for HNRPH2 (NM_019597.2,336-354).
caagtctaacagtgttgaa

SEQ ID NO: 52058 - DNA, 19 bp, Homo sapiens
  siRNA target sequence for HNRPH2 (NM_019597.2,1042-1060).
ggacccgatggcagagtta

SEQ ID NO: 52059 - DNA, 19 bp, Homo sapiens
  siRNA target sequence for HNRPH2 (NM_019597.2,1270-1288).
ggagggatgggcttatcca

SEQ ID NO: 52060 - DNA, 19 bp, Homo sapiens
  siRNA target sequence for HNRPH3 (NM_012207.1,122-140).
gattgggttatgaaacata

SEQ ID NO: 52061 - DNA, 19 bp, Homo sapiens
  siRNA target sequence for HNRPH3 (NM_012207.1,127-145).
ggttatgaaacataatggt

SEQ ID NO: 52062 - DNA, 19 bp, Homo sapiens
  siRNA target sequence for HNRPH3 (NM_012207.1,174-192).
gacttcgtggactaccatt

SEQ ID NO: 52063 - DNA, 19 bp, Homo sapiens
  siRNA target sequence for HNRPH3 (NM_012207.1,208-226).
ggaaatagttcagttcttt

SEQ ID NO: 52064 - DNA, 19 bp, Homo sapiens
  siRNA target sequence for HNRPH3 (NM_012207.1,390-408).
gtagcaggagtgaaatcaa

SEQ ID NO: 52065 - DNA, 19 bp, Homo sapiens
  siRNA target sequence for HNRPH3 (NM_012207.1,445-463).
gcgaccgggaccatatgat

SEQ ID NO: 52066 - DNA, 19 bp, Homo sapiens
  siRNA target sequence for HNRPH3 (NM_012207.1,446-464).
cgaccgggaccatatgata

SEQ ID NO: 52067 - DNA, 19 bp, Homo sapiens
  siRNA target sequence for HNRPH3 (NM_012207.1,501-519).
ggcgtggaagtatgtatga

SEQ ID NO: 52068 - DNA, 19 bp, Homo sapiens
  siRNA target sequence for HNRPH3 (NM_012207.1,503-521).
cgtggaagtatgtatgaca

SEQ ID NO: 52069 - DNA, 19 bp, Homo sapiens
  siRNA target sequence for HNRPH3 (NM_012207.1,715-733).
gagagggttgccttttcgt

SEQ ID NO: 52070 - DNA, 19 bp, Homo sapiens
  siRNA target sequence for HNRPH3 (NM_012207.1,724-742).
gccttttcgtgcaactgaa

SEQ ID NO: 52071 - DNA, 19 bp, Homo sapiens
  siRNA target sequence for HNRPH3 (NM_012207.1,725-743).
ccttttcgtgcaactgaaa

SEQ ID NO: 52072 - DNA, 19 bp, Homo sapiens
  siRNA target sequence for HNRPH3 (NM_012207.1,763-781).
ctcaccactaaatccaata

SEQ ID NO: 52073 - DNA, 19 bp, Homo sapiens
  siRNA target sequence for HNRPH3 (NM_012207.1,777-795).
caatacgagttcatattga

SEQ ID NO: 52074 - DNA, 19 bp, Homo sapiens
  siRNA target sequence for HNRPH3 (NM_012207.1,838-856).
gtttgtgacacatgaagat

SEQ ID NO: 52075 - DNA, 19 bp, Homo sapiens
  siRNA target sequence for HNRPH3 (NM_012207.1,863-881).
gctgccatgtctaaagata

SEQ ID NO: 52076 - DNA, 19 bp, Homo sapiens
  siRNA target sequence for HNRPH3 (NM_012207.1,866-884).
gccatgtctaaagataaaa

SEQ ID NO: 52077 - DNA, 19 bp, Homo sapiens
  siRNA target sequence for HNRPH3 (NM_012207.1,889-907).
catgcaacatcgatatatt

SEQ ID NO: 52078 - DNA, 19 bp, Homo sapiens
  siRNA target sequence for HNRPH3 (NM_012207.1,1036-1054).
caattacagtggaggatat

SEQ ID NO: 52079 - DNA, 19 bp, Homo sapiens
  siRNA target sequence for HNRPH3 (NM_012207.1,1139-1157).
ggatggcgtgggatgtact

SEQ ID NO: 52080 - DNA, 19 bp, Homo sapiens
  siRNA target sequence for HNRPL (NM_001533.1,384-402).
cttgcaacgcagtgaacta

SEQ ID NO: 52081 - DNA, 19 bp, Homo sapiens
  siRNA target sequence for HNRPL (NM_001533.1,403-421).
cgcagccgacaaccaaata

SEQ ID NO: 52082 - DNA, 19 bp, Homo sapiens
  siRNA target sequence for HNRPL (NM_001533.1,404-422).
gcagccgacaaccaaatat

SEQ ID NO: 52083 - DNA, 19 bp, Homo sapiens
  siRNA target sequence for HNRPL (NM_001533.1,405-423).
cagccgacaaccaaatata

SEQ ID NO: 52084 - DNA, 19 bp, Homo sapiens
  siRNA target sequence for HNRPL (NM_001533.1,407-425).
gccgacaaccaaatataca

SEQ ID NO: 52085 - DNA, 19 bp, Homo sapiens
  siRNA target sequence for HNRPL (NM_001533.1,408-426).
ccgacaaccaaatatacat

SEQ ID NO: 52086 - DNA, 19 bp, Homo sapiens
  siRNA target sequence for HNRPL (NM_001533.1,409-427).
cgacaaccaaatatacatt

SEQ ID NO: 52087 - DNA, 19 bp, Homo sapiens
  siRNA target sequence for HNRPL (NM_001533.1,513-531).
gtgtgcttctctttaccat

SEQ ID NO: 52088 - DNA, 19 bp, Homo sapiens
  siRNA target sequence for HNRPL (NM_001533.1,528-546).
ccatcctgaaccccattta

SEQ ID NO: 52089 - DNA, 19 bp, Homo sapiens
  siRNA target sequence for HNRPL (NM_001533.1,529-547).
catcctgaaccccatttat

SEQ ID NO: 52090 - DNA, 19 bp, Homo sapiens
  siRNA target sequence for HNRPL (NM_001533.1,533-551).
ctgaaccccatttattcga

SEQ ID NO: 52091 - DNA, 19 bp, Homo sapiens
  siRNA target sequence for HNRPL (NM_001533.1,549-567).
cgatcaccacggatgttct

SEQ ID NO: 52092 - DNA, 19 bp, Homo sapiens
  siRNA target sequence for HNRPL (NM_001533.1,550-568).
gatcaccacggatgttctt

SEQ ID NO: 52093 - DNA, 19 bp, Homo sapiens
  siRNA target sequence for HNRPL (NM_001533.1,556-574).
cacggatgttctttacact

SEQ ID NO: 52094 - DNA, 19 bp, Homo sapiens
  siRNA target sequence for HNRPL (NM_001533.1,558-576).
cggatgttctttacactat

SEQ ID NO: 52095 - DNA, 19 bp, Homo sapiens
  siRNA target sequence for HNRPL (NM_001533.1,560-578).
gatgttctttacactatct

SEQ ID NO: 52096 - DNA, 19 bp, Homo sapiens
  siRNA target sequence for HNRPL (NM_001533.1,635-653).
gcgatggtggaatttgact

SEQ ID NO: 52097 - DNA, 19 bp, Homo sapiens
  siRNA target sequence for HNRPL (NM_001533.1,673-691).
ggccaaggcctctctcaat

SEQ ID NO: 52098 - DNA, 19 bp, Homo sapiens
  siRNA target sequence for HNRPL (NM_001533.1,717-735).
gcactctgaagatcgaata

SEQ ID NO: 52099 - DNA, 19 bp, Homo sapiens
  siRNA target sequence for HNRPL (NM_001533.1,743-761).
cctacacgcttgaatgtgt

SEQ ID NO: 52100 - DNA, 19 bp, Homo sapiens
  siRNA target sequence for HNRPL (NM_001533.1,744-762).
ctacacgcttgaatgtgtt

SEQ ID NO: 52101 - DNA, 19 bp, Homo sapiens
  siRNA target sequence for HNRPL (NM_001533.1,747-765).
cacgcttgaatgtgttcaa

SEQ ID NO: 52102 - DNA, 19 bp, Homo sapiens
  siRNA target sequence for HNRPL (NM_001533.1,749-767).
cgcttgaatgtgttcaaga

SEQ ID NO: 52103 - DNA, 19 bp, Homo sapiens
  siRNA target sequence for HNRPL (NM_001533.1,776-794).
gatacttgggactacacaa

SEQ ID NO: 52104 - DNA, 19 bp, Homo sapiens
  siRNA target sequence for HNRPL (NM_001533.1,867-885).
gagatcaccccgcagaata

SEQ ID NO: 52105 - DNA, 19 bp, Homo sapiens
  siRNA target sequence for HNRPL (NM_001533.1,903-921).
ggtaccacagccattacca

SEQ ID NO: 52106 - DNA, 19 bp, Homo sapiens
  siRNA target sequence for HNRPL (NM_001533.1,1098-1116).
gcttggatcaatctaagat

SEQ ID NO: 52107 - DNA, 19 bp, Homo sapiens
  siRNA target sequence for HNRPL (NM_001533.1,1122-1140).
gtgaccgagtcttcaatgt

SEQ ID NO: 52108 - DNA, 19 bp, Homo sapiens
  siRNA target sequence for HNRPL (NM_001533.1,1366-1384).
cagtgaatcccggaacaat

SEQ ID NO: 52109 - DNA, 19 bp, Homo sapiens
  siRNA target sequence for HNRPM (NM_005968.2,354-372).
cgacctgctcagaatgaga

SEQ ID NO: 52110 - DNA, 19 bp, Homo sapiens
  siRNA target sequence for HNRPM (NM_005968.2,414-432).
gagccatatgccaatccaa

SEQ ID NO: 52111 - DNA, 19 bp, Homo sapiens
  siRNA target sequence for HNRPM (NM_005968.2,424-442).
ccaatccaactaaaagata

SEQ ID NO: 52112 - DNA, 19 bp, Homo sapiens
  siRNA target sequence for HNRPM (NM_005968.2,445-463).
gagccttcattacaaacat

SEQ ID NO: 52113 - DNA, 19 bp, Homo sapiens
  siRNA target sequence for HNRPM (NM_005968.2,457-475).
caaacataccttttgatgt

SEQ ID NO: 52114 - DNA, 19 bp, Homo sapiens
  siRNA target sequence for HNRPM (NM_005968.2,461-479).
cataccttttgatgtgaaa

SEQ ID NO: 52115 - DNA, 19 bp, Homo sapiens
  siRNA target sequence for HNRPM (NM_005968.2,474-492).
gtgaaatggcagtcactta

SEQ ID NO: 52116 - DNA, 19 bp, Homo sapiens
  siRNA target sequence for HNRPM (NM_005968.2,545-563).
ggacgctgaaggaaagtca

SEQ ID NO: 52117 - DNA, 19 bp, Homo sapiens
  siRNA target sequence for HNRPM (NM_005968.2,612-630).
gctgcggaagtcctaaaca

SEQ ID NO: 52118 - DNA, 19 bp, Homo sapiens
  siRNA target sequence for HNRPM (NM_005968.2,613-631).
ctgcggaagtcctaaacaa

SEQ ID NO: 52119 - DNA, 19 bp, Homo sapiens
  siRNA target sequence for HNRPM (NM_005968.2,832-850).
gacttggaagcacagtatt

SEQ ID NO: 52120 - DNA, 19 bp, Homo sapiens
  siRNA target sequence for HNRPM (NM_005968.2,852-870).
gtagcaaatctggattata

SEQ ID NO: 52121 - DNA, 19 bp, Homo sapiens
  siRNA target sequence for HNRPM (NM_005968.2,917-935).
ggtggtccgagcagacatt

SEQ ID NO: 52122 - DNA, 19 bp, Homo sapiens
  siRNA target sequence for HNRPM (NM_005968.2,920-938).
ggtccgagcagacattctt

SEQ ID NO: 52123 - DNA, 19 bp, Homo sapiens
  siRNA target sequence for HNRPM (NM_005968.2,923-941).
ccgagcagacattcttgaa

SEQ ID NO: 52124 - DNA, 19 bp, Homo sapiens
  siRNA target sequence for HNRPM (NM_005968.2,960-978).
cgtggaataggcactgtta

SEQ ID NO: 52125 - DNA, 19 bp, Homo sapiens
  siRNA target sequence for HNRPM (NM_005968.2,1002-1020).
gtgcaagctatatctatgt

SEQ ID NO: 52126 - DNA, 19 bp, Homo sapiens
  siRNA target sequence for HNRPM (NM_005968.2,1022-1040).
caatggccagctgctattt

SEQ ID NO: 52127 - DNA, 19 bp, Homo sapiens
  siRNA target sequence for HNRPM (NM_005968.2,1065-1083).
gatgagagggccttaccaa

SEQ ID NO: 52128 - DNA, 19 bp, Homo sapiens
  siRNA target sequence for HNRPM (NM_005968.2,1075-1093).
ccttaccaaaaggagattt

SEQ ID NO: 52129 - DNA, 19 bp, Homo sapiens
  siRNA target sequence for HNRPM (NM_005968.2,1198-1216).
gcatcggaatgggaaacat

SEQ ID NO: 52130 - DNA, 19 bp, Homo sapiens
  siRNA target sequence for HNRPM (NM_005968.2,1199-1217).
catcggaatgggaaacata

SEQ ID NO: 52131 - DNA, 19 bp, Homo sapiens
  siRNA target sequence for HNRPM (NM_005968.2,1234-1252).
gaatggaaggcataggatt

SEQ ID NO: 52132 - DNA, 19 bp, Homo sapiens
  siRNA target sequence for HNRPM (NM_005968.2,1334-1352).
catgggcaggataaatgaa

SEQ ID NO: 52133 - DNA, 19 bp, Homo sapiens
  siRNA target sequence for HNRPM (NM_005968.2,2203-2221).
gaaatctgccattcgattt

SEQ ID NO: 52134 - DNA, 19 bp, Homo sapiens
  siRNA target sequence for HNRPM (NM_005968.2,2389-2407).
gagagattgacgttcgaat

SEQ ID NO: 52135 - DNA, 19 bp, Homo sapiens
  siRNA target sequence for HNRPM (NM_005968.2,2393-2411).
gattgacgttcgaattgat

SEQ ID NO: 52136 - DNA, 19 bp, Homo sapiens
  siRNA target sequence for HNRPM (NM_005968.2,2397-2415).
gacgttcgaattgatagaa

SEQ ID NO: 52137 - DNA, 19 bp, Homo sapiens
  siRNA target sequence for HNRPR (NM_005826.2,95-113).
ctaatcaggtgaatggtaa

SEQ ID NO: 52138 - DNA, 19 bp, Homo sapiens
  siRNA target sequence for HNRPR (NM_005826.2,109-127).
ggtaatgcggtacagttaa

SEQ ID NO: 52139 - DNA, 19 bp, Homo sapiens
  siRNA target sequence for HNRPR (NM_005826.2,110-128).
gtaatgcggtacagttaaa

SEQ ID NO: 52140 - DNA, 19 bp, Homo sapiens
  siRNA target sequence for HNRPR (NM_005826.2,136-154).
gaagaaccaatggatactt

SEQ ID NO: 52141 - DNA, 19 bp, Homo sapiens
  siRNA target sequence for HNRPR (NM_005826.2,218-236).
cagaaagacttgatgaaat

SEQ ID NO: 52142 - DNA, 19 bp, Homo sapiens
  siRNA target sequence for HNRPR (NM_005826.2,220-238).
gaaagacttgatgaaatat

SEQ ID NO: 52143 - DNA, 19 bp, Homo sapiens
  siRNA target sequence for HNRPR (NM_005826.2,243-261).
gacaggattggtagcttat

SEQ ID NO: 52144 - DNA, 19 bp, Homo sapiens
  siRNA target sequence for HNRPR (NM_005826.2,245-263).
caggattggtagcttatgt

SEQ ID NO: 52145 - DNA, 19 bp, Homo sapiens
  siRNA target sequence for HNRPR (NM_005826.2,257-275).
cttatgtcgatcttgatga

SEQ ID NO: 52146 - DNA, 19 bp, Homo sapiens
  siRNA target sequence for HNRPR (NM_005826.2,342-360).
ggaaagtgacttatcacat

SEQ ID NO: 52147 - DNA, 19 bp, Homo sapiens
  siRNA target sequence for HNRPR (NM_005826.2,444-462).
cacaaagggacctgatgaa

SEQ ID NO: 52148 - DNA, 19 bp, Homo sapiens
  siRNA target sequence for HNRPR (NM_005826.2,454-472).
cctgatgaagcgaagatca

SEQ ID NO: 52149 - DNA, 19 bp, Homo sapiens
  siRNA target sequence for HNRPR (NM_005826.2,455-473).
ctgatgaagcgaagatcaa

SEQ ID NO: 52150 - DNA, 19 bp, Homo sapiens
  siRNA target sequence for HNRPR (NM_005826.2,480-498).
gcttgagagaactggttat

SEQ ID NO: 52151 - DNA, 19 bp, Homo sapiens
  siRNA target sequence for HNRPR (NM_005826.2,481-499).
cttgagagaactggttata

SEQ ID NO: 52152 - DNA, 19 bp, Homo sapiens
  siRNA target sequence for HNRPR (NM_005826.2,493-511).
ggttatactctggatgtaa

SEQ ID NO: 52153 - DNA, 19 bp, Homo sapiens
  siRNA target sequence for HNRPR (NM_005826.2,564-582).
cgtgcaacctggaattgga

SEQ ID NO: 52154 - DNA, 19 bp, Homo sapiens
  siRNA target sequence for HNRPR (NM_005826.2,575-593).
gaattggaacggaggtatt

SEQ ID NO: 52155 - DNA, 19 bp, Homo sapiens
  siRNA target sequence for HNRPR (NM_005826.2,588-606).
ggtatttgtaggcaaaata

SEQ ID NO: 52156 - DNA, 19 bp, Homo sapiens
  siRNA target sequence for HNRPR (NM_005826.2,688-706).
ccactgtccggtcagaata

SEQ ID NO: 52157 - DNA, 19 bp, Homo sapiens
  siRNA target sequence for HNRPR (NM_005826.2,700-718).
cagaatagagggtatgcat

SEQ ID NO: 52158 - DNA, 19 bp, Homo sapiens
  siRNA target sequence for HNRPR (NM_005826.2,746-764).
cacaggaagccgtgaaact

SEQ ID NO: 52159 - DNA, 19 bp, Homo sapiens
  siRNA target sequence for HNRPR (NM_005826.2,817-835).
gtggcaaacaacagacttt

SEQ ID NO: 52160 - DNA, 19 bp, Homo sapiens
  siRNA target sequence for HNRPR (NM_005826.2,841-859).
ggatccattccgaagaata

SEQ ID NO: 52161 - DNA, 19 bp, Homo sapiens
  siRNA target sequence for HNRPR (NM_005826.2,842-860).
gatccattccgaagaataa

SEQ ID NO: 52162 - DNA, 19 bp, Homo sapiens
  siRNA target sequence for HNRPR (NM_005826.2,903-921).
gggtttggtggacgttatt

SEQ ID NO: 52163 - DNA, 19 bp, Homo sapiens
  siRNA target sequence for HNRPR (NM_005826.2,909-927).
ggtggacgttattctctat

SEQ ID NO: 52164 - DNA, 19 bp, Homo sapiens
  siRNA target sequence for HNRPR (NM_005826.2,912-930).
ggacgttattctctatcat

SEQ ID NO: 52165 - DNA, 19 bp, Homo sapiens
  siRNA target sequence for HNRPR (NM_005826.2,915-933).
cgttattctctatcatcaa

SEQ ID NO: 52166 - DNA, 19 bp, Homo sapiens
  siRNA target sequence for HNRPR (NM_005826.2,928-946).
catcaacccgatgacaaaa

SEQ ID NO: 52167 - DNA, 19 bp, Homo sapiens
  siRNA target sequence for HNRPR (NM_005826.2,959-977).
ggttctgcttccttgaata

SEQ ID NO: 52168 - DNA, 19 bp, Homo sapiens
  siRNA target sequence for HNRPR (NM_005826.2,1040-1058).
ggggaaatgtagttacagt

SEQ ID NO: 52169 - DNA, 19 bp, Homo sapiens
  siRNA target sequence for HNRPR (NM_005826.2,1139-1157).
ctacggtgacagaagaaat

SEQ ID NO: 52170 - DNA, 19 bp, Homo sapiens
  siRNA target sequence for HNRPR (NM_005826.2,1162-1180).
gaaaagtcattttctgaat

SEQ ID NO: 52171 - DNA, 19 bp, Homo sapiens
  siRNA target sequence for HNRPR (NM_005826.2,1206-1224).
gttgaaagattatgcattt

SEQ ID NO: 52172 - DNA, 19 bp, Homo sapiens
  siRNA target sequence for HNRPR (NM_005826.2,1378-1396).
gcgtatgaagattattact

SEQ ID NO: 52173 - DNA, 19 bp, Homo sapiens
  siRNA target sequence for HNRPR (NM_005826.2,1379-1397).
cgtatgaagattattacta

SEQ ID NO: 52174 - DNA, 19 bp, Homo sapiens
  siRNA target sequence for HNRPR (NM_005826.2,1411-1429).
cgcatgccacctccaatta

SEQ ID NO: 52175 - DNA, 19 bp, Homo sapiens
  siRNA target sequence for HNRPR (NM_005826.2,1465-1483).
ggctaccctccagattact

SEQ ID NO: 52176 - DNA, 19 bp, Homo sapiens
  siRNA target sequence for HNRPR (NM_005826.2,1466-1484).
gctaccctccagattacta

SEQ ID NO: 52177 - DNA, 19 bp, Homo sapiens
  siRNA target sequence for HNRPR (NM_005826.2,1485-1503).
cggctatgaagattactat

SEQ ID NO: 52178 - DNA, 19 bp, Homo sapiens
  siRNA target sequence for HNRPR (NM_005826.2,1556-1574).
cctactacggctatgatga

SEQ ID NO: 52179 - DNA, 19 bp, Homo sapiens
  siRNA target sequence for HNRPR (NM_005826.2,1779-1797).
caatcgtgggggcaatgta

SEQ ID NO: 52180 - DNA, 19 bp, Homo sapiens
  siRNA target sequence for HNRPR (NM_005826.2,1925-1943).
gtaactatggttacaataa

SEQ ID NO: 52181 - DNA, 19 bp, Homo sapiens
  siRNA target sequence for ILF2 (NM_004515.2,152-170).
ggccctttgtaccacatat

SEQ ID NO: 52182 - DNA, 19 bp, Homo sapiens
  siRNA target sequence for ILF2 (NM_004515.2,164-182).
cacatatcccatttgactt

SEQ ID NO: 52183 - DNA, 19 bp, Homo sapiens
  siRNA target sequence for ILF2 (NM_004515.2,172-190).
ccatttgacttctatttgt

SEQ ID NO: 52184 - DNA, 19 bp, Homo sapiens
  siRNA target sequence for ILF2 (NM_004515.2,284-302).
ctgctgaacaggcatctat

SEQ ID NO: 52185 - DNA, 19 bp, Homo sapiens
  siRNA target sequence for ILF2 (NM_004515.2,359-377).
ggacatttgaagtgcaaat

SEQ ID NO: 52186 - DNA, 19 bp, Homo sapiens
  siRNA target sequence for ILF2 (NM_004515.2,360-378).
gacatttgaagtgcaaatt

SEQ ID NO: 52187 - DNA, 19 bp, Homo sapiens
  siRNA target sequence for ILF2 (NM_004515.2,389-407).
gacaggtgggatcctataa

SEQ ID NO: 52188 - DNA, 19 bp, Homo sapiens
  siRNA target sequence for ILF2 (NM_004515.2,391-409).
caggtgggatcctataaaa

SEQ ID NO: 52189 - DNA, 19 bp, Homo sapiens
  siRNA target sequence for ILF2 (NM_004515.2,528-546).
ggatccttctgaagtttta

SEQ ID NO: 52190 - DNA, 19 bp, Homo sapiens
  siRNA target sequence for ILF2 (NM_004515.2,532-550).
ccttctgaagttttaacca

SEQ ID NO: 52191 - DNA, 19 bp, Homo sapiens
  siRNA target sequence for ILF2 (NM_004515.2,621-639).
gccacccaatcttcgaaaa

SEQ ID NO: 52192 - DNA, 19 bp, Homo sapiens
  siRNA target sequence for ILF2 (NM_004515.2,623-641).
cacccaatcttcgaaaact

SEQ ID NO: 52193 - DNA, 19 bp, Homo sapiens
  siRNA target sequence for ILF2 (NM_004515.2,649-667).
gaactccatttggatatca

SEQ ID NO: 52194 - DNA, 19 bp, Homo sapiens
  siRNA target sequence for ILF2 (NM_004515.2,654-672).
ccatttggatatcaaagta

SEQ ID NO: 52195 - DNA, 19 bp, Homo sapiens
  siRNA target sequence for ILF2 (NM_004515.2,705-723).
ccgctggttcgaggaaaat

SEQ ID NO: 52196 - DNA, 19 bp, Homo sapiens
  siRNA target sequence for ILF2 (NM_004515.2,728-746).
ctcagtccacagttaaagt

SEQ ID NO: 52197 - DNA, 19 bp, Homo sapiens
  siRNA target sequence for ILF2 (NM_004515.2,765-783).
ggacttgaggattcgtttt

SEQ ID NO: 52198 - DNA, 19 bp, Homo sapiens
  siRNA target sequence for ILF2 (NM_004515.2,768-786).
cttgaggattcgttttcct

SEQ ID NO: 52199 - DNA, 19 bp, Homo sapiens
  siRNA target sequence for ILF2 (NM_004515.2,819-837).
cctactaggccattatgct

SEQ ID NO: 52200 - DNA, 19 bp, Homo sapiens
  siRNA target sequence for ILF2 (NM_004515.2,827-845).
gccattatgctgtgatgaa

SEQ ID NO: 52201 - DNA, 19 bp, Homo sapiens
  siRNA target sequence for ILF2 (NM_004515.2,861-879).
gcctttggccctaaacgtt

SEQ ID NO: 52202 - DNA, 19 bp, Homo sapiens
  siRNA target sequence for ILF2 (NM_004515.2,957-975).
gagtggcaactttagagta

SEQ ID NO: 52203 - DNA, 19 bp, Homo sapiens
  siRNA target sequence for ILF2 (NM_004515.2,1000-1018).
caggacatggtctgctata

SEQ ID NO: 52204 - DNA, 19 bp, Homo sapiens
  siRNA target sequence for ILF2 (NM_004515.2,1080-1098).
gggtgatgccagctatctt

SEQ ID NO: 52205 - DNA, 19 bp, Homo sapiens
  siRNA target sequence for ILF2 (NM_004515.2,1115-1133).
cctgggatggagtgatagt

SEQ ID NO: 52206 - DNA, 19 bp, Homo sapiens
  siRNA target sequence for ILF2 (NM_004515.2,1116-1134).
ctgggatggagtgatagta

SEQ ID NO: 52207 - DNA, 19 bp, Homo sapiens
  siRNA target sequence for IMP-3 (NM_006547.2,308-326).
cccctcggacctagaaagt

SEQ ID NO: 52208 - DNA, 19 bp, Homo sapiens
  siRNA target sequence for IMP-3 (NM_006547.2,309-327).
ccctcggacctagaaagta

SEQ ID NO: 52209 - DNA, 19 bp, Homo sapiens
  siRNA target sequence for IMP-3 (NM_006547.2,310-328).
cctcggacctagaaagtat

SEQ ID NO: 52210 - DNA, 19 bp, Homo sapiens
  siRNA target sequence for IMP-3 (NM_006547.2,428-446).
cgaggcgctttcaggtaaa

SEQ ID NO: 52211 - DNA, 19 bp, Homo sapiens
  siRNA target sequence for IMP-3 (NM_006547.2,431-449).
ggcgctttcaggtaaaata

SEQ ID NO: 52212 - DNA, 19 bp, Homo sapiens
  siRNA target sequence for IMP-3 (NM_006547.2,433-451).
cgctttcaggtaaaataga

SEQ ID NO: 52213 - DNA, 19 bp, Homo sapiens
  siRNA target sequence for IMP-3 (NM_006547.2,455-473).
gcacgggaaacccatagaa

SEQ ID NO: 52214 - DNA, 19 bp, Homo sapiens
  siRNA target sequence for IMP-3 (NM_006547.2,458-476).
cgggaaacccatagaagtt

SEQ ID NO: 52215 - DNA, 19 bp, Homo sapiens
  siRNA target sequence for IMP-3 (NM_006547.2,497-515).
gcaaaggattcggaaactt

SEQ ID NO: 52216 - DNA, 19 bp, Homo sapiens
  siRNA target sequence for IMP-3 (NM_006547.2,502-520).
ggattcggaaacttcagat

SEQ ID NO: 52217 - DNA, 19 bp, Homo sapiens
  siRNA target sequence for IMP-3 (NM_006547.2,503-521).
gattcggaaacttcagata

SEQ ID NO: 52218 - DNA, 19 bp, Homo sapiens
  siRNA target sequence for IMP-3 (NM_006547.2,507-525).
cggaaacttcagatacgaa

SEQ ID NO: 52219 - DNA, 19 bp, Homo sapiens
  siRNA target sequence for IMP-3 (NM_006547.2,509-527).
gaaacttcagatacgaaat

SEQ ID NO: 52220 - DNA, 19 bp, Homo sapiens
  siRNA target sequence for IMP-3 (NM_006547.2,523-541).
gaaatatcccgcctcattt

SEQ ID NO: 52221 - DNA, 19 bp, Homo sapiens
  siRNA target sequence for IMP-3 (NM_006547.2,617-635).
ggaaactgcagttgtaaat

SEQ ID NO: 52222 - DNA, 19 bp, Homo sapiens
  siRNA target sequence for IMP-3 (NM_006547.2,661-679).
ctagacaagcactagacaa

SEQ ID NO: 52223 - DNA, 19 bp, Homo sapiens
  siRNA target sequence for IMP-3 (NM_006547.2,664-682).
gacaagcactagacaaact

SEQ ID NO: 52224 - DNA, 19 bp, Homo sapiens
  siRNA target sequence for IMP-3 (NM_006547.2,687-705).
ggatttcagttagagaatt

SEQ ID NO: 52225 - DNA, 19 bp, Homo sapiens
  siRNA target sequence for IMP-3 (NM_006547.2,709-727).
ccttgaaagtagcctatat

SEQ ID NO: 52226 - DNA, 19 bp, Homo sapiens
  siRNA target sequence for IMP-3 (NM_006547.2,828-846).
gtatccaagcagaaaccat

SEQ ID NO: 52227 - DNA, 19 bp, Homo sapiens
  siRNA target sequence for IMP-3 (NM_006547.2,833-851).
caagcagaaaccatgtgat

SEQ ID NO: 52228 - DNA, 19 bp, Homo sapiens
  siRNA target sequence for IMP-3 (NM_006547.2,889-907).
gagccatcataggaaaaga

SEQ ID NO: 52229 - DNA, 19 bp, Homo sapiens
  siRNA target sequence for IMP-3 (NM_006547.2,938-956).
gacccagtctaaaatcgat

SEQ ID NO: 52230 - DNA, 19 bp, Homo sapiens
  siRNA target sequence for IMP-3 (NM_006547.2,953-971).
cgatgtccaccgtaaagaa

SEQ ID NO: 52231 - DNA, 19 bp, Homo sapiens
  siRNA target sequence for IMP-3 (NM_006547.2,985-1003).
ctgagaagtcgattactat

SEQ ID NO: 52232 - DNA, 19 bp, Homo sapiens
  siRNA target sequence for IMP-3 (NM_006547.2,1021-1039).
gcacctctgcggcttgtaa

SEQ ID NO: 52233 - DNA, 19 bp, Homo sapiens
  siRNA target sequence for IMP-3 (NM_006547.2,1025-1043).
ctctgcggcttgtaagtct

SEQ ID NO: 52234 - DNA, 19 bp, Homo sapiens
  siRNA target sequence for IMP-3 (NM_006547.2,1027-1045).
ctgcggcttgtaagtctat

SEQ ID NO: 52235 - DNA, 19 bp, Homo sapiens
  siRNA target sequence for IMP-3 (NM_006547.2,1030-1048).
cggcttgtaagtctattct

SEQ ID NO: 52236 - DNA, 19 bp, Homo sapiens
  siRNA target sequence for IMP-3 (NM_006547.2,1042-1060).
ctattctggagattatgca

SEQ ID NO: 52237 - DNA, 19 bp, Homo sapiens
  siRNA target sequence for IMP-3 (NM_006547.2,1058-1076).
gcataaggaagctcaagat

SEQ ID NO: 52238 - DNA, 19 bp, Homo sapiens
  siRNA target sequence for IMP-3 (NM_006547.2,1068-1086).
gctcaagatataaaattca

SEQ ID NO: 52239 - DNA, 19 bp, Homo sapiens
  siRNA target sequence for IMP-3 (NM_006547.2,1092-1110).
gagatccccttgaagattt

SEQ ID NO: 52240 - DNA, 19 bp, Homo sapiens
  siRNA target sequence for IMP-3 (NM_006547.2,1103-1121).
gaagattttagctcataat

SEQ ID NO: 52241 - DNA, 19 bp, Homo sapiens
  siRNA target sequence for IMP-3 (NM_006547.2,1124-1142).
ctttgttggacgtcttatt

SEQ ID NO: 52242 - DNA, 19 bp, Homo sapiens
  siRNA target sequence for IMP-3 (NM_006547.2,1128-1146).
gttggacgtcttattggta

SEQ ID NO: 52243 - DNA, 19 bp, Homo sapiens
  siRNA target sequence for IMP-3 (NM_006547.2,1132-1150).
gacgtcttattggtaaaga

SEQ ID NO: 52244 - DNA, 19 bp, Homo sapiens
  siRNA target sequence for IMP-3 (NM_006547.2,1187-1205).
cactaaaatcacgatatct

SEQ ID NO: 52245 - DNA, 19 bp, Homo sapiens
  siRNA target sequence for IMP-3 (NM_006547.2,1214-1232).
ggaattgacgctgtataat

SEQ ID NO: 52246 - DNA, 19 bp, Homo sapiens
  siRNA target sequence for IMP-3 (NM_006547.2,1234-1252).
cagaacgcactattacagt

SEQ ID NO: 52247 - DNA, 19 bp, Homo sapiens
  siRNA target sequence for IMP-3 (NM_006547.2,1236-1254).
gaacgcactattacagtta

SEQ ID NO: 52248 - DNA, 19 bp, Homo sapiens
  siRNA target sequence for IMP-3 (NM_006547.2,1301-1319).
gaaaatcagggagtcttat

SEQ ID NO: 52249 - DNA, 19 bp, Homo sapiens
  siRNA target sequence for IMP-3 (NM_006547.2,1307-1325).
cagggagtcttatgaaaat

SEQ ID NO: 52250 - DNA, 19 bp, Homo sapiens
  siRNA target sequence for IMP-3 (NM_006547.2,1450-1468).
ctccctacccgcagtttga

SEQ ID NO: 52251 - DNA, 19 bp, Homo sapiens
  siRNA target sequence for IMP-3 (NM_006547.2,1480-1498).
cggagactgttcatctgtt

SEQ ID NO: 52252 - DNA, 19 bp, Homo sapiens
  siRNA target sequence for IMP-3 (NM_006547.2,1496-1514).
gtttatcccagctctatca

SEQ ID NO: 52253 - DNA, 19 bp, Homo sapiens
  siRNA target sequence for KHDRBS3 (NM_006558.1,469-487).
cctggtgaaccaagaaata

SEQ ID NO: 52254 - DNA, 19 bp, Homo sapiens
  siRNA target sequence for KHDRBS3 (NM_006558.1,533-551).
gatgtggtgattaataaga

SEQ ID NO: 52255 - DNA, 19 bp, Homo sapiens
  siRNA target sequence for KHDRBS3 (NM_006558.1,559-577).
gctgggacagaaagtgtta

SEQ ID NO: 52256 - DNA, 19 bp, Homo sapiens
  siRNA target sequence for KHDRBS3 (NM_006558.1,562-580).
gggacagaaagtgttaatt

SEQ ID NO: 52257 - DNA, 19 bp, Homo sapiens
  siRNA target sequence for KHDRBS3 (NM_006558.1,590-608).
cagttccctaagttcaact

SEQ ID NO: 52258 - DNA, 19 bp, Homo sapiens
  siRNA target sequence for KHDRBS3 (NM_006558.1,604-622).
caactttgtggggaaactt

SEQ ID NO: 52259 - DNA, 19 bp, Homo sapiens
  siRNA target sequence for KHDRBS3 (NM_006558.1,627-645).
gtccacgtggcaattctct

SEQ ID NO: 52260 - DNA, 19 bp, Homo sapiens
  siRNA target sequence for KHDRBS3 (NM_006558.1,642-660).
ctctgaagcgtttacaaga

SEQ ID NO: 52261 - DNA, 19 bp, Homo sapiens
  siRNA target sequence for KHDRBS3 (NM_006558.1,646-664).
gaagcgtttacaagaagaa

SEQ ID NO: 52262 - DNA, 19 bp, Homo sapiens
  siRNA target sequence for KHDRBS3 (NM_006558.1,856-874).
cctcatccctgattataat

SEQ ID NO: 52263 - DNA, 19 bp, Homo sapiens
  siRNA target sequence for KHDRBS3 (NM_006558.1,859-877).
catccctgattataatgat

SEQ ID NO: 52264 - DNA, 19 bp, Homo sapiens
  siRNA target sequence for KHDRBS3 (NM_006558.1,1029-1047).
ggccagttggagttgtagt

SEQ ID NO: 52265 - DNA, 19 bp, Homo sapiens
  siRNA target sequence for KHDRBS3 (NM_006558.1,1173-1191).
ccccgacacaagagactta

SEQ ID NO: 52266 - DNA, 19 bp, Homo sapiens
  siRNA target sequence for KHDRBS3 (NM_006558.1,1174-1192).
cccgacacaagagacttat

SEQ ID NO: 52267 - DNA, 19 bp, Homo sapiens
  siRNA target sequence for KHDRBS3 (NM_006558.1,1177-1195).
gacacaagagacttatgga

SEQ ID NO: 52268 - DNA, 19 bp, Homo sapiens
  siRNA target sequence for KHDRBS3 (NM_006558.1,1221-1239).
gcactgcttatgatgaaca

SEQ ID NO: 52269 - DNA, 19 bp, Homo sapiens
  siRNA target sequence for KHDRBS3 (NM_006558.1,1232-1250).
gatgaacagagttatgatt

SEQ ID NO: 52270 - DNA, 19 bp, Homo sapiens
  siRNA target sequence for KHDRBS3 (NM_006558.1,1284-1302).
gtggtgctgattactatga

SEQ ID NO: 52271 - DNA, 19 bp, Homo sapiens
  siRNA target sequence for KHDRBS3 (NM_006558.1,1318-1336).
cagtgaggagacttatgat

SEQ ID NO: 52272 - DNA, 19 bp, Homo sapiens
  siRNA target sequence for KHDRBS3 (NM_006558.1,1346-1364).
caagaagagtggactaact

SEQ ID NO: 52273 - DNA, 19 bp, Homo sapiens
  siRNA target sequence for KHDRBS3 (NM_006558.1,1349-1367).
gaagagtggactaactcaa

SEQ ID NO: 52274 - DNA, 19 bp, Homo sapiens
  siRNA target sequence for KHDRBS3 (NM_006558.1,1415-1433).
cagccatatggcagatact

SEQ ID NO: 52275 - DNA, 19 bp, Homo sapiens
  siRNA target sequence for KIAA0116 (NM_015004.2,266-284).
ccagtgctacccctgaatt

SEQ ID NO: 52276 - DNA, 19 bp, Homo sapiens
  siRNA target sequence for KIAA0116 (NM_015004.2,269-287).
gtgctacccctgaatttga

SEQ ID NO: 52277 - DNA, 19 bp, Homo sapiens
  siRNA target sequence for KIAA0116 (NM_015004.2,327-345).
caccctctatcggatattt

SEQ ID NO: 52278 - DNA, 19 bp, Homo sapiens
  siRNA target sequence for KIAA0116 (NM_015004.2,329-347).
ccctctatcggatatttaa

SEQ ID NO: 52279 - DNA, 19 bp, Homo sapiens
  siRNA target sequence for KIAA0116 (NM_015004.2,331-349).
ctctatcggatatttaaca

SEQ ID NO: 52280 - DNA, 19 bp, Homo sapiens
  siRNA target sequence for KIAA0116 (NM_015004.2,333-351).
ctatcggatatttaacaat

SEQ ID NO: 52281 - DNA, 19 bp, Homo sapiens
  siRNA target sequence for KIAA0116 (NM_015004.2,477-495).
ggctgctctcttcaataca

SEQ ID NO: 52282 - DNA, 19 bp, Homo sapiens
  siRNA target sequence for KIAA0116 (NM_015004.2,478-496).
gctgctctcttcaatacaa

SEQ ID NO: 52283 - DNA, 19 bp, Homo sapiens
  siRNA target sequence for KIAA0116 (NM_015004.2,533-551).
ggtcgaaggacattgaatt

SEQ ID NO: 52284 - DNA, 19 bp, Homo sapiens
  siRNA target sequence for KIAA0116 (NM_015004.2,537-555).
gaaggacattgaattgtca

SEQ ID NO: 52285 - DNA, 19 bp, Homo sapiens
  siRNA target sequence for KIAA0116 (NM_015004.2,578-596).
gactaagtgtggagaatgt

SEQ ID NO: 52286 - DNA, 19 bp, Homo sapiens
  siRNA target sequence for KIAA0117 (NM_015014.1,139-157).
caggtcgccagtagcttat

SEQ ID NO: 52287 - DNA, 19 bp, Homo sapiens
  siRNA target sequence for KIAA0117 (NM_015014.1,141-159).
ggtcgccagtagcttattt

SEQ ID NO: 52288 - DNA, 19 bp, Homo sapiens
  siRNA target sequence for KIAA0117 (NM_015014.1,243-261).
cgtgcctgtgcctaaacaa

SEQ ID NO: 52289 - DNA, 19 bp, Homo sapiens
  siRNA target sequence for KIAA0117 (NM_015014.1,364-382).
cacactaacgcagaaaaaa

SEQ ID NO: 52290 - DNA, 19 bp, Homo sapiens
  siRNA target sequence for KIAA0117 (NM_015014.1,404-422).
ctctagcgagtgctgattt

SEQ ID NO: 52291 - DNA, 19 bp, Homo sapiens
  siRNA target sequence for KIAA0117 (NM_015014.1,410-428).
cgagtgctgatttagaaga

SEQ ID NO: 52292 - DNA, 19 bp, Homo sapiens
  siRNA target sequence for KIAA0117 (NM_015014.1,467-485).
ctcaacctggtgttaaagt

SEQ ID NO: 52293 - DNA, 19 bp, Homo sapiens
  siRNA target sequence for KIAA0117 (NM_015014.1,519-537).
cacagttgtcagtcaaaga

SEQ ID NO: 52294 - DNA, 19 bp, Homo sapiens
  siRNA target sequence for KIAA0117 (NM_015014.1,598-616).
gggaatttgcctgttacat

SEQ ID NO: 52295 - DNA, 19 bp, Homo sapiens
  siRNA target sequence for KIAA0117 (NM_015014.1,695-713).
cagagggaacgctatccaa

SEQ ID NO: 52296 - DNA, 19 bp, Homo sapiens
  siRNA target sequence for KIAA0117 (NM_015014.1,697-715).
gagggaacgctatccaaaa

SEQ ID NO: 52297 - DNA, 19 bp, Homo sapiens
  siRNA target sequence for KIAA0117 (NM_015014.1,700-718).
ggaacgctatccaaaaagt

SEQ ID NO: 52298 - DNA, 19 bp, Homo sapiens
  siRNA target sequence for KIAA0117 (NM_015014.1,701-719).
gaacgctatccaaaaagtt

SEQ ID NO: 52299 - DNA, 19 bp, Homo sapiens
  siRNA target sequence for KIAA0427 (NM_014772.1,590-608).
ccaacaccttcgattcctt

SEQ ID NO: 52300 - DNA, 19 bp, Homo sapiens
  siRNA target sequence for KIAA0427 (NM_014772.1,843-861).
gttccgcaggaggagaaat

SEQ ID NO: 52301 - DNA, 19 bp, Homo sapiens
  siRNA target sequence for KIAA0427 (NM_014772.1,947-965).
gggaccaccagaaatccta

SEQ ID NO: 52302 - DNA, 19 bp, Homo sapiens
  siRNA target sequence for KIAA0427 (NM_014772.1,1238-1256).
ggccagaggttgagacaaa

SEQ ID NO: 52303 - DNA, 19 bp, Homo sapiens
  siRNA target sequence for KIAA0427 (NM_014772.1,1249-1267).
gagacaaaacgtaaagaca

SEQ ID NO: 52304 - DNA, 19 bp, Homo sapiens
  siRNA target sequence for KIAA0427 (NM_014772.1,1253-1271).
caaaacgtaaagacagtat

SEQ ID NO: 52305 - DNA, 19 bp, Homo sapiens
  siRNA target sequence for KIAA0427 (NM_014772.1,1335-1353).
gcggcgaaggctaaaggaa

SEQ ID NO: 52306 - DNA, 19 bp, Homo sapiens
  siRNA target sequence for KIAA0427 (NM_014772.1,1336-1354).
cggcgaaggctaaaggaaa

SEQ ID NO: 52307 - DNA, 19 bp, Homo sapiens
  siRNA target sequence for KIAA0427 (NM_014772.1,1337-1355).
ggcgaaggctaaaggaaaa

SEQ ID NO: 52308 - DNA, 19 bp, Homo sapiens
  siRNA target sequence for KIAA0427 (NM_014772.1,1382-1400).
ctccccagcagaacaagat

SEQ ID NO: 52309 - DNA, 19 bp, Homo sapiens
  siRNA target sequence for KIAA0427 (NM_014772.1,1519-1537).
gagatcgtgcgcacaatct

SEQ ID NO: 52310 - DNA, 19 bp, Homo sapiens
  siRNA target sequence for KIAA0427 (NM_014772.1,2035-2053).
cccatcacgcagtactaca

SEQ ID NO: 52311 - DNA, 19 bp, Homo sapiens
  siRNA target sequence for KIAA0427 (NM_014772.1,2036-2054).
ccatcacgcagtactacaa

SEQ ID NO: 52312 - DNA, 19 bp, Homo sapiens
  siRNA target sequence for KIAA0682 (NM_014852.1,84-102).
cgcgactgatcgtgaagaa

SEQ ID NO: 52313 - DNA, 19 bp, Homo sapiens
  siRNA target sequence for KIAA0682 (NM_014852.1,85-103).
gcgactgatcgtgaagaat

SEQ ID NO: 52314 - DNA, 19 bp, Homo sapiens
  siRNA target sequence for KIAA0682 (NM_014852.1,199-217).
gttccgcaagtttggtttt

SEQ ID NO: 52315 - DNA, 19 bp, Homo sapiens
  siRNA target sequence for KIAA0682 (NM_014852.1,399-417).
ctactccagaaattaagaa

SEQ ID NO: 52316 - DNA, 19 bp, Homo sapiens
  siRNA target sequence for KIAA0682 (NM_014852.1,975-993).
ggggagccccgttcaatgt

SEQ ID NO: 52317 - DNA, 19 bp, Homo sapiens
  siRNA target sequence for KIAA0682 (NM_014852.1,1037-1055).
gtggccattcgaattgtga

SEQ ID NO: 52318 - DNA, 19 bp, Homo sapiens
  siRNA target sequence for KIAA0682 (NM_014852.1,1041-1059).
ccattcgaattgtgagaaa

SEQ ID NO: 52319 - DNA, 19 bp, Homo sapiens
  siRNA target sequence for KIAA0682 (NM_014852.1,1056-1074).
gaaacgctcatgggaataa

SEQ ID NO: 52320 - DNA, 19 bp, Homo sapiens
  siRNA target sequence for KIAA0682 (NM_014852.1,1060-1078).
cgctcatgggaataaaaca

SEQ ID NO: 52321 - DNA, 19 bp, Homo sapiens
  siRNA target sequence for KIAA0682 (NM_014852.1,1208-1226).
ccaaagaataccaccaaat

SEQ ID NO: 52322 - DNA, 19 bp, Homo sapiens
  siRNA target sequence for KIAA0682 (NM_014852.1,1553-1571).
ggatcgtcgtcctacaaga

SEQ ID NO: 52323 - DNA, 19 bp, Homo sapiens
  siRNA target sequence for KIAA0682 (NM_014852.1,1554-1572).
gatcgtcgtcctacaagaa

SEQ ID NO: 52324 - DNA, 19 bp, Homo sapiens
  siRNA target sequence for KIAA0682 (NM_014852.1,1613-1631).
cacaactggaacacactat

SEQ ID NO: 52325 - DNA, 19 bp, Homo sapiens
  siRNA target sequence for KIAA0682 (NM_014852.1,1658-1676).
gccatcgcacagaagtaca

SEQ ID NO: 52326 - DNA, 19 bp, Homo sapiens
  siRNA target sequence for KIAA0682 (NM_014852.1,1763-1781).
gaagtgcggcgttttctca

SEQ ID NO: 52327 - DNA, 19 bp, Homo sapiens
  siRNA target sequence for KIAA0682 (NM_014852.1,1770-1788).
ggcgttttctcatagacaa

SEQ ID NO: 52328 - DNA, 19 bp, Homo sapiens
  siRNA target sequence for KIAA0682 (NM_014852.1,1998-2016).
ggcatctggcctattccaa

SEQ ID NO: 52329 - DNA, 19 bp, Homo sapiens
  siRNA target sequence for KIAA0682 (NM_014852.1,2260-2278).
cccaggatgtactctgttt

SEQ ID NO: 52330 - DNA, 19 bp, Homo sapiens
  siRNA target sequence for KIAA0682 (NM_014852.1,2264-2282).
ggatgtactctgtttatta

SEQ ID NO: 52331 - DNA, 19 bp, Homo sapiens
  siRNA target sequence for KIAA0682 (NM_014852.1,2382-2400).
caggagtgctcctttccat

SEQ ID NO: 52332 - DNA, 19 bp, Homo sapiens
  siRNA target sequence for KIAA0682 (NM_014852.1,2393-2411).
ctttccatggggtttggat

SEQ ID NO: 52333 - DNA, 19 bp, Homo sapiens
  siRNA target sequence for KIAA0682 (NM_014852.1,2637-2655).
gcacctttggggagttgaa

SEQ ID NO: 52334 - DNA, 19 bp, Homo sapiens
  siRNA target sequence for KIAA0682 (NM_014852.1,2658-2676).
cggtccgcctgccaaagaa

SEQ ID NO: 52335 - DNA, 19 bp, Homo sapiens
  siRNA target sequence for KIAA0682 (NM_016196.1,1342-1360).
gaagctcttctccaaatat

SEQ ID NO: 52336 - DNA, 19 bp, Homo sapiens
  siRNA target sequence for KIAA0682 (NM_016196.1,1939-1957).
gccagagggcggaatcact

SEQ ID NO: 52337 - DNA, 19 bp, Homo sapiens
  siRNA target sequence for KIS (NM_144624.1,418-436).
gaaacatcgtgactttgta

SEQ ID NO: 52338 - DNA, 19 bp, Homo sapiens
  siRNA target sequence for KIS (NM_144624.1,428-446).
gactttgtatggagtgttt

SEQ ID NO: 52339 - DNA, 19 bp, Homo sapiens
  siRNA target sequence for KIS (NM_144624.1,441-459).
gtgtttacaatccactttt

SEQ ID NO: 52340 - DNA, 19 bp, Homo sapiens
  siRNA target sequence for KIS (NM_144624.1,510-528).
gtttcggaattgctcttat

SEQ ID NO: 52341 - DNA, 19 bp, Homo sapiens
  siRNA target sequence for KIS (NM_144624.1,547-565).
gttccatgtggatgataca

SEQ ID NO: 52342 - DNA, 19 bp, Homo sapiens
  siRNA target sequence for KIS (NM_144624.1,571-589).
gtgcccgagatgttttgga

SEQ ID NO: 52343 - DNA, 19 bp, Homo sapiens
  siRNA target sequence for KIS (NM_144624.1,633-651).
ctcaaaccacgtaacatat

SEQ ID NO: 52344 - DNA, 19 bp, Homo sapiens
  siRNA target sequence for KIS (NM_144624.1,658-676).
gtgcagagaatgaatgttt

SEQ ID NO: 52345 - DNA, 19 bp, Homo sapiens
  siRNA target sequence for KIS (NM_144624.1,708-726).
gaaggcaatcaggatgtaa

SEQ ID NO: 52346 - DNA, 19 bp, Homo sapiens
  siRNA target sequence for KIS (NM_144624.1,712-730).
gcaatcaggatgtaaagta

SEQ ID NO: 52347 - DNA, 19 bp, Homo sapiens
  siRNA target sequence for KIS (NM_144624.1,720-738).
gatgtaaagtatattcaga

SEQ ID NO: 52348 - DNA, 19 bp, Homo sapiens
  siRNA target sequence for KIS (NM_144624.1,789-807).
gctggcctgcagagtgata

SEQ ID NO: 52349 - DNA, 19 bp, Homo sapiens
  siRNA target sequence for KIS (NM_144624.1,959-977).
ggtgaatgccgcaattcca

SEQ ID NO: 52350 - DNA, 19 bp, Homo sapiens
  siRNA target sequence for KIS (NM_144624.1,976-994).
cagcctatcacctaagaga

SEQ ID NO: 52351 - DNA, 19 bp, Homo sapiens
  siRNA target sequence for KIS (NM_144624.1,984-1002).
cacctaagagaccttatca

SEQ ID NO: 52352 - DNA, 19 bp, Homo sapiens
  siRNA target sequence for KIS (NM_144624.1,986-1004).
cctaagagaccttatcaaa

SEQ ID NO: 52353 - DNA, 19 bp, Homo sapiens
  siRNA target sequence for KIS (NM_144624.1,1030-1048).
gaagaattcctgctgaaat

SEQ ID NO: 52354 - DNA, 19 bp, Homo sapiens
  siRNA target sequence for KIS (NM_144624.1,1051-1069).
cattgtgcagcccattctt

SEQ ID NO: 52355 - DNA, 19 bp, Homo sapiens
  siRNA target sequence for KIS (NM_144624.1,1058-1076).
cagcccattctttagcatt

SEQ ID NO: 52356 - DNA, 19 bp, Homo sapiens
  siRNA target sequence for KIS (NM_144624.1,1078-1096).
cttttgcccctcatattga

SEQ ID NO: 52357 - DNA, 19 bp, Homo sapiens
  siRNA target sequence for KIS (NM_144624.1,1142-1160).
gctggatgatgattatctt

SEQ ID NO: 52358 - DNA, 19 bp, Homo sapiens
  siRNA target sequence for KIS (NM_175866.1,904-922).
cagttctgctattattgat

SEQ ID NO: 52359 - DNA, 19 bp, Homo sapiens
  siRNA target sequence for KIS (NM_175866.1,906-924).
gttctgctattattgatca

SEQ ID NO: 52360 - DNA, 19 bp, Homo sapiens
  siRNA target sequence for KIS (NM_175866.1,1212-1230).
cagtggtatctctacttgt

SEQ ID NO: 52361 - DNA, 19 bp, Homo sapiens
  siRNA target sequence for KIS (NM_175866.1,1248-1266).
gcagaggacaagtctttgt

SEQ ID NO: 52362 - DNA, 19 bp, Homo sapiens
  siRNA target sequence for KIS (NM_175866.1,1249-1267).
cagaggacaagtctttgtt

SEQ ID NO: 52363 - DNA, 19 bp, Homo sapiens
  siRNA target sequence for KIS (NM_175866.1,1251-1269).
gaggacaagtctttgttga

SEQ ID NO: 52364 - DNA, 19 bp, Homo sapiens
  siRNA target sequence for KIS (NM_175866.1,1261-1279).
ctttgttgagtatgcaaat

SEQ ID NO: 52365 - DNA, 19 bp, Homo sapiens
  siRNA target sequence for KIS (NM_175866.1,1275-1293).
caaatgctggtgattccaa

SEQ ID NO: 52366 - DNA, 19 bp, Homo sapiens
  siRNA target sequence for KIS (NM_175866.1,1290-1308).
ccaaagctgcgcagaaatt

SEQ ID NO: 52367 - DNA, 19 bp, Homo sapiens
  siRNA target sequence for KIS (NM_175866.1,1295-1313).
gctgcgcagaaattactga

SEQ ID NO: 52368 - DNA, 19 bp, Homo sapiens
  siRNA target sequence for KIS (NM_175866.1,1312-1330).
gactggaaggatgtttgat

SEQ ID NO: 52369 - DNA, 19 bp, Homo sapiens
  siRNA target sequence for KIS (NM_175866.1,1358-1376).
ccgctgagtgcctacaaga

SEQ ID NO: 52370 - DNA, 19 bp, Homo sapiens
  siRNA target sequence for KIS (NM_175866.1,1368-1386).
cctacaagaggggatatct

SEQ ID NO: 52371 - DNA, 19 bp, Homo sapiens
  siRNA target sequence for KIS (NM_175866.1,1372-1390).
caagaggggatatctgtat

SEQ ID NO: 52372 - DNA, 19 bp, Homo sapiens
  siRNA target sequence for LGTN (NM_006893.1,212-230).
ccccacccttggaactgat

SEQ ID NO: 52373 - DNA, 19 bp, Homo sapiens
  siRNA target sequence for LGTN (NM_006893.1,217-235).
cccttggaactgatcaagt

SEQ ID NO: 52374 - DNA, 19 bp, Homo sapiens
  siRNA target sequence for LGTN (NM_006893.1,393-411).
gatcttctgccaaccttta

SEQ ID NO: 52375 - DNA, 19 bp, Homo sapiens
  siRNA target sequence for LGTN (NM_006893.1,399-417).
ctgccaacctttacaacat

SEQ ID NO: 52376 - DNA, 19 bp, Homo sapiens
  siRNA target sequence for LGTN (NM_006893.1,421-439).
ctctggtgctcgagaaact

SEQ ID NO: 52377 - DNA, 19 bp, Homo sapiens
  siRNA target sequence for LGTN (NM_006893.1,512-530).
cgacctctgtgccatttct

SEQ ID NO: 52378 - DNA, 19 bp, Homo sapiens
  siRNA target sequence for LGTN (NM_006893.1,892-910).
gcaaaacgcttcaagaaca

SEQ ID NO: 52379 - DNA, 19 bp, Homo sapiens
  siRNA target sequence for LGTN (NM_006893.1,947-965).
cttgaagtgccgagtcaaa

SEQ ID NO: 52380 - DNA, 19 bp, Homo sapiens
  siRNA target sequence for LGTN (NM_006893.1,999-1017).
cttggcagccacatgttct

SEQ ID NO: 52381 - DNA, 19 bp, Homo sapiens
  siRNA target sequence for LGTN (NM_006893.1,1032-1050).
ggacgacaactggacataa

SEQ ID NO: 52382 - DNA, 19 bp, Homo sapiens
  siRNA target sequence for LGTN (NM_006893.1,1033-1051).
gacgacaactggacataaa

SEQ ID NO: 52383 - DNA, 19 bp, Homo sapiens
  siRNA target sequence for LGTN (NM_006893.1,1060-1078).
gctacaaaaagctctctaa

SEQ ID NO: 52384 - DNA, 19 bp, Homo sapiens
  siRNA target sequence for LGTN (NM_006893.1,1246-1264).
cctatcaccctccagatat

SEQ ID NO: 52385 - DNA, 19 bp, Homo sapiens
  siRNA target sequence for LGTN (NM_006893.1,1247-1265).
ctatcaccctccagatata

SEQ ID NO: 52386 - DNA, 19 bp, Homo sapiens
  siRNA target sequence for LGTN (NM_006893.1,1353-1371).
gtccgaacgatcgtcatta

SEQ ID NO: 52387 - DNA, 19 bp, Homo sapiens
  siRNA target sequence for LGTN (NM_006893.1,1356-1374).
cgaacgatcgtcattaact

SEQ ID NO: 52388 - DNA, 19 bp, Homo sapiens
  siRNA target sequence for LGTN (NM_006893.1,1357-1375).
gaacgatcgtcattaacta

SEQ ID NO: 52389 - DNA, 19 bp, Homo sapiens
  siRNA target sequence for LGTN (NM_006893.1,1367-1385).
cattaactacgccaagaaa

SEQ ID NO: 52390 - DNA, 19 bp, Homo sapiens
  siRNA target sequence for LGTN (NM_006893.1,1395-1413).
gttgatgcagacaacaaaa

SEQ ID NO: 52391 - DNA, 19 bp, Homo sapiens
  siRNA target sequence for LGTN (NM_006893.1,1554-1572).
ggacaagagcccattgtga

SEQ ID NO: 52392 - DNA, 19 bp, Homo sapiens
  siRNA target sequence for LGTN (NM_006893.1,1555-1573).
gacaagagcccattgtgaa

SEQ ID NO: 52393 - DNA, 19 bp, Homo sapiens
  siRNA target sequence for LGTN (NM_006893.1,1579-1597).
ggagaatctgtccaattga

SEQ ID NO: 52394 - DNA, 19 bp, Homo sapiens
  siRNA target sequence for LGTN (NM_006893.1,1582-1600).
gaatctgtccaattgacat

SEQ ID NO: 52395 - DNA, 19 bp, Homo sapiens
  siRNA target sequence for LGTN (NM_006893.1,1608-1626).
gcacaaagagcgtctaata

SEQ ID NO: 52396 - DNA, 19 bp, Homo sapiens
  siRNA target sequence for LGTN (NM_006893.1,1609-1627).
cacaaagagcgtctaataa

SEQ ID NO: 52397 - DNA, 19 bp, Homo sapiens
  siRNA target sequence for LGTN (NM_006893.1,1615-1633).
gagcgtctaataaaaaggt

SEQ ID NO: 52398 - DNA, 19 bp, Homo sapiens
  siRNA target sequence for LGTN (NM_006893.1,1787-1805).
cctcggctggctattgctt

SEQ ID NO: 52399 - DNA, 19 bp, Homo sapiens
  siRNA target sequence for LGTN (NM_006893.1,1796-1814).
gctattgcttgaagagtat

SEQ ID NO: 52400 - DNA, 19 bp, Homo sapiens
  siRNA target sequence for LGTN (NM_006893.1,1811-1829).
gtatcagctccctcgaaaa

SEQ ID NO: 52401 - DNA, 19 bp, Homo sapiens
  siRNA target sequence for LOC91801 (NM_138775.1,111-129).
gacagcaaccatcaaagta

SEQ ID NO: 52402 - DNA, 19 bp, Homo sapiens
  siRNA target sequence for LOC91801 (NM_138775.1,208-226).
gcattgagacagtatccta

SEQ ID NO: 52403 - DNA, 19 bp, Homo sapiens
  siRNA target sequence for LOC91801 (NM_138775.1,290-308).
gctcccggttttagagaaa

SEQ ID NO: 52404 - DNA, 19 bp, Homo sapiens
  siRNA target sequence for LOC91801 (NM_138775.1,291-309).
ctcccggttttagagaaat

SEQ ID NO: 52405 - DNA, 19 bp, Homo sapiens
  siRNA target sequence for LOC91801 (NM_138775.1,403-421).
ccctcaatggaaaagaagt

SEQ ID NO: 52406 - DNA, 19 bp, Homo sapiens
  siRNA target sequence for LOC91801 (NM_138775.1,511-529).
caggactcatggtagtaga

SEQ ID NO: 52407 - DNA, 19 bp, Homo sapiens
  siRNA target sequence for LOC91801 (NM_138775.1,514-532).
gactcatggtagtagaaga

SEQ ID NO: 52408 - DNA, 19 bp, Homo sapiens
  siRNA target sequence for LOC91801 (NM_138775.1,573-591).
gttgattggacagaagata

SEQ ID NO: 52409 - DNA, 19 bp, Homo sapiens
  siRNA target sequence for LOC91801 (NM_138775.1,581-599).
gacagaagatacagacaat

SEQ ID NO: 52410 - DNA, 19 bp, Homo sapiens
  siRNA target sequence for LOC91801 (NM_138775.1,594-612).
gacaatcaaaactctcaaa

SEQ ID NO: 52411 - DNA, 19 bp, Homo sapiens
  siRNA target sequence for MATR3 (NM_018834.3,377-395).
cctgtctgcggcaggaata

SEQ ID NO: 52412 - DNA, 19 bp, Homo sapiens
  siRNA target sequence for MATR3 (NM_018834.3,411-429).
gctacccagtctttaagta

SEQ ID NO: 52413 - DNA, 19 bp, Homo sapiens
  siRNA target sequence for MATR3 (NM_018834.3,412-430).
ctacccagtctttaagtat

SEQ ID NO: 52414 - DNA, 19 bp, Homo sapiens
  siRNA target sequence for MATR3 (NM_018834.3,463-481).
ctgcacgccttgctagttt

SEQ ID NO: 52415 - DNA, 19 bp, Homo sapiens
  siRNA target sequence for MATR3 (NM_018834.3,465-483).
gcacgccttgctagtttaa

SEQ ID NO: 52416 - DNA, 19 bp, Homo sapiens
  siRNA target sequence for MATR3 (NM_018834.3,468-486).
cgccttgctagtttaatga

SEQ ID NO: 52417 - DNA, 19 bp, Homo sapiens
  siRNA target sequence for MATR3 (NM_018834.3,489-507).
cttggaatgagttcttcat

SEQ ID NO: 52418 - DNA, 19 bp, Homo sapiens
  siRNA target sequence for MATR3 (NM_018834.3,497-515).
gagttcttcattgaatcaa

SEQ ID NO: 52419 - DNA, 19 bp, Homo sapiens
  siRNA target sequence for MATR3 (NM_018834.3,536-554).
gtcttctgctagtacttct

SEQ ID NO: 52420 - DNA, 19 bp, Homo sapiens
  siRNA target sequence for MATR3 (NM_018834.3,556-574).
cccataatttgcagtctat

SEQ ID NO: 52421 - DNA, 19 bp, Homo sapiens
  siRNA target sequence for MATR3 (NM_018834.3,557-575).
ccataatttgcagtctata

SEQ ID NO: 52422 - DNA, 19 bp, Homo sapiens
  siRNA target sequence for MATR3 (NM_018834.3,558-576).
cataatttgcagtctatat

SEQ ID NO: 52423 - DNA, 19 bp, Homo sapiens
  siRNA target sequence for MATR3 (NM_018834.3,630-648).
gcagaccaggccagtaaca

SEQ ID NO: 52424 - DNA, 19 bp, Homo sapiens
  siRNA target sequence for MATR3 (NM_018834.3,631-649).
cagaccaggccagtaacat

SEQ ID NO: 52425 - DNA, 19 bp, Homo sapiens
  siRNA target sequence for MATR3 (NM_018834.3,633-651).
gaccaggccagtaacattt

SEQ ID NO: 52426 - DNA, 19 bp, Homo sapiens
  siRNA target sequence for MATR3 (NM_018834.3,697-715).
gttatccagaggacaagat

SEQ ID NO: 52427 - DNA, 19 bp, Homo sapiens
  siRNA target sequence for MATR3 (NM_018834.3,741-759).
cttctacagcttaaaagga

SEQ ID NO: 52428 - DNA, 19 bp, Homo sapiens
  siRNA target sequence for MATR3 (NM_018834.3,782-800).
cttgagttatggtagagat

SEQ ID NO: 52429 - DNA, 19 bp, Homo sapiens
  siRNA target sequence for MATR3 (NM_018834.3,903-921).
ctcaacccagtgcttgatt

SEQ ID NO: 52430 - DNA, 19 bp, Homo sapiens
  siRNA target sequence for MATR3 (NM_018834.3,930-948).
ggaagtcgttctcaagaat

SEQ ID NO: 52431 - DNA, 19 bp, Homo sapiens
  siRNA target sequence for MATR3 (NM_018834.3,949-967).
ctggttattatgacagaat

SEQ ID NO: 52432 - DNA, 19 bp, Homo sapiens
  siRNA target sequence for MATR3 (NM_018834.3,1026-1044).
ggtgagacctcgcataact

SEQ ID NO: 52433 - DNA, 19 bp, Homo sapiens
  siRNA target sequence for MATR3 (NM_018834.3,1027-1045).
gtgagacctcgcataacta

SEQ ID NO: 52434 - DNA, 19 bp, Homo sapiens
  siRNA target sequence for MATR3 (NM_018834.3,1031-1049).
gacctcgcataactatcat

SEQ ID NO: 52435 - DNA, 19 bp, Homo sapiens
  siRNA target sequence for MATR3 (NM_018834.3,1033-1051).
cctcgcataactatcataa

SEQ ID NO: 52436 - DNA, 19 bp, Homo sapiens
  siRNA target sequence for MATR3 (NM_018834.3,1036-1054).
cgcataactatcataaatt

SEQ ID NO: 52437 - DNA, 19 bp, Homo sapiens
  siRNA target sequence for MATR3 (NM_018834.3,1037-1055).
gcataactatcataaattt

SEQ ID NO: 52438 - DNA, 19 bp, Homo sapiens
  siRNA target sequence for MATR3 (NM_018834.3,1131-1149).
gctcctccaagtagcaata

SEQ ID NO: 52439 - DNA, 19 bp, Homo sapiens
  siRNA target sequence for MATR3 (NM_018834.3,1132-1150).
ctcctccaagtagcaatat

SEQ ID NO: 52440 - DNA, 19 bp, Homo sapiens
  siRNA target sequence for MATR3 (NM_018834.3,1135-1153).
ctccaagtagcaatattga

SEQ ID NO: 52441 - DNA, 19 bp, Homo sapiens
  siRNA target sequence for MATR3 (NM_018834.3,1185-1203).
ccccatctgtgctctatat

SEQ ID NO: 52442 - DNA, 19 bp, Homo sapiens
  siRNA target sequence for MATR3 (NM_018834.3,1206-1224).
gatttgccagttcattcta

SEQ ID NO: 52443 - DNA, 19 bp, Homo sapiens
  siRNA target sequence for MATR3 (NM_018834.3,1232-1250).
gtggagtcaacatatcaat

SEQ ID NO: 52444 - DNA, 19 bp, Homo sapiens
  siRNA target sequence for MATR3 (NM_018834.3,1330-1348).
caatgggtgatccattcat

SEQ ID NO: 52445 - DNA, 19 bp, Homo sapiens
  siRNA target sequence for MATR3 (NM_018834.3,1349-1367).
gttgcagcagtctacaaat

SEQ ID NO: 52446 - DNA, 19 bp, Homo sapiens
  siRNA target sequence for MATR3 (NM_018834.3,1507-1525).
gcagagttgttcacatcat

SEQ ID NO: 52447 - DNA, 19 bp, Homo sapiens
  siRNA target sequence for MATR3 (NM_018834.3,1536-1554).
cgagggaaaaacttgagat

SEQ ID NO: 52448 - DNA, 19 bp, Homo sapiens
  siRNA target sequence for MATR3 (NM_018834.3,1547-1565).
cttgagataccagctatta

SEQ ID NO: 52449 - DNA, 19 bp, Homo sapiens
  siRNA target sequence for MATR3 (NM_018834.3,1568-1586).
gctggtagaaccatttgga

SEQ ID NO: 52450 - DNA, 19 bp, Homo sapiens
  siRNA target sequence for MATR3 (NM_018834.3,1684-1702).
ccacaccagcgttagtatt

SEQ ID NO: 52451 - DNA, 19 bp, Homo sapiens
  siRNA target sequence for MATR3 (NM_018834.3,1685-1703).
cacaccagcgttagtattt

SEQ ID NO: 52452 - DNA, 19 bp, Homo sapiens
  siRNA target sequence for MATR3 (NM_018834.3,1796-1814).
gcttggacgtgtgatacat

SEQ ID NO: 52453 - DNA, 19 bp, Homo sapiens
  siRNA target sequence for MATR3 (NM_018834.3,2070-2088).
gatttactgaaaaaagata

SEQ ID NO: 52454 - DNA, 19 bp, Homo sapiens
  siRNA target sequence for MATR3 (NM_018834.3,2471-2489).
caagatcgaggaacttgat

SEQ ID NO: 52455 - DNA, 19 bp, Homo sapiens
  siRNA target sequence for MATR3 (NM_018834.3,2474-2492).
gatcgaggaacttgatcaa

SEQ ID NO: 52456 - DNA, 19 bp, Homo sapiens
  siRNA target sequence for MBNL1 (NM_021038.1,1499-1517).
cggccagacacggaatgta

SEQ ID NO: 52457 - DNA, 19 bp, Homo sapiens
  siRNA target sequence for MBNL1 (NM_021038.1,1500-1518).
ggccagacacggaatgtaa

SEQ ID NO: 52458 - DNA, 19 bp, Homo sapiens
  siRNA target sequence for MBNL1 (NM_021038.1,1501-1519).
gccagacacggaatgtaaa

SEQ ID NO: 52459 - DNA, 19 bp, Homo sapiens
  siRNA target sequence for MBNL1 (NM_021038.1,1503-1521).
cagacacggaatgtaaatt

SEQ ID NO: 52460 - DNA, 19 bp, Homo sapiens
  siRNA target sequence for MBNL1 (NM_021038.1,1507-1525).
cacggaatgtaaatttgca

SEQ ID NO: 52461 - DNA, 19 bp, Homo sapiens
  siRNA target sequence for MBNL1 (NM_021038.1,1523-1541).
gcacatccttcgaaaagct

SEQ ID NO: 52462 - DNA, 19 bp, Homo sapiens
  siRNA target sequence for MBNL1 (NM_021038.1,1533-1551).
cgaaaagctgccaagttga

SEQ ID NO: 52463 - DNA, 19 bp, Homo sapiens
  siRNA target sequence for MBNL1 (NM_021038.1,1568-1586).
gcctgctttgattcattga

SEQ ID NO: 52464 - DNA, 19 bp, Homo sapiens
  siRNA target sequence for MBNL1 (NM_021038.1,1569-1587).
cctgctttgattcattgaa

SEQ ID NO: 52465 - DNA, 19 bp, Homo sapiens
  siRNA target sequence for MBNL1 (NM_021038.1,1735-1753).
gcctggtgccccattacaa

SEQ ID NO: 52466 - DNA, 19 bp, Homo sapiens
  siRNA target sequence for MBNL1 (NM_021038.1,1751-1769).
caacccgtgccaatgtttt

SEQ ID NO: 52467 - DNA, 19 bp, Homo sapiens
  siRNA target sequence for MBNL1 (NM_021038.1,1755-1773).
ccgtgccaatgttttcagt

SEQ ID NO: 52468 - DNA, 19 bp, Homo sapiens
  siRNA target sequence for MBNL1 (NM_021038.1,1797-1815).
catcagcagccgcctttaa

SEQ ID NO: 52469 - DNA, 19 bp, Homo sapiens
  siRNA target sequence for MBNL1 (NM_021038.1,1819-1837).
ctatctgggacctgtttct

SEQ ID NO: 52470 - DNA, 19 bp, Homo sapiens
  siRNA target sequence for MBNL1 (NM_021038.1,2103-2121).
ctcgggaaaagtgcaaata

SEQ ID NO: 52471 - DNA, 19 bp, Homo sapiens
  siRNA target sequence for MBNL1 (NM_021038.1,2105-2123).
cgggaaaagtgcaaatact

SEQ ID NO: 52472 - DNA, 19 bp, Homo sapiens
  siRNA target sequence for MBNL1 (NM_021038.1,2106-2124).
gggaaaagtgcaaatactt

SEQ ID NO: 52473 - DNA, 19 bp, Homo sapiens
  siRNA target sequence for MBNL1 (NM_021038.1,2138-2156).
catttgcaagccaagatca

SEQ ID NO: 52474 - DNA, 19 bp, Homo sapiens
  siRNA target sequence for MBNL1 (NM_021038.1,2237-2255).
gtacttcccccattaccaa

SEQ ID NO: 52475 - DNA, 19 bp, Homo sapiens
  siRNA target sequence for MBNL1 (NM_021038.1,2281-2299).
cggtgccaccgcagtcttt

SEQ ID NO: 52476 - DNA, 19 bp, Homo sapiens
  siRNA target sequence for MBNL1 (NM_021038.1,2463-2481).
ccaaccagatacccataat

SEQ ID NO: 52477 - DNA, 19 bp, Homo sapiens
  siRNA target sequence for MBNL1 (NM_021038.1,2464-2482).
caaccagatacccataata

SEQ ID NO: 52478 - DNA, 19 bp, Homo sapiens
  siRNA target sequence for MBNL1 (NM_021038.1,2467-2485).
ccagatacccataatatct

SEQ ID NO: 52479 - DNA, 19 bp, Homo sapiens
  siRNA target sequence for MBNL1 (NM_021038.1,2497-2515).
gactagccacaagtatgtt

SEQ ID NO: 52480 - DNA, 19 bp, Homo sapiens
  siRNA target sequence for MCTS1 (NM_014060.1,302-320).
ccagttgaaaacttcagtt

SEQ ID NO: 52481 - DNA, 19 bp, Homo sapiens
  siRNA target sequence for MCTS1 (NM_014060.1,303-321).
cagttgaaaacttcagtta

SEQ ID NO: 52482 - DNA, 19 bp, Homo sapiens
  siRNA target sequence for MCTS1 (NM_014060.1,327-345).
ggtattaagaatcaattga

SEQ ID NO: 52483 - DNA, 19 bp, Homo sapiens
  siRNA target sequence for MCTS1 (NM_014060.1,350-368).
gcaatttccaggtattgaa

SEQ ID NO: 52484 - DNA, 19 bp, Homo sapiens
  siRNA target sequence for MCTS1 (NM_014060.1,366-384).
gaaccatggcttaatcaaa

SEQ ID NO: 52485 - DNA, 19 bp, Homo sapiens
  siRNA target sequence for MCTS1 (NM_014060.1,369-387).
ccatggcttaatcaaatca

SEQ ID NO: 52486 - DNA, 19 bp, Homo sapiens
  siRNA target sequence for MCTS1 (NM_014060.1,370-388).
catggcttaatcaaatcat

SEQ ID NO: 52487 - DNA, 19 bp, Homo sapiens
  siRNA target sequence for MCTS1 (NM_014060.1,414-432).
gtccgatgccatgaacata

SEQ ID NO: 52488 - DNA, 19 bp, Homo sapiens
  siRNA target sequence for MCTS1 (NM_014060.1,416-434).
ccgatgccatgaacatata

SEQ ID NO: 52489 - DNA, 19 bp, Homo sapiens
  siRNA target sequence for MCTS1 (NM_014060.1,418-436).
gatgccatgaacatataga

SEQ ID NO: 52490 - DNA, 19 bp, Homo sapiens
  siRNA target sequence for MCTS1 (NM_014060.1,447-465).
gtaaatggagaattactct

SEQ ID NO: 52491 - DNA, 19 bp, Homo sapiens
  siRNA target sequence for MCTS1 (NM_014060.1,499-517).
ccctaagattacttcacaa

SEQ ID NO: 52492 - DNA, 19 bp, Homo sapiens
  siRNA target sequence for MCTS1 (NM_014060.1,500-518).
cctaagattacttcacaaa

SEQ ID NO: 52493 - DNA, 19 bp, Homo sapiens
  siRNA target sequence for MCTS1 (NM_014060.1,556-574).
gagccatcaaatttgtact

SEQ ID NO: 52494 - DNA, 19 bp, Homo sapiens
  siRNA target sequence for MCTS1 (NM_014060.1,590-608).
catgtgtccaggcttaact

SEQ ID NO: 52495 - DNA, 19 bp, Homo sapiens
  siRNA target sequence for MCTS1 (NM_014060.1,690-708).
gttggagtcatgaagatgt

SEQ ID NO: 52496 - DNA, 19 bp, Homo sapiens
  siRNA target sequence for MCTS1 (NM_014060.1,738-756).
ggaattggcattgaaaata

SEQ ID NO: 52497 - DNA, 19 bp, Homo sapiens
  siRNA target sequence for MCTS1 (NM_014060.1,771-789).
gatgggctgtggcatatga

SEQ ID NO: 52498 - DNA, 19 bp, Homo sapiens
  siRNA target sequence for MCTS1 (NM_014060.1,781-799).
ggcatatgaagacatataa

SEQ ID NO: 52499 - DNA, 19 bp, Homo sapiens
  siRNA target sequence for METTL3 (NM_019852.2,304-322).
ctacagatcctgagttaga

SEQ ID NO: 52500 - DNA, 19 bp, Homo sapiens
  siRNA target sequence for METTL3 (NM_019852.2,307-325).
cagatcctgagttagagaa

SEQ ID NO: 52501 - DNA, 19 bp, Homo sapiens
  siRNA target sequence for METTL3 (NM_019852.2,346-364).
ctgatctggccttaacatt

SEQ ID NO: 52502 - DNA, 19 bp, Homo sapiens
  siRNA target sequence for METTL3 (NM_019852.2,482-500).
gcgaggtctcctacaagat

SEQ ID NO: 52503 - DNA, 19 bp, Homo sapiens
  siRNA target sequence for METTL3 (NM_019852.2,484-502).
gaggtctcctacaagatga

SEQ ID NO: 52504 - DNA, 19 bp, Homo sapiens
  siRNA target sequence for METTL3 (NM_019852.2,504-522).
gcacatcctactcttgtaa

SEQ ID NO: 52505 - DNA, 19 bp, Homo sapiens
  siRNA target sequence for METTL3 (NM_019852.2,818-836).
ggagatcctagagctatta

SEQ ID NO: 52506 - DNA, 19 bp, Homo sapiens
  siRNA target sequence for METTL3 (NM_019852.2,819-837).
gagatcctagagctattaa

SEQ ID NO: 52507 - DNA, 19 bp, Homo sapiens
  siRNA target sequence for METTL3 (NM_019852.2,821-839).
gatcctagagctattaaat

SEQ ID NO: 52508 - DNA, 19 bp, Homo sapiens
  siRNA target sequence for METTL3 (NM_019852.2,824-842).
cctagagctattaaatact

SEQ ID NO: 52509 - DNA, 19 bp, Homo sapiens
  siRNA target sequence for METTL3 (NM_019852.2,854-872).
ggaacaatccattgttgaa

SEQ ID NO: 52510 - DNA, 19 bp, Homo sapiens
  siRNA target sequence for METTL3 (NM_019852.2,855-873).
gaacaatccattgttgaaa

SEQ ID NO: 52511 - DNA, 19 bp, Homo sapiens
  siRNA target sequence for METTL3 (NM_019852.2,894-912).
gcccaagtgcaagaattct

SEQ ID NO: 52512 - DNA, 19 bp, Homo sapiens
  siRNA target sequence for METTL3 (NM_019852.2,978-996).
cacttcagacgaattatca

SEQ ID NO: 52513 - DNA, 19 bp, Homo sapiens
  siRNA target sequence for METTL3 (NM_019852.2,980-998).
cttcagacgaattatcaat

SEQ ID NO: 52514 - DNA, 19 bp, Homo sapiens
  siRNA target sequence for METTL3 (NM_019852.2,983-1001).
cagacgaattatcaataaa

SEQ ID NO: 52515 - DNA, 19 bp, Homo sapiens
  siRNA target sequence for METTL3 (NM_019852.2,985-1003).
gacgaattatcaataaaca

SEQ ID NO: 52516 - DNA, 19 bp, Homo sapiens
  siRNA target sequence for METTL3 (NM_019852.2,1021-1039).
gtgactgctctttccttaa

SEQ ID NO: 52517 - DNA, 19 bp, Homo sapiens
  siRNA target sequence for METTL3 (NM_019852.2,1025-1043).
ctgctctttccttaataca

SEQ ID NO: 52518 - DNA, 19 bp, Homo sapiens
  siRNA target sequence for METTL3 (NM_019852.2,1055-1073).
ggatacctgcaagtatgtt

SEQ ID NO: 52519 - DNA, 19 bp, Homo sapiens
  siRNA target sequence for METTL3 (NM_019852.2,1063-1081).
gcaagtatgttcactatga

SEQ ID NO: 52520 - DNA, 19 bp, Homo sapiens
  siRNA target sequence for METTL3 (NM_019852.2,1136-1154).
ccaggagcttgctcttaca

SEQ ID NO: 52521 - DNA, 19 bp, Homo sapiens
  siRNA target sequence for METTL3 (NM_019852.2,1200-1218).
cagtggatctgttgtgata

SEQ ID NO: 52522 - DNA, 19 bp, Homo sapiens
  siRNA target sequence for METTL3 (NM_019852.2,1437-1455).
cgggtagatgaaattattt

SEQ ID NO: 52523 - DNA, 19 bp, Homo sapiens
  siRNA target sequence for METTL3 (NM_019852.2,1532-1550).
ctgcttggttggtgtcaaa

SEQ ID NO: 52524 - DNA, 19 bp, Homo sapiens
  siRNA target sequence for METTL3 (NM_019852.2,1605-1623).
gttcgttccaccagtcata

SEQ ID NO: 52525 - DNA, 19 bp, Homo sapiens
  siRNA target sequence for METTL3 (NM_019852.2,1620-1638).
cataaaccagatgaaatct

SEQ ID NO: 52526 - DNA, 19 bp, Homo sapiens
  siRNA target sequence for METTL3 (NM_019852.2,1641-1659).
ggcatgattgaaagactat

SEQ ID NO: 52527 - DNA, 19 bp, Homo sapiens
  siRNA target sequence for METTL3 (NM_019852.2,1643-1661).
catgattgaaagactatct

SEQ ID NO: 52528 - DNA, 19 bp, Homo sapiens
  siRNA target sequence for METTL3 (NM_019852.2,1665-1683).
ggcactcgcaagattgagt

SEQ ID NO: 52529 - DNA, 19 bp, Homo sapiens
  siRNA target sequence for METTL3 (NM_019852.2,1666-1684).
gcactcgcaagattgagtt

SEQ ID NO: 52530 - DNA, 19 bp, Homo sapiens
  siRNA target sequence for METTL3 (NM_019852.2,1667-1685).
cactcgcaagattgagtta

SEQ ID NO: 52531 - DNA, 19 bp, Homo sapiens
  siRNA target sequence for METTL3 (NM_019852.2,1669-1687).
ctcgcaagattgagttatt

SEQ ID NO: 52532 - DNA, 19 bp, Homo sapiens
  siRNA target sequence for METTL3 (NM_019852.2,1718-1736).
gatcacccttggaaaccaa

SEQ ID NO: 52533 - DNA, 19 bp, Homo sapiens
  siRNA target sequence for METTL3 (NM_019852.2,1770-1788).
gttgcacggttcaagcaaa

SEQ ID NO: 52534 - DNA, 19 bp, Homo sapiens
  siRNA target sequence for METTL3 (NM_019852.2,1774-1792).
cacggttcaagcaaaggta

SEQ ID NO: 52535 - DNA, 19 bp, Homo sapiens
  siRNA target sequence for METTL3 (NM_019852.2,1789-1807).
ggtacccagatggtatcat

SEQ ID NO: 52536 - DNA, 19 bp, Homo sapiens
  siRNA target sequence for MGC42174 (NM_152383.2,263-281).
gcttcgccaggtgacaaaa

SEQ ID NO: 52537 - DNA, 19 bp, Homo sapiens
  siRNA target sequence for MGC42174 (NM_152383.2,295-313).
gtccacacgagggaagaaa

SEQ ID NO: 52538 - DNA, 19 bp, Homo sapiens
  siRNA target sequence for MGC42174 (NM_152383.2,310-328).
gaaaaagagcatatttgaa

SEQ ID NO: 52539 - DNA, 19 bp, Homo sapiens
  siRNA target sequence for MGC42174 (NM_152383.2,377-395).
ctcatccagggtgtattga

SEQ ID NO: 52540 - DNA, 19 bp, Homo sapiens
  siRNA target sequence for MGC42174 (NM_152383.2,467-485).
ggggttgttgctcgtaata

SEQ ID NO: 52541 - DNA, 19 bp, Homo sapiens
  siRNA target sequence for MGC42174 (NM_152383.2,469-487).
ggttgttgctcgtaataga

SEQ ID NO: 52542 - DNA, 19 bp, Homo sapiens
  siRNA target sequence for MGC42174 (NM_152383.2,830-848).
caagacacaagagctttat

SEQ ID NO: 52543 - DNA, 19 bp, Homo sapiens
  siRNA target sequence for MGC42174 (NM_152383.2,867-885).
gatcagcaaaggtggttta

SEQ ID NO: 52544 - DNA, 19 bp, Homo sapiens
  siRNA target sequence for MGC42174 (NM_152383.2,915-933).
caaccggcttcctcaaact

SEQ ID NO: 52545 - DNA, 19 bp, Homo sapiens
  siRNA target sequence for MGC42174 (NM_152383.2,918-936).
ccggcttcctcaaactctt

SEQ ID NO: 52546 - DNA, 19 bp, Homo sapiens
  siRNA target sequence for MGC42174 (NM_152383.2,951-969).
gcgaactgtttaggaaata

SEQ ID NO: 52547 - DNA, 19 bp, Homo sapiens
  siRNA target sequence for MGC42174 (NM_152383.2,991-1009).
ccaccgagtgcctagaatt

SEQ ID NO: 52548 - DNA, 19 bp, Homo sapiens
  siRNA target sequence for MGC42174 (NM_152383.2,992-1010).
caccgagtgcctagaattt

SEQ ID NO: 52549 - DNA, 19 bp, Homo sapiens
  siRNA target sequence for MGC42174 (NM_152383.2,994-1012).
ccgagtgcctagaatttat

SEQ ID NO: 52550 - DNA, 19 bp, Homo sapiens
  siRNA target sequence for MGC42174 (NM_152383.2,1043-1061).
gtggcacggcctaaagatt

SEQ ID NO: 52551 - DNA, 19 bp, Homo sapiens
  siRNA target sequence for MGC42174 (NM_152383.2,1045-1063).
ggcacggcctaaagattat

SEQ ID NO: 52552 - DNA, 19 bp, Homo sapiens
  siRNA target sequence for MGC42174 (NM_152383.2,1064-1082).
gccaacacactgttcatct

SEQ ID NO: 52553 - DNA, 19 bp, Homo sapiens
  siRNA target sequence for MGC42174 (NM_152383.2,1192-1210).
gtatggcgtggatttctct

SEQ ID NO: 52554 - DNA, 19 bp, Homo sapiens
  siRNA target sequence for MGC42174 (NM_152383.2,1370-1388).
ctcgctgacggcaacttca

SEQ ID NO: 52555 - DNA, 19 bp, Homo sapiens
  siRNA target sequence for MGC42174 (NM_152383.2,1374-1392).
ctgacggcaacttcaaagt

SEQ ID NO: 52556 - DNA, 19 bp, Homo sapiens
  siRNA target sequence for MGC42174 (NM_152383.2,1407-1425).
ctgacgtgagttactttgt

SEQ ID NO: 52557 - DNA, 19 bp, Homo sapiens
  siRNA target sequence for MGC42174 (NM_152383.2,1464-1482).
gggctacaagcgtctactt

SEQ ID NO: 52558 - DNA, 19 bp, Homo sapiens
  siRNA target sequence for MGC42174 (NM_152383.2,1473-1491).
gcgtctacttggttcaaaa

SEQ ID NO: 52559 - DNA, 19 bp, Homo sapiens
  siRNA target sequence for MGC42174 (NM_152383.2,1633-1651).
ccgctcctgcaccaaactt

SEQ ID NO: 52560 - DNA, 19 bp, Homo sapiens
  siRNA target sequence for MGC42174 (NM_152383.2,1634-1652).
cgctcctgcaccaaactta

SEQ ID NO: 52561 - DNA, 19 bp, Homo sapiens
  siRNA target sequence for MGC42174 (NM_152383.2,1638-1656).
cctgcaccaaacttagcta

SEQ ID NO: 52562 - DNA, 19 bp, Homo sapiens
  siRNA target sequence for MGC42174 (NM_152383.2,1660-1678).
gcatgcacagagcatgatt

SEQ ID NO: 52563 - DNA, 19 bp, Homo sapiens
  siRNA target sequence for MGC42174 (NM_152383.2,1813-1831).
cggcgcacttcgtttggat

SEQ ID NO: 52564 - DNA, 19 bp, Homo sapiens
  siRNA target sequence for MGC42174 (NM_152383.2,1881-1899).
gatgtcatatctatgagta

SEQ ID NO: 52565 - DNA, 19 bp, Homo sapiens
  siRNA target sequence for MGC42174 (NM_152383.2,2010-2028).
cgcaggagccctcaataaa

SEQ ID NO: 52566 - DNA, 19 bp, Homo sapiens
  siRNA target sequence for MGC4562 (NM_133375.2,228-246).
gaaggatgcgcgtcatgat

SEQ ID NO: 52567 - DNA, 19 bp, Homo sapiens
  siRNA target sequence for MGC4562 (NM_133375.2,238-256).
cgtcatgattgcattctct

SEQ ID NO: 52568 - DNA, 19 bp, Homo sapiens
  siRNA target sequence for MGC4562 (NM_133375.2,239-257).
gtcatgattgcattctctt

SEQ ID NO: 52569 - DNA, 19 bp, Homo sapiens
  siRNA target sequence for MGC4562 (NM_133375.2,322-340).
cagaccaggagcatataca

SEQ ID NO: 52570 - DNA, 19 bp, Homo sapiens
  siRNA target sequence for MGC4562 (NM_133375.2,342-360).
cgcagctgtttggtactat

SEQ ID NO: 52571 - DNA, 19 bp, Homo sapiens
  siRNA target sequence for MGC4562 (NM_133375.2,344-362).
cagctgtttggtactatca

SEQ ID NO: 52572 - DNA, 19 bp, Homo sapiens
  siRNA target sequence for MGC4562 (NM_133375.2,418-436).
cagcagtatggaagtgaaa

SEQ ID NO: 52573 - DNA, 19 bp, Homo sapiens
  siRNA target sequence for MGC4562 (NM_133375.2,431-449).
gtgaaacagaaggagtatt

SEQ ID NO: 52574 - DNA, 19 bp, Homo sapiens
  siRNA target sequence for MGC4562 (NM_133375.2,439-457).
gaaggagtattcgtgatta

SEQ ID NO: 52575 - DNA, 19 bp, Homo sapiens
  siRNA target sequence for MGC4562 (NM_133375.2,442-460).
ggagtattcgtgattactt

SEQ ID NO: 52576 - DNA, 19 bp, Homo sapiens
  siRNA target sequence for MGC4562 (NM_133375.2,443-461).
gagtattcgtgattacttt

SEQ ID NO: 52577 - DNA, 19 bp, Homo sapiens
  siRNA target sequence for MGC4562 (NM_133375.2,576-594).
ggagtacccagaacatctt

SEQ ID NO: 52578 - DNA, 19 bp, Homo sapiens
  siRNA target sequence for MGC4562 (NM_133375.2,606-624).
gttagaagctgggattaaa

SEQ ID NO: 52579 - DNA, 19 bp, Homo sapiens
  siRNA target sequence for MGC4562 (NM_133375.2,632-650).
gctatatccagggaattct

SEQ ID NO: 52580 - DNA, 19 bp, Homo sapiens
  siRNA target sequence for MGC4562 (NM_133375.2,710-728).
gtaaagattcagatttagt

SEQ ID NO: 52581 - DNA, 19 bp, Homo sapiens
  siRNA target sequence for MGC4562 (NM_133375.2,756-774).
ggctcgaaaccgctcaatt

SEQ ID NO: 52582 - DNA, 19 bp, Homo sapiens
  siRNA target sequence for MGC4562 (NM_133375.2,758-776).
ctcgaaaccgctcaattca

SEQ ID NO: 52583 - DNA, 19 bp, Homo sapiens
  siRNA target sequence for MGC4562 (NM_133375.2,831-849).
cgtagccctgtgtgagaat

SEQ ID NO: 52584 - DNA, 19 bp, Homo sapiens
  siRNA target sequence for MGC4562 (NM_133375.2,905-923).
gagtggtgggcatacttca

SEQ ID NO: 52585 - DNA, 19 bp, Homo sapiens
  siRNA target sequence for MGC4562 (NM_133375.2,913-931).
ggcatacttcagaagaact

SEQ ID NO: 52586 - DNA, 19 bp, Homo sapiens
  siRNA target sequence for MGC4562 (NM_133375.2,935-953).
gggattatgtggtgacatt

SEQ ID NO: 52587 - DNA, 19 bp, Homo sapiens
  siRNA target sequence for MGC4562 (NM_133375.2,948-966).
gacatttccgtccaaagaa

SEQ ID NO: 52588 - DNA, 19 bp, Homo sapiens
  siRNA target sequence for MGC4562 (NM_133375.2,972-990).
ccaatctcagggcaaaaat

SEQ ID NO: 52589 - DNA, 19 bp, Homo sapiens
  siRNA target sequence for MGC4562 (NM_133375.2,1006-1024).
gttacaccttgggattaca

SEQ ID NO: 52590 - DNA, 19 bp, Homo sapiens
  siRNA target sequence for MGC4562 (NM_133375.2,1023-1041).
cagaattcccaaaattcga

SEQ ID NO: 52591 - DNA, 19 bp, Homo sapiens
  siRNA target sequence for MGC4562 (NM_133375.2,1025-1043).
gaattcccaaaattcgaat

SEQ ID NO: 52592 - DNA, 19 bp, Homo sapiens
  siRNA target sequence for MGC4562 (NM_133375.2,1030-1048).
cccaaaattcgaattagca

SEQ ID NO: 52593 - DNA, 19 bp, Homo sapiens
  siRNA target sequence for MGC4562 (NM_133375.2,1081-1099).
gtggtcgtgcgcatcgatt

SEQ ID NO: 52594 - DNA, 19 bp, Homo sapiens
  siRNA target sequence for MGC4562 (NM_133375.2,1195-1213).
gaaaacagtatttcagtta

SEQ ID NO: 52595 - DNA, 19 bp, Homo sapiens
  siRNA target sequence for MGC4562 (NM_133375.2,1200-1218).
cagtatttcagttattcct

SEQ ID NO: 52596 - DNA, 19 bp, Homo sapiens
  siRNA target sequence for MGC4562 (NM_133375.2,1285-1303).
gaagaggaacaaaaacgta

SEQ ID NO: 52597 - DNA, 19 bp, Homo sapiens
  siRNA target sequence for MGC4562 (NM_133375.2,1291-1309).
gaacaaaaacgtaaagact

SEQ ID NO: 52598 - DNA, 19 bp, Homo sapiens
  siRNA target sequence for MGC4562 (NM_133375.2,1413-1431).
ggtccacatcgcagatgta

SEQ ID NO: 52599 - DNA, 19 bp, Homo sapiens
  siRNA target sequence for MGC4562 (NM_133375.2,1416-1434).
ccacatcgcagatgtaaca

SEQ ID NO: 52600 - DNA, 19 bp, Homo sapiens
  siRNA target sequence for MGC4562 (NM_133375.2,1422-1440).
cgcagatgtaacacacttt

SEQ ID NO: 52601 - DNA, 19 bp, Homo sapiens
  siRNA target sequence for MGC4562 (NM_133375.2,1437-1455).
ctttgtggcaccaaattct

SEQ ID NO: 52602 - DNA, 19 bp, Homo sapiens
  siRNA target sequence for MGC4562 (NM_133375.2,1448-1466).
caaattcttacattgatat

SEQ ID NO: 52603 - DNA, 19 bp, Homo sapiens
  siRNA target sequence for MGC4562 (NM_133375.2,1478-1496).
caagggccaccacttatta

SEQ ID NO: 52604 - DNA, 19 bp, Homo sapiens
  siRNA target sequence for MGC4562 (NM_133375.2,1482-1500).
ggccaccacttattatcta

SEQ ID NO: 52605 - DNA, 19 bp, Homo sapiens
  siRNA target sequence for MGC4562 (NM_133375.2,1501-1519).
gcagatcgtcgctatgaca

SEQ ID NO: 52606 - DNA, 19 bp, Homo sapiens
  siRNA target sequence for MGC4562 (NM_133375.2,1502-1520).
cagatcgtcgctatgacat

SEQ ID NO: 52607 - DNA, 19 bp, Homo sapiens
  siRNA target sequence for MGC4562 (NM_133375.2,1533-1551).
cctcagtgcagatttgtgt

SEQ ID NO: 52608 - DNA, 19 bp, Homo sapiens
  siRNA target sequence for MGC4562 (NM_133375.2,1534-1552).
ctcagtgcagatttgtgtt

SEQ ID NO: 52609 - DNA, 19 bp, Homo sapiens
  siRNA target sequence for MGC4562 (NM_133375.2,1560-1578).
gggaggcgttgataggtat

SEQ ID NO: 52610 - DNA, 19 bp, Homo sapiens
  siRNA target sequence for MGC4562 (NM_133375.2,1632-1650).
gtggtatggcagaaccatt

SEQ ID NO: 52611 - DNA, 19 bp, Homo sapiens
  siRNA target sequence for MGC4562 (NM_133375.2,1635-1653).
gtatggcagaaccattatt

SEQ ID NO: 52612 - DNA, 19 bp, Homo sapiens
  siRNA target sequence for MGC4562 (NM_133375.2,1639-1657).
ggcagaaccattattcgat

SEQ ID NO: 52613 - DNA, 19 bp, Homo sapiens
  siRNA target sequence for MGC4562 (NM_133375.2,1654-1672).
cgatcagcatacaaactgt

SEQ ID NO: 52614 - DNA, 19 bp, Homo sapiens
  siRNA target sequence for MGC4562 (NM_133375.2,1707-1725).
cttaagcgttgttgatgat

SEQ ID NO: 52615 - DNA, 19 bp, Homo sapiens
  siRNA target sequence for MGC4562 (NM_133375.2,1713-1731).
cgttgttgatgatattcca

SEQ ID NO: 52616 - DNA, 19 bp, Homo sapiens
  siRNA target sequence for MGC4562 (NM_133375.2,1818-1836).
ccatgtcagagctaaacga

SEQ ID NO: 52617 - DNA, 19 bp, Homo sapiens
  siRNA target sequence for MGC4562 (NM_133375.2,1877-1895).
gcgtacagctagatgacaa

SEQ ID NO: 52618 - DNA, 19 bp, Homo sapiens
  siRNA target sequence for MGC4562 (NM_133375.2,1878-1896).
cgtacagctagatgacaaa

SEQ ID NO: 52619 - DNA, 19 bp, Homo sapiens
  siRNA target sequence for MGC4562 (NM_133375.2,1975-1993).
cactgggtcgccaaaaaga

SEQ ID NO: 52620 - DNA, 19 bp, Homo sapiens
  siRNA target sequence for MGC4562 (NM_133375.2,2101-2119).
gatacacggtccaataaaa

SEQ ID NO: 52621 - DNA, 19 bp, Homo sapiens
  siRNA target sequence for MGC4562 (NM_133375.2,2105-2123).
cacggtccaataaaacact

SEQ ID NO: 52622 - DNA, 19 bp, Homo sapiens
  siRNA target sequence for MGC4562 (NM_133375.2,2152-2170).
ccccacgatcccattgtga

SEQ ID NO: 52623 - DNA, 19 bp, Homo sapiens
  siRNA target sequence for MGC4562 (NM_133375.2,2153-2171).
cccacgatcccattgtgaa

SEQ ID NO: 52624 - DNA, 19 bp, Homo sapiens
  siRNA target sequence for MGC4562 (NM_133375.2,2262-2280).
cggtcttgcattagataaa

SEQ ID NO: 52625 - DNA, 19 bp, Homo sapiens
  siRNA target sequence for MGC4562 (NM_133375.2,2263-2281).
ggtcttgcattagataaat

SEQ ID NO: 52626 - DNA, 19 bp, Homo sapiens
  siRNA target sequence for MGC4562 (NM_133375.2,2286-2304).
ccactttacttctccaata

SEQ ID NO: 52627 - DNA, 19 bp, Homo sapiens
  siRNA target sequence for MGC4562 (NM_133375.2,2287-2305).
cactttacttctccaataa

SEQ ID NO: 52628 - DNA, 19 bp, Homo sapiens
  siRNA target sequence for MGC4562 (NM_133375.2,2289-2307).
ctttacttctccaataaga

SEQ ID NO: 52629 - DNA, 19 bp, Homo sapiens
  siRNA target sequence for MGC4562 (NM_133375.2,2300-2318).
caataagaagatattcaga

SEQ ID NO: 52630 - DNA, 19 bp, Homo sapiens
  siRNA target sequence for MGC4562 (NM_133375.2,2309-2327).
gatattcagatattgtagt

SEQ ID NO: 52631 - DNA, 19 bp, Homo sapiens
  siRNA target sequence for MGC4562 (NM_133375.2,2323-2341).
gtagtacaccgcttgttaa

SEQ ID NO: 52632 - DNA, 19 bp, Homo sapiens
  siRNA target sequence for MGC4562 (NM_133375.2,2401-2419).
gatcttgaggaattatgca

SEQ ID NO: 52633 - DNA, 19 bp, Homo sapiens
  siRNA target sequence for MGC4562 (NM_133375.2,2481-2499).
ccagtgcatgtacttcaaa

SEQ ID NO: 52634 - DNA, 19 bp, Homo sapiens
  siRNA target sequence for MGC4562 (NM_133375.2,2514-2532).
caccgaggagcgttgcata

SEQ ID NO: 52635 - DNA, 19 bp, Homo sapiens
  siRNA target sequence for MGC4562 (NM_133375.2,2517-2535).
cgaggagcgttgcatatct

SEQ ID NO: 52636 - DNA, 19 bp, Homo sapiens
  siRNA target sequence for MGC4562 (NM_133375.2,2528-2546).
gcatatctgacggagttat

SEQ ID NO: 52637 - DNA, 19 bp, Homo sapiens
  siRNA target sequence for MGC4562 (NM_133375.2,2536-2554).
gacggagttatttattcaa

SEQ ID NO: 52638 - DNA, 19 bp, Homo sapiens
  siRNA target sequence for MGC4562 (NM_133375.2,2569-2587).
gtgcttctatttataccaa

SEQ ID NO: 52639 - DNA, 19 bp, Homo sapiens
  siRNA target sequence for MGC4562 (NM_133375.2,2602-2620).
ggtgctgcttatctaaaaa

SEQ ID NO: 52640 - DNA, 19 bp, Homo sapiens
  siRNA target sequence for MGC4562 (NM_133375.2,2678-2696).
gatcccttcaacgatttca

SEQ ID NO: 52641 - DNA, 19 bp, Homo sapiens
  siRNA target sequence for MGC4562 (NM_133375.2,2681-2699).
cccttcaacgatttcaaaa

SEQ ID NO: 52642 - DNA, 19 bp, Homo sapiens
  siRNA target sequence for MGC4562 (NM_133375.2,2717-2735).
caacagatggggaatctgt

SEQ ID NO: 52643 - DNA, 19 bp, Homo sapiens
  siRNA target sequence for MGC4562 (NM_133375.2,2752-2770).
gaccatgtaaccgtaagaa

SEQ ID NO: 52644 - DNA, 19 bp, Homo sapiens
  siRNA target sequence for MGC4562 (NM_133375.2,2755-2773).
catgtaaccgtaagaatat

SEQ ID NO: 52645 - DNA, 19 bp, Homo sapiens
  siRNA target sequence for MGC4562 (NM_133375.2,2758-2776).
gtaaccgtaagaatatcca

SEQ ID NO: 52646 - DNA, 19 bp, Homo sapiens
  siRNA target sequence for MGC4562 (NM_133375.2,2788-2806).
cgttgccattctgatacaa

SEQ ID NO: 52647 - DNA, 19 bp, Homo sapiens
  siRNA target sequence for MGC4562 (NM_133375.2,2793-2811).
ccattctgatacaatcaga

SEQ ID NO: 52648 - DNA, 19 bp, Homo sapiens
  siRNA target sequence for MGC4562 (NM_133375.2,2825-2843).
gtaacaaaccatacaagat

SEQ ID NO: 52649 - DNA, 19 bp, Homo sapiens
  siRNA target sequence for MGC4562 (NM_133375.2,2833-2851).
ccatacaagataccaaata

SEQ ID NO: 52650 - DNA, 19 bp, Homo sapiens
  siRNA target sequence for MGC4562 (NM_133375.2,2877-2895).
cttgctgaagagtgagtta

SEQ ID NO: 52651 - DNA, 19 bp, Homo sapiens
  siRNA target sequence for MGC4562 (NM_133375.2,3002-3020).
gcctatacacacttctaga

SEQ ID NO: 52652 - DNA, 19 bp, Homo sapiens
  siRNA target sequence for MGC4562 (NM_133375.2,3034-3052).
ctagctctcctggatgttt

SEQ ID NO: 52653 - DNA, 19 bp, Homo sapiens
  siRNA target sequence for MOV10L1 (NM_018995.1,124-142).
ggtgacactaagctgaaaa

SEQ ID NO: 52654 - DNA, 19 bp, Homo sapiens
  siRNA target sequence for MOV10L1 (NM_018995.1,171-189).
cagcgattatggcatgatt

SEQ ID NO: 52655 - DNA, 19 bp, Homo sapiens
  siRNA target sequence for MOV10L1 (NM_018995.1,190-208).
gatgatatgatctacttct

SEQ ID NO: 52656 - DNA, 19 bp, Homo sapiens
  siRNA target sequence for MOV10L1 (NM_018995.1,224-242).
ctagcagagtgcttctgaa

SEQ ID NO: 52657 - DNA, 19 bp, Homo sapiens
  siRNA target sequence for MOV10L1 (NM_018995.1,412-430).
gagggcgcaggctgtatca

SEQ ID NO: 52658 - DNA, 19 bp, Homo sapiens
  siRNA target sequence for MOV10L1 (NM_018995.1,414-432).
gggcgcaggctgtatcagt

SEQ ID NO: 52659 - DNA, 19 bp, Homo sapiens
  siRNA target sequence for MOV10L1 (NM_018995.1,641-659).
ccttggactccttgaaact

SEQ ID NO: 52660 - DNA, 19 bp, Homo sapiens
  siRNA target sequence for MOV10L1 (NM_018995.1,799-817).
catttctatggaacgattt

SEQ ID NO: 52661 - DNA, 19 bp, Homo sapiens
  siRNA target sequence for MOV10L1 (NM_018995.1,919-937).
ggagacattcctcaaaact

SEQ ID NO: 52662 - DNA, 19 bp, Homo sapiens
  siRNA target sequence for MOV10L1 (NM_018995.1,955-973).
gctggctgggataaatcta

SEQ ID NO: 52663 - DNA, 19 bp, Homo sapiens
  siRNA target sequence for MOV10L1 (NM_018995.1,962-980).
gggataaatctaaacaatt

SEQ ID NO: 52664 - DNA, 19 bp, Homo sapiens
  siRNA target sequence for MOV10L1 (NM_018995.1,964-982).
gataaatctaaacaattca

SEQ ID NO: 52665 - DNA, 19 bp, Homo sapiens
  siRNA target sequence for MOV10L1 (NM_018995.1,983-1001).
gattccaaatgctggataa

SEQ ID NO: 52666 - DNA, 19 bp, Homo sapiens
  siRNA target sequence for MOV10L1 (NM_018995.1,1011-1029).
gtgccccgtggtatctttt

SEQ ID NO: 52667 - DNA, 19 bp, Homo sapiens
  siRNA target sequence for MOV10L1 (NM_018995.1,1013-1031).
gccccgtggtatcttttgt

SEQ ID NO: 52668 - DNA, 19 bp, Homo sapiens
  siRNA target sequence for MOV10L1 (NM_018995.1,1014-1032).
ccccgtggtatcttttgtt

SEQ ID NO: 52669 - DNA, 19 bp, Homo sapiens
  siRNA target sequence for MOV10L1 (NM_018995.1,1076-1094).
cattaaatagccacacaaa

SEQ ID NO: 52670 - DNA, 19 bp, Homo sapiens
  siRNA target sequence for MOV10L1 (NM_018995.1,1183-1201).
gaaaaagacaacattctat

SEQ ID NO: 52671 - DNA, 19 bp, Homo sapiens
  siRNA target sequence for MOV10L1 (NM_018995.1,1250-1268).
ggggaaaaaccttcattgt

SEQ ID NO: 52672 - DNA, 19 bp, Homo sapiens
  siRNA target sequence for MOV10L1 (NM_018995.1,1270-1288).
gtcatctgtgacggaaaaa

SEQ ID NO: 52673 - DNA, 19 bp, Homo sapiens
  siRNA target sequence for MOV10L1 (NM_018995.1,1275-1293).
ctgtgacggaaaaaatcct

SEQ ID NO: 52674 - DNA, 19 bp, Homo sapiens
  siRNA target sequence for MOV10L1 (NM_018995.1,1298-1316).
gctgcaaggagctcctttt

SEQ ID NO: 52675 - DNA, 19 bp, Homo sapiens
  siRNA target sequence for MOV10L1 (NM_018995.1,1335-1353).
cctaattgggcgatacctt

SEQ ID NO: 52676 - DNA, 19 bp, Homo sapiens
  siRNA target sequence for MOV10L1 (NM_018995.1,1343-1361).
ggcgataccttgaagtaaa

SEQ ID NO: 52677 - DNA, 19 bp, Homo sapiens
  siRNA target sequence for MOV10L1 (NM_018995.1,1344-1362).
gcgataccttgaagtaaat

SEQ ID NO: 52678 - DNA, 19 bp, Homo sapiens
  siRNA target sequence for MOV10L1 (NM_018995.1,1374-1392).
ggaggagtcactaattgct

SEQ ID NO: 52679 - DNA, 19 bp, Homo sapiens
  siRNA target sequence for MOV10L1 (NM_018995.1,1482-1500).
gaactcaagacgacaactt

SEQ ID NO: 52680 - DNA, 19 bp, Homo sapiens
  siRNA target sequence for MOV10L1 (NM_018995.1,1522-1540).
ccaatcccagatagactta

SEQ ID NO: 52681 - DNA, 19 bp, Homo sapiens
  siRNA target sequence for MOV10L1 (NM_018995.1,1572-1590).
gactttccagccattactt

SEQ ID NO: 52682 - DNA, 19 bp, Homo sapiens
  siRNA target sequence for MOV10L1 (NM_018995.1,1594-1612).
gagcttctgaacatgtcaa

SEQ ID NO: 52683 - DNA, 19 bp, Homo sapiens
  siRNA target sequence for MOV10L1 (NM_018995.1,1644-1662).
gcttgaggagatttatgca

SEQ ID NO: 52684 - DNA, 19 bp, Homo sapiens
  siRNA target sequence for MOV10L1 (NM_018995.1,1689-1707).
gagcgggatcatcttaaga

SEQ ID NO: 52685 - DNA, 19 bp, Homo sapiens
  siRNA target sequence for MOV10L1 (NM_018995.1,1770-1788).
cgcaggtgataaactgatt

SEQ ID NO: 52686 - DNA, 19 bp, Homo sapiens
  siRNA target sequence for MOV10L1 (NM_018995.1,1813-1831).
catgccatcgaatacatca

SEQ ID NO: 52687 - DNA, 19 bp, Homo sapiens
  siRNA target sequence for MOV10L1 (NM_018995.1,1830-1848).
cagctacgtgactgagatt

SEQ ID NO: 52688 - DNA, 19 bp, Homo sapiens
  siRNA target sequence for MOV10L1 (NM_018995.1,1832-1850).
gctacgtgactgagattca

SEQ ID NO: 52689 - DNA, 19 bp, Homo sapiens
  siRNA target sequence for MOV10L1 (NM_018995.1,1833-1851).
ctacgtgactgagattcat

SEQ ID NO: 52690 - DNA, 19 bp, Homo sapiens
  siRNA target sequence for MOV10L1 (NM_018995.1,1836-1854).
cgtgactgagattcatgaa

SEQ ID NO: 52691 - DNA, 19 bp, Homo sapiens
  siRNA target sequence for MOV10L1 (NM_018995.1,1909-1927).
cctatggatgtggaattta

SEQ ID NO: 52692 - DNA, 19 bp, Homo sapiens
  siRNA target sequence for MOV10L1 (NM_018995.1,1953-1971).
gtgtcactttgcacttgaa

SEQ ID NO: 52693 - DNA, 19 bp, Homo sapiens
  siRNA target sequence for MOV10L1 (NM_018995.1,1977-1995).
catccacttaggtgtaaaa

SEQ ID NO: 52694 - DNA, 19 bp, Homo sapiens
  siRNA target sequence for MOV10L1 (NM_018995.1,1981-1999).
cacttaggtgtaaaagtgt

SEQ ID NO: 52695 - DNA, 19 bp, Homo sapiens
  siRNA target sequence for MOV10L1 (NM_018995.1,2029-2047).
ccacaagtgacgggaaatt

SEQ ID NO: 52696 - DNA, 19 bp, Homo sapiens
  siRNA target sequence for MOV10L1 (NM_018995.1,2032-2050).
caagtgacgggaaattgga

SEQ ID NO: 52697 - DNA, 19 bp, Homo sapiens
  siRNA target sequence for MOV10L1 (NM_018995.1,2169-2187).
ggtgctggcaccctttact

SEQ ID NO: 52698 - DNA, 19 bp, Homo sapiens
  siRNA target sequence for MOV10L1 (NM_018995.1,2196-2214).
gagcgattgggtagatgaa

SEQ ID NO: 52699 - DNA, 19 bp, Homo sapiens
  siRNA target sequence for MOV10L1 (NM_018995.1,2198-2216).
gcgattgggtagatgaaat

SEQ ID NO: 52700 - DNA, 19 bp, Homo sapiens
  siRNA target sequence for MOV10L1 (NM_018995.1,2199-2217).
cgattgggtagatgaaatt

SEQ ID NO: 52701 - DNA, 19 bp, Homo sapiens
  siRNA target sequence for MOV10L1 (NM_018995.1,2277-2295).
gttagcagttaaaaggatt

SEQ ID NO: 52702 - DNA, 19 bp, Homo sapiens
  siRNA target sequence for MOV10L1 (NM_018995.1,2312-2330).
gtcccctcccgtatattct

SEQ ID NO: 52703 - DNA, 19 bp, Homo sapiens
  siRNA target sequence for MOV10L1 (NM_018995.1,2314-2332).
cccctcccgtatattctct

SEQ ID NO: 52704 - DNA, 19 bp, Homo sapiens
  siRNA target sequence for MOV10L1 (NM_018995.1,2315-2333).
ccctcccgtatattctctt

SEQ ID NO: 52705 - DNA, 19 bp, Homo sapiens
  siRNA target sequence for MOV10L1 (NM_018995.1,2316-2334).
cctcccgtatattctcttt

SEQ ID NO: 52706 - DNA, 19 bp, Homo sapiens
  siRNA target sequence for MOV10L1 (NM_018995.1,2400-2418).
gccggacagtcggatttta

SEQ ID NO: 52707 - DNA, 19 bp, Homo sapiens
  siRNA target sequence for MOV10L1 (NM_018995.1,2402-2420).
cggacagtcggattttagt

SEQ ID NO: 52708 - DNA, 19 bp, Homo sapiens
  siRNA target sequence for MOV10L1 (NM_018995.1,2404-2422).
gacagtcggattttagtct

SEQ ID NO: 52709 - DNA, 19 bp, Homo sapiens
  siRNA target sequence for MOV10L1 (NM_018995.1,2519-2537).
gcaggttcgaggagatagt

SEQ ID NO: 52710 - DNA, 19 bp, Homo sapiens
  siRNA target sequence for MOV10L1 (NM_018995.1,2520-2538).
caggttcgaggagatagtt

SEQ ID NO: 52711 - DNA, 19 bp, Homo sapiens
  siRNA target sequence for MOV10L1 (NM_018995.1,2522-2540).
ggttcgaggagatagttat

SEQ ID NO: 52712 - DNA, 19 bp, Homo sapiens
  siRNA target sequence for MOV10L1 (NM_018995.1,2523-2541).
gttcgaggagatagttatt

SEQ ID NO: 52713 - DNA, 19 bp, Homo sapiens
  siRNA target sequence for MOV10L1 (NM_018995.1,2545-2563).
gccgtcaaaccgtattgca

SEQ ID NO: 52714 - DNA, 19 bp, Homo sapiens
  siRNA target sequence for MOV10L1 (NM_018995.1,2588-2606).
cctcacgcttccggataat

SEQ ID NO: 52715 - DNA, 19 bp, Homo sapiens
  siRNA target sequence for MOV10L1 (NM_018995.1,2593-2611).
cgcttccggataatcatca

SEQ ID NO: 52716 - DNA, 19 bp, Homo sapiens
  siRNA target sequence for MOV10L1 (NM_018995.1,2621-2639).
gcagctcagggctgtttta

SEQ ID NO: 52717 - DNA, 19 bp, Homo sapiens
  siRNA target sequence for MOV10L1 (NM_018995.1,2624-2642).
gctcagggctgttttacca

SEQ ID NO: 52718 - DNA, 19 bp, Homo sapiens
  siRNA target sequence for MOV10L1 (NM_018995.1,2631-2649).
gctgttttaccaaatagga

SEQ ID NO: 52719 - DNA, 19 bp, Homo sapiens
  siRNA target sequence for MOV10L1 (NM_018995.1,2821-2839).
gggctgaacgtgtcctttt

SEQ ID NO: 52720 - DNA, 19 bp, Homo sapiens
  siRNA target sequence for MOV10L1 (NM_018995.1,2822-2840).
ggctgaacgtgtccttttt

SEQ ID NO: 52721 - DNA, 19 bp, Homo sapiens
  siRNA target sequence for MOV10L1 (NM_018995.1,2826-2844).
gaacgtgtcctttttggaa

SEQ ID NO: 52722 - DNA, 19 bp, Homo sapiens
  siRNA target sequence for MOV10L1 (NM_018995.1,2891-2909).
gtgcttgtggcgcacataa

SEQ ID NO: 52723 - DNA, 19 bp, Homo sapiens
  siRNA target sequence for MOV10L1 (NM_018995.1,3325-3343).
gagtatctggtcatcatca

SEQ ID NO: 52724 - DNA, 19 bp, Homo sapiens
  siRNA target sequence for MOV10L1 (NM_018995.1,3327-3345).
gtatctggtcatcatcatt

SEQ ID NO: 52725 - DNA, 19 bp, Homo sapiens
  siRNA target sequence for MOV10L1 (NM_018995.1,3331-3349).
ctggtcatcatcatttcga

SEQ ID NO: 52726 - DNA, 19 bp, Homo sapiens
  siRNA target sequence for MOV10L1 (NM_018995.1,3347-3365).
cgaccgtacggtcaaatga

SEQ ID NO: 52727 - DNA, 19 bp, Homo sapiens
  siRNA target sequence for MOV10L1 (NM_018995.1,3348-3366).
gaccgtacggtcaaatgaa

SEQ ID NO: 52728 - DNA, 19 bp, Homo sapiens
  siRNA target sequence for MOV10L1 (NM_018995.1,3350-3368).
ccgtacggtcaaatgaaga

SEQ ID NO: 52729 - DNA, 19 bp, Homo sapiens
  siRNA target sequence for MOV10L1 (NM_018995.1,3351-3369).
cgtacggtcaaatgaagat

SEQ ID NO: 52730 - DNA, 19 bp, Homo sapiens
  siRNA target sequence for MOV10L1 (NM_018995.1,3352-3370).
gtacggtcaaatgaagata

SEQ ID NO: 52731 - DNA, 19 bp, Homo sapiens
  siRNA target sequence for MOV10L1 (NM_018995.1,3355-3373).
cggtcaaatgaagatagat

SEQ ID NO: 52732 - DNA, 19 bp, Homo sapiens
  siRNA target sequence for MOV10L1 (NM_018995.1,3356-3374).
ggtcaaatgaagatagatt

SEQ ID NO: 52733 - DNA, 19 bp, Homo sapiens
  siRNA target sequence for MOV10L1 (NM_018995.1,3397-3415).
ggtttcttgtccaactcaa

SEQ ID NO: 52734 - DNA, 19 bp, Homo sapiens
  siRNA target sequence for MOV10L1 (NM_018995.1,3398-3416).
gtttcttgtccaactcaaa

SEQ ID NO: 52735 - DNA, 19 bp, Homo sapiens
  siRNA target sequence for MOV10L1 (NM_018995.1,3405-3423).
gtccaactcaaaaagattt

SEQ ID NO: 52736 - DNA, 19 bp, Homo sapiens
  siRNA target sequence for MOV10L1 (NM_018995.1,3483-3501).
cgttcgagacccctgtttt

SEQ ID NO: 52737 - DNA, 19 bp, Homo sapiens
  siRNA target sequence for MOV10L1 (NM_018995.1,3521-3539).
gtattacaaacggtgttta

SEQ ID NO: 52738 - DNA, 19 bp, Homo sapiens
  siRNA target sequence for MOV10L1 (NM_018995.1,3565-3583).
ctgcagtctctgcaaaact

SEQ ID NO: 52739 - DNA, 19 bp, Homo sapiens
  siRNA target sequence for MRPL1 (NM_020236.2,714-732).
gcctgaacttaatcgatta

SEQ ID NO: 52740 - DNA, 19 bp, Homo sapiens
  siRNA target sequence for MRPL1 (NM_020236.2,715-733).
cctgaacttaatcgattaa

SEQ ID NO: 52741 - DNA, 19 bp, Homo sapiens
  siRNA target sequence for MRPL1 (NM_020236.2,762-780).
gctttctcgaaattccatt

SEQ ID NO: 52742 - DNA, 19 bp, Homo sapiens
  siRNA target sequence for MRPL1 (NM_020236.2,874-892).
gcaacattggatatgtcaa

SEQ ID NO: 52743 - DNA, 19 bp, Homo sapiens
  siRNA target sequence for MRPL1 (NM_020236.2,908-926).
ccaatctgcaagcagttat

SEQ ID NO: 52744 - DNA, 19 bp, Homo sapiens
  siRNA target sequence for MRPL1 (NM_020236.2,941-959).
ggcacagaccgctgaattt

SEQ ID NO: 52745 - DNA, 19 bp, Homo sapiens
  siRNA target sequence for MRPL1 (NM_020236.2,984-1002).
ccttcgtagttcaacaagt

SEQ ID NO: 52746 - DNA, 19 bp, Homo sapiens
  siRNA target sequence for MRPL1 (NM_020236.2,998-1016).
caagtgaaggtttattact

SEQ ID NO: 52747 - DNA, 19 bp, Homo sapiens
  siRNA target sequence for MRPL1 (NM_020236.2,1001-1019).
gtgaaggtttattactgaa

SEQ ID NO: 52748 - DNA, 19 bp, Homo sapiens
  siRNA target sequence for MRPL12 (NM_002949.2,495-513).
gcgaaagaacggacacatt

SEQ ID NO: 52749 - DNA, 19 bp, Homo sapiens
  siRNA target sequence for MRPL12 (NM_002949.2,496-514).
cgaaagaacggacacattt

SEQ ID NO: 52750 - DNA, 19 bp, Homo sapiens
  siRNA target sequence for MRPL12 (NM_002949.2,535-553).
cgaagcccgtggacaaagt

SEQ ID NO: 52751 - DNA, 19 bp, Homo sapiens
  siRNA target sequence for MRPL23 (NM_021134.2,110-128).
gtgttccgaaccaacttct

SEQ ID NO: 52752 - DNA, 19 bp, Homo sapiens
  siRNA target sequence for MRPL23 (NM_021134.2,115-133).
ccgaaccaacttcttcatt

SEQ ID NO: 52753 - DNA, 19 bp, Homo sapiens
  siRNA target sequence for MRPL23 (NM_021134.2,204-222).
gggtggacctcaggaatta

SEQ ID NO: 52754 - DNA, 19 bp, Homo sapiens
  siRNA target sequence for MRPL23 (NM_021134.2,269-287).
gtgcagcatggctctaaca

SEQ ID NO: 52755 - DNA, 19 bp, Homo sapiens
  siRNA target sequence for MRPL23 (NM_021134.2,303-321).
gaaacgtgaggatcaagaa

SEQ ID NO: 52756 - DNA, 19 bp, Homo sapiens
  siRNA target sequence for MRPL3 (NM_007208.2,259-277).
cacacatctggctttttgt

SEQ ID NO: 52757 - DNA, 19 bp, Homo sapiens
  siRNA target sequence for MRPL3 (NM_007208.2,350-368).
gcagttggtctctgatgaa

SEQ ID NO: 52758 - DNA, 19 bp, Homo sapiens
  siRNA target sequence for MRPL3 (NM_007208.2,378-396).
caattagcaagtaaactgt

SEQ ID NO: 52759 - DNA, 19 bp, Homo sapiens
  siRNA target sequence for MRPL3 (NM_007208.2,474-492).
ctgggcatgatgcctttat

SEQ ID NO: 52760 - DNA, 19 bp, Homo sapiens
  siRNA target sequence for MRPL3 (NM_007208.2,523-541).
cattacttcaggtacaaga

SEQ ID NO: 52761 - DNA, 19 bp, Homo sapiens
  siRNA target sequence for MRPL3 (NM_007208.2,537-555).
caagactgtcatgtcttaa

SEQ ID NO: 52762 - DNA, 19 bp, Homo sapiens
  siRNA target sequence for MRPL3 (NM_007208.2,540-558).
gactgtcatgtcttaaaat

SEQ ID NO: 52763 - DNA, 19 bp, Homo sapiens
  siRNA target sequence for MRPL3 (NM_007208.2,546-564).
catgtcttaaaatatacgt

SEQ ID NO: 52764 - DNA, 19 bp, Homo sapiens
  siRNA target sequence for MRPL3 (NM_007208.2,616-634).
ctgtatcacgttttcgtaa

SEQ ID NO: 52765 - DNA, 19 bp, Homo sapiens
  siRNA target sequence for MRPL3 (NM_007208.2,630-648).
cgtaaagctacatccatat

SEQ ID NO: 52766 - DNA, 19 bp, Homo sapiens
  siRNA target sequence for MRPL3 (NM_007208.2,631-649).
gtaaagctacatccatatt

SEQ ID NO: 52767 - DNA, 19 bp, Homo sapiens
  siRNA target sequence for MRPL3 (NM_007208.2,636-654).
gctacatccatattggaat

SEQ ID NO: 52768 - DNA, 19 bp, Homo sapiens
  siRNA target sequence for MRPL3 (NM_007208.2,637-655).
ctacatccatattggaatt

SEQ ID NO: 52769 - DNA, 19 bp, Homo sapiens
  siRNA target sequence for MRPL3 (NM_007208.2,677-695).
gccgaaacagacagttaaa

SEQ ID NO: 52770 - DNA, 19 bp, Homo sapiens
  siRNA target sequence for MRPL3 (NM_007208.2,755-773).
ctttcgtccaggacagtat

SEQ ID NO: 52771 - DNA, 19 bp, Homo sapiens
  siRNA target sequence for MRPL3 (NM_007208.2,782-800).
cacagccaaaactattggt

SEQ ID NO: 52772 - DNA, 19 bp, Homo sapiens
  siRNA target sequence for MRPL3 (NM_007208.2,793-811).
ctattggtaaaggttttca

SEQ ID NO: 52773 - DNA, 19 bp, Homo sapiens
  siRNA target sequence for MRPL3 (NM_007208.2,850-868).
ctacgcatggtcaaacgaa

SEQ ID NO: 52774 - DNA, 19 bp, Homo sapiens
  siRNA target sequence for MRPL3 (NM_007208.2,913-931).
gagtctggcctggaactaa

SEQ ID NO: 52775 - DNA, 19 bp, Homo sapiens
  siRNA target sequence for MRPL3 (NM_007208.2,915-933).
gtctggcctggaactaaaa

SEQ ID NO: 52776 - DNA, 19 bp, Homo sapiens
  siRNA target sequence for MRPL3 (NM_007208.2,997-1015).
caaagcacaacataatcta

SEQ ID NO: 52777 - DNA, 19 bp, Homo sapiens
  siRNA target sequence for MRPL3 (NM_007208.2,1001-1019).
gcacaacataatctatgta

SEQ ID NO: 52778 - DNA, 19 bp, Homo sapiens
  siRNA target sequence for MRPL3 (NM_007208.2,1002-1020).
cacaacataatctatgtaa

SEQ ID NO: 52779 - DNA, 19 bp, Homo sapiens
  siRNA target sequence for MRPL3 (NM_007208.2,1025-1043).
ctctgtacctggacataaa

SEQ ID NO: 52780 - DNA, 19 bp, Homo sapiens
  siRNA target sequence for MRPL3 (NM_007208.2,1088-1106).
ggatctcggtaaaaatcta

SEQ ID NO: 52781 - DNA, 19 bp, Homo sapiens
  siRNA target sequence for MRPL3 (NM_007208.2,1104-1122).
ctaccattccctacatatt

SEQ ID NO: 52782 - DNA, 19 bp, Homo sapiens
  siRNA target sequence for MRPL3 (NM_007208.2,1182-1200).
cccggtgcgccttctatta

SEQ ID NO: 52783 - DNA, 19 bp, Homo sapiens
  siRNA target sequence for MRPL3 (NM_007208.2,1186-1204).
gtgcgccttctattacatt

SEQ ID NO: 52784 - DNA, 19 bp, Homo sapiens
  siRNA target sequence for MRPS28 (NM_014018.2,75-93).
cgagtgtttctcttcttca

SEQ ID NO: 52785 - DNA, 19 bp, Homo sapiens
  siRNA target sequence for MRPS28 (NM_014018.2,128-146).
cgaaagtggtagttccaat

SEQ ID NO: 52786 - DNA, 19 bp, Homo sapiens
  siRNA target sequence for MRPS28 (NM_014018.2,196-214).
ggcactcggagcttctaca

SEQ ID NO: 52787 - DNA, 19 bp, Homo sapiens
  siRNA target sequence for MRPS28 (NM_014018.2,301-319).
gacctgcaaaggataaact

SEQ ID NO: 52788 - DNA, 19 bp, Homo sapiens
  siRNA target sequence for MRPS28 (NM_014018.2,320-338).
ggtcattggacggatcttt

SEQ ID NO: 52789 - DNA, 19 bp, Homo sapiens
  siRNA target sequence for MRPS28 (NM_014018.2,323-341).
cattggacggatctttcat

SEQ ID NO: 52790 - DNA, 19 bp, Homo sapiens
  siRNA target sequence for MRPS28 (NM_014018.2,328-346).
gacggatctttcatattgt

SEQ ID NO: 52791 - DNA, 19 bp, Homo sapiens
  siRNA target sequence for MRPS28 (NM_014018.2,350-368).
gaatgatctgtacatagat

SEQ ID NO: 52792 - DNA, 19 bp, Homo sapiens
  siRNA target sequence for MRPS28 (NM_014018.2,373-391).
gtggaaagtttcattgtgt

SEQ ID NO: 52793 - DNA, 19 bp, Homo sapiens
  siRNA target sequence for MRPS28 (NM_014018.2,440-458).
ggtccggttgcggctatta

SEQ ID NO: 52794 - DNA, 19 bp, Homo sapiens
  siRNA target sequence for MRPS28 (NM_014018.2,443-461).
ccggttgcggctattagat

SEQ ID NO: 52795 - DNA, 19 bp, Homo sapiens
  siRNA target sequence for MRPS28 (NM_014018.2,445-463).
ggttgcggctattagatct

SEQ ID NO: 52796 - DNA, 19 bp, Homo sapiens
  siRNA target sequence for MRPS28 (NM_014018.2,446-464).
gttgcggctattagatctt

SEQ ID NO: 52797 - DNA, 19 bp, Homo sapiens
  siRNA target sequence for MRPS28 (NM_014018.2,449-467).
gcggctattagatcttgaa

SEQ ID NO: 52798 - DNA, 19 bp, Homo sapiens
  siRNA target sequence for MRPS28 (NM_014018.2,451-469).
ggctattagatcttgaact

SEQ ID NO: 52799 - DNA, 19 bp, Homo sapiens
  siRNA target sequence for MRPS28 (NM_014018.2,479-497).
gttcctgggagcaacaaca

SEQ ID NO: 52800 - DNA, 19 bp, Homo sapiens
  siRNA target sequence for MRPS28 (NM_014018.2,554-572).
ctcaagatcgaaagaagaa

SEQ ID NO: 52801 - DNA, 19 bp, Homo sapiens
  siRNA target sequence for MSI1 (NM_002442.2,113-131).
cacgacccctgcaagatgt

SEQ ID NO: 52802 - DNA, 19 bp, Homo sapiens
  siRNA target sequence for MSI1 (NM_002442.2,164-182).
gaagggctgcgcgaatact

SEQ ID NO: 52803 - DNA, 19 bp, Homo sapiens
  siRNA target sequence for MSI1 (NM_002442.2,224-242).
gaccccctgaccaagagat

SEQ ID NO: 52804 - DNA, 19 bp, Homo sapiens
  siRNA target sequence for MSI1 (NM_002442.2,311-329).
cacgagctcgactccaaaa

SEQ ID NO: 52805 - DNA, 19 bp, Homo sapiens
  siRNA target sequence for MSI1 (NM_002442.2,313-331).
cgagctcgactccaaaaca

SEQ ID NO: 52806 - DNA, 19 bp, Homo sapiens
  siRNA target sequence for MSI1 (NM_002442.2,314-332).
gagctcgactccaaaacaa

SEQ ID NO: 52807 - DNA, 19 bp, Homo sapiens
  siRNA target sequence for MSI1 (NM_002442.2,316-334).
gctcgactccaaaacaatt

SEQ ID NO: 52808 - DNA, 19 bp, Homo sapiens
  siRNA target sequence for MSI1 (NM_002442.2,381-399).
ctcgaacgaagaagatctt

SEQ ID NO: 52809 - DNA, 19 bp, Homo sapiens
  siRNA target sequence for MSI1 (NM_002442.2,428-446).
gtggaggacgtgaagcaat

SEQ ID NO: 52810 - DNA, 19 bp, Homo sapiens
  siRNA target sequence for MSI1 (NM_002442.2,430-448).
ggaggacgtgaagcaatat

SEQ ID NO: 52811 - DNA, 19 bp, Homo sapiens
  siRNA target sequence for MSI1 (NM_002442.2,431-449).
gaggacgtgaagcaatatt

SEQ ID NO: 52812 - DNA, 19 bp, Homo sapiens
  siRNA target sequence for MSI1 (NM_002442.2,472-490).
cgacgccatgctgatgttt

SEQ ID NO: 52813 - DNA, 19 bp, Homo sapiens
  siRNA target sequence for MSI1 (NM_002442.2,715-733).
gggttacccaggtttccaa

SEQ ID NO: 52814 - DNA, 19 bp, Homo sapiens
  siRNA target sequence for MSI1 (NM_002442.2,742-760).
ctacgccagccggagttat

SEQ ID NO: 52815 - DNA, 19 bp, Homo sapiens
  siRNA target sequence for MSI1 (NM_002442.2,745-763).
cgccagccggagttataca

SEQ ID NO: 52816 - DNA, 19 bp, Homo sapiens
  siRNA target sequence for NHP2L1 (NM_005008.1,101-119).
gaggctgatgtgaatccaa

SEQ ID NO: 52817 - DNA, 19 bp, Homo sapiens
  siRNA target sequence for NHP2L1 (NM_005008.1,167-185).
ctcgttcagcagtcatgta

SEQ ID NO: 52818 - DNA, 19 bp, Homo sapiens
  siRNA target sequence for NHP2L1 (NM_005008.1,173-191).
cagcagtcatgtaactata

SEQ ID NO: 52819 - DNA, 19 bp, Homo sapiens
  siRNA target sequence for NHP2L1 (NM_005008.1,459-477).
ccattgaaaggctcttagt

SEQ ID NO: 52820 - DNA, 19 bp, Homo sapiens
  siRNA target sequence for NOL4 (NM_003787.1,757-775).
cggtgacacgatttctaat

SEQ ID NO: 52821 - DNA, 19 bp, Homo sapiens
  siRNA target sequence for NOL4 (NM_003787.1,759-777).
gtgacacgatttctaatga

SEQ ID NO: 52822 - DNA, 19 bp, Homo sapiens
  siRNA target sequence for NOL4 (NM_003787.1,873-891).
gactacaacatgccaatta

SEQ ID NO: 52823 - DNA, 19 bp, Homo sapiens
  siRNA target sequence for NOL4 (NM_003787.1,942-960).
gatgaggatgaaagttcaa

SEQ ID NO: 52824 - DNA, 19 bp, Homo sapiens
  siRNA target sequence for NOL4 (NM_003787.1,1046-1064).
gcaaagtccccagaatctt

SEQ ID NO: 52825 - DNA, 19 bp, Homo sapiens
  siRNA target sequence for NOL4 (NM_003787.1,1248-1266).
cagctaacttcggaataca

SEQ ID NO: 52826 - DNA, 19 bp, Homo sapiens
  siRNA target sequence for NOL4 (NM_003787.1,1250-1268).
gctaacttcggaatacaga

SEQ ID NO: 52827 - DNA, 19 bp, Homo sapiens
  siRNA target sequence for NOL4 (NM_003787.1,1251-1269).
ctaacttcggaatacagaa

SEQ ID NO: 52828 - DNA, 19 bp, Homo sapiens
  siRNA target sequence for NOL4 (NM_003787.1,1361-1379).
caagtctcctgcacatagt

SEQ ID NO: 52829 - DNA, 19 bp, Homo sapiens
  siRNA target sequence for NOL4 (NM_003787.1,1425-1443).
gctgaggacctctcactaa

SEQ ID NO: 52830 - DNA, 19 bp, Homo sapiens
  siRNA target sequence for NOL4 (NM_003787.1,1428-1446).
gaggacctctcactaaaca

SEQ ID NO: 52831 - DNA, 19 bp, Homo sapiens
  siRNA target sequence for NOL4 (NM_003787.1,1524-1542).
gagcggctgaaagctttta

SEQ ID NO: 52832 - DNA, 19 bp, Homo sapiens
  siRNA target sequence for NOL4 (NM_003787.1,1547-1565).
gtttgtcaggctgtttgta

SEQ ID NO: 52833 - DNA, 19 bp, Homo sapiens
  siRNA target sequence for NOL4 (NM_003787.1,1582-1600).
gaatggtcccaatctctaa

SEQ ID NO: 52834 - DNA, 19 bp, Homo sapiens
  siRNA target sequence for NOL4 (NM_003787.1,1645-1663).
gacaattccctgagtatca

SEQ ID NO: 52835 - DNA, 19 bp, Homo sapiens
  siRNA target sequence for NOL4 (NM_003787.1,1667-1685).
gcgtgccagaaaacgtata

SEQ ID NO: 52836 - DNA, 19 bp, Homo sapiens
  siRNA target sequence for NOL4 (NM_003787.1,1671-1689).
gccagaaaacgtatacgta

SEQ ID NO: 52837 - DNA, 19 bp, Homo sapiens
  siRNA target sequence for NOL4 (NM_003787.1,1675-1693).
gaaaacgtatacgtactta

SEQ ID NO: 52838 - DNA, 19 bp, Homo sapiens
  siRNA target sequence for NOL4 (NM_003787.1,1700-1718).
gtcctgcaggcggatgaaa

SEQ ID NO: 52839 - DNA, 19 bp, Homo sapiens
  siRNA target sequence for NOL4 (NM_003787.1,1733-1751).
gatgtctcgacctattcct

SEQ ID NO: 52840 - DNA, 19 bp, Homo sapiens
  siRNA target sequence for NOL4 (NM_003787.1,1767-1785).
gcagttgcagagagtatct

SEQ ID NO: 52841 - DNA, 19 bp, Homo sapiens
  siRNA target sequence for NOL4 (NM_003787.1,1768-1786).
cagttgcagagagtatctt

SEQ ID NO: 52842 - DNA, 19 bp, Homo sapiens
  siRNA target sequence for NOL4 (NM_003787.1,1864-1882).
cagctgacaaacagtgtaa

SEQ ID NO: 52843 - DNA, 19 bp, Homo sapiens
  siRNA target sequence for NOL4 (NM_003787.1,1890-1908).
gcgacccaggccacttact

SEQ ID NO: 52844 - DNA, 19 bp, Homo sapiens
  siRNA target sequence for NOL4 (NM_003787.1,1892-1910).
gacccaggccacttactca

SEQ ID NO: 52845 - DNA, 19 bp, Homo sapiens
  siRNA target sequence for NOL4 (NM_003787.1,1898-1916).
ggccacttactcaacatca

SEQ ID NO: 52846 - DNA, 19 bp, Homo sapiens
  siRNA target sequence for NOL4 (NM_003787.1,1938-1956).
gtgctgtacatcaatggaa

SEQ ID NO: 52847 - DNA, 19 bp, Homo sapiens
  siRNA target sequence for NOL4 (NM_003787.1,1940-1958).
gctgtacatcaatggaaat

SEQ ID NO: 52848 - DNA, 19 bp, Homo sapiens
  siRNA target sequence for NOL4 (NM_003787.1,1959-1977).
gggacctatagttaccata

SEQ ID NO: 52849 - DNA, 19 bp, Homo sapiens
  siRNA target sequence for NOL4 (NM_003787.1,1993-2011).
gagggggtctgctaaatct

SEQ ID NO: 52850 - DNA, 19 bp, Homo sapiens
  siRNA target sequence for NOL4 (NM_003787.1,1995-2013).
gggggtctgctaaatctga

SEQ ID NO: 52851 - DNA, 19 bp, Homo sapiens
  siRNA target sequence for NOL4 (NM_003787.1,1996-2014).
ggggtctgctaaatctgaa

SEQ ID NO: 52852 - DNA, 19 bp, Homo sapiens
  siRNA target sequence for NOL4 (NM_003787.1,1999-2017).
gtctgctaaatctgaatga

SEQ ID NO: 52853 - DNA, 19 bp, Homo sapiens
  siRNA target sequence for NOL4 (NM_003787.1,2043-2061).
ctcagcatgaagagacaat

SEQ ID NO: 52854 - DNA, 19 bp, Homo sapiens
  siRNA target sequence for NOL4 (NM_003787.1,2105-2123).
ccagctgagtccaactgaa

SEQ ID NO: 52855 - DNA, 19 bp, Homo sapiens
  siRNA target sequence for NOL4 (NM_003787.1,2106-2124).
cagctgagtccaactgaaa

SEQ ID NO: 52856 - DNA, 19 bp, Homo sapiens
  siRNA target sequence for NOL4 (NM_003787.1,2109-2127).
ctgagtccaactgaaatca

SEQ ID NO: 52857 - DNA, 19 bp, Homo sapiens
  siRNA target sequence for NOL4 (NM_003787.1,2111-2129).
gagtccaactgaaatcaat

SEQ ID NO: 52858 - DNA, 19 bp, Homo sapiens
  siRNA target sequence for NOL4 (NM_003787.1,2157-2175).
cgagaatcagctgcatttt

SEQ ID NO: 52859 - DNA, 19 bp, Homo sapiens
  siRNA target sequence for NOL5A (NM_006392.2,369-387).
gaggagttagggtacaact

SEQ ID NO: 52860 - DNA, 19 bp, Homo sapiens
  siRNA target sequence for NOL5A (NM_006392.2,463-481).
ccgatctgtcagcttgtaa

SEQ ID NO: 52861 - DNA, 19 bp, Homo sapiens
  siRNA target sequence for NOL5A (NM_006392.2,464-482).
cgatctgtcagcttgtaaa

SEQ ID NO: 52862 - DNA, 19 bp, Homo sapiens
  siRNA target sequence for NOL5A (NM_006392.2,492-510).
gggctgggacacagctatt

SEQ ID NO: 52863 - DNA, 19 bp, Homo sapiens
  siRNA target sequence for NOL5A (NM_006392.2,511-529).
cccgtgccaaagttaagtt

SEQ ID NO: 52864 - DNA, 19 bp, Homo sapiens
  siRNA target sequence for NOL5A (NM_006392.2,512-530).
ccgtgccaaagttaagttt

SEQ ID NO: 52865 - DNA, 19 bp, Homo sapiens
  siRNA target sequence for NOL5A (NM_006392.2,513-531).
cgtgccaaagttaagttta

SEQ ID NO: 52866 - DNA, 19 bp, Homo sapiens
  siRNA target sequence for NOL5A (NM_006392.2,514-532).
gtgccaaagttaagtttaa

SEQ ID NO: 52867 - DNA, 19 bp, Homo sapiens
  siRNA target sequence for NOL5A (NM_006392.2,534-552).
gtgaaccgggtggacaata

SEQ ID NO: 52868 - DNA, 19 bp, Homo sapiens
  siRNA target sequence for NOL5A (NM_006392.2,540-558).
cgggtggacaatatgatca

SEQ ID NO: 52869 - DNA, 19 bp, Homo sapiens
  siRNA target sequence for NOL5A (NM_006392.2,541-559).
gggtggacaatatgatcat

SEQ ID NO: 52870 - DNA, 19 bp, Homo sapiens
  siRNA target sequence for NOL5A (NM_006392.2,624-642).
gagtggtacgggtatcact

SEQ ID NO: 52871 - DNA, 19 bp, Homo sapiens
  siRNA target sequence for NOL5A (NM_006392.2,626-644).
gtggtacgggtatcacttt

SEQ ID NO: 52872 - DNA, 19 bp, Homo sapiens
  siRNA target sequence for NOL5A (NM_006392.2,685-703).
gccgtcttgcccagtttat

SEQ ID NO: 52873 - DNA, 19 bp, Homo sapiens
  siRNA target sequence for NOL5A (NM_006392.2,690-708).
cttgcccagtttattggaa

SEQ ID NO: 52874 - DNA, 19 bp, Homo sapiens
  siRNA target sequence for NOL5A (NM_006392.2,706-724).
gaaaccgaagggaactgaa

SEQ ID NO: 52875 - DNA, 19 bp, Homo sapiens
  siRNA target sequence for NOL5A (NM_006392.2,769-787).
ccaaggctaaggctattct

SEQ ID NO: 52876 - DNA, 19 bp, Homo sapiens
  siRNA target sequence for NOL5A (NM_006392.2,816-834).
gacatatctgccattgact

SEQ ID NO: 52877 - DNA, 19 bp, Homo sapiens
  siRNA target sequence for NOL5A (NM_006392.2,823-841).
ctgccattgacttgataaa

SEQ ID NO: 52878 - DNA, 19 bp, Homo sapiens
  siRNA target sequence for NOL5A (NM_006392.2,856-874).
ccagtcgtgtggtgtcttt

SEQ ID NO: 52879 - DNA, 19 bp, Homo sapiens
  siRNA target sequence for NOL5A (NM_006392.2,857-875).
cagtcgtgtggtgtcttta

SEQ ID NO: 52880 - DNA, 19 bp, Homo sapiens
  siRNA target sequence for NOL5A (NM_006392.2,886-904).
gccagagcctacacactta

SEQ ID NO: 52881 - DNA, 19 bp, Homo sapiens
  siRNA target sequence for NOL5A (NM_006392.2,1070-1088).
gaagacaaggggtaacact

SEQ ID NO: 52882 - DNA, 19 bp, Homo sapiens
  siRNA target sequence for NOL5A (NM_006392.2,1128-1146).
cgagcagctgccaagaaca

SEQ ID NO: 52883 - DNA, 19 bp, Homo sapiens
  siRNA target sequence for NOL5A (NM_006392.2,1189-1207).
cctcacgaatcgattgctt

SEQ ID NO: 52884 - DNA, 19 bp, Homo sapiens
  siRNA target sequence for NOL5A (NM_006392.2,1212-1230).
gaggtgcccacgagtgtat

SEQ ID NO: 52885 - DNA, 19 bp, Homo sapiens
  siRNA target sequence for NOL5A (NM_006392.2,1285-1303).
gagagataccacgaaagaa

SEQ ID NO: 52886 - DNA, 19 bp, Homo sapiens
  siRNA target sequence for NOL5A (NM_006392.2,1425-1443).
gccctcgcgtcttcagaaa

SEQ ID NO: 52887 - DNA, 19 bp, Homo sapiens
  siRNA target sequence for NOL5A (NM_006392.2,1426-1444).
ccctcgcgtcttcagaaaa

SEQ ID NO: 52888 - DNA, 19 bp, Homo sapiens
  siRNA target sequence for NOL5A (NM_006392.2,1428-1446).
ctcgcgtcttcagaaaaca

SEQ ID NO: 52889 - DNA, 19 bp, Homo sapiens
  siRNA target sequence for NOPD1 (NM_182543.1,423-441).
gtctattttccctaagata

SEQ ID NO: 52890 - DNA, 19 bp, Homo sapiens
  siRNA target sequence for NOPD1 (NM_182543.1,449-467).
gacctgaggttgaaaacta

SEQ ID NO: 52891 - DNA, 19 bp, Homo sapiens
  siRNA target sequence for NOPD1 (NM_182543.1,454-472).
gaggttgaaaactatctta

SEQ ID NO: 52892 - DNA, 19 bp, Homo sapiens
  siRNA target sequence for NOPD1 (NM_182543.1,501-519).
gactgctttaggtaaacaa

SEQ ID NO: 52893 - DNA, 19 bp, Homo sapiens
  siRNA target sequence for NOPD1 (NM_182543.1,581-599).
ctgtcagagtgaatacaca

SEQ ID NO: 52894 - DNA, 19 bp, Homo sapiens
  siRNA target sequence for NOPD1 (NM_182543.1,608-626).
cagtacaacatgtgaaaaa

SEQ ID NO: 52895 - DNA, 19 bp, Homo sapiens
  siRNA target sequence for NOPD1 (NM_182543.1,646-664).
cagaagcagtttaatggat

SEQ ID NO: 52896 - DNA, 19 bp, Homo sapiens
  siRNA target sequence for NOPD1 (NM_182543.1,651-669).
gcagtttaatggattaagt

SEQ ID NO: 52897 - DNA, 19 bp, Homo sapiens
  siRNA target sequence for NOPD1 (NM_182543.1,662-680).
gattaagtgttcctattct

SEQ ID NO: 52898 - DNA, 19 bp, Homo sapiens
  siRNA target sequence for NOPD1 (NM_182543.1,718-736).
gttattggacccagaaaga

SEQ ID NO: 52899 - DNA, 19 bp, Homo sapiens
  siRNA target sequence for NOPD1 (NM_182543.1,777-795).
gtgtggcaatgcagtttta

SEQ ID NO: 52900 - DNA, 19 bp, Homo sapiens
  siRNA target sequence for NOPD1 (NM_182543.1,826-844).
gtgtcagcatcacaattta

SEQ ID NO: 52901 - DNA, 19 bp, Homo sapiens
  siRNA target sequence for NOPD1 (NM_182543.1,955-973).
ctaagccgcaaagaaatct

SEQ ID NO: 52902 - DNA, 19 bp, Homo sapiens
  siRNA target sequence for NOPD1 (NM_182543.1,993-1011).
gaaaggcatgggcataaga

SEQ ID NO: 52903 - DNA, 19 bp, Homo sapiens
  siRNA target sequence for NOPD1 (NM_182543.1,997-1015).
ggcatgggcataagaatga

SEQ ID NO: 52904 - DNA, 19 bp, Homo sapiens
  siRNA target sequence for NOPD1 (NM_182543.1,1049-1067).
gtgtactgccccgttactt

SEQ ID NO: 52905 - DNA, 19 bp, Homo sapiens
  siRNA target sequence for NOPD1 (NM_182543.1,1051-1069).
gtactgccccgttacttat

SEQ ID NO: 52906 - DNA, 19 bp, Homo sapiens
  siRNA target sequence for NOPD1 (NM_182543.1,1054-1072).
ctgccccgttacttatttt

SEQ ID NO: 52907 - DNA, 19 bp, Homo sapiens
  siRNA target sequence for NOPD1 (NM_182543.1,1059-1077).
ccgttacttatttttacaa

SEQ ID NO: 52908 - DNA, 19 bp, Homo sapiens
  siRNA target sequence for NOPD1 (NM_182543.1,1085-1103).
catctgccttagtaagtca

SEQ ID NO: 52909 - DNA, 19 bp, Homo sapiens
  siRNA target sequence for NOPD1 (NM_182543.1,1091-1109).
ccttagtaagtcatgtact

SEQ ID NO: 52910 - DNA, 19 bp, Homo sapiens
  siRNA target sequence for NOPD1 (NM_182543.1,1092-1110).
cttagtaagtcatgtacta

SEQ ID NO: 52911 - DNA, 19 bp, Homo sapiens
  siRNA target sequence for NOPD1 (NM_182543.1,1169-1187).
cacacattgcagcactaat

SEQ ID NO: 52912 - DNA, 19 bp, Homo sapiens
  siRNA target sequence for NOPD1 (NM_182543.1,1173-1191).
cattgcagcactaatgcat

SEQ ID NO: 52913 - DNA, 19 bp, Homo sapiens
  siRNA target sequence for NOPD1 (NM_182543.1,1178-1196).
cagcactaatgcatgatca

SEQ ID NO: 52914 - DNA, 19 bp, Homo sapiens
  siRNA target sequence for NOPD1 (NM_182543.1,1204-1222).
gttatagcactggataaaa

SEQ ID NO: 52915 - DNA, 19 bp, Homo sapiens
  siRNA target sequence for NOPD1 (NM_182543.1,1277-1295).
ccatcagggcattttgttt

SEQ ID NO: 52916 - DNA, 19 bp, Homo sapiens
  siRNA target sequence for NOPD1 (NM_182543.1,1304-1322).
caaaggcggttaaacttga

SEQ ID NO: 52917 - DNA, 19 bp, Homo sapiens
  siRNA target sequence for NOPD1 (NM_182543.1,1310-1328).
cggttaaacttgatatggt

SEQ ID NO: 52918 - DNA, 19 bp, Homo sapiens
  siRNA target sequence for NOPD1 (NM_182543.1,1352-1370).
catttctaccagaatcctt

SEQ ID NO: 52919 - DNA, 19 bp, Homo sapiens
  siRNA target sequence for NOPD1 (NM_182543.1,1367-1385).
cctttgaccgaattcttct

SEQ ID NO: 52920 - DNA, 19 bp, Homo sapiens
  siRNA target sequence for NOPD1 (NM_182543.1,1454-1472).
catcatatcagccattaca

SEQ ID NO: 52921 - DNA, 19 bp, Homo sapiens
  siRNA target sequence for NOPD1 (NM_182543.1,1516-1534).
ggtgtgctggtttatagca

SEQ ID NO: 52922 - DNA, 19 bp, Homo sapiens
  siRNA target sequence for NOPD1 (NM_182543.1,1532-1550).
gcacgtgcactataacact

SEQ ID NO: 52923 - DNA, 19 bp, Homo sapiens
  siRNA target sequence for NOPD1 (NM_182543.1,1659-1677).
ctcatgtgaacagttgaaa

SEQ ID NO: 52924 - DNA, 19 bp, Homo sapiens
  siRNA target sequence for NOPD1 (NM_182543.1,1770-1788).
ggctaataaggactctata

SEQ ID NO: 52925 - DNA, 19 bp, Homo sapiens
  siRNA target sequence for NOPD1 (NM_182543.1,1780-1798).
gactctataggttttttta

SEQ ID NO: 52926 - DNA, 19 bp, Homo sapiens
  siRNA target sequence for NOVA1 (NM_002515.1,193-211).
ggcgaagacggccagtatt

SEQ ID NO: 52927 - DNA, 19 bp, Homo sapiens
  siRNA target sequence for NOVA1 (NM_002515.1,195-213).
cgaagacggccagtatttt

SEQ ID NO: 52928 - DNA, 19 bp, Homo sapiens
  siRNA target sequence for NOVA1 (NM_002515.1,199-217).
gacggccagtattttctaa

SEQ ID NO: 52929 - DNA, 19 bp, Homo sapiens
  siRNA target sequence for NOVA1 (NM_002515.1,204-222).
ccagtattttctaaaggtt

SEQ ID NO: 52930 - DNA, 19 bp, Homo sapiens
  siRNA target sequence for NOVA1 (NM_002515.1,233-251).
gttatgctgctggatctat

SEQ ID NO: 52931 - DNA, 19 bp, Homo sapiens
  siRNA target sequence for NOVA1 (NM_002515.1,266-284).
gacagacaattgttcagtt

SEQ ID NO: 52932 - DNA, 19 bp, Homo sapiens
  siRNA target sequence for NOVA1 (NM_002515.1,322-340).
ctgtctaagtccaaagatt

SEQ ID NO: 52933 - DNA, 19 bp, Homo sapiens
  siRNA target sequence for NOVA1 (NM_002515.1,483-501).
ccagaccaccgttaatcca

SEQ ID NO: 52934 - DNA, 19 bp, Homo sapiens
  siRNA target sequence for NOVA1 (NM_002515.1,502-520).
gatcgcatcaaacaaacat

SEQ ID NO: 52935 - DNA, 19 bp, Homo sapiens
  siRNA target sequence for NOVA1 (NM_002515.1,543-561).
caagtcctctccatctgat

SEQ ID NO: 52936 - DNA, 19 bp, Homo sapiens
  siRNA target sequence for NOVA1 (NM_002515.1,575-593).
ccagagctaatcaggtaaa

SEQ ID NO: 52937 - DNA, 19 bp, Homo sapiens
  siRNA target sequence for NOVA1 (NM_002515.1,644-662).
ctactgtgaaggctgtaat

SEQ ID NO: 52938 - DNA, 19 bp, Homo sapiens
  siRNA target sequence for NOVA1 (NM_002515.1,815-833).
gctgtctcaatatcagtta

SEQ ID NO: 52939 - DNA, 19 bp, Homo sapiens
  siRNA target sequence for NOVA1 (NM_002515.1,853-871).
gtggcaaattccaatccaa

SEQ ID NO: 52940 - DNA, 19 bp, Homo sapiens
  siRNA target sequence for NOVA1 (NM_002515.1,887-905).
caaacactgctgaagtgtt

SEQ ID NO: 52941 - DNA, 19 bp, Homo sapiens
  siRNA target sequence for NOVA1 (NM_002515.1,929-947).
ggctattaggacatgctaa

SEQ ID NO: 52942 - DNA, 19 bp, Homo sapiens
  siRNA target sequence for NOVA1 (NM_002515.1,1011-1029).
catcacctctgcacttaat

SEQ ID NO: 52943 - DNA, 19 bp, Homo sapiens
  siRNA target sequence for NOVA1 (NM_002515.1,1031-1049).
cattagccagctatggata

SEQ ID NO: 52944 - DNA, 19 bp, Homo sapiens
  siRNA target sequence for NOVA1 (NM_002515.1,1037-1055).
ccagctatggatataatct

SEQ ID NO: 52945 - DNA, 19 bp, Homo sapiens
  siRNA target sequence for NOVA1 (NM_002515.1,1209-1227).
ggggacatttgcattaggt

SEQ ID NO: 52946 - DNA, 19 bp, Homo sapiens
  siRNA target sequence for NOVA1 (NM_002515.1,1210-1228).
gggacatttgcattaggta

SEQ ID NO: 52947 - DNA, 19 bp, Homo sapiens
  siRNA target sequence for NOVA1 (NM_002515.1,1325-1343).
gatccaaggatgtagttga

SEQ ID NO: 52948 - DNA, 19 bp, Homo sapiens
  siRNA target sequence for NOVA1 (NM_002515.1,1328-1346).
ccaaggatgtagttgaaat

SEQ ID NO: 52949 - DNA, 19 bp, Homo sapiens
  siRNA target sequence for NOVA1 (NM_002515.1,1349-1367).
cagtgccagaaaacttagt

SEQ ID NO: 52950 - DNA, 19 bp, Homo sapiens
  siRNA target sequence for NOVA1 (NM_002515.1,1362-1380).
cttagttggtgcaatactt

SEQ ID NO: 52951 - DNA, 19 bp, Homo sapiens
  siRNA target sequence for NOVA1 (NM_002515.1,1421-1439).
ctggtgcaaggatacagat

SEQ ID NO: 52952 - DNA, 19 bp, Homo sapiens
  siRNA target sequence for NOVA1 (NM_002515.1,1430-1448).
ggatacagatctccaaaaa

SEQ ID NO: 52953 - DNA, 19 bp, Homo sapiens
  siRNA target sequence for NOVA1 (NM_002515.1,1472-1490).
ggaatcggaaggtaaccat

SEQ ID NO: 52954 - DNA, 19 bp, Homo sapiens
  siRNA target sequence for NOVA1 (NM_002515.1,1535-1553).
cacaaaggatcacatatga

SEQ ID NO: 52955 - DNA, 19 bp, Homo sapiens
  siRNA target sequence for NOVA1 (NM_006489.1,505-523).
cgcatcaaacaagtaaaga

SEQ ID NO: 52956 - DNA, 19 bp, Homo sapiens
  siRNA target sequence for NOVA1 (NM_006491.1,572-590).
ctaatcagaagcataatat

SEQ ID NO: 52957 - DNA, 19 bp, Homo sapiens
  siRNA target sequence for NOVA1 (NM_006491.1,583-601).
cataatatctcctggatat

SEQ ID NO: 52958 - DNA, 19 bp, Homo sapiens
  siRNA target sequence for NOVA2 (NM_002516.1,347-365).
ccgagaaggtccgagaaat

SEQ ID NO: 52959 - DNA, 19 bp, Homo sapiens
  siRNA target sequence for NOVA2 (NM_002516.1,1442-1460).
ccacgcaagccgctcaata

SEQ ID NO: 52960 - DNA, 19 bp, Homo sapiens
  siRNA target sequence for NOVA2 (NM_002516.1,1445-1463).
cgcaagccgctcaatacct

SEQ ID NO: 52961 - DNA, 19 bp, Homo sapiens
  siRNA target sequence for NUFIP1 (NM_012345.1,5-23).
ctgagccgactagtgattt

SEQ ID NO: 52962 - DNA, 19 bp, Homo sapiens
  siRNA target sequence for NUFIP1 (NM_012345.1,799-817).
ggagcagtattgacaacaa

SEQ ID NO: 52963 - DNA, 19 bp, Homo sapiens
  siRNA target sequence for NUFIP1 (NM_012345.1,805-823).
gtattgacaacaacacaat

SEQ ID NO: 52964 - DNA, 19 bp, Homo sapiens
  siRNA target sequence for NUFIP1 (NM_012345.1,818-836).
cacaatatggcaagatgaa

SEQ ID NO: 52965 - DNA, 19 bp, Homo sapiens
  siRNA target sequence for NUFIP1 (NM_012345.1,837-855).
ggggatgtccagacattca

SEQ ID NO: 52966 - DNA, 19 bp, Homo sapiens
  siRNA target sequence for NUFIP1 (NM_012345.1,839-857).
ggatgtccagacattcaca

SEQ ID NO: 52967 - DNA, 19 bp, Homo sapiens
  siRNA target sequence for NUFIP1 (NM_012345.1,840-858).
gatgtccagacattcacaa

SEQ ID NO: 52968 - DNA, 19 bp, Homo sapiens
  siRNA target sequence for NUFIP1 (NM_012345.1,1000-1018).
gttttgataaacagtgatt

SEQ ID NO: 52969 - DNA, 19 bp, Homo sapiens
  siRNA target sequence for NUFIP1 (NM_012345.1,1075-1093).
ccagccctatgctcactaa

SEQ ID NO: 52970 - DNA, 19 bp, Homo sapiens
  siRNA target sequence for NUFIP1 (NM_012345.1,1076-1094).
cagccctatgctcactaat

SEQ ID NO: 52971 - DNA, 19 bp, Homo sapiens
  siRNA target sequence for NUFIP1 (NM_012345.1,1080-1098).
cctatgctcactaatgagt

SEQ ID NO: 52972 - DNA, 19 bp, Homo sapiens
  siRNA target sequence for NUFIP1 (NM_012345.1,1081-1099).
ctatgctcactaatgagta

SEQ ID NO: 52973 - DNA, 19 bp, Homo sapiens
  siRNA target sequence for NUFIP1 (NM_012345.1,1086-1104).
ctcactaatgagtagctat

SEQ ID NO: 52974 - DNA, 19 bp, Homo sapiens
  siRNA target sequence for NUFIP1 (NM_012345.1,1174-1192).
gaaaaccaggttcttgata

SEQ ID NO: 52975 - DNA, 19 bp, Homo sapiens
  siRNA target sequence for NUFIP1 (NM_012345.1,1206-1224).
gagtccaagtcaagatgtt

SEQ ID NO: 52976 - DNA, 19 bp, Homo sapiens
  siRNA target sequence for NUFIP1 (NM_012345.1,1208-1226).
gtccaagtcaagatgttaa

SEQ ID NO: 52977 - DNA, 19 bp, Homo sapiens
  siRNA target sequence for NUFIP1 (NM_012345.1,1222-1240).
gttaaagcaactgttagaa

SEQ ID NO: 52978 - DNA, 19 bp, Homo sapiens
  siRNA target sequence for NUFIP1 (NM_012345.1,1315-1333).
cacaactatcaaacgttat

SEQ ID NO: 52979 - DNA, 19 bp, Homo sapiens
  siRNA target sequence for NUFIP1 (NM_012345.1,1320-1338).
ctatcaaacgttattcgaa

SEQ ID NO: 52980 - DNA, 19 bp, Homo sapiens
  siRNA target sequence for NUFIP1 (NM_012345.1,1329-1347).
gttattcgaaccaagaaca

SEQ ID NO: 52981 - DNA, 19 bp, Homo sapiens
  siRNA target sequence for NUFIP1 (NM_012345.1,1381-1399).
ccggacattcgacatgaaa

SEQ ID NO: 52982 - DNA, 19 bp, Homo sapiens
  siRNA target sequence for NUFIP1 (NM_012345.1,1414-1432).
cagtgtgttcggtacatca

SEQ ID NO: 52983 - DNA, 19 bp, Homo sapiens
  siRNA target sequence for NUFIP1 (NM_012345.1,1460-1478).
ctaattctgcgaaaagtaa

SEQ ID NO: 52984 - DNA, 19 bp, Homo sapiens
  siRNA target sequence for NUFIP1 (NM_012345.1,1468-1486).
gcgaaaagtaaagatgtat

SEQ ID NO: 52985 - DNA, 19 bp, Homo sapiens
  siRNA target sequence for NXF1 (NM_006362.3,158-176).
cgatgatgaacgcgttaat

SEQ ID NO: 52986 - DNA, 19 bp, Homo sapiens
  siRNA target sequence for NXF1 (NM_006362.3,159-177).
gatgatgaacgcgttaatt

SEQ ID NO: 52987 - DNA, 19 bp, Homo sapiens
  siRNA target sequence for NXF1 (NM_006362.3,209-227).
cttccggtggaaatatggt

SEQ ID NO: 52988 - DNA, 19 bp, Homo sapiens
  siRNA target sequence for NXF1 (NM_006362.3,325-343).
gtccccgagtacgatacaa

SEQ ID NO: 52989 - DNA, 19 bp, Homo sapiens
  siRNA target sequence for NXF1 (NM_006362.3,336-354).
cgatacaacccctatacca

SEQ ID NO: 52990 - DNA, 19 bp, Homo sapiens
  siRNA target sequence for NXF1 (NM_006362.3,390-408).
cgagatcgcattcatgtta

SEQ ID NO: 52991 - DNA, 19 bp, Homo sapiens
  siRNA target sequence for NXF1 (NM_006362.3,462-480).
gatgggacctcaaagaact

SEQ ID NO: 52992 - DNA, 19 bp, Homo sapiens
  siRNA target sequence for NXF1 (NM_006362.3,562-580).
ccttcacccctattgagtt

SEQ ID NO: 52993 - DNA, 19 bp, Homo sapiens
  siRNA target sequence for NXF1 (NM_006362.3,563-581).
cttcacccctattgagttt

SEQ ID NO: 52994 - DNA, 19 bp, Homo sapiens
  siRNA target sequence for NXF1 (NM_006362.3,568-586).
cccctattgagtttcacta

SEQ ID NO: 52995 - DNA, 19 bp, Homo sapiens
  siRNA target sequence for NXF1 (NM_006362.3,578-596).
gtttcactatgagaataca

SEQ ID NO: 52996 - DNA, 19 bp, Homo sapiens
  siRNA target sequence for NXF1 (NM_006362.3,644-662).
ggctgtcaactataagatt

SEQ ID NO: 52997 - DNA, 19 bp, Homo sapiens
  siRNA target sequence for NXF1 (NM_006362.3,645-663).
gctgtcaactataagattt

SEQ ID NO: 52998 - DNA, 19 bp, Homo sapiens
  siRNA target sequence for NXF1 (NM_006362.3,646-664).
ctgtcaactataagatttt

SEQ ID NO: 52999 - DNA, 19 bp, Homo sapiens
  siRNA target sequence for NXF1 (NM_006362.3,669-687).
cgggagaaccgaaggatat

SEQ ID NO: 53000 - DNA, 19 bp, Homo sapiens
  siRNA target sequence for NXF1 (NM_006362.3,671-689).
ggagaaccgaaggatatct

SEQ ID NO: 53001 - DNA, 19 bp, Homo sapiens
  siRNA target sequence for NXF1 (NM_006362.3,672-690).
gagaaccgaaggatatcta

SEQ ID NO: 53002 - DNA, 19 bp, Homo sapiens
  siRNA target sequence for NXF1 (NM_006362.3,678-696).
cgaaggatatctatcatca

SEQ ID NO: 53003 - DNA, 19 bp, Homo sapiens
  siRNA target sequence for NXF1 (NM_006362.3,679-697).
gaaggatatctatcatcat

SEQ ID NO: 53004 - DNA, 19 bp, Homo sapiens
  siRNA target sequence for NXF1 (NM_006362.3,706-724).
ctgctccaccccacactat

SEQ ID NO: 53005 - DNA, 19 bp, Homo sapiens
  siRNA target sequence for NXF1 (NM_006362.3,711-729).
ccaccccacactatactga

SEQ ID NO: 53006 - DNA, 19 bp, Homo sapiens
  siRNA target sequence for NXF1 (NM_006362.3,712-730).
caccccacactatactgaa

SEQ ID NO: 53007 - DNA, 19 bp, Homo sapiens
  siRNA target sequence for NXF1 (NM_006362.3,721-739).
ctatactgaatgaactgaa

SEQ ID NO: 53008 - DNA, 19 bp, Homo sapiens
  siRNA target sequence for NXF1 (NM_006362.3,770-788).
catgagcaaacgatacgat

SEQ ID NO: 53009 - DNA, 19 bp, Homo sapiens
  siRNA target sequence for NXF1 (NM_006362.3,965-983).
ggatgacatgtctagcatt

SEQ ID NO: 53010 - DNA, 19 bp, Homo sapiens
  siRNA target sequence for NXF1 (NM_006362.3,1044-1062).
cgggaattggacaagataa

SEQ ID NO: 53011 - DNA, 19 bp, Homo sapiens
  siRNA target sequence for NXF1 (NM_006362.3,1141-1159).
gcgccattcgcgaacgatt

SEQ ID NO: 53012 - DNA, 19 bp, Homo sapiens
  siRNA target sequence for NXF1 (NM_006362.3,1142-1160).
cgccattcgcgaacgattt

SEQ ID NO: 53013 - DNA, 19 bp, Homo sapiens
  siRNA target sequence for NXF1 (NM_006362.3,1151-1169).
cgaacgatttcccaagtta

SEQ ID NO: 53014 - DNA, 19 bp, Homo sapiens
  siRNA target sequence for NXF1 (NM_006362.3,1196-1214).
cccaccaattgcctttgat

SEQ ID NO: 53015 - DNA, 19 bp, Homo sapiens
  siRNA target sequence for NXF1 (NM_006362.3,1239-1257).
ccctgcaagggaagctatt

SEQ ID NO: 53016 - DNA, 19 bp, Homo sapiens
  siRNA target sequence for NXF1 (NM_006362.3,1240-1258).
cctgcaagggaagctattt

SEQ ID NO: 53017 - DNA, 19 bp, Homo sapiens
  siRNA target sequence for NXF1 (NM_006362.3,1292-1310).
cttcctgcaacagtactat

SEQ ID NO: 53018 - DNA, 19 bp, Homo sapiens
  siRNA target sequence for NXF1 (NM_006362.3,1372-1390).
gttccctgagcattccttt

SEQ ID NO: 53019 - DNA, 19 bp, Homo sapiens
  siRNA target sequence for NXF1 (NM_006362.3,1414-1432).
gcagcttagccgagtattt

SEQ ID NO: 53020 - DNA, 19 bp, Homo sapiens
  siRNA target sequence for NXF1 (NM_006362.3,1512-1530).
gttgccttcctcaatgagt

SEQ ID NO: 53021 - DNA, 19 bp, Homo sapiens
  siRNA target sequence for NXF1 (NM_006362.3,1680-1698).
gctgttcctgctagcaatt

SEQ ID NO: 53022 - DNA, 19 bp, Homo sapiens
  siRNA target sequence for NXF1 (NM_006362.3,1693-1711).
gcaattcagggctatgtat

SEQ ID NO: 53023 - DNA, 19 bp, Homo sapiens
  siRNA target sequence for NXF1 (NM_006362.3,1694-1712).
caattcagggctatgtatt

SEQ ID NO: 53024 - DNA, 19 bp, Homo sapiens
  siRNA target sequence for NXF1 (NM_006362.3,1702-1720).
ggctatgtattgtaaatga

SEQ ID NO: 53025 - DNA, 19 bp, Homo sapiens
  siRNA target sequence for NXF1 (NM_006362.3,1703-1721).
gctatgtattgtaaatgat

SEQ ID NO: 53026 - DNA, 19 bp, Homo sapiens
  siRNA target sequence for NXF1 (NM_006362.3,1733-1751).
gcggaatgccagttctgaa

SEQ ID NO: 53027 - DNA, 19 bp, Homo sapiens
  siRNA target sequence for NXF2 (NM_017809.2,818-836).
gaagtgtgggacatacaga

SEQ ID NO: 53028 - DNA, 19 bp, Homo sapiens
  siRNA target sequence for NXF2 (NM_017809.2,896-914).
gagttctttccgggataat

SEQ ID NO: 53029 - DNA, 19 bp, Homo sapiens
  siRNA target sequence for NXF2 (NM_017809.2,898-916).
gttctttccgggataattt

SEQ ID NO: 53030 - DNA, 19 bp, Homo sapiens
  siRNA target sequence for NXF2 (NM_017809.2,1080-1098).
gaagacgaaatccgtatta

SEQ ID NO: 53031 - DNA, 19 bp, Homo sapiens
  siRNA target sequence for NXF2 (NM_017809.2,1083-1101).
gacgaaatccgtattacca

SEQ ID NO: 53032 - DNA, 19 bp, Homo sapiens
  siRNA target sequence for NXF2 (NM_017809.2,1162-1180).
caaggaactggtttaaggt

SEQ ID NO: 53033 - DNA, 19 bp, Homo sapiens
  siRNA target sequence for NXF3 (NM_022052.1,180-198).
gtcaatcctggcatgcatt

SEQ ID NO: 53034 - DNA, 19 bp, Homo sapiens
  siRNA target sequence for NXF3 (NM_022052.1,186-204).
cctggcatgcattcttcat

SEQ ID NO: 53035 - DNA, 19 bp, Homo sapiens
  siRNA target sequence for NXF3 (NM_022052.1,265-283).
gatacactccctatactat

SEQ ID NO: 53036 - DNA, 19 bp, Homo sapiens
  siRNA target sequence for NXF3 (NM_022052.1,269-287).
cactccctatactatttca

SEQ ID NO: 53037 - DNA, 19 bp, Homo sapiens
  siRNA target sequence for NXF3 (NM_022052.1,297-315).
cggaaaggcagttttcgta

SEQ ID NO: 53038 - DNA, 19 bp, Homo sapiens
  siRNA target sequence for NXF3 (NM_022052.1,304-322).
gcagttttcgtaaacaaga

SEQ ID NO: 53039 - DNA, 19 bp, Homo sapiens
  siRNA target sequence for NXF3 (NM_022052.1,321-339).
gaccaaacccacgttaaca

SEQ ID NO: 53040 - DNA, 19 bp, Homo sapiens
  siRNA target sequence for NXF3 (NM_022052.1,490-508).
ccttcgtcccagttgagtt

SEQ ID NO: 53041 - DNA, 19 bp, Homo sapiens
  siRNA target sequence for NXF3 (NM_022052.1,491-509).
cttcgtcccagttgagttt

SEQ ID NO: 53042 - DNA, 19 bp, Homo sapiens
  siRNA target sequence for NXF3 (NM_022052.1,495-513).
gtcccagttgagtttcact

SEQ ID NO: 53043 - DNA, 19 bp, Homo sapiens
  siRNA target sequence for NXF3 (NM_022052.1,557-575).
cgcctatgcactgaagaat

SEQ ID NO: 53044 - DNA, 19 bp, Homo sapiens
  siRNA target sequence for NXF3 (NM_022052.1,572-590).
gaatgtcagtggcaagatt

SEQ ID NO: 53045 - DNA, 19 bp, Homo sapiens
  siRNA target sequence for NXF3 (NM_022052.1,587-605).
gatttgggatgaggataat

SEQ ID NO: 53046 - DNA, 19 bp, Homo sapiens
  siRNA target sequence for NXF3 (NM_022052.1,634-652).
ctggcataccccactttgt

SEQ ID NO: 53047 - DNA, 19 bp, Homo sapiens
  siRNA target sequence for NXF3 (NM_022052.1,764-782).
catggtgaaccgtgatact

SEQ ID NO: 53048 - DNA, 19 bp, Homo sapiens
  siRNA target sequence for NXF3 (NM_022052.1,768-786).
gtgaaccgtgatactaaga

SEQ ID NO: 53049 - DNA, 19 bp, Homo sapiens
  siRNA target sequence for NXF3 (NM_022052.1,942-960).
gatacctccagcaacataa

SEQ ID NO: 53050 - DNA, 19 bp, Homo sapiens
  siRNA target sequence for NXF3 (NM_022052.1,1084-1102).
ctgagatgttgaagaatct

SEQ ID NO: 53051 - DNA, 19 bp, Homo sapiens
  siRNA target sequence for OAS1 (NM_002534.1,164-182).
cgtgtttccgcatgcaaat

SEQ ID NO: 53052 - DNA, 19 bp, Homo sapiens
  siRNA target sequence for OAS1 (NM_002534.1,254-272).
gtgtgtccaaggtggtaaa

SEQ ID NO: 53053 - DNA, 19 bp, Homo sapiens
  siRNA target sequence for OAS1 (NM_002534.1,351-369).
cacttttcaggatcagtta

SEQ ID NO: 53054 - DNA, 19 bp, Homo sapiens
  siRNA target sequence for OAS1 (NM_002534.1,382-400).
gagttcatccaggaaatta

SEQ ID NO: 53055 - DNA, 19 bp, Homo sapiens
  siRNA target sequence for OAS1 (NM_002534.1,408-426).
gctggaagcctgtcaaaga

SEQ ID NO: 53056 - DNA, 19 bp, Homo sapiens
  siRNA target sequence for OAS1 (NM_002534.1,434-452).
cattttccgtgaagtttga

SEQ ID NO: 53057 - DNA, 19 bp, Homo sapiens
  siRNA target sequence for OAS1 (NM_002534.1,587-605).
ctaacccccaaatctatgt

SEQ ID NO: 53058 - DNA, 19 bp, Homo sapiens
  siRNA target sequence for OAS1 (NM_002534.1,623-641).
gcaccgacctgcagaaaga

SEQ ID NO: 53059 - DNA, 19 bp, Homo sapiens
  siRNA target sequence for OAS1 (NM_002534.1,729-747).
caagcactggtaccaaaat

SEQ ID NO: 53060 - DNA, 19 bp, Homo sapiens
  siRNA target sequence for OAS1 (NM_002534.1,737-755).
ggtaccaaaattgtaagaa

SEQ ID NO: 53061 - DNA, 19 bp, Homo sapiens
  siRNA target sequence for OAS1 (NM_002534.1,813-831).
ggagcgagggagcatgaaa

SEQ ID NO: 53062 - DNA, 19 bp, Homo sapiens
  siRNA target sequence for OAS1 (NM_002534.1,816-834).
gcgagggagcatgaaaaca

SEQ ID NO: 53063 - DNA, 19 bp, Homo sapiens
  siRNA target sequence for OAS1 (NM_002534.1,818-836).
gagggagcatgaaaacaca

SEQ ID NO: 53064 - DNA, 19 bp, Homo sapiens
  siRNA target sequence for OAS1 (NM_002534.1,860-878).
ggacggtcttggaattagt

SEQ ID NO: 53065 - DNA, 19 bp, Homo sapiens
  siRNA target sequence for OAS1 (NM_002534.1,863-881).
cggtcttggaattagtcat

SEQ ID NO: 53066 - DNA, 19 bp, Homo sapiens
  siRNA target sequence for OAS1 (NM_002534.1,864-882).
ggtcttggaattagtcata

SEQ ID NO: 53067 - DNA, 19 bp, Homo sapiens
  siRNA target sequence for OAS1 (NM_002534.1,865-883).
gtcttggaattagtcataa

SEQ ID NO: 53068 - DNA, 19 bp, Homo sapiens
  siRNA target sequence for OAS1 (NM_002534.1,1060-1078).
gctgaggcctggctgaatt

SEQ ID NO: 53069 - DNA, 19 bp, Homo sapiens
  siRNA target sequence for OAS2 (NM_002535.1,202-220).
ctcctatggacggaaaaca

SEQ ID NO: 53070 - DNA, 19 bp, Homo sapiens
  siRNA target sequence for OAS2 (NM_002535.1,209-227).
ggacggaaaacagtcttaa

SEQ ID NO: 53071 - DNA, 19 bp, Homo sapiens
  siRNA target sequence for OAS2 (NM_002535.1,302-320).
cgtgacatcctcgataaaa

SEQ ID NO: 53072 - DNA, 19 bp, Homo sapiens
  siRNA target sequence for OAS2 (NM_002535.1,402-420).
ccatccaggtgttcacaaa

SEQ ID NO: 53073 - DNA, 19 bp, Homo sapiens
  siRNA target sequence for OAS2 (NM_002535.1,460-478).
cgctctgagcttaaatgat

SEQ ID NO: 53074 - DNA, 19 bp, Homo sapiens
  siRNA target sequence for OAS2 (NM_002535.1,496-514).
ctatcgagagctcaaaaga

SEQ ID NO: 53075 - DNA, 19 bp, Homo sapiens
  siRNA target sequence for OAS2 (NM_002535.1,506-524).
ctcaaaagatccttggata

SEQ ID NO: 53076 - DNA, 19 bp, Homo sapiens
  siRNA target sequence for OAS2 (NM_002535.1,513-531).
gatccttggataagacaaa

SEQ ID NO: 53077 - DNA, 19 bp, Homo sapiens
  siRNA target sequence for OAS2 (NM_002535.1,594-612).
gtcctggaaaactaaagga

SEQ ID NO: 53078 - DNA, 19 bp, Homo sapiens
  siRNA target sequence for OAS2 (NM_002535.1,722-740).
caggggtgcagaaaagaca

SEQ ID NO: 53079 - DNA, 19 bp, Homo sapiens
  siRNA target sequence for OAS2 (NM_002535.1,876-894).
cagcgaggccagtaatctt

SEQ ID NO: 53080 - DNA, 19 bp, Homo sapiens
  siRNA target sequence for OAS2 (NM_002535.1,899-917).
ccagttgacccaaccaata

SEQ ID NO: 53081 - DNA, 19 bp, Homo sapiens
  siRNA target sequence for OAS2 (NM_002535.1,900-918).
cagttgacccaaccaataa

SEQ ID NO: 53082 - DNA, 19 bp, Homo sapiens
  siRNA target sequence for OAS2 (NM_002535.1,962-980).
gctcaaacctggttgactt

SEQ ID NO: 53083 - DNA, 19 bp, Homo sapiens
  siRNA target sequence for OAS2 (NM_002535.1,984-1002).
ccaacctggataatgagtt

SEQ ID NO: 53084 - DNA, 19 bp, Homo sapiens
  siRNA target sequence for OAS2 (NM_002535.1,1055-1073).
caccttctggataagttca

SEQ ID NO: 53085 - DNA, 19 bp, Homo sapiens
  siRNA target sequence for OAS2 (NM_002535.1,1101-1119).
gcttcctagagcagattga

SEQ ID NO: 53086 - DNA, 19 bp, Homo sapiens
  siRNA target sequence for OAS2 (NM_002535.1,1159-1177).
ctgcttccgacaatcaaca

SEQ ID NO: 53087 - DNA, 19 bp, Homo sapiens
  siRNA target sequence for OAS2 (NM_002535.1,1247-1265).
gatctcgtcgtgttccata

SEQ ID NO: 53088 - DNA, 19 bp, Homo sapiens
  siRNA target sequence for OAS2 (NM_002535.1,1250-1268).
ctcgtcgtgttccataact

SEQ ID NO: 53089 - DNA, 19 bp, Homo sapiens
  siRNA target sequence for OAS2 (NM_002535.1,1252-1270).
cgtcgtgttccataactca

SEQ ID NO: 53090 - DNA, 19 bp, Homo sapiens
  siRNA target sequence for OAS2 (NM_002535.1,1256-1274).
gtgttccataactcactta

SEQ ID NO: 53091 - DNA, 19 bp, Homo sapiens
  siRNA target sequence for OAS2 (NM_002535.1,1258-1276).
gttccataactcacttaaa

SEQ ID NO: 53092 - DNA, 19 bp, Homo sapiens
  siRNA target sequence for OAS2 (NM_002535.1,1532-1550).
gggctcattgatctgtata

SEQ ID NO: 53093 - DNA, 19 bp, Homo sapiens
  siRNA target sequence for OAS2 (NM_002535.1,1534-1552).
gctcattgatctgtataaa

SEQ ID NO: 53094 - DNA, 19 bp, Homo sapiens
  siRNA target sequence for OAS2 (NM_002535.1,1574-1592).
gagttttctacctgtttca

SEQ ID NO: 53095 - DNA, 19 bp, Homo sapiens
  siRNA target sequence for OAS2 (NM_002535.1,1597-1615).
cctgcagcgaaacttcatt

SEQ ID NO: 53096 - DNA, 19 bp, Homo sapiens
  siRNA target sequence for OAS2 (NM_002535.1,1761-1779).
gtggagtgccggattttga

SEQ ID NO: 53097 - DNA, 19 bp, Homo sapiens
  siRNA target sequence for OAS2 (NM_002535.1,1763-1781).
ggagtgccggattttgaca

SEQ ID NO: 53098 - DNA, 19 bp, Homo sapiens
  siRNA target sequence for OAS2 (NM_002535.1,1873-1891).
gaccgtgaggaagtttcta

SEQ ID NO: 53099 - DNA, 19 bp, Homo sapiens
  siRNA target sequence for OAS2 (NM_002535.1,2044-2062).
cccaataccaccttggaaa

SEQ ID NO: 53100 - DNA, 19 bp, Homo sapiens
  siRNA target sequence for OAS2 (NM_016817.1,2094-2112).
gagctaggatccatcctat

SEQ ID NO: 53101 - DNA, 19 bp, Homo sapiens
  siRNA target sequence for OAS2 (NM_016817.1,2097-2115).
ctaggatccatcctattgt

SEQ ID NO: 53102 - DNA, 19 bp, Homo sapiens
  siRNA target sequence for OAS2 (NM_016817.1,2100-2118).
ggatccatcctattgtcaa

SEQ ID NO: 53103 - DNA, 19 bp, Homo sapiens
  siRNA target sequence for OAS2 (NM_016817.1,2101-2119).
gatccatcctattgtcaat

SEQ ID NO: 53104 - DNA, 19 bp, Homo sapiens
  siRNA target sequence for OAS2 (NM_016817.1,2130-2148).
catccagaagccatagaat

SEQ ID NO: 53105 - DNA, 19 bp, Homo sapiens
  siRNA target sequence for OAS3 (NM_006187.1,429-447).
gcctgacatccgtagatct

SEQ ID NO: 53106 - DNA, 19 bp, Homo sapiens
  siRNA target sequence for OAS3 (NM_006187.1,449-467).
gaggactggatggatgtta

SEQ ID NO: 53107 - DNA, 19 bp, Homo sapiens
  siRNA target sequence for OAS3 (NM_006187.1,624-642).
ccaagttgaagaacctaat

SEQ ID NO: 53108 - DNA, 19 bp, Homo sapiens
  siRNA target sequence for OAS3 (NM_006187.1,744-762).
gggagcagggctgtaagaa

SEQ ID NO: 53109 - DNA, 19 bp, Homo sapiens
  siRNA target sequence for OAS3 (NM_006187.1,818-836).
catcagcacctgtgtgttt

SEQ ID NO: 53110 - DNA, 19 bp, Homo sapiens
  siRNA target sequence for OAS3 (NM_006187.1,821-839).
cagcacctgtgtgttttct

SEQ ID NO: 53111 - DNA, 19 bp, Homo sapiens
  siRNA target sequence for OAS3 (NM_006187.1,1390-1408).
ggcctcaagagtcagtaaa

SEQ ID NO: 53112 - DNA, 19 bp, Homo sapiens
  siRNA target sequence for OAS3 (NM_006187.1,1440-1458).
gggatggctgtgatgttga

SEQ ID NO: 53113 - DNA, 19 bp, Homo sapiens
  siRNA target sequence for OAS3 (NM_006187.1,1449-1467).
gtgatgttgaactcatcat

SEQ ID NO: 53114 - DNA, 19 bp, Homo sapiens
  siRNA target sequence for OAS3 (NM_006187.1,1451-1469).
gatgttgaactcatcatct

SEQ ID NO: 53115 - DNA, 19 bp, Homo sapiens
  siRNA target sequence for OAS3 (NM_006187.1,1815-1833).
gccctgtcaagctgaagaa

SEQ ID NO: 53116 - DNA, 19 bp, Homo sapiens
  siRNA target sequence for OAS3 (NM_006187.1,1867-1885).
ggttgcggctcagaacaaa

SEQ ID NO: 53117 - DNA, 19 bp, Homo sapiens
  siRNA target sequence for OAS3 (NM_006187.1,1965-1983).
gcaggcaggattgtttcaa

SEQ ID NO: 53118 - DNA, 19 bp, Homo sapiens
  siRNA target sequence for OAS3 (NM_006187.1,2044-2062).
ctactggacggtcaactat

SEQ ID NO: 53119 - DNA, 19 bp, Homo sapiens
  siRNA target sequence for OAS3 (NM_006187.1,2351-2369).
gtgaacaaggccgttgata

SEQ ID NO: 53120 - DNA, 19 bp, Homo sapiens
  siRNA target sequence for OAS3 (NM_006187.1,2363-2381).
gttgataccatctgttcat

SEQ ID NO: 53121 - DNA, 19 bp, Homo sapiens
  siRNA target sequence for OAS3 (NM_006187.1,2401-2419).
ccggaattctcccatcaaa

SEQ ID NO: 53122 - DNA, 19 bp, Homo sapiens
  siRNA target sequence for OAS3 (NM_006187.1,2403-2421).
ggaattctcccatcaaagt

SEQ ID NO: 53123 - DNA, 19 bp, Homo sapiens
  siRNA target sequence for OAS3 (NM_006187.1,2409-2427).
ctcccatcaaagtgatcaa

SEQ ID NO: 53124 - DNA, 19 bp, Homo sapiens
  siRNA target sequence for OAS3 (NM_006187.1,2595-2613).
ggcagttcgaggtcaagtt

SEQ ID NO: 53125 - DNA, 19 bp, Homo sapiens
  siRNA target sequence for OAS3 (NM_006187.1,2825-2843).
caacgggacttcatcatct

SEQ ID NO: 53126 - DNA, 19 bp, Homo sapiens
  siRNA target sequence for OAS3 (NM_006187.1,3050-3068).
cgccagctctgtatctact

SEQ ID NO: 53127 - DNA, 19 bp, Homo sapiens
  siRNA target sequence for OIP2 (NM_181503.1,59-77).
ggagtattacaggagattt

SEQ ID NO: 53128 - DNA, 19 bp, Homo sapiens
  siRNA target sequence for OIP2 (NM_181503.1,133-151).
ctgtcaacatcggttcaat

SEQ ID NO: 53129 - DNA, 19 bp, Homo sapiens
  siRNA target sequence for OIP2 (NM_181503.1,135-153).
gtcaacatcggttcaatta

SEQ ID NO: 53130 - DNA, 19 bp, Homo sapiens
  siRNA target sequence for OIP2 (NM_181503.1,137-155).
caacatcggttcaattagt

SEQ ID NO: 53131 - DNA, 19 bp, Homo sapiens
  siRNA target sequence for OIP2 (NM_181503.1,196-214).
cagtaatctgtggagttaa

SEQ ID NO: 53132 - DNA, 19 bp, Homo sapiens
  siRNA target sequence for OIP2 (NM_181503.1,240-258).
gatgcccctgataaaggat

SEQ ID NO: 53133 - DNA, 19 bp, Homo sapiens
  siRNA target sequence for OIP2 (NM_181503.1,245-263).
ccctgataaaggatacgtt

SEQ ID NO: 53134 - DNA, 19 bp, Homo sapiens
  siRNA target sequence for OIP2 (NM_181503.1,256-274).
gatacgttgttcctaatgt

SEQ ID NO: 53135 - DNA, 19 bp, Homo sapiens
  siRNA target sequence for OIP2 (NM_181503.1,429-447).
ctatactgtgatctcattt

SEQ ID NO: 53136 - DNA, 19 bp, Homo sapiens
  siRNA target sequence for OIP2 (NM_181503.1,452-470).
cgactacgatggaaacatt

SEQ ID NO: 53137 - DNA, 19 bp, Homo sapiens
  siRNA target sequence for OIP2 (NM_181503.1,494-512).
gctagcggctttaaaaaat

SEQ ID NO: 53138 - DNA, 19 bp, Homo sapiens
  siRNA target sequence for OIP2 (NM_181503.1,516-534).
cagttgcctgaagttacta

SEQ ID NO: 53139 - DNA, 19 bp, Homo sapiens
  siRNA target sequence for OIP2 (NM_181503.1,518-536).
gttgcctgaagttactata

SEQ ID NO: 53140 - DNA, 19 bp, Homo sapiens
  siRNA target sequence for OIP2 (NM_181503.1,521-539).
gcctgaagttactataaat

SEQ ID NO: 53141 - DNA, 19 bp, Homo sapiens
  siRNA target sequence for OIP2 (NM_181503.1,547-565).
ctgctttagcagaagttaa

SEQ ID NO: 53142 - DNA, 19 bp, Homo sapiens
  siRNA target sequence for OIP2 (NM_181503.1,675-693).
ctggcaacaggaaccttaa

SEQ ID NO: 53143 - DNA, 19 bp, Homo sapiens
  siRNA target sequence for OIP2 (NM_181503.1,684-702).
ggaaccttaacaatagtaa

SEQ ID NO: 53144 - DNA, 19 bp, Homo sapiens
  siRNA target sequence for OIP2 (NM_181503.1,688-706).
ccttaacaatagtaatgga

SEQ ID NO: 53145 - DNA, 19 bp, Homo sapiens
  siRNA target sequence for OIP2 (NM_181503.1,689-707).
cttaacaatagtaatggat

SEQ ID NO: 53146 - DNA, 19 bp, Homo sapiens
  siRNA target sequence for OIP2 (NM_181503.1,751-769).
ggctaactggagctaaact

SEQ ID NO: 53147 - DNA, 19 bp, Homo sapiens
  siRNA target sequence for OIP2 (NM_181503.1,752-770).
gctaactggagctaaactt

SEQ ID NO: 53148 - DNA, 19 bp, Homo sapiens
  siRNA target sequence for OIP2 (NM_181503.1,790-808).
cagttacaagacacaaaga

SEQ ID NO: 53149 - DNA, 19 bp, Homo sapiens
  siRNA target sequence for P14 (NM_016047.2,255-273).
ctgaagtaaatcggatatt

SEQ ID NO: 53150 - DNA, 19 bp, Homo sapiens
  siRNA target sequence for P14 (NM_016047.2,257-275).
gaagtaaatcggatattgt

SEQ ID NO: 53151 - DNA, 19 bp, Homo sapiens
  siRNA target sequence for P14 (NM_016047.2,260-278).
gtaaatcggatattgtata

SEQ ID NO: 53152 - DNA, 19 bp, Homo sapiens
  siRNA target sequence for P14 (NM_016047.2,266-284).
cggatattgtatataagaa

SEQ ID NO: 53153 - DNA, 19 bp, Homo sapiens
  siRNA target sequence for P14 (NM_016047.2,331-349).
gaaatatggacctattcgt

SEQ ID NO: 53154 - DNA, 19 bp, Homo sapiens
  siRNA target sequence for P14 (NM_016047.2,338-356).
ggacctattcgtcaaatca

SEQ ID NO: 53155 - DNA, 19 bp, Homo sapiens
  siRNA target sequence for P14 (NM_016047.2,361-379).
ggggaacacacctgaaact

SEQ ID NO: 53156 - DNA, 19 bp, Homo sapiens
  siRNA target sequence for P14 (NM_016047.2,364-382).
gaacacacctgaaactaga

SEQ ID NO: 53157 - DNA, 19 bp, Homo sapiens
  siRNA target sequence for P14 (NM_016047.2,378-396).
ctagaggaacagcttatgt

SEQ ID NO: 53158 - DNA, 19 bp, Homo sapiens
  siRNA target sequence for P14 (NM_016047.2,397-415).
ggtctatgaggacatcttt

SEQ ID NO: 53159 - DNA, 19 bp, Homo sapiens
  siRNA target sequence for P14 (NM_016047.2,439-457).
cctatcgggattcaatgtt

SEQ ID NO: 53160 - DNA, 19 bp, Homo sapiens
  siRNA target sequence for P14 (NM_016047.2,440-458).
ctatcgggattcaatgttt

SEQ ID NO: 53161 - DNA, 19 bp, Homo sapiens
  siRNA target sequence for P14 (NM_016047.2,444-462).
cgggattcaatgtttgtaa

SEQ ID NO: 53162 - DNA, 19 bp, Homo sapiens
  siRNA target sequence for P14 (NM_016047.2,465-483).
gataccttgtggttttgta

SEQ ID NO: 53163 - DNA, 19 bp, Homo sapiens
  siRNA target sequence for P14 (NM_016047.2,544-562).
gcttctcaaggagaaatat

SEQ ID NO: 53164 - DNA, 19 bp, Homo sapiens
  siRNA target sequence for PABPC5 (NM_080832.1,446-464).
gagcggggagcctaatcct

SEQ ID NO: 53165 - DNA, 19 bp, Homo sapiens
  siRNA target sequence for PABPC5 (NM_080832.1,618-636).
ggctatgggtatgttaact

SEQ ID NO: 53166 - DNA, 19 bp, Homo sapiens
  siRNA target sequence for PABPC5 (NM_080832.1,619-637).
gctatgggtatgttaactt

SEQ ID NO: 53167 - DNA, 19 bp, Homo sapiens
  siRNA target sequence for PABPC5 (NM_080832.1,654-672).
gcagagtgggccttgaaca

SEQ ID NO: 53168 - DNA, 19 bp, Homo sapiens
  siRNA target sequence for PABPC5 (NM_080832.1,725-743).
gccagatgaccgcttaaga

SEQ ID NO: 53169 - DNA, 19 bp, Homo sapiens
  siRNA target sequence for PABPC5 (NM_080832.1,726-744).
ccagatgaccgcttaagaa

SEQ ID NO: 53170 - DNA, 19 bp, Homo sapiens
  siRNA target sequence for PABPC5 (NM_080832.1,792-810).
gacaatagggccctgtttt

SEQ ID NO: 53171 - DNA, 19 bp, Homo sapiens
  siRNA target sequence for PABPC5 (NM_080832.1,882-900).
gcctatgttcactttgaca

SEQ ID NO: 53172 - DNA, 19 bp, Homo sapiens
  siRNA target sequence for PABPC5 (NM_080832.1,953-971).
caaccgccaggtgtatgtt

SEQ ID NO: 53173 - DNA, 19 bp, Homo sapiens
  siRNA target sequence for PABPC5 (NM_080832.1,1015-1033).
ccagggatagagcaacttt

SEQ ID NO: 53174 - DNA, 19 bp, Homo sapiens
  siRNA target sequence for PABPC5 (NM_080832.1,1034-1052).
caccaatgttttcgttaaa

SEQ ID NO: 53175 - DNA, 19 bp, Homo sapiens
  siRNA target sequence for PABPC5 (NM_080832.1,1108-1126).
ggccaactgagagtgttaa

SEQ ID NO: 53176 - DNA, 19 bp, Homo sapiens
  siRNA target sequence for PABPC5 (NM_080832.1,1109-1127).
gccaactgagagtgttaaa

SEQ ID NO: 53177 - DNA, 19 bp, Homo sapiens
  siRNA target sequence for PABPC5 (NM_080832.1,1116-1134).
gagagtgttaaagtaataa

SEQ ID NO: 53178 - DNA, 19 bp, Homo sapiens
  siRNA target sequence for PABPC5 (NM_080832.1,1160-1178).
ctttggatttgtgagatat

SEQ ID NO: 53179 - DNA, 19 bp, Homo sapiens
  siRNA target sequence for PABPC5 (NM_080832.1,1255-1273).
ggcgagcacagaagaaaat

SEQ ID NO: 53180 - DNA, 19 bp, Homo sapiens
  siRNA target sequence for PABPC5 (NM_080832.1,1289-1307).
gttgaggcggagatttgaa

SEQ ID NO: 53181 - DNA, 19 bp, Homo sapiens
  siRNA target sequence for PABPC5 (NM_080832.1,1336-1354).
ccccaggggtgcctatcta

SEQ ID NO: 53182 - DNA, 19 bp, Homo sapiens
  siRNA target sequence for PABPC5 (NM_080832.1,1337-1355).
cccaggggtgcctatctat

SEQ ID NO: 53183 - DNA, 19 bp, Homo sapiens
  siRNA target sequence for PABPC5 (NM_080832.1,1338-1356).
ccaggggtgcctatctata

SEQ ID NO: 53184 - DNA, 19 bp, Homo sapiens
  siRNA target sequence for PABPC5 (NM_080832.1,1426-1444).
gtcgggccaaagtgatgat

SEQ ID NO: 53185 - DNA, 19 bp, Homo sapiens
  siRNA target sequence for PABPC5 (NM_080832.1,1451-1469).
ggggcaaggcaaaggattt

SEQ ID NO: 53186 - DNA, 19 bp, Homo sapiens
  siRNA target sequence for PABPN1 (NM_004643.1,1708-1726).
ggtagagaagcagatgaat

SEQ ID NO: 53187 - DNA, 19 bp, Homo sapiens
  siRNA target sequence for PABPN1 (NM_004643.1,1709-1727).
gtagagaagcagatgaata

SEQ ID NO: 53188 - DNA, 19 bp, Homo sapiens
  siRNA target sequence for PABPN1 (NM_004643.1,1843-1861).
gctggaagctcactttcat

SEQ ID NO: 53189 - DNA, 19 bp, Homo sapiens
  siRNA target sequence for PABPN1 (NM_004643.1,1872-1890).
cagtcaaccgtgttaccat

SEQ ID NO: 53190 - DNA, 19 bp, Homo sapiens
  siRNA target sequence for PABPN1 (NM_004643.1,1887-1905).
ccatactgtgtgacaaatt

SEQ ID NO: 53191 - DNA, 19 bp, Homo sapiens
  siRNA target sequence for PABPN1 (NM_004643.1,1917-1935).
ccaaagggtttgcgtatat

SEQ ID NO: 53192 - DNA, 19 bp, Homo sapiens
  siRNA target sequence for PABPN1 (NM_004643.1,1918-1936).
caaagggtttgcgtatata

SEQ ID NO: 53193 - DNA, 19 bp, Homo sapiens
  siRNA target sequence for PABPN1 (NM_004643.1,1963-1981).
gacttccttggccttagat

SEQ ID NO: 53194 - DNA, 19 bp, Homo sapiens
  siRNA target sequence for PABPN1 (NM_004643.1,1965-1983).
cttccttggccttagatga

SEQ ID NO: 53195 - DNA, 19 bp, Homo sapiens
  siRNA target sequence for PABPN1 (NM_004643.1,2117-2135).
cgattctacagtggtttta

SEQ ID NO: 53196 - DNA, 19 bp, Homo sapiens
  siRNA target sequence for PAPOLA (NM_032632.2,215-233).
gccgtttccagttacaaca

SEQ ID NO: 53197 - DNA, 19 bp, Homo sapiens
  siRNA target sequence for PAPOLA (NM_032632.2,263-281).
gaagcactatggcattact

SEQ ID NO: 53198 - DNA, 19 bp, Homo sapiens
  siRNA target sequence for PAPOLA (NM_032632.2,309-327).
gagactgactgcgtactta

SEQ ID NO: 53199 - DNA, 19 bp, Homo sapiens
  siRNA target sequence for PAPOLA (NM_032632.2,311-329).
gactgactgcgtacttaca

SEQ ID NO: 53200 - DNA, 19 bp, Homo sapiens
  siRNA target sequence for PAPOLA (NM_032632.2,313-331).
ctgactgcgtacttacaca

SEQ ID NO: 53201 - DNA, 19 bp, Homo sapiens
  siRNA target sequence for PAPOLA (NM_032632.2,319-337).
gcgtacttacacagaaact

SEQ ID NO: 53202 - DNA, 19 bp, Homo sapiens
  siRNA target sequence for PAPOLA (NM_032632.2,320-338).
cgtacttacacagaaacta

SEQ ID NO: 53203 - DNA, 19 bp, Homo sapiens
  siRNA target sequence for PAPOLA (NM_032632.2,321-339).
gtacttacacagaaactaa

SEQ ID NO: 53204 - DNA, 19 bp, Homo sapiens
  siRNA target sequence for PAPOLA (NM_032632.2,538-556).
caaaaggtgctgatattga

SEQ ID NO: 53205 - DNA, 19 bp, Homo sapiens
  siRNA target sequence for PAPOLA (NM_032632.2,607-625).
cattctatgataagttgaa

SEQ ID NO: 53206 - DNA, 19 bp, Homo sapiens
  siRNA target sequence for PAPOLA (NM_032632.2,666-684).
gcattcgtaccagttatta

SEQ ID NO: 53207 - DNA, 19 bp, Homo sapiens
  siRNA target sequence for PAPOLA (NM_032632.2,667-685).
cattcgtaccagttattaa

SEQ ID NO: 53208 - DNA, 19 bp, Homo sapiens
  siRNA target sequence for PAPOLA (NM_032632.2,901-919).
gggccaaacgccacaacat

SEQ ID NO: 53209 - DNA, 19 bp, Homo sapiens
  siRNA target sequence for PAPOLA (NM_032632.2,903-921).
gccaaacgccacaacatct

SEQ ID NO: 53210 - DNA, 19 bp, Homo sapiens
  siRNA target sequence for PAPOLA (NM_032632.2,904-922).
ccaaacgccacaacatcta

SEQ ID NO: 53211 - DNA, 19 bp, Homo sapiens
  siRNA target sequence for PAPOLA (NM_032632.2,905-923).
caaacgccacaacatctat

SEQ ID NO: 53212 - DNA, 19 bp, Homo sapiens
  siRNA target sequence for PAPOLA (NM_032632.2,1005-1023).
gcatcaactcttgtacata

SEQ ID NO: 53213 - DNA, 19 bp, Homo sapiens
  siRNA target sequence for PAPOLA (NM_032632.2,1054-1072).
ggccaaatccagtgctatt

SEQ ID NO: 53214 - DNA, 19 bp, Homo sapiens
  siRNA target sequence for PAPOLA (NM_032632.2,1056-1074).
ccaaatccagtgctattga

SEQ ID NO: 53215 - DNA, 19 bp, Homo sapiens
  siRNA target sequence for PAPOLA (NM_032632.2,1057-1075).
caaatccagtgctattgaa

SEQ ID NO: 53216 - DNA, 19 bp, Homo sapiens
  siRNA target sequence for PAPOLA (NM_032632.2,1523-1541).
ggtgattgggttagtgttt

SEQ ID NO: 53217 - DNA, 19 bp, Homo sapiens
  siRNA target sequence for PAPOLA (NM_032632.2,1524-1542).
gtgattgggttagtgttta

SEQ ID NO: 53218 - DNA, 19 bp, Homo sapiens
  siRNA target sequence for PAPOLA (NM_032632.2,1623-1641).
gcaataaacagcaagatgt

SEQ ID NO: 53219 - DNA, 19 bp, Homo sapiens
  siRNA target sequence for PAPOLA (NM_032632.2,1691-1709).
ccatcaactactacctaat

SEQ ID NO: 53220 - DNA, 19 bp, Homo sapiens
  siRNA target sequence for PAPOLA (NM_032632.2,1738-1756).
caacagaaggtgtcaaatt

SEQ ID NO: 53221 - DNA, 19 bp, Homo sapiens
  siRNA target sequence for PAPOLA (NM_032632.2,1751-1769).
caaattgacagctctcaat

SEQ ID NO: 53222 - DNA, 19 bp, Homo sapiens
  siRNA target sequence for PAPOLA (NM_032632.2,1774-1792).
gcagcctcgacttgtctat

SEQ ID NO: 53223 - DNA, 19 bp, Homo sapiens
  siRNA target sequence for PAPOLA (NM_032632.2,1944-1962).
gtgccacaagtaaattcca

SEQ ID NO: 53224 - DNA, 19 bp, Homo sapiens
  siRNA target sequence for PAPOLA (NM_032632.2,1974-1992).
gggggtacatcgagtgaaa

SEQ ID NO: 53225 - DNA, 19 bp, Homo sapiens
  siRNA target sequence for PAPOLA (NM_032632.2,1978-1996).
gtacatcgagtgaaagcat

SEQ ID NO: 53226 - DNA, 19 bp, Homo sapiens
  siRNA target sequence for PAPOLA (NM_032632.2,2062-2080).
cttcaacacgtctggtaaa

SEQ ID NO: 53227 - DNA, 19 bp, Homo sapiens
  siRNA target sequence for PAPOLA (NM_032632.2,2170-2188).
cctcacctcataaagaaga

SEQ ID NO: 53228 - DNA, 19 bp, Homo sapiens
  siRNA target sequence for PAPOLA (NM_032632.2,2187-2205).
gagagtcccaagaaaacca

SEQ ID NO: 53229 - DNA, 19 bp, Homo sapiens
  siRNA target sequence for PAPOLA (NM_032632.2,2365-2383).
gtacagacctttctgatat

SEQ ID NO: 53230 - DNA, 19 bp, Homo sapiens
  siRNA target sequence for PAPOLB (NM_020144.3,301-319).
cacccagaggctaatagaa

SEQ ID NO: 53231 - DNA, 19 bp, Homo sapiens
  siRNA target sequence for PAPOLB (NM_020144.3,438-456).
gtcttccccagtctgtaat

SEQ ID NO: 53232 - DNA, 19 bp, Homo sapiens
  siRNA target sequence for PAPOLB (NM_020144.3,513-531).
cgaaaggcgcagatattga

SEQ ID NO: 53233 - DNA, 19 bp, Homo sapiens
  siRNA target sequence for PAPOLB (NM_020144.3,579-597).
cctcattctatgctaaact

SEQ ID NO: 53234 - DNA, 19 bp, Homo sapiens
  siRNA target sequence for PAPOLB (NM_020144.3,582-600).
cattctatgctaaactgaa

SEQ ID NO: 53235 - DNA, 19 bp, Homo sapiens
  siRNA target sequence for PAPOLB (NM_020144.3,767-785).
gacattagatgcataagaa

SEQ ID NO: 53236 - DNA, 19 bp, Homo sapiens
  siRNA target sequence for PAPOLB (NM_020144.3,876-894).
gggccaagtgccacaatat

SEQ ID NO: 53237 - DNA, 19 bp, Homo sapiens
  siRNA target sequence for PAPOLB (NM_020144.3,879-897).
ccaagtgccacaatatcta

SEQ ID NO: 53238 - DNA, 19 bp, Homo sapiens
  siRNA target sequence for PAPOLB (NM_020144.3,880-898).
caagtgccacaatatctat

SEQ ID NO: 53239 - DNA, 19 bp, Homo sapiens
  siRNA target sequence for PAPOLB (NM_020144.3,1031-1049).
ccaaacccagtgttactga

SEQ ID NO: 53240 - DNA, 19 bp, Homo sapiens
  siRNA target sequence for PAPOLB (NM_020144.3,1161-1179).
ccacatacaacgtgtctat

SEQ ID NO: 53241 - DNA, 19 bp, Homo sapiens
  siRNA target sequence for PAPOLB (NM_020144.3,1162-1180).
cacatacaacgtgtctatt

SEQ ID NO: 53242 - DNA, 19 bp, Homo sapiens
  siRNA target sequence for PAPOLB (NM_020144.3,1223-1241).
gctatcacacacgagattt

SEQ ID NO: 53243 - DNA, 19 bp, Homo sapiens
  siRNA target sequence for PAPOLB (NM_020144.3,1224-1242).
ctatcacacacgagatttt

SEQ ID NO: 53244 - DNA, 19 bp, Homo sapiens
  siRNA target sequence for PAPOLB (NM_020144.3,1228-1246).
cacacacgagattttgcta

SEQ ID NO: 53245 - DNA, 19 bp, Homo sapiens
  siRNA target sequence for PAPOLB (NM_020144.3,1232-1250).
cacgagattttgctaagta

SEQ ID NO: 53246 - DNA, 19 bp, Homo sapiens
  siRNA target sequence for PAPOLB (NM_020144.3,1501-1519).
gattgggttagggctaaaa

SEQ ID NO: 53247 - DNA, 19 bp, Homo sapiens
  siRNA target sequence for PAPOLB (NM_020144.3,1514-1532).
ctaaaaaagccagataatt

SEQ ID NO: 53248 - DNA, 19 bp, Homo sapiens
  siRNA target sequence for PAPOLB (NM_020144.3,1522-1540).
gccagataattctgaaatt

SEQ ID NO: 53249 - DNA, 19 bp, Homo sapiens
  siRNA target sequence for PAPOLB (NM_020144.3,1619-1637).
gagatgggtatgaaaatta

SEQ ID NO: 53250 - DNA, 19 bp, Homo sapiens
  siRNA target sequence for PAPOLB (NM_020144.3,1711-1729).
ctcaacagaaggtagaaga

SEQ ID NO: 53251 - DNA, 19 bp, Homo sapiens
  siRNA target sequence for PAPOLB (NM_020144.3,1713-1731).
caacagaaggtagaagatt

SEQ ID NO: 53252 - DNA, 19 bp, Homo sapiens
  siRNA target sequence for PAPOLB (NM_020144.3,1721-1739).
ggtagaagattgacagatt

SEQ ID NO: 53253 - DNA, 19 bp, Homo sapiens
  siRNA target sequence for PAPOLB (NM_020144.3,1722-1740).
gtagaagattgacagattt

SEQ ID NO: 53254 - DNA, 19 bp, Homo sapiens
  siRNA target sequence for PAPOLB (NM_020144.3,1797-1815).
catctactagcactatgaa

SEQ ID NO: 53255 - DNA, 19 bp, Homo sapiens
  siRNA target sequence for PAPOLB (NM_020144.3,1856-1874).
cctgccttggctgtaatga

SEQ ID NO: 53256 - DNA, 19 bp, Homo sapiens
  siRNA target sequence for PAPOLB (NM_020144.3,1915-1933).
gcaacaggtgaataccaat

SEQ ID NO: 53257 - DNA, 19 bp, Homo sapiens
  siRNA target sequence for PAPOLB (NM_020144.3,1919-1937).
caggtgaataccaatgaaa

SEQ ID NO: 53258 - DNA, 19 bp, Homo sapiens
  siRNA target sequence for PAPOLB (NM_020144.3,1941-1959).
caggggttgcattaaacga

SEQ ID NO: 53259 - DNA, 19 bp, Homo sapiens
  siRNA target sequence for PAPOLB (NM_020144.3,1943-1961).
ggggttgcattaaacgaaa

SEQ ID NO: 53260 - DNA, 19 bp, Homo sapiens
  siRNA target sequence for PAPOLB (NM_020144.3,2011-2029).
catggtcgccagagttgtt

SEQ ID NO: 53261 - DNA, 19 bp, Homo sapiens
  siRNA target sequence for PAPOLG (NM_022894.2,268-286).
cagcgtcaacaaaagcatt

SEQ ID NO: 53262 - DNA, 19 bp, Homo sapiens
  siRNA target sequence for PAPOLG (NM_022894.2,317-335).
ctcctaaagaaattgatca

SEQ ID NO: 53263 - DNA, 19 bp, Homo sapiens
  siRNA target sequence for PAPOLG (NM_022894.2,360-378).
cgccatgaaaccatttgga

SEQ ID NO: 53264 - DNA, 19 bp, Homo sapiens
  siRNA target sequence for PAPOLG (NM_022894.2,410-428).
ggctggtggttcttggtaa

SEQ ID NO: 53265 - DNA, 19 bp, Homo sapiens
  siRNA target sequence for PAPOLG (NM_022894.2,418-436).
gttcttggtaaattgaaca

SEQ ID NO: 53266 - DNA, 19 bp, Homo sapiens
  siRNA target sequence for PAPOLG (NM_022894.2,421-439).
cttggtaaattgaacaatt

SEQ ID NO: 53267 - DNA, 19 bp, Homo sapiens
  siRNA target sequence for PAPOLG (NM_022894.2,498-516).
ggctactgttggtggtaaa

SEQ ID NO: 53268 - DNA, 19 bp, Homo sapiens
  siRNA target sequence for PAPOLG (NM_022894.2,499-517).
gctactgttggtggtaaaa

SEQ ID NO: 53269 - DNA, 19 bp, Homo sapiens
  siRNA target sequence for PAPOLG (NM_022894.2,508-526).
ggtggtaaaattttcacat

SEQ ID NO: 53270 - DNA, 19 bp, Homo sapiens
  siRNA target sequence for PAPOLG (NM_022894.2,554-572).
ccaaaggagctgacattga

SEQ ID NO: 53271 - DNA, 19 bp, Homo sapiens
  siRNA target sequence for PAPOLG (NM_022894.2,643-661).
catcaagatggcattagaa

SEQ ID NO: 53272 - DNA, 19 bp, Homo sapiens
  siRNA target sequence for PAPOLG (NM_022894.2,646-664).
caagatggcattagaaact

SEQ ID NO: 53273 - DNA, 19 bp, Homo sapiens
  siRNA target sequence for PAPOLG (NM_022894.2,716-734).
gtattgaaattgatctagt

SEQ ID NO: 53274 - DNA, 19 bp, Homo sapiens
  siRNA target sequence for PAPOLG (NM_022894.2,747-765).
ggcaatacaaaccatatca

SEQ ID NO: 53275 - DNA, 19 bp, Homo sapiens
  siRNA target sequence for PAPOLG (NM_022894.2,758-776).
ccatatcagataatttaga

SEQ ID NO: 53276 - DNA, 19 bp, Homo sapiens
  siRNA target sequence for PAPOLG (NM_022894.2,793-811).
cgcctgagaagccttgata

SEQ ID NO: 53277 - DNA, 19 bp, Homo sapiens
  siRNA target sequence for PAPOLG (NM_022894.2,794-812).
gcctgagaagccttgatat

SEQ ID NO: 53278 - DNA, 19 bp, Homo sapiens
  siRNA target sequence for PAPOLG (NM_022894.2,804-822).
ccttgatataaggtgtatt

SEQ ID NO: 53279 - DNA, 19 bp, Homo sapiens
  siRNA target sequence for PAPOLG (NM_022894.2,815-833).
ggtgtattcgcagcttaaa

SEQ ID NO: 53280 - DNA, 19 bp, Homo sapiens
  siRNA target sequence for PAPOLG (NM_022894.2,816-834).
gtgtattcgcagcttaaat

SEQ ID NO: 53281 - DNA, 19 bp, Homo sapiens
  siRNA target sequence for PAPOLG (NM_022894.2,828-846).
cttaaatggttgtagagtt

SEQ ID NO: 53282 - DNA, 19 bp, Homo sapiens
  siRNA target sequence for PAPOLG (NM_022894.2,868-886).
gtgccaaataaagaaactt

SEQ ID NO: 53283 - DNA, 19 bp, Homo sapiens
  siRNA target sequence for PAPOLG (NM_022894.2,870-888).
gccaaataaagaaactttt

SEQ ID NO: 53284 - DNA, 19 bp, Homo sapiens
  siRNA target sequence for PAPOLG (NM_022894.2,871-889).
ccaaataaagaaactttta

SEQ ID NO: 53285 - DNA, 19 bp, Homo sapiens
  siRNA target sequence for PAPOLG (NM_022894.2,894-912).
caccctaagagctgtcaaa

SEQ ID NO: 53286 - DNA, 19 bp, Homo sapiens
  siRNA target sequence for PAPOLG (NM_022894.2,896-914).
ccctaagagctgtcaaatt

SEQ ID NO: 53287 - DNA, 19 bp, Homo sapiens
  siRNA target sequence for PAPOLG (NM_022894.2,897-915).
cctaagagctgtcaaatta

SEQ ID NO: 53288 - DNA, 19 bp, Homo sapiens
  siRNA target sequence for PAPOLG (NM_022894.2,898-916).
ctaagagctgtcaaattat

SEQ ID NO: 53289 - DNA, 19 bp, Homo sapiens
  siRNA target sequence for PAPOLG (NM_022894.2,909-927).
caaattatgggcaaaacga

SEQ ID NO: 53290 - DNA, 19 bp, Homo sapiens
  siRNA target sequence for PAPOLG (NM_022894.2,918-936).
ggcaaaacgacgtggtatt

SEQ ID NO: 53291 - DNA, 19 bp, Homo sapiens
  siRNA target sequence for PAPOLG (NM_022894.2,919-937).
gcaaaacgacgtggtattt

SEQ ID NO: 53292 - DNA, 19 bp, Homo sapiens
  siRNA target sequence for PAPOLG (NM_022894.2,920-938).
caaaacgacgtggtattta

SEQ ID NO: 53293 - DNA, 19 bp, Homo sapiens
  siRNA target sequence for PAPOLG (NM_022894.2,926-944).
gacgtggtatttattccaa

SEQ ID NO: 53294 - DNA, 19 bp, Homo sapiens
  siRNA target sequence for PAPOLG (NM_022894.2,995-1013).
cttgccaattgtatccaaa

SEQ ID NO: 53295 - DNA, 19 bp, Homo sapiens
  siRNA target sequence for PAPOLG (NM_022894.2,999-1017).
ccaattgtatccaaatgca

SEQ ID NO: 53296 - DNA, 19 bp, Homo sapiens
  siRNA target sequence for PAPOLG (NM_022894.2,1099-1117).
gaagaaagcaatttgaatt

SEQ ID NO: 53297 - DNA, 19 bp, Homo sapiens
  siRNA target sequence for PAPOLG (NM_022894.2,1125-1143).
ctgggatcctcgggtaaat

SEQ ID NO: 53298 - DNA, 19 bp, Homo sapiens
  siRNA target sequence for PAPOLG (NM_022894.2,1128-1146).
ggatcctcgggtaaatcca

SEQ ID NO: 53299 - DNA, 19 bp, Homo sapiens
  siRNA target sequence for PAPOLG (NM_022894.2,1129-1147).
gatcctcgggtaaatccat

SEQ ID NO: 53300 - DNA, 19 bp, Homo sapiens
  siRNA target sequence for PAPOLG (NM_022894.2,1135-1153).
cgggtaaatccatcagata

SEQ ID NO: 53301 - DNA, 19 bp, Homo sapiens
  siRNA target sequence for PAPOLG (NM_022894.2,1148-1166).
cagataggtatcatctcat

SEQ ID NO: 53302 - DNA, 19 bp, Homo sapiens
  siRNA target sequence for PAPOLG (NM_022894.2,1192-1210).
caacagaattctacgtata

SEQ ID NO: 53303 - DNA, 19 bp, Homo sapiens
  siRNA target sequence for PAPOLG (NM_022894.2,1218-1236).
cacatcaactcgaacagta

SEQ ID NO: 53304 - DNA, 19 bp, Homo sapiens
  siRNA target sequence for PAPOLG (NM_022894.2,1220-1238).
catcaactcgaacagtaat

SEQ ID NO: 53305 - DNA, 19 bp, Homo sapiens
  siRNA target sequence for PAPOLG (NM_022894.2,1223-1241).
caactcgaacagtaatggt

SEQ ID NO: 53306 - DNA, 19 bp, Homo sapiens
  siRNA target sequence for PAPOLG (NM_022894.2,1293-1311).
gtcagattggtccaaacta

SEQ ID NO: 53307 - DNA, 19 bp, Homo sapiens
  siRNA target sequence for PAPOLG (NM_022894.2,1295-1313).
cagattggtccaaactact

SEQ ID NO: 53308 - DNA, 19 bp, Homo sapiens
  siRNA target sequence for PAPOLG (NM_022894.2,1317-1335).
gccaccgaatttctttcaa

SEQ ID NO: 53309 - DNA, 19 bp, Homo sapiens
  siRNA target sequence for PAPOLG (NM_022894.2,1318-1336).
ccaccgaatttctttcaaa

SEQ ID NO: 53310 - DNA, 19 bp, Homo sapiens
  siRNA target sequence for PAPOLG (NM_022894.2,1338-1356).
gtatagacattatatagta

SEQ ID NO: 53311 - DNA, 19 bp, Homo sapiens
  siRNA target sequence for PAPOLG (NM_022894.2,1365-1383).
cagcgcatcaacagaagaa

SEQ ID NO: 53312 - DNA, 19 bp, Homo sapiens
  siRNA target sequence for PAPOLG (NM_022894.2,1399-1417).
gttggattagtagaatcta

SEQ ID NO: 53313 - DNA, 19 bp, Homo sapiens
  siRNA target sequence for PAPOLG (NM_022894.2,1415-1433).
ctaaaatccgtgtacttgt

SEQ ID NO: 53314 - DNA, 19 bp, Homo sapiens
  siRNA target sequence for PAPOLG (NM_022894.2,1440-1458).
cttggaacggaatgaattt

SEQ ID NO: 53315 - DNA, 19 bp, Homo sapiens
  siRNA target sequence for PAPOLG (NM_022894.2,1444-1462).
gaacggaatgaatttatta

SEQ ID NO: 53316 - DNA, 19 bp, Homo sapiens
  siRNA target sequence for PAPOLG (NM_022894.2,1507-1525).
catcataaagacaacaatt

SEQ ID NO: 53317 - DNA, 19 bp, Homo sapiens
  siRNA target sequence for PAPOLG (NM_022894.2,1516-1534).
gacaacaattacgtatcaa

SEQ ID NO: 53318 - DNA, 19 bp, Homo sapiens
  siRNA target sequence for PAPOLG (NM_022894.2,1538-1556).
ggttccttgggataatttt

SEQ ID NO: 53319 - DNA, 19 bp, Homo sapiens
  siRNA target sequence for PAPOLG (NM_022894.2,1576-1594).
gaaagtgtcaacatagact

SEQ ID NO: 53320 - DNA, 19 bp, Homo sapiens
  siRNA target sequence for PAPOLG (NM_022894.2,1582-1600).
gtcaacatagacttgacat

SEQ ID NO: 53321 - DNA, 19 bp, Homo sapiens
  siRNA target sequence for PAPOLG (NM_022894.2,1629-1647).
gtacagacaggcaaacaat

SEQ ID NO: 53322 - DNA, 19 bp, Homo sapiens
  siRNA target sequence for PAPOLG (NM_022894.2,1634-1652).
gacaggcaaacaatataaa

SEQ ID NO: 53323 - DNA, 19 bp, Homo sapiens
  siRNA target sequence for PAPOLG (NM_022894.2,1671-1689).
gaaaattgaagcaactcat

SEQ ID NO: 53324 - DNA, 19 bp, Homo sapiens
  siRNA target sequence for PAPOLG (NM_022894.2,1678-1696).
gaagcaactcatgtaaaga

SEQ ID NO: 53325 - DNA, 19 bp, Homo sapiens
  siRNA target sequence for PAPOLG (NM_022894.2,1756-1774).
ctctctgatgtcaatcgaa

SEQ ID NO: 53326 - DNA, 19 bp, Homo sapiens
  siRNA target sequence for PAPOLG (NM_022894.2,1782-1800).
cggacttcaatccaaaaga

SEQ ID NO: 53327 - DNA, 19 bp, Homo sapiens
  siRNA target sequence for PAPOLG (NM_022894.2,1784-1802).
gacttcaatccaaaagatt

SEQ ID NO: 53328 - DNA, 19 bp, Homo sapiens
  siRNA target sequence for PAPOLG (NM_022894.2,1786-1804).
cttcaatccaaaagattgt

SEQ ID NO: 53329 - DNA, 19 bp, Homo sapiens
  siRNA target sequence for PAPOLG (NM_022894.2,1830-1848).
ctccagagacactgataat

SEQ ID NO: 53330 - DNA, 19 bp, Homo sapiens
  siRNA target sequence for PAPOLG (NM_022894.2,1878-1896).
gtctgatagcccttctgta

SEQ ID NO: 53331 - DNA, 19 bp, Homo sapiens
  siRNA target sequence for PAPOLG (NM_022894.2,2031-2049).
ccccactgtgtgtaccatt

SEQ ID NO: 53332 - DNA, 19 bp, Homo sapiens
  siRNA target sequence for PAPOLG (NM_022894.2,2054-2072).
ccgtagtaggacgaaatgt

SEQ ID NO: 53333 - DNA, 19 bp, Homo sapiens
  siRNA target sequence for PAPOLG (NM_022894.2,2056-2074).
gtagtaggacgaaatgtca

SEQ ID NO: 53334 - DNA, 19 bp, Homo sapiens
  siRNA target sequence for PAPOLG (NM_022894.2,2062-2080).
ggacgaaatgtcattccta

SEQ ID NO: 53335 - DNA, 19 bp, Homo sapiens
  siRNA target sequence for PAPOLG (NM_022894.2,2071-2089).
gtcattcctagaatcacaa

SEQ ID NO: 53336 - DNA, 19 bp, Homo sapiens
  siRNA target sequence for PAPOLG (NM_022894.2,2109-2127).
gggacaaccgcatctgaat

SEQ ID NO: 53337 - DNA, 19 bp, Homo sapiens
  siRNA target sequence for PAPOLG (NM_022894.2,2118-2136).
gcatctgaatggaatgtca

SEQ ID NO: 53338 - DNA, 19 bp, Homo sapiens
  siRNA target sequence for PAPOLG (NM_022894.2,2124-2142).
gaatggaatgtcaaatata

SEQ ID NO: 53339 - DNA, 19 bp, Homo sapiens
  siRNA target sequence for PAPOLG (NM_022894.2,2128-2146).
ggaatgtcaaatataacta

SEQ ID NO: 53340 - DNA, 19 bp, Homo sapiens
  siRNA target sequence for PAPOLG (NM_022894.2,2211-2229).
cgtagaaaagtttattcga

SEQ ID NO: 53341 - DNA, 19 bp, Homo sapiens
  siRNA target sequence for PAPOLG (NM_022894.2,2227-2245).
cgacttgaatcaacattta

SEQ ID NO: 53342 - DNA, 19 bp, Homo sapiens
  siRNA target sequence for PAPOLG (NM_022894.2,2306-2324).
ctatgcctattccaactat

SEQ ID NO: 53343 - DNA, 19 bp, Homo sapiens
  siRNA target sequence for PAPOLG (NM_022894.2,2311-2329).
cctattccaactattgata

SEQ ID NO: 53344 - DNA, 19 bp, Homo sapiens
  siRNA target sequence for PAPOLG (NM_022894.2,2326-2344).
gatacatcacgcaaaaaga

SEQ ID NO: 53345 - DNA, 19 bp, Homo sapiens
  siRNA target sequence for PAPOLG (NM_022894.2,2343-2361).
gagactacccagtaaagaa

SEQ ID NO: 53346 - DNA, 19 bp, Homo sapiens
  siRNA target sequence for PAPOLG (NM_022894.2,2345-2363).
gactacccagtaaagaact

SEQ ID NO: 53347 - DNA, 19 bp, Homo sapiens
  siRNA target sequence for PMSCL1 (NM_005033.1,490-508).
gatgtctaagaaattcgaa

SEQ ID NO: 53348 - DNA, 19 bp, Homo sapiens
  siRNA target sequence for PMSCL1 (NM_005033.1,499-517).
gaaattcgaagtgtataga

SEQ ID NO: 53349 - DNA, 19 bp, Homo sapiens
  siRNA target sequence for PMSCL1 (NM_005033.1,564-582).
cgtgtagacctacatttat

SEQ ID NO: 53350 - DNA, 19 bp, Homo sapiens
  siRNA target sequence for PMSCL1 (NM_005033.1,625-643).
caatcgtggccttatgtca

SEQ ID NO: 53351 - DNA, 19 bp, Homo sapiens
  siRNA target sequence for PMSCL1 (NM_005033.1,675-693).
gatgaagtaacactgtata

SEQ ID NO: 53352 - DNA, 19 bp, Homo sapiens
  siRNA target sequence for PMSCL1 (NM_005033.1,704-722).
gcgtgatcctgtaccatta

SEQ ID NO: 53353 - DNA, 19 bp, Homo sapiens
  siRNA target sequence for PMSCL1 (NM_005033.1,705-723).
cgtgatcctgtaccattaa

SEQ ID NO: 53354 - DNA, 19 bp, Homo sapiens
  siRNA target sequence for PMSCL1 (NM_005033.1,708-726).
gatcctgtaccattaagta

SEQ ID NO: 53355 - DNA, 19 bp, Homo sapiens
  siRNA target sequence for PMSCL1 (NM_005033.1,842-860).
gaacaaacatcgagagatt

SEQ ID NO: 53356 - DNA, 19 bp, Homo sapiens
  siRNA target sequence for PMSCL1 (NM_005033.1,849-867).
catcgagagatttgtacta

SEQ ID NO: 53357 - DNA, 19 bp, Homo sapiens
  siRNA target sequence for PMSCL1 (NM_005033.1,875-893).
cagtggtgggataatgcta

SEQ ID NO: 53358 - DNA, 19 bp, Homo sapiens
  siRNA target sequence for PMSCL1 (NM_005033.1,879-897).
ggtgggataatgctactaa

SEQ ID NO: 53359 - DNA, 19 bp, Homo sapiens
  siRNA target sequence for PMSCL1 (NM_005033.1,906-924).
gttctgagatgcagtaaaa

SEQ ID NO: 53360 - DNA, 19 bp, Homo sapiens
  siRNA target sequence for PMSCL1 (NM_005033.1,1027-1045).
ctatagcaaatcaaaggat

SEQ ID NO: 53361 - DNA, 19 bp, Homo sapiens
  siRNA target sequence for PMSCL1 (NM_005033.1,1061-1079).
ggaaaaggcccctattgat

SEQ ID NO: 53362 - DNA, 19 bp, Homo sapiens
  siRNA target sequence for PMSCL1 (NM_005033.1,1062-1080).
gaaaaggcccctattgata

SEQ ID NO: 53363 - DNA, 19 bp, Homo sapiens
  siRNA target sequence for PMSCL1 (NM_005033.1,1131-1149).
ccttcagaagttgtttcta

SEQ ID NO: 53364 - DNA, 19 bp, Homo sapiens
  siRNA target sequence for PMSCL1 (NM_005033.1,1246-1264).
gcggtggtgatcaagctat

SEQ ID NO: 53365 - DNA, 19 bp, Homo sapiens
  siRNA target sequence for PMSCL1 (NM_005033.1,1299-1317).
gaagtctctgatattggaa

SEQ ID NO: 53366 - DNA, 19 bp, Homo sapiens
  siRNA target sequence for PMSCL1 (NM_005033.1,1318-1336).
gccaagatgctcccataat

SEQ ID NO: 53367 - DNA, 19 bp, Homo sapiens
  siRNA target sequence for PMSCL1 (NM_005033.1,1319-1337).
ccaagatgctcccataata

SEQ ID NO: 53368 - DNA, 19 bp, Homo sapiens
  siRNA target sequence for PMSCL1 (NM_005033.1,1323-1341).
gatgctcccataatactct

SEQ ID NO: 53369 - DNA, 19 bp, Homo sapiens
  siRNA target sequence for PMSCL1 (NM_005033.1,1329-1347).
cccataatactctcagata

SEQ ID NO: 53370 - DNA, 19 bp, Homo sapiens
  siRNA target sequence for PMSCL1 (NM_005033.1,1331-1349).
cataatactctcagatagt

SEQ ID NO: 53371 - DNA, 19 bp, Homo sapiens
  siRNA target sequence for PMSCL1 (NM_005033.1,1374-1392).
gaaccagacaagaatccaa

SEQ ID NO: 53372 - DNA, 19 bp, Homo sapiens
  siRNA target sequence for PMSCL2 (NM_002685.1,77-95).
ggcgaccagcgcaaccaaa

SEQ ID NO: 53373 - DNA, 19 bp, Homo sapiens
  siRNA target sequence for PMSCL2 (NM_002685.1,78-96).
gcgaccagcgcaaccaaat

SEQ ID NO: 53374 - DNA, 19 bp, Homo sapiens
  siRNA target sequence for PMSCL2 (NM_002685.1,134-152).
cgacagctttgtgaagttt

SEQ ID NO: 53375 - DNA, 19 bp, Homo sapiens
  siRNA target sequence for PMSCL2 (NM_002685.1,207-225).
ggcgatgagtatgattttt

SEQ ID NO: 53376 - DNA, 19 bp, Homo sapiens
  siRNA target sequence for PMSCL2 (NM_002685.1,208-226).
gcgatgagtatgattttta

SEQ ID NO: 53377 - DNA, 19 bp, Homo sapiens
  siRNA target sequence for PMSCL2 (NM_002685.1,282-300).
cagtgcatgagcagagtaa

SEQ ID NO: 53378 - DNA, 19 bp, Homo sapiens
  siRNA target sequence for PMSCL2 (NM_002685.1,312-330).
gggtgtcgcagcaacatta

SEQ ID NO: 53379 - DNA, 19 bp, Homo sapiens
  siRNA target sequence for PMSCL2 (NM_002685.1,313-331).
ggtgtcgcagcaacattaa

SEQ ID NO: 53380 - DNA, 19 bp, Homo sapiens
  siRNA target sequence for PMSCL2 (NM_002685.1,326-344).
cattaaggatcgaagtaaa

SEQ ID NO: 53381 - DNA, 19 bp, Homo sapiens
  siRNA target sequence for PMSCL2 (NM_002685.1,362-380).
caagtttgatttactagtt

SEQ ID NO: 53382 - DNA, 19 bp, Homo sapiens
  siRNA target sequence for PMSCL2 (NM_002685.1,431-449).
ctcaggtgtaaacaagaat

SEQ ID NO: 53383 - DNA, 19 bp, Homo sapiens
  siRNA target sequence for PMSCL2 (NM_002685.1,509-527).
ccgtaaggcagcagaatat

SEQ ID NO: 53384 - DNA, 19 bp, Homo sapiens
  siRNA target sequence for PMSCL2 (NM_002685.1,554-572).
ccggctgcttcatgcaaaa

SEQ ID NO: 53385 - DNA, 19 bp, Homo sapiens
  siRNA target sequence for PMSCL2 (NM_002685.1,555-573).
cggctgcttcatgcaaaaa

SEQ ID NO: 53386 - DNA, 19 bp, Homo sapiens
  siRNA target sequence for PMSCL2 (NM_002685.1,581-599).
ccgacctcagctcaagttt

SEQ ID NO: 53387 - DNA, 19 bp, Homo sapiens
  siRNA target sequence for PMSCL2 (NM_002685.1,623-641).
cacaccatttcttcctaaa

SEQ ID NO: 53388 - DNA, 19 bp, Homo sapiens
  siRNA target sequence for PMSCL2 (NM_002685.1,797-815).
gtttgcacatccttatcaa

SEQ ID NO: 53389 - DNA, 19 bp, Homo sapiens
  siRNA target sequence for PMSCL2 (NM_002685.1,807-825).
ccttatcaatatgaactaa

SEQ ID NO: 53390 - DNA, 19 bp, Homo sapiens
  siRNA target sequence for PMSCL2 (NM_002685.1,813-831).
caatatgaactaaatcact

SEQ ID NO: 53391 - DNA, 19 bp, Homo sapiens
  siRNA target sequence for PMSCL2 (NM_002685.1,869-887).
ccagttatacagacctata

SEQ ID NO: 53392 - DNA, 19 bp, Homo sapiens
  siRNA target sequence for PMSCL2 (NM_002685.1,891-909).
gagacaccatgccatttca

SEQ ID NO: 53393 - DNA, 19 bp, Homo sapiens
  siRNA target sequence for PMSCL2 (NM_002685.1,893-911).
gacaccatgccatttcata

SEQ ID NO: 53394 - DNA, 19 bp, Homo sapiens
  siRNA target sequence for PMSCL2 (NM_002685.1,897-915).
ccatgccatttcatatcct

SEQ ID NO: 53395 - DNA, 19 bp, Homo sapiens
  siRNA target sequence for PMSCL2 (NM_002685.1,927-945).
ctcgtggaactcaacgaaa

SEQ ID NO: 53396 - DNA, 19 bp, Homo sapiens
  siRNA target sequence for PMSCL2 (NM_002685.1,941-959).
cgaaaagctcttgaattgt

SEQ ID NO: 53397 - DNA, 19 bp, Homo sapiens
  siRNA target sequence for PMSCL2 (NM_002685.1,953-971).
gaattgtcaggaatttgca

SEQ ID NO: 53398 - DNA, 19 bp, Homo sapiens
  siRNA target sequence for PMSCL2 (NM_002685.1,1033-1051).
ctactcggacggaagactt

SEQ ID NO: 53399 - DNA, 19 bp, Homo sapiens
  siRNA target sequence for PMSCL2 (NM_002685.1,1036-1054).
ctcggacggaagacttcat

SEQ ID NO: 53400 - DNA, 19 bp, Homo sapiens
  siRNA target sequence for PMSCL2 (NM_002685.1,1038-1056).
cggacggaagacttcatca

SEQ ID NO: 53401 - DNA, 19 bp, Homo sapiens
  siRNA target sequence for PMSCL2 (NM_002685.1,1039-1057).
ggacggaagacttcatcat

SEQ ID NO: 53402 - DNA, 19 bp, Homo sapiens
  siRNA target sequence for PMSCL2 (NM_002685.1,1040-1058).
gacggaagacttcatcatt

SEQ ID NO: 53403 - DNA, 19 bp, Homo sapiens
  siRNA target sequence for PMSCL2 (NM_002685.1,1042-1060).
cggaagacttcatcattga

SEQ ID NO: 53404 - DNA, 19 bp, Homo sapiens
  siRNA target sequence for PMSCL2 (NM_002685.1,1071-1089).
cttcgaagtgacatgtaca

SEQ ID NO: 53405 - DNA, 19 bp, Homo sapiens
  siRNA target sequence for PMSCL2 (NM_002685.1,1075-1093).
gaagtgacatgtacattct

SEQ ID NO: 53406 - DNA, 19 bp, Homo sapiens
  siRNA target sequence for PMSCL2 (NM_002685.1,1078-1096).
gtgacatgtacattctcaa

SEQ ID NO: 53407 - DNA, 19 bp, Homo sapiens
  siRNA target sequence for PMSCL2 (NM_002685.1,1108-1126).
cagacccagccatcgttaa

SEQ ID NO: 53408 - DNA, 19 bp, Homo sapiens
  siRNA target sequence for PMSCL2 (NM_002685.1,1117-1135).
ccatcgttaaggtctttca

SEQ ID NO: 53409 - DNA, 19 bp, Homo sapiens
  siRNA target sequence for PMSCL2 (NM_002685.1,1138-1156).
gtgctgattcagacataga

SEQ ID NO: 53410 - DNA, 19 bp, Homo sapiens
  siRNA target sequence for PMSCL2 (NM_002685.1,1151-1169).
catagaatggctacagaaa

SEQ ID NO: 53411 - DNA, 19 bp, Homo sapiens
  siRNA target sequence for PMSCL2 (NM_002685.1,1176-1194).
gggttgtatgtagtaaaca

SEQ ID NO: 53412 - DNA, 19 bp, Homo sapiens
  siRNA target sequence for PMSCL2 (NM_002685.1,1177-1195).
ggttgtatgtagtaaacat

SEQ ID NO: 53413 - DNA, 19 bp, Homo sapiens
  siRNA target sequence for PMSCL2 (NM_002685.1,1237-1255).
ggcactcactcgatcatct

SEQ ID NO: 53414 - DNA, 19 bp, Homo sapiens
  siRNA target sequence for PMSCL2 (NM_002685.1,1270-1288).
gcaacgtggactcaaacaa

SEQ ID NO: 53415 - DNA, 19 bp, Homo sapiens
  siRNA target sequence for PMSCL2 (NM_002685.1,1275-1293).
gtggactcaaacaagcaat

SEQ ID NO: 53416 - DNA, 19 bp, Homo sapiens
  siRNA target sequence for PMSCL2 (NM_002685.1,1277-1295).
ggactcaaacaagcaatat

SEQ ID NO: 53417 - DNA, 19 bp, Homo sapiens
  siRNA target sequence for PMSCL2 (NM_002685.1,1351-1369).
gggatgacacccattacct

SEQ ID NO: 53418 - DNA, 19 bp, Homo sapiens
  siRNA target sequence for PMSCL2 (NM_002685.1,1368-1386).
ctgctatatatctatgaca

SEQ ID NO: 53419 - DNA, 19 bp, Homo sapiens
  siRNA target sequence for PMSCL2 (NM_002685.1,1505-1523).
gtcctaccttgaactctat

SEQ ID NO: 53420 - DNA, 19 bp, Homo sapiens
  siRNA target sequence for PMSCL2 (NM_002685.1,1643-1661).
catgatgctgaaaatagct

SEQ ID NO: 53421 - DNA, 19 bp, Homo sapiens
  siRNA target sequence for PMSCL2 (NM_002685.1,1676-1694).
ggaacctcagggcatcata

SEQ ID NO: 53422 - DNA, 19 bp, Homo sapiens
  siRNA target sequence for PMSCL2 (NM_002685.1,1726-1744).
ggcagcagatcaacgaaat

SEQ ID NO: 53423 - DNA, 19 bp, Homo sapiens
  siRNA target sequence for PMSCL2 (NM_002685.1,1840-1858).
gattggagaatgttctctt

SEQ ID NO: 53424 - DNA, 19 bp, Homo sapiens
  siRNA target sequence for PMSCL2 (NM_002685.1,1884-1902).
cctccggatggctatccaa

SEQ ID NO: 53425 - DNA, 19 bp, Homo sapiens
  siRNA target sequence for PMSCL2 (NM_002685.1,1888-1906).
cggatggctatccaatcat

SEQ ID NO: 53426 - DNA, 19 bp, Homo sapiens
  siRNA target sequence for PMSCL2 (NM_002685.1,2002-2020).
cagctgtcatcacgttatt

SEQ ID NO: 53427 - DNA, 19 bp, Homo sapiens
  siRNA target sequence for PMSCL2 (NM_002685.1,2029-2047).
ctagtgctgaagacagtaa

SEQ ID NO: 53428 - DNA, 19 bp, Homo sapiens
  siRNA target sequence for PMSCL2 (NM_002685.1,2273-2291).
ggtcgtgctagaaaatgct

SEQ ID NO: 53429 - DNA, 19 bp, Homo sapiens
  siRNA target sequence for PMSCL2 (NM_002685.1,2348-2366).
gaagaaacgactcaaaatt

SEQ ID NO: 53430 - DNA, 19 bp, Homo sapiens
  siRNA target sequence for PMSCL2 (NM_002685.1,2476-2494).
ctcagtttgatccaaataa

SEQ ID NO: 53431 - DNA, 19 bp, Homo sapiens
  siRNA target sequence for PMSCL2 (NM_002685.1,2503-2521).
cgtctggcaagaaatgcat

SEQ ID NO: 53432 - DNA, 19 bp, Homo sapiens
  siRNA target sequence for PMSCL2 (NM_002685.1,2504-2522).
gtctggcaagaaatgcatt

SEQ ID NO: 53433 - DNA, 19 bp, Homo sapiens
  siRNA target sequence for PNPT1 (NM_033109.2,244-262).
ggtcacagcggtcagtaaa

SEQ ID NO: 53434 - DNA, 19 bp, Homo sapiens
  siRNA target sequence for PNPT1 (NM_033109.2,245-263).
gtcacagcggtcagtaaaa

SEQ ID NO: 53435 - DNA, 19 bp, Homo sapiens
  siRNA target sequence for PNPT1 (NM_033109.2,296-314).
gtggttgactacagacaaa

SEQ ID NO: 53436 - DNA, 19 bp, Homo sapiens
  siRNA target sequence for PNPT1 (NM_033109.2,298-316).
ggttgactacagacaaaaa

SEQ ID NO: 53437 - DNA, 19 bp, Homo sapiens
  siRNA target sequence for PNPT1 (NM_033109.2,333-351).
gaattcccacaaactatct

SEQ ID NO: 53438 - DNA, 19 bp, Homo sapiens
  siRNA target sequence for PNPT1 (NM_033109.2,366-384).
gtacttctgataaagaaat

SEQ ID NO: 53439 - DNA, 19 bp, Homo sapiens
  siRNA target sequence for PNPT1 (NM_033109.2,396-414).
gaataatagatcgttcaat

SEQ ID NO: 53440 - DNA, 19 bp, Homo sapiens
  siRNA target sequence for PNPT1 (NM_033109.2,429-447).
cagctggctacttctatga

SEQ ID NO: 53441 - DNA, 19 bp, Homo sapiens
  siRNA target sequence for PNPT1 (NM_033109.2,652-670).
ggttgctggagcacctaaa

SEQ ID NO: 53442 - DNA, 19 bp, Homo sapiens
  siRNA target sequence for PNPT1 (NM_033109.2,653-671).
gttgctggagcacctaaaa

SEQ ID NO: 53443 - DNA, 19 bp, Homo sapiens
  siRNA target sequence for PNPT1 (NM_033109.2,692-710).
gcctctgcagagaacattt

SEQ ID NO: 53444 - DNA, 19 bp, Homo sapiens
  siRNA target sequence for PNPT1 (NM_033109.2,814-832).
gacacctcagaagttattt

SEQ ID NO: 53445 - DNA, 19 bp, Homo sapiens
  siRNA target sequence for PNPT1 (NM_033109.2,834-852).
ccccttcgccagagattgt

SEQ ID NO: 53446 - DNA, 19 bp, Homo sapiens
  siRNA target sequence for PNPT1 (NM_033109.2,847-865).
gattgtgaaatatactcat

SEQ ID NO: 53447 - DNA, 19 bp, Homo sapiens
  siRNA target sequence for PNPT1 (NM_033109.2,880-898).
gagactctatgcagttttt

SEQ ID NO: 53448 - DNA, 19 bp, Homo sapiens
  siRNA target sequence for PNPT1 (NM_033109.2,891-909).
cagtttttacagattacga

SEQ ID NO: 53449 - DNA, 19 bp, Homo sapiens
  siRNA target sequence for PNPT1 (NM_033109.2,900-918).
cagattacgagcatgacaa

SEQ ID NO: 53450 - DNA, 19 bp, Homo sapiens
  siRNA target sequence for PNPT1 (NM_033109.2,956-974).
gatacggaggaacaactaa

SEQ ID NO: 53451 - DNA, 19 bp, Homo sapiens
  siRNA target sequence for PNPT1 (NM_033109.2,992-1010).
gccgatccatatgaaataa

SEQ ID NO: 53452 - DNA, 19 bp, Homo sapiens
  siRNA target sequence for PNPT1 (NM_033109.2,993-1011).
ccgatccatatgaaataat

SEQ ID NO: 53453 - DNA, 19 bp, Homo sapiens
  siRNA target sequence for PNPT1 (NM_033109.2,994-1012).
cgatccatatgaaataata

SEQ ID NO: 53454 - DNA, 19 bp, Homo sapiens
  siRNA target sequence for PNPT1 (NM_033109.2,1078-1096).
cgatggtcgggatttgact

SEQ ID NO: 53455 - DNA, 19 bp, Homo sapiens
  siRNA target sequence for PNPT1 (NM_033109.2,1093-1111).
gacttcacttaggaatgta

SEQ ID NO: 53456 - DNA, 19 bp, Homo sapiens
  siRNA target sequence for PNPT1 (NM_033109.2,1116-1134).
gtgaggtagatatgtttaa

SEQ ID NO: 53457 - DNA, 19 bp, Homo sapiens
  siRNA target sequence for PNPT1 (NM_033109.2,1138-1156).
ccttcatggatcagcatta

SEQ ID NO: 53458 - DNA, 19 bp, Homo sapiens
  siRNA target sequence for PNPT1 (NM_033109.2,1145-1163).
ggatcagcattatttcaaa

SEQ ID NO: 53459 - DNA, 19 bp, Homo sapiens
  siRNA target sequence for PNPT1 (NM_033109.2,1178-1196).
gtgctttgtaccgttacat

SEQ ID NO: 53460 - DNA, 19 bp, Homo sapiens
  siRNA target sequence for PNPT1 (NM_033109.2,1180-1198).
gctttgtaccgttacattt

SEQ ID NO: 53461 - DNA, 19 bp, Homo sapiens
  siRNA target sequence for PNPT1 (NM_033109.2,1188-1206).
ccgttacatttgattcatt

SEQ ID NO: 53462 - DNA, 19 bp, Homo sapiens
  siRNA target sequence for PNPT1 (NM_033109.2,1222-1240).
gtcagatcaagttataaca

SEQ ID NO: 53463 - DNA, 19 bp, Homo sapiens
  siRNA target sequence for PNPT1 (NM_033109.2,1239-1257).
cagctataaatgggataaa

SEQ ID NO: 53464 - DNA, 19 bp, Homo sapiens
  siRNA target sequence for PNPT1 (NM_033109.2,1279-1297).
ctacgagtttcctccttat

SEQ ID NO: 53465 - DNA, 19 bp, Homo sapiens
  siRNA target sequence for PNPT1 (NM_033109.2,1290-1308).
ctccttatgcaactaatga

SEQ ID NO: 53466 - DNA, 19 bp, Homo sapiens
  siRNA target sequence for PNPT1 (NM_033109.2,1292-1310).
ccttatgcaactaatgaaa

SEQ ID NO: 53467 - DNA, 19 bp, Homo sapiens
  siRNA target sequence for PNPT1 (NM_033109.2,1313-1331).
ggcaaagtcactggtttaa

SEQ ID NO: 53468 - DNA, 19 bp, Homo sapiens
  siRNA target sequence for PNPT1 (NM_033109.2,1314-1332).
gcaaagtcactggtttaaa

SEQ ID NO: 53469 - DNA, 19 bp, Homo sapiens
  siRNA target sequence for PNPT1 (NM_033109.2,1400-1418).
cctttcaccataagagtta

SEQ ID NO: 53470 - DNA, 19 bp, Homo sapiens
  siRNA target sequence for PNPT1 (NM_033109.2,1435-1453).
gtcaaatgggtcatcttct

SEQ ID NO: 53471 - DNA, 19 bp, Homo sapiens
  siRNA target sequence for PNPT1 (NM_033109.2,1461-1479).
ctgcatgtggcggaagttt

SEQ ID NO: 53472 - DNA, 19 bp, Homo sapiens
  siRNA target sequence for PNPT1 (NM_033109.2,1467-1485).
gtggcggaagtttagcatt

SEQ ID NO: 53473 - DNA, 19 bp, Homo sapiens
  siRNA target sequence for PNPT1 (NM_033109.2,1469-1487).
ggcggaagtttagcattaa

SEQ ID NO: 53474 - DNA, 19 bp, Homo sapiens
  siRNA target sequence for PNPT1 (NM_033109.2,1470-1488).
gcggaagtttagcattaat

SEQ ID NO: 53475 - DNA, 19 bp, Homo sapiens
  siRNA target sequence for PNPT1 (NM_033109.2,1473-1491).
gaagtttagcattaatgga

SEQ ID NO: 53476 - DNA, 19 bp, Homo sapiens
  siRNA target sequence for PNPT1 (NM_033109.2,1489-1507).
ggattcaggggttccaatt

SEQ ID NO: 53477 - DNA, 19 bp, Homo sapiens
  siRNA target sequence for PNPT1 (NM_033109.2,1515-1533).
ctgttgcaggcgtagcaat

SEQ ID NO: 53478 - DNA, 19 bp, Homo sapiens
  siRNA target sequence for PNPT1 (NM_033109.2,1520-1538).
gcaggcgtagcaataggat

SEQ ID NO: 53479 - DNA, 19 bp, Homo sapiens
  siRNA target sequence for PNPT1 (NM_033109.2,1568-1586).
gaaatagaagattatcgtt

SEQ ID NO: 53480 - DNA, 19 bp, Homo sapiens
  siRNA target sequence for PNPT1 (NM_033109.2,1593-1611).
cagatattttgggaattga

SEQ ID NO: 53481 - DNA, 19 bp, Homo sapiens
  siRNA target sequence for PNPT1 (NM_033109.2,1622-1640).
ggtgacatggacttcaaaa

SEQ ID NO: 53482 - DNA, 19 bp, Homo sapiens
  siRNA target sequence for PNPT1 (NM_033109.2,1623-1641).
gtgacatggacttcaaaat

SEQ ID NO: 53483 - DNA, 19 bp, Homo sapiens
  siRNA target sequence for PNPT1 (NM_033109.2,1636-1654).
caaaatagctggcactaat

SEQ ID NO: 53484 - DNA, 19 bp, Homo sapiens
  siRNA target sequence for PNPT1 (NM_033109.2,1665-1683).
ctgcattacaggctgatat

SEQ ID NO: 53485 - DNA, 19 bp, Homo sapiens
  siRNA target sequence for PNPT1 (NM_033109.2,1667-1685).
gcattacaggctgatatta

SEQ ID NO: 53486 - DNA, 19 bp, Homo sapiens
  siRNA target sequence for PNPT1 (NM_033109.2,1668-1686).
cattacaggctgatattaa

SEQ ID NO: 53487 - DNA, 19 bp, Homo sapiens
  siRNA target sequence for PNPT1 (NM_033109.2,1675-1693).
ggctgatattaaattacct

SEQ ID NO: 53488 - DNA, 19 bp, Homo sapiens
  siRNA target sequence for PNPT1 (NM_033109.2,1788-1806).
ctcgagcatctagaaaaga

SEQ ID NO: 53489 - DNA, 19 bp, Homo sapiens
  siRNA target sequence for PNPT1 (NM_033109.2,1829-1847).
gttcaggttccattatcaa

SEQ ID NO: 53490 - DNA, 19 bp, Homo sapiens
  siRNA target sequence for PNPT1 (NM_033109.2,1868-1886).
cctggtggctataacttaa

SEQ ID NO: 53491 - DNA, 19 bp, Homo sapiens
  siRNA target sequence for PNPT1 (NM_033109.2,1869-1887).
ctggtggctataacttaaa

SEQ ID NO: 53492 - DNA, 19 bp, Homo sapiens
  siRNA target sequence for PNPT1 (NM_033109.2,1872-1890).
gtggctataacttaaaaaa

SEQ ID NO: 53493 - DNA, 19 bp, Homo sapiens
  siRNA target sequence for PNPT1 (NM_033109.2,1897-1915).
ggctgaaacaggtgtaact

SEQ ID NO: 53494 - DNA, 19 bp, Homo sapiens
  siRNA target sequence for PNPT1 (NM_033109.2,1898-1916).
gctgaaacaggtgtaacta

SEQ ID NO: 53495 - DNA, 19 bp, Homo sapiens
  siRNA target sequence for PNPT1 (NM_033109.2,1899-1917).
ctgaaacaggtgtaactat

SEQ ID NO: 53496 - DNA, 19 bp, Homo sapiens
  siRNA target sequence for PNPT1 (NM_033109.2,1901-1919).
gaaacaggtgtaactatta

SEQ ID NO: 53497 - DNA, 19 bp, Homo sapiens
  siRNA target sequence for PNPT1 (NM_033109.2,1980-1998).
caagagacttcattactga

SEQ ID NO: 53498 - DNA, 19 bp, Homo sapiens
  siRNA target sequence for PNPT1 (NM_033109.2,2042-2060).
gtatataccgccacaataa

SEQ ID NO: 53499 - DNA, 19 bp, Homo sapiens
  siRNA target sequence for PNPT1 (NM_033109.2,2070-2088).
gagatactggtgtaatggt

SEQ ID NO: 53500 - DNA, 19 bp, Homo sapiens
  siRNA target sequence for PNPT1 (NM_033109.2,2072-2090).
gatactggtgtaatggtaa

SEQ ID NO: 53501 - DNA, 19 bp, Homo sapiens
  siRNA target sequence for PNPT1 (NM_033109.2,2078-2096).
ggtgtaatggtaaaattat

SEQ ID NO: 53502 - DNA, 19 bp, Homo sapiens
  siRNA target sequence for PNPT1 (NM_033109.2,2109-2127).
ctgcggtactgcttcataa

SEQ ID NO: 53503 - DNA, 19 bp, Homo sapiens
  siRNA target sequence for PNPT1 (NM_033109.2,2111-2129).
gcggtactgcttcataaca

SEQ ID NO: 53504 - DNA, 19 bp, Homo sapiens
  siRNA target sequence for PNPT1 (NM_033109.2,2119-2137).
gcttcataacacacaactt

SEQ ID NO: 53505 - DNA, 19 bp, Homo sapiens
  siRNA target sequence for PNPT1 (NM_033109.2,2130-2148).
cacaacttgatcaacgaaa

SEQ ID NO: 53506 - DNA, 19 bp, Homo sapiens
  siRNA target sequence for PNPT1 (NM_033109.2,2160-2178).
ctactgccctaggattaga

SEQ ID NO: 53507 - DNA, 19 bp, Homo sapiens
  siRNA target sequence for PNPT1 (NM_033109.2,2163-2181).
ctgccctaggattagaagt

SEQ ID NO: 53508 - DNA, 19 bp, Homo sapiens
  siRNA target sequence for POLR2G (NM_002696.1,123-141).
ccctagagcacgaaatcct

SEQ ID NO: 53509 - DNA, 19 bp, Homo sapiens
  siRNA target sequence for POLR2G (NM_002696.1,248-266).
gtcaccaccattgacaata

SEQ ID NO: 53510 - DNA, 19 bp, Homo sapiens
  siRNA target sequence for POLR2G (NM_002696.1,302-320).
gtcctttatccagttaagt

SEQ ID NO: 53511 - DNA, 19 bp, Homo sapiens
  siRNA target sequence for POLR2G (NM_002696.1,305-323).
ctttatccagttaagtaca

SEQ ID NO: 53512 - DNA, 19 bp, Homo sapiens
  siRNA target sequence for POLR2G (NM_002696.1,404-422).
gaaattgggcccatgtctt

SEQ ID NO: 53513 - DNA, 19 bp, Homo sapiens
  siRNA target sequence for POLR2G (NM_002696.1,480-498).
caccatgttacaagacaat

SEQ ID NO: 53514 - DNA, 19 bp, Homo sapiens
  siRNA target sequence for POLR2G (NM_002696.1,495-513).
caatggatgaggatattgt

SEQ ID NO: 53515 - DNA, 19 bp, Homo sapiens
  siRNA target sequence for POLR2G (NM_002696.1,552-570).
ggacccgtgtggacaagaa

SEQ ID NO: 53516 - DNA, 19 bp, Homo sapiens
  siRNA target sequence for POLR2G (NM_002696.1,553-571).
gacccgtgtggacaagaat

SEQ ID NO: 53517 - DNA, 19 bp, Homo sapiens
  siRNA target sequence for POLR2G (NM_002696.1,555-573).
cccgtgtggacaagaatga

SEQ ID NO: 53518 - DNA, 19 bp, Homo sapiens
  siRNA target sequence for POLR2G (NM_002696.1,560-578).
gtggacaagaatgacattt

SEQ ID NO: 53519 - DNA, 19 bp, Homo sapiens
  siRNA target sequence for POLR2G (NM_002696.1,562-580).
ggacaagaatgacattttt

SEQ ID NO: 53520 - DNA, 19 bp, Homo sapiens
  siRNA target sequence for POLR2G (NM_002696.1,588-606).
gctccctgatggacgatta

SEQ ID NO: 53521 - DNA, 19 bp, Homo sapiens
  siRNA target sequence for POLR2G (NM_002696.1,591-609).
ccctgatggacgattactt

SEQ ID NO: 53522 - DNA, 19 bp, Homo sapiens
  siRNA target sequence for POLR2G (NM_002696.1,602-620).
gattacttggggcttgtaa

SEQ ID NO: 53523 - DNA, 19 bp, Homo sapiens
  siRNA target sequence for POP4 (NM_006627.1,33-51).
gtgtgatctaccatgcatt

SEQ ID NO: 53524 - DNA, 19 bp, Homo sapiens
  siRNA target sequence for POP4 (NM_006627.1,37-55).
gatctaccatgcattgtct

SEQ ID NO: 53525 - DNA, 19 bp, Homo sapiens
  siRNA target sequence for POP4 (NM_006627.1,56-74).
cagaaagaggcgaatgact

SEQ ID NO: 53526 - DNA, 19 bp, Homo sapiens
  siRNA target sequence for POP4 (NM_006627.1,274-292).
gctgcggctctttgacatt

SEQ ID NO: 53527 - DNA, 19 bp, Homo sapiens
  siRNA target sequence for POP4 (NM_006627.1,277-295).
gcggctctttgacattaaa

SEQ ID NO: 53528 - DNA, 19 bp, Homo sapiens
  siRNA target sequence for POP4 (NM_006627.1,280-298).
gctctttgacattaaacca

SEQ ID NO: 53529 - DNA, 19 bp, Homo sapiens
  siRNA target sequence for POP4 (NM_006627.1,385-403).
cacgcagccacagatgatt

SEQ ID NO: 53530 - DNA, 19 bp, Homo sapiens
  siRNA target sequence for POP4 (NM_006627.1,425-443).
gatcttcacggggctatta

SEQ ID NO: 53531 - DNA, 19 bp, Homo sapiens
  siRNA target sequence for POP4 (NM_006627.1,428-446).
cttcacggggctattattt

SEQ ID NO: 53532 - DNA, 19 bp, Homo sapiens
  siRNA target sequence for POP4 (NM_006627.1,438-456).
ctattatttcagtgacaaa

SEQ ID NO: 53533 - DNA, 19 bp, Homo sapiens
  siRNA target sequence for POP4 (NM_006627.1,459-477).
ccaaatgcccctcttatgt

SEQ ID NO: 53534 - DNA, 19 bp, Homo sapiens
  siRNA target sequence for POP4 (NM_006627.1,469-487).
ctcttatgtgggtattaca

SEQ ID NO: 53535 - DNA, 19 bp, Homo sapiens
  siRNA target sequence for POP4 (NM_006627.1,478-496).
gggtattacaggaatcctt

SEQ ID NO: 53536 - DNA, 19 bp, Homo sapiens
  siRNA target sequence for POP4 (NM_006627.1,536-554).
gaagaccgcctgaaagtta

SEQ ID NO: 53537 - DNA, 19 bp, Homo sapiens
  siRNA target sequence for POP4 (NM_006627.1,588-606).
ccgatggctttatttccta

SEQ ID NO: 53538 - DNA, 19 bp, Homo sapiens
  siRNA target sequence for POP4 (NM_006627.1,594-612).
gctttatttcctacattta

SEQ ID NO: 53539 - DNA, 19 bp, Homo sapiens
  siRNA target sequence for POP4 (NM_006627.1,625-643).
ccagcttcggtcaagtgaa

SEQ ID NO: 53540 - DNA, 19 bp, Homo sapiens
  siRNA target sequence for POP4 (NM_006627.1,641-659).
gaacggtctgcgaagaagt

SEQ ID NO: 53541 - DNA, 19 bp, Homo sapiens
  siRNA target sequence for POP4 (NM_006627.1,644-662).
cggtctgcgaagaagttca

SEQ ID NO: 53542 - DNA, 19 bp, Homo sapiens
  siRNA target sequence for POP4 (NM_006627.1,646-664).
gtctgcgaagaagttcaaa

SEQ ID NO: 53543 - DNA, 19 bp, Homo sapiens
  siRNA target sequence for POP4 (NM_006627.1,661-679).
caaagcgaagggaacgatt

SEQ ID NO: 53544 - DNA, 19 bp, Homo sapiens
  siRNA target sequence for PPIE (NM_006112.1,62-80).
ggacgacaaagttcttcat

SEQ ID NO: 53545 - DNA, 19 bp, Homo sapiens
  siRNA target sequence for PPIE (NM_006112.1,78-96).
catgctgcgttcattcctt

SEQ ID NO: 53546 - DNA, 19 bp, Homo sapiens
  siRNA target sequence for PPIE (NM_006112.1,100-118).
gagacatcacagatattca

SEQ ID NO: 53547 - DNA, 19 bp, Homo sapiens
  siRNA target sequence for PPIE (NM_006112.1,196-214).
cagctatcgacaacatgaa

SEQ ID NO: 53548 - DNA, 19 bp, Homo sapiens
  siRNA target sequence for PPIE (NM_006112.1,224-242).
gctttttggacgtacaatt

SEQ ID NO: 53549 - DNA, 19 bp, Homo sapiens
  siRNA target sequence for PPIE (NM_006112.1,234-252).
cgtacaattcgtgtcaatt

SEQ ID NO: 53550 - DNA, 19 bp, Homo sapiens
  siRNA target sequence for PPIE (NM_006112.1,235-253).
gtacaattcgtgtcaattt

SEQ ID NO: 53551 - DNA, 19 bp, Homo sapiens
  siRNA target sequence for PPIE (NM_006112.1,290-308).
gccagtttggtcagatgat

SEQ ID NO: 53552 - DNA, 19 bp, Homo sapiens
  siRNA target sequence for PPIE (NM_006112.1,303-321).
gatgatgactggttgaaga

SEQ ID NO: 53553 - DNA, 19 bp, Homo sapiens
  siRNA target sequence for PPIE (NM_006112.1,482-500).
gatgctcctgcgttctgat

SEQ ID NO: 53554 - DNA, 19 bp, Homo sapiens
  siRNA target sequence for PPIE (NM_006112.1,665-683).
gttcgatgatgaaaacttt

SEQ ID NO: 53555 - DNA, 19 bp, Homo sapiens
  siRNA target sequence for PPIE (NM_006112.1,817-835).
ccgaaggcctagatgtctt

SEQ ID NO: 53556 - DNA, 19 bp, Homo sapiens
  siRNA target sequence for PPP1R8 (NM_002713.2,1060-1078).
gcaggcgcatgcagaactt

SEQ ID NO: 53557 - DNA, 19 bp, Homo sapiens
  siRNA target sequence for PPP1R8 (NM_002713.2,1061-1079).
caggcgcatgcagaacttt

SEQ ID NO: 53558 - DNA, 19 bp, Homo sapiens
  siRNA target sequence for PPP1R8 (NM_002713.2,1231-1249).
cgtcagcagtgaacatgaa

SEQ ID NO: 53559 - DNA, 19 bp, Homo sapiens
  siRNA target sequence for PPP1R8 (NM_002713.2,1258-1276).
caaaccctgcagtctataa

SEQ ID NO: 53560 - DNA, 19 bp, Homo sapiens
  siRNA target sequence for PPP1R8 (NM_014110.3,120-138).
gccccctcccggtttacat

SEQ ID NO: 53561 - DNA, 19 bp, Homo sapiens
  siRNA target sequence for PPP1R8 (NM_014110.3,163-181).
ctaattgagaaactgatta

SEQ ID NO: 53562 - DNA, 19 bp, Homo sapiens
  siRNA target sequence for PPP1R8 (NM_014110.3,184-202).
gatgagaagaagtattact

SEQ ID NO: 53563 - DNA, 19 bp, Homo sapiens
  siRNA target sequence for PPP1R8 (NM_014110.3,187-205).
gagaagaagtattacttat

SEQ ID NO: 53564 - DNA, 19 bp, Homo sapiens
  siRNA target sequence for PPP1R8 (NM_014110.3,307-325).
ctgatagatctcaacagta

SEQ ID NO: 53565 - DNA, 19 bp, Homo sapiens
  siRNA target sequence for PPP1R8 (NM_014110.3,323-341).
gtacacacggcactttctt

SEQ ID NO: 53566 - DNA, 19 bp, Homo sapiens
  siRNA target sequence for PPP1R8 (NM_014110.3,387-405).
cgattccacggtctcattt

SEQ ID NO: 53567 - DNA, 19 bp, Homo sapiens
  siRNA target sequence for PPP1R8 (NM_014110.3,434-452).
gcgagaagcctcagacatt

SEQ ID NO: 53568 - DNA, 19 bp, Homo sapiens
  siRNA target sequence for PPP1R8 (NM_014110.3,570-588).
ccacaacaagcggatttct

SEQ ID NO: 53569 - DNA, 19 bp, Homo sapiens
  siRNA target sequence for PPP1R8 (NM_014110.3,571-589).
cacaacaagcggatttcta

SEQ ID NO: 53570 - DNA, 19 bp, Homo sapiens
  siRNA target sequence for PPP1R8 (NM_014110.3,607-625).
ggaaatctggacattcaaa

SEQ ID NO: 53571 - DNA, 19 bp, Homo sapiens
  siRNA target sequence for PPP1R8 (NM_014110.3,648-666).
ctcacgggtgacattcagt

SEQ ID NO: 53572 - DNA, 19 bp, Homo sapiens
  siRNA target sequence for PPP1R8 (NM_014110.3,665-683).
gtgaggatgatgagatcat

SEQ ID NO: 53573 - DNA, 19 bp, Homo sapiens
  siRNA target sequence for PS1D (NM_016505.2,172-190).
gcctgctctctacactatt

SEQ ID NO: 53574 - DNA, 19 bp, Homo sapiens
  siRNA target sequence for PS1D (NM_016505.2,173-191).
cctgctctctacactattt

SEQ ID NO: 53575 - DNA, 19 bp, Homo sapiens
  siRNA target sequence for PS1D (NM_016505.2,174-192).
ctgctctctacactatttt

SEQ ID NO: 53576 - DNA, 19 bp, Homo sapiens
  siRNA target sequence for PS1D (NM_016505.2,263-281).
ctggtccatcgaactcata

SEQ ID NO: 53577 - DNA, 19 bp, Homo sapiens
  siRNA target sequence for PS1D (NM_016505.2,266-284).
gtccatcgaactcatatgt

SEQ ID NO: 53578 - DNA, 19 bp, Homo sapiens
  siRNA target sequence for PS1D (NM_016505.2,268-286).
ccatcgaactcatatgtca

SEQ ID NO: 53579 - DNA, 19 bp, Homo sapiens
  siRNA target sequence for PS1D (NM_016505.2,269-287).
catcgaactcatatgtcat

SEQ ID NO: 53580 - DNA, 19 bp, Homo sapiens
  siRNA target sequence for PS1D (NM_016505.2,285-303).
catcctgtcgggtggataa

SEQ ID NO: 53581 - DNA, 19 bp, Homo sapiens
  siRNA target sequence for PS1D (NM_016505.2,298-316).
ggataagccctctgagata

SEQ ID NO: 53582 - DNA, 19 bp, Homo sapiens
  siRNA target sequence for PS1D (NM_016505.2,304-322).
gccctctgagatagtagat

SEQ ID NO: 53583 - DNA, 19 bp, Homo sapiens
  siRNA target sequence for PS1D (NM_016505.2,391-409).
ctccatgaaggttgtcaat

SEQ ID NO: 53584 - DNA, 19 bp, Homo sapiens
  siRNA target sequence for PS1D (NM_016505.2,393-411).
ccatgaaggttgtcaatca

SEQ ID NO: 53585 - DNA, 19 bp, Homo sapiens
  siRNA target sequence for PS1D (NM_016505.2,394-412).
catgaaggttgtcaatcaa

SEQ ID NO: 53586 - DNA, 19 bp, Homo sapiens
  siRNA target sequence for PS1D (NM_016505.2,431-449).
gatcccaacaatgttatca

SEQ ID NO: 53587 - DNA, 19 bp, Homo sapiens
  siRNA target sequence for PS1D (NM_016505.2,473-491).
cgatccttccaggattaca

SEQ ID NO: 53588 - DNA, 19 bp, Homo sapiens
  siRNA target sequence for PS1D (NM_016505.2,509-527).
cttgaggctgtcttgaaca

SEQ ID NO: 53589 - DNA, 19 bp, Homo sapiens
  siRNA target sequence for PS1D (NM_016505.2,512-530).
gaggctgtcttgaacacta

SEQ ID NO: 53590 - DNA, 19 bp, Homo sapiens
  siRNA target sequence for PS1D (NM_016505.2,554-572).
ggccactttgcaaaagatt

SEQ ID NO: 53591 - DNA, 19 bp, Homo sapiens
  siRNA target sequence for PS1D (NM_016505.2,556-574).
ccactttgcaaaagattgt

SEQ ID NO: 53592 - DNA, 19 bp, Homo sapiens
  siRNA target sequence for PS1D (NM_016505.2,557-575).
cactttgcaaaagattgtt

SEQ ID NO: 53593 - DNA, 19 bp, Homo sapiens
  siRNA target sequence for PS1D (NM_016505.2,584-602).
ccaggtgggactaaatact

SEQ ID NO: 53594 - DNA, 19 bp, Homo sapiens
  siRNA target sequence for PS1D (NM_016505.2,592-610).
gactaaatactctctgata

SEQ ID NO: 53595 - DNA, 19 bp, Homo sapiens
  siRNA target sequence for PS1D (NM_016505.2,637-655).
ggcaaagtcagcagagttt

SEQ ID NO: 53596 - DNA, 19 bp, Homo sapiens
  siRNA target sequence for PS1D (NM_016505.2,661-679).
gcctgaccctacaaggaat

SEQ ID NO: 53597 - DNA, 19 bp, Homo sapiens
  siRNA target sequence for PS1D (NM_016505.2,665-683).
gaccctacaaggaatcctt

SEQ ID NO: 53598 - DNA, 19 bp, Homo sapiens
  siRNA target sequence for PS1D (NM_016505.2,719-737).
catagagataggaagtcat

SEQ ID NO: 53599 - DNA, 19 bp, Homo sapiens
  siRNA target sequence for PS1D (NM_016505.2,781-799).
ggcaaggcacacatcaaaa

SEQ ID NO: 53600 - DNA, 19 bp, Homo sapiens
  siRNA target sequence for PSMA1 (NM_002786.2,148-166).
ccagggcaggattcatcaa

SEQ ID NO: 53601 - DNA, 19 bp, Homo sapiens
  siRNA target sequence for PSMA1 (NM_002786.2,151-169).
gggcaggattcatcaaatt

SEQ ID NO: 53602 - DNA, 19 bp, Homo sapiens
  siRNA target sequence for PSMA1 (NM_002786.2,153-171).
gcaggattcatcaaattga

SEQ ID NO: 53603 - DNA, 19 bp, Homo sapiens
  siRNA target sequence for PSMA1 (NM_002786.2,177-195).
caatggaagctgttaaaca

SEQ ID NO: 53604 - DNA, 19 bp, Homo sapiens
  siRNA target sequence for PSMA1 (NM_002786.2,203-221).
gccacagttggtctgaaat

SEQ ID NO: 53605 - DNA, 19 bp, Homo sapiens
  siRNA target sequence for PSMA1 (NM_002786.2,205-223).
cacagttggtctgaaatca

SEQ ID NO: 53606 - DNA, 19 bp, Homo sapiens
  siRNA target sequence for PSMA1 (NM_002786.2,293-311).
ctccatgttgacaaccata

SEQ ID NO: 53607 - DNA, 19 bp, Homo sapiens
  siRNA target sequence for PSMA1 (NM_002786.2,295-313).
ccatgttgacaaccatatt

SEQ ID NO: 53608 - DNA, 19 bp, Homo sapiens
  siRNA target sequence for PSMA1 (NM_002786.2,307-325).
ccatattggtatctcaatt

SEQ ID NO: 53609 - DNA, 19 bp, Homo sapiens
  siRNA target sequence for PSMA1 (NM_002786.2,341-359).
gatgctagactgttatgta

SEQ ID NO: 53610 - DNA, 19 bp, Homo sapiens
  siRNA target sequence for PSMA1 (NM_002786.2,344-362).
gctagactgttatgtaatt

SEQ ID NO: 53611 - DNA, 19 bp, Homo sapiens
  siRNA target sequence for PSMA1 (NM_002786.2,367-385).
gcgtcaggagtgtttggat

SEQ ID NO: 53612 - DNA, 19 bp, Homo sapiens
  siRNA target sequence for PSMA1 (NM_002786.2,368-386).
cgtcaggagtgtttggatt

SEQ ID NO: 53613 - DNA, 19 bp, Homo sapiens
  siRNA target sequence for PSMA1 (NM_002786.2,412-430).
gcctgtgtctcgtcttgta

SEQ ID NO: 53614 - DNA, 19 bp, Homo sapiens
  siRNA target sequence for PSMA1 (NM_002786.2,418-436).
gtctcgtcttgtatctcta

SEQ ID NO: 53615 - DNA, 19 bp, Homo sapiens
  siRNA target sequence for PSMA1 (NM_002786.2,420-438).
ctcgtcttgtatctctaat

SEQ ID NO: 53616 - DNA, 19 bp, Homo sapiens
  siRNA target sequence for PSMA1 (NM_002786.2,454-472).
gataccaacacaacgatat

SEQ ID NO: 53617 - DNA, 19 bp, Homo sapiens
  siRNA target sequence for PSMA1 (NM_002786.2,499-517).
ccttattgctggttatgat

SEQ ID NO: 53618 - DNA, 19 bp, Homo sapiens
  siRNA target sequence for PSMA1 (NM_002786.2,544-562).
ctgtccatctgctaactat

SEQ ID NO: 53619 - DNA, 19 bp, Homo sapiens
  siRNA target sequence for PSMA1 (NM_002786.2,546-564).
gtccatctgctaactattt

SEQ ID NO: 53620 - DNA, 19 bp, Homo sapiens
  siRNA target sequence for PSMA1 (NM_002786.2,597-615).
cccaatcagctcgtactta

SEQ ID NO: 53621 - DNA, 19 bp, Homo sapiens
  siRNA target sequence for PSMA1 (NM_002786.2,599-617).
caatcagctcgtacttact

SEQ ID NO: 53622 - DNA, 19 bp, Homo sapiens
  siRNA target sequence for PSMA1 (NM_002786.2,612-630).
cttacttggagagacatat

SEQ ID NO: 53623 - DNA, 19 bp, Homo sapiens
  siRNA target sequence for PSMA1 (NM_002786.2,616-634).
cttggagagacatatgtct

SEQ ID NO: 53624 - DNA, 19 bp, Homo sapiens
  siRNA target sequence for PSMA1 (NM_002786.2,620-638).
gagagacatatgtctgaat

SEQ ID NO: 53625 - DNA, 19 bp, Homo sapiens
  siRNA target sequence for PSMA1 (NM_002786.2,635-653).
gaatttatggagtgtaatt

SEQ ID NO: 53626 - DNA, 19 bp, Homo sapiens
  siRNA target sequence for PSMA1 (NM_002786.2,707-725).
gaacaggacctgactacaa

SEQ ID NO: 53627 - DNA, 19 bp, Homo sapiens
  siRNA target sequence for PSMA1 (NM_002786.2,736-754).
cattggaattgttggtaaa

SEQ ID NO: 53628 - DNA, 19 bp, Homo sapiens
  siRNA target sequence for PSMA1 (NM_002786.2,760-778).
ggagtttacaatctatgat

SEQ ID NO: 53629 - DNA, 19 bp, Homo sapiens
  siRNA target sequence for PSMA1 (NM_148976.1,338-356).
gcaaggtgaagtttcgaaa

SEQ ID NO: 53630 - DNA, 19 bp, Homo sapiens
  siRNA target sequence for PSMA6 (NM_002791.1,131-149).
ggttttgaccgccacatta

SEQ ID NO: 53631 - DNA, 19 bp, Homo sapiens
  siRNA target sequence for PSMA6 (NM_002791.1,168-186).
gtcggctctaccaagtaga

SEQ ID NO: 53632 - DNA, 19 bp, Homo sapiens
  siRNA target sequence for PSMA6 (NM_002791.1,170-188).
cggctctaccaagtagaat

SEQ ID NO: 53633 - DNA, 19 bp, Homo sapiens
  siRNA target sequence for PSMA6 (NM_002791.1,171-189).
ggctctaccaagtagaata

SEQ ID NO: 53634 - DNA, 19 bp, Homo sapiens
  siRNA target sequence for PSMA6 (NM_002791.1,172-190).
gctctaccaagtagaatat

SEQ ID NO: 53635 - DNA, 19 bp, Homo sapiens
  siRNA target sequence for PSMA6 (NM_002791.1,175-193).
ctaccaagtagaatatgct

SEQ ID NO: 53636 - DNA, 19 bp, Homo sapiens
  siRNA target sequence for PSMA6 (NM_002791.1,211-229).
gggtggccttacatcagta

SEQ ID NO: 53637 - DNA, 19 bp, Homo sapiens
  siRNA target sequence for PSMA6 (NM_002791.1,271-289).
gaaagtacctgacaaatta

SEQ ID NO: 53638 - DNA, 19 bp, Homo sapiens
  siRNA target sequence for PSMA6 (NM_002791.1,278-296).
cctgacaaattattggatt

SEQ ID NO: 53639 - DNA, 19 bp, Homo sapiens
  siRNA target sequence for PUM1 (NM_014676.1,100-118).
gcgttgcatgtgtcttgaa

SEQ ID NO: 53640 - DNA, 19 bp, Homo sapiens
  siRNA target sequence for PUM1 (NM_014676.1,102-120).
gttgcatgtgtcttgaaga

SEQ ID NO: 53641 - DNA, 19 bp, Homo sapiens
  siRNA target sequence for PUM1 (NM_014676.1,132-150).
ctttggcaggactctttca

SEQ ID NO: 53642 - DNA, 19 bp, Homo sapiens
  siRNA target sequence for PUM1 (NM_014676.1,236-254).
gccacaaccagctgcaaat

SEQ ID NO: 53643 - DNA, 19 bp, Homo sapiens
  siRNA target sequence for PUM1 (NM_014676.1,330-348).
gctatggtggactacttct

SEQ ID NO: 53644 - DNA, 19 bp, Homo sapiens
  siRNA target sequence for PUM1 (NM_014676.1,390-408).
ggaggaggcggctataata

SEQ ID NO: 53645 - DNA, 19 bp, Homo sapiens
  siRNA target sequence for PUM1 (NM_014676.1,391-409).
gaggaggcggctataataa

SEQ ID NO: 53646 - DNA, 19 bp, Homo sapiens
  siRNA target sequence for PUM1 (NM_014676.1,393-411).
ggaggcggctataataata

SEQ ID NO: 53647 - DNA, 19 bp, Homo sapiens
  siRNA target sequence for PUM1 (NM_014676.1,396-414).
ggcggctataataatagca

SEQ ID NO: 53648 - DNA, 19 bp, Homo sapiens
  siRNA target sequence for PUM1 (NM_014676.1,424-442).
ggcctactggggataacat

SEQ ID NO: 53649 - DNA, 19 bp, Homo sapiens
  siRNA target sequence for PUM1 (NM_014676.1,425-443).
gcctactggggataacatt

SEQ ID NO: 53650 - DNA, 19 bp, Homo sapiens
  siRNA target sequence for PUM1 (NM_014676.1,427-445).
ctactggggataacattca

SEQ ID NO: 53651 - DNA, 19 bp, Homo sapiens
  siRNA target sequence for PUM1 (NM_014676.1,531-549).
ctcttgccaggtaaaaagt

SEQ ID NO: 53652 - DNA, 19 bp, Homo sapiens
  siRNA target sequence for PUM1 (NM_014676.1,533-551).
cttgccaggtaaaaagttt

SEQ ID NO: 53653 - DNA, 19 bp, Homo sapiens
  siRNA target sequence for PUM1 (NM_014676.1,693-711).
gtgaacagtgaggtcaatt

SEQ ID NO: 53654 - DNA, 19 bp, Homo sapiens
  siRNA target sequence for PUM1 (NM_014676.1,695-713).
gaacagtgaggtcaattct

SEQ ID NO: 53655 - DNA, 19 bp, Homo sapiens
  siRNA target sequence for PUM1 (NM_014676.1,698-716).
cagtgaggtcaattctgta

SEQ ID NO: 53656 - DNA, 19 bp, Homo sapiens
  siRNA target sequence for PUM1 (NM_014676.1,786-804).
ggcgattcctgtctaagaa

SEQ ID NO: 53657 - DNA, 19 bp, Homo sapiens
  siRNA target sequence for PUM1 (NM_014676.1,788-806).
cgattcctgtctaagaaaa

SEQ ID NO: 53658 - DNA, 19 bp, Homo sapiens
  siRNA target sequence for PUM1 (NM_014676.1,860-878).
gaagaacaagggtacgttt

SEQ ID NO: 53659 - DNA, 19 bp, Homo sapiens
  siRNA target sequence for PUM1 (NM_014676.1,871-889).
gtacgtttgatggagataa

SEQ ID NO: 53660 - DNA, 19 bp, Homo sapiens
  siRNA target sequence for PUM1 (NM_014676.1,874-892).
cgtttgatggagataagct

SEQ ID NO: 53661 - DNA, 19 bp, Homo sapiens
  siRNA target sequence for PUM1 (NM_014676.1,883-901).
gagataagctaggagattt

SEQ ID NO: 53662 - DNA, 19 bp, Homo sapiens
  siRNA target sequence for PUM1 (NM_014676.1,885-903).
gataagctaggagatttga

SEQ ID NO: 53663 - DNA, 19 bp, Homo sapiens
  siRNA target sequence for PUM1 (NM_014676.1,923-941).
ggacaagaccaatggttta

SEQ ID NO: 53664 - DNA, 19 bp, Homo sapiens
  siRNA target sequence for PUM1 (NM_014676.1,926-944).
caagaccaatggtttacca

SEQ ID NO: 53665 - DNA, 19 bp, Homo sapiens
  siRNA target sequence for PUM1 (NM_014676.1,960-978).
gatgcagacgtcaaagatt

SEQ ID NO: 53666 - DNA, 19 bp, Homo sapiens
  siRNA target sequence for PUM1 (NM_014676.1,963-981).
gcagacgtcaaagatttta

SEQ ID NO: 53667 - DNA, 19 bp, Homo sapiens
  siRNA target sequence for PUM1 (NM_014676.1,1000-1018).
gccagaactctgctaatga

SEQ ID NO: 53668 - DNA, 19 bp, Homo sapiens
  siRNA target sequence for PUM1 (NM_014676.1,1156-1174).
gcatggagcctcttcagtt

SEQ ID NO: 53669 - DNA, 19 bp, Homo sapiens
  siRNA target sequence for PUM1 (NM_014676.1,1163-1181).
gcctcttcagtttgattat

SEQ ID NO: 53670 - DNA, 19 bp, Homo sapiens
  siRNA target sequence for PUM1 (NM_014676.1,1337-1355).
gccgcacatcggtttagct

SEQ ID NO: 53671 - DNA, 19 bp, Homo sapiens
  siRNA target sequence for PUM1 (NM_014676.1,1362-1380).
gcgtttgtccccaatccat

SEQ ID NO: 53672 - DNA, 19 bp, Homo sapiens
  siRNA target sequence for PUM1 (NM_014676.1,1363-1381).
cgtttgtccccaatccata

SEQ ID NO: 53673 - DNA, 19 bp, Homo sapiens
  siRNA target sequence for PUM1 (NM_014676.1,1368-1386).
gtccccaatccatacatca

SEQ ID NO: 53674 - DNA, 19 bp, Homo sapiens
  siRNA target sequence for PUM1 (NM_014676.1,1458-1476).
gtggtccctcaccagtatt

SEQ ID NO: 53675 - DNA, 19 bp, Homo sapiens
  siRNA target sequence for PUM1 (NM_014676.1,1463-1481).
ccctcaccagtattatgga

SEQ ID NO: 53676 - DNA, 19 bp, Homo sapiens
  siRNA target sequence for PUM1 (NM_014676.1,1497-1515).
gtctaccctgccagtcttt

SEQ ID NO: 53677 - DNA, 19 bp, Homo sapiens
  siRNA target sequence for PUM1 (NM_014676.1,1536-1554).
gccgctgcagcaactaatt

SEQ ID NO: 53678 - DNA, 19 bp, Homo sapiens
  siRNA target sequence for PUM1 (NM_014676.1,1538-1556).
cgctgcagcaactaattca

SEQ ID NO: 53679 - DNA, 19 bp, Homo sapiens
  siRNA target sequence for PUM1 (NM_014676.1,1756-1774).
ctcctgctgcttactatga

SEQ ID NO: 53680 - DNA, 19 bp, Homo sapiens
  siRNA target sequence for PUM1 (NM_014676.1,1780-1798).
ctggtgcccttgtagtgaa

SEQ ID NO: 53681 - DNA, 19 bp, Homo sapiens
  siRNA target sequence for PUM1 (NM_014676.1,1926-1944).
ggtcttgctggaacaacaa

SEQ ID NO: 53682 - DNA, 19 bp, Homo sapiens
  siRNA target sequence for PUM1 (NM_014676.1,1950-1968).
ccatttcgccctttaggaa

SEQ ID NO: 53683 - DNA, 19 bp, Homo sapiens
  siRNA target sequence for PUM1 (NM_014676.1,2230-2248).
gcagcagtgacctttataa

SEQ ID NO: 53684 - DNA, 19 bp, Homo sapiens
  siRNA target sequence for PUM1 (NM_014676.1,2269-2287).
cccccattggacacagttt

SEQ ID NO: 53685 - DNA, 19 bp, Homo sapiens
  siRNA target sequence for PUM1 (NM_014676.1,2512-2530).
gcccgagcagcactctttt

SEQ ID NO: 53686 - DNA, 19 bp, Homo sapiens
  siRNA target sequence for PUM1 (NM_014676.1,2514-2532).
ccgagcagcactcttttct

SEQ ID NO: 53687 - DNA, 19 bp, Homo sapiens
  siRNA target sequence for PUM1 (NM_014676.1,2537-2555).
ctctcgtttgcgatatgga

SEQ ID NO: 53688 - DNA, 19 bp, Homo sapiens
  siRNA target sequence for PUM1 (NM_014676.1,2539-2557).
ctcgtttgcgatatggaat

SEQ ID NO: 53689 - DNA, 19 bp, Homo sapiens
  siRNA target sequence for PUM1 (NM_014676.1,2609-2627).
caaccggtaccccaattta

SEQ ID NO: 53690 - DNA, 19 bp, Homo sapiens
  siRNA target sequence for PUM1 (NM_014676.1,2612-2630).
ccggtaccccaatttacaa

SEQ ID NO: 53691 - DNA, 19 bp, Homo sapiens
  siRNA target sequence for PUM1 (NM_014676.1,2637-2655).
gagattgctggacatataa

SEQ ID NO: 53692 - DNA, 19 bp, Homo sapiens
  siRNA target sequence for PUM1 (NM_014676.1,2644-2662).
ctggacatataatggaatt

SEQ ID NO: 53693 - DNA, 19 bp, Homo sapiens
  siRNA target sequence for PUM1 (NM_014676.1,2726-2744).
gcgccagcttgtcttcaat

SEQ ID NO: 53694 - DNA, 19 bp, Homo sapiens
  siRNA target sequence for PUM1 (NM_014676.1,2774-2792).
ggtggatgtgtttggtaat

SEQ ID NO: 53695 - DNA, 19 bp, Homo sapiens
  siRNA target sequence for PUM1 (NM_014676.1,2787-2805).
ggtaattacgtcattcaga

SEQ ID NO: 53696 - DNA, 19 bp, Homo sapiens
  siRNA target sequence for PUM1 (NM_014676.1,2788-2806).
gtaattacgtcattcagaa

SEQ ID NO: 53697 - DNA, 19 bp, Homo sapiens
  siRNA target sequence for PUM1 (NM_014676.1,2795-2813).
cgtcattcagaagttcttt

SEQ ID NO: 53698 - DNA, 19 bp, Homo sapiens
  siRNA target sequence for PUM1 (NM_014676.1,2875-2893).
cattggcactacagatgta

SEQ ID NO: 53699 - DNA, 19 bp, Homo sapiens
  siRNA target sequence for PUM1 (NM_014676.1,2951-2969).
gatggttcgggaactagat

SEQ ID NO: 53700 - DNA, 19 bp, Homo sapiens
  siRNA target sequence for PUM1 (NM_014676.1,2967-2985).
gatggccatgtcttgaagt

SEQ ID NO: 53701 - DNA, 19 bp, Homo sapiens
  siRNA target sequence for PUM1 (NM_014676.1,3004-3022).
gcaatcacgtggttcagaa

SEQ ID NO: 53702 - DNA, 19 bp, Homo sapiens
  siRNA target sequence for PUM1 (NM_014676.1,3014-3032).
ggttcagaaatgcattgaa

SEQ ID NO: 53703 - DNA, 19 bp, Homo sapiens
  siRNA target sequence for PUM1 (NM_014676.1,3039-3057).
cagccccagtctttgcaat

SEQ ID NO: 53704 - DNA, 19 bp, Homo sapiens
  siRNA target sequence for PUM1 (NM_014676.1,3041-3059).
gccccagtctttgcaattt

SEQ ID NO: 53705 - DNA, 19 bp, Homo sapiens
  siRNA target sequence for PUM1 (NM_014676.1,3045-3063).
cagtctttgcaatttatca

SEQ ID NO: 53706 - DNA, 19 bp, Homo sapiens
  siRNA target sequence for PUM1 (NM_014676.1,3071-3089).
gtttaagggacaggtattt

SEQ ID NO: 53707 - DNA, 19 bp, Homo sapiens
  siRNA target sequence for PUM1 (NM_014676.1,3081-3099).
caggtatttgccttatcca

SEQ ID NO: 53708 - DNA, 19 bp, Homo sapiens
  siRNA target sequence for PUM1 (NM_014676.1,3153-3171).
gaccagacactccctattt

SEQ ID NO: 53709 - DNA, 19 bp, Homo sapiens
  siRNA target sequence for PUM1 (NM_014676.1,3155-3173).
ccagacactccctatttta

SEQ ID NO: 53710 - DNA, 19 bp, Homo sapiens
  siRNA target sequence for PUM1 (NM_014676.1,3255-3273).
cgtcctgaggataaaagca

SEQ ID NO: 53711 - DNA, 19 bp, Homo sapiens
  siRNA target sequence for PUM1 (NM_014676.1,3256-3274).
gtcctgaggataaaagcaa

SEQ ID NO: 53712 - DNA, 19 bp, Homo sapiens
  siRNA target sequence for PUM1 (NM_014676.1,3290-3308).
ccgaggcaatgtacttgta

SEQ ID NO: 53713 - DNA, 19 bp, Homo sapiens
  siRNA target sequence for PUM1 (NM_014676.1,3291-3309).
cgaggcaatgtacttgtat

SEQ ID NO: 53714 - DNA, 19 bp, Homo sapiens
  siRNA target sequence for PUM1 (NM_014676.1,3296-3314).
caatgtacttgtattgagt

SEQ ID NO: 53715 - DNA, 19 bp, Homo sapiens
  siRNA target sequence for PUM1 (NM_014676.1,3504-3522).
cggaagatcgtcatgcata

SEQ ID NO: 53716 - DNA, 19 bp, Homo sapiens
  siRNA target sequence for PUM1 (NM_014676.1,3505-3523).
ggaagatcgtcatgcataa

SEQ ID NO: 53717 - DNA, 19 bp, Homo sapiens
  siRNA target sequence for PUM1 (NM_014676.1,3540-3558).
gcaactcttcgtaagtaca

SEQ ID NO: 53718 - DNA, 19 bp, Homo sapiens
  siRNA target sequence for PUM1 (NM_014676.1,3602-3620).
gaagaacggtgttgactta

SEQ ID NO: 53719 - DNA, 19 bp, Homo sapiens
  siRNA target sequence for PUM2 (NM_015317.1,99-117).
gaacctgatgattcaacaa

SEQ ID NO: 53720 - DNA, 19 bp, Homo sapiens
  siRNA target sequence for PUM2 (NM_015317.1,103-121).
ctgatgattcaacaaaaga

SEQ ID NO: 53721 - DNA, 19 bp, Homo sapiens
  siRNA target sequence for PUM2 (NM_015317.1,175-193).
gagcttctcaccattcaat

SEQ ID NO: 53722 - DNA, 19 bp, Homo sapiens
  siRNA target sequence for PUM2 (NM_015317.1,190-208).
caatgtcccagcctattat

SEQ ID NO: 53723 - DNA, 19 bp, Homo sapiens
  siRNA target sequence for PUM2 (NM_015317.1,194-212).
gtcccagcctattatggta

SEQ ID NO: 53724 - DNA, 19 bp, Homo sapiens
  siRNA target sequence for PUM2 (NM_015317.1,220-238).
gatctggacagggttttca

SEQ ID NO: 53725 - DNA, 19 bp, Homo sapiens
  siRNA target sequence for PUM2 (NM_015317.1,264-282).
ctgtctccgcgatcagaaa

SEQ ID NO: 53726 - DNA, 19 bp, Homo sapiens
  siRNA target sequence for PUM2 (NM_015317.1,294-312).
ggtgtgagcatggtagaat

SEQ ID NO: 53727 - DNA, 19 bp, Homo sapiens
  siRNA target sequence for PUM2 (NM_015317.1,328-346).
ctcctgctgataaattgga

SEQ ID NO: 53728 - DNA, 19 bp, Homo sapiens
  siRNA target sequence for PUM2 (NM_015317.1,351-369).
cgatttaggaagggaaatt

SEQ ID NO: 53729 - DNA, 19 bp, Homo sapiens
  siRNA target sequence for PUM2 (NM_015317.1,443-461).
ggaccaaaacagagatctt

SEQ ID NO: 53730 - DNA, 19 bp, Homo sapiens
  siRNA target sequence for PUM2 (NM_015317.1,444-462).
gaccaaaacagagatctta

SEQ ID NO: 53731 - DNA, 19 bp, Homo sapiens
  siRNA target sequence for PUM2 (NM_015317.1,499-517).
gaggtttgccaaatggaat

SEQ ID NO: 53732 - DNA, 19 bp, Homo sapiens
  siRNA target sequence for PUM2 (NM_015317.1,519-537).
gatgccgattgcaaagatt

SEQ ID NO: 53733 - DNA, 19 bp, Homo sapiens
  siRNA target sequence for PUM2 (NM_015317.1,522-540).
gccgattgcaaagatttta

SEQ ID NO: 53734 - DNA, 19 bp, Homo sapiens
  siRNA target sequence for PUM2 (NM_015317.1,523-541).
ccgattgcaaagattttaa

SEQ ID NO: 53735 - DNA, 19 bp, Homo sapiens
  siRNA target sequence for PUM2 (NM_015317.1,524-542).
cgattgcaaagattttaat

SEQ ID NO: 53736 - DNA, 19 bp, Homo sapiens
  siRNA target sequence for PUM2 (NM_015317.1,565-583).
cctctccaactgaagtagt

SEQ ID NO: 53737 - DNA, 19 bp, Homo sapiens
  siRNA target sequence for PUM2 (NM_015317.1,566-584).
ctctccaactgaagtagtt

SEQ ID NO: 53738 - DNA, 19 bp, Homo sapiens
  siRNA target sequence for PUM2 (NM_015317.1,633-651).
cctaatcctacagctaata

SEQ ID NO: 53739 - DNA, 19 bp, Homo sapiens
  siRNA target sequence for PUM2 (NM_015317.1,634-652).
ctaatcctacagctaataa

SEQ ID NO: 53740 - DNA, 19 bp, Homo sapiens
  siRNA target sequence for PUM2 (NM_015317.1,654-672).
ccacttgttgaagaatttt

SEQ ID NO: 53741 - DNA, 19 bp, Homo sapiens
  siRNA target sequence for PUM2 (NM_015317.1,657-675).
cttgttgaagaattttcaa

SEQ ID NO: 53742 - DNA, 19 bp, Homo sapiens
  siRNA target sequence for PUM2 (NM_015317.1,695-713).
ggatgccatggaacaagtt

SEQ ID NO: 53743 - DNA, 19 bp, Homo sapiens
  siRNA target sequence for PUM2 (NM_015317.1,714-732).
ggtctggaatccttacagt

SEQ ID NO: 53744 - DNA, 19 bp, Homo sapiens
  siRNA target sequence for PUM2 (NM_015317.1,715-733).
gtctggaatccttacagtt

SEQ ID NO: 53745 - DNA, 19 bp, Homo sapiens
  siRNA target sequence for PUM2 (NM_015317.1,720-738).
gaatccttacagtttgact

SEQ ID NO: 53746 - DNA, 19 bp, Homo sapiens
  siRNA target sequence for PUM2 (NM_015317.1,731-749).
gtttgactatcctggtaat

SEQ ID NO: 53747 - DNA, 19 bp, Homo sapiens
  siRNA target sequence for PUM2 (NM_015317.1,742-760).
ctggtaatcaggtaccaat

SEQ ID NO: 53748 - DNA, 19 bp, Homo sapiens
  siRNA target sequence for PUM2 (NM_015317.1,775-793).
ctactgtaggcctttttga

SEQ ID NO: 53749 - DNA, 19 bp, Homo sapiens
  siRNA target sequence for PUM2 (NM_015317.1,815-833).
ctttcagaggactaatgca

SEQ ID NO: 53750 - DNA, 19 bp, Homo sapiens
  siRNA target sequence for PUM2 (NM_015317.1,832-850).
cactaacagttcaacagtt

SEQ ID NO: 53751 - DNA, 19 bp, Homo sapiens
  siRNA target sequence for PUM2 (NM_015317.1,834-852).
ctaacagttcaacagttaa

SEQ ID NO: 53752 - DNA, 19 bp, Homo sapiens
  siRNA target sequence for PUM2 (NM_015317.1,866-884).
gcagcaatatgcattagca

SEQ ID NO: 53753 - DNA, 19 bp, Homo sapiens
  siRNA target sequence for PUM2 (NM_015317.1,900-918).
catatagctggtgtattct

SEQ ID NO: 53754 - DNA, 19 bp, Homo sapiens
  siRNA target sequence for PUM2 (NM_015317.1,1108-1126).
ctgcagctgcggcaaataa

SEQ ID NO: 53755 - DNA, 19 bp, Homo sapiens
  siRNA target sequence for PUM2 (NM_015317.1,1110-1128).
gcagctgcggcaaataaca

SEQ ID NO: 53756 - DNA, 19 bp, Homo sapiens
  siRNA target sequence for PUM2 (NM_015317.1,1310-1328).
gccaggctatcaagtacta

SEQ ID NO: 53757 - DNA, 19 bp, Homo sapiens
  siRNA target sequence for PUM2 (NM_015317.1,1333-1351).
caactgcctattatgatca

SEQ ID NO: 53758 - DNA, 19 bp, Homo sapiens
  siRNA target sequence for PUM2 (NM_015317.1,1396-1414).
gagctccagttcggttaat

SEQ ID NO: 53759 - DNA, 19 bp, Homo sapiens
  siRNA target sequence for PUM2 (NM_015317.1,1502-1520).
cagcacaaatggtctgttt

SEQ ID NO: 53760 - DNA, 19 bp, Homo sapiens
  siRNA target sequence for PUM2 (NM_015317.1,1618-1636).
gctcccagagtagttcttt

SEQ ID NO: 53761 - DNA, 19 bp, Homo sapiens
  siRNA target sequence for PUM2 (NM_015317.1,1619-1637).
ctcccagagtagttcttta

SEQ ID NO: 53762 - DNA, 19 bp, Homo sapiens
  siRNA target sequence for PUM2 (NM_015317.1,1621-1639).
cccagagtagttctttatt

SEQ ID NO: 53763 - DNA, 19 bp, Homo sapiens
  siRNA target sequence for PUM2 (NM_015317.1,1622-1640).
ccagagtagttctttattt

SEQ ID NO: 53764 - DNA, 19 bp, Homo sapiens
  siRNA target sequence for PUM2 (NM_015317.1,1653-1671).
ggtcaacctggaagtacat

SEQ ID NO: 53765 - DNA, 19 bp, Homo sapiens
  siRNA target sequence for PUM2 (NM_015317.1,1694-1712).
ctctttgggtgctgctata

SEQ ID NO: 53766 - DNA, 19 bp, Homo sapiens
  siRNA target sequence for PUM2 (NM_015317.1,1719-1737).
gccctcagtggatttggtt

SEQ ID NO: 53767 - DNA, 19 bp, Homo sapiens
  siRNA target sequence for PUM2 (NM_015317.1,1746-1764).
ggcagttctgcaagtagta

SEQ ID NO: 53768 - DNA, 19 bp, Homo sapiens
  siRNA target sequence for PUM2 (NM_015317.1,1789-1807).
ctactagctctgacttgta

SEQ ID NO: 53769 - DNA, 19 bp, Homo sapiens
  siRNA target sequence for PUM2 (NM_015317.1,1800-1818).
gacttgtacaaaagatcta

SEQ ID NO: 53770 - DNA, 19 bp, Homo sapiens
  siRNA target sequence for PUM2 (NM_015317.1,1831-1849).
cacccatagggcaaccatt

SEQ ID NO: 53771 - DNA, 19 bp, Homo sapiens
  siRNA target sequence for PUM2 (NM_015317.1,1833-1851).
cccatagggcaaccatttt

SEQ ID NO: 53772 - DNA, 19 bp, Homo sapiens
  siRNA target sequence for PUM2 (NM_015317.1,1834-1852).
ccatagggcaaccatttta

SEQ ID NO: 53773 - DNA, 19 bp, Homo sapiens
  siRNA target sequence for PUM2 (NM_015317.1,1839-1857).
gggcaaccattttacaata

SEQ ID NO: 53774 - DNA, 19 bp, Homo sapiens
  siRNA target sequence for PUM2 (NM_015317.1,1871-1889).
ctcctctccaagtccaata

SEQ ID NO: 53775 - DNA, 19 bp, Homo sapiens
  siRNA target sequence for PUM2 (NM_015317.1,1907-1925).
ccaaactccaggacattca

SEQ ID NO: 53776 - DNA, 19 bp, Homo sapiens
  siRNA target sequence for PUM2 (NM_015317.1,1995-2013).
ggtagtggtcgatatatct

SEQ ID NO: 53777 - DNA, 19 bp, Homo sapiens
  siRNA target sequence for PUM2 (NM_015317.1,2103-2121).
cggcttcggtataataggt

SEQ ID NO: 53778 - DNA, 19 bp, Homo sapiens
  siRNA target sequence for PUM2 (NM_015317.1,2109-2127).
cggtataataggtctgata

SEQ ID NO: 53779 - DNA, 19 bp, Homo sapiens
  siRNA target sequence for PUM2 (NM_015317.1,2133-2151).
ccttctggccgcagtagat

SEQ ID NO: 53780 - DNA, 19 bp, Homo sapiens
  siRNA target sequence for PUM2 (NM_015317.1,2134-2152).
cttctggccgcagtagatt

SEQ ID NO: 53781 - DNA, 19 bp, Homo sapiens
  siRNA target sequence for PUM2 (NM_015317.1,2140-2158).
gccgcagtagattattgga

SEQ ID NO: 53782 - DNA, 19 bp, Homo sapiens
  siRNA target sequence for PUM2 (NM_015317.1,2141-2159).
ccgcagtagattattggaa

SEQ ID NO: 53783 - DNA, 19 bp, Homo sapiens
  siRNA target sequence for PUM2 (NM_015317.1,2197-2215).
gagacttgattggacatat

SEQ ID NO: 53784 - DNA, 19 bp, Homo sapiens
  siRNA target sequence for PUM2 (NM_015317.1,2201-2219).
cttgattggacatatagtt

SEQ ID NO: 53785 - DNA, 19 bp, Homo sapiens
  siRNA target sequence for PUM2 (NM_015317.1,2237-2255).
gcatggttctagattcata

SEQ ID NO: 53786 - DNA, 19 bp, Homo sapiens
  siRNA target sequence for PUM2 (NM_015317.1,2283-2301).
gctgagcgacagatggtat

SEQ ID NO: 53787 - DNA, 19 bp, Homo sapiens
  siRNA target sequence for PUM2 (NM_015317.1,2284-2302).
ctgagcgacagatggtatt

SEQ ID NO: 53788 - DNA, 19 bp, Homo sapiens
  siRNA target sequence for PUM2 (NM_015317.1,2286-2304).
gagcgacagatggtattta

SEQ ID NO: 53789 - DNA, 19 bp, Homo sapiens
  siRNA target sequence for PUM2 (NM_015317.1,2288-2306).
gcgacagatggtatttaat

SEQ ID NO: 53790 - DNA, 19 bp, Homo sapiens
  siRNA target sequence for PUM2 (NM_015317.1,2319-2337).
gcagcctatcaattaatga

SEQ ID NO: 53791 - DNA, 19 bp, Homo sapiens
  siRNA target sequence for PUM2 (NM_015317.1,2349-2367).
ggcaactatgttatacaga

SEQ ID NO: 53792 - DNA, 19 bp, Homo sapiens
  siRNA target sequence for PUM2 (NM_015317.1,2350-2368).
gcaactatgttatacagaa

SEQ ID NO: 53793 - DNA, 19 bp, Homo sapiens
  siRNA target sequence for PUM2 (NM_015317.1,2354-2372).
ctatgttatacagaagttt

SEQ ID NO: 53794 - DNA, 19 bp, Homo sapiens
  siRNA target sequence for PUM2 (NM_015317.1,2383-2401).
ggagtctggatcaaaaatt

SEQ ID NO: 53795 - DNA, 19 bp, Homo sapiens
  siRNA target sequence for PUM2 (NM_015317.1,2384-2402).
gagtctggatcaaaaatta

SEQ ID NO: 53796 - DNA, 19 bp, Homo sapiens
  siRNA target sequence for PUM2 (NM_015317.1,2405-2423).
cctggctactcgtattcgt

SEQ ID NO: 53797 - DNA, 19 bp, Homo sapiens
  siRNA target sequence for PUM2 (NM_015317.1,2416-2434).
gtattcgtggtcatgttct

SEQ ID NO: 53798 - DNA, 19 bp, Homo sapiens
  siRNA target sequence for PUM2 (NM_015317.1,2438-2456).
cttagccttgcagatgtat

SEQ ID NO: 53799 - DNA, 19 bp, Homo sapiens
  siRNA target sequence for PUM2 (NM_015317.1,2463-2481).
cgcgttattcagaaagcat

SEQ ID NO: 53800 - DNA, 19 bp, Homo sapiens
  siRNA target sequence for PUM2 (NM_015317.1,2478-2496).
gcattagaatctatttctt

SEQ ID NO: 53801 - DNA, 19 bp, Homo sapiens
  siRNA target sequence for PUM2 (NM_015317.1,2501-2519).
ccagcagagtgaaatggta

SEQ ID NO: 53802 - DNA, 19 bp, Homo sapiens
  siRNA target sequence for PUM2 (NM_015317.1,2533-2551).
gtcatgtgctcaaatgtgt

SEQ ID NO: 53803 - DNA, 19 bp, Homo sapiens
  siRNA target sequence for PUM2 (NM_015317.1,2540-2558).
gctcaaatgtgtgaaagat

SEQ ID NO: 53804 - DNA, 19 bp, Homo sapiens
  siRNA target sequence for PUM2 (NM_015317.1,2561-2579).
gaatggaaaccatgttgta

SEQ ID NO: 53805 - DNA, 19 bp, Homo sapiens
  siRNA target sequence for PUM2 (NM_015317.1,2577-2595).
gtacaaaaatgtatcgaat

SEQ ID NO: 53806 - DNA, 19 bp, Homo sapiens
  siRNA target sequence for PUM2 (NM_015317.1,2607-2625).
cagtcactacagttcatca

SEQ ID NO: 53807 - DNA, 19 bp, Homo sapiens
  siRNA target sequence for PUM2 (NM_015317.1,2631-2649).
gctttcaagggacaagtat

SEQ ID NO: 53808 - DNA, 19 bp, Homo sapiens
  siRNA target sequence for PUM2 (NM_015317.1,2654-2672).
gctttcaactcatccttat

SEQ ID NO: 53809 - DNA, 19 bp, Homo sapiens
  siRNA target sequence for PUM2 (NM_015317.1,2722-2740).
ccttacctatcttagaaga

SEQ ID NO: 53810 - DNA, 19 bp, Homo sapiens
  siRNA target sequence for PUM2 (NM_015317.1,2723-2741).
cttacctatcttagaagaa

SEQ ID NO: 53811 - DNA, 19 bp, Homo sapiens
  siRNA target sequence for PUM2 (NM_015317.1,2775-2793).
cagtatggcaattatgtta

SEQ ID NO: 53812 - DNA, 19 bp, Homo sapiens
  siRNA target sequence for PUM2 (NM_015317.1,2846-2864).
cgaaatcaggggaaaggtt

SEQ ID NO: 53813 - DNA, 19 bp, Homo sapiens
  siRNA target sequence for PUM2 (NM_015317.1,2894-2912).
caatgtagtagaaaagtgt

SEQ ID NO: 53814 - DNA, 19 bp, Homo sapiens
  siRNA target sequence for PUM2 (NM_015317.1,2898-2916).
gtagtagaaaagtgtgtta

SEQ ID NO: 53815 - DNA, 19 bp, Homo sapiens
  siRNA target sequence for PUM2 (NM_015317.1,2929-2947).
gtgctgagagagctttact

SEQ ID NO: 53816 - DNA, 19 bp, Homo sapiens
  siRNA target sequence for PUM2 (NM_015317.1,2931-2949).
gctgagagagctttactga

SEQ ID NO: 53817 - DNA, 19 bp, Homo sapiens
  siRNA target sequence for PUM2 (NM_015317.1,2932-2950).
ctgagagagctttactgat

SEQ ID NO: 53818 - DNA, 19 bp, Homo sapiens
  siRNA target sequence for PUM2 (NM_015317.1,3018-3036).
gccaattacgtggttcaaa

SEQ ID NO: 53819 - DNA, 19 bp, Homo sapiens
  siRNA target sequence for PUM2 (NM_015317.1,3019-3037).
ccaattacgtggttcaaaa

SEQ ID NO: 53820 - DNA, 19 bp, Homo sapiens
  siRNA target sequence for PUM2 (NM_015317.1,3061-3079).
ctcagagaaagataatcat

SEQ ID NO: 53821 - DNA, 19 bp, Homo sapiens
  siRNA target sequence for PUM2 (NM_015317.1,3071-3089).
gataatcatgcacaagatt

SEQ ID NO: 53822 - DNA, 19 bp, Homo sapiens
  siRNA target sequence for PUM2 (NM_015317.1,3086-3104).
gattcgacctcacattact

SEQ ID NO: 53823 - DNA, 19 bp, Homo sapiens
  siRNA target sequence for PUM2 (NM_015317.1,3119-3137).
cacatacgggaagcatata

SEQ ID NO: 53824 - DNA, 19 bp, Homo sapiens
  siRNA target sequence for PUM2 (NM_015317.1,3121-3139).
catacgggaagcatatact

SEQ ID NO: 53825 - DNA, 19 bp, Homo sapiens
  siRNA target sequence for PUM2 (NM_015317.1,3173-3191).
cccggacctaggacctatt

SEQ ID NO: 53826 - DNA, 19 bp, Homo sapiens
  siRNA target sequence for PUM2 (NM_015317.1,3176-3194).
ggacctaggacctattgga

SEQ ID NO: 53827 - DNA, 19 bp, Homo sapiens
  siRNA target sequence for RAE1 (NM_003610.2,226-244).
cagtgcaactacagacaat

SEQ ID NO: 53828 - DNA, 19 bp, Homo sapiens
  siRNA target sequence for RAE1 (NM_003610.2,228-246).
gtgcaactacagacaatca

SEQ ID NO: 53829 - DNA, 19 bp, Homo sapiens
  siRNA target sequence for RAE1 (NM_003610.2,245-263).
cacaatcccatgaaggata

SEQ ID NO: 53830 - DNA, 19 bp, Homo sapiens
  siRNA target sequence for RAE1 (NM_003610.2,252-270).
ccatgaaggatattgaagt

SEQ ID NO: 53831 - DNA, 19 bp, Homo sapiens
  siRNA target sequence for RAE1 (NM_003610.2,253-271).
catgaaggatattgaagta

SEQ ID NO: 53832 - DNA, 19 bp, Homo sapiens
  siRNA target sequence for RAE1 (NM_003610.2,259-277).
ggatattgaagtaacatca

SEQ ID NO: 53833 - DNA, 19 bp, Homo sapiens
  siRNA target sequence for RAE1 (NM_003610.2,345-363).
caggatcatgggctaatga

SEQ ID NO: 53834 - DNA, 19 bp, Homo sapiens
  siRNA target sequence for RAE1 (NM_003610.2,455-473).
gacgatgggagcaaagtgt

SEQ ID NO: 53835 - DNA, 19 bp, Homo sapiens
  siRNA target sequence for RAE1 (NM_003610.2,478-496).
ggcatcgtgtgataaaact

SEQ ID NO: 53836 - DNA, 19 bp, Homo sapiens
  siRNA target sequence for RAE1 (NM_003610.2,508-526).
ggacctcagcagtaaccaa

SEQ ID NO: 53837 - DNA, 19 bp, Homo sapiens
  siRNA target sequence for RAE1 (NM_003610.2,519-537).
gtaaccaagcgatacagat

SEQ ID NO: 53838 - DNA, 19 bp, Homo sapiens
  siRNA target sequence for RAE1 (NM_003610.2,573-591).
ggatcaaagctccaaacta

SEQ ID NO: 53839 - DNA, 19 bp, Homo sapiens
  siRNA target sequence for RAE1 (NM_003610.2,608-626).
gggagctgggataagactt

SEQ ID NO: 53840 - DNA, 19 bp, Homo sapiens
  siRNA target sequence for RAE1 (NM_003610.2,609-627).
ggagctgggataagacttt

SEQ ID NO: 53841 - DNA, 19 bp, Homo sapiens
  siRNA target sequence for RAE1 (NM_003610.2,612-630).
gctgggataagactttaaa

SEQ ID NO: 53842 - DNA, 19 bp, Homo sapiens
  siRNA target sequence for RAE1 (NM_003610.2,615-633).
gggataagactttaaagtt

SEQ ID NO: 53843 - DNA, 19 bp, Homo sapiens
  siRNA target sequence for RAE1 (NM_003610.2,616-634).
ggataagactttaaagttt

SEQ ID NO: 53844 - DNA, 19 bp, Homo sapiens
  siRNA target sequence for RAE1 (NM_003610.2,637-655).
ggatactcgatcgtcaaat

SEQ ID NO: 53845 - DNA, 19 bp, Homo sapiens
  siRNA target sequence for RAE1 (NM_003610.2,642-660).
ctcgatcgtcaaatcctat

SEQ ID NO: 53846 - DNA, 19 bp, Homo sapiens
  siRNA target sequence for RAE1 (NM_003610.2,645-663).
gatcgtcaaatcctatgat

SEQ ID NO: 53847 - DNA, 19 bp, Homo sapiens
  siRNA target sequence for RAE1 (NM_003610.2,651-669).
caaatcctatgatggtttt

SEQ ID NO: 53848 - DNA, 19 bp, Homo sapiens
  siRNA target sequence for RAE1 (NM_003610.2,674-692).
ctccctgaaaggtgttact

SEQ ID NO: 53849 - DNA, 19 bp, Homo sapiens
  siRNA target sequence for RAE1 (NM_003610.2,732-750).
cagagaggggcctgattgt

SEQ ID NO: 53850 - DNA, 19 bp, Homo sapiens
  siRNA target sequence for RAE1 (NM_003610.2,734-752).
gagaggggcctgattgtct

SEQ ID NO: 53851 - DNA, 19 bp, Homo sapiens
  siRNA target sequence for RAE1 (NM_003610.2,738-756).
ggggcctgattgtctatca

SEQ ID NO: 53852 - DNA, 19 bp, Homo sapiens
  siRNA target sequence for RAE1 (NM_003610.2,761-779).
gagaatcaaccttctgaat

SEQ ID NO: 53853 - DNA, 19 bp, Homo sapiens
  siRNA target sequence for RAE1 (NM_003610.2,787-805).
gatagaatctccactgaaa

SEQ ID NO: 53854 - DNA, 19 bp, Homo sapiens
  siRNA target sequence for RAE1 (NM_003610.2,812-830).
catcggtgtgtggctattt

SEQ ID NO: 53855 - DNA, 19 bp, Homo sapiens
  siRNA target sequence for RAE1 (NM_003610.2,815-833).
cggtgtgtggctattttta

SEQ ID NO: 53856 - DNA, 19 bp, Homo sapiens
  siRNA target sequence for RAE1 (NM_003610.2,858-876).
gttttgccctgggaagtat

SEQ ID NO: 53857 - DNA, 19 bp, Homo sapiens
  siRNA target sequence for RAE1 (NM_003610.2,877-895).
cgaggggagagttgctatt

SEQ ID NO: 53858 - DNA, 19 bp, Homo sapiens
  siRNA target sequence for RAE1 (NM_003610.2,881-899).
gggagagttgctattcact

SEQ ID NO: 53859 - DNA, 19 bp, Homo sapiens
  siRNA target sequence for RAE1 (NM_003610.2,882-900).
ggagagttgctattcacta

SEQ ID NO: 53860 - DNA, 19 bp, Homo sapiens
  siRNA target sequence for RAE1 (NM_003610.2,883-901).
gagagttgctattcactat

SEQ ID NO: 53861 - DNA, 19 bp, Homo sapiens
  siRNA target sequence for RAE1 (NM_003610.2,885-903).
gagttgctattcactatat

SEQ ID NO: 53862 - DNA, 19 bp, Homo sapiens
  siRNA target sequence for RAE1 (NM_003610.2,887-905).
gttgctattcactatatca

SEQ ID NO: 53863 - DNA, 19 bp, Homo sapiens
  siRNA target sequence for RAE1 (NM_003610.2,931-949).
cttcacctttaaatgtcat

SEQ ID NO: 53864 - DNA, 19 bp, Homo sapiens
  siRNA target sequence for RAE1 (NM_003610.2,985-1003).
catttatgcggtaaatgga

SEQ ID NO: 53865 - DNA, 19 bp, Homo sapiens
  siRNA target sequence for RAE1 (NM_003610.2,1006-1024).
cgcgttccatcctgttcat

SEQ ID NO: 53866 - DNA, 19 bp, Homo sapiens
  siRNA target sequence for RAE1 (NM_003610.2,1043-1061).
ggatctgatggtagattca

SEQ ID NO: 53867 - DNA, 19 bp, Homo sapiens
  siRNA target sequence for RAE1 (NM_003610.2,1098-1116).
cttcggaacagttagatca

SEQ ID NO: 53868 - DNA, 19 bp, Homo sapiens
  siRNA target sequence for RAE1 (NM_003610.2,1125-1143).
cagcttgctgtttcaatca

SEQ ID NO: 53869 - DNA, 19 bp, Homo sapiens
  siRNA target sequence for RAE1 (NM_003610.2,1127-1145).
gcttgctgtttcaatcaca

SEQ ID NO: 53870 - DNA, 19 bp, Homo sapiens
  siRNA target sequence for RAE1 (NM_003610.2,1134-1152).
gtttcaatcacaatggaaa

SEQ ID NO: 53871 - DNA, 19 bp, Homo sapiens
  siRNA target sequence for RAE1 (NM_003610.2,1180-1198).
ctggtcaaagggacatgaa

SEQ ID NO: 53872 - DNA, 19 bp, Homo sapiens
  siRNA target sequence for RAE1 (NM_003610.2,1182-1200).
ggtcaaagggacatgaatt

SEQ ID NO: 53873 - DNA, 19 bp, Homo sapiens
  siRNA target sequence for RAE1 (NM_003610.2,1183-1201).
gtcaaagggacatgaattt

SEQ ID NO: 53874 - DNA, 19 bp, Homo sapiens
  siRNA target sequence for RAE1 (NM_003610.2,1253-1271).
ctaaagcccaggaataaga

SEQ ID NO: 53875 - DNA, 19 bp, Homo sapiens
  siRNA target sequence for RALY (NM_007367.2,413-431).
gagaccatcttctctaagt

SEQ ID NO: 53876 - DNA, 19 bp, Homo sapiens
  siRNA target sequence for RALY (NM_007367.2,415-433).
gaccatcttctctaagtat

SEQ ID NO: 53877 - DNA, 19 bp, Homo sapiens
  siRNA target sequence for RALY (NM_007367.2,712-730).
ggtccggcgtgtcaaaact

SEQ ID NO: 53878 - DNA, 19 bp, Homo sapiens
  siRNA target sequence for RALY (NM_007367.2,713-731).
gtccggcgtgtcaaaacta

SEQ ID NO: 53879 - DNA, 19 bp, Homo sapiens
  siRNA target sequence for RALY (NM_007367.2,718-736).
gcgtgtcaaaactaacgta

SEQ ID NO: 53880 - DNA, 19 bp, Homo sapiens
  siRNA target sequence for RALY (NM_016732.1,627-645).
gtggctacatctttgacta

SEQ ID NO: 53881 - DNA, 19 bp, Homo sapiens
  siRNA target sequence for RALY (NM_016732.1,631-649).
ctacatctttgactatgat

SEQ ID NO: 53882 - DNA, 19 bp, Homo sapiens
  siRNA target sequence for RBM10 (NM_005676.3,493-511).
catggactaccgttcatat

SEQ ID NO: 53883 - DNA, 19 bp, Homo sapiens
  siRNA target sequence for RBM10 (NM_005676.3,898-916).
cgccttcgtcgagtttagt

SEQ ID NO: 53884 - DNA, 19 bp, Homo sapiens
  siRNA target sequence for RBM10 (NM_005676.3,900-918).
ccttcgtcgagtttagtca

SEQ ID NO: 53885 - DNA, 19 bp, Homo sapiens
  siRNA target sequence for RBM10 (NM_005676.3,1022-1040).
gaggactggctgtgcaata

SEQ ID NO: 53886 - DNA, 19 bp, Homo sapiens
  siRNA target sequence for RBM10 (NM_005676.3,1304-1322).
ccacacagcaccatggatt

SEQ ID NO: 53887 - DNA, 19 bp, Homo sapiens
  siRNA target sequence for RBM10 (NM_005676.3,1365-1383).
ccaacgtgcgcgtcataaa

SEQ ID NO: 53888 - DNA, 19 bp, Homo sapiens
  siRNA target sequence for RBM10 (NM_005676.3,1500-1518).
gcaagaccatcaatgttga

SEQ ID NO: 53889 - DNA, 19 bp, Homo sapiens
  siRNA target sequence for RBM10 (NM_005676.3,1852-1870).
gtcgatgcaggctttctct

SEQ ID NO: 53890 - DNA, 19 bp, Homo sapiens
  siRNA target sequence for RBM10 (NM_005676.3,1943-1961).
gccaacagccagtcgtata

SEQ ID NO: 53891 - DNA, 19 bp, Homo sapiens
  siRNA target sequence for RBM10 (NM_005676.3,1952-1970).
cagtcgtataccatcatgt

SEQ ID NO: 53892 - DNA, 19 bp, Homo sapiens
  siRNA target sequence for RBM10 (NM_005676.3,2105-2123).
gagacctccggctactact

SEQ ID NO: 53893 - DNA, 19 bp, Homo sapiens
  siRNA target sequence for RBM10 (NM_005676.3,2153-2171).
cccaactcccagtattact

SEQ ID NO: 53894 - DNA, 19 bp, Homo sapiens
  siRNA target sequence for RBM10 (NM_005676.3,2154-2172).
ccaactcccagtattacta

SEQ ID NO: 53895 - DNA, 19 bp, Homo sapiens
  siRNA target sequence for RBM10 (NM_005676.3,2209-2227).
ggagaggcggacctatgtt

SEQ ID NO: 53896 - DNA, 19 bp, Homo sapiens
  siRNA target sequence for RBM10 (NM_005676.3,2244-2262).
cggccgacggacataagga

SEQ ID NO: 53897 - DNA, 19 bp, Homo sapiens
  siRNA target sequence for RBM10 (NM_005676.3,2724-2742).
ggctccacaagcaaaacct

SEQ ID NO: 53898 - DNA, 19 bp, Homo sapiens
  siRNA target sequence for RBM10 (NM_005676.3,2725-2743).
gctccacaagcaaaacctt

SEQ ID NO: 53899 - DNA, 19 bp, Homo sapiens
  siRNA target sequence for RBM10 (NM_005676.3,2756-2774).
cgagcccacttgtcagaaa

SEQ ID NO: 53900 - DNA, 19 bp, Homo sapiens
  siRNA target sequence for RBM10 (NM_005676.3,3125-3143).
gagacactgcacaagacaa

SEQ ID NO: 53901 - DNA, 19 bp, Homo sapiens
  siRNA target sequence for RBM11 (NM_144770.1,32-50).
ccgacaggaccgtgtttgt

SEQ ID NO: 53902 - DNA, 19 bp, Homo sapiens
  siRNA target sequence for RBM11 (NM_144770.1,70-88).
gttcgggaagagattctgt

SEQ ID NO: 53903 - DNA, 19 bp, Homo sapiens
  siRNA target sequence for RBM11 (NM_144770.1,113-131).
cactaaccaaagtgactat

SEQ ID NO: 53904 - DNA, 19 bp, Homo sapiens
  siRNA target sequence for RBM11 (NM_144770.1,115-133).
ctaaccaaagtgactatat

SEQ ID NO: 53905 - DNA, 19 bp, Homo sapiens
  siRNA target sequence for RBM11 (NM_144770.1,119-137).
ccaaagtgactatatgcaa

SEQ ID NO: 53906 - DNA, 19 bp, Homo sapiens
  siRNA target sequence for RBM11 (NM_144770.1,186-204).
cccagaatcggtgtcttat

SEQ ID NO: 53907 - DNA, 19 bp, Homo sapiens
  siRNA target sequence for RBM11 (NM_144770.1,196-214).
gtgtcttatgccatagctt

SEQ ID NO: 53908 - DNA, 19 bp, Homo sapiens
  siRNA target sequence for RBM11 (NM_144770.1,219-237).
gaatggaattcgtttatat

SEQ ID NO: 53909 - DNA, 19 bp, Homo sapiens
  siRNA target sequence for RBM11 (NM_144770.1,292-310).
gctaaccaaagttttgaga

SEQ ID NO: 53910 - DNA, 19 bp, Homo sapiens
  siRNA target sequence for RBM11 (NM_144770.1,333-351).
caactacaggaatgaagaa

SEQ ID NO: 53911 - DNA, 19 bp, Homo sapiens
  siRNA target sequence for RBM11 (NM_144770.1,377-395).
ccatgcagtattttccaat

SEQ ID NO: 53912 - DNA, 19 bp, Homo sapiens
  siRNA target sequence for RBM11 (NM_144770.1,391-409).
ccaattaataatacttctt

SEQ ID NO: 53913 - DNA, 19 bp, Homo sapiens
  siRNA target sequence for RBM11 (NM_144770.1,468-486).
gcagcttccttactatgaa

SEQ ID NO: 53914 - DNA, 19 bp, Homo sapiens
  siRNA target sequence for RBM11 (NM_144770.1,763-781).
caaacaagtgatagtgata

SEQ ID NO: 53915 - DNA, 19 bp, Homo sapiens
  siRNA target sequence for RBM11 (NM_144770.1,816-834).
ccaaaagttccgaaagtct

SEQ ID NO: 53916 - DNA, 19 bp, Homo sapiens
  siRNA target sequence for RBM15 (NM_022768.3,138-156).
gcggttccgctgtgtgaaa

SEQ ID NO: 53917 - DNA, 19 bp, Homo sapiens
  siRNA target sequence for RBM15 (NM_022768.3,201-219).
cgacgacccgcaacaatga

SEQ ID NO: 53918 - DNA, 19 bp, Homo sapiens
  siRNA target sequence for RBM15 (NM_022768.3,202-220).
gacgacccgcaacaatgaa

SEQ ID NO: 53919 - DNA, 19 bp, Homo sapiens
  siRNA target sequence for RBM15 (NM_022768.3,211-229).
caacaatgaagggaaaaga

SEQ ID NO: 53920 - DNA, 19 bp, Homo sapiens
  siRNA target sequence for RBM15 (NM_022768.3,285-303).
ggtgagcggagcaagaagt

SEQ ID NO: 53921 - DNA, 19 bp, Homo sapiens
  siRNA target sequence for RBM15 (NM_022768.3,286-304).
gtgagcggagcaagaagtt

SEQ ID NO: 53922 - DNA, 19 bp, Homo sapiens
  siRNA target sequence for RBM15 (NM_022768.3,403-421).
gtggcagccgcgagtatga

SEQ ID NO: 53923 - DNA, 19 bp, Homo sapiens
  siRNA target sequence for RBM15 (NM_022768.3,405-423).
ggcagccgcgagtatgata

SEQ ID NO: 53924 - DNA, 19 bp, Homo sapiens
  siRNA target sequence for RBM15 (NM_022768.3,442-460).
gtagccgcttgcatagtta

SEQ ID NO: 53925 - DNA, 19 bp, Homo sapiens
  siRNA target sequence for RBM15 (NM_022768.3,447-465).
cgcttgcatagttatagct

SEQ ID NO: 53926 - DNA, 19 bp, Homo sapiens
  siRNA target sequence for RBM15 (NM_022768.3,467-485).
cccgagcaccaaaaattct

SEQ ID NO: 53927 - DNA, 19 bp, Homo sapiens
  siRNA target sequence for RBM15 (NM_022768.3,665-683).
caaacgcttcggtgatgta

SEQ ID NO: 53928 - DNA, 19 bp, Homo sapiens
  siRNA target sequence for RBM15 (NM_022768.3,670-688).
gcttcggtgatgtaagtgt

SEQ ID NO: 53929 - DNA, 19 bp, Homo sapiens
  siRNA target sequence for RBM15 (NM_022768.3,730-748).
gggtagcctttgtgaactt

SEQ ID NO: 53930 - DNA, 19 bp, Homo sapiens
  siRNA target sequence for RBM15 (NM_022768.3,809-827).
ccggcctctgaagatagaa

SEQ ID NO: 53931 - DNA, 19 bp, Homo sapiens
  siRNA target sequence for RBM15 (NM_022768.3,850-868).
gcagccgctcccctttaga

SEQ ID NO: 53932 - DNA, 19 bp, Homo sapiens
  siRNA target sequence for RBM15 (NM_022768.3,853-871).
gccgctcccctttagacaa

SEQ ID NO: 53933 - DNA, 19 bp, Homo sapiens
  siRNA target sequence for RBM15 (NM_022768.3,854-872).
ccgctcccctttagacaaa

SEQ ID NO: 53934 - DNA, 19 bp, Homo sapiens
  siRNA target sequence for RBM15 (NM_022768.3,856-874).
gctcccctttagacaaaga

SEQ ID NO: 53935 - DNA, 19 bp, Homo sapiens
  siRNA target sequence for RBM15 (NM_022768.3,860-878).
ccctttagacaaagatact

SEQ ID NO: 53936 - DNA, 19 bp, Homo sapiens
  siRNA target sequence for RBM15 (NM_022768.3,862-880).
ctttagacaaagatactta

SEQ ID NO: 53937 - DNA, 19 bp, Homo sapiens
  siRNA target sequence for RBM15 (NM_022768.3,1077-1095).
gactacccgttctatgaga

SEQ ID NO: 53938 - DNA, 19 bp, Homo sapiens
  siRNA target sequence for RBM15 (NM_022768.3,1198-1216).
ctaaccggacgctcttctt

SEQ ID NO: 53939 - DNA, 19 bp, Homo sapiens
  siRNA target sequence for RBM15 (NM_022768.3,1234-1252).
ctgtaacggagagtgattt

SEQ ID NO: 53940 - DNA, 19 bp, Homo sapiens
  siRNA target sequence for RBM15 (NM_022768.3,1236-1254).
gtaacggagagtgatttaa

SEQ ID NO: 53941 - DNA, 19 bp, Homo sapiens
  siRNA target sequence for RBM15 (NM_022768.3,1327-1345).
cttacggctttctcaaatt

SEQ ID NO: 53942 - DNA, 19 bp, Homo sapiens
  siRNA target sequence for RBM15 (NM_022768.3,1406-1424).
gaatcctatcaaaattggt

SEQ ID NO: 53943 - DNA, 19 bp, Homo sapiens
  siRNA target sequence for RBM15 (NM_022768.3,1415-1433).
caaaattggttatggtaaa

SEQ ID NO: 53944 - DNA, 19 bp, Homo sapiens
  siRNA target sequence for RBM15 (NM_022768.3,1489-1507).
ctgccctggcacgagaatt

SEQ ID NO: 53945 - DNA, 19 bp, Homo sapiens
  siRNA target sequence for RBM15 (NM_022768.3,1498-1516).
cacgagaatttgatcgatt

SEQ ID NO: 53946 - DNA, 19 bp, Homo sapiens
  siRNA target sequence for RBM15 (NM_022768.3,1532-1550).
catagactaccgaaaaggt

SEQ ID NO: 53947 - DNA, 19 bp, Homo sapiens
  siRNA target sequence for RBM15 (NM_022768.3,1548-1566).
ggtgatagttgggcatata

SEQ ID NO: 53948 - DNA, 19 bp, Homo sapiens
  siRNA target sequence for RBM15 (NM_022768.3,1636-1654).
cagatcgacgccttagagt

SEQ ID NO: 53949 - DNA, 19 bp, Homo sapiens
  siRNA target sequence for RBM15 (NM_022768.3,1642-1660).
gacgccttagagtagactt

SEQ ID NO: 53950 - DNA, 19 bp, Homo sapiens
  siRNA target sequence for RBM15 (NM_022768.3,1663-1681).
ccgacaccgaacatcgtta

SEQ ID NO: 53951 - DNA, 19 bp, Homo sapiens
  siRNA target sequence for RBM15 (NM_022768.3,1701-1719).
cctctgcccttgactcatt

SEQ ID NO: 53952 - DNA, 19 bp, Homo sapiens
  siRNA target sequence for RBM15 (NM_022768.3,1702-1720).
ctctgcccttgactcatta

SEQ ID NO: 53953 - DNA, 19 bp, Homo sapiens
  siRNA target sequence for RBM15 (NM_022768.3,1727-1745).
ggtgacagatgcttttgga

SEQ ID NO: 53954 - DNA, 19 bp, Homo sapiens
  siRNA target sequence for RBM15 (NM_022768.3,1783-1801).
ggacaccacccttactata

SEQ ID NO: 53955 - DNA, 19 bp, Homo sapiens
  siRNA target sequence for RBM15 (NM_022768.3,2095-2113).
ctgaccgcagtccagaatt

SEQ ID NO: 53956 - DNA, 19 bp, Homo sapiens
  siRNA target sequence for RBM15 (NM_022768.3,2097-2115).
gaccgcagtccagaattga

SEQ ID NO: 53957 - DNA, 19 bp, Homo sapiens
  siRNA target sequence for RBM15 (NM_022768.3,2116-2134).
gcagtagccgggatcgtta

SEQ ID NO: 53958 - DNA, 19 bp, Homo sapiens
  siRNA target sequence for RBM15 (NM_022768.3,2119-2137).
gtagccgggatcgttacaa

SEQ ID NO: 53959 - DNA, 19 bp, Homo sapiens
  siRNA target sequence for RBM15 (NM_022768.3,2131-2149).
gttacaacagcgacaatga

SEQ ID NO: 53960 - DNA, 19 bp, Homo sapiens
  siRNA target sequence for RBM15 (NM_022768.3,2231-2249).
gcgagaccgtaaaaactct

SEQ ID NO: 53961 - DNA, 19 bp, Homo sapiens
  siRNA target sequence for RBM15 (NM_022768.3,2305-2323).
gccctctgaaaaaagaaga

SEQ ID NO: 53962 - DNA, 19 bp, Homo sapiens
  siRNA target sequence for RBM15 (NM_022768.3,2446-2464).
ggcagggcatgcttctact

SEQ ID NO: 53963 - DNA, 19 bp, Homo sapiens
  siRNA target sequence for RBM15 (NM_022768.3,2510-2528).
cctccaagtggctagtagt

SEQ ID NO: 53964 - DNA, 19 bp, Homo sapiens
  siRNA target sequence for RBM15 (NM_022768.3,2513-2531).
ccaagtggctagtagtctt

SEQ ID NO: 53965 - DNA, 19 bp, Homo sapiens
  siRNA target sequence for RBM15 (NM_022768.3,2601-2619).
cccaagttggatgaagtaa

SEQ ID NO: 53966 - DNA, 19 bp, Homo sapiens
  siRNA target sequence for RBM15 (NM_022768.3,2603-2621).
caagttggatgaagtaact

SEQ ID NO: 53967 - DNA, 19 bp, Homo sapiens
  siRNA target sequence for RBM15 (NM_022768.3,2634-2652).
gtagcagggcccaatggtt

SEQ ID NO: 53968 - DNA, 19 bp, Homo sapiens
  siRNA target sequence for RBM15 (NM_022768.3,2761-2779).
cctatttaaagcaaaagca

SEQ ID NO: 53969 - DNA, 19 bp, Homo sapiens
  siRNA target sequence for RBM15 (NM_022768.3,2903-2921).
ggccaaatctgaagaagat

SEQ ID NO: 53970 - DNA, 19 bp, Homo sapiens
  siRNA target sequence for RBM16 (NM_014892.1,192-210).
gccgtgaagaccttcaata

SEQ ID NO: 53971 - DNA, 19 bp, Homo sapiens
  siRNA target sequence for RBM16 (NM_014892.1,202-220).
ccttcaatagcgagttgta

SEQ ID NO: 53972 - DNA, 19 bp, Homo sapiens
  siRNA target sequence for RBM16 (NM_014892.1,203-221).
cttcaatagcgagttgtat

SEQ ID NO: 53973 - DNA, 19 bp, Homo sapiens
  siRNA target sequence for RBM16 (NM_014892.1,244-262).
ccatttcgaaagcgaaaat

SEQ ID NO: 53974 - DNA, 19 bp, Homo sapiens
  siRNA target sequence for RBM16 (NM_014892.1,434-452).
gtttgcacccagatttagt

SEQ ID NO: 53975 - DNA, 19 bp, Homo sapiens
  siRNA target sequence for RBM16 (NM_014892.1,492-510).
cctggggatgacaagagta

SEQ ID NO: 53976 - DNA, 19 bp, Homo sapiens
  siRNA target sequence for RBM16 (NM_014892.1,493-511).
ctggggatgacaagagtaa

SEQ ID NO: 53977 - DNA, 19 bp, Homo sapiens
  siRNA target sequence for RBM16 (NM_014892.1,501-519).
gacaagagtaaaatagtga

SEQ ID NO: 53978 - DNA, 19 bp, Homo sapiens
  siRNA target sequence for RBM16 (NM_014892.1,638-656).
cactgctatgagcaatact

SEQ ID NO: 53979 - DNA, 19 bp, Homo sapiens
  siRNA target sequence for RBM16 (NM_014892.1,709-727).
ctgatccgtgggtatctca

SEQ ID NO: 53980 - DNA, 19 bp, Homo sapiens
  siRNA target sequence for RBM16 (NM_014892.1,714-732).
ccgtgggtatctcagataa

SEQ ID NO: 53981 - DNA, 19 bp, Homo sapiens
  siRNA target sequence for RBM16 (NM_014892.1,719-737).
ggtatctcagataacaaat

SEQ ID NO: 53982 - DNA, 19 bp, Homo sapiens
  siRNA target sequence for RBM16 (NM_014892.1,720-738).
gtatctcagataacaaata

SEQ ID NO: 53983 - DNA, 19 bp, Homo sapiens
  siRNA target sequence for RBM16 (NM_014892.1,751-769).
cggctgtagctcagatctt

SEQ ID NO: 53984 - DNA, 19 bp, Homo sapiens
  siRNA target sequence for RBM16 (NM_014892.1,785-803).
ccagcagcttcaacaatta

SEQ ID NO: 53985 - DNA, 19 bp, Homo sapiens
  siRNA target sequence for RBM16 (NM_014892.1,788-806).
gcagcttcaacaattaata

SEQ ID NO: 53986 - DNA, 19 bp, Homo sapiens
  siRNA target sequence for RBM16 (NM_014892.1,811-829).
ccttacagatacaacaaca

SEQ ID NO: 53987 - DNA, 19 bp, Homo sapiens
  siRNA target sequence for RBM16 (NM_014892.1,865-883).
ctggtcttgttgttcagtt

SEQ ID NO: 53988 - DNA, 19 bp, Homo sapiens
  siRNA target sequence for RBM16 (NM_014892.1,888-906).
gctcttacggcacaactta

SEQ ID NO: 53989 - DNA, 19 bp, Homo sapiens
  siRNA target sequence for RBM16 (NM_014892.1,931-949).
ctcttactcccttagaaca

SEQ ID NO: 53990 - DNA, 19 bp, Homo sapiens
  siRNA target sequence for RBM16 (NM_014892.1,951-969).
ggagtctcctttaacaaga

SEQ ID NO: 53991 - DNA, 19 bp, Homo sapiens
  siRNA target sequence for RBM16 (NM_014892.1,952-970).
gagtctcctttaacaagaa

SEQ ID NO: 53992 - DNA, 19 bp, Homo sapiens
  siRNA target sequence for RBM16 (NM_014892.1,954-972).
gtctcctttaacaagaagt

SEQ ID NO: 53993 - DNA, 19 bp, Homo sapiens
  siRNA target sequence for RBM16 (NM_014892.1,1047-1065).
ctttctcacgtttcagaat

SEQ ID NO: 53994 - DNA, 19 bp, Homo sapiens
  siRNA target sequence for RBM16 (NM_014892.1,1051-1069).
ctcacgtttcagaatctgt

SEQ ID NO: 53995 - DNA, 19 bp, Homo sapiens
  siRNA target sequence for RBM16 (NM_014892.1,1231-1249).
ggagtagtcagcagcattt

SEQ ID NO: 53996 - DNA, 19 bp, Homo sapiens
  siRNA target sequence for RBM16 (NM_014892.1,1265-1283).
caatttggatgattccata

SEQ ID NO: 53997 - DNA, 19 bp, Homo sapiens
  siRNA target sequence for RBM16 (NM_014892.1,1271-1289).
ggatgattccatagatatt

SEQ ID NO: 53998 - DNA, 19 bp, Homo sapiens
  siRNA target sequence for RBM16 (NM_014892.1,1365-1383).
gtggcggttcgctcaagat

SEQ ID NO: 53999 - DNA, 19 bp, Homo sapiens
  siRNA target sequence for RBM16 (NM_014892.1,1367-1385).
ggcggttcgctcaagatca

SEQ ID NO: 54000 - DNA, 19 bp, Homo sapiens
  siRNA target sequence for RBM16 (NM_014892.1,1368-1386).
gcggttcgctcaagatcaa

SEQ ID NO: 54001 - DNA, 19 bp, Homo sapiens
  siRNA target sequence for RBM16 (NM_014892.1,1370-1388).
ggttcgctcaagatcaaga

SEQ ID NO: 54002 - DNA, 19 bp, Homo sapiens
  siRNA target sequence for RBM16 (NM_014892.1,1371-1389).
gttcgctcaagatcaagaa

SEQ ID NO: 54003 - DNA, 19 bp, Homo sapiens
  siRNA target sequence for RBM16 (NM_014892.1,1438-1456).
cacggtctggctctagaaa

SEQ ID NO: 54004 - DNA, 19 bp, Homo sapiens
  siRNA target sequence for RBM16 (NM_014892.1,1447-1465).
gctctagaaagcgtaaaca

SEQ ID NO: 54005 - DNA, 19 bp, Homo sapiens
  siRNA target sequence for RBM16 (NM_014892.1,1479-1497).
cgctcccgctcaagagaaa

SEQ ID NO: 54006 - DNA, 19 bp, Homo sapiens
  siRNA target sequence for RBM16 (NM_014892.1,1483-1501).
cccgctcaagagaaagaaa

SEQ ID NO: 54007 - DNA, 19 bp, Homo sapiens
  siRNA target sequence for RBM16 (NM_014892.1,1515-1533).
cggtcgtattcaagtgaaa

SEQ ID NO: 54008 - DNA, 19 bp, Homo sapiens
  siRNA target sequence for RBM16 (NM_014892.1,1571-1589).
gggattacctccaattaga

SEQ ID NO: 54009 - DNA, 19 bp, Homo sapiens
  siRNA target sequence for RBM16 (NM_014892.1,1572-1590).
ggattacctccaattagat

SEQ ID NO: 54010 - DNA, 19 bp, Homo sapiens
  siRNA target sequence for RBM16 (NM_014892.1,1588-1606).
gatctaaaacactaagtgt

SEQ ID NO: 54011 - DNA, 19 bp, Homo sapiens
  siRNA target sequence for RBM16 (NM_014892.1,1599-1617).
ctaagtgtatgtagtacta

SEQ ID NO: 54012 - DNA, 19 bp, Homo sapiens
  siRNA target sequence for RBM16 (NM_014892.1,1661-1679).
cttaaccaacctgtttgaa

SEQ ID NO: 54013 - DNA, 19 bp, Homo sapiens
  siRNA target sequence for RBM16 (NM_014892.1,1739-1757).
catggttcatcgacaagat

SEQ ID NO: 54014 - DNA, 19 bp, Homo sapiens
  siRNA target sequence for RBM16 (NM_014892.1,1779-1797).
ctcagttctggatcatata

SEQ ID NO: 54015 - DNA, 19 bp, Homo sapiens
  siRNA target sequence for RBM16 (NM_014892.1,1781-1799).
cagttctggatcatataaa

SEQ ID NO: 54016 - DNA, 19 bp, Homo sapiens
  siRNA target sequence for RBM16 (NM_014892.1,1803-1821).
gggtccaaggtcattaaga

SEQ ID NO: 54017 - DNA, 19 bp, Homo sapiens
  siRNA target sequence for RBM16 (NM_014892.1,1804-1822).
ggtccaaggtcattaagat

SEQ ID NO: 54018 - DNA, 19 bp, Homo sapiens
  siRNA target sequence for RBM16 (NM_014892.1,1875-1893).
gtggatcttggagttacat

SEQ ID NO: 54019 - DNA, 19 bp, Homo sapiens
  siRNA target sequence for RBM16 (NM_014892.1,1877-1895).
ggatcttggagttacatat

SEQ ID NO: 54020 - DNA, 19 bp, Homo sapiens
  siRNA target sequence for RBM16 (NM_014892.1,1878-1896).
gatcttggagttacatata

SEQ ID NO: 54021 - DNA, 19 bp, Homo sapiens
  siRNA target sequence for RBM16 (NM_014892.1,1956-1974).
gatcaggagactgtaaata

SEQ ID NO: 54022 - DNA, 19 bp, Homo sapiens
  siRNA target sequence for RBM16 (NM_014892.1,1996-2014).
gctcagaacctgttaaaga

SEQ ID NO: 54023 - DNA, 19 bp, Homo sapiens
  siRNA target sequence for RBM16 (NM_014892.1,2127-2145).
gccgtgcctacagttagtt

SEQ ID NO: 54024 - DNA, 19 bp, Homo sapiens
  siRNA target sequence for RBM16 (NM_014892.1,2128-2146).
ccgtgcctacagttagttt

SEQ ID NO: 54025 - DNA, 19 bp, Homo sapiens
  siRNA target sequence for RBM16 (NM_014892.1,2129-2147).
cgtgcctacagttagttta

SEQ ID NO: 54026 - DNA, 19 bp, Homo sapiens
  siRNA target sequence for RBM16 (NM_014892.1,2310-2328).
ccagtagtaccaacatctt

SEQ ID NO: 54027 - DNA, 19 bp, Homo sapiens
  siRNA target sequence for RBM16 (NM_014892.1,2311-2329).
cagtagtaccaacatcttt

SEQ ID NO: 54028 - DNA, 19 bp, Homo sapiens
  siRNA target sequence for RBM16 (NM_014892.1,2331-2349).
gtgcagccgtcattatcca

SEQ ID NO: 54029 - DNA, 19 bp, Homo sapiens
  siRNA target sequence for RBM16 (NM_014892.1,2347-2365).
ccatgacaccggaaactgt

SEQ ID NO: 54030 - DNA, 19 bp, Homo sapiens
  siRNA target sequence for RBM16 (NM_014892.1,2353-2371).
caccggaaactgtgaaaga

SEQ ID NO: 54031 - DNA, 19 bp, Homo sapiens
  siRNA target sequence for RBM16 (NM_014892.1,2546-2564).
gattccaaatgatatttca

SEQ ID NO: 54032 - DNA, 19 bp, Homo sapiens
  siRNA target sequence for RBM16 (NM_014892.1,2584-2602).
gaggacagccgccaaatgt

SEQ ID NO: 54033 - DNA, 19 bp, Homo sapiens
  siRNA target sequence for RBM16 (NM_014892.1,2586-2604).
ggacagccgccaaatgtga

SEQ ID NO: 54034 - DNA, 19 bp, Homo sapiens
  siRNA target sequence for RBM16 (NM_014892.1,2626-2644).
gagtccaaagaccaaatgt

SEQ ID NO: 54035 - DNA, 19 bp, Homo sapiens
  siRNA target sequence for RBM16 (NM_014892.1,2628-2646).
gtccaaagaccaaatgtat

SEQ ID NO: 54036 - DNA, 19 bp, Homo sapiens
  siRNA target sequence for RBM16 (NM_014892.1,2914-2932).
ctttaagtatccctaatca

SEQ ID NO: 54037 - DNA, 19 bp, Homo sapiens
  siRNA target sequence for RBM16 (NM_014892.1,2941-2959).
ccacaatgccaatgttaga

SEQ ID NO: 54038 - DNA, 19 bp, Homo sapiens
  siRNA target sequence for RBM16 (NM_014892.1,2960-2978).
cattcgtccgggactaata

SEQ ID NO: 54039 - DNA, 19 bp, Homo sapiens
  siRNA target sequence for RBM16 (NM_014892.1,3047-3065).
cccatcggtacttgattca

SEQ ID NO: 54040 - DNA, 19 bp, Homo sapiens
  siRNA target sequence for RBM16 (NM_014892.1,3145-3163).
gaagacaaagcgtagacaa

SEQ ID NO: 54041 - DNA, 19 bp, Homo sapiens
  siRNA target sequence for RBM16 (NM_014892.1,3148-3166).
gacaaagcgtagacaatgt

SEQ ID NO: 54042 - DNA, 19 bp, Homo sapiens
  siRNA target sequence for RBM16 (NM_014892.1,3150-3168).
caaagcgtagacaatgtta

SEQ ID NO: 54043 - DNA, 19 bp, Homo sapiens
  siRNA target sequence for RBM16 (NM_014892.1,3233-3251).
ccggtttcctcctatagaa

SEQ ID NO: 54044 - DNA, 19 bp, Homo sapiens
  siRNA target sequence for RBM16 (NM_014892.1,3234-3252).
cggtttcctcctatagaaa

SEQ ID NO: 54045 - DNA, 19 bp, Homo sapiens
  siRNA target sequence for RBM16 (NM_014892.1,3278-3296).
ccctgtggatgttagagat

SEQ ID NO: 54046 - DNA, 19 bp, Homo sapiens
  siRNA target sequence for RBM16 (NM_014892.1,3367-3385).
gaagacctcctgtagatat

SEQ ID NO: 54047 - DNA, 19 bp, Homo sapiens
  siRNA target sequence for RBM16 (NM_014892.1,3373-3391).
ctcctgtagatataagaga

SEQ ID NO: 54048 - DNA, 19 bp, Homo sapiens
  siRNA target sequence for RBM16 (NM_014892.1,3403-3421).
ggccaggtatagatcatct

SEQ ID NO: 54049 - DNA, 19 bp, Homo sapiens
  siRNA target sequence for RBM16 (NM_014892.1,3404-3422).
gccaggtatagatcatctt

SEQ ID NO: 54050 - DNA, 19 bp, Homo sapiens
  siRNA target sequence for RBM16 (NM_014892.1,3509-3527).
ggtctatggtggtccaaaa

SEQ ID NO: 54051 - DNA, 19 bp, Homo sapiens
  siRNA target sequence for RBM16 (NM_014892.1,3550-3568).
gatttcggtctggaaacta

SEQ ID NO: 54052 - DNA, 19 bp, Homo sapiens
  siRNA target sequence for RBM16 (NM_014892.1,3555-3573).
cggtctggaaactatcgat

SEQ ID NO: 54053 - DNA, 19 bp, Homo sapiens
  siRNA target sequence for RBM16 (NM_014892.1,3556-3574).
ggtctggaaactatcgatt

SEQ ID NO: 54054 - DNA, 19 bp, Homo sapiens
  siRNA target sequence for RBM16 (NM_014892.1,3557-3575).
gtctggaaactatcgattt

SEQ ID NO: 54055 - DNA, 19 bp, Homo sapiens
  siRNA target sequence for RBM16 (NM_014892.1,3559-3577).
ctggaaactatcgatttga

SEQ ID NO: 54056 - DNA, 19 bp, Homo sapiens
  siRNA target sequence for RBM16 (NM_014892.1,3723-3741).
cgagacagaattcaaaaca

SEQ ID NO: 54057 - DNA, 19 bp, Homo sapiens
  siRNA target sequence for RBM16 (NM_014892.1,3757-3775).
ctcatgctcgggtttttga

SEQ ID NO: 54058 - DNA, 19 bp, Homo sapiens
  siRNA target sequence for RBM16 (NM_014892.1,3762-3780).
gctcgggtttttgattatt

SEQ ID NO: 54059 - DNA, 19 bp, Homo sapiens
  siRNA target sequence for RBM16 (NM_014892.1,3791-3809).
cacttctcaacgaaaaggt

SEQ ID NO: 54060 - DNA, 19 bp, Homo sapiens
  siRNA target sequence for RBM16 (NM_014892.1,3796-3814).
ctcaacgaaaaggtgataa

SEQ ID NO: 54061 - DNA, 19 bp, Homo sapiens
  siRNA target sequence for RBM16 (NM_014892.1,3876-3894).
cagaatgatcctgaacttt

SEQ ID NO: 54062 - DNA, 19 bp, Homo sapiens
  siRNA target sequence for RBM16 (NM_014892.1,3878-3896).
gaatgatcctgaactttat

SEQ ID NO: 54063 - DNA, 19 bp, Homo sapiens
  siRNA target sequence for RBM3 (NM_006743.2,91-109).
gtgggagggctcaacttta

SEQ ID NO: 54064 - DNA, 19 bp, Homo sapiens
  siRNA target sequence for RBM3 (NM_006743.2,94-112).
ggagggctcaactttaaca

SEQ ID NO: 54065 - DNA, 19 bp, Homo sapiens
  siRNA target sequence for RBM3 (NM_006743.2,144-162).
cagtttcggacctatctct

SEQ ID NO: 54066 - DNA, 19 bp, Homo sapiens
  siRNA target sequence for RBM3 (NM_006743.2,195-213).
gcggtccaggggttttggt

SEQ ID NO: 54067 - DNA, 19 bp, Homo sapiens
  siRNA target sequence for RBM3 (NM_006743.2,451-469).
ggacgttccagagactata

SEQ ID NO: 54068 - DNA, 19 bp, Homo sapiens
  siRNA target sequence for RBM3 (NM_006743.2,476-494).
gaaaccagggtggttatga

SEQ ID NO: 54069 - DNA, 19 bp, Homo sapiens
  siRNA target sequence for RBM4 (NM_002896.1,606-624).
cagacttgaccgagcaata

SEQ ID NO: 54070 - DNA, 19 bp, Homo sapiens
  siRNA target sequence for RBM4 (NM_002896.1,667-685).
ctatggggattcattgtat

SEQ ID NO: 54071 - DNA, 19 bp, Homo sapiens
  siRNA target sequence for RBM4 (NM_002896.1,704-722).
gcgctcgatgcctactaca

SEQ ID NO: 54072 - DNA, 19 bp, Homo sapiens
  siRNA target sequence for RBM4 (NM_002896.1,705-723).
cgctcgatgcctactacaa

SEQ ID NO: 54073 - DNA, 19 bp, Homo sapiens
  siRNA target sequence for RBM4 (NM_002896.1,767-785).
ctgcctccgtgtataatta

SEQ ID NO: 54074 - DNA, 19 bp, Homo sapiens
  siRNA target sequence for RBM4 (NM_002896.1,810-828).
gccacaagtccagaataca

SEQ ID NO: 54075 - DNA, 19 bp, Homo sapiens
  siRNA target sequence for RBM4 (NM_002896.1,947-965).
cagcttccacttcatatta

SEQ ID NO: 54076 - DNA, 19 bp, Homo sapiens
  siRNA target sequence for RBM7 (NM_016090.2,358-376).
gtacgaaaggactatggat

SEQ ID NO: 54077 - DNA, 19 bp, Homo sapiens
  siRNA target sequence for RBM7 (NM_016090.2,597-615).
cacagcgtaaagtcagaat

SEQ ID NO: 54078 - DNA, 19 bp, Homo sapiens
  siRNA target sequence for RBM7 (NM_016090.2,599-617).
cagcgtaaagtcagaatga

SEQ ID NO: 54079 - DNA, 19 bp, Homo sapiens
  siRNA target sequence for RBM7 (NM_016090.2,601-619).
gcgtaaagtcagaatgaat

SEQ ID NO: 54080 - DNA, 19 bp, Homo sapiens
  siRNA target sequence for RBM7 (NM_016090.2,602-620).
cgtaaagtcagaatgaatt

SEQ ID NO: 54081 - DNA, 19 bp, Homo sapiens
  siRNA target sequence for RBM7 (NM_016090.2,627-645).
cctacctagcagatagaca

SEQ ID NO: 54082 - DNA, 19 bp, Homo sapiens
  siRNA target sequence for RBM7 (NM_016090.2,628-646).
ctacctagcagatagacat

SEQ ID NO: 54083 - DNA, 19 bp, Homo sapiens
  siRNA target sequence for RBM7 (NM_016090.2,631-649).
cctagcagatagacattat

SEQ ID NO: 54084 - DNA, 19 bp, Homo sapiens
  siRNA target sequence for RBM7 (NM_016090.2,632-650).
ctagcagatagacattata

SEQ ID NO: 54085 - DNA, 19 bp, Homo sapiens
  siRNA target sequence for RBM7 (NM_016090.2,677-695).
gggtctgaccatcattaca

SEQ ID NO: 54086 - DNA, 19 bp, Homo sapiens
  siRNA target sequence for RBM7 (NM_016090.2,679-697).
gtctgaccatcattacaga

SEQ ID NO: 54087 - DNA, 19 bp, Homo sapiens
  siRNA target sequence for RBM7 (NM_016090.2,718-736).
ctatgaagacaggaatcat

SEQ ID NO: 54088 - DNA, 19 bp, Homo sapiens
  siRNA target sequence for RBM7 (NM_016090.2,748-766).
ccatgactatgataacaga

SEQ ID NO: 54089 - DNA, 19 bp, Homo sapiens
  siRNA target sequence for RBM9 (NM_014309.1,547-565).
ctgacctccggcagatgtt

SEQ ID NO: 54090 - DNA, 19 bp, Homo sapiens
  siRNA target sequence for RBM9 (NM_014309.1,585-603).
ctagatgtagaaataatct

SEQ ID NO: 54091 - DNA, 19 bp, Homo sapiens
  siRNA target sequence for RBM9 (NM_014309.1,752-770).
gaagatggtcacaccatat

SEQ ID NO: 54092 - DNA, 19 bp, Homo sapiens
  siRNA target sequence for RBM9 (NM_014309.1,755-773).
gatggtcacaccatatgca

SEQ ID NO: 54093 - DNA, 19 bp, Homo sapiens
  siRNA target sequence for RBM9 (NM_014309.1,793-811).
cagtagttggagctgtata

SEQ ID NO: 54094 - DNA, 19 bp, Homo sapiens
  siRNA target sequence for RBM9 (NM_014309.1,807-825).
gtatatggtccggagttat

SEQ ID NO: 54095 - DNA, 19 bp, Homo sapiens
  siRNA target sequence for RBM9 (NM_014309.1,888-906).
ggaagagggggtatcaaca

SEQ ID NO: 54096 - DNA, 19 bp, Homo sapiens
  siRNA target sequence for RBM9 (NM_014309.1,894-912).
gggggtatcaacacttaca

SEQ ID NO: 54097 - DNA, 19 bp, Homo sapiens
  siRNA target sequence for RBM9 (NM_014309.1,895-913).
ggggtatcaacacttacat

SEQ ID NO: 54098 - DNA, 19 bp, Homo sapiens
  siRNA target sequence for RBM9 (NM_014309.1,896-914).
gggtatcaacacttacatt

SEQ ID NO: 54099 - DNA, 19 bp, Homo sapiens
  siRNA target sequence for RBM9 (NM_014309.1,956-974).
cacggcagccgctttcaga

SEQ ID NO: 54100 - DNA, 19 bp, Homo sapiens
  siRNA target sequence for RBM9 (NM_014309.1,1211-1229).
ggcgctgtggcgagtttat

SEQ ID NO: 54101 - DNA, 19 bp, Homo sapiens
  siRNA target sequence for RBM9 (NM_014309.1,1212-1230).
gcgctgtggcgagtttata

SEQ ID NO: 54102 - DNA, 19 bp, Homo sapiens
  siRNA target sequence for RBM9 (NM_014309.1,1247-1265).
cgatttgccccctactgaa

SEQ ID NO: 54103 - DNA, 19 bp, Homo sapiens
  siRNA target sequence for RBMS2 (NM_002898.1,435-453).
caaacctcccactgtcaat

SEQ ID NO: 54104 - DNA, 19 bp, Homo sapiens
  siRNA target sequence for RBMS2 (NM_002898.1,589-607).
catcacccactttaatgga

SEQ ID NO: 54105 - DNA, 19 bp, Homo sapiens
  siRNA target sequence for RBMS2 (NM_002898.1,592-610).
cacccactttaatggaaaa

SEQ ID NO: 54106 - DNA, 19 bp, Homo sapiens
  siRNA target sequence for RBMS2 (NM_002898.1,594-612).
cccactttaatggaaaata

SEQ ID NO: 54107 - DNA, 19 bp, Homo sapiens
  siRNA target sequence for RBMS2 (NM_002898.1,645-663).
ccgatcccttgctttgcaa

SEQ ID NO: 54108 - DNA, 19 bp, Homo sapiens
  siRNA target sequence for RBMS2 (NM_002898.1,646-664).
cgatcccttgctttgcaaa

SEQ ID NO: 54109 - DNA, 19 bp, Homo sapiens
  siRNA target sequence for RBMS2 (NM_002898.1,848-866).
gcactctccccataccttt

SEQ ID NO: 54110 - DNA, 19 bp, Homo sapiens
  siRNA target sequence for RBMS2 (NM_002898.1,868-886).
ctctcctgtgtcttcgtat

SEQ ID NO: 54111 - DNA, 19 bp, Homo sapiens
  siRNA target sequence for RBMS2 (NM_002898.1,872-890).
cctgtgtcttcgtatcaga

SEQ ID NO: 54112 - DNA, 19 bp, Homo sapiens
  siRNA target sequence for RBMS2 (NM_002898.1,901-919).
gacatctcctctacaagta

SEQ ID NO: 54113 - DNA, 19 bp, Homo sapiens
  siRNA target sequence for RBMS2 (NM_002898.1,1205-1223).
gagcatggggtctattctt

SEQ ID NO: 54114 - DNA, 19 bp, Homo sapiens
  siRNA target sequence for RBMS3 (NM_014483.1,183-201).
ccagtacacttactactat

SEQ ID NO: 54115 - DNA, 19 bp, Homo sapiens
  siRNA target sequence for RBMS3 (NM_014483.1,308-326).
gcggggaacagttgagtaa

SEQ ID NO: 54116 - DNA, 19 bp, Homo sapiens
  siRNA target sequence for RBMS3 (NM_014483.1,309-327).
cggggaacagttgagtaaa

SEQ ID NO: 54117 - DNA, 19 bp, Homo sapiens
  siRNA target sequence for RBMS3 (NM_014483.1,310-328).
ggggaacagttgagtaaaa

SEQ ID NO: 54118 - DNA, 19 bp, Homo sapiens
  siRNA target sequence for RBMS3 (NM_014483.1,365-383).
ctgaccaggacctaatcaa

SEQ ID NO: 54119 - DNA, 19 bp, Homo sapiens
  siRNA target sequence for RBMS3 (NM_014483.1,387-405).
gtgccaaccgtatggaaaa

SEQ ID NO: 54120 - DNA, 19 bp, Homo sapiens
  siRNA target sequence for RBMS3 (NM_014483.1,389-407).
gccaaccgtatggaaaaat

SEQ ID NO: 54121 - DNA, 19 bp, Homo sapiens
  siRNA target sequence for RBMS3 (NM_014483.1,390-408).
ccaaccgtatggaaaaatt

SEQ ID NO: 54122 - DNA, 19 bp, Homo sapiens
  siRNA target sequence for RBMS3 (NM_014483.1,556-574).
caagacccaacaaacctat

SEQ ID NO: 54123 - DNA, 19 bp, Homo sapiens
  siRNA target sequence for RBMS3 (NM_014483.1,559-577).
gacccaacaaacctataca

SEQ ID NO: 54124 - DNA, 19 bp, Homo sapiens
  siRNA target sequence for RBMS3 (NM_014483.1,562-580).
ccaacaaacctatacatct

SEQ ID NO: 54125 - DNA, 19 bp, Homo sapiens
  siRNA target sequence for RBMS3 (NM_014483.1,650-668).
ccacaagaatactaagaga

SEQ ID NO: 54126 - DNA, 19 bp, Homo sapiens
  siRNA target sequence for RBMS3 (NM_014483.1,725-743).
gtgaagtggtaattcaaca

SEQ ID NO: 54127 - DNA, 19 bp, Homo sapiens
  siRNA target sequence for RBMS3 (NM_014483.1,727-745).
gaagtggtaattcaacatt

SEQ ID NO: 54128 - DNA, 19 bp, Homo sapiens
  siRNA target sequence for RBMS3 (NM_014483.1,732-750).
ggtaattcaacattttaat

SEQ ID NO: 54129 - DNA, 19 bp, Homo sapiens
  siRNA target sequence for RBMS3 (NM_014483.1,793-811).
gagcctttgctgtgcaaat

SEQ ID NO: 54130 - DNA, 19 bp, Homo sapiens
  siRNA target sequence for RBMS3 (NM_014483.1,834-852).
gcgacagaatcaaagcaaa

SEQ ID NO: 54131 - DNA, 19 bp, Homo sapiens
  siRNA target sequence for RBMS3 (NM_014483.1,835-853).
cgacagaatcaaagcaaat

SEQ ID NO: 54132 - DNA, 19 bp, Homo sapiens
  siRNA target sequence for RBMS3 (NM_014483.1,916-934).
cccacagctgccatacaga

SEQ ID NO: 54133 - DNA, 19 bp, Homo sapiens
  siRNA target sequence for RBMS3 (NM_014483.1,1033-1051).
caggtccagagtacttcat

SEQ ID NO: 54134 - DNA, 19 bp, Homo sapiens
  siRNA target sequence for RBMS3 (NM_014483.1,1056-1074).
gcctcatccgccatacgtt

SEQ ID NO: 54135 - DNA, 19 bp, Homo sapiens
  siRNA target sequence for RBMS3 (NM_014483.1,1057-1075).
cctcatccgccatacgtta

SEQ ID NO: 54136 - DNA, 19 bp, Homo sapiens
  siRNA target sequence for RBMS3 (NM_014483.1,1058-1076).
ctcatccgccatacgttat

SEQ ID NO: 54137 - DNA, 19 bp, Homo sapiens
  siRNA target sequence for RBMS3 (NM_014483.1,1182-1200).
gggcacaacaggaacgtat

SEQ ID NO: 54138 - DNA, 19 bp, Homo sapiens
  siRNA target sequence for RBMS3 (NM_014483.1,1184-1202).
gcacaacaggaacgtatat

SEQ ID NO: 54139 - DNA, 19 bp, Homo sapiens
  siRNA target sequence for RBMS3 (NM_014483.1,1255-1273).
cctccgacagctgtttcta

SEQ ID NO: 54140 - DNA, 19 bp, Homo sapiens
  siRNA target sequence for RBMS3 (NM_014483.1,1256-1274).
ctccgacagctgtttctat

SEQ ID NO: 54141 - DNA, 19 bp, Homo sapiens
  siRNA target sequence for RBMS3 (NM_014483.1,1259-1277).
cgacagctgtttctattga

SEQ ID NO: 54142 - DNA, 19 bp, Homo sapiens
  siRNA target sequence for RBPMS (NM_006867.1,654-672).
ggccttcctctggatatca

SEQ ID NO: 54143 - DNA, 19 bp, Homo sapiens
  siRNA target sequence for RBPMS (NM_006867.1,655-673).
gccttcctctggatatcaa

SEQ ID NO: 54144 - DNA, 19 bp, Homo sapiens
  siRNA target sequence for RBPMS (NM_006867.1,681-699).
gagctctatctgcttttca

SEQ ID NO: 54145 - DNA, 19 bp, Homo sapiens
  siRNA target sequence for RBPMS (NM_006867.1,710-728).
gggctatgagggttctctt

SEQ ID NO: 54146 - DNA, 19 bp, Homo sapiens
  siRNA target sequence for RBPMS (NM_006867.1,711-729).
ggctatgagggttctctta

SEQ ID NO: 54147 - DNA, 19 bp, Homo sapiens
  siRNA target sequence for RBPMS (NM_006867.1,712-730).
gctatgagggttctcttat

SEQ ID NO: 54148 - DNA, 19 bp, Homo sapiens
  siRNA target sequence for RBPMS (NM_006867.1,713-731).
ctatgagggttctcttata

SEQ ID NO: 54149 - DNA, 19 bp, Homo sapiens
  siRNA target sequence for RBPMS (NM_006867.1,751-769).
ctgtaggttttgtcagttt

SEQ ID NO: 54150 - DNA, 19 bp, Homo sapiens
  siRNA target sequence for RBPMS (NM_006867.1,818-836).
ccgcttcgatcctgaaatt

SEQ ID NO: 54151 - DNA, 19 bp, Homo sapiens
  siRNA target sequence for RBPMS (NM_006867.1,846-864).
ctacgactagagtttgcta

SEQ ID NO: 54152 - DNA, 19 bp, Homo sapiens
  siRNA target sequence for RDBP (NM_002904.4,433-451).
ccgttccagaggagcatat

SEQ ID NO: 54153 - DNA, 19 bp, Homo sapiens
  siRNA target sequence for RDBP (NM_002904.4,435-453).
gttccagaggagcatatct

SEQ ID NO: 54154 - DNA, 19 bp, Homo sapiens
  siRNA target sequence for RDBP (NM_002904.4,510-528).
gagctttgtgtcttctagt

SEQ ID NO: 54155 - DNA, 19 bp, Homo sapiens
  siRNA target sequence for RDBP (NM_002904.4,603-621).
ctttgactggggctatgaa

SEQ ID NO: 54156 - DNA, 19 bp, Homo sapiens
  siRNA target sequence for RDBP (NM_002904.4,1218-1236).
cgtctacaaggaaaacctt

SEQ ID NO: 54157 - DNA, 19 bp, Homo sapiens
  siRNA target sequence for RENT1 (NM_002911.2,257-275).
gctcgcagactctcacttt

SEQ ID NO: 54158 - DNA, 19 bp, Homo sapiens
  siRNA target sequence for RENT1 (NM_002911.2,330-348).
cgagttcaccgactttact

SEQ ID NO: 54159 - DNA, 19 bp, Homo sapiens
  siRNA target sequence for RENT1 (NM_002911.2,333-351).
gttcaccgactttactctt

SEQ ID NO: 54160 - DNA, 19 bp, Homo sapiens
  siRNA target sequence for RENT1 (NM_002911.2,540-558).
gaacttcgaggaagatgaa

SEQ ID NO: 54161 - DNA, 19 bp, Homo sapiens
  siRNA target sequence for RENT1 (NM_002911.2,622-640).
cctgcctgcgtggtttact

SEQ ID NO: 54162 - DNA, 19 bp, Homo sapiens
  siRNA target sequence for RENT1 (NM_002911.2,625-643).
gcctgcgtggtttactgta

SEQ ID NO: 54163 - DNA, 19 bp, Homo sapiens
  siRNA target sequence for RENT1 (NM_002911.2,627-645).
ctgcgtggtttactgtaat

SEQ ID NO: 54164 - DNA, 19 bp, Homo sapiens
  siRNA target sequence for RENT1 (NM_002911.2,631-649).
gtggtttactgtaatacca

SEQ ID NO: 54165 - DNA, 19 bp, Homo sapiens
  siRNA target sequence for RENT1 (NM_002911.2,663-681).
ctgcaacggacgtggaaat

SEQ ID NO: 54166 - DNA, 19 bp, Homo sapiens
  siRNA target sequence for RENT1 (NM_002911.2,666-684).
caacggacgtggaaatact

SEQ ID NO: 54167 - DNA, 19 bp, Homo sapiens
  siRNA target sequence for RENT1 (NM_002911.2,669-687).
cggacgtggaaatacttct

SEQ ID NO: 54168 - DNA, 19 bp, Homo sapiens
  siRNA target sequence for RENT1 (NM_002911.2,689-707).
gcagccacattgtaaatca

SEQ ID NO: 54169 - DNA, 19 bp, Homo sapiens
  siRNA target sequence for RENT1 (NM_002911.2,706-724).
caccttgtgagggcaaaat

SEQ ID NO: 54170 - DNA, 19 bp, Homo sapiens
  siRNA target sequence for RENT1 (NM_002911.2,1004-1022).
cggcacagcagatcaacaa

SEQ ID NO: 54171 - DNA, 19 bp, Homo sapiens
  siRNA target sequence for RENT1 (NM_002911.2,1128-1146).
ctaccagtaccagaacata

SEQ ID NO: 54172 - DNA, 19 bp, Homo sapiens
  siRNA target sequence for RENT1 (NM_002911.2,1201-1219).
cagactcaagataacatca

SEQ ID NO: 54173 - DNA, 19 bp, Homo sapiens
  siRNA target sequence for RENT1 (NM_002911.2,1229-1247).
gggacctgggccttaacaa

SEQ ID NO: 54174 - DNA, 19 bp, Homo sapiens
  siRNA target sequence for RENT1 (NM_002911.2,1231-1249).
gacctgggccttaacaaga

SEQ ID NO: 54175 - DNA, 19 bp, Homo sapiens
  siRNA target sequence for RENT1 (NM_002911.2,1253-1271).
gaatcgcctacttcacttt

SEQ ID NO: 54176 - DNA, 19 bp, Homo sapiens
  siRNA target sequence for RENT1 (NM_002911.2,1314-1332).
gatatgcctgcggtacaaa

SEQ ID NO: 54177 - DNA, 19 bp, Homo sapiens
  siRNA target sequence for RENT1 (NM_002911.2,1358-1376).
ggatcggccacgtcatcaa

SEQ ID NO: 54178 - DNA, 19 bp, Homo sapiens
  siRNA target sequence for RENT1 (NM_002911.2,1497-1515).
gatgcagagcgcattgaaa

SEQ ID NO: 54179 - DNA, 19 bp, Homo sapiens
  siRNA target sequence for RENT1 (NM_002911.2,1501-1519).
cagagcgcattgaaaacgt

SEQ ID NO: 54180 - DNA, 19 bp, Homo sapiens
  siRNA target sequence for RENT1 (NM_002911.2,1503-1521).
gagcgcattgaaaacgttt

SEQ ID NO: 54181 - DNA, 19 bp, Homo sapiens
  siRNA target sequence for RENT1 (NM_002911.2,1579-1597).
gtggaggacgtaatcatca

SEQ ID NO: 54182 - DNA, 19 bp, Homo sapiens
  siRNA target sequence for RENT1 (NM_002911.2,1887-1905).
cgactccccggtgtctttt

SEQ ID NO: 54183 - DNA, 19 bp, Homo sapiens
  siRNA target sequence for RENT1 (NM_002911.2,2115-2133).
gcagttccgctccatttta

SEQ ID NO: 54184 - DNA, 19 bp, Homo sapiens
  siRNA target sequence for RENT1 (NM_002911.2,2116-2134).
cagttccgctccattttaa

SEQ ID NO: 54185 - DNA, 19 bp, Homo sapiens
  siRNA target sequence for RENT1 (NM_002911.2,2411-2429).
cagcggatcgtgtgaagaa

SEQ ID NO: 54186 - DNA, 19 bp, Homo sapiens
  siRNA target sequence for RENT1 (NM_002911.2,2455-2473).
cccgataaaccgatgttct

SEQ ID NO: 54187 - DNA, 19 bp, Homo sapiens
  siRNA target sequence for RENT1 (NM_002911.2,2456-2474).
ccgataaaccgatgttctt

SEQ ID NO: 54188 - DNA, 19 bp, Homo sapiens
  siRNA target sequence for RENT1 (NM_002911.2,2458-2476).
gataaaccgatgttcttct

SEQ ID NO: 54189 - DNA, 19 bp, Homo sapiens
  siRNA target sequence for RENT1 (NM_002911.2,2540-2558).
ctgcgaacgtggagaagat

SEQ ID NO: 54190 - DNA, 19 bp, Homo sapiens
  siRNA target sequence for RENT1 (NM_002911.2,2633-2651).
cctacctggtgcagtacat

SEQ ID NO: 54191 - DNA, 19 bp, Homo sapiens
  siRNA target sequence for RENT1 (NM_002911.2,2723-2741).
gacgcgagaaggacttcat

SEQ ID NO: 54192 - DNA, 19 bp, Homo sapiens
  siRNA target sequence for RENT1 (NM_002911.2,2817-2835).
cctgaccagagcaaggtat

SEQ ID NO: 54193 - DNA, 19 bp, Homo sapiens
  siRNA target sequence for RENT1 (NM_002911.2,2828-2846).
caaggtatggcgtcatcat

SEQ ID NO: 54194 - DNA, 19 bp, Homo sapiens
  siRNA target sequence for RENT1 (NM_002911.2,2831-2849).
ggtatggcgtcatcattgt

SEQ ID NO: 54195 - DNA, 19 bp, Homo sapiens
  siRNA target sequence for RENT1 (NM_002911.2,2853-2871).
caacccgaaggcactatca

SEQ ID NO: 54196 - DNA, 19 bp, Homo sapiens
  siRNA target sequence for RENT1 (NM_002911.2,2980-2998).
cggaagctggtcaacacta

SEQ ID NO: 54197 - DNA, 19 bp, Homo sapiens
  siRNA target sequence for RENT1 (NM_002911.2,3004-3022).
ccgggagcccgcttcatga

SEQ ID NO: 54198 - DNA, 19 bp, Homo sapiens
  siRNA target sequence for RENT1 (NM_002911.2,3018-3036).
catgaccacagccatgtat

SEQ ID NO: 54199 - DNA, 19 bp, Homo sapiens
  siRNA target sequence for RENT1 (NM_002911.2,3057-3075).
cccaggctccgtctatgat

SEQ ID NO: 54200 - DNA, 19 bp, Homo sapiens
  siRNA target sequence for RENT1 (NM_002911.2,3092-3110).
ggccttccagcatgtactt

SEQ ID NO: 54201 - DNA, 19 bp, Homo sapiens
  siRNA target sequence for RENT1 (NM_002911.2,3314-3332).
ctggacccagccagactaa

SEQ ID NO: 54202 - DNA, 19 bp, Homo sapiens
  siRNA target sequence for RENT1 (NM_002911.2,3482-3500).
gtgacgagtttaaatcaca

SEQ ID NO: 54203 - DNA, 19 bp, Homo sapiens
  siRNA target sequence for RNASE1 (NM_002933.3,252-270).
gcagctccacctactgtaa

SEQ ID NO: 54204 - DNA, 19 bp, Homo sapiens
  siRNA target sequence for RNASE1 (NM_002933.3,258-276).
ccacctactgtaaccaaat

SEQ ID NO: 54205 - DNA, 19 bp, Homo sapiens
  siRNA target sequence for RNASE1 (NM_002933.3,519-537).
gtgaagggagcccatatgt

SEQ ID NO: 54206 - DNA, 19 bp, Homo sapiens
  siRNA target sequence for RNASEH1 (NM_002936.3,419-437).
gcgcagagccgtatgcaaa

SEQ ID NO: 54207 - DNA, 19 bp, Homo sapiens
  siRNA target sequence for RNASEH1 (NM_002936.3,428-446).
cgtatgcaaagcacatgaa

SEQ ID NO: 54208 - DNA, 19 bp, Homo sapiens
  siRNA target sequence for RNASEH1 (NM_002936.3,584-602).
ggccaggccatcctttaaa

SEQ ID NO: 54209 - DNA, 19 bp, Homo sapiens
  siRNA target sequence for RNASEH2A (NM_006397.2,195-213).
ggtctacgccatctgttat

SEQ ID NO: 54210 - DNA, 19 bp, Homo sapiens
  siRNA target sequence for RNASEH2A (NM_006397.2,196-214).
gtctacgccatctgttatt

SEQ ID NO: 54211 - DNA, 19 bp, Homo sapiens
  siRNA target sequence for RNASEH2A (NM_006397.2,198-216).
ctacgccatctgttattgt

SEQ ID NO: 54212 - DNA, 19 bp, Homo sapiens
  siRNA target sequence for RNASEH2A (NM_006397.2,423-441).
cactgggcttatacagtat

SEQ ID NO: 54213 - DNA, 19 bp, Homo sapiens
  siRNA target sequence for RNASEH2A (NM_006397.2,427-445).
gggcttatacagtatgcat

SEQ ID NO: 54214 - DNA, 19 bp, Homo sapiens
  siRNA target sequence for RNASEH2A (NM_006397.2,428-446).
ggcttatacagtatgcatt

SEQ ID NO: 54215 - DNA, 19 bp, Homo sapiens
  siRNA target sequence for RNASEH2A (NM_006397.2,657-675).
gcaggacttggatactgat

SEQ ID NO: 54216 - DNA, 19 bp, Homo sapiens
  siRNA target sequence for RNASEH2A (NM_006397.2,692-710).
ccaatgatcccaagacaaa

SEQ ID NO: 54217 - DNA, 19 bp, Homo sapiens
  siRNA target sequence for RNASEH2A (NM_006397.2,802-820).
gaggcggaagatgttatat

SEQ ID NO: 54218 - DNA, 19 bp, Homo sapiens
  siRNA target sequence for RNASEH2A (NM_006397.2,904-922).
cgttcttcccaccgatatt

SEQ ID NO: 54219 - DNA, 19 bp, Homo sapiens
  siRNA target sequence for RNASEH2A (NM_006397.2,905-923).
gttcttcccaccgatattt

SEQ ID NO: 54220 - DNA, 19 bp, Homo sapiens
  siRNA target sequence for RNASEL (NM_021133.2,240-258).
gacaatcacttgctgatta

SEQ ID NO: 54221 - DNA, 19 bp, Homo sapiens
  siRNA target sequence for RNASEL (NM_021133.2,251-269).
gctgattaaagctgttcaa

SEQ ID NO: 54222 - DNA, 19 bp, Homo sapiens
  siRNA target sequence for RNASEL (NM_021133.2,307-325).
gtggagccaatgttaattt

SEQ ID NO: 54223 - DNA, 19 bp, Homo sapiens
  siRNA target sequence for RNASEL (NM_021133.2,354-372).
ctgcataacgcagtacaaa

SEQ ID NO: 54224 - DNA, 19 bp, Homo sapiens
  siRNA target sequence for RNASEL (NM_021133.2,442-460).
gggccacgccttttatcct

SEQ ID NO: 54225 - DNA, 19 bp, Homo sapiens
  siRNA target sequence for RNASEL (NM_021133.2,479-497).
cgtgaagctgctgaaactt

SEQ ID NO: 54226 - DNA, 19 bp, Homo sapiens
  siRNA target sequence for RNASEL (NM_021133.2,554-572).
catggaagccgctgtgtat

SEQ ID NO: 54227 - DNA, 19 bp, Homo sapiens
  siRNA target sequence for RNASEL (NM_021133.2,558-576).
gaagccgctgtgtatggta

SEQ ID NO: 54228 - DNA, 19 bp, Homo sapiens
  siRNA target sequence for RNASEL (NM_021133.2,683-701).
catggacgctgctgaaaaa

SEQ ID NO: 54229 - DNA, 19 bp, Homo sapiens
  siRNA target sequence for RNASEL (NM_021133.2,703-721).
gacacgtagaggtcttgaa

SEQ ID NO: 54230 - DNA, 19 bp, Homo sapiens
  siRNA target sequence for RNASEL (NM_021133.2,707-725).
cgtagaggtcttgaagatt

SEQ ID NO: 54231 - DNA, 19 bp, Homo sapiens
  siRNA target sequence for RNASEL (NM_021133.2,735-753).
gagatgggggcagatgtaa

SEQ ID NO: 54232 - DNA, 19 bp, Homo sapiens
  siRNA target sequence for RNASEL (NM_021133.2,750-768).
gtaaacgcctgtgacaata

SEQ ID NO: 54233 - DNA, 19 bp, Homo sapiens
  siRNA target sequence for RNASEL (NM_021133.2,800-818).
gagctctgacgatagtgat

SEQ ID NO: 54234 - DNA, 19 bp, Homo sapiens
  siRNA target sequence for RNASEL (NM_021133.2,1001-1019).
gcttgctgttgaactcaaa

SEQ ID NO: 54235 - DNA, 19 bp, Homo sapiens
  siRNA target sequence for RNASEL (NM_021133.2,1005-1023).
gctgttgaactcaaactga

SEQ ID NO: 54236 - DNA, 19 bp, Homo sapiens
  siRNA target sequence for RNASEL (NM_021133.2,1006-1024).
ctgttgaactcaaactgaa

SEQ ID NO: 54237 - DNA, 19 bp, Homo sapiens
  siRNA target sequence for RNASEL (NM_021133.2,1050-1068).
cgtggagccagtacagatt

SEQ ID NO: 54238 - DNA, 19 bp, Homo sapiens
  siRNA target sequence for RNASEL (NM_021133.2,1063-1081).
cagattgtggggatcttgt

SEQ ID NO: 54239 - DNA, 19 bp, Homo sapiens
  siRNA target sequence for RNASEL (NM_021133.2,1065-1083).
gattgtggggatcttgtta

SEQ ID NO: 54240 - DNA, 19 bp, Homo sapiens
  siRNA target sequence for RNASEL (NM_021133.2,1085-1103).
gacagcgaggcggaattat

SEQ ID NO: 54241 - DNA, 19 bp, Homo sapiens
  siRNA target sequence for RNASEL (NM_021133.2,1087-1105).
cagcgaggcggaattatga

SEQ ID NO: 54242 - DNA, 19 bp, Homo sapiens
  siRNA target sequence for RNASEL (NM_021133.2,1111-1129).
cccttgtgaaggttcttct

SEQ ID NO: 54243 - DNA, 19 bp, Homo sapiens
  siRNA target sequence for RNASEL (NM_021133.2,1222-1240).
gaatataccgccctatgat

SEQ ID NO: 54244 - DNA, 19 bp, Homo sapiens
  siRNA target sequence for RNASEL (NM_021133.2,1242-1260).
ggcaaactcaagttcttta

SEQ ID NO: 54245 - DNA, 19 bp, Homo sapiens
  siRNA target sequence for RNASEL (NM_021133.2,1274-1292).
caaaattgctgatacttca

SEQ ID NO: 54246 - DNA, 19 bp, Homo sapiens
  siRNA target sequence for RNASEL (NM_021133.2,1301-1319).
catctacctggggttctat

SEQ ID NO: 54247 - DNA, 19 bp, Homo sapiens
  siRNA target sequence for RNASEL (NM_021133.2,1632-1650).
caaaacatcttaatagatt

SEQ ID NO: 54248 - DNA, 19 bp, Homo sapiens
  siRNA target sequence for RNASEL (NM_021133.2,1663-1681).
ctcacctggcagattttga

SEQ ID NO: 54249 - DNA, 19 bp, Homo sapiens
  siRNA target sequence for RNASEL (NM_021133.2,1702-1720).
gagatccacaggaagtcaa

SEQ ID NO: 54250 - DNA, 19 bp, Homo sapiens
  siRNA target sequence for RNASEL (NM_021133.2,1741-1759).
gacggctggtcctctatgt

SEQ ID NO: 54251 - DNA, 19 bp, Homo sapiens
  siRNA target sequence for RNASEL (NM_021133.2,1809-1827).
gaagaggtggttcaacttt

SEQ ID NO: 54252 - DNA, 19 bp, Homo sapiens
  siRNA target sequence for RNASEL (NM_021133.2,1911-1929).
ggtcatcccttcttttgga

SEQ ID NO: 54253 - DNA, 19 bp, Homo sapiens
  siRNA target sequence for RNASEL (NM_021133.2,1956-1974).
cggaatgtgggaaatgaat

SEQ ID NO: 54254 - DNA, 19 bp, Homo sapiens
  siRNA target sequence for RNASEL (NM_021133.2,1977-1995).
gacatcaaaacacgaaaat

SEQ ID NO: 54255 - DNA, 19 bp, Homo sapiens
  siRNA target sequence for RNASEL (NM_021133.2,2029-2047).
ggccttctgaacattccaa

SEQ ID NO: 54256 - DNA, 19 bp, Homo sapiens
  siRNA target sequence for RNASEL (NM_021133.2,2055-2073).
gacaagtggacgactaaga

SEQ ID NO: 54257 - DNA, 19 bp, Homo sapiens
  siRNA target sequence for RNASEL (NM_021133.2,2057-2075).
caagtggacgactaagatt

SEQ ID NO: 54258 - DNA, 19 bp, Homo sapiens
  siRNA target sequence for RNASEL (NM_021133.2,2060-2078).
gtggacgactaagattaat

SEQ ID NO: 54259 - DNA, 19 bp, Homo sapiens
  siRNA target sequence for RNASEL (NM_021133.2,2142-2160).
gtgggtgatctgctaaagt

SEQ ID NO: 54260 - DNA, 19 bp, Homo sapiens
  siRNA target sequence for RNASEL (NM_021133.2,2145-2163).
ggtgatctgctaaagttca

SEQ ID NO: 54261 - DNA, 19 bp, Homo sapiens
  siRNA target sequence for RNASEL (NM_021133.2,2259-2277).
gatctggtgatctatgtct

SEQ ID NO: 54262 - DNA, 19 bp, Homo sapiens
  siRNA target sequence for RNASEL (NM_021133.2,2265-2283).
gtgatctatgtctacacaa

SEQ ID NO: 54263 - DNA, 19 bp, Homo sapiens
  siRNA target sequence for RNASEL (NM_021133.2,2270-2288).
ctatgtctacacaaaacta

SEQ ID NO: 54264 - DNA, 19 bp, Homo sapiens
  siRNA target sequence for RNASET2 (NM_003730.3,540-558).
gagacagtatgcgagaaaa

SEQ ID NO: 54265 - DNA, 19 bp, Homo sapiens
  siRNA target sequence for RNASET2 (NM_003730.3,544-562).
cagtatgcgagaaaattca

SEQ ID NO: 54266 - DNA, 19 bp, Homo sapiens
  siRNA target sequence for RNASET2 (NM_003730.3,546-564).
gtatgcgagaaaattcaaa

SEQ ID NO: 54267 - DNA, 19 bp, Homo sapiens
  siRNA target sequence for RNASET2 (NM_003730.3,550-568).
gcgagaaaattcaaaacga

SEQ ID NO: 54268 - DNA, 19 bp, Homo sapiens
  siRNA target sequence for RNASET2 (NM_003730.3,583-601).
cggattactggacaataca

SEQ ID NO: 54269 - DNA, 19 bp, Homo sapiens
  siRNA target sequence for RNASET2 (NM_003730.3,603-621).
ggactatggcccgataaaa

SEQ ID NO: 54270 - DNA, 19 bp, Homo sapiens
  siRNA target sequence for RNASET2 (NM_003730.3,691-709).
catactggcctgacgtaat

SEQ ID NO: 54271 - DNA, 19 bp, Homo sapiens
  siRNA target sequence for RNASET2 (NM_003730.3,743-761).
gcatgagtgggaaaagcat

SEQ ID NO: 54272 - DNA, 19 bp, Homo sapiens
  siRNA target sequence for RNASET2 (NM_003730.3,846-864).
ctcaacagtgtgcttctaa

SEQ ID NO: 54273 - DNA, 19 bp, Homo sapiens
  siRNA target sequence for RNASET2 (NM_003730.3,926-944).
cagagtatatggagtgata

SEQ ID NO: 54274 - DNA, 19 bp, Homo sapiens
  siRNA target sequence for RNASET2 (NM_003730.3,937-955).
gagtgatacccaaaatcca

SEQ ID NO: 54275 - DNA, 19 bp, Homo sapiens
  siRNA target sequence for RNASET2 (NM_003730.3,980-998).
ggaagtacagacaattggt

SEQ ID NO: 54276 - DNA, 19 bp, Homo sapiens
  siRNA target sequence for RNASET2 (NM_003730.3,989-1007).
gacaattggtcagatagaa

SEQ ID NO: 54277 - DNA, 19 bp, Homo sapiens
  siRNA target sequence for RNASET2 (NM_003730.3,991-1009).
caattggtcagatagaact

SEQ ID NO: 54278 - DNA, 19 bp, Homo sapiens
  siRNA target sequence for RNMT (NM_003799.1,248-266).
gcaaaagcgtcagtgaatt

SEQ ID NO: 54279 - DNA, 19 bp, Homo sapiens
  siRNA target sequence for RNMT (NM_003799.1,256-274).
gtcagtgaattctgaaaca

SEQ ID NO: 54280 - DNA, 19 bp, Homo sapiens
  siRNA target sequence for RNMT (NM_003799.1,320-338).
gggctttctgaaaagactt

SEQ ID NO: 54281 - DNA, 19 bp, Homo sapiens
  siRNA target sequence for RNMT (NM_003799.1,389-407).
gatcttgtaaaggaaagtt

SEQ ID NO: 54282 - DNA, 19 bp, Homo sapiens
  siRNA target sequence for RNMT (NM_003799.1,527-545).
gatgttccaaaagataaat

SEQ ID NO: 54283 - DNA, 19 bp, Homo sapiens
  siRNA target sequence for RNMT (NM_003799.1,554-572).
ggagatggcactcaaaata

SEQ ID NO: 54284 - DNA, 19 bp, Homo sapiens
  siRNA target sequence for RNMT (NM_003799.1,557-575).
gatggcactcaaaataaga

SEQ ID NO: 54285 - DNA, 19 bp, Homo sapiens
  siRNA target sequence for RNMT (NM_003799.1,639-657).
cagtggctgcccattacaa

SEQ ID NO: 54286 - DNA, 19 bp, Homo sapiens
  siRNA target sequence for RNMT (NM_003799.1,645-663).
ctgcccattacaatgaact

SEQ ID NO: 54287 - DNA, 19 bp, Homo sapiens
  siRNA target sequence for RNMT (NM_003799.1,648-666).
cccattacaatgaacttca

SEQ ID NO: 54288 - DNA, 19 bp, Homo sapiens
  siRNA target sequence for RNMT (NM_003799.1,685-703).
gcgtagtcaaagtcgtatt

SEQ ID NO: 54289 - DNA, 19 bp, Homo sapiens
  siRNA target sequence for RNMT (NM_003799.1,686-704).
cgtagtcaaagtcgtattt

SEQ ID NO: 54290 - DNA, 19 bp, Homo sapiens
  siRNA target sequence for RNMT (NM_003799.1,687-705).
gtagtcaaagtcgtatttt

SEQ ID NO: 54291 - DNA, 19 bp, Homo sapiens
  siRNA target sequence for RNMT (NM_003799.1,690-708).
gtcaaagtcgtatttttta

SEQ ID NO: 54292 - DNA, 19 bp, Homo sapiens
  siRNA target sequence for RNMT (NM_003799.1,698-716).
cgtattttttacctaagaa

SEQ ID NO: 54293 - DNA, 19 bp, Homo sapiens
  siRNA target sequence for RNMT (NM_003799.1,766-784).
ggtacgacagaagaaaaaa

SEQ ID NO: 54294 - DNA, 19 bp, Homo sapiens
  siRNA target sequence for RNMT (NM_003799.1,778-796).
gaaaaaacgtgatatcact

SEQ ID NO: 54295 - DNA, 19 bp, Homo sapiens
  siRNA target sequence for RNMT (NM_003799.1,816-834).
gtaaaggtggagatttgct

SEQ ID NO: 54296 - DNA, 19 bp, Homo sapiens
  siRNA target sequence for RNMT (NM_003799.1,859-877).
caagctagtttgtactgat

SEQ ID NO: 54297 - DNA, 19 bp, Homo sapiens
  siRNA target sequence for RNMT (NM_003799.1,925-943).
gaaaaatcgtcgtgatagt

SEQ ID NO: 54298 - DNA, 19 bp, Homo sapiens
  siRNA target sequence for RNMT (NM_003799.1,932-950).
cgtcgtgatagtgaatata

SEQ ID NO: 54299 - DNA, 19 bp, Homo sapiens
  siRNA target sequence for RNMT (NM_003799.1,1143-1161).
gtactactcccaatagctt

SEQ ID NO: 54300 - DNA, 19 bp, Homo sapiens
  siRNA target sequence for RNMT (NM_003799.1,1185-1203).
cttcagaaacagaatcatt

SEQ ID NO: 54301 - DNA, 19 bp, Homo sapiens
  siRNA target sequence for RNMT (NM_003799.1,1251-1269).
ctttatttggctgcaaata

SEQ ID NO: 54302 - DNA, 19 bp, Homo sapiens
  siRNA target sequence for RNMT (NM_003799.1,1444-1462).
ggccttggagccatatcct

SEQ ID NO: 54303 - DNA, 19 bp, Homo sapiens
  siRNA target sequence for RNMT (NM_003799.1,1450-1468).
ggagccatatcctgcaaat

SEQ ID NO: 54304 - DNA, 19 bp, Homo sapiens
  siRNA target sequence for RNMT (NM_003799.1,1508-1526).
gaacatgcagcaaagtaca

SEQ ID NO: 54305 - DNA, 19 bp, Homo sapiens
  siRNA target sequence for RNMT (NM_003799.1,1525-1543).
catgaagaacagtcaagta

SEQ ID NO: 54306 - DNA, 19 bp, Homo sapiens
  siRNA target sequence for RNMT (NM_003799.1,1531-1549).
gaacagtcaagtaaggtta

SEQ ID NO: 54307 - DNA, 19 bp, Homo sapiens
  siRNA target sequence for RNMT (NM_003799.1,1536-1554).
gtcaagtaaggttaccttt

SEQ ID NO: 54308 - DNA, 19 bp, Homo sapiens
  siRNA target sequence for RNMT (NM_003799.1,1555-1573).
gggaaccttaagtaaatca

SEQ ID NO: 54309 - DNA, 19 bp, Homo sapiens
  siRNA target sequence for RNMT (NM_003799.1,1557-1575).
gaaccttaagtaaatcaga

SEQ ID NO: 54310 - DNA, 19 bp, Homo sapiens
  siRNA target sequence for RNPC1 (NM_017495.4,667-685).
gctgtcctcgccctacatt

SEQ ID NO: 54311 - DNA, 19 bp, Homo sapiens
  siRNA target sequence for RNPC1 (NM_017495.4,672-690).
cctcgccctacattgagta

SEQ ID NO: 54312 - DNA, 19 bp, Homo sapiens
  siRNA target sequence for RNPC2 (NM_004902.2,347-365).
ggcagacgatattgatatt

SEQ ID NO: 54313 - DNA, 19 bp, Homo sapiens
  siRNA target sequence for RNPC2 (NM_004902.2,425-443).
ccatgaagaacgtagcaaa

SEQ ID NO: 54314 - DNA, 19 bp, Homo sapiens
  siRNA target sequence for RNPC2 (NM_004902.2,426-444).
catgaagaacgtagcaaaa

SEQ ID NO: 54315 - DNA, 19 bp, Homo sapiens
  siRNA target sequence for RNPC2 (NM_004902.2,469-487).
gtcgtagtcatgaacgaaa

SEQ ID NO: 54316 - DNA, 19 bp, Homo sapiens
  siRNA target sequence for RNPC2 (NM_004902.2,503-521).
ggaacggaagcgaagtaga

SEQ ID NO: 54317 - DNA, 19 bp, Homo sapiens
  siRNA target sequence for RNPC2 (NM_004902.2,582-600).
cgacggagccgctcaagaa

SEQ ID NO: 54318 - DNA, 19 bp, Homo sapiens
  siRNA target sequence for RNPC2 (NM_004902.2,636-654).
ccttactccggaccaaaat

SEQ ID NO: 54319 - DNA, 19 bp, Homo sapiens
  siRNA target sequence for RNPC2 (NM_004902.2,637-655).
cttactccggaccaaaatt

SEQ ID NO: 54320 - DNA, 19 bp, Homo sapiens
  siRNA target sequence for RNPC2 (NM_004902.2,644-662).
cggaccaaaatttaacagt

SEQ ID NO: 54321 - DNA, 19 bp, Homo sapiens
  siRNA target sequence for RNPC2 (NM_004902.2,661-679).
gtgccatccgaggaaagat

SEQ ID NO: 54322 - DNA, 19 bp, Homo sapiens
  siRNA target sequence for RNPC2 (NM_004902.2,686-704).
gcctcatagcatcaaatta

SEQ ID NO: 54323 - DNA, 19 bp, Homo sapiens
  siRNA target sequence for RNPC2 (NM_004902.2,687-705).
cctcatagcatcaaattaa

SEQ ID NO: 54324 - DNA, 19 bp, Homo sapiens
  siRNA target sequence for RNPC2 (NM_004902.2,711-729).
cgacgttcccgaagcaaaa

SEQ ID NO: 54325 - DNA, 19 bp, Homo sapiens
  siRNA target sequence for RNPC2 (NM_004902.2,724-742).
gcaaaagtccattcagaaa

SEQ ID NO: 54326 - DNA, 19 bp, Homo sapiens
  siRNA target sequence for RNPC2 (NM_004902.2,751-769).
gccctgtgagagaacctat

SEQ ID NO: 54327 - DNA, 19 bp, Homo sapiens
  siRNA target sequence for RNPC2 (NM_004902.2,798-816).
gcaaggacagtcttctgta

SEQ ID NO: 54328 - DNA, 19 bp, Homo sapiens
  siRNA target sequence for RNPC2 (NM_004902.2,818-836).
gcagctggcggcaagaatt

SEQ ID NO: 54329 - DNA, 19 bp, Homo sapiens
  siRNA target sequence for RNPC2 (NM_004902.2,821-839).
gctggcggcaagaattcga

SEQ ID NO: 54330 - DNA, 19 bp, Homo sapiens
  siRNA target sequence for RNPC2 (NM_004902.2,863-881).
ctctacagtaggaaaggtt

SEQ ID NO: 54331 - DNA, 19 bp, Homo sapiens
  siRNA target sequence for RNPC2 (NM_004902.2,882-900).
cgagatgtgaggatgattt

SEQ ID NO: 54332 - DNA, 19 bp, Homo sapiens
  siRNA target sequence for RNPC2 (NM_004902.2,892-910).
ggatgatttctgacagaaa

SEQ ID NO: 54333 - DNA, 19 bp, Homo sapiens
  siRNA target sequence for RNPC2 (NM_004902.2,913-931).
caagacgttccaaaggaat

SEQ ID NO: 54334 - DNA, 19 bp, Homo sapiens
  siRNA target sequence for RNPC2 (NM_004902.2,939-957).
gtggagttcgtcgatgtta

SEQ ID NO: 54335 - DNA, 19 bp, Homo sapiens
  siRNA target sequence for RNPC2 (NM_004902.2,963-981).
gtgcctctagcaataggat

SEQ ID NO: 54336 - DNA, 19 bp, Homo sapiens
  siRNA target sequence for RNPC2 (NM_004902.2,965-983).
gcctctagcaataggatta

SEQ ID NO: 54337 - DNA, 19 bp, Homo sapiens
  siRNA target sequence for RNPC2 (NM_004902.2,966-984).
cctctagcaataggattaa

SEQ ID NO: 54338 - DNA, 19 bp, Homo sapiens
  siRNA target sequence for RNPC2 (NM_004902.2,1048-1066).
ctgcagcaatggcaaacaa

SEQ ID NO: 54339 - DNA, 19 bp, Homo sapiens
  siRNA target sequence for RNPC2 (NM_004902.2,1051-1069).
cagcaatggcaaacaattt

SEQ ID NO: 54340 - DNA, 19 bp, Homo sapiens
  siRNA target sequence for RNPC2 (NM_004902.2,1097-1115).
gctttatgtgggctcatta

SEQ ID NO: 54341 - DNA, 19 bp, Homo sapiens
  siRNA target sequence for RNPC2 (NM_004902.2,1108-1126).
gctcattacacttcaacat

SEQ ID NO: 54342 - DNA, 19 bp, Homo sapiens
  siRNA target sequence for RNPC2 (NM_004902.2,1118-1136).
cttcaacataactgaagat

SEQ ID NO: 54343 - DNA, 19 bp, Homo sapiens
  siRNA target sequence for RNPC2 (NM_004902.2,1209-1227).
cgatccaagggatatggat

SEQ ID NO: 54344 - DNA, 19 bp, Homo sapiens
  siRNA target sequence for RNPC2 (NM_004902.2,1214-1232).
caagggatatggatttatt

SEQ ID NO: 54345 - DNA, 19 bp, Homo sapiens
  siRNA target sequence for RNPC2 (NM_004902.2,1268-1286).
ggaacaacttaatggattt

SEQ ID NO: 54346 - DNA, 19 bp, Homo sapiens
  siRNA target sequence for RNPC2 (NM_004902.2,1338-1356).
gcttcgagtgctagttcat

SEQ ID NO: 54347 - DNA, 19 bp, Homo sapiens
  siRNA target sequence for RNPC2 (NM_004902.2,1339-1357).
cttcgagtgctagttcatt

SEQ ID NO: 54348 - DNA, 19 bp, Homo sapiens
  siRNA target sequence for RNPC2 (NM_004902.2,1342-1360).
cgagtgctagttcattttt

SEQ ID NO: 54349 - DNA, 19 bp, Homo sapiens
  siRNA target sequence for RNPC2 (NM_004902.2,1377-1395).
gaaaggactggaattgatt

SEQ ID NO: 54350 - DNA, 19 bp, Homo sapiens
  siRNA target sequence for RNPC2 (NM_004902.2,1402-1420).
caactggtcgtcttcagtt

SEQ ID NO: 54351 - DNA, 19 bp, Homo sapiens
  siRNA target sequence for RNPC2 (NM_004902.2,1405-1423).
ctggtcgtcttcagttaat

SEQ ID NO: 54352 - DNA, 19 bp, Homo sapiens
  siRNA target sequence for RNPC2 (NM_184234.1,1506-1524).
ggtgctgtggcagaattct

SEQ ID NO: 54353 - DNA, 19 bp, Homo sapiens
  siRNA target sequence for ROD1 (NM_005156.3,156-174).
gtgttgttacagatcttat

SEQ ID NO: 54354 - DNA, 19 bp, Homo sapiens
  siRNA target sequence for ROD1 (NM_005156.3,158-176).
gttgttacagatcttataa

SEQ ID NO: 54355 - DNA, 19 bp, Homo sapiens
  siRNA target sequence for ROD1 (NM_005156.3,170-188).
cttataacagtcggtttaa

SEQ ID NO: 54356 - DNA, 19 bp, Homo sapiens
  siRNA target sequence for ROD1 (NM_005156.3,286-304).
gaaatttaaacgagataga

SEQ ID NO: 54357 - DNA, 19 bp, Homo sapiens
  siRNA target sequence for ROD1 (NM_005156.3,361-379).
cgaagcagagatcatatca

SEQ ID NO: 54358 - DNA, 19 bp, Homo sapiens
  siRNA target sequence for ROD1 (NM_005156.3,389-407).
ccatttggcaaagtaacta

SEQ ID NO: 54359 - DNA, 19 bp, Homo sapiens
  siRNA target sequence for ROD1 (NM_005156.3,396-414).
gcaaagtaactaatctttt

SEQ ID NO: 54360 - DNA, 19 bp, Homo sapiens
  siRNA target sequence for ROD1 (NM_005156.3,458-476).
gaggaagctgccgttacta

SEQ ID NO: 54361 - DNA, 19 bp, Homo sapiens
  siRNA target sequence for ROD1 (NM_005156.3,468-486).
ccgttactatggtgaatta

SEQ ID NO: 54362 - DNA, 19 bp, Homo sapiens
  siRNA target sequence for ROD1 (NM_005156.3,469-487).
cgttactatggtgaattat

SEQ ID NO: 54363 - DNA, 19 bp, Homo sapiens
  siRNA target sequence for ROD1 (NM_005156.3,470-488).
gttactatggtgaattatt

SEQ ID NO: 54364 - DNA, 19 bp, Homo sapiens
  siRNA target sequence for ROD1 (NM_005156.3,481-499).
gaattattacactcctatt

SEQ ID NO: 54365 - DNA, 19 bp, Homo sapiens
  siRNA target sequence for ROD1 (NM_005156.3,512-530).
cgaagccagcctgtttata

SEQ ID NO: 54366 - DNA, 19 bp, Homo sapiens
  siRNA target sequence for ROD1 (NM_005156.3,516-534).
gccagcctgtttatattca

SEQ ID NO: 54367 - DNA, 19 bp, Homo sapiens
  siRNA target sequence for ROD1 (NM_005156.3,540-558).
ccaatcacagagaacttaa

SEQ ID NO: 54368 - DNA, 19 bp, Homo sapiens
  siRNA target sequence for ROD1 (NM_005156.3,559-577).
gactgacaatctacctaat

SEQ ID NO: 54369 - DNA, 19 bp, Homo sapiens
  siRNA target sequence for ROD1 (NM_005156.3,682-700).
gagccctgtgcttcgaata

SEQ ID NO: 54370 - DNA, 19 bp, Homo sapiens
  siRNA target sequence for ROD1 (NM_005156.3,684-702).
gccctgtgcttcgaataat

SEQ ID NO: 54371 - DNA, 19 bp, Homo sapiens
  siRNA target sequence for ROD1 (NM_005156.3,685-703).
ccctgtgcttcgaataatt

SEQ ID NO: 54372 - DNA, 19 bp, Homo sapiens
  siRNA target sequence for ROD1 (NM_005156.3,686-704).
cctgtgcttcgaataatta

SEQ ID NO: 54373 - DNA, 19 bp, Homo sapiens
  siRNA target sequence for ROD1 (NM_005156.3,687-705).
ctgtgcttcgaataattat

SEQ ID NO: 54374 - DNA, 19 bp, Homo sapiens
  siRNA target sequence for ROD1 (NM_005156.3,691-709).
gcttcgaataattattgaa

SEQ ID NO: 54375 - DNA, 19 bp, Homo sapiens
  siRNA target sequence for ROD1 (NM_005156.3,786-804).
cctttacaaagaataatca

SEQ ID NO: 54376 - DNA, 19 bp, Homo sapiens
  siRNA target sequence for ROD1 (NM_005156.3,865-883).
ggatggccagaatatctat

SEQ ID NO: 54377 - DNA, 19 bp, Homo sapiens
  siRNA target sequence for ROD1 (NM_005156.3,920-938).
ctcaccagccttaatgtga

SEQ ID NO: 54378 - DNA, 19 bp, Homo sapiens
  siRNA target sequence for ROD1 (NM_005156.3,924-942).
ccagccttaatgtgaaata

SEQ ID NO: 54379 - DNA, 19 bp, Homo sapiens
  siRNA target sequence for ROD1 (NM_005156.3,1084-1102).
cccagccattggatttcct

SEQ ID NO: 54380 - DNA, 19 bp, Homo sapiens
  siRNA target sequence for ROD1 (NM_005156.3,1142-1160).
cttggtcctctcacaatca

SEQ ID NO: 54381 - DNA, 19 bp, Homo sapiens
  siRNA target sequence for ROD1 (NM_005156.3,1206-1224).
gtataccaggaaattctgt

SEQ ID NO: 54382 - DNA, 19 bp, Homo sapiens
  siRNA target sequence for ROD1 (NM_005156.3,1212-1230).
caggaaattctgttctact

SEQ ID NO: 54383 - DNA, 19 bp, Homo sapiens
  siRNA target sequence for ROD1 (NM_005156.3,1221-1239).
ctgttctactcgtcacaaa

SEQ ID NO: 54384 - DNA, 19 bp, Homo sapiens
  siRNA target sequence for ROD1 (NM_005156.3,1265-1283).
catgggctttttatcctat

SEQ ID NO: 54385 - DNA, 19 bp, Homo sapiens
  siRNA target sequence for ROD1 (NM_005156.3,1301-1319).
gtacatcgagtgaagatta

SEQ ID NO: 54386 - DNA, 19 bp, Homo sapiens
  siRNA target sequence for ROD1 (NM_005156.3,1351-1369).
gatggcggatgcaaatcaa

SEQ ID NO: 54387 - DNA, 19 bp, Homo sapiens
  siRNA target sequence for ROD1 (NM_005156.3,1376-1394).
ctagcaatgaaccatctaa

SEQ ID NO: 54388 - DNA, 19 bp, Homo sapiens
  siRNA target sequence for ROD1 (NM_005156.3,1391-1409).
ctaagtggtcagagacttt

SEQ ID NO: 54389 - DNA, 19 bp, Homo sapiens
  siRNA target sequence for ROD1 (NM_005156.3,1480-1498).
ccaaggtctgactaaggat

SEQ ID NO: 54390 - DNA, 19 bp, Homo sapiens
  siRNA target sequence for ROD1 (NM_005156.3,1484-1502).
ggtctgactaaggatttca

SEQ ID NO: 54391 - DNA, 19 bp, Homo sapiens
  siRNA target sequence for ROD1 (NM_005156.3,1647-1665).
gttcagtgaaggcttttaa

SEQ ID NO: 54392 - DNA, 19 bp, Homo sapiens
  siRNA target sequence for ROD1 (NM_005156.3,1683-1701).
gcaaaatggcgctcattca

SEQ ID NO: 54393 - DNA, 19 bp, Homo sapiens
  siRNA target sequence for ROD1 (NM_005156.3,1735-1753).
cattgagcttcataaccat

SEQ ID NO: 54394 - DNA, 19 bp, Homo sapiens
  siRNA target sequence for ROD1 (NM_005156.3,1750-1768).
ccatgaccttggagaaaat

SEQ ID NO: 54395 - DNA, 19 bp, Homo sapiens
  siRNA target sequence for RPL18 (NM_000979.2,85-103).
cccaagagccaggatatct

SEQ ID NO: 54396 - DNA, 19 bp, Homo sapiens
  siRNA target sequence for RPL18 (NM_000979.2,110-128).
ggctgttggtcaagttata

SEQ ID NO: 54397 - DNA, 19 bp, Homo sapiens
  siRNA target sequence for RPL18 (NM_000979.2,284-302).
ggaccataactgatgatgt

SEQ ID NO: 54398 - DNA, 19 bp, Homo sapiens
  siRNA target sequence for RPL24 (NM_000986.2,45-63).
ggtcgagctgtgcagtttt

SEQ ID NO: 54399 - DNA, 19 bp, Homo sapiens
  siRNA target sequence for RPL24 (NM_000986.2,59-77).
gttttagcgggtacaagat

SEQ ID NO: 54400 - DNA, 19 bp, Homo sapiens
  siRNA target sequence for RPL24 (NM_000986.2,445-463).
gcagcacctaagcaaaaga

SEQ ID NO: 54401 - DNA, 19 bp, Homo sapiens
  siRNA target sequence for RPL28 (NM_000991.3,47-65).
ctgcgcatctgcaatggat

SEQ ID NO: 54402 - DNA, 19 bp, Homo sapiens
  siRNA target sequence for RPL30 (NM_000989.2,124-142).
ccaactcgttatgaaaagt

SEQ ID NO: 54403 - DNA, 19 bp, Homo sapiens
  siRNA target sequence for RPL37A (NM_000998.2,38-56).
ggccaaacgtaccaagaaa

SEQ ID NO: 54404 - DNA, 19 bp, Homo sapiens
  siRNA target sequence for RPL37A (NM_000998.2,40-58).
ccaaacgtaccaagaaagt

SEQ ID NO: 54405 - DNA, 19 bp, Homo sapiens
  siRNA target sequence for RPL37A (NM_000998.2,57-75).
gtcgggatcgtcggtaaat

SEQ ID NO: 54406 - DNA, 19 bp, Homo sapiens
  siRNA target sequence for RPL38 (NM_000999.2,216-234).
gatgcagcagataccttta

SEQ ID NO: 54407 - DNA, 19 bp, Homo sapiens
  siRNA target sequence for RPL3L (NM_005061.2,269-287).
ggcggtgacaattgtagaa

SEQ ID NO: 54408 - DNA, 19 bp, Homo sapiens
  siRNA target sequence for RPL3L (NM_005061.2,682-700).
gccagagtgaggtcattga

SEQ ID NO: 54409 - DNA, 19 bp, Homo sapiens
  siRNA target sequence for RPL3L (NM_005061.2,683-701).
ccagagtgaggtcattgat

SEQ ID NO: 54410 - DNA, 19 bp, Homo sapiens
  siRNA target sequence for RPL3L (NM_005061.2,742-760).
caagccgctggcataccaa

SEQ ID NO: 54411 - DNA, 19 bp, Homo sapiens
  siRNA target sequence for RPL3L (NM_005061.2,1043-1061).
gctgaagggttgtattgct

SEQ ID NO: 54412 - DNA, 19 bp, Homo sapiens
  siRNA target sequence for RPL3L (NM_005061.2,1075-1093).
gggtcattacgctgagaaa

SEQ ID NO: 54413 - DNA, 19 bp, Homo sapiens
  siRNA target sequence for RPL3L (NM_005061.2,1116-1134).
cgccaagccgtggagaata

SEQ ID NO: 54414 - DNA, 19 bp, Homo sapiens
  siRNA target sequence for RPL3L (NM_005061.2,1117-1135).
gccaagccgtggagaatat

SEQ ID NO: 54415 - DNA, 19 bp, Homo sapiens
  siRNA target sequence for RPL3L (NM_005061.2,1118-1136).
ccaagccgtggagaatatt

SEQ ID NO: 54416 - DNA, 19 bp, Homo sapiens
  siRNA target sequence for RPL4 (NM_000968.2,693-711).
gaggataatggtatcatca

SEQ ID NO: 54417 - DNA, 19 bp, Homo sapiens
  siRNA target sequence for RPL8 (NM_000973.2,157-175).
gcatcgtcaaggacatcat

SEQ ID NO: 54418 - DNA, 19 bp, Homo sapiens
  siRNA target sequence for RPL8 (NM_000973.2,220-238).
gggatccgtatcggtttaa

SEQ ID NO: 54419 - DNA, 19 bp, Homo sapiens
  siRNA target sequence for RPL8 (NM_000973.2,222-240).
gatccgtatcggtttaaga

SEQ ID NO: 54420 - DNA, 19 bp, Homo sapiens
  siRNA target sequence for RPL8 (NM_000973.2,242-260).
gcggacggagctgttcatt

SEQ ID NO: 54421 - DNA, 19 bp, Homo sapiens
  siRNA target sequence for RPL8 (NM_000973.2,278-296).
cacgggccagtttgtgtat

SEQ ID NO: 54422 - DNA, 19 bp, Homo sapiens
  siRNA target sequence for RPL8 (NM_000973.2,346-364).
ccatgcctgagggtacaat

SEQ ID NO: 54423 - DNA, 19 bp, Homo sapiens
  siRNA target sequence for RPL8 (NM_000973.2,484-502).
ccggctccaagaaggttat

SEQ ID NO: 54424 - DNA, 19 bp, Homo sapiens
  siRNA target sequence for RPL8 (NM_000973.2,540-558).
ggaggtggccgaattgaca

SEQ ID NO: 54425 - DNA, 19 bp, Homo sapiens
  siRNA target sequence for RPL8 (NM_000973.2,541-559).
gaggtggccgaattgacaa

SEQ ID NO: 54426 - DNA, 19 bp, Homo sapiens
  siRNA target sequence for RPLP2 (NM_001004.2,404-422).
ggatttggcctttttgatt

SEQ ID NO: 54427 - DNA, 19 bp, Homo sapiens
  siRNA target sequence for RPN1 (NM_002950.2,385-403).
gctcccagttgctcttgat

SEQ ID NO: 54428 - DNA, 19 bp, Homo sapiens
  siRNA target sequence for RPN1 (NM_002950.2,401-419).
gatcctggggccaagattt

SEQ ID NO: 54429 - DNA, 19 bp, Homo sapiens
  siRNA target sequence for RPN1 (NM_002950.2,411-429).
ccaagatttcagtcattgt

SEQ ID NO: 54430 - DNA, 19 bp, Homo sapiens
  siRNA target sequence for RPN1 (NM_002950.2,502-520).
gtttgaggggaaccattat

SEQ ID NO: 54431 - DNA, 19 bp, Homo sapiens
  siRNA target sequence for RPN1 (NM_002950.2,506-524).
gaggggaaccattatttct

SEQ ID NO: 54432 - DNA, 19 bp, Homo sapiens
  siRNA target sequence for RPN1 (NM_002950.2,509-527).
gggaaccattatttctact

SEQ ID NO: 54433 - DNA, 19 bp, Homo sapiens
  siRNA target sequence for RPN1 (NM_002950.2,562-580).
gaagcttgcctctcgaaat

SEQ ID NO: 54434 - DNA, 19 bp, Homo sapiens
  siRNA target sequence for RPN1 (NM_002950.2,660-678).
cctatagtcaggatacttt

SEQ ID NO: 54435 - DNA, 19 bp, Homo sapiens
  siRNA target sequence for RPN1 (NM_002950.2,661-679).
ctatagtcaggatactttt

SEQ ID NO: 54436 - DNA, 19 bp, Homo sapiens
  siRNA target sequence for RPN1 (NM_002950.2,670-688).
ggatacttttaaagtacat

SEQ ID NO: 54437 - DNA, 19 bp, Homo sapiens
  siRNA target sequence for RPN1 (NM_002950.2,721-739).
cagcatgacccgagtcatt

SEQ ID NO: 54438 - DNA, 19 bp, Homo sapiens
  siRNA target sequence for RPN1 (NM_002950.2,723-741).
gcatgacccgagtcattga

SEQ ID NO: 54439 - DNA, 19 bp, Homo sapiens
  siRNA target sequence for RPN1 (NM_002950.2,724-742).
catgacccgagtcattgaa

SEQ ID NO: 54440 - DNA, 19 bp, Homo sapiens
  siRNA target sequence for RPN1 (NM_002950.2,743-761).
gtctctcactggggtaata

SEQ ID NO: 54441 - DNA, 19 bp, Homo sapiens
  siRNA target sequence for RPN1 (NM_002950.2,745-763).
ctctcactggggtaatatt

SEQ ID NO: 54442 - DNA, 19 bp, Homo sapiens
  siRNA target sequence for RPN1 (NM_002950.2,805-823).
gcttaaggggcctttctca

SEQ ID NO: 54443 - DNA, 19 bp, Homo sapiens
  siRNA target sequence for RPN1 (NM_002950.2,814-832).
gcctttctcacgctatgat

SEQ ID NO: 54444 - DNA, 19 bp, Homo sapiens
  siRNA target sequence for RPN1 (NM_002950.2,815-833).
cctttctcacgctatgatt

SEQ ID NO: 54445 - DNA, 19 bp, Homo sapiens
  siRNA target sequence for RPN1 (NM_002950.2,816-834).
ctttctcacgctatgatta

SEQ ID NO: 54446 - DNA, 19 bp, Homo sapiens
  siRNA target sequence for RPN1 (NM_002950.2,861-879).
cctccatccgttcttttaa

SEQ ID NO: 54447 - DNA, 19 bp, Homo sapiens
  siRNA target sequence for RPN1 (NM_002950.2,896-914).
gctgcccaggatgtttatt

SEQ ID NO: 54448 - DNA, 19 bp, Homo sapiens
  siRNA target sequence for RPN1 (NM_002950.2,1036-1054).
ctacaacctcccaagctat

SEQ ID NO: 54449 - DNA, 19 bp, Homo sapiens
  siRNA target sequence for RPN1 (NM_002950.2,1050-1068).
gctatgagtacctctataa

SEQ ID NO: 54450 - DNA, 19 bp, Homo sapiens
  siRNA target sequence for RPN1 (NM_002950.2,1051-1069).
ctatgagtacctctataat

SEQ ID NO: 54451 - DNA, 19 bp, Homo sapiens
  siRNA target sequence for RPN1 (NM_002950.2,1174-1192).
gaacattgaaattgatagt

SEQ ID NO: 54452 - DNA, 19 bp, Homo sapiens
  siRNA target sequence for RPN1 (NM_002950.2,1187-1205).
gatagtccctatgaaatca

SEQ ID NO: 54453 - DNA, 19 bp, Homo sapiens
  siRNA target sequence for RPN1 (NM_002950.2,1313-1331).
gtccactacacgttcaaca

SEQ ID NO: 54454 - DNA, 19 bp, Homo sapiens
  siRNA target sequence for RPN1 (NM_002950.2,1526-1544).
gacgagaccgtcaataggt

SEQ ID NO: 54455 - DNA, 19 bp, Homo sapiens
  siRNA target sequence for RPN1 (NM_002950.2,1535-1553).
gtcaataggtacaagcaat

SEQ ID NO: 54456 - DNA, 19 bp, Homo sapiens
  siRNA target sequence for RPN1 (NM_002950.2,1779-1797).
cgtacattgagaatgagaa

SEQ ID NO: 54457 - DNA, 19 bp, Homo sapiens
  siRNA target sequence for RPP14 (NM_007042.1,183-201).
ctgccacatatgaaagagt

SEQ ID NO: 54458 - DNA, 19 bp, Homo sapiens
  siRNA target sequence for RPP14 (NM_007042.1,194-212).
gaaagagtagtttacaaaa

SEQ ID NO: 54459 - DNA, 19 bp, Homo sapiens
  siRNA target sequence for RPP14 (NM_007042.1,220-238).
cgagtaccactacatgaaa

SEQ ID NO: 54460 - DNA, 19 bp, Homo sapiens
  siRNA target sequence for RPP14 (NM_007042.1,244-262).
cctagaatttcaagattgt

SEQ ID NO: 54461 - DNA, 19 bp, Homo sapiens
  siRNA target sequence for RPP14 (NM_007042.1,274-292).
gaatgctgcacagttcaaa

SEQ ID NO: 54462 - DNA, 19 bp, Homo sapiens
  siRNA target sequence for RPP14 (NM_007042.1,332-350).
gttgatgccgccttacctt

SEQ ID NO: 54463 - DNA, 19 bp, Homo sapiens
  siRNA target sequence for RPP14 (NM_007042.1,348-366).
ctttggacatcctaaccta

SEQ ID NO: 54464 - DNA, 19 bp, Homo sapiens
  siRNA target sequence for RPP14 (NM_007042.1,402-420).
gtagcagtggtcttgtcaa

SEQ ID NO: 54465 - DNA, 19 bp, Homo sapiens
  siRNA target sequence for RPP14 (NM_007042.1,405-423).
gcagtggtcttgtcaaatt

SEQ ID NO: 54466 - DNA, 19 bp, Homo sapiens
  siRNA target sequence for RPP14 (NM_007042.1,436-454).
gaccctgttaggatcctat

SEQ ID NO: 54467 - DNA, 19 bp, Homo sapiens
  siRNA target sequence for RPP14 (NM_007042.1,438-456).
ccctgttaggatcctataa

SEQ ID NO: 54468 - DNA, 19 bp, Homo sapiens
  siRNA target sequence for RPP14 (NM_007042.1,447-465).
gatcctataaaggcaaaaa

SEQ ID NO: 54469 - DNA, 19 bp, Homo sapiens
  siRNA target sequence for RPP14 (NM_007042.1,481-499).
gattcaggtttctccattt

SEQ ID NO: 54470 - DNA, 19 bp, Homo sapiens
  siRNA target sequence for RPP14 (NM_007042.1,503-521).
cttgcattatctggtaata

SEQ ID NO: 54471 - DNA, 19 bp, Homo sapiens
  siRNA target sequence for RPP14 (NM_007042.1,506-524).
gcattatctggtaatagta

SEQ ID NO: 54472 - DNA, 19 bp, Homo sapiens
  siRNA target sequence for RPP14 (NM_007042.1,516-534).
gtaatagtagggaactagt

SEQ ID NO: 54473 - DNA, 19 bp, Homo sapiens
  siRNA target sequence for RPP14 (NM_007042.1,522-540).
gtagggaactagtattgga

SEQ ID NO: 54474 - DNA, 19 bp, Homo sapiens
  siRNA target sequence for RPS19 (NM_001022.2,74-92).
ctggagttactgtaaaaga

SEQ ID NO: 54475 - DNA, 19 bp, Homo sapiens
  siRNA target sequence for RPS21 (NM_001024.2,277-295).
gatggcatcgtctcaaaga

SEQ ID NO: 54476 - DNA, 19 bp, Homo sapiens
  siRNA target sequence for RPS29 (NM_001032.2,89-107).
cttgtcgtgtctgttcaaa

SEQ ID NO: 54477 - DNA, 19 bp, Homo sapiens
  siRNA target sequence for RPS29 (NM_001032.2,114-132).
cggtctgatccggaaatat

SEQ ID NO: 54478 - DNA, 19 bp, Homo sapiens
  siRNA target sequence for RPS29 (NM_001032.2,124-142).
cggaaatatggcctcaata

SEQ ID NO: 54479 - DNA, 19 bp, Homo sapiens
  siRNA target sequence for RPS29 (NM_001032.2,125-143).
ggaaatatggcctcaatat

SEQ ID NO: 54480 - DNA, 19 bp, Homo sapiens
  siRNA target sequence for RPS29 (NM_001032.2,160-178).
cgtcagtacgcgaaggata

SEQ ID NO: 54481 - DNA, 19 bp, Homo sapiens
  siRNA target sequence for RPS29 (NM_001032.2,161-179).
gtcagtacgcgaaggatat

SEQ ID NO: 54482 - DNA, 19 bp, Homo sapiens
  siRNA target sequence for RPS29 (NM_001032.2,170-188).
cgaaggatatcggtttcat

SEQ ID NO: 54483 - DNA, 19 bp, Homo sapiens
  siRNA target sequence for RPS3 (NM_001005.2,152-170).
ggacagaaatcattatctt

SEQ ID NO: 54484 - DNA, 19 bp, Homo sapiens
  siRNA target sequence for RPS4Y (NM_001008.2,206-224).
gtatgcaacgtttcatcaa

SEQ ID NO: 54485 - DNA, 19 bp, Homo sapiens
  siRNA target sequence for RPS4Y (NM_001008.2,210-228).
gcaacgtttcatcaaaatt

SEQ ID NO: 54486 - DNA, 19 bp, Homo sapiens
  siRNA target sequence for RPS4Y (NM_001008.2,506-524).
ggactggcaagataatcaa

SEQ ID NO: 54487 - DNA, 19 bp, Homo sapiens
  siRNA target sequence for RPS4Y (NM_001008.2,509-527).
ctggcaagataatcaactt

SEQ ID NO: 54488 - DNA, 19 bp, Homo sapiens
  siRNA target sequence for RPS4Y (NM_001008.2,538-556).
gatacaggcaatttgtgta

SEQ ID NO: 54489 - DNA, 19 bp, Homo sapiens
  siRNA target sequence for RPS4Y2 (NM_138963.1,499-517).
gggaagataaccagcttta

SEQ ID NO: 54490 - DNA, 19 bp, Homo sapiens
  siRNA target sequence for RPS4Y2 (NM_138963.1,500-518).
ggaagataaccagctttat

SEQ ID NO: 54491 - DNA, 19 bp, Homo sapiens
  siRNA target sequence for RPS4Y2 (NM_138963.1,611-629).
cttgcgatgtggtacatgt

SEQ ID NO: 54492 - DNA, 19 bp, Homo sapiens
  siRNA target sequence for RPS4Y2 (NM_138963.1,614-632).
gcgatgtggtacatgtgaa

SEQ ID NO: 54493 - DNA, 19 bp, Homo sapiens
  siRNA target sequence for RPS5 (NM_001009.2,132-150).
gatgtgcagatcaatgaca

SEQ ID NO: 54494 - DNA, 19 bp, Homo sapiens
  siRNA target sequence for RPS5 (NM_001009.2,258-276).
gtggagcgcctcactaact

SEQ ID NO: 54495 - DNA, 19 bp, Homo sapiens
  siRNA target sequence for RPS5 (NM_001009.2,335-353).
gcatgccttcgagatcata

SEQ ID NO: 54496 - DNA, 19 bp, Homo sapiens
  siRNA target sequence for RPS5 (NM_001009.2,607-625).
cgaactcctatgccattaa

SEQ ID NO: 54497 - DNA, 19 bp, Homo sapiens
  siRNA target sequence for RPS6 (NM_001010.2,353-371).
caaatctgagcgttctcaa

SEQ ID NO: 54498 - DNA, 19 bp, Homo sapiens
  siRNA target sequence for RPS9 (NM_001013.2,330-348).
gcctgaagatagaggattt

SEQ ID NO: 54499 - DNA, 19 bp, Homo sapiens
  siRNA target sequence for RRP40 (NM_016042.1,295-313).
gcggtatgttccagtaaaa

SEQ ID NO: 54500 - DNA, 19 bp, Homo sapiens
  siRNA target sequence for RRP40 (NM_016042.1,320-338).
catgtgattggcatagtga

SEQ ID NO: 54501 - DNA, 19 bp, Homo sapiens
  siRNA target sequence for RRP40 (NM_016042.1,341-359).
gctaaatctggagatatat

SEQ ID NO: 54502 - DNA, 19 bp, Homo sapiens
  siRNA target sequence for RRP40 (NM_016042.1,342-360).
ctaaatctggagatatatt

SEQ ID NO: 54503 - DNA, 19 bp, Homo sapiens
  siRNA target sequence for RRP40 (NM_016042.1,351-369).
gagatatattcaaagttga

SEQ ID NO: 54504 - DNA, 19 bp, Homo sapiens
  siRNA target sequence for RRP40 (NM_016042.1,397-415).
gtcttacttgtcatttgaa

SEQ ID NO: 54505 - DNA, 19 bp, Homo sapiens
  siRNA target sequence for RRP40 (NM_016042.1,408-426).
catttgaaggtgcaactaa

SEQ ID NO: 54506 - DNA, 19 bp, Homo sapiens
  siRNA target sequence for RRP40 (NM_016042.1,416-434).
ggtgcaactaaaagaaaca

SEQ ID NO: 54507 - DNA, 19 bp, Homo sapiens
  siRNA target sequence for RRP40 (NM_016042.1,448-466).
ggttggagatctcatctat

SEQ ID NO: 54508 - DNA, 19 bp, Homo sapiens
  siRNA target sequence for RRP40 (NM_016042.1,469-487).
ccagtttgtggttgctaat

SEQ ID NO: 54509 - DNA, 19 bp, Homo sapiens
  siRNA target sequence for RRP40 (NM_016042.1,476-494).
gtggttgctaataaagaca

SEQ ID NO: 54510 - DNA, 19 bp, Homo sapiens
  siRNA target sequence for RRP40 (NM_016042.1,525-543).
gtggacgagccaatggaat

SEQ ID NO: 54511 - DNA, 19 bp, Homo sapiens
  siRNA target sequence for RRP40 (NM_016042.1,578-596).
gtgactctgggcttaatta

SEQ ID NO: 54512 - DNA, 19 bp, Homo sapiens
  siRNA target sequence for RRP40 (NM_016042.1,580-598).
gactctgggcttaattaga

SEQ ID NO: 54513 - DNA, 19 bp, Homo sapiens
  siRNA target sequence for RRP40 (NM_016042.1,582-600).
ctctgggcttaattagaaa

SEQ ID NO: 54514 - DNA, 19 bp, Homo sapiens
  siRNA target sequence for RRP40 (NM_016042.1,601-619).
gctattagctccagattgt

SEQ ID NO: 54515 - DNA, 19 bp, Homo sapiens
  siRNA target sequence for RRP40 (NM_016042.1,646-664).
ctatccactggagatagta

SEQ ID NO: 54516 - DNA, 19 bp, Homo sapiens
  siRNA target sequence for RRP41 (NM_019037.1,303-321).
cggacagggccctagtgaa

SEQ ID NO: 54517 - DNA, 19 bp, Homo sapiens
  siRNA target sequence for RRP41 (NM_019037.1,311-329).
gccctagtgaactgtcaat

SEQ ID NO: 54518 - DNA, 19 bp, Homo sapiens
  siRNA target sequence for RRP41 (NM_019037.1,312-330).
ccctagtgaactgtcaata

SEQ ID NO: 54519 - DNA, 19 bp, Homo sapiens
  siRNA target sequence for RRP41 (NM_019037.1,319-337).
gaactgtcaatatagttca

SEQ ID NO: 54520 - DNA, 19 bp, Homo sapiens
  siRNA target sequence for RRP41 (NM_019037.1,409-427).
gctccgccagactttcgaa

SEQ ID NO: 54521 - DNA, 19 bp, Homo sapiens
  siRNA target sequence for RRP41 (NM_019037.1,452-470).
ccacgctcccagattgata

SEQ ID NO: 54522 - DNA, 19 bp, Homo sapiens
  siRNA target sequence for RRP41 (NM_019037.1,453-471).
cacgctcccagattgatat

SEQ ID NO: 54523 - DNA, 19 bp, Homo sapiens
  siRNA target sequence for RRP41 (NM_019037.1,455-473).
cgctcccagattgatatct

SEQ ID NO: 54524 - DNA, 19 bp, Homo sapiens
  siRNA target sequence for RRP41 (NM_019037.1,456-474).
gctcccagattgatatcta

SEQ ID NO: 54525 - DNA, 19 bp, Homo sapiens
  siRNA target sequence for RRP41 (NM_019037.1,457-475).
ctcccagattgatatctat

SEQ ID NO: 54526 - DNA, 19 bp, Homo sapiens
  siRNA target sequence for RRP41 (NM_019037.1,505-523).
ctatgcagcttgtgtgaat

SEQ ID NO: 54527 - DNA, 19 bp, Homo sapiens
  siRNA target sequence for RRP41 (NM_019037.1,553-571).
gatacccatgagagacttt

SEQ ID NO: 54528 - DNA, 19 bp, Homo sapiens
  siRNA target sequence for RRP41 (NM_019037.1,809-827).
gtgcgtgaggcctctatct

SEQ ID NO: 54529 - DNA, 19 bp, Homo sapiens
  siRNA target sequence for RRP46 (NM_020158.1,37-55).
cgcatactgacgccaaaat

SEQ ID NO: 54530 - DNA, 19 bp, Homo sapiens
  siRNA target sequence for RRP46 (NM_020158.1,223-241).
gcaaagagattttcaacaa

SEQ ID NO: 54531 - DNA, 19 bp, Homo sapiens
  siRNA target sequence for RRP46 (NM_020158.1,257-275).
gatcctgaggccgaagatt

SEQ ID NO: 54532 - DNA, 19 bp, Homo sapiens
  siRNA target sequence for RTCD1 (NM_003729.1,310-328).
gcctgaggcctcaacattt

SEQ ID NO: 54533 - DNA, 19 bp, Homo sapiens
  siRNA target sequence for RTCD1 (NM_003729.1,311-329).
cctgaggcctcaacattta

SEQ ID NO: 54534 - DNA, 19 bp, Homo sapiens
  siRNA target sequence for RTCD1 (NM_003729.1,387-405).
ggctcaacagaaataacct

SEQ ID NO: 54535 - DNA, 19 bp, Homo sapiens
  siRNA target sequence for RTCD1 (NM_003729.1,388-406).
gctcaacagaaataacctt

SEQ ID NO: 54536 - DNA, 19 bp, Homo sapiens
  siRNA target sequence for RTCD1 (NM_003729.1,389-407).
ctcaacagaaataaccttt

SEQ ID NO: 54537 - DNA, 19 bp, Homo sapiens
  siRNA target sequence for RTCD1 (NM_003729.1,533-551).
gaaaggtggaactaatgct

SEQ ID NO: 54538 - DNA, 19 bp, Homo sapiens
  siRNA target sequence for RTCD1 (NM_003729.1,557-575).
ggcaccacagatcgattat

SEQ ID NO: 54539 - DNA, 19 bp, Homo sapiens
  siRNA target sequence for RTCD1 (NM_003729.1,558-576).
gcaccacagatcgattata

SEQ ID NO: 54540 - DNA, 19 bp, Homo sapiens
  siRNA target sequence for RTCD1 (NM_003729.1,562-580).
cacagatcgattatacagt

SEQ ID NO: 54541 - DNA, 19 bp, Homo sapiens
  siRNA target sequence for RTCD1 (NM_003729.1,584-602).
ggtcttcaagccaattgtt

SEQ ID NO: 54542 - DNA, 19 bp, Homo sapiens
  siRNA target sequence for RTCD1 (NM_003729.1,593-611).
gccaattgttgaaaaattt

SEQ ID NO: 54543 - DNA, 19 bp, Homo sapiens
  siRNA target sequence for RTCD1 (NM_003729.1,661-679).
ggggtggtgaagtgattgt

SEQ ID NO: 54544 - DNA, 19 bp, Homo sapiens
  siRNA target sequence for RTCD1 (NM_003729.1,682-700).
gaatgtcaccagttaaaca

SEQ ID NO: 54545 - DNA, 19 bp, Homo sapiens
  siRNA target sequence for RTCD1 (NM_003729.1,688-706).
caccagttaaacaattgaa

SEQ ID NO: 54546 - DNA, 19 bp, Homo sapiens
  siRNA target sequence for RTCD1 (NM_003729.1,726-744).
cgtggctgtgtgactaaga

SEQ ID NO: 54547 - DNA, 19 bp, Homo sapiens
  siRNA target sequence for RTCD1 (NM_003729.1,729-747).
ggctgtgtgactaagatat

SEQ ID NO: 54548 - DNA, 19 bp, Homo sapiens
  siRNA target sequence for RTCD1 (NM_003729.1,730-748).
gctgtgtgactaagatata

SEQ ID NO: 54549 - DNA, 19 bp, Homo sapiens
  siRNA target sequence for RTCD1 (NM_003729.1,731-749).
ctgtgtgactaagatatat

SEQ ID NO: 54550 - DNA, 19 bp, Homo sapiens
  siRNA target sequence for RTCD1 (NM_003729.1,765-783).
gctggtgttttgccattta

SEQ ID NO: 54551 - DNA, 19 bp, Homo sapiens
  siRNA target sequence for RTCD1 (NM_003729.1,801-819).
gcagcggcagcagttagat

SEQ ID NO: 54552 - DNA, 19 bp, Homo sapiens
  siRNA target sequence for RTCD1 (NM_003729.1,833-851).
gatccgggatttgtatgtt

SEQ ID NO: 54553 - DNA, 19 bp, Homo sapiens
  siRNA target sequence for RTCD1 (NM_003729.1,837-855).
cgggatttgtatgttaaca

SEQ ID NO: 54554 - DNA, 19 bp, Homo sapiens
  siRNA target sequence for RTCD1 (NM_003729.1,860-878).
gcctgttcaagaacctaaa

SEQ ID NO: 54555 - DNA, 19 bp, Homo sapiens
  siRNA target sequence for RTCD1 (NM_003729.1,946-964).
ctggatcatcgcttggtaa

SEQ ID NO: 54556 - DNA, 19 bp, Homo sapiens
  siRNA target sequence for RTCD1 (NM_003729.1,970-988).
gtgtaaatgcagacaaagt

SEQ ID NO: 54557 - DNA, 19 bp, Homo sapiens
  siRNA target sequence for RTCD1 (NM_003729.1,1002-1020).
gccgaaatgctattagcaa

SEQ ID NO: 54558 - DNA, 19 bp, Homo sapiens
  siRNA target sequence for RTCD1 (NM_003729.1,1003-1021).
ccgaaatgctattagcaaa

SEQ ID NO: 54559 - DNA, 19 bp, Homo sapiens
  siRNA target sequence for RTCD1 (NM_003729.1,1004-1022).
cgaaatgctattagcaaat

SEQ ID NO: 54560 - DNA, 19 bp, Homo sapiens
  siRNA target sequence for RTCD1 (NM_003729.1,1010-1028).
gctattagcaaatcttaga

SEQ ID NO: 54561 - DNA, 19 bp, Homo sapiens
  siRNA target sequence for RTCD1 (NM_003729.1,1033-1051).
gtggtactgtggatgagta

SEQ ID NO: 54562 - DNA, 19 bp, Homo sapiens
  siRNA target sequence for RTCD1 (NM_003729.1,1036-1054).
gtactgtggatgagtatct

SEQ ID NO: 54563 - DNA, 19 bp, Homo sapiens
  siRNA target sequence for RTCD1 (NM_003729.1,1059-1077).
gaccagctgattgttttca

SEQ ID NO: 54564 - DNA, 19 bp, Homo sapiens
  siRNA target sequence for RTCD1 (NM_003729.1,1132-1150).
cgcaaaccgcgatacattt

SEQ ID NO: 54565 - DNA, 19 bp, Homo sapiens
  siRNA target sequence for RTCD1 (NM_003729.1,1133-1151).
gcaaaccgcgatacatttt

SEQ ID NO: 54566 - DNA, 19 bp, Homo sapiens
  siRNA target sequence for RTCD1 (NM_003729.1,1158-1176).
caaatagcaaaggctaaat

SEQ ID NO: 54567 - DNA, 19 bp, Homo sapiens
  siRNA target sequence for RTCD1 (NM_003729.1,1203-1221).
gaagacgccgctaaagata

SEQ ID NO: 54568 - DNA, 19 bp, Homo sapiens
  siRNA target sequence for RTCD1 (NM_003729.1,1206-1224).
gacgccgctaaagatactt

SEQ ID NO: 54569 - DNA, 19 bp, Homo sapiens
  siRNA target sequence for RTCD1 (NM_003729.1,1208-1226).
cgccgctaaagatacttat

SEQ ID NO: 54570 - DNA, 19 bp, Homo sapiens
  siRNA target sequence for RTCD1 (NM_003729.1,1209-1227).
gccgctaaagatacttata

SEQ ID NO: 54571 - DNA, 19 bp, Homo sapiens
  siRNA target sequence for RTCD1 (NM_003729.1,1210-1228).
ccgctaaagatacttatat

SEQ ID NO: 54572 - DNA, 19 bp, Homo sapiens
  siRNA target sequence for RTCD1 (NM_003729.1,1211-1229).
cgctaaagatacttatatt

SEQ ID NO: 54573 - DNA, 19 bp, Homo sapiens
  siRNA target sequence for SARS (NM_006513.2,96-114).
gtttcgggtggataaagga

SEQ ID NO: 54574 - DNA, 19 bp, Homo sapiens
  siRNA target sequence for SARS (NM_006513.2,198-216).
cgagtggcgacgatgtaga

SEQ ID NO: 54575 - DNA, 19 bp, Homo sapiens
  siRNA target sequence for SARS (NM_006513.2,199-217).
gagtggcgacgatgtagat

SEQ ID NO: 54576 - DNA, 19 bp, Homo sapiens
  siRNA target sequence for SARS (NM_006513.2,201-219).
gtggcgacgatgtagattt

SEQ ID NO: 54577 - DNA, 19 bp, Homo sapiens
  siRNA target sequence for SARS (NM_006513.2,215-233).
gatttcgggcagacaactt

SEQ ID NO: 54578 - DNA, 19 bp, Homo sapiens
  siRNA target sequence for SARS (NM_006513.2,220-238).
cgggcagacaacttgaaca

SEQ ID NO: 54579 - DNA, 19 bp, Homo sapiens
  siRNA target sequence for SARS (NM_006513.2,221-239).
gggcagacaacttgaacaa

SEQ ID NO: 54580 - DNA, 19 bp, Homo sapiens
  siRNA target sequence for SARS (NM_006513.2,321-339).
gaatgtgctgagtttcgat

SEQ ID NO: 54581 - DNA, 19 bp, Homo sapiens
  siRNA target sequence for SARS (NM_006513.2,369-387).
gaaagtctcacaaatcaaa

SEQ ID NO: 54582 - DNA, 19 bp, Homo sapiens
  siRNA target sequence for SARS (NM_006513.2,425-443).
gtgacgcggagcggataaa

SEQ ID NO: 54583 - DNA, 19 bp, Homo sapiens
  siRNA target sequence for SARS (NM_006513.2,427-445).
gacgcggagcggataaagt

SEQ ID NO: 54584 - DNA, 19 bp, Homo sapiens
  siRNA target sequence for SARS (NM_006513.2,448-466).
gaagcagagcggtttgaga

SEQ ID NO: 54585 - DNA, 19 bp, Homo sapiens
  siRNA target sequence for SARS (NM_006513.2,486-504).
ccttctgcacccttctgta

SEQ ID NO: 54586 - DNA, 19 bp, Homo sapiens
  siRNA target sequence for SARS (NM_006513.2,497-515).
cttctgtacccatcagtaa

SEQ ID NO: 54587 - DNA, 19 bp, Homo sapiens
  siRNA target sequence for SARS (NM_006513.2,543-561).
gaggatttggggtgattgt

SEQ ID NO: 54588 - DNA, 19 bp, Homo sapiens
  siRNA target sequence for SARS (NM_006513.2,546-564).
gatttggggtgattgtaca

SEQ ID NO: 54589 - DNA, 19 bp, Homo sapiens
  siRNA target sequence for SARS (NM_006513.2,644-662).
ggagtcgagggtacttctt

SEQ ID NO: 54590 - DNA, 19 bp, Homo sapiens
  siRNA target sequence for SARS (NM_006513.2,647-665).
gtcgagggtacttcttgaa

SEQ ID NO: 54591 - DNA, 19 bp, Homo sapiens
  siRNA target sequence for SARS (NM_006513.2,729-747).
gggctacattcccatttat

SEQ ID NO: 54592 - DNA, 19 bp, Homo sapiens
  siRNA target sequence for SARS (NM_006513.2,792-810).
gctcagccagtttgatgaa

SEQ ID NO: 54593 - DNA, 19 bp, Homo sapiens
  siRNA target sequence for SARS (NM_006513.2,1048-1066).
gaacagtttgtgtactcat

SEQ ID NO: 54594 - DNA, 19 bp, Homo sapiens
  siRNA target sequence for SARS (NM_006513.2,1064-1082).
catcaccccatgacaacaa

SEQ ID NO: 54595 - DNA, 19 bp, Homo sapiens
  siRNA target sequence for SARS (NM_006513.2,1080-1098).
caagtcatgggagatgttt

SEQ ID NO: 54596 - DNA, 19 bp, Homo sapiens
  siRNA target sequence for SARS (NM_006513.2,1083-1101).
gtcatgggagatgtttgaa

SEQ ID NO: 54597 - DNA, 19 bp, Homo sapiens
  siRNA target sequence for SARS (NM_006513.2,1112-1130).
ccaccgcagaggagttcta

SEQ ID NO: 54598 - DNA, 19 bp, Homo sapiens
  siRNA target sequence for SARS (NM_006513.2,1252-1270).
gtctcctgttctaattgca

SEQ ID NO: 54599 - DNA, 19 bp, Homo sapiens
  siRNA target sequence for SARS (NM_006513.2,1342-1360).
gtccatatgctcaatgcta

SEQ ID NO: 54600 - DNA, 19 bp, Homo sapiens
  siRNA target sequence for SARS (NM_006513.2,1471-1489).
gaactgatcccctttgtga

SEQ ID NO: 54601 - DNA, 19 bp, Homo sapiens
  siRNA target sequence for SARS (NM_006513.2,1537-1555).
catgagggcagcaaaaaga

SEQ ID NO: 54602 - DNA, 19 bp, Homo sapiens
  siRNA target sequence for SARS (NM_006513.2,1568-1586).
gagacgtcaccctagaaaa

SEQ ID NO: 54603 - DNA, 19 bp, Homo sapiens
  siRNA target sequence for SARS (NM_006513.2,1570-1588).
gacgtcaccctagaaaaca

SEQ ID NO: 54604 - DNA, 19 bp, Homo sapiens
  siRNA target sequence for SBP2 (NM_024077.2,85-103).
gaaagcgagggcatcaagt

SEQ ID NO: 54605 - DNA, 19 bp, Homo sapiens
  siRNA target sequence for SBP2 (NM_024077.2,90-108).
cgagggcatcaagttatca

SEQ ID NO: 54606 - DNA, 19 bp, Homo sapiens
  siRNA target sequence for SBP2 (NM_024077.2,107-125).
cagcagatgtcaaaccatt

SEQ ID NO: 54607 - DNA, 19 bp, Homo sapiens
  siRNA target sequence for SBP2 (NM_024077.2,110-128).
cagatgtcaaaccatttgt

SEQ ID NO: 54608 - DNA, 19 bp, Homo sapiens
  siRNA target sequence for SBP2 (NM_024077.2,201-219).
cacatactatccgtttgtt

SEQ ID NO: 54609 - DNA, 19 bp, Homo sapiens
  siRNA target sequence for SBP2 (NM_024077.2,203-221).
catactatccgtttgttca

SEQ ID NO: 54610 - DNA, 19 bp, Homo sapiens
  siRNA target sequence for SBP2 (NM_024077.2,849-867).
gttatcaaagggtgaaata

SEQ ID NO: 54611 - DNA, 19 bp, Homo sapiens
  siRNA target sequence for SBP2 (NM_024077.2,901-919).
gctaatgccgctaccaatt

SEQ ID NO: 54612 - DNA, 19 bp, Homo sapiens
  siRNA target sequence for SBP2 (NM_024077.2,947-965).
ggacaccaatgggttatgt

SEQ ID NO: 54613 - DNA, 19 bp, Homo sapiens
  siRNA target sequence for SBP2 (NM_024077.2,948-966).
gacaccaatgggttatgtt

SEQ ID NO: 54614 - DNA, 19 bp, Homo sapiens
  siRNA target sequence for SBP2 (NM_024077.2,950-968).
caccaatgggttatgttgt

SEQ ID NO: 54615 - DNA, 19 bp, Homo sapiens
  siRNA target sequence for SBP2 (NM_024077.2,964-982).
gttgttcgacagacattat

SEQ ID NO: 54616 - DNA, 19 bp, Homo sapiens
  siRNA target sequence for SBP2 (NM_024077.2,967-985).
gttcgacagacattatcta

SEQ ID NO: 54617 - DNA, 19 bp, Homo sapiens
  siRNA target sequence for SBP2 (NM_024077.2,1054-1072).
gatcctaaaaatgttagta

SEQ ID NO: 54618 - DNA, 19 bp, Homo sapiens
  siRNA target sequence for SBP2 (NM_024077.2,1097-1115).
cggatccttcctacaacaa

SEQ ID NO: 54619 - DNA, 19 bp, Homo sapiens
  siRNA target sequence for SBP2 (NM_024077.2,1162-1180).
ggtagtgaccttgaacaaa

SEQ ID NO: 54620 - DNA, 19 bp, Homo sapiens
  siRNA target sequence for SBP2 (NM_024077.2,1290-1308).
cctggcagttgcatctgaa

SEQ ID NO: 54621 - DNA, 19 bp, Homo sapiens
  siRNA target sequence for SBP2 (NM_024077.2,1293-1311).
ggcagttgcatctgaaaga

SEQ ID NO: 54622 - DNA, 19 bp, Homo sapiens
  siRNA target sequence for SBP2 (NM_024077.2,1324-1342).
gagacaccgaaatttcaat

SEQ ID NO: 54623 - DNA, 19 bp, Homo sapiens
  siRNA target sequence for SBP2 (NM_024077.2,1328-1346).
caccgaaatttcaatctaa

SEQ ID NO: 54624 - DNA, 19 bp, Homo sapiens
  siRNA target sequence for SBP2 (NM_024077.2,1347-1365).
gcagcagccacaggataat

SEQ ID NO: 54625 - DNA, 19 bp, Homo sapiens
  siRNA target sequence for SBP2 (NM_024077.2,1936-1954).
cgcagattcagggattact

SEQ ID NO: 54626 - DNA, 19 bp, Homo sapiens
  siRNA target sequence for SBP2 (NM_024077.2,1955-1973).
gcagccagatgcttagtaa

SEQ ID NO: 54627 - DNA, 19 bp, Homo sapiens
  siRNA target sequence for SBP2 (NM_024077.2,1958-1976).
gccagatgcttagtaaaga

SEQ ID NO: 54628 - DNA, 19 bp, Homo sapiens
  siRNA target sequence for SBP2 (NM_024077.2,1975-1993).
gaagtggatgcttgtgtta

SEQ ID NO: 54629 - DNA, 19 bp, Homo sapiens
  siRNA target sequence for SBP2 (NM_024077.2,1988-2006).
gtgttaccgacctactcaa

SEQ ID NO: 54630 - DNA, 19 bp, Homo sapiens
  siRNA target sequence for SBP2 (NM_024077.2,1994-2012).
ccgacctactcaaagaact

SEQ ID NO: 54631 - DNA, 19 bp, Homo sapiens
  siRNA target sequence for SBP2 (NM_024077.2,2018-2036).
gtttccaagaccgtatgta

SEQ ID NO: 54632 - DNA, 19 bp, Homo sapiens
  siRNA target sequence for SBP2 (NM_024077.2,2028-2046).
ccgtatgtaccagaaagat

SEQ ID NO: 54633 - DNA, 19 bp, Homo sapiens
  siRNA target sequence for SBP2 (NM_024077.2,2047-2065).
ccagtcaaggccaagacta

SEQ ID NO: 54634 - DNA, 19 bp, Homo sapiens
  siRNA target sequence for SBP2 (NM_024077.2,2063-2081).
ctaaacgtcgacttgtgtt

SEQ ID NO: 54635 - DNA, 19 bp, Homo sapiens
  siRNA target sequence for SBP2 (NM_024077.2,2084-2102).
ggttgagggaggttctcaa

SEQ ID NO: 54636 - DNA, 19 bp, Homo sapiens
  siRNA target sequence for SBP2 (NM_024077.2,2141-2159).
ctcccaactgtgagaagat

SEQ ID NO: 54637 - DNA, 19 bp, Homo sapiens
  siRNA target sequence for SBP2 (NM_024077.2,2171-2189).
gtgggctggatgacacttt

SEQ ID NO: 54638 - DNA, 19 bp, Homo sapiens
  siRNA target sequence for SBP2 (NM_024077.2,2186-2204).
ctttgcacacaattattga

SEQ ID NO: 54639 - DNA, 19 bp, Homo sapiens
  siRNA target sequence for SBP2 (NM_024077.2,2190-2208).
gcacacaattattgattat

SEQ ID NO: 54640 - DNA, 19 bp, Homo sapiens
  siRNA target sequence for SBP2 (NM_024077.2,2584-2602).
gaggcttcaacctctcaaa

SEQ ID NO: 54641 - DNA, 19 bp, Homo sapiens
  siRNA target sequence for SBP2 (NM_024077.2,2587-2605).
gcttcaacctctcaaatga

SEQ ID NO: 54642 - DNA, 19 bp, Homo sapiens
  siRNA target sequence for SBP2 (NM_024077.2,2588-2606).
cttcaacctctcaaatgat

SEQ ID NO: 54643 - DNA, 19 bp, Homo sapiens
  siRNA target sequence for SCA1 (NM_000332.1,948-966).
caagagcggagcaacgaat

SEQ ID NO: 54644 - DNA, 19 bp, Homo sapiens
  siRNA target sequence for SCA1 (NM_000332.1,1130-1148).
ctcggtggagcttggttta

SEQ ID NO: 54645 - DNA, 19 bp, Homo sapiens
  siRNA target sequence for SCA1 (NM_000332.1,1132-1150).
cggtggagcttggtttaca

SEQ ID NO: 54646 - DNA, 19 bp, Homo sapiens
  siRNA target sequence for SCA1 (NM_000332.1,1152-1170).
cagggaataggtttacaca

SEQ ID NO: 54647 - DNA, 19 bp, Homo sapiens
  siRNA target sequence for SCA1 (NM_000332.1,1154-1172).
gggaataggtttacacaaa

SEQ ID NO: 54648 - DNA, 19 bp, Homo sapiens
  siRNA target sequence for SCA1 (NM_000332.1,1307-1325).
gcacaccttccagttcatt

SEQ ID NO: 54649 - DNA, 19 bp, Homo sapiens
  siRNA target sequence for SCA1 (NM_000332.1,1334-1352).
ccaatacagtggaacctat

SEQ ID NO: 54650 - DNA, 19 bp, Homo sapiens
  siRNA target sequence for SCA1 (NM_000332.1,1674-1692).
cagtacgtccacatttcca

SEQ ID NO: 54651 - DNA, 19 bp, Homo sapiens
  siRNA target sequence for SCA1 (NM_000332.1,1798-1816).
cccaggtcgtcatgcaata

SEQ ID NO: 54652 - DNA, 19 bp, Homo sapiens
  siRNA target sequence for SCA1 (NM_000332.1,2224-2242).
caccccacacggtcattca

SEQ ID NO: 54653 - DNA, 19 bp, Homo sapiens
  siRNA target sequence for SCA1 (NM_000332.1,2520-2538).
cccaagagcgagaacttca

SEQ ID NO: 54654 - DNA, 19 bp, Homo sapiens
  siRNA target sequence for SCA1 (NM_000332.1,2644-2662).
cgctgcctccctacttcat

SEQ ID NO: 54655 - DNA, 19 bp, Homo sapiens
  siRNA target sequence for SCA1 (NM_000332.1,2646-2664).
ctgcctccctacttcatga

SEQ ID NO: 54656 - DNA, 19 bp, Homo sapiens
  siRNA target sequence for SCA1 (NM_000332.1,2685-2703).
gccaacggggagctaaaga

SEQ ID NO: 54657 - DNA, 19 bp, Homo sapiens
  siRNA target sequence for SCA1 (NM_000332.1,2686-2704).
ccaacggggagctaaagaa

SEQ ID NO: 54658 - DNA, 19 bp, Homo sapiens
  siRNA target sequence for SCA1 (NM_000332.1,2777-2795).
caccgtagagaggattgaa

SEQ ID NO: 54659 - DNA, 19 bp, Homo sapiens
  siRNA target sequence for SCA1 (NM_000332.1,2779-2797).
ccgtagagaggattgaaga

SEQ ID NO: 54660 - DNA, 19 bp, Homo sapiens
  siRNA target sequence for SCA1 (NM_000332.1,2811-2829).
ggcgtggccgtgatacagt

SEQ ID NO: 54661 - DNA, 19 bp, Homo sapiens
  siRNA target sequence for SCA1 (NM_000332.1,2812-2830).
gcgtggccgtgatacagtt

SEQ ID NO: 54662 - DNA, 19 bp, Homo sapiens
  siRNA target sequence for SCA1 (NM_000332.1,2851-2869).
cccaggtcagcgttgaagt

SEQ ID NO: 54663 - DNA, 19 bp, Homo sapiens
  siRNA target sequence for SCA1 (NM_000332.1,2852-2870).
ccaggtcagcgttgaagtt

SEQ ID NO: 54664 - DNA, 19 bp, Homo sapiens
  siRNA target sequence for SCA1 (NM_000332.1,2853-2871).
caggtcagcgttgaagttt

SEQ ID NO: 54665 - DNA, 19 bp, Homo sapiens
  siRNA target sequence for SCA1 (NM_000332.1,2868-2886).
gttttggtagagtatcctt

SEQ ID NO: 54666 - DNA, 19 bp, Homo sapiens
  siRNA target sequence for SCA1 (NM_000332.1,2873-2891).
ggtagagtatccttttttt

SEQ ID NO: 54667 - DNA, 19 bp, Homo sapiens
  siRNA target sequence for SCA1 (NM_000332.1,3006-3024).
ctgaagaacggctctgtta

SEQ ID NO: 54668 - DNA, 19 bp, Homo sapiens
  siRNA target sequence for SCA1 (NM_000332.1,3008-3026).
gaagaacggctctgttaaa

SEQ ID NO: 54669 - DNA, 19 bp, Homo sapiens
  siRNA target sequence for SCA1 (NM_000332.1,3154-3172).
ctgagaatggcgaactgaa

SEQ ID NO: 54670 - DNA, 19 bp, Homo sapiens
  siRNA target sequence for SCA1 (NM_000332.1,3158-3176).
gaatggcgaactgaagttt

SEQ ID NO: 54671 - DNA, 19 bp, Homo sapiens
  siRNA target sequence for SCA1 (NM_000332.1,3341-3359).
ggaggttaagatttgcatt

SEQ ID NO: 54672 - DNA, 19 bp, Homo sapiens
  siRNA target sequence for SCA1 (NM_000332.1,3356-3374).
cattgaaggccggtctaat

SEQ ID NO: 54673 - DNA, 19 bp, Homo sapiens
  siRNA target sequence for SF1 (NM_004630.1,408-426).
cgttggacttcccaagtaa

SEQ ID NO: 54674 - DNA, 19 bp, Homo sapiens
  siRNA target sequence for SF1 (NM_004630.1,444-462).
gctggaaccaagacacaat

SEQ ID NO: 54675 - DNA, 19 bp, Homo sapiens
  siRNA target sequence for SF1 (NM_004630.1,510-528).
gacttactcgagaacaaga

SEQ ID NO: 54676 - DNA, 19 bp, Homo sapiens
  siRNA target sequence for SF1 (NM_004630.1,627-645).
cccctgagcccatctacaa

SEQ ID NO: 54677 - DNA, 19 bp, Homo sapiens
  siRNA target sequence for SF1 (NM_004630.1,650-668).
gaggggaagcggcttaaca

SEQ ID NO: 54678 - DNA, 19 bp, Homo sapiens
  siRNA target sequence for SF1 (NM_004630.1,734-752).
gcactcaatccggatttca

SEQ ID NO: 54679 - DNA, 19 bp, Homo sapiens
  siRNA target sequence for SF1 (NM_004630.1,779-797).
gcaacacgtgtgagtgata

SEQ ID NO: 54680 - DNA, 19 bp, Homo sapiens
  siRNA target sequence for SF1 (NM_004630.1,780-798).
caacacgtgtgagtgataa

SEQ ID NO: 54681 - DNA, 19 bp, Homo sapiens
  siRNA target sequence for SF1 (NM_004630.1,783-801).
cacgtgtgagtgataaagt

SEQ ID NO: 54682 - DNA, 19 bp, Homo sapiens
  siRNA target sequence for SF1 (NM_004630.1,785-803).
cgtgtgagtgataaagtca

SEQ ID NO: 54683 - DNA, 19 bp, Homo sapiens
  siRNA target sequence for SF1 (NM_004630.1,786-804).
gtgtgagtgataaagtcat

SEQ ID NO: 54684 - DNA, 19 bp, Homo sapiens
  siRNA target sequence for SF1 (NM_004630.1,916-934).
ggggaaagggtctgtgaaa

SEQ ID NO: 54685 - DNA, 19 bp, Homo sapiens
  siRNA target sequence for SF1 (NM_004630.1,997-1015).
cctggttactgccaataca

SEQ ID NO: 54686 - DNA, 19 bp, Homo sapiens
  siRNA target sequence for SF1 (NM_004630.1,1116-1134).
gggagttggctcgcttaaa

SEQ ID NO: 54687 - DNA, 19 bp, Homo sapiens
  siRNA target sequence for SF1 (NM_004630.1,1117-1135).
ggagttggctcgcttaaat

SEQ ID NO: 54688 - DNA, 19 bp, Homo sapiens
  siRNA target sequence for SF1 (NM_004630.1,1142-1160).
cttcgggaagacgataaca

SEQ ID NO: 54689 - DNA, 19 bp, Homo sapiens
  siRNA target sequence for SF1 (NM_004630.1,1151-1169).
gacgataacaggatcttaa

SEQ ID NO: 54690 - DNA, 19 bp, Homo sapiens
  siRNA target sequence for SF1 (NM_004630.1,1153-1171).
cgataacaggatcttaaga

SEQ ID NO: 54691 - DNA, 19 bp, Homo sapiens
  siRNA target sequence for SF1 (NM_004630.1,1232-1250).
ggggctggccacattgctt

SEQ ID NO: 54692 - DNA, 19 bp, Homo sapiens
  siRNA target sequence for SF1 (NM_004630.1,1295-1313).
gataaagcacggatggata

SEQ ID NO: 54693 - DNA, 19 bp, Homo sapiens
  siRNA target sequence for SF1 (NM_004630.1,1713-1731).
ctcctccaatggatcagta

SEQ ID NO: 54694 - DNA, 19 bp, Homo sapiens
  siRNA target sequence for SF1 (NM_004630.1,1952-1970).
ccatggcagcaaaatacga

SEQ ID NO: 54695 - DNA, 19 bp, Homo sapiens
  siRNA target sequence for SF3A2 (NM_007165.3,219-237).
gacccgtacttcatgaaga

SEQ ID NO: 54696 - DNA, 19 bp, Homo sapiens
  siRNA target sequence for SF3A2 (NM_007165.3,240-258).
cacctgggctcctatgaat

SEQ ID NO: 54697 - DNA, 19 bp, Homo sapiens
  siRNA target sequence for SF3A2 (NM_007165.3,245-263).
gggctcctatgaatgcaaa

SEQ ID NO: 54698 - DNA, 19 bp, Homo sapiens
  siRNA target sequence for SF3A2 (NM_007165.3,268-286).
gcctgacacttcacaacaa

SEQ ID NO: 54699 - DNA, 19 bp, Homo sapiens
  siRNA target sequence for SF3A2 (NM_007165.3,531-549).
ccacgtcaccgcttcatgt

SEQ ID NO: 54700 - DNA, 19 bp, Homo sapiens
  siRNA target sequence for SF3A2 (NM_007165.3,826-844).
caccgctgcctgagtcttt

SEQ ID NO: 54701 - DNA, 19 bp, Homo sapiens
  siRNA target sequence for SF3A2 (NM_007165.3,1445-1463).
cgaaggcccagggaacata

SEQ ID NO: 54702 - DNA, 19 bp, Homo sapiens
  siRNA target sequence for SF4 (NM_021164.2,57-75).
ggggttgctccccctaaat

SEQ ID NO: 54703 - DNA, 19 bp, Homo sapiens
  siRNA target sequence for SF4 (NM_021164.2,222-240).
cacaactcttcctgcattt

SEQ ID NO: 54704 - DNA, 19 bp, Homo sapiens
  siRNA target sequence for SF4 (NM_021164.2,572-590).
cccctcgtcatggtgtttt

SEQ ID NO: 54705 - DNA, 19 bp, Homo sapiens
  siRNA target sequence for SF4 (NM_172231.2,527-545).
gctggagatcaaagtttca

SEQ ID NO: 54706 - DNA, 19 bp, Homo sapiens
  siRNA target sequence for SF4 (NM_172231.2,560-578).
cgagactcggaaagtgata

SEQ ID NO: 54707 - DNA, 19 bp, Homo sapiens
  siRNA target sequence for SF4 (NM_172231.2,644-662).
caaggataacccagcattt

SEQ ID NO: 54708 - DNA, 19 bp, Homo sapiens
  siRNA target sequence for SF4 (NM_172231.2,663-681).
gcatttttgcacgataaga

SEQ ID NO: 54709 - DNA, 19 bp, Homo sapiens
  siRNA target sequence for SF4 (NM_172231.2,664-682).
catttttgcacgataagaa

SEQ ID NO: 54710 - DNA, 19 bp, Homo sapiens
  siRNA target sequence for SF4 (NM_172231.2,749-767).
ggcagcctctcagaaagtt

SEQ ID NO: 54711 - DNA, 19 bp, Homo sapiens
  siRNA target sequence for SF4 (NM_172231.2,883-901).
cattcagctttctgtatga

SEQ ID NO: 54712 - DNA, 19 bp, Homo sapiens
  siRNA target sequence for SF4 (NM_172231.2,1075-1093).
cgcctgcgcccactatcat

SEQ ID NO: 54713 - DNA, 19 bp, Homo sapiens
  siRNA target sequence for SF4 (NM_172231.2,1165-1183).
ggcctgaagaggataaggt

SEQ ID NO: 54714 - DNA, 19 bp, Homo sapiens
  siRNA target sequence for SF4 (NM_172231.2,1166-1184).
gcctgaagaggataaggta

SEQ ID NO: 54715 - DNA, 19 bp, Homo sapiens
  siRNA target sequence for SF4 (NM_172231.2,1300-1318).
gcgtcacagagctttcaga

SEQ ID NO: 54716 - DNA, 19 bp, Homo sapiens
  siRNA target sequence for SF4 (NM_172231.2,1534-1552).
gggccgagcagctgacaaa

SEQ ID NO: 54717 - DNA, 19 bp, Homo sapiens
  siRNA target sequence for SF4 (NM_172231.2,1537-1555).
ccgagcagctgacaaagat

SEQ ID NO: 54718 - DNA, 19 bp, Homo sapiens
  siRNA target sequence for SF4 (NM_172231.2,1596-1614).
gacgagctggaaaagttta

SEQ ID NO: 54719 - DNA, 19 bp, Homo sapiens
  siRNA target sequence for SF4 (NM_172231.2,1660-1678).
cagagtacaaggagttcaa

SEQ ID NO: 54720 - DNA, 19 bp, Homo sapiens
  siRNA target sequence for SF4 (NM_172231.2,1920-1938).
cccagacggccttactact

SEQ ID NO: 54721 - DNA, 19 bp, Homo sapiens
  siRNA target sequence for SFRS14 (NM_014884.1,138-156).
ggcagccagacgaattaca

SEQ ID NO: 54722 - DNA, 19 bp, Homo sapiens
  siRNA target sequence for SFRS14 (NM_014884.1,149-167).
gaattacacaggagacttt

SEQ ID NO: 54723 - DNA, 19 bp, Homo sapiens
  siRNA target sequence for SFRS14 (NM_014884.1,230-248).
gcgaaactcttcagtttaa

SEQ ID NO: 54724 - DNA, 19 bp, Homo sapiens
  siRNA target sequence for SFRS14 (NM_014884.1,231-249).
cgaaactcttcagtttaaa

SEQ ID NO: 54725 - DNA, 19 bp, Homo sapiens
  siRNA target sequence for SFRS14 (NM_014884.1,324-342).
ctccctcagtggatctgta

SEQ ID NO: 54726 - DNA, 19 bp, Homo sapiens
  siRNA target sequence for SFRS14 (NM_014884.1,371-389).
gcctgagaagtgacgtatt

SEQ ID NO: 54727 - DNA, 19 bp, Homo sapiens
  siRNA target sequence for SFRS14 (NM_014884.1,372-390).
cctgagaagtgacgtattt

SEQ ID NO: 54728 - DNA, 19 bp, Homo sapiens
  siRNA target sequence for SFRS14 (NM_014884.1,438-456).
ctactttcgcaaagaatgt

SEQ ID NO: 54729 - DNA, 19 bp, Homo sapiens
  siRNA target sequence for SFRS14 (NM_014884.1,529-547).
cgttctcaggactggaaat

SEQ ID NO: 54730 - DNA, 19 bp, Homo sapiens
  siRNA target sequence for SFRS14 (NM_014884.1,557-575).
gtggttcttgggaacaaga

SEQ ID NO: 54731 - DNA, 19 bp, Homo sapiens
  siRNA target sequence for SFRS14 (NM_014884.1,640-658).
gttttgggggactttggat

SEQ ID NO: 54732 - DNA, 19 bp, Homo sapiens
  siRNA target sequence for SFRS14 (NM_014884.1,656-674).
gatcttccaggctgattga

SEQ ID NO: 54733 - DNA, 19 bp, Homo sapiens
  siRNA target sequence for SFRS14 (NM_014884.1,770-788).
gaggtcgagctctaaacat

SEQ ID NO: 54734 - DNA, 19 bp, Homo sapiens
  siRNA target sequence for SFRS14 (NM_014884.1,868-886).
gtcacattgagaaatgtga

SEQ ID NO: 54735 - DNA, 19 bp, Homo sapiens
  siRNA target sequence for SFRS14 (NM_014884.1,901-919).
cccaccgtgaatcgtatta

SEQ ID NO: 54736 - DNA, 19 bp, Homo sapiens
  siRNA target sequence for SFRS14 (NM_014884.1,903-921).
caccgtgaatcgtattact

SEQ ID NO: 54737 - DNA, 19 bp, Homo sapiens
  siRNA target sequence for SFRS14 (NM_014884.1,929-947).
ctcagggcactaaccaaat

SEQ ID NO: 54738 - DNA, 19 bp, Homo sapiens
  siRNA target sequence for SFRS14 (NM_014884.1,938-956).
ctaaccaaatccagaaaaa

SEQ ID NO: 54739 - DNA, 19 bp, Homo sapiens
  siRNA target sequence for SFRS14 (NM_014884.1,1035-1053).
ggggctggatctgaagaat

SEQ ID NO: 54740 - DNA, 19 bp, Homo sapiens
  siRNA target sequence for SFRS14 (NM_014884.1,1077-1095).
gagctttgacatcatagat

SEQ ID NO: 54741 - DNA, 19 bp, Homo sapiens
  siRNA target sequence for SFRS14 (NM_014884.1,1079-1097).
gctttgacatcatagataa

SEQ ID NO: 54742 - DNA, 19 bp, Homo sapiens
  siRNA target sequence for SFRS14 (NM_014884.1,1089-1107).
catagataagtctgatgtt

SEQ ID NO: 54743 - DNA, 19 bp, Homo sapiens
  siRNA target sequence for SFRS14 (NM_014884.1,1098-1116).
gtctgatgttttttcaaga

SEQ ID NO: 54744 - DNA, 19 bp, Homo sapiens
  siRNA target sequence for SFRS14 (NM_014884.1,1141-1159).
gcaggattccacaccataa

SEQ ID NO: 54745 - DNA, 19 bp, Homo sapiens
  siRNA target sequence for SFRS14 (NM_014884.1,1142-1160).
caggattccacaccataaa

SEQ ID NO: 54746 - DNA, 19 bp, Homo sapiens
  siRNA target sequence for SFRS14 (NM_014884.1,1242-1260).
caaatgttccttaaaacca

SEQ ID NO: 54747 - DNA, 19 bp, Homo sapiens
  siRNA target sequence for SFRS14 (NM_014884.1,1314-1332).
gaaaacacccagagttgat

SEQ ID NO: 54748 - DNA, 19 bp, Homo sapiens
  siRNA target sequence for SFRS14 (NM_014884.1,1321-1339).
cccagagttgataatgagt

SEQ ID NO: 54749 - DNA, 19 bp, Homo sapiens
  siRNA target sequence for SFRS14 (NM_014884.1,1322-1340).
ccagagttgataatgagtt

SEQ ID NO: 54750 - DNA, 19 bp, Homo sapiens
  siRNA target sequence for SFRS14 (NM_014884.1,1323-1341).
cagagttgataatgagttt

SEQ ID NO: 54751 - DNA, 19 bp, Homo sapiens
  siRNA target sequence for SFRS14 (NM_014884.1,1369-1387).
gtgaagaccaaaaattgct

SEQ ID NO: 54752 - DNA, 19 bp, Homo sapiens
  siRNA target sequence for SFRS14 (NM_014884.1,1404-1422).
gccttttgacaagtacata

SEQ ID NO: 54753 - DNA, 19 bp, Homo sapiens
  siRNA target sequence for SFRS14 (NM_014884.1,1405-1423).
ccttttgacaagtacataa

SEQ ID NO: 54754 - DNA, 19 bp, Homo sapiens
  siRNA target sequence for SFRS14 (NM_014884.1,1406-1424).
cttttgacaagtacataat

SEQ ID NO: 54755 - DNA, 19 bp, Homo sapiens
  siRNA target sequence for SFRS14 (NM_014884.1,1449-1467).
gagtgtcacacctttgctt

SEQ ID NO: 54756 - DNA, 19 bp, Homo sapiens
  siRNA target sequence for SFRS14 (NM_014884.1,1451-1469).
gtgtcacacctttgcttat

SEQ ID NO: 54757 - DNA, 19 bp, Homo sapiens
  siRNA target sequence for SFRS14 (NM_014884.1,1636-1654).
gctgtcggcctgcaagata

SEQ ID NO: 54758 - DNA, 19 bp, Homo sapiens
  siRNA target sequence for SFRS14 (NM_014884.1,1637-1655).
ctgtcggcctgcaagatat

SEQ ID NO: 54759 - DNA, 19 bp, Homo sapiens
  siRNA target sequence for SFRS14 (NM_014884.1,1686-1704).
cgaagactccactttgttt

SEQ ID NO: 54760 - DNA, 19 bp, Homo sapiens
  siRNA target sequence for SFRS14 (NM_014884.1,1701-1719).
gtttgggcgagagtacata

SEQ ID NO: 54761 - DNA, 19 bp, Homo sapiens
  siRNA target sequence for SFRS14 (NM_014884.1,1814-1832).
ctcctacgaaacctgaaat

SEQ ID NO: 54762 - DNA, 19 bp, Homo sapiens
  siRNA target sequence for SFRS14 (NM_014884.1,1902-1920).
catcgaccagcttgtgaaa

SEQ ID NO: 54763 - DNA, 19 bp, Homo sapiens
  siRNA target sequence for SFRS14 (NM_014884.1,2006-2024).
gtctggagtataaatatta

SEQ ID NO: 54764 - DNA, 19 bp, Homo sapiens
  siRNA target sequence for SFRS14 (NM_014884.1,2313-2331).
cctgccagacagaaatgat

SEQ ID NO: 54765 - DNA, 19 bp, Homo sapiens
  siRNA target sequence for SFRS14 (NM_014884.1,2467-2485).
gctgacattgacatgaaga

SEQ ID NO: 54766 - DNA, 19 bp, Homo sapiens
  siRNA target sequence for SFRS14 (NM_014884.1,2530-2548).
ggaccagagatcgaacaat

SEQ ID NO: 54767 - DNA, 19 bp, Homo sapiens
  siRNA target sequence for SFRS14 (NM_014884.1,2531-2549).
gaccagagatcgaacaatt

SEQ ID NO: 54768 - DNA, 19 bp, Homo sapiens
  siRNA target sequence for SFRS14 (NM_014884.1,2533-2551).
ccagagatcgaacaattca

SEQ ID NO: 54769 - DNA, 19 bp, Homo sapiens
  siRNA target sequence for SFRS14 (NM_014884.1,2590-2608).
ctacatgaccaaaatagtt

SEQ ID NO: 54770 - DNA, 19 bp, Homo sapiens
  siRNA target sequence for SFRS14 (NM_014884.1,2611-2629).
gctttcaaattctatcgaa

SEQ ID NO: 54771 - DNA, 19 bp, Homo sapiens
  siRNA target sequence for SFRS14 (NM_014884.1,2612-2630).
ctttcaaattctatcgaaa

SEQ ID NO: 54772 - DNA, 19 bp, Homo sapiens
  siRNA target sequence for SFRS14 (NM_014884.1,2616-2634).
caaattctatcgaaagaaa

SEQ ID NO: 54773 - DNA, 19 bp, Homo sapiens
  siRNA target sequence for SFRS14 (NM_014884.1,2622-2640).
ctatcgaaagaaagtgttt

SEQ ID NO: 54774 - DNA, 19 bp, Homo sapiens
  siRNA target sequence for SFRS14 (NM_014884.1,2644-2662).
ctatgtccatcaatttgtt

SEQ ID NO: 54775 - DNA, 19 bp, Homo sapiens
  siRNA target sequence for SFRS14 (NM_014884.1,3076-3094).
gttcgaattgcctatgaca

SEQ ID NO: 54776 - DNA, 19 bp, Homo sapiens
  siRNA target sequence for SFRS14 (NM_014884.1,3103-3121).
ggtcgtcccatgtccaaaa

SEQ ID NO: 54777 - DNA, 19 bp, Homo sapiens
  siRNA target sequence for SFRS14 (NM_014884.1,3104-3122).
gtcgtcccatgtccaaaaa

SEQ ID NO: 54778 - DNA, 19 bp, Homo sapiens
  siRNA target sequence for SFRS14 (NM_014884.1,3106-3124).
cgtcccatgtccaaaaaga

SEQ ID NO: 54779 - DNA, 19 bp, Homo sapiens
  siRNA target sequence for SFRS14 (NM_014884.1,3154-3172).
cagaagctgaccgataaga

SEQ ID NO: 54780 - DNA, 19 bp, Homo sapiens
  siRNA target sequence for SFRS14 (NM_014884.1,3300-3318).
cgggcaggagcacaaagaa

SEQ ID NO: 54781 - DNA, 19 bp, Homo sapiens
  siRNA target sequence for SFRS3 (NM_003017.3,109-127).
cctgtccattggactgtaa

SEQ ID NO: 54782 - DNA, 19 bp, Homo sapiens
  siRNA target sequence for SFRS3 (NM_003017.3,290-308).
gctagatggaagaacacta

SEQ ID NO: 54783 - DNA, 19 bp, Homo sapiens
  siRNA target sequence for SFRS3 (NM_003017.3,291-309).
ctagatggaagaacactat

SEQ ID NO: 54784 - DNA, 19 bp, Homo sapiens
  siRNA target sequence for SKIV2L (NM_006929.3,561-579).
gcagaacagttgtttctgt

SEQ ID NO: 54785 - DNA, 19 bp, Homo sapiens
  siRNA target sequence for SKIV2L (NM_006929.3,612-630).
gagcactcagcccgaaaat

SEQ ID NO: 54786 - DNA, 19 bp, Homo sapiens
  siRNA target sequence for SKIV2L (NM_006929.3,643-661).
cggatccctggtctctttt

SEQ ID NO: 54787 - DNA, 19 bp, Homo sapiens
  siRNA target sequence for SKIV2L (NM_006929.3,746-764).
cttgctggagaacacaaat

SEQ ID NO: 54788 - DNA, 19 bp, Homo sapiens
  siRNA target sequence for SKIV2L (NM_006929.3,818-836).
gtccttatggggaaatcca

SEQ ID NO: 54789 - DNA, 19 bp, Homo sapiens
  siRNA target sequence for SKIV2L (NM_006929.3,874-892).
ccaccataacagatctgaa

SEQ ID NO: 54790 - DNA, 19 bp, Homo sapiens
  siRNA target sequence for SKIV2L (NM_006929.3,923-941).
ctttgagaaagatcttctt

SEQ ID NO: 54791 - DNA, 19 bp, Homo sapiens
  siRNA target sequence for SKIV2L (NM_006929.3,929-947).
gaaagatcttcttactatt

SEQ ID NO: 54792 - DNA, 19 bp, Homo sapiens
  siRNA target sequence for SKIV2L (NM_006929.3,971-989).
ggactttgcaccaaaagat

SEQ ID NO: 54793 - DNA, 19 bp, Homo sapiens
  siRNA target sequence for SKIV2L (NM_006929.3,972-990).
gactttgcaccaaaagatt

SEQ ID NO: 54794 - DNA, 19 bp, Homo sapiens
  siRNA target sequence for SKIV2L (NM_006929.3,974-992).
ctttgcaccaaaagattgt

SEQ ID NO: 54795 - DNA, 19 bp, Homo sapiens
  siRNA target sequence for SKIV2L (NM_006929.3,1054-1072).
ggggtgacgaggatgagaa

SEQ ID NO: 54796 - DNA, 19 bp, Homo sapiens
  siRNA target sequence for SKIV2L (NM_006929.3,1055-1073).
gggtgacgaggatgagaat

SEQ ID NO: 54797 - DNA, 19 bp, Homo sapiens
  siRNA target sequence for SKIV2L (NM_006929.3,1098-1116).
cccagaggggacactgttt

SEQ ID NO: 54798 - DNA, 19 bp, Homo sapiens
  siRNA target sequence for SKIV2L (NM_006929.3,1258-1276).
cctcccctgttggtgattt

SEQ ID NO: 54799 - DNA, 19 bp, Homo sapiens
  siRNA target sequence for SKIV2L (NM_006929.3,1312-1330).
catttgagccagatgtgtt

SEQ ID NO: 54800 - DNA, 19 bp, Homo sapiens
  siRNA target sequence for SKIV2L (NM_006929.3,1499-1517).
ccgggacttccgaaacaca

SEQ ID NO: 54801 - DNA, 19 bp, Homo sapiens
  siRNA target sequence for SKIV2L (NM_006929.3,1500-1518).
cgggacttccgaaacacat

SEQ ID NO: 54802 - DNA, 19 bp, Homo sapiens
  siRNA target sequence for SKIV2L (NM_006929.3,1501-1519).
gggacttccgaaacacatt

SEQ ID NO: 54803 - DNA, 19 bp, Homo sapiens
  siRNA target sequence for SKIV2L (NM_006929.3,1656-1674).
gatgaggttcactatatca

SEQ ID NO: 54804 - DNA, 19 bp, Homo sapiens
  siRNA target sequence for SKIV2L (NM_006929.3,1699-1717).
gggaggaggtgcttatcat

SEQ ID NO: 54805 - DNA, 19 bp, Homo sapiens
  siRNA target sequence for SKIV2L (NM_006929.3,1760-1778).
ccccaacgcccttgagttt

SEQ ID NO: 54806 - DNA, 19 bp, Homo sapiens
  siRNA target sequence for SKIV2L (NM_006929.3,1799-1817).
gaagcgtcgtcagatctat

SEQ ID NO: 54807 - DNA, 19 bp, Homo sapiens
  siRNA target sequence for SKIV2L (NM_006929.3,1803-1821).
cgtcgtcagatctatgtga

SEQ ID NO: 54808 - DNA, 19 bp, Homo sapiens
  siRNA target sequence for SKIV2L (NM_006929.3,1804-1822).
gtcgtcagatctatgtgat

SEQ ID NO: 54809 - DNA, 19 bp, Homo sapiens
  siRNA target sequence for SKIV2L (NM_006929.3,1809-1827).
cagatctatgtgattagca

SEQ ID NO: 54810 - DNA, 19 bp, Homo sapiens
  siRNA target sequence for SKIV2L (NM_006929.3,1844-1862).
gcccctggagcactatctt

SEQ ID NO: 54811 - DNA, 19 bp, Homo sapiens
  siRNA target sequence for SKIV2L (NM_006929.3,1845-1863).
cccctggagcactatcttt

SEQ ID NO: 54812 - DNA, 19 bp, Homo sapiens
  siRNA target sequence for SKIV2L (NM_006929.3,1846-1864).
ccctggagcactatctttt

SEQ ID NO: 54813 - DNA, 19 bp, Homo sapiens
  siRNA target sequence for SKIV2L (NM_006929.3,1848-1866).
ctggagcactatcttttca

SEQ ID NO: 54814 - DNA, 19 bp, Homo sapiens
  siRNA target sequence for SKIV2L (NM_006929.3,1850-1868).
ggagcactatcttttcaca

SEQ ID NO: 54815 - DNA, 19 bp, Homo sapiens
  siRNA target sequence for SKIV2L (NM_006929.3,1917-1935).
cgaggagccttccatacaa

SEQ ID NO: 54816 - DNA, 19 bp, Homo sapiens
  siRNA target sequence for SKIV2L (NM_006929.3,1928-1946).
ccatacaaaagggtactat

SEQ ID NO: 54817 - DNA, 19 bp, Homo sapiens
  siRNA target sequence for SKIV2L (NM_006929.3,2350-2368).
gcctggtcaaggtcttgtt

SEQ ID NO: 54818 - DNA, 19 bp, Homo sapiens
  siRNA target sequence for SKIV2L (NM_006929.3,2351-2369).
cctggtcaaggtcttgttt

SEQ ID NO: 54819 - DNA, 19 bp, Homo sapiens
  siRNA target sequence for SKIV2L (NM_006929.3,2399-2417).
catgcctgctcgtacagta

SEQ ID NO: 54820 - DNA, 19 bp, Homo sapiens
  siRNA target sequence for SKIV2L (NM_006929.3,2404-2422).
ctgctcgtacagtagtgtt

SEQ ID NO: 54821 - DNA, 19 bp, Homo sapiens
  siRNA target sequence for SKIV2L (NM_006929.3,2407-2425).
ctcgtacagtagtgtttga

SEQ ID NO: 54822 - DNA, 19 bp, Homo sapiens
  siRNA target sequence for SKIV2L (NM_006929.3,2521-2539).
ccacaggcaccgttatcct

SEQ ID NO: 54823 - DNA, 19 bp, Homo sapiens
  siRNA target sequence for SKIV2L (NM_006929.3,2622-2640).
cgcctcacgtacactatga

SEQ ID NO: 54824 - DNA, 19 bp, Homo sapiens
  siRNA target sequence for SKIV2L (NM_006929.3,2623-2641).
gcctcacgtacactatgat

SEQ ID NO: 54825 - DNA, 19 bp, Homo sapiens
  siRNA target sequence for SKIV2L (NM_006929.3,2804-2822).
ggtcgacctgcctgaatat

SEQ ID NO: 54826 - DNA, 19 bp, Homo sapiens
  siRNA target sequence for SKIV2L (NM_006929.3,2805-2823).
gtcgacctgcctgaatatt

SEQ ID NO: 54827 - DNA, 19 bp, Homo sapiens
  siRNA target sequence for SKIV2L (NM_006929.3,3329-3347).
caccctcgaccctgtcaat

SEQ ID NO: 54828 - DNA, 19 bp, Homo sapiens
  siRNA target sequence for SKIV2L (NM_006929.3,3472-3490).
gggagcgaatgcagataca

SEQ ID NO: 54829 - DNA, 19 bp, Homo sapiens
  siRNA target sequence for SKIV2L (NM_006929.3,3474-3492).
gagcgaatgcagatacaga

SEQ ID NO: 54830 - DNA, 19 bp, Homo sapiens
  siRNA target sequence for SKIV2L (NM_006929.3,3779-3797).
cctcaagcagggaatagaa

SEQ ID NO: 54831 - DNA, 19 bp, Homo sapiens
  siRNA target sequence for SMN2 (NM_022875.1,987-1005).
gctattatatggaaatgct

SEQ ID NO: 54832 - DNA, 19 bp, Homo sapiens
  siRNA target sequence for SNRPA (NM_004596.3,555-573).
gccctaaccacactattta

SEQ ID NO: 54833 - DNA, 19 bp, Homo sapiens
  siRNA target sequence for SNRPA (NM_004596.3,751-769).
gcagggtttccctttctat

SEQ ID NO: 54834 - DNA, 19 bp, Homo sapiens
  siRNA target sequence for SNRPA (NM_004596.3,794-812).
gccaagaccgactcagata

SEQ ID NO: 54835 - DNA, 19 bp, Homo sapiens
  siRNA target sequence for SNRPA (NM_004596.3,795-813).
ccaagaccgactcagatat

SEQ ID NO: 54836 - DNA, 19 bp, Homo sapiens
  siRNA target sequence for SNRPA (NM_004596.3,799-817).
gaccgactcagatatcatt

SEQ ID NO: 54837 - DNA, 19 bp, Homo sapiens
  siRNA target sequence for SNRPA (NM_004596.3,1142-1160).
gagaatccaccgaatcaca

SEQ ID NO: 54838 - DNA, 19 bp, Homo sapiens
  siRNA target sequence for SNRPA (NM_004596.3,1148-1166).
ccaccgaatcacatcttgt

SEQ ID NO: 54839 - DNA, 19 bp, Homo sapiens
  siRNA target sequence for SNRPA (NM_004596.3,1149-1167).
caccgaatcacatcttgtt

SEQ ID NO: 54840 - DNA, 19 bp, Homo sapiens
  siRNA target sequence for SNRPA (NM_004596.3,1325-1343).
ctgcagggctttaagatca

SEQ ID NO: 54841 - DNA, 19 bp, Homo sapiens
  siRNA target sequence for SNRPA1 (NM_003090.1,520-538).
gtcaggaagcagagaaaat

SEQ ID NO: 54842 - DNA, 19 bp, Homo sapiens
  siRNA target sequence for SNRPA1 (NM_003090.1,553-571).
ggggtgcacagcttgcaaa

SEQ ID NO: 54843 - DNA, 19 bp, Homo sapiens
  siRNA target sequence for SNRPA1 (NM_003090.1,559-577).
cacagcttgcaaaggatat

SEQ ID NO: 54844 - DNA, 19 bp, Homo sapiens
  siRNA target sequence for SNRPA1 (NM_003090.1,671-689).
gaatgccatagcaaatgct

SEQ ID NO: 54845 - DNA, 19 bp, Homo sapiens
  siRNA target sequence for SNRPC (NM_003093.1,173-191).
caacggctgcatttcaaca

SEQ ID NO: 54846 - DNA, 19 bp, Homo sapiens
  siRNA target sequence for SNRPC (NM_003093.1,182-200).
catttcaacaaggaaagat

SEQ ID NO: 54847 - DNA, 19 bp, Homo sapiens
  siRNA target sequence for SRP54 (NM_003136.2,283-301).
ccaccattatcaatgaaga

SEQ ID NO: 54848 - DNA, 19 bp, Homo sapiens
  siRNA target sequence for SRP54 (NM_003136.2,297-315).
gaagaggtattgaatgcta

SEQ ID NO: 54849 - DNA, 19 bp, Homo sapiens
  siRNA target sequence for SRP54 (NM_003136.2,375-393).
caactaagagaaaatgtta

SEQ ID NO: 54850 - DNA, 19 bp, Homo sapiens
  siRNA target sequence for SRP54 (NM_003136.2,500-518).
ggcatggacacccactaaa

SEQ ID NO: 54851 - DNA, 19 bp, Homo sapiens
  siRNA target sequence for SRP54 (NM_003136.2,505-523).
ggacacccactaaaggaaa

SEQ ID NO: 54852 - DNA, 19 bp, Homo sapiens
  siRNA target sequence for SRP54 (NM_003136.2,506-524).
gacacccactaaaggaaaa

SEQ ID NO: 54853 - DNA, 19 bp, Homo sapiens
  siRNA target sequence for SRP54 (NM_003136.2,551-569).
gcaagggagtggtaaaaca

SEQ ID NO: 54854 - DNA, 19 bp, Homo sapiens
  siRNA target sequence for SRP54 (NM_003136.2,552-570).
caagggagtggtaaaacaa

SEQ ID NO: 54855 - DNA, 19 bp, Homo sapiens
  siRNA target sequence for SRP54 (NM_003136.2,557-575).
gagtggtaaaacaacaaca

SEQ ID NO: 54856 - DNA, 19 bp, Homo sapiens
  siRNA target sequence for SRP54 (NM_003136.2,651-669).
ggggcttttgaccaactaa

SEQ ID NO: 54857 - DNA, 19 bp, Homo sapiens
  siRNA target sequence for SRP54 (NM_003136.2,839-857).
gcttcaagttgctaatgct

SEQ ID NO: 54858 - DNA, 19 bp, Homo sapiens
  siRNA target sequence for SRP54 (NM_003136.2,840-858).
cttcaagttgctaatgcta

SEQ ID NO: 54859 - DNA, 19 bp, Homo sapiens
  siRNA target sequence for SRP54 (NM_003136.2,916-934).
cccaggctaaggcttttaa

SEQ ID NO: 54860 - DNA, 19 bp, Homo sapiens
  siRNA target sequence for SRP54 (NM_003136.2,917-935).
ccaggctaaggcttttaaa

SEQ ID NO: 54861 - DNA, 19 bp, Homo sapiens
  siRNA target sequence for SRP54 (NM_003136.2,952-970).
cctcagtaatagtgacaaa

SEQ ID NO: 54862 - DNA, 19 bp, Homo sapiens
  siRNA target sequence for SRP54 (NM_003136.2,953-971).
ctcagtaatagtgacaaaa

SEQ ID NO: 54863 - DNA, 19 bp, Homo sapiens
  siRNA target sequence for SRP54 (NM_003136.2,1008-1026).
gcagtcgctgccacaaaaa

SEQ ID NO: 54864 - DNA, 19 bp, Homo sapiens
  siRNA target sequence for SRP54 (NM_003136.2,1018-1036).
ccacaaaaagtccgattat

SEQ ID NO: 54865 - DNA, 19 bp, Homo sapiens
  siRNA target sequence for SRP54 (NM_003136.2,1029-1047).
ccgattattttcattggta

SEQ ID NO: 54866 - DNA, 19 bp, Homo sapiens
  siRNA target sequence for SRP54 (NM_003136.2,1045-1063).
gtacaggggaacatataga

SEQ ID NO: 54867 - DNA, 19 bp, Homo sapiens
  siRNA target sequence for SRP54 (NM_003136.2,1051-1069).
gggaacatatagatgactt

SEQ ID NO: 54868 - DNA, 19 bp, Homo sapiens
  siRNA target sequence for SRP54 (NM_003136.2,1121-1139).
cattgaaggactgatagat

SEQ ID NO: 54869 - DNA, 19 bp, Homo sapiens
  siRNA target sequence for SRP54 (NM_003136.2,1128-1146).
ggactgatagataaagtca

SEQ ID NO: 54870 - DNA, 19 bp, Homo sapiens
  siRNA target sequence for SRP54 (NM_003136.2,1173-1191).
gcacttatagagaagttga

SEQ ID NO: 54871 - DNA, 19 bp, Homo sapiens
  siRNA target sequence for SRP54 (NM_003136.2,1207-1225).
cgttgcgagacatgtatga

SEQ ID NO: 54872 - DNA, 19 bp, Homo sapiens
  siRNA target sequence for SRP54 (NM_003136.2,1271-1289).
ggggatgatccctggtttt

SEQ ID NO: 54873 - DNA, 19 bp, Homo sapiens
  siRNA target sequence for SRP54 (NM_003136.2,1332-1350).
gcaaggctaaagaaattaa

SEQ ID NO: 54874 - DNA, 19 bp, Homo sapiens
  siRNA target sequence for SRP54 (NM_003136.2,1354-1372).
caataatggatagtatgaa

SEQ ID NO: 54875 - DNA, 19 bp, Homo sapiens
  siRNA target sequence for SRP54 (NM_003136.2,1366-1384).
gtatgaatgatcaagaact

SEQ ID NO: 54876 - DNA, 19 bp, Homo sapiens
  siRNA target sequence for SRP54 (NM_003136.2,1423-1441).
caggaagaatccaaagagt

SEQ ID NO: 54877 - DNA, 19 bp, Homo sapiens
  siRNA target sequence for SRP54 (NM_003136.2,1454-1472).
gggtgtatcaacaagagat

SEQ ID NO: 54878 - DNA, 19 bp, Homo sapiens
  siRNA target sequence for SRP54 (NM_003136.2,1476-1494).
caagaacttttgacacaat

SEQ ID NO: 54879 - DNA, 19 bp, Homo sapiens
  siRNA target sequence for SRP54 (NM_003136.2,1528-1546).
gaggtatcaaaggactttt

SEQ ID NO: 54880 - DNA, 19 bp, Homo sapiens
  siRNA target sequence for SRP54 (NM_003136.2,1551-1569).
ggtggcgacatgtctaaga

SEQ ID NO: 54881 - DNA, 19 bp, Homo sapiens
  siRNA target sequence for SRP54 (NM_003136.2,1552-1570).
gtggcgacatgtctaagaa

SEQ ID NO: 54882 - DNA, 19 bp, Homo sapiens
  siRNA target sequence for SRP54 (NM_003136.2,1602-1620).
caacaaatggccaaaatga

SEQ ID NO: 54883 - DNA, 19 bp, Homo sapiens
  siRNA target sequence for SRP54 (NM_003136.2,1656-1674).
gcaggacttcagtcaatga

SEQ ID NO: 54884 - DNA, 19 bp, Homo sapiens
  siRNA target sequence for SRP54 (NM_003136.2,1657-1675).
caggacttcagtcaatgat

SEQ ID NO: 54885 - DNA, 19 bp, Homo sapiens
  siRNA target sequence for SRP54 (NM_003136.2,1714-1732).
gcatgatgggattcaataa

SEQ ID NO: 54886 - DNA, 19 bp, Homo sapiens
  siRNA target sequence for SRP54 (NM_003136.2,1715-1733).
catgatgggattcaataat

SEQ ID NO: 54887 - DNA, 19 bp, Homo sapiens
  siRNA target sequence for SRP68 (NM_014230.2,172-190).
ccggatcgaaggcaaacaa

SEQ ID NO: 54888 - DNA, 19 bp, Homo sapiens
  siRNA target sequence for SRP68 (NM_014230.2,173-191).
cggatcgaaggcaaacaaa

SEQ ID NO: 54889 - DNA, 19 bp, Homo sapiens
  siRNA target sequence for SRP68 (NM_014230.2,205-223).
gcctgagtttggagattct

SEQ ID NO: 54890 - DNA, 19 bp, Homo sapiens
  siRNA target sequence for SRP68 (NM_014230.2,256-274).
gtttacggcatggagattt

SEQ ID NO: 54891 - DNA, 19 bp, Homo sapiens
  siRNA target sequence for SRP68 (NM_014230.2,290-308).
ctactgttcccgtagacaa

SEQ ID NO: 54892 - DNA, 19 bp, Homo sapiens
  siRNA target sequence for SRP68 (NM_014230.2,293-311).
ctgttcccgtagacaaaga

SEQ ID NO: 54893 - DNA, 19 bp, Homo sapiens
  siRNA target sequence for SRP68 (NM_014230.2,304-322).
gacaaagacgtcttcgaaa

SEQ ID NO: 54894 - DNA, 19 bp, Homo sapiens
  siRNA target sequence for SRP68 (NM_014230.2,318-336).
cgaaaaacactcaacttca

SEQ ID NO: 54895 - DNA, 19 bp, Homo sapiens
  siRNA target sequence for SRP68 (NM_014230.2,332-350).
cttcaagatgggtaacaga

SEQ ID NO: 54896 - DNA, 19 bp, Homo sapiens
  siRNA target sequence for SRP68 (NM_014230.2,338-356).
gatgggtaacagacacaaa

SEQ ID NO: 54897 - DNA, 19 bp, Homo sapiens
  siRNA target sequence for SRP68 (NM_014230.2,383-401).
gcttctgaccgataataga

SEQ ID NO: 54898 - DNA, 19 bp, Homo sapiens
  siRNA target sequence for SRP68 (NM_014230.2,384-402).
cttctgaccgataatagat

SEQ ID NO: 54899 - DNA, 19 bp, Homo sapiens
  siRNA target sequence for SRP68 (NM_014230.2,387-405).
ctgaccgataatagatact

SEQ ID NO: 54900 - DNA, 19 bp, Homo sapiens
  siRNA target sequence for SRP68 (NM_014230.2,569-587).
ggatgccaagaccaaatta

SEQ ID NO: 54901 - DNA, 19 bp, Homo sapiens
  siRNA target sequence for SRP68 (NM_014230.2,616-634).
caggaatgctacgttttga

SEQ ID NO: 54902 - DNA, 19 bp, Homo sapiens
  siRNA target sequence for SRP68 (NM_014230.2,619-637).
gaatgctacgttttgaaca

SEQ ID NO: 54903 - DNA, 19 bp, Homo sapiens
  siRNA target sequence for SRP68 (NM_014230.2,623-641).
gctacgttttgaacatcaa

SEQ ID NO: 54904 - DNA, 19 bp, Homo sapiens
  siRNA target sequence for SRP68 (NM_014230.2,627-645).
cgttttgaacatcaagaat

SEQ ID NO: 54905 - DNA, 19 bp, Homo sapiens
  siRNA target sequence for SRP68 (NM_014230.2,651-669).
gctgccattgaggctttta

SEQ ID NO: 54906 - DNA, 19 bp, Homo sapiens
  siRNA target sequence for SRP68 (NM_014230.2,695-713).
gctagccagtgctttcaca

SEQ ID NO: 54907 - DNA, 19 bp, Homo sapiens
  siRNA target sequence for SRP68 (NM_014230.2,764-782).
catccgctattgtgcatat

SEQ ID NO: 54908 - DNA, 19 bp, Homo sapiens
  siRNA target sequence for SRP68 (NM_014230.2,767-785).
ccgctattgtgcatataat

SEQ ID NO: 54909 - DNA, 19 bp, Homo sapiens
  siRNA target sequence for SRP68 (NM_014230.2,768-786).
cgctattgtgcatataata

SEQ ID NO: 54910 - DNA, 19 bp, Homo sapiens
  siRNA target sequence for SRP68 (NM_014230.2,791-809).
ggaccagtcagccatcaat

SEQ ID NO: 54911 - DNA, 19 bp, Homo sapiens
  siRNA target sequence for SRP68 (NM_014230.2,937-955).
gaacggttccagtgaagat

SEQ ID NO: 54912 - DNA, 19 bp, Homo sapiens
  siRNA target sequence for SRP68 (NM_014230.2,957-975).
gacaaagtgcgcattttct

SEQ ID NO: 54913 - DNA, 19 bp, Homo sapiens
  siRNA target sequence for SRP68 (NM_014230.2,965-983).
gcgcattttcttattagga

SEQ ID NO: 54914 - DNA, 19 bp, Homo sapiens
  siRNA target sequence for SRP68 (NM_014230.2,1030-1048).
ctaaggagcgcctgtttga

SEQ ID NO: 54915 - DNA, 19 bp, Homo sapiens
  siRNA target sequence for SRP68 (NM_014230.2,1147-1165).
ggaaggtgtctaatcttca

SEQ ID NO: 54916 - DNA, 19 bp, Homo sapiens
  siRNA target sequence for SRP68 (NM_014230.2,1152-1170).
gtgtctaatcttcaatact

SEQ ID NO: 54917 - DNA, 19 bp, Homo sapiens
  siRNA target sequence for SRP68 (NM_014230.2,1173-1191).
catagctacctgacttaca

SEQ ID NO: 54918 - DNA, 19 bp, Homo sapiens
  siRNA target sequence for SRP68 (NM_014230.2,1204-1222).
cggcaatcaagcgtaatga

SEQ ID NO: 54919 - DNA, 19 bp, Homo sapiens
  siRNA target sequence for SRP68 (NM_014230.2,1206-1224).
gcaatcaagcgtaatgaga

SEQ ID NO: 54920 - DNA, 19 bp, Homo sapiens
  siRNA target sequence for SRP68 (NM_014230.2,1207-1225).
caatcaagcgtaatgagaa

SEQ ID NO: 54921 - DNA, 19 bp, Homo sapiens
  siRNA target sequence for SRP68 (NM_014230.2,1305-1323).
ctgatccgactctatgaca

SEQ ID NO: 54922 - DNA, 19 bp, Homo sapiens
  siRNA target sequence for SRP68 (NM_014230.2,1422-1440).
gcttacaggtgttttttca

SEQ ID NO: 54923 - DNA, 19 bp, Homo sapiens
  siRNA target sequence for SRP68 (NM_014230.2,1530-1548).
gatgctggcgccttcaaga

SEQ ID NO: 54924 - DNA, 19 bp, Homo sapiens
  siRNA target sequence for SRP68 (NM_014230.2,1533-1551).
gctggcgccttcaagaaca

SEQ ID NO: 54925 - DNA, 19 bp, Homo sapiens
  siRNA target sequence for SRP68 (NM_014230.2,1638-1656).
gcaaacgacgctcatcaaa

SEQ ID NO: 54926 - DNA, 19 bp, Homo sapiens
  siRNA target sequence for SRP68 (NM_014230.2,1837-1855).
caccccttgaggacaagtt

SEQ ID NO: 54927 - DNA, 19 bp, Homo sapiens
  siRNA target sequence for SRP68 (NM_014230.2,1875-1893).
ggcctcactggatacatca

SEQ ID NO: 54928 - DNA, 19 bp, Homo sapiens
  siRNA target sequence for SRP68 (NM_014230.2,1876-1894).
gcctcactggatacatcaa

SEQ ID NO: 54929 - DNA, 19 bp, Homo sapiens
  siRNA target sequence for SSA2 (NM_004600.3,262-280).
ccaattctcaggatggata

SEQ ID NO: 54930 - DNA, 19 bp, Homo sapiens
  siRNA target sequence for SSA2 (NM_004600.3,306-324).
cgactacaccggttcttat

SEQ ID NO: 54931 - DNA, 19 bp, Homo sapiens
  siRNA target sequence for SSA2 (NM_004600.3,339-357).
ggtgggacttattatatca

SEQ ID NO: 54932 - DNA, 19 bp, Homo sapiens
  siRNA target sequence for SSA2 (NM_004600.3,340-358).
gtgggacttattatatcaa

SEQ ID NO: 54933 - DNA, 19 bp, Homo sapiens
  siRNA target sequence for SSA2 (NM_004600.3,344-362).
gacttattatatcaaagaa

SEQ ID NO: 54934 - DNA, 19 bp, Homo sapiens
  siRNA target sequence for SSA2 (NM_004600.3,387-405).
gaagctttaattagattga

SEQ ID NO: 54935 - DNA, 19 bp, Homo sapiens
  siRNA target sequence for SSA2 (NM_004600.3,391-409).
ctttaattagattgattga

SEQ ID NO: 54936 - DNA, 19 bp, Homo sapiens
  siRNA target sequence for SSA2 (NM_004600.3,421-439).
gatgtgaagtgatacaaga

SEQ ID NO: 54937 - DNA, 19 bp, Homo sapiens
  siRNA target sequence for SSA2 (NM_004600.3,429-447).
gtgatacaagaaataaagt

SEQ ID NO: 54938 - DNA, 19 bp, Homo sapiens
  siRNA target sequence for SSA2 (NM_004600.3,513-531).
cagtgctccgacataagca

SEQ ID NO: 54939 - DNA, 19 bp, Homo sapiens
  siRNA target sequence for SSA2 (NM_004600.3,518-536).
ctccgacataagcacaaaa

SEQ ID NO: 54940 - DNA, 19 bp, Homo sapiens
  siRNA target sequence for SSA2 (NM_004600.3,521-539).
cgacataagcacaaaacaa

SEQ ID NO: 54941 - DNA, 19 bp, Homo sapiens
  siRNA target sequence for SSA2 (NM_004600.3,561-579).
gaagtttgtcgcattccta

SEQ ID NO: 54942 - DNA, 19 bp, Homo sapiens
  siRNA target sequence for SSA2 (NM_004600.3,742-760).
ggtctcacaaagatctatt

SEQ ID NO: 54943 - DNA, 19 bp, Homo sapiens
  siRNA target sequence for SSA2 (NM_004600.3,789-807).
gaaggacttgcaattgtga

SEQ ID NO: 54944 - DNA, 19 bp, Homo sapiens
  siRNA target sequence for SSA2 (NM_004600.3,799-817).
caattgtgaccaaatatat

SEQ ID NO: 54945 - DNA, 19 bp, Homo sapiens
  siRNA target sequence for SSA2 (NM_004600.3,944-962).
cattcatctaatagaagaa

SEQ ID NO: 54946 - DNA, 19 bp, Homo sapiens
  siRNA target sequence for SSA2 (NM_004600.3,951-969).
ctaatagaagaacatagat

SEQ ID NO: 54947 - DNA, 19 bp, Homo sapiens
  siRNA target sequence for SSA2 (NM_004600.3,972-990).
gttagagaacatcttttaa

SEQ ID NO: 54948 - DNA, 19 bp, Homo sapiens
  siRNA target sequence for SSA2 (NM_004600.3,1040-1058).
gccgcttactgcattacta

SEQ ID NO: 54949 - DNA, 19 bp, Homo sapiens
  siRNA target sequence for SSA2 (NM_004600.3,1041-1059).
ccgcttactgcattactaa

SEQ ID NO: 54950 - DNA, 19 bp, Homo sapiens
  siRNA target sequence for SSA2 (NM_004600.3,1078-1096).
ctgctaattcagtacttga

SEQ ID NO: 54951 - DNA, 19 bp, Homo sapiens
  siRNA target sequence for SSA2 (NM_004600.3,1160-1178).
ggctcgtatacatccattt

SEQ ID NO: 54952 - DNA, 19 bp, Homo sapiens
  siRNA target sequence for SSA2 (NM_004600.3,1162-1180).
ctcgtatacatccatttca

SEQ ID NO: 54953 - DNA, 19 bp, Homo sapiens
  siRNA target sequence for SSA2 (NM_004600.3,1164-1182).
cgtatacatccatttcata

SEQ ID NO: 54954 - DNA, 19 bp, Homo sapiens
  siRNA target sequence for SSA2 (NM_004600.3,1425-1443).
cgaacagaaaaagattctt

SEQ ID NO: 54955 - DNA, 19 bp, Homo sapiens
  siRNA target sequence for SSA2 (NM_004600.3,1453-1471).
ctttttccgatgaaatggt

SEQ ID NO: 54956 - DNA, 19 bp, Homo sapiens
  siRNA target sequence for SSA2 (NM_004600.3,1489-1507).
cagatatgaccttacaaca

SEQ ID NO: 54957 - DNA, 19 bp, Homo sapiens
  siRNA target sequence for SSA2 (NM_004600.3,1496-1514).
gaccttacaacaggtttta

SEQ ID NO: 54958 - DNA, 19 bp, Homo sapiens
  siRNA target sequence for SSA2 (NM_004600.3,1656-1674).
gctctgagggagtatcgaa

SEQ ID NO: 54959 - DNA, 19 bp, Homo sapiens
  siRNA target sequence for SSA2 (NM_004600.3,1657-1675).
ctctgagggagtatcgaaa

SEQ ID NO: 54960 - DNA, 19 bp, Homo sapiens
  siRNA target sequence for SSA2 (NM_004600.3,1661-1679).
gagggagtatcgaaagaaa

SEQ ID NO: 54961 - DNA, 19 bp, Homo sapiens
  siRNA target sequence for SSA2 (NM_004600.3,1663-1681).
gggagtatcgaaagaaaat

SEQ ID NO: 54962 - DNA, 19 bp, Homo sapiens
  siRNA target sequence for SSA2 (NM_004600.3,1749-1767).
gatagaggcatgttggata

SEQ ID NO: 54963 - DNA, 19 bp, Homo sapiens
  siRNA target sequence for SSA2 (NM_004600.3,1764-1782).
gatatgtgcggctttgata

SEQ ID NO: 54964 - DNA, 19 bp, Homo sapiens
  siRNA target sequence for SSA2 (NM_004600.3,1794-1812).
gatgtaattcgaaatttca

SEQ ID NO: 54965 - DNA, 19 bp, Homo sapiens
  siRNA target sequence for SSA2 (NM_004600.3,1803-1821).
cgaaatttcacattagata

SEQ ID NO: 54966 - DNA, 19 bp, Homo sapiens
  siRNA target sequence for SUPV3L1 (NM_003171.2,166-184).
ggttctggggcaagtttct

SEQ ID NO: 54967 - DNA, 19 bp, Homo sapiens
  siRNA target sequence for SUPV3L1 (NM_003171.2,209-227).
gcctccggtggctccaaaa

SEQ ID NO: 54968 - DNA, 19 bp, Homo sapiens
  siRNA target sequence for SUPV3L1 (NM_003171.2,211-229).
ctccggtggctccaaaata

SEQ ID NO: 54969 - DNA, 19 bp, Homo sapiens
  siRNA target sequence for SUPV3L1 (NM_003171.2,419-437).
caagctttcataagcttta

SEQ ID NO: 54970 - DNA, 19 bp, Homo sapiens
  siRNA target sequence for SUPV3L1 (NM_003171.2,422-440).
gctttcataagctttagaa

SEQ ID NO: 54971 - DNA, 19 bp, Homo sapiens
  siRNA target sequence for SUPV3L1 (NM_003171.2,509-527).
gcagctcatgcggatgatt

SEQ ID NO: 54972 - DNA, 19 bp, Homo sapiens
  siRNA target sequence for SUPV3L1 (NM_003171.2,513-531).
ctcatgcggatgatttatt

SEQ ID NO: 54973 - DNA, 19 bp, Homo sapiens
  siRNA target sequence for SUPV3L1 (NM_003171.2,541-559).
cttgagacatgccaaacaa

SEQ ID NO: 54974 - DNA, 19 bp, Homo sapiens
  siRNA target sequence for SUPV3L1 (NM_003171.2,579-597).
gtaaggatgatctacgtaa

SEQ ID NO: 54975 - DNA, 19 bp, Homo sapiens
  siRNA target sequence for SUPV3L1 (NM_003171.2,584-602).
gatgatctacgtaaaatca

SEQ ID NO: 54976 - DNA, 19 bp, Homo sapiens
  siRNA target sequence for SUPV3L1 (NM_003171.2,593-611).
cgtaaaatcagtgacttaa

SEQ ID NO: 54977 - DNA, 19 bp, Homo sapiens
  siRNA target sequence for SUPV3L1 (NM_003171.2,601-619).
cagtgacttaagaatacca

SEQ ID NO: 54978 - DNA, 19 bp, Homo sapiens
  siRNA target sequence for SUPV3L1 (NM_003171.2,644-662).
gccatgcagcggaagataa

SEQ ID NO: 54979 - DNA, 19 bp, Homo sapiens
  siRNA target sequence for SUPV3L1 (NM_003171.2,645-663).
ccatgcagcggaagataat

SEQ ID NO: 54980 - DNA, 19 bp, Homo sapiens
  siRNA target sequence for SUPV3L1 (NM_003171.2,646-664).
catgcagcggaagataata

SEQ ID NO: 54981 - DNA, 19 bp, Homo sapiens
  siRNA target sequence for SUPV3L1 (NM_003171.2,649-667).
gcagcggaagataatattt

SEQ ID NO: 54982 - DNA, 19 bp, Homo sapiens
  siRNA target sequence for SUPV3L1 (NM_003171.2,701-719).
cacgcaatccagaaatact

SEQ ID NO: 54983 - DNA, 19 bp, Homo sapiens
  siRNA target sequence for SUPV3L1 (NM_003171.2,704-722).
gcaatccagaaatacttct

SEQ ID NO: 54984 - DNA, 19 bp, Homo sapiens
  siRNA target sequence for SUPV3L1 (NM_003171.2,764-782).
gcacatgagatcttcgaaa

SEQ ID NO: 54985 - DNA, 19 bp, Homo sapiens
  siRNA target sequence for SUPV3L1 (NM_003171.2,765-783).
cacatgagatcttcgaaaa

SEQ ID NO: 54986 - DNA, 19 bp, Homo sapiens
  siRNA target sequence for SUPV3L1 (NM_003171.2,767-785).
catgagatcttcgaaaaga

SEQ ID NO: 54987 - DNA, 19 bp, Homo sapiens
  siRNA target sequence for SUPV3L1 (NM_003171.2,859-877).
ggcttcacatgtttcttgt

SEQ ID NO: 54988 - DNA, 19 bp, Homo sapiens
  siRNA target sequence for SUPV3L1 (NM_003171.2,884-902).
gagatgtgcagtgttacaa

SEQ ID NO: 54989 - DNA, 19 bp, Homo sapiens
  siRNA target sequence for SUPV3L1 (NM_003171.2,886-904).
gatgtgcagtgttacaact

SEQ ID NO: 54990 - DNA, 19 bp, Homo sapiens
  siRNA target sequence for SUPV3L1 (NM_003171.2,892-910).
cagtgttacaactccttat

SEQ ID NO: 54991 - DNA, 19 bp, Homo sapiens
  siRNA target sequence for SUPV3L1 (NM_003171.2,967-985).
ctggaccagagcacttcta

SEQ ID NO: 54992 - DNA, 19 bp, Homo sapiens
  siRNA target sequence for SUPV3L1 (NM_003171.2,993-1011).
gtgctgaagaggttcattt

SEQ ID NO: 54993 - DNA, 19 bp, Homo sapiens
  siRNA target sequence for SUPV3L1 (NM_003171.2,1073-1091).
gtggaggttcgagactata

SEQ ID NO: 54994 - DNA, 19 bp, Homo sapiens
  siRNA target sequence for SUPV3L1 (NM_003171.2,1076-1094).
gaggttcgagactataaga

SEQ ID NO: 54995 - DNA, 19 bp, Homo sapiens
  siRNA target sequence for SUPV3L1 (NM_003171.2,1117-1135).
ggaccatgcactagaatct

SEQ ID NO: 54996 - DNA, 19 bp, Homo sapiens
  siRNA target sequence for SUPV3L1 (NM_003171.2,1118-1136).
gaccatgcactagaatctt

SEQ ID NO: 54997 - DNA, 19 bp, Homo sapiens
  siRNA target sequence for SUPV3L1 (NM_003171.2,1151-1169).
cctggggactgcattgtct

SEQ ID NO: 54998 - DNA, 19 bp, Homo sapiens
  siRNA target sequence for SUPV3L1 (NM_003171.2,1155-1173).
gggactgcattgtctgttt

SEQ ID NO: 54999 - DNA, 19 bp, Homo sapiens
  siRNA target sequence for SUPV3L1 (NM_003171.2,1156-1174).
ggactgcattgtctgtttt

SEQ ID NO: 55000 - DNA, 19 bp, Homo sapiens
  siRNA target sequence for SUPV3L1 (NM_003171.2,1157-1175).
gactgcattgtctgtttta

SEQ ID NO: 55001 - DNA, 19 bp, Homo sapiens
  siRNA target sequence for SUPV3L1 (NM_003171.2,1194-1212).
ctgtgagtcggcagattga

SEQ ID NO: 55002 - DNA, 19 bp, Homo sapiens
  siRNA target sequence for SUPV3L1 (NM_003171.2,1196-1214).
gtgagtcggcagattgaaa

SEQ ID NO: 55003 - DNA, 19 bp, Homo sapiens
  siRNA target sequence for SUPV3L1 (NM_003171.2,1198-1216).
gagtcggcagattgaaatt

SEQ ID NO: 55004 - DNA, 19 bp, Homo sapiens
  siRNA target sequence for SUPV3L1 (NM_003171.2,1295-1313).
cccaatgacccatgcaaaa

SEQ ID NO: 55005 - DNA, 19 bp, Homo sapiens
  siRNA target sequence for SUPV3L1 (NM_003171.2,1354-1372).
gagcataaggagaattatt

SEQ ID NO: 55006 - DNA, 19 bp, Homo sapiens
  siRNA target sequence for SUPV3L1 (NM_003171.2,1382-1400).
cttataaagcccagtatca

SEQ ID NO: 55007 - DNA, 19 bp, Homo sapiens
  siRNA target sequence for SUPV3L1 (NM_003171.2,1473-1491).
gattcagctcacggtttaa

SEQ ID NO: 55008 - DNA, 19 bp, Homo sapiens
  siRNA target sequence for SUPV3L1 (NM_003171.2,1506-1524).
caacaatgaatcatgaaga

SEQ ID NO: 55009 - DNA, 19 bp, Homo sapiens
  siRNA target sequence for SUPV3L1 (NM_003171.2,1517-1535).
catgaagatctcagtttat

SEQ ID NO: 55010 - DNA, 19 bp, Homo sapiens
  siRNA target sequence for SUPV3L1 (NM_003171.2,1552-1570).
gaggcctgtggatcctata

SEQ ID NO: 55011 - DNA, 19 bp, Homo sapiens
  siRNA target sequence for SUPV3L1 (NM_003171.2,1634-1652).
gcaacactgtccaatctca

SEQ ID NO: 55012 - DNA, 19 bp, Homo sapiens
  siRNA target sequence for SUPV3L1 (NM_003171.2,1638-1656).
cactgtccaatctcattga

SEQ ID NO: 55013 - DNA, 19 bp, Homo sapiens
  siRNA target sequence for SUPV3L1 (NM_003171.2,1640-1658).
ctgtccaatctcattgata

SEQ ID NO: 55014 - DNA, 19 bp, Homo sapiens
  siRNA target sequence for SUPV3L1 (NM_003171.2,1642-1660).
gtccaatctcattgatatt

SEQ ID NO: 55015 - DNA, 19 bp, Homo sapiens
  siRNA target sequence for SUPV3L1 (NM_003171.2,1645-1663).
caatctcattgatattttt

SEQ ID NO: 55016 - DNA, 19 bp, Homo sapiens
  siRNA target sequence for SUPV3L1 (NM_003171.2,1676-1694).
caagttgatgggcagtatt

SEQ ID NO: 55017 - DNA, 19 bp, Homo sapiens
  siRNA target sequence for SUPV3L1 (NM_003171.2,1682-1700).
gatgggcagtattttgtct

SEQ ID NO: 55018 - DNA, 19 bp, Homo sapiens
  siRNA target sequence for SUPV3L1 (NM_003171.2,1699-1717).
ctgcaatatggatgatttt

SEQ ID NO: 55019 - DNA, 19 bp, Homo sapiens
  siRNA target sequence for SUPV3L1 (NM_003171.2,1760-1778).
cgagtgaggtatgttttct

SEQ ID NO: 55020 - DNA, 19 bp, Homo sapiens
  siRNA target sequence for SUPV3L1 (NM_003171.2,1779-1797).
gcacagctcctatcaacaa

SEQ ID NO: 55021 - DNA, 19 bp, Homo sapiens
  siRNA target sequence for SUPV3L1 (NM_003171.2,1815-1833).
gttcttcactgttacagtt

SEQ ID NO: 55022 - DNA, 19 bp, Homo sapiens
  siRNA target sequence for SUPV3L1 (NM_003171.2,1861-1879).
cctgacctttgcatggtta

SEQ ID NO: 55023 - DNA, 19 bp, Homo sapiens
  siRNA target sequence for SUPV3L1 (NM_003171.2,1872-1890).
catggttacgccgatacat

SEQ ID NO: 55024 - DNA, 19 bp, Homo sapiens
  siRNA target sequence for SUPV3L1 (NM_003171.2,1875-1893).
ggttacgccgatacatcaa

SEQ ID NO: 55025 - DNA, 19 bp, Homo sapiens
  siRNA target sequence for SUPV3L1 (NM_003171.2,1876-1894).
gttacgccgatacatcaaa

SEQ ID NO: 55026 - DNA, 19 bp, Homo sapiens
  siRNA target sequence for SUPV3L1 (NM_003171.2,1949-1967).
cacgatgtcttggatcttt

SEQ ID NO: 55027 - DNA, 19 bp, Homo sapiens
  siRNA target sequence for SUPV3L1 (NM_003171.2,1952-1970).
gatgtcttggatctttact

SEQ ID NO: 55028 - DNA, 19 bp, Homo sapiens
  siRNA target sequence for SUPV3L1 (NM_003171.2,1974-1992).
ggctaagctaccgatttat

SEQ ID NO: 55029 - DNA, 19 bp, Homo sapiens
  siRNA target sequence for SUPV3L1 (NM_003171.2,1980-1998).
gctaccgatttatggatat

SEQ ID NO: 55030 - DNA, 19 bp, Homo sapiens
  siRNA target sequence for SUPV3L1 (NM_003171.2,1984-2002).
ccgatttatggatatgttt

SEQ ID NO: 55031 - DNA, 19 bp, Homo sapiens
  siRNA target sequence for SUPV3L1 (NM_003171.2,2060-2078).
ggtgtgcacaatatcacta

SEQ ID NO: 55032 - DNA, 19 bp, Homo sapiens
  siRNA target sequence for SUPV3L1 (NM_003171.2,2061-2079).
gtgtgcacaatatcactaa

SEQ ID NO: 55033 - DNA, 19 bp, Homo sapiens
  siRNA target sequence for SUPV3L1 (NM_003171.2,2063-2081).
gtgcacaatatcactaaat

SEQ ID NO: 55034 - DNA, 19 bp, Homo sapiens
  siRNA target sequence for SUPV3L1 (NM_003171.2,2066-2084).
cacaatatcactaaattga

SEQ ID NO: 55035 - DNA, 19 bp, Homo sapiens
  siRNA target sequence for SUPV3L1 (NM_003171.2,2098-2116).
gacgcataagctgttgaat

SEQ ID NO: 55036 - DNA, 19 bp, Homo sapiens
  siRNA target sequence for SUPV3L1 (NM_003171.2,2100-2118).
cgcataagctgttgaattt

SEQ ID NO: 55037 - DNA, 19 bp, Homo sapiens
  siRNA target sequence for SUPV3L1 (NM_003171.2,2137-2155).
gagccagtcacgattgtca

SEQ ID NO: 55038 - DNA, 19 bp, Homo sapiens
  siRNA target sequence for SUPV3L1 (NM_003171.2,2147-2165).
cgattgtcaggaaccttaa

SEQ ID NO: 55039 - DNA, 19 bp, Homo sapiens
  siRNA target sequence for SUPV3L1 (NM_003171.2,2148-2166).
gattgtcaggaaccttaaa

SEQ ID NO: 55040 - DNA, 19 bp, Homo sapiens
  siRNA target sequence for SUPV3L1 (NM_003171.2,2194-2212).
caaagctctagggagtaaa

SEQ ID NO: 55041 - DNA, 19 bp, Homo sapiens
  siRNA target sequence for SUPV3L1 (NM_003171.2,2317-2335).
gtggatgacacaacaaact

SEQ ID NO: 55042 - DNA, 19 bp, Homo sapiens
  siRNA target sequence for SUPV3L1 (NM_003171.2,2319-2337).
ggatgacacaacaaactga

SEQ ID NO: 55043 - DNA, 19 bp, Homo sapiens
  siRNA target sequence for SUPV3L1 (NM_003171.2,2320-2338).
gatgacacaacaaactgaa

SEQ ID NO: 55044 - DNA, 19 bp, Homo sapiens
  siRNA target sequence for SUPV3L1 (NM_003171.2,2359-2377).
gtctgggactcatccaaaa

SEQ ID NO: 55045 - DNA, 19 bp, Homo sapiens
  siRNA target sequence for SURF6 (NM_006753.3,428-446).
gacagcgactgcatgagaa

SEQ ID NO: 55046 - DNA, 19 bp, Homo sapiens
  siRNA target sequence for SURF6 (NM_006753.3,490-508).
cctgccgccttggagaaaa

SEQ ID NO: 55047 - DNA, 19 bp, Homo sapiens
  siRNA target sequence for SURF6 (NM_006753.3,665-683).
ggctgatcttcaataaggt

SEQ ID NO: 55048 - DNA, 19 bp, Homo sapiens
  siRNA target sequence for SURF6 (NM_006753.3,715-733).
gcgcagcgcagaaaagaga

SEQ ID NO: 55049 - DNA, 19 bp, Homo sapiens
  siRNA target sequence for SURF6 (NM_006753.3,884-902).
ggaccaacctcctctacaa

SEQ ID NO: 55050 - DNA, 19 bp, Homo sapiens
  siRNA target sequence for SYNCRIP (NM_006372.3,528-546).
ggctacagaacatgttaat

SEQ ID NO: 55051 - DNA, 19 bp, Homo sapiens
  siRNA target sequence for SYNCRIP (NM_006372.3,559-577).
gaagagcccatggatacta

SEQ ID NO: 55052 - DNA, 19 bp, Homo sapiens
  siRNA target sequence for SYNCRIP (NM_006372.3,564-582).
gcccatggatactacttct

SEQ ID NO: 55053 - DNA, 19 bp, Homo sapiens
  siRNA target sequence for SYNCRIP (NM_006372.3,674-692).
ggctagttgcacatagtga

SEQ ID NO: 55054 - DNA, 19 bp, Homo sapiens
  siRNA target sequence for SYNCRIP (NM_006372.3,675-693).
gctagttgcacatagtgat

SEQ ID NO: 55055 - DNA, 19 bp, Homo sapiens
  siRNA target sequence for SYNCRIP (NM_006372.3,743-761).
cattggcagttcttcaaca

SEQ ID NO: 55056 - DNA, 19 bp, Homo sapiens
  siRNA target sequence for SYNCRIP (NM_006372.3,747-765).
ggcagttcttcaacagttt

SEQ ID NO: 55057 - DNA, 19 bp, Homo sapiens
  siRNA target sequence for SYNCRIP (NM_006372.3,773-791).
gtgatctctctcatgttca

SEQ ID NO: 55058 - DNA, 19 bp, Homo sapiens
  siRNA target sequence for SYNCRIP (NM_006372.3,852-870).
gaccaaagtagcagattct

SEQ ID NO: 55059 - DNA, 19 bp, Homo sapiens
  siRNA target sequence for SYNCRIP (NM_006372.3,917-935).
caggctacacacttgatgt

SEQ ID NO: 55060 - DNA, 19 bp, Homo sapiens
  siRNA target sequence for SYNCRIP (NM_006372.3,1050-1068).
ggatgaacttgttccatta

SEQ ID NO: 55061 - DNA, 19 bp, Homo sapiens
  siRNA target sequence for SYNCRIP (NM_006372.3,1136-1154).
gttatgcgtttgtcacttt

SEQ ID NO: 55062 - DNA, 19 bp, Homo sapiens
  siRNA target sequence for SYNCRIP (NM_006372.3,1169-1187).
cagctcaggaggctgttaa

SEQ ID NO: 55063 - DNA, 19 bp, Homo sapiens
  siRNA target sequence for SYNCRIP (NM_006372.3,1176-1194).
ggaggctgttaaactgtat

SEQ ID NO: 55064 - DNA, 19 bp, Homo sapiens
  siRNA target sequence for SYNCRIP (NM_006372.3,1177-1195).
gaggctgttaaactgtata

SEQ ID NO: 55065 - DNA, 19 bp, Homo sapiens
  siRNA target sequence for SYNCRIP (NM_006372.3,1179-1197).
ggctgttaaactgtataat

SEQ ID NO: 55066 - DNA, 19 bp, Homo sapiens
  siRNA target sequence for SYNCRIP (NM_006372.3,1180-1198).
gctgttaaactgtataata

SEQ ID NO: 55067 - DNA, 19 bp, Homo sapiens
  siRNA target sequence for SYNCRIP (NM_006372.3,1247-1265).
ccaacaataggctttttgt

SEQ ID NO: 55068 - DNA, 19 bp, Homo sapiens
  siRNA target sequence for SYNCRIP (NM_006372.3,1267-1285).
ggctctattcctaagagta

SEQ ID NO: 55069 - DNA, 19 bp, Homo sapiens
  siRNA target sequence for SYNCRIP (NM_006372.3,1330-1348).
ggtcttacagacgtcattt

SEQ ID NO: 55070 - DNA, 19 bp, Homo sapiens
  siRNA target sequence for SYNCRIP (NM_006372.3,1333-1351).
cttacagacgtcattttat

SEQ ID NO: 55071 - DNA, 19 bp, Homo sapiens
  siRNA target sequence for SYNCRIP (NM_006372.3,1357-1375).
caaccggatgacaagaaaa

SEQ ID NO: 55072 - DNA, 19 bp, Homo sapiens
  siRNA target sequence for SYNCRIP (NM_006372.3,1425-1443).
ccaggcaaggcgtaggtta

SEQ ID NO: 55073 - DNA, 19 bp, Homo sapiens
  siRNA target sequence for SYNCRIP (NM_006372.3,1426-1444).
caggcaaggcgtaggttaa

SEQ ID NO: 55074 - DNA, 19 bp, Homo sapiens
  siRNA target sequence for SYNCRIP (NM_006372.3,1429-1447).
gcaaggcgtaggttaatga

SEQ ID NO: 55075 - DNA, 19 bp, Homo sapiens
  siRNA target sequence for SYNCRIP (NM_006372.3,1458-1476).
caaggtctgggggaatgtt

SEQ ID NO: 55076 - DNA, 19 bp, Homo sapiens
  siRNA target sequence for SYNCRIP (NM_006372.3,1519-1537).
gaggttatggcaaaggtaa

SEQ ID NO: 55077 - DNA, 19 bp, Homo sapiens
  siRNA target sequence for SYNCRIP (NM_006372.3,1553-1571).
gcaaccttgccaatactgt

SEQ ID NO: 55078 - DNA, 19 bp, Homo sapiens
  siRNA target sequence for SYNCRIP (NM_006372.3,1646-1664).
cgttcattcattttgatga

SEQ ID NO: 55079 - DNA, 19 bp, Homo sapiens
  siRNA target sequence for SYNJ1 (NM_003895.1,60-78).
gattccggatctatcacaa

SEQ ID NO: 55080 - DNA, 19 bp, Homo sapiens
  siRNA target sequence for SYNJ1 (NM_003895.1,109-127).
ggaaactaggcataaggaa

SEQ ID NO: 55081 - DNA, 19 bp, Homo sapiens
  siRNA target sequence for SYNJ1 (NM_003895.1,185-203).
gcaatcaagggtacatact

SEQ ID NO: 55082 - DNA, 19 bp, Homo sapiens
  siRNA target sequence for SYNJ1 (NM_003895.1,193-211).
gggtacatactccaaagta

SEQ ID NO: 55083 - DNA, 19 bp, Homo sapiens
  siRNA target sequence for SYNJ1 (NM_003895.1,195-213).
gtacatactccaaagtact

SEQ ID NO: 55084 - DNA, 19 bp, Homo sapiens
  siRNA target sequence for SYNJ1 (NM_003895.1,205-223).
caaagtactggatgcatat

SEQ ID NO: 55085 - DNA, 19 bp, Homo sapiens
  siRNA target sequence for SYNJ1 (NM_003895.1,214-232).
ggatgcatatggactctta

SEQ ID NO: 55086 - DNA, 19 bp, Homo sapiens
  siRNA target sequence for SYNJ1 (NM_003895.1,234-252).
gtgttctgcggttaaatct

SEQ ID NO: 55087 - DNA, 19 bp, Homo sapiens
  siRNA target sequence for SYNJ1 (NM_003895.1,244-262).
gttaaatcttggtgatact

SEQ ID NO: 55088 - DNA, 19 bp, Homo sapiens
  siRNA target sequence for SYNJ1 (NM_003895.1,281-299).
ctagtcactggatgtatgt

SEQ ID NO: 55089 - DNA, 19 bp, Homo sapiens
  siRNA target sequence for SYNJ1 (NM_003895.1,323-341).
gaagttttccgagttactt

SEQ ID NO: 55090 - DNA, 19 bp, Homo sapiens
  siRNA target sequence for SYNJ1 (NM_003895.1,361-379).
gcgaatcgattcttcagat

SEQ ID NO: 55091 - DNA, 19 bp, Homo sapiens
  siRNA target sequence for SYNJ1 (NM_003895.1,447-465).
ctggcatcagtttagattt

SEQ ID NO: 55092 - DNA, 19 bp, Homo sapiens
  siRNA target sequence for SYNJ1 (NM_003895.1,501-519).
caactgataatagattttt

SEQ ID NO: 55093 - DNA, 19 bp, Homo sapiens
  siRNA target sequence for SYNJ1 (NM_003895.1,520-538).
ctggaatcagtctttgcat

SEQ ID NO: 55094 - DNA, 19 bp, Homo sapiens
  siRNA target sequence for SYNJ1 (NM_003895.1,638-656).
gcgaaggcttgcctcattt

SEQ ID NO: 55095 - DNA, 19 bp, Homo sapiens
  siRNA target sequence for SYNJ1 (NM_003895.1,640-658).
gaaggcttgcctcatttca

SEQ ID NO: 55096 - DNA, 19 bp, Homo sapiens
  siRNA target sequence for SYNJ1 (NM_003895.1,644-662).
gcttgcctcatttcaagat

SEQ ID NO: 55097 - DNA, 19 bp, Homo sapiens
  siRNA target sequence for SYNJ1 (NM_003895.1,645-663).
cttgcctcatttcaagatt

SEQ ID NO: 55098 - DNA, 19 bp, Homo sapiens
  siRNA target sequence for SYNJ1 (NM_003895.1,674-692).
cgagctgggaccaggttta

SEQ ID NO: 55099 - DNA, 19 bp, Homo sapiens
  siRNA target sequence for SYNJ1 (NM_003895.1,697-715).
ccggggaacaaatgatgat

SEQ ID NO: 55100 - DNA, 19 bp, Homo sapiens
  siRNA target sequence for SYNJ1 (NM_003895.1,717-735).
gtcatgttgccaattttgt

SEQ ID NO: 55101 - DNA, 19 bp, Homo sapiens
  siRNA target sequence for SYNJ1 (NM_003895.1,741-759).
cagaacaggttgtgtactt

SEQ ID NO: 55102 - DNA, 19 bp, Homo sapiens
  siRNA target sequence for SYNJ1 (NM_003895.1,757-775).
cttagatgactcagtttct

SEQ ID NO: 55103 - DNA, 19 bp, Homo sapiens
  siRNA target sequence for SYNJ1 (NM_003895.1,792-810).
gaggatctgttccattgtt

SEQ ID NO: 55104 - DNA, 19 bp, Homo sapiens
  siRNA target sequence for SYNJ1 (NM_003895.1,826-844).
gttgcaagtgggatctcat

SEQ ID NO: 55105 - DNA, 19 bp, Homo sapiens
  siRNA target sequence for SYNJ1 (NM_003895.1,842-860).
catcgtgtccgtatgtcaa

SEQ ID NO: 55106 - DNA, 19 bp, Homo sapiens
  siRNA target sequence for SYNJ1 (NM_003895.1,892-910).
caggcattttagaacactt

SEQ ID NO: 55107 - DNA, 19 bp, Homo sapiens
  siRNA target sequence for SYNJ1 (NM_003895.1,896-914).
cattttagaacacttaaga

SEQ ID NO: 55108 - DNA, 19 bp, Homo sapiens
  siRNA target sequence for SYNJ1 (NM_003895.1,903-921).
gaacacttaagaacttata

SEQ ID NO: 55109 - DNA, 19 bp, Homo sapiens
  siRNA target sequence for SYNJ1 (NM_003895.1,908-926).
cttaagaacttatatggta

SEQ ID NO: 55110 - DNA, 19 bp, Homo sapiens
  siRNA target sequence for SYNJ1 (NM_003895.1,962-980).
ggtgaacatatgctaagta

SEQ ID NO: 55111 - DNA, 19 bp, Homo sapiens
  siRNA target sequence for SYNJ1 (NM_003895.1,968-986).
catatgctaagtaaagctt

SEQ ID NO: 55112 - DNA, 19 bp, Homo sapiens
  siRNA target sequence for SYNJ1 (NM_003895.1,1008-1026).
ctgaacatgctgctgatat

SEQ ID NO: 55113 - DNA, 19 bp, Homo sapiens
  siRNA target sequence for SYNJ1 (NM_003895.1,1022-1040).
gatatccagatggtgaatt

SEQ ID NO: 55114 - DNA, 19 bp, Homo sapiens
  siRNA target sequence for SYNJ1 (NM_003895.1,1033-1051).
ggtgaattttgactatcat

SEQ ID NO: 55115 - DNA, 19 bp, Homo sapiens
  siRNA target sequence for SYNJ1 (NM_003895.1,1036-1054).
gaattttgactatcatcaa

SEQ ID NO: 55116 - DNA, 19 bp, Homo sapiens
  siRNA target sequence for SYNJ1 (NM_003895.1,1043-1061).
gactatcatcaaatggtta

SEQ ID NO: 55117 - DNA, 19 bp, Homo sapiens
  siRNA target sequence for SYNJ1 (NM_003895.1,1170-1188).
gtggtacagttcgaacaaa

SEQ ID NO: 55118 - DNA, 19 bp, Homo sapiens
  siRNA target sequence for SYNJ1 (NM_003895.1,1172-1190).
ggtacagttcgaacaaact

SEQ ID NO: 55119 - DNA, 19 bp, Homo sapiens
  siRNA target sequence for SYNJ1 (NM_003895.1,1181-1199).
cgaacaaactgcttggatt

SEQ ID NO: 55120 - DNA, 19 bp, Homo sapiens
  siRNA target sequence for SYNJ1 (NM_003895.1,1189-1207).
ctgcttggattgtcttgat

SEQ ID NO: 55121 - DNA, 19 bp, Homo sapiens
  siRNA target sequence for SYNJ1 (NM_003895.1,1261-1279).
ggaagctcttggtttagct

SEQ ID NO: 55122 - DNA, 19 bp, Homo sapiens
  siRNA target sequence for SYNJ1 (NM_003895.1,1291-1309).
gttggtgactcgctttcaa

SEQ ID NO: 55123 - DNA, 19 bp, Homo sapiens
  siRNA target sequence for SYNJ1 (NM_003895.1,1294-1312).
ggtgactcgctttcaagaa

SEQ ID NO: 55124 - DNA, 19 bp, Homo sapiens
  siRNA target sequence for SYNJ1 (NM_003895.1,1297-1315).
gactcgctttcaagaagtt

SEQ ID NO: 55125 - DNA, 19 bp, Homo sapiens
  siRNA target sequence for SYNJ1 (NM_003895.1,1299-1317).
ctcgctttcaagaagtttt

SEQ ID NO: 55126 - DNA, 19 bp, Homo sapiens
  siRNA target sequence for SYNJ1 (NM_003895.1,1310-1328).
gaagtttttcggtcaatgt

SEQ ID NO: 55127 - DNA, 19 bp, Homo sapiens
  siRNA target sequence for SYNJ1 (NM_003895.1,1330-1348).
gtccgtgaatggtgattca

SEQ ID NO: 55128 - DNA, 19 bp, Homo sapiens
  siRNA target sequence for SYNJ1 (NM_003895.1,1340-1358).
ggtgattcaatcagtaaga

SEQ ID NO: 55129 - DNA, 19 bp, Homo sapiens
  siRNA target sequence for SYNJ1 (NM_003895.1,1403-1421).
gatggtgctcgctctgtta

SEQ ID NO: 55130 - DNA, 19 bp, Homo sapiens
  siRNA target sequence for SYNJ1 (NM_003895.1,1416-1434).
ctgttacccgaacaattca

SEQ ID NO: 55131 - DNA, 19 bp, Homo sapiens
  siRNA target sequence for SYNJ1 (NM_003895.1,1418-1436).
gttacccgaacaattcaga

SEQ ID NO: 55132 - DNA, 19 bp, Homo sapiens
  siRNA target sequence for SYNJ1 (NM_003895.1,1422-1440).
cccgaacaattcagaataa

SEQ ID NO: 55133 - DNA, 19 bp, Homo sapiens
  siRNA target sequence for SYNJ1 (NM_003895.1,1459-1477).
gcaagaggccattgatgtt

SEQ ID NO: 55134 - DNA, 19 bp, Homo sapiens
  siRNA target sequence for SYNJ1 (NM_003895.1,1486-1504).
gggaaatactctgaatagt

SEQ ID NO: 55135 - DNA, 19 bp, Homo sapiens
  siRNA target sequence for SYNJ1 (NM_003895.1,1488-1506).
gaaatactctgaatagtga

SEQ ID NO: 55136 - DNA, 19 bp, Homo sapiens
  siRNA target sequence for SYNJ1 (NM_003895.1,1516-1534).
caaagctcgagcactttta

SEQ ID NO: 55137 - DNA, 19 bp, Homo sapiens
  siRNA target sequence for SYNJ1 (NM_003895.1,1520-1538).
gctcgagcacttttaacta

SEQ ID NO: 55138 - DNA, 19 bp, Homo sapiens
  siRNA target sequence for SYNJ1 (NM_003895.1,1577-1595).
gcatcttctaaagtactaa

SEQ ID NO: 55139 - DNA, 19 bp, Homo sapiens
  siRNA target sequence for SYNJ1 (NM_003895.1,1682-1700).
caatttcgcagcatagctt

SEQ ID NO: 55140 - DNA, 19 bp, Homo sapiens
  siRNA target sequence for SYNJ1 (NM_003895.1,1692-1710).
gcatagcttttaagaatca

SEQ ID NO: 55141 - DNA, 19 bp, Homo sapiens
  siRNA target sequence for SYNJ1 (NM_003895.1,1759-1777).
ggagtttcaagataaaaga

SEQ ID NO: 55142 - DNA, 19 bp, Homo sapiens
  siRNA target sequence for SYNJ1 (NM_003895.1,1776-1794).
gaagtaagccaactgatat

SEQ ID NO: 55143 - DNA, 19 bp, Homo sapiens
  siRNA target sequence for SYNJ1 (NM_003895.1,1779-1797).
gtaagccaactgatatatt

SEQ ID NO: 55144 - DNA, 19 bp, Homo sapiens
  siRNA target sequence for SYNJ1 (NM_003895.1,1783-1801).
gccaactgatatatttgca

SEQ ID NO: 55145 - DNA, 19 bp, Homo sapiens
  siRNA target sequence for SYNJ1 (NM_003895.1,1784-1802).
ccaactgatatatttgcaa

SEQ ID NO: 55146 - DNA, 19 bp, Homo sapiens
  siRNA target sequence for SYNJ1 (NM_003895.1,1785-1803).
caactgatatatttgcaat

SEQ ID NO: 55147 - DNA, 19 bp, Homo sapiens
  siRNA target sequence for SYNJ1 (NM_003895.1,1800-1818).
caattggttttgaagaaat

SEQ ID NO: 55148 - DNA, 19 bp, Homo sapiens
  siRNA target sequence for SYNJ1 (NM_003895.1,1867-1885).
gaagctctgggctgtagaa

SEQ ID NO: 55149 - DNA, 19 bp, Homo sapiens
  siRNA target sequence for SYNJ1 (NM_003895.1,1875-1893).
gggctgtagaacttcagaa

SEQ ID NO: 55150 - DNA, 19 bp, Homo sapiens
  siRNA target sequence for SYNJ1 (NM_003895.1,1942-1960).
ggtgggcgtctgtttgttt

SEQ ID NO: 55151 - DNA, 19 bp, Homo sapiens
  siRNA target sequence for SYNJ1 (NM_003895.1,1973-1991).
ccacagcatgctcctttta

SEQ ID NO: 55152 - DNA, 19 bp, Homo sapiens
  siRNA target sequence for SYNJ1 (NM_003895.1,1993-2011).
cagggatgttgcagttgat

SEQ ID NO: 55153 - DNA, 19 bp, Homo sapiens
  siRNA target sequence for SYNJ1 (NM_003895.1,2066-2084).
cgaatgctcttccatacaa

SEQ ID NO: 55154 - DNA, 19 bp, Homo sapiens
  siRNA target sequence for SYNJ1 (NM_003895.1,2168-2186).
cgaaaattgagttttccta

SEQ ID NO: 55155 - DNA, 19 bp, Homo sapiens
  siRNA target sequence for SYNJ1 (NM_003895.1,2254-2272).
ccctaacgaagaagttaaa

SEQ ID NO: 55156 - DNA, 19 bp, Homo sapiens
  siRNA target sequence for SYNJ1 (NM_003895.1,2275-2293).
gctcataagacagcaaaat

SEQ ID NO: 55157 - DNA, 19 bp, Homo sapiens
  siRNA target sequence for SYNJ1 (NM_003895.1,2276-2294).
ctcataagacagcaaaatt

SEQ ID NO: 55158 - DNA, 19 bp, Homo sapiens
  siRNA target sequence for SYNJ1 (NM_003895.1,2309-2327).
gcaggagatcaacttatca

SEQ ID NO: 55159 - DNA, 19 bp, Homo sapiens
  siRNA target sequence for SYNJ1 (NM_003895.1,2310-2328).
caggagatcaacttatcaa

SEQ ID NO: 55160 - DNA, 19 bp, Homo sapiens
  siRNA target sequence for SYNJ1 (NM_003895.1,2313-2331).
gagatcaacttatcaatca

SEQ ID NO: 55161 - DNA, 19 bp, Homo sapiens
  siRNA target sequence for SYNJ1 (NM_003895.1,2379-2397).
cctttgctccgacatataa

SEQ ID NO: 55162 - DNA, 19 bp, Homo sapiens
  siRNA target sequence for SYNJ1 (NM_003895.1,2388-2406).
cgacatataagtatgactt

SEQ ID NO: 55163 - DNA, 19 bp, Homo sapiens
  siRNA target sequence for SYNJ1 (NM_003895.1,2391-2409).
catataagtatgacttgtt

SEQ ID NO: 55164 - DNA, 19 bp, Homo sapiens
  siRNA target sequence for SYNJ1 (NM_003895.1,2507-2525).
gaagatctagatcttctaa

SEQ ID NO: 55165 - DNA, 19 bp, Homo sapiens
  siRNA target sequence for SYNJ1 (NM_003895.1,2513-2531).
ctagatcttctaaatgcta

SEQ ID NO: 55166 - DNA, 19 bp, Homo sapiens
  siRNA target sequence for SYNJ1 (NM_003895.1,2625-2643).
ctgtcgttgccctgattga

SEQ ID NO: 55167 - DNA, 19 bp, Homo sapiens
  siRNA target sequence for SYNJ1 (NM_003895.1,2627-2645).
gtcgttgccctgattgata

SEQ ID NO: 55168 - DNA, 19 bp, Homo sapiens
  siRNA target sequence for SYNJ1 (NM_003895.1,2629-2647).
cgttgccctgattgatata

SEQ ID NO: 55169 - DNA, 19 bp, Homo sapiens
  siRNA target sequence for SYNJ1 (NM_003895.1,2669-2687).
gaagagaggcaaaacattt

SEQ ID NO: 55170 - DNA, 19 bp, Homo sapiens
  siRNA target sequence for SYNJ1 (NM_003895.1,2714-2732).
ccaccagatggtacagtat

SEQ ID NO: 55171 - DNA, 19 bp, Homo sapiens
  siRNA target sequence for SYNJ1 (NM_003895.1,2718-2736).
cagatggtacagtattggt

SEQ ID NO: 55172 - DNA, 19 bp, Homo sapiens
  siRNA target sequence for SYNJ1 (NM_003895.1,2734-2752).
ggtctcaatcaaaagttct

SEQ ID NO: 55173 - DNA, 19 bp, Homo sapiens
  siRNA target sequence for SYNJ1 (NM_003895.1,2735-2753).
gtctcaatcaaaagttctt

SEQ ID NO: 55174 - DNA, 19 bp, Homo sapiens
  siRNA target sequence for SYNJ1 (NM_003895.1,2810-2828).
gcaagttttggtgaagtta

SEQ ID NO: 55175 - DNA, 19 bp, Homo sapiens
  siRNA target sequence for SYNJ1 (NM_003895.1,2814-2832).
gttttggtgaagttatact

SEQ ID NO: 55176 - DNA, 19 bp, Homo sapiens
  siRNA target sequence for SYNJ1 (NM_003895.1,2890-2908).
gaatgttctgagcctaaat

SEQ ID NO: 55177 - DNA, 19 bp, Homo sapiens
  siRNA target sequence for SYNJ1 (NM_003895.1,2901-2919).
gcctaaatggtaaagagtt

SEQ ID NO: 55178 - DNA, 19 bp, Homo sapiens
  siRNA target sequence for SYNJ1 (NM_003895.1,2902-2920).
cctaaatggtaaagagtta

SEQ ID NO: 55179 - DNA, 19 bp, Homo sapiens
  siRNA target sequence for SYNJ1 (NM_003895.1,2917-2935).
gttattgaatcggactata

SEQ ID NO: 55180 - DNA, 19 bp, Homo sapiens
  siRNA target sequence for SYNJ1 (NM_003895.1,2923-2941).
gaatcggactataactatt

SEQ ID NO: 55181 - DNA, 19 bp, Homo sapiens
  siRNA target sequence for SYNJ1 (NM_003895.1,2927-2945).
cggactataactattgctt

SEQ ID NO: 55182 - DNA, 19 bp, Homo sapiens
  siRNA target sequence for SYNJ1 (NM_003895.1,2928-2946).
ggactataactattgcttt

SEQ ID NO: 55183 - DNA, 19 bp, Homo sapiens
  siRNA target sequence for SYNJ1 (NM_003895.1,2931-2949).
ctataactattgctttaaa

SEQ ID NO: 55184 - DNA, 19 bp, Homo sapiens
  siRNA target sequence for SYNJ1 (NM_003895.1,2952-2970).
gtccagactggatcaaaaa

SEQ ID NO: 55185 - DNA, 19 bp, Homo sapiens
  siRNA target sequence for SYNJ1 (NM_003895.1,3004-3022).
cattgcattgccatcatca

SEQ ID NO: 55186 - DNA, 19 bp, Homo sapiens
  siRNA target sequence for SYNJ1 (NM_003895.1,3131-3149).
ctccagccatcttcaagtt

SEQ ID NO: 55187 - DNA, 19 bp, Homo sapiens
  siRNA target sequence for SYNJ1 (NM_003895.1,3196-3214).
ccagtcacctacaatatca

SEQ ID NO: 55188 - DNA, 19 bp, Homo sapiens
  siRNA target sequence for SYNJ1 (NM_003895.1,3250-3268).
ccgagcaccgtcaagaact

SEQ ID NO: 55189 - DNA, 19 bp, Homo sapiens
  siRNA target sequence for SYNJ1 (NM_003895.1,3449-3467).
gcacccactagaaaggaat

SEQ ID NO: 55190 - DNA, 19 bp, Homo sapiens
  siRNA target sequence for SYNJ1 (NM_003895.1,3536-3554).
ggaacaacaaggaaagata

SEQ ID NO: 55191 - DNA, 19 bp, Homo sapiens
  siRNA target sequence for SYNJ1 (NM_003895.1,3639-3657).
ctcctcgtgctggagttat

SEQ ID NO: 55192 - DNA, 19 bp, Homo sapiens
  siRNA target sequence for SYNJ1 (NM_003895.1,3641-3659).
cctcgtgctggagttatca

SEQ ID NO: 55193 - DNA, 19 bp, Homo sapiens
  siRNA target sequence for SYNJ1 (NM_003895.1,3736-3754).
gaaaggttcaactttcctt

SEQ ID NO: 55194 - DNA, 19 bp, Homo sapiens
  siRNA target sequence for SYNJ1 (NM_003895.1,3945-3963).
cctcacaaccgcaagtaaa

SEQ ID NO: 55195 - DNA, 19 bp, Homo sapiens
  siRNA target sequence for SYNJ1 (NM_003895.1,3950-3968).
caaccgcaagtaaaaacaa

SEQ ID NO: 55196 - DNA, 19 bp, Homo sapiens
  siRNA target sequence for SYNJ1 (NM_003895.1,3990-4008).
gagaatcaccattaaagat

SEQ ID NO: 55197 - DNA, 19 bp, Homo sapiens
  siRNA target sequence for SYNJ1 (NM_003895.1,4194-4212).
ggagtcaatcccaggaaaa

SEQ ID NO: 55198 - DNA, 19 bp, Homo sapiens
  siRNA target sequence for SYNJ1 (NM_003895.1,4207-4225).
ggaaaatatgcgaagttct

SEQ ID NO: 55199 - DNA, 19 bp, Homo sapiens
  siRNA target sequence for SYNJ1 (NM_003895.1,4346-4364).
gaagagcccgttactatca

SEQ ID NO: 55200 - DNA, 19 bp, Homo sapiens
  siRNA target sequence for SYNJ1 (NM_003895.1,4384-4402).
gcctcttggtcataacaaa

SEQ ID NO: 55201 - DNA, 19 bp, Homo sapiens
  siRNA target sequence for SYNJ1 (NM_003895.1,4405-4423).
cagggcttcatcttcactt

SEQ ID NO: 55202 - DNA, 19 bp, Homo sapiens
  siRNA target sequence for SYNJ1 (NM_003895.1,4408-4426).
ggcttcatcttcacttgat

SEQ ID NO: 55203 - DNA, 19 bp, Homo sapiens
  siRNA target sequence for SYNJ1 (NM_003895.1,4419-4437).
cacttgatggctttaagga

SEQ ID NO: 55204 - DNA, 19 bp, Homo sapiens
  siRNA target sequence for SYNJ1 (NM_003895.1,4428-4446).
gctttaaggacagttttga

SEQ ID NO: 55205 - DNA, 19 bp, Homo sapiens
  siRNA target sequence for SYNJ1 (NM_003895.1,4448-4466).
ctacagggccagtctacat

SEQ ID NO: 55206 - DNA, 19 bp, Homo sapiens
  siRNA target sequence for SYNJ1 (NM_003895.1,4451-4469).
cagggccagtctacattaa

SEQ ID NO: 55207 - DNA, 19 bp, Homo sapiens
  siRNA target sequence for SYNJ1 (NM_003895.1,4454-4472).
ggccagtctacattaaaaa

SEQ ID NO: 55208 - DNA, 19 bp, Homo sapiens
  siRNA target sequence for SYNJ1 (NM_003895.1,4540-4558).
gtcagcttgttcagactta

SEQ ID NO: 55209 - DNA, 19 bp, Homo sapiens
  siRNA target sequence for SYNJ1 (NM_003895.1,4551-4569).
cagacttactgggtaatca

SEQ ID NO: 55210 - DNA, 19 bp, Homo sapiens
  siRNA target sequence for SYNJ1 (NM_003895.1,4561-4579).
gggtaatcagccaagttca

SEQ ID NO: 55211 - DNA, 19 bp, Homo sapiens
  siRNA target sequence for SYNJ1 (NM_003895.1,4562-4580).
ggtaatcagccaagttcat

SEQ ID NO: 55212 - DNA, 19 bp, Homo sapiens
  siRNA target sequence for SYNJ1 (NM_003895.1,4563-4581).
gtaatcagccaagttcatt

SEQ ID NO: 55213 - DNA, 19 bp, Homo sapiens
  siRNA target sequence for SYNJ1 (NM_003895.1,4584-4602).
ctggctccaacctgacatt

SEQ ID NO: 55214 - DNA, 19 bp, Homo sapiens
  siRNA target sequence for SYNJ1 (NM_003895.1,4701-4719).
gccctccagtagatccttt

SEQ ID NO: 55215 - DNA, 19 bp, Homo sapiens
  siRNA target sequence for SYNJ1 (NM_003895.1,4751-4769).
ctggactttacagaaagat

SEQ ID NO: 55216 - DNA, 19 bp, Homo sapiens
  siRNA target sequence for SYNJ2 (NM_003898.1,338-356).
cacatctgtgggcagaatt

SEQ ID NO: 55217 - DNA, 19 bp, Homo sapiens
  siRNA target sequence for SYNJ2 (NM_003898.1,455-473).
cagctcgggggtgttctat

SEQ ID NO: 55218 - DNA, 19 bp, Homo sapiens
  siRNA target sequence for SYNJ2 (NM_003898.1,457-475).
gctcgggggtgttctattt

SEQ ID NO: 55219 - DNA, 19 bp, Homo sapiens
  siRNA target sequence for SYNJ2 (NM_003898.1,462-480).
ggggtgttctatttctcat

SEQ ID NO: 55220 - DNA, 19 bp, Homo sapiens
  siRNA target sequence for SYNJ2 (NM_003898.1,807-825).
gacgatggagtgtcatctt

SEQ ID NO: 55221 - DNA, 19 bp, Homo sapiens
  siRNA target sequence for SYNJ2 (NM_003898.1,809-827).
cgatggagtgtcatctttt

SEQ ID NO: 55222 - DNA, 19 bp, Homo sapiens
  siRNA target sequence for SYNJ2 (NM_003898.1,1020-1038).
ctcaacagagccttcaaga

SEQ ID NO: 55223 - DNA, 19 bp, Homo sapiens
  siRNA target sequence for SYNJ2 (NM_003898.1,1065-1083).
ggcgacacgcctatgatca

SEQ ID NO: 55224 - DNA, 19 bp, Homo sapiens
  siRNA target sequence for SYNJ2 (NM_003898.1,1066-1084).
gcgacacgcctatgatcaa

SEQ ID NO: 55225 - DNA, 19 bp, Homo sapiens
  siRNA target sequence for SYNJ2 (NM_003898.1,1067-1085).
cgacacgcctatgatcaat

SEQ ID NO: 55226 - DNA, 19 bp, Homo sapiens
  siRNA target sequence for SYNJ2 (NM_003898.1,1068-1086).
gacacgcctatgatcaatt

SEQ ID NO: 55227 - DNA, 19 bp, Homo sapiens
  siRNA target sequence for SYNJ2 (NM_003898.1,1070-1088).
cacgcctatgatcaatttt

SEQ ID NO: 55228 - DNA, 19 bp, Homo sapiens
  siRNA target sequence for SYNJ2 (NM_003898.1,1075-1093).
ctatgatcaattttgactt

SEQ ID NO: 55229 - DNA, 19 bp, Homo sapiens
  siRNA target sequence for SYNJ2 (NM_003898.1,1136-1154).
cctcttgaggccacagtta

SEQ ID NO: 55230 - DNA, 19 bp, Homo sapiens
  siRNA target sequence for SYNJ2 (NM_003898.1,1137-1155).
ctcttgaggccacagttaa

SEQ ID NO: 55231 - DNA, 19 bp, Homo sapiens
  siRNA target sequence for SYNJ2 (NM_003898.1,1170-1188).
gacttcgatgtgttcacaa

SEQ ID NO: 55232 - DNA, 19 bp, Homo sapiens
  siRNA target sequence for SYNJ2 (NM_003898.1,1196-1214).
gaacgtcagtccacgtttt

SEQ ID NO: 55233 - DNA, 19 bp, Homo sapiens
  siRNA target sequence for SYNJ2 (NM_003898.1,1200-1218).
gtcagtccacgttttcaga

SEQ ID NO: 55234 - DNA, 19 bp, Homo sapiens
  siRNA target sequence for SYNJ2 (NM_003898.1,1221-1239).
ggcactttgcggatgaact

SEQ ID NO: 55235 - DNA, 19 bp, Homo sapiens
  siRNA target sequence for SYNJ2 (NM_003898.1,1315-1333).
ccctggggctgagttcaaa

SEQ ID NO: 55236 - DNA, 19 bp, Homo sapiens
  siRNA target sequence for SYNJ2 (NM_003898.1,1641-1659).
cgtcagtccgaattcacaa

SEQ ID NO: 55237 - DNA, 19 bp, Homo sapiens
  siRNA target sequence for SYNJ2 (NM_003898.1,1642-1660).
gtcagtccgaattcacaaa

SEQ ID NO: 55238 - DNA, 19 bp, Homo sapiens
  siRNA target sequence for SYNJ2 (NM_003898.1,1644-1662).
cagtccgaattcacaaatt

SEQ ID NO: 55239 - DNA, 19 bp, Homo sapiens
  siRNA target sequence for SYNJ2 (NM_003898.1,1805-1823).
cagcagcccagctgacata

SEQ ID NO: 55240 - DNA, 19 bp, Homo sapiens
  siRNA target sequence for SYNJ2 (NM_003898.1,1808-1826).
cagcccagctgacatattt

SEQ ID NO: 55241 - DNA, 19 bp, Homo sapiens
  siRNA target sequence for SYNJ2 (NM_003898.1,1903-1921).
ggggtgaacagcttcagaa

SEQ ID NO: 55242 - DNA, 19 bp, Homo sapiens
  siRNA target sequence for SYNJ2 (NM_003898.1,1923-1941).
gccatctcacgctctcata

SEQ ID NO: 55243 - DNA, 19 bp, Homo sapiens
  siRNA target sequence for SYNJ2 (NM_003898.1,1925-1943).
catctcacgctctcataga

SEQ ID NO: 55244 - DNA, 19 bp, Homo sapiens
  siRNA target sequence for SYNJ2 (NM_003898.1,1930-1948).
cacgctctcatagatacat

SEQ ID NO: 55245 - DNA, 19 bp, Homo sapiens
  siRNA target sequence for SYNJ2 (NM_003898.1,1933-1951).
gctctcatagatacattct

SEQ ID NO: 55246 - DNA, 19 bp, Homo sapiens
  siRNA target sequence for SYNJ2 (NM_003898.1,1968-1986).
ctggtgggcgtctgtcttt

SEQ ID NO: 55247 - DNA, 19 bp, Homo sapiens
  siRNA target sequence for SYNJ2 (NM_003898.1,1971-1989).
gtgggcgtctgtctttata

SEQ ID NO: 55248 - DNA, 19 bp, Homo sapiens
  siRNA target sequence for SYNJ2 (NM_003898.1,1974-1992).
ggcgtctgtctttatatct

SEQ ID NO: 55249 - DNA, 19 bp, Homo sapiens
  siRNA target sequence for SYNJ2 (NM_003898.1,1976-1994).
cgtctgtctttatatcttt

SEQ ID NO: 55250 - DNA, 19 bp, Homo sapiens
  siRNA target sequence for SYNJ2 (NM_003898.1,1991-2009).
ctttgtacgtccataccat

SEQ ID NO: 55251 - DNA, 19 bp, Homo sapiens
  siRNA target sequence for SYNJ2 (NM_003898.1,2264-2282).
caactaccgcattgatctt

SEQ ID NO: 55252 - DNA, 19 bp, Homo sapiens
  siRNA target sequence for SYNJ2 (NM_003898.1,2267-2285).
ctaccgcattgatcttact

SEQ ID NO: 55253 - DNA, 19 bp, Homo sapiens
  siRNA target sequence for SYNJ2 (NM_003898.1,2270-2288).
ccgcattgatcttacttat

SEQ ID NO: 55254 - DNA, 19 bp, Homo sapiens
  siRNA target sequence for SYNJ2 (NM_003898.1,2393-2411).
cgaaggagccattaacttt

SEQ ID NO: 55255 - DNA, 19 bp, Homo sapiens
  siRNA target sequence for SYNJ2 (NM_003898.1,2436-2454).
ggctcagccgcctacgata

SEQ ID NO: 55256 - DNA, 19 bp, Homo sapiens
  siRNA target sequence for SYNJ2 (NM_003898.1,2536-2554).
gagaactcaaccttctaga

SEQ ID NO: 55257 - DNA, 19 bp, Homo sapiens
  siRNA target sequence for SYNJ2 (NM_003898.1,2546-2564).
ccttctagacagtgatcta

SEQ ID NO: 55258 - DNA, 19 bp, Homo sapiens
  siRNA target sequence for SYNJ2 (NM_003898.1,2565-2583).
gatgttgacaccaaagtca

SEQ ID NO: 55259 - DNA, 19 bp, Homo sapiens
  siRNA target sequence for SYNJ2 (NM_003898.1,2598-2616).
cctggtgccctgcagtatt

SEQ ID NO: 55260 - DNA, 19 bp, Homo sapiens
  siRNA target sequence for SYNJ2 (NM_003898.1,2880-2898).
gggcagatgctggtaactt

SEQ ID NO: 55261 - DNA, 19 bp, Homo sapiens
  siRNA target sequence for SYNJ2 (NM_003898.1,2881-2899).
ggcagatgctggtaacttt

SEQ ID NO: 55262 - DNA, 19 bp, Homo sapiens
  siRNA target sequence for SYNJ2 (NM_003898.1,2882-2900).
gcagatgctggtaactttt

SEQ ID NO: 55263 - DNA, 19 bp, Homo sapiens
  siRNA target sequence for SYNJ2 (NM_003898.1,2955-2973).
ggcagagcagtgaagatta

SEQ ID NO: 55264 - DNA, 19 bp, Homo sapiens
  siRNA target sequence for SYNJ2 (NM_003898.1,3110-3128).
gtcagaaggggatattctt

SEQ ID NO: 55265 - DNA, 19 bp, Homo sapiens
  siRNA target sequence for SYNJ2 (NM_003898.1,3272-3290).
gcagcatccaacgtacaaa

SEQ ID NO: 55266 - DNA, 19 bp, Homo sapiens
  siRNA target sequence for SYNJ2 (NM_003898.1,3275-3293).
gcatccaacgtacaaagat

SEQ ID NO: 55267 - DNA, 19 bp, Homo sapiens
  siRNA target sequence for SYNJ2 (NM_003898.1,3418-3436).
cccctccaaccggtttaat

SEQ ID NO: 55268 - DNA, 19 bp, Homo sapiens
  siRNA target sequence for SYNJ2 (NM_003898.1,3421-3439).
ctccaaccggtttaatggt

SEQ ID NO: 55269 - DNA, 19 bp, Homo sapiens
  siRNA target sequence for SYNJ2 (NM_003898.1,3440-3458).
gaaaaagtcggcttcagat

SEQ ID NO: 55270 - DNA, 19 bp, Homo sapiens
  siRNA target sequence for SYNJ2 (NM_003898.1,3473-3491).
cggcacccatggacagtat

SEQ ID NO: 55271 - DNA, 19 bp, Homo sapiens
  siRNA target sequence for SYNJ2 (NM_003898.1,3474-3492).
ggcacccatggacagtatt

SEQ ID NO: 55272 - DNA, 19 bp, Homo sapiens
  siRNA target sequence for SYNJ2 (NM_003898.1,3478-3496).
cccatggacagtattcaat

SEQ ID NO: 55273 - DNA, 19 bp, Homo sapiens
  siRNA target sequence for SYNJ2 (NM_003898.1,3480-3498).
catggacagtattcaattt

SEQ ID NO: 55274 - DNA, 19 bp, Homo sapiens
  siRNA target sequence for SYNJ2 (NM_003898.1,3545-3563).
ggctcggactggaataagt

SEQ ID NO: 55275 - DNA, 19 bp, Homo sapiens
  siRNA target sequence for SYNJ2 (NM_003898.1,3546-3564).
gctcggactggaataagta

SEQ ID NO: 55276 - DNA, 19 bp, Homo sapiens
  siRNA target sequence for SYNJ2 (NM_003898.1,3547-3565).
ctcggactggaataagtaa

SEQ ID NO: 55277 - DNA, 19 bp, Homo sapiens
  siRNA target sequence for SYNJ2 (NM_003898.1,3555-3573).
ggaataagtaaaccttata

SEQ ID NO: 55278 - DNA, 19 bp, Homo sapiens
  siRNA target sequence for SYNJ2 (NM_003898.1,3829-3847).
ccctgtcaccggaagaaca

SEQ ID NO: 55279 - DNA, 19 bp, Homo sapiens
  siRNA target sequence for SYNJ2 (NM_003898.1,3833-3851).
gtcaccggaagaacagttt

SEQ ID NO: 55280 - DNA, 19 bp, Homo sapiens
  siRNA target sequence for SYNJ2 (NM_003898.1,3858-3876).
cagactgtccattttacaa

SEQ ID NO: 55281 - DNA, 19 bp, Homo sapiens
  siRNA target sequence for SYNJ2 (NM_003898.1,4155-4173).
ggcctcacttacaatagca

SEQ ID NO: 55282 - DNA, 19 bp, Homo sapiens
  siRNA target sequence for SYNJ2 (NM_003898.1,4298-4316).
cccacttcttggtgattat

SEQ ID NO: 55283 - DNA, 19 bp, Homo sapiens
  siRNA target sequence for SYNJ2 (NM_003898.1,4343-4361).
ccaccctaaactgttgaat

SEQ ID NO: 55284 - DNA, 19 bp, Homo sapiens
  siRNA target sequence for SYNJ2 (NM_003898.1,4344-4362).
caccctaaactgttgaata

SEQ ID NO: 55285 - DNA, 19 bp, Homo sapiens
  siRNA target sequence for SYNJ2 (NM_003898.1,4347-4365).
cctaaactgttgaataaca

SEQ ID NO: 55286 - DNA, 19 bp, Homo sapiens
  siRNA target sequence for SYNJ2 (NM_003898.1,4406-4424).
caggagccccaaaagagat

SEQ ID NO: 55287 - DNA, 19 bp, Homo sapiens
  siRNA target sequence for SYNJ2 (NM_003898.1,4500-4518).
ggtcactgggtgacaatca

SEQ ID NO: 55288 - DNA, 19 bp, Homo sapiens
  siRNA target sequence for TARBP1 (NM_005646.2,1117-1135).
ccatcctggcatatgtgta

SEQ ID NO: 55289 - DNA, 19 bp, Homo sapiens
  siRNA target sequence for TARBP1 (NM_005646.2,1118-1136).
catcctggcatatgtgtat

SEQ ID NO: 55290 - DNA, 19 bp, Homo sapiens
  siRNA target sequence for TARBP1 (NM_005646.2,1203-1221).
gctgtatgaaacaaagatt

SEQ ID NO: 55291 - DNA, 19 bp, Homo sapiens
  siRNA target sequence for TARBP1 (NM_005646.2,1353-1371).
gaagtttttagtcacttat

SEQ ID NO: 55292 - DNA, 19 bp, Homo sapiens
  siRNA target sequence for TARBP1 (NM_005646.2,1400-1418).
gtagcttcctattgaagtt

SEQ ID NO: 55293 - DNA, 19 bp, Homo sapiens
  siRNA target sequence for TARBP1 (NM_005646.2,1403-1421).
gcttcctattgaagtttat

SEQ ID NO: 55294 - DNA, 19 bp, Homo sapiens
  siRNA target sequence for TARBP1 (NM_005646.2,1404-1422).
cttcctattgaagtttatt

SEQ ID NO: 55295 - DNA, 19 bp, Homo sapiens
  siRNA target sequence for TARBP1 (NM_005646.2,1483-1501).
gcaaatgtcccaagacata

SEQ ID NO: 55296 - DNA, 19 bp, Homo sapiens
  siRNA target sequence for TARBP1 (NM_005646.2,1529-1547).
ctctcagggatgttattca

SEQ ID NO: 55297 - DNA, 19 bp, Homo sapiens
  siRNA target sequence for TARBP1 (NM_005646.2,1531-1549).
ctcagggatgttattcatt

SEQ ID NO: 55298 - DNA, 19 bp, Homo sapiens
  siRNA target sequence for TARBP1 (NM_005646.2,1540-1558).
gttattcattgcactatga

SEQ ID NO: 55299 - DNA, 19 bp, Homo sapiens
  siRNA target sequence for TARBP1 (NM_005646.2,1580-1598).
gaggggcagcccaatgcta

SEQ ID NO: 55300 - DNA, 19 bp, Homo sapiens
  siRNA target sequence for TARBP1 (NM_005646.2,1603-1621).
cttcaaacagctatgaatt

SEQ ID NO: 55301 - DNA, 19 bp, Homo sapiens
  siRNA target sequence for TARBP1 (NM_005646.2,1696-1714).
ggacgaggaacttcattgt

SEQ ID NO: 55302 - DNA, 19 bp, Homo sapiens
  siRNA target sequence for TARBP1 (NM_005646.2,1727-1745).
gtgactggctacgtgttaa

SEQ ID NO: 55303 - DNA, 19 bp, Homo sapiens
  siRNA target sequence for TARBP1 (NM_005646.2,1731-1749).
ctggctacgtgttaatgaa

SEQ ID NO: 55304 - DNA, 19 bp, Homo sapiens
  siRNA target sequence for TARBP1 (NM_005646.2,1738-1756).
cgtgttaatgaaagctatt

SEQ ID NO: 55305 - DNA, 19 bp, Homo sapiens
  siRNA target sequence for TARBP1 (NM_005646.2,1739-1757).
gtgttaatgaaagctattt

SEQ ID NO: 55306 - DNA, 19 bp, Homo sapiens
  siRNA target sequence for TARBP1 (NM_005646.2,1778-1796).
gctccattggacttcacaa

SEQ ID NO: 55307 - DNA, 19 bp, Homo sapiens
  siRNA target sequence for TARBP1 (NM_005646.2,1786-1804).
ggacttcacaagacatctt

SEQ ID NO: 55308 - DNA, 19 bp, Homo sapiens
  siRNA target sequence for TARBP1 (NM_005646.2,1831-1849).
caagagtatgttaagtcat

SEQ ID NO: 55309 - DNA, 19 bp, Homo sapiens
  siRNA target sequence for TARBP1 (NM_005646.2,1942-1960).
ggaatgaagactcagtata

SEQ ID NO: 55310 - DNA, 19 bp, Homo sapiens
  siRNA target sequence for TARBP1 (NM_005646.2,2011-2029).
ctggatgtgcttatgaagt

SEQ ID NO: 55311 - DNA, 19 bp, Homo sapiens
  siRNA target sequence for TARBP1 (NM_005646.2,2200-2218).
ctcagaagacttactatga

SEQ ID NO: 55312 - DNA, 19 bp, Homo sapiens
  siRNA target sequence for TARBP1 (NM_005646.2,2242-2260).
ctggatcgttgccatttat

SEQ ID NO: 55313 - DNA, 19 bp, Homo sapiens
  siRNA target sequence for TARBP1 (NM_005646.2,2323-2341).
cctatctggagagttattt

SEQ ID NO: 55314 - DNA, 19 bp, Homo sapiens
  siRNA target sequence for TARBP1 (NM_005646.2,2404-2422).
gttggaagtcagattcaga

SEQ ID NO: 55315 - DNA, 19 bp, Homo sapiens
  siRNA target sequence for TARBP1 (NM_005646.2,2633-2651).
cccaaggatggggaaaaat

SEQ ID NO: 55316 - DNA, 19 bp, Homo sapiens
  siRNA target sequence for TARBP1 (NM_005646.2,2645-2663).
gaaaaatagttgcacaata

SEQ ID NO: 55317 - DNA, 19 bp, Homo sapiens
  siRNA target sequence for TARBP1 (NM_005646.2,2761-2779).
gccgttcagatgccaataa

SEQ ID NO: 55318 - DNA, 19 bp, Homo sapiens
  siRNA target sequence for TARBP1 (NM_005646.2,2815-2833).
ctttcttctgatcaagttt

SEQ ID NO: 55319 - DNA, 19 bp, Homo sapiens
  siRNA target sequence for TARBP1 (NM_005646.2,2887-2905).
gaatcactctgcatagagt

SEQ ID NO: 55320 - DNA, 19 bp, Homo sapiens
  siRNA target sequence for TARBP1 (NM_005646.2,2891-2909).
cactctgcatagagtcttt

SEQ ID NO: 55321 - DNA, 19 bp, Homo sapiens
  siRNA target sequence for TARBP1 (NM_005646.2,2911-2929).
gacatggcgtggaaaatta

SEQ ID NO: 55322 - DNA, 19 bp, Homo sapiens
  siRNA target sequence for TARBP1 (NM_005646.2,2913-2931).
catggcgtggaaaattata

SEQ ID NO: 55323 - DNA, 19 bp, Homo sapiens
  siRNA target sequence for TARBP1 (NM_005646.2,2916-2934).
ggcgtggaaaattatatct

SEQ ID NO: 55324 - DNA, 19 bp, Homo sapiens
  siRNA target sequence for TARBP1 (NM_005646.2,2917-2935).
gcgtggaaaattatatctt

SEQ ID NO: 55325 - DNA, 19 bp, Homo sapiens
  siRNA target sequence for TARBP1 (NM_005646.2,2942-2960).
gcaacactcagctgatatt

SEQ ID NO: 55326 - DNA, 19 bp, Homo sapiens
  siRNA target sequence for TARBP1 (NM_005646.2,2963-2981).
gggctaatttaaaagcttt

SEQ ID NO: 55327 - DNA, 19 bp, Homo sapiens
  siRNA target sequence for TARBP1 (NM_005646.2,3034-3052).
ggccaggcatatttcaaaa

SEQ ID NO: 55328 - DNA, 19 bp, Homo sapiens
  siRNA target sequence for TARBP1 (NM_005646.2,3035-3053).
gccaggcatatttcaaaat

SEQ ID NO: 55329 - DNA, 19 bp, Homo sapiens
  siRNA target sequence for TARBP1 (NM_005646.2,3058-3076).
gagattatgtacaagataa

SEQ ID NO: 55330 - DNA, 19 bp, Homo sapiens
  siRNA target sequence for TARBP1 (NM_005646.2,3098-3116).
ctggagtcttcaatacact

SEQ ID NO: 55331 - DNA, 19 bp, Homo sapiens
  siRNA target sequence for TARBP1 (NM_005646.2,3105-3123).
cttcaatacactgataagt

SEQ ID NO: 55332 - DNA, 19 bp, Homo sapiens
  siRNA target sequence for TARBP1 (NM_005646.2,3141-3159).
gatagtgtctgcttcaaat

SEQ ID NO: 55333 - DNA, 19 bp, Homo sapiens
  siRNA target sequence for TARBP1 (NM_005646.2,3145-3163).
gtgtctgcttcaaatgtgt

SEQ ID NO: 55334 - DNA, 19 bp, Homo sapiens
  siRNA target sequence for TARBP1 (NM_005646.2,3162-3180).
gtcccaaggatctttatca

SEQ ID NO: 55335 - DNA, 19 bp, Homo sapiens
  siRNA target sequence for TARBP1 (NM_005646.2,3211-3229).
gaggcttgtatatttggaa

SEQ ID NO: 55336 - DNA, 19 bp, Homo sapiens
  siRNA target sequence for TARBP1 (NM_005646.2,3232-3250).
gtgtttaggcgtgatcaaa

SEQ ID NO: 55337 - DNA, 19 bp, Homo sapiens
  siRNA target sequence for TARBP1 (NM_005646.2,3234-3252).
gtttaggcgtgatcaaaga

SEQ ID NO: 55338 - DNA, 19 bp, Homo sapiens
  siRNA target sequence for TARBP1 (NM_005646.2,3242-3260).
gtgatcaaagacttgttca

SEQ ID NO: 55339 - DNA, 19 bp, Homo sapiens
  siRNA target sequence for TARBP1 (NM_005646.2,3251-3269).
gacttgttcaggatgtaca

SEQ ID NO: 55340 - DNA, 19 bp, Homo sapiens
  siRNA target sequence for TARBP1 (NM_005646.2,3265-3283).
gtacagaccttcatagaaa

SEQ ID NO: 55341 - DNA, 19 bp, Homo sapiens
  siRNA target sequence for TARBP1 (NM_005646.2,3292-3310).
catgactgtgcggcaaata

SEQ ID NO: 55342 - DNA, 19 bp, Homo sapiens
  siRNA target sequence for TARBP1 (NM_005646.2,3299-3317).
gtgcggcaaatattgttat

SEQ ID NO: 55343 - DNA, 19 bp, Homo sapiens
  siRNA target sequence for TARBP1 (NM_005646.2,3302-3320).
cggcaaatattgttatgga

SEQ ID NO: 55344 - DNA, 19 bp, Homo sapiens
  siRNA target sequence for TARBP1 (NM_005646.2,3303-3321).
ggcaaatattgttatggaa

SEQ ID NO: 55345 - DNA, 19 bp, Homo sapiens
  siRNA target sequence for TARBP1 (NM_005646.2,3304-3322).
gcaaatattgttatggaaa

SEQ ID NO: 55346 - DNA, 19 bp, Homo sapiens
  siRNA target sequence for TARBP1 (NM_005646.2,3337-3355).
gaccattatgtgagaattt

SEQ ID NO: 55347 - DNA, 19 bp, Homo sapiens
  siRNA target sequence for TARBP1 (NM_005646.2,3339-3357).
ccattatgtgagaatttgt

SEQ ID NO: 55348 - DNA, 19 bp, Homo sapiens
  siRNA target sequence for TARBP1 (NM_005646.2,3418-3436).
gatcttgcaatcaagctat

SEQ ID NO: 55349 - DNA, 19 bp, Homo sapiens
  siRNA target sequence for TARBP1 (NM_005646.2,3432-3450).
gctattagataaagatgaa

SEQ ID NO: 55350 - DNA, 19 bp, Homo sapiens
  siRNA target sequence for TARBP1 (NM_005646.2,3433-3451).
ctattagataaagatgaat

SEQ ID NO: 55351 - DNA, 19 bp, Homo sapiens
  siRNA target sequence for TARBP1 (NM_005646.2,3464-3482).
ccaaaaaacgctactatgt

SEQ ID NO: 55352 - DNA, 19 bp, Homo sapiens
  siRNA target sequence for TARBP1 (NM_005646.2,3473-3491).
gctactatgtgaattctct

SEQ ID NO: 55353 - DNA, 19 bp, Homo sapiens
  siRNA target sequence for TARBP1 (NM_005646.2,3520-3538).
cagactctgctggtacttt

SEQ ID NO: 55354 - DNA, 19 bp, Homo sapiens
  siRNA target sequence for TARBP1 (NM_005646.2,3542-3560).
ctagacttgaccagaattt

SEQ ID NO: 55355 - DNA, 19 bp, Homo sapiens
  siRNA target sequence for TARBP1 (NM_005646.2,3547-3565).
cttgaccagaatttcttga

SEQ ID NO: 55356 - DNA, 19 bp, Homo sapiens
  siRNA target sequence for TARBP1 (NM_005646.2,3568-3586).
ggaattattgacaggattt

SEQ ID NO: 55357 - DNA, 19 bp, Homo sapiens
  siRNA target sequence for TARBP1 (NM_005646.2,3593-3611).
ctggtttcaccaacaatca

SEQ ID NO: 55358 - DNA, 19 bp, Homo sapiens
  siRNA target sequence for TARBP1 (NM_005646.2,3603-3621).
caacaatcaagcatccata

SEQ ID NO: 55359 - DNA, 19 bp, Homo sapiens
  siRNA target sequence for TARBP1 (NM_005646.2,3610-3628).
caagcatccataaaatatt

SEQ ID NO: 55360 - DNA, 19 bp, Homo sapiens
  siRNA target sequence for TARBP1 (NM_005646.2,3634-3652).
gaatggattattatattga

SEQ ID NO: 55361 - DNA, 19 bp, Homo sapiens
  siRNA target sequence for TARBP1 (NM_005646.2,3701-3719).
cttatggtgaagaaaatct

SEQ ID NO: 55362 - DNA, 19 bp, Homo sapiens
  siRNA target sequence for TARBP1 (NM_005646.2,3718-3736).
cttaaaacaagcatttgta

SEQ ID NO: 55363 - DNA, 19 bp, Homo sapiens
  siRNA target sequence for TARBP1 (NM_005646.2,3725-3743).
caagcatttgtacgttttt

SEQ ID NO: 55364 - DNA, 19 bp, Homo sapiens
  siRNA target sequence for TARBP1 (NM_005646.2,3734-3752).
gtacgtttttagcagtttt

SEQ ID NO: 55365 - DNA, 19 bp, Homo sapiens
  siRNA target sequence for TARBP1 (NM_005646.2,3840-3858).
caatcacaattttagtgtt

SEQ ID NO: 55366 - DNA, 19 bp, Homo sapiens
  siRNA target sequence for TARBP1 (NM_005646.2,3854-3872).
gtgttcgactgtatgcttt

SEQ ID NO: 55367 - DNA, 19 bp, Homo sapiens
  siRNA target sequence for TARBP1 (NM_005646.2,3868-3886).
gctttagttgctcttaaga

SEQ ID NO: 55368 - DNA, 19 bp, Homo sapiens
  siRNA target sequence for TARBP1 (NM_005646.2,3934-3952).
ctgactcctgtgattgaat

SEQ ID NO: 55369 - DNA, 19 bp, Homo sapiens
  siRNA target sequence for TARBP1 (NM_005646.2,3986-4004).
cagggaatgccaagaagaa

SEQ ID NO: 55370 - DNA, 19 bp, Homo sapiens
  siRNA target sequence for TARBP1 (NM_005646.2,3988-4006).
gggaatgccaagaagaatt

SEQ ID NO: 55371 - DNA, 19 bp, Homo sapiens
  siRNA target sequence for TARBP1 (NM_005646.2,4012-4030).
cgcattcaggagcatttct

SEQ ID NO: 55372 - DNA, 19 bp, Homo sapiens
  siRNA target sequence for TARBP1 (NM_005646.2,4013-4031).
gcattcaggagcatttctt

SEQ ID NO: 55373 - DNA, 19 bp, Homo sapiens
  siRNA target sequence for TARBP1 (NM_005646.2,4045-4063).
cacccactcaaggattatt

SEQ ID NO: 55374 - DNA, 19 bp, Homo sapiens
  siRNA target sequence for TARBP1 (NM_005646.2,4047-4065).
cccactcaaggattattgt

SEQ ID NO: 55375 - DNA, 19 bp, Homo sapiens
  siRNA target sequence for TARBP1 (NM_005646.2,4094-4112).
gcctttcaggccttattga

SEQ ID NO: 55376 - DNA, 19 bp, Homo sapiens
  siRNA target sequence for TARBP1 (NM_005646.2,4102-4120).
ggccttattgaagatgaat

SEQ ID NO: 55377 - DNA, 19 bp, Homo sapiens
  siRNA target sequence for TARBP1 (NM_005646.2,4149-4167).
cactgatgttcctttagct

SEQ ID NO: 55378 - DNA, 19 bp, Homo sapiens
  siRNA target sequence for TARBP1 (NM_005646.2,4160-4178).
ctttagctgcgggatttca

SEQ ID NO: 55379 - DNA, 19 bp, Homo sapiens
  siRNA target sequence for TARBP1 (NM_005646.2,4177-4195).
cagtggtacctttctcaaa

SEQ ID NO: 55380 - DNA, 19 bp, Homo sapiens
  siRNA target sequence for TARBP1 (NM_005646.2,4179-4197).
gtggtacctttctcaaact

SEQ ID NO: 55381 - DNA, 19 bp, Homo sapiens
  siRNA target sequence for TARBP1 (NM_005646.2,4234-4252).
caagacataggtactaatt

SEQ ID NO: 55382 - DNA, 19 bp, Homo sapiens
  siRNA target sequence for TARBP1 (NM_005646.2,4280-4298).
ggaccgacgttcagaagaa

SEQ ID NO: 55383 - DNA, 19 bp, Homo sapiens
  siRNA target sequence for TARBP1 (NM_005646.2,4283-4301).
ccgacgttcagaagaagat

SEQ ID NO: 55384 - DNA, 19 bp, Homo sapiens
  siRNA target sequence for TARBP1 (NM_005646.2,4284-4302).
cgacgttcagaagaagatt

SEQ ID NO: 55385 - DNA, 19 bp, Homo sapiens
  siRNA target sequence for TARBP1 (NM_005646.2,4316-4334).
gtcgtgtttccgacttaga

SEQ ID NO: 55386 - DNA, 19 bp, Homo sapiens
  siRNA target sequence for TARBP1 (NM_005646.2,4369-4387).
cttggaaagtcaattagta

SEQ ID NO: 55387 - DNA, 19 bp, Homo sapiens
  siRNA target sequence for TARBP1 (NM_005646.2,4413-4431).
cgacaaaccgaccaattta

SEQ ID NO: 55388 - DNA, 19 bp, Homo sapiens
  siRNA target sequence for TARBP1 (NM_005646.2,4416-4434).
caaaccgaccaatttagga

SEQ ID NO: 55389 - DNA, 19 bp, Homo sapiens
  siRNA target sequence for TARBP1 (NM_005646.2,4483-4501).
ggcagccttcagtgtatca

SEQ ID NO: 55390 - DNA, 19 bp, Homo sapiens
  siRNA target sequence for TARBP1 (NM_005646.2,4568-4586).
cacctcagctaattgatta

SEQ ID NO: 55391 - DNA, 19 bp, Homo sapiens
  siRNA target sequence for TARBP1 (NM_005646.2,4629-4647).
ggaacaaactgccaaaagt

SEQ ID NO: 55392 - DNA, 19 bp, Homo sapiens
  siRNA target sequence for TARBP1 (NM_005646.2,4686-4704).
gctcttgttgggaaatgaa

SEQ ID NO: 55393 - DNA, 19 bp, Homo sapiens
  siRNA target sequence for TARBP1 (NM_005646.2,4743-4761).
cgtttgtgtggaaattcct

SEQ ID NO: 55394 - DNA, 19 bp, Homo sapiens
  siRNA target sequence for TEP1 (NM_007110.3,107-125).
ggctatgctccctgactta

SEQ ID NO: 55395 - DNA, 19 bp, Homo sapiens
  siRNA target sequence for TEP1 (NM_007110.3,109-127).
ctatgctccctgacttaca

SEQ ID NO: 55396 - DNA, 19 bp, Homo sapiens
  siRNA target sequence for TEP1 (NM_007110.3,128-146).
gcccttggagaaactacat

SEQ ID NO: 55397 - DNA, 19 bp, Homo sapiens
  siRNA target sequence for TEP1 (NM_007110.3,141-159).
ctacatcagcatgtatcta

SEQ ID NO: 55398 - DNA, 19 bp, Homo sapiens
  siRNA target sequence for TEP1 (NM_007110.3,283-301).
gcctggccacactttctga

SEQ ID NO: 55399 - DNA, 19 bp, Homo sapiens
  siRNA target sequence for TEP1 (NM_007110.3,377-395).
ggccaccctctctagtcta

SEQ ID NO: 55400 - DNA, 19 bp, Homo sapiens
  siRNA target sequence for TEP1 (NM_007110.3,378-396).
gccaccctctctagtctaa

SEQ ID NO: 55401 - DNA, 19 bp, Homo sapiens
  siRNA target sequence for TEP1 (NM_007110.3,422-440).
gttccagagtctacagata

SEQ ID NO: 55402 - DNA, 19 bp, Homo sapiens
  siRNA target sequence for TEP1 (NM_007110.3,514-532).
gggctcagcatttctctaa

SEQ ID NO: 55403 - DNA, 19 bp, Homo sapiens
  siRNA target sequence for TEP1 (NM_007110.3,610-628).
gtcgttggtttgattcaga

SEQ ID NO: 55404 - DNA, 19 bp, Homo sapiens
  siRNA target sequence for TEP1 (NM_007110.3,810-828).
gtctcagaagtaaacatga

SEQ ID NO: 55405 - DNA, 19 bp, Homo sapiens
  siRNA target sequence for TEP1 (NM_007110.3,905-923).
cctcaaggcatctttgtat

SEQ ID NO: 55406 - DNA, 19 bp, Homo sapiens
  siRNA target sequence for TEP1 (NM_007110.3,1000-1018).
cccacctgcgacgatattt

SEQ ID NO: 55407 - DNA, 19 bp, Homo sapiens
  siRNA target sequence for TEP1 (NM_007110.3,1002-1020).
cacctgcgacgatatttct

SEQ ID NO: 55408 - DNA, 19 bp, Homo sapiens
  siRNA target sequence for TEP1 (NM_007110.3,1004-1022).
cctgcgacgatatttctgt

SEQ ID NO: 55409 - DNA, 19 bp, Homo sapiens
  siRNA target sequence for TEP1 (NM_007110.3,1129-1147).
ctgccatgacggacaaatt

SEQ ID NO: 55410 - DNA, 19 bp, Homo sapiens
  siRNA target sequence for TEP1 (NM_007110.3,1570-1588).
cggtctgggaggaactcat

SEQ ID NO: 55411 - DNA, 19 bp, Homo sapiens
  siRNA target sequence for TEP1 (NM_007110.3,1571-1589).
ggtctgggaggaactcatt

SEQ ID NO: 55412 - DNA, 19 bp, Homo sapiens
  siRNA target sequence for TEP1 (NM_007110.3,1577-1595).
ggaggaactcattgaaaat

SEQ ID NO: 55413 - DNA, 19 bp, Homo sapiens
  siRNA target sequence for TEP1 (NM_007110.3,1713-1731).
cacagtcggcagtttccat

SEQ ID NO: 55414 - DNA, 19 bp, Homo sapiens
  siRNA target sequence for TEP1 (NM_007110.3,1720-1738).
ggcagtttccattcagatt

SEQ ID NO: 55415 - DNA, 19 bp, Homo sapiens
  siRNA target sequence for TEP1 (NM_007110.3,1745-1763).
cgcccatgatgccattgat

SEQ ID NO: 55416 - DNA, 19 bp, Homo sapiens
  siRNA target sequence for TEP1 (NM_007110.3,1769-1787).
cgaggctcaactcagaaat

SEQ ID NO: 55417 - DNA, 19 bp, Homo sapiens
  siRNA target sequence for TEP1 (NM_007110.3,1799-1817).
ctttccttcgaatataaca

SEQ ID NO: 55418 - DNA, 19 bp, Homo sapiens
  siRNA target sequence for TEP1 (NM_007110.3,1818-1836).
ctgatgaggcggatactaa

SEQ ID NO: 55419 - DNA, 19 bp, Homo sapiens
  siRNA target sequence for TEP1 (NM_007110.3,1820-1838).
gatgaggcggatactaact

SEQ ID NO: 55420 - DNA, 19 bp, Homo sapiens
  siRNA target sequence for TEP1 (NM_007110.3,1823-1841).
gaggcggatactaactaga

SEQ ID NO: 55421 - DNA, 19 bp, Homo sapiens
  siRNA target sequence for TEP1 (NM_007110.3,1825-1843).
ggcggatactaactagaaa

SEQ ID NO: 55422 - DNA, 19 bp, Homo sapiens
  siRNA target sequence for TEP1 (NM_007110.3,1828-1846).
ggatactaactagaaatga

SEQ ID NO: 55423 - DNA, 19 bp, Homo sapiens
  siRNA target sequence for TEP1 (NM_007110.3,1829-1847).
gatactaactagaaatgaa

SEQ ID NO: 55424 - DNA, 19 bp, Homo sapiens
  siRNA target sequence for TEP1 (NM_007110.3,1912-1930).
ggatacctgtgttgtatga

SEQ ID NO: 55425 - DNA, 19 bp, Homo sapiens
  siRNA target sequence for TEP1 (NM_007110.3,1967-1985).
cagacagtggaaatatgat

SEQ ID NO: 55426 - DNA, 19 bp, Homo sapiens
  siRNA target sequence for TEP1 (NM_007110.3,2071-2089).
gcactgtcttggtctatct

SEQ ID NO: 55427 - DNA, 19 bp, Homo sapiens
  siRNA target sequence for TEP1 (NM_007110.3,2084-2102).
ctatctgacagatgctaat

SEQ ID NO: 55428 - DNA, 19 bp, Homo sapiens
  siRNA target sequence for TEP1 (NM_007110.3,2150-2168).
ctatgcactgctgttgatt

SEQ ID NO: 55429 - DNA, 19 bp, Homo sapiens
  siRNA target sequence for TEP1 (NM_007110.3,2292-2310).
gtccaggagtttgatgaaa

SEQ ID NO: 55430 - DNA, 19 bp, Homo sapiens
  siRNA target sequence for TEP1 (NM_007110.3,2313-2331).
gatggatggtccctgaata

SEQ ID NO: 55431 - DNA, 19 bp, Homo sapiens
  siRNA target sequence for TEP1 (NM_007110.3,2317-2335).
gatggtccctgaatacttt

SEQ ID NO: 55432 - DNA, 19 bp, Homo sapiens
  siRNA target sequence for TEP1 (NM_007110.3,2404-2422).
gcatggatgatggaatgat

SEQ ID NO: 55433 - DNA, 19 bp, Homo sapiens
  siRNA target sequence for TEP1 (NM_007110.3,2408-2426).
ggatgatggaatgataaat

SEQ ID NO: 55434 - DNA, 19 bp, Homo sapiens
  siRNA target sequence for TEP1 (NM_007110.3,2475-2493).
gttggtatcctcctaagaa

SEQ ID NO: 55435 - DNA, 19 bp, Homo sapiens
  siRNA target sequence for TEP1 (NM_007110.3,2484-2502).
ctcctaagaagggtacaat

SEQ ID NO: 55436 - DNA, 19 bp, Homo sapiens
  siRNA target sequence for TEP1 (NM_007110.3,2499-2517).
caatacctgtcaacagatt

SEQ ID NO: 55437 - DNA, 19 bp, Homo sapiens
  siRNA target sequence for TEP1 (NM_007110.3,2504-2522).
cctgtcaacagatttgaat

SEQ ID NO: 55438 - DNA, 19 bp, Homo sapiens
  siRNA target sequence for TEP1 (NM_007110.3,2548-2566).
gtactgatgcgatactgaa

SEQ ID NO: 55439 - DNA, 19 bp, Homo sapiens
  siRNA target sequence for TEP1 (NM_007110.3,2551-2569).
ctgatgcgatactgaagtt

SEQ ID NO: 55440 - DNA, 19 bp, Homo sapiens
  siRNA target sequence for TEP1 (NM_007110.3,2553-2571).
gatgcgatactgaagttca

SEQ ID NO: 55441 - DNA, 19 bp, Homo sapiens
  siRNA target sequence for TEP1 (NM_007110.3,2590-2608).
cccatcttctggaacatgt

SEQ ID NO: 55442 - DNA, 19 bp, Homo sapiens
  siRNA target sequence for TEP1 (NM_007110.3,2730-2748).
cgcagcatccggcttttca

SEQ ID NO: 55443 - DNA, 19 bp, Homo sapiens
  siRNA target sequence for TEP1 (NM_007110.3,2731-2749).
gcagcatccggcttttcat

SEQ ID NO: 55444 - DNA, 19 bp, Homo sapiens
  siRNA target sequence for TEP1 (NM_007110.3,2958-2976).
ctgggctcccgttatggat

SEQ ID NO: 55445 - DNA, 19 bp, Homo sapiens
  siRNA target sequence for TEP1 (NM_007110.3,2962-2980).
gctcccgttatggatacat

SEQ ID NO: 55446 - DNA, 19 bp, Homo sapiens
  siRNA target sequence for TEP1 (NM_007110.3,2963-2981).
ctcccgttatggatacatt

SEQ ID NO: 55447 - DNA, 19 bp, Homo sapiens
  siRNA target sequence for TEP1 (NM_007110.3,3108-3126).
gcccaagctctcatctact

SEQ ID NO: 55448 - DNA, 19 bp, Homo sapiens
  siRNA target sequence for TEP1 (NM_007110.3,3339-3357).
ctgcaggatgtatggaata

SEQ ID NO: 55449 - DNA, 19 bp, Homo sapiens
  siRNA target sequence for TEP1 (NM_007110.3,3610-3628).
gggccaaggtggcatcatt

SEQ ID NO: 55450 - DNA, 19 bp, Homo sapiens
  siRNA target sequence for TEP1 (NM_007110.3,3611-3629).
ggccaaggtggcatcatta

SEQ ID NO: 55451 - DNA, 19 bp, Homo sapiens
  siRNA target sequence for TEP1 (NM_007110.3,3613-3631).
ccaaggtggcatcattagt

SEQ ID NO: 55452 - DNA, 19 bp, Homo sapiens
  siRNA target sequence for TEP1 (NM_007110.3,4159-4177).
ggctcttcacgctgtatga

SEQ ID NO: 55453 - DNA, 19 bp, Homo sapiens
  siRNA target sequence for TEP1 (NM_007110.3,4304-4322).
cacacggagtggtttgact

SEQ ID NO: 55454 - DNA, 19 bp, Homo sapiens
  siRNA target sequence for TEP1 (NM_007110.3,4362-4380).
ctaccgaaggggactaaga

SEQ ID NO: 55455 - DNA, 19 bp, Homo sapiens
  siRNA target sequence for TEP1 (NM_007110.3,4454-4472).
gagtctgcgcagtttgcta

SEQ ID NO: 55456 - DNA, 19 bp, Homo sapiens
  siRNA target sequence for TEP1 (NM_007110.3,4529-4547).
gagaacagcagctaaacgt

SEQ ID NO: 55457 - DNA, 19 bp, Homo sapiens
  siRNA target sequence for TEP1 (NM_007110.3,4710-4728).
cttctttcgaagttcctta

SEQ ID NO: 55458 - DNA, 19 bp, Homo sapiens
  siRNA target sequence for TEP1 (NM_007110.3,4788-4806).
gcccatgccctctatgctt

SEQ ID NO: 55459 - DNA, 19 bp, Homo sapiens
  siRNA target sequence for TEP1 (NM_007110.3,4997-5015).
cacactacgatggcttaat

SEQ ID NO: 55460 - DNA, 19 bp, Homo sapiens
  siRNA target sequence for TEP1 (NM_007110.3,5020-5038).
cccggaccatgaaaaatca

SEQ ID NO: 55461 - DNA, 19 bp, Homo sapiens
  siRNA target sequence for TEP1 (NM_007110.3,5199-5217).
ggaatctctgcttgtttgt

SEQ ID NO: 55462 - DNA, 19 bp, Homo sapiens
  siRNA target sequence for TEP1 (NM_007110.3,5216-5234).
gttcctctccgatgataca

SEQ ID NO: 55463 - DNA, 19 bp, Homo sapiens
  siRNA target sequence for TEP1 (NM_007110.3,5222-5240).
ctccgatgatacactcttt

SEQ ID NO: 55464 - DNA, 19 bp, Homo sapiens
  siRNA target sequence for TEP1 (NM_007110.3,5224-5242).
ccgatgatacactctttct

SEQ ID NO: 55465 - DNA, 19 bp, Homo sapiens
  siRNA target sequence for TEP1 (NM_007110.3,5225-5243).
cgatgatacactctttctt

SEQ ID NO: 55466 - DNA, 19 bp, Homo sapiens
  siRNA target sequence for TEP1 (NM_007110.3,5226-5244).
gatgatacactctttctta

SEQ ID NO: 55467 - DNA, 19 bp, Homo sapiens
  siRNA target sequence for TEP1 (NM_007110.3,5290-5308).
gtcgggtgctgcagactaa

SEQ ID NO: 55468 - DNA, 19 bp, Homo sapiens
  siRNA target sequence for TEP1 (NM_007110.3,5724-5742).
gcgggttgccagttactga

SEQ ID NO: 55469 - DNA, 19 bp, Homo sapiens
  siRNA target sequence for TEP1 (NM_007110.3,5864-5882).
ggtggctgttggatatcga

SEQ ID NO: 55470 - DNA, 19 bp, Homo sapiens
  siRNA target sequence for TEP1 (NM_007110.3,5880-5898).
cgagcggatggcattagga

SEQ ID NO: 55471 - DNA, 19 bp, Homo sapiens
  siRNA target sequence for TEP1 (NM_007110.3,5881-5899).
gagcggatggcattaggat

SEQ ID NO: 55472 - DNA, 19 bp, Homo sapiens
  siRNA target sequence for TEP1 (NM_007110.3,5886-5904).
gatggcattaggatctaca

SEQ ID NO: 55473 - DNA, 19 bp, Homo sapiens
  siRNA target sequence for TEP1 (NM_007110.3,5889-5907).
ggcattaggatctacaaaa

SEQ ID NO: 55474 - DNA, 19 bp, Homo sapiens
  siRNA target sequence for TEP1 (NM_007110.3,5890-5908).
gcattaggatctacaaaat

SEQ ID NO: 55475 - DNA, 19 bp, Homo sapiens
  siRNA target sequence for TEP1 (NM_007110.3,5971-5989).
ggctaagccccaaggtatt

SEQ ID NO: 55476 - DNA, 19 bp, Homo sapiens
  siRNA target sequence for TEP1 (NM_007110.3,6229-6247).
ctgtgagctgctgtagttt

SEQ ID NO: 55477 - DNA, 19 bp, Homo sapiens
  siRNA target sequence for TEP1 (NM_007110.3,6318-6336).
cccaaaacccctgttttga

SEQ ID NO: 55478 - DNA, 19 bp, Homo sapiens
  siRNA target sequence for TEP1 (NM_007110.3,6377-6395).
ctgtgcctggaccaaagat

SEQ ID NO: 55479 - DNA, 19 bp, Homo sapiens
  siRNA target sequence for TEP1 (NM_007110.3,6379-6397).
gtgcctggaccaaagataa

SEQ ID NO: 55480 - DNA, 19 bp, Homo sapiens
  siRNA target sequence for TEP1 (NM_007110.3,6389-6407).
caaagataacctactgata

SEQ ID NO: 55481 - DNA, 19 bp, Homo sapiens
  siRNA target sequence for TEP1 (NM_007110.3,6393-6411).
gataacctactgatatcct

SEQ ID NO: 55482 - DNA, 19 bp, Homo sapiens
  siRNA target sequence for TEP1 (NM_007110.3,6536-6554).
ccgggatgggaccttgaaa

SEQ ID NO: 55483 - DNA, 19 bp, Homo sapiens
  siRNA target sequence for TEP1 (NM_007110.3,6833-6851).
ctggcaggttcctaaggaa

SEQ ID NO: 55484 - DNA, 19 bp, Homo sapiens
  siRNA target sequence for TEP1 (NM_007110.3,6920-6938).
catggcagtatctggaaat

SEQ ID NO: 55485 - DNA, 19 bp, Homo sapiens
  siRNA target sequence for TEP1 (NM_007110.3,6939-6957).
caagctggggaactaatct

SEQ ID NO: 55486 - DNA, 19 bp, Homo sapiens
  siRNA target sequence for TEP1 (NM_007110.3,7024-7042).
cctcggcacacaccttttt

SEQ ID NO: 55487 - DNA, 19 bp, Homo sapiens
  siRNA target sequence for TEP1 (NM_007110.3,7025-7043).
ctcggcacacacctttttt

SEQ ID NO: 55488 - DNA, 19 bp, Homo sapiens
  siRNA target sequence for TEP1 (NM_007110.3,7069-7087).
gcgagtggcaagtgaaact

SEQ ID NO: 55489 - DNA, 19 bp, Homo sapiens
  siRNA target sequence for TEP1 (NM_007110.3,7095-7113).
ggttcggcacccggaaatt

SEQ ID NO: 55490 - DNA, 19 bp, Homo sapiens
  siRNA target sequence for TEP1 (NM_007110.3,7096-7114).
gttcggcacccggaaattt

SEQ ID NO: 55491 - DNA, 19 bp, Homo sapiens
  siRNA target sequence for TEP1 (NM_007110.3,7100-7118).
ggcacccggaaatttgagt

SEQ ID NO: 55492 - DNA, 19 bp, Homo sapiens
  siRNA target sequence for TEP1 (NM_007110.3,7175-7193).
ggctcctgatggtcacttt

SEQ ID NO: 55493 - DNA, 19 bp, Homo sapiens
  siRNA target sequence for TEP1 (NM_007110.3,7209-7227).
gcagatttgaagttacttt

SEQ ID NO: 55494 - DNA, 19 bp, Homo sapiens
  siRNA target sequence for TEP1 (NM_007110.3,7240-7258).
gggatgctccatctgaaat

SEQ ID NO: 55495 - DNA, 19 bp, Homo sapiens
  siRNA target sequence for TEP1 (NM_007110.3,7242-7260).
gatgctccatctgaaatct

SEQ ID NO: 55496 - DNA, 19 bp, Homo sapiens
  siRNA target sequence for TEP1 (NM_007110.3,7254-7272).
gaaatctggagcagctata

SEQ ID NO: 55497 - DNA, 19 bp, Homo sapiens
  siRNA target sequence for TEP1 (NM_007110.3,7267-7285).
gctatacagaaaatcctat

SEQ ID NO: 55498 - DNA, 19 bp, Homo sapiens
  siRNA target sequence for TEP1 (NM_007110.3,7367-7385).
ggaatcaggagagtttgaa

SEQ ID NO: 55499 - DNA, 19 bp, Homo sapiens
  siRNA target sequence for TEP1 (NM_007110.3,7386-7404).
gagaggctgaactttgata

SEQ ID NO: 55500 - DNA, 19 bp, Homo sapiens
  siRNA target sequence for TEP1 (NM_007110.3,7388-7406).
gaggctgaactttgatata

SEQ ID NO: 55501 - DNA, 19 bp, Homo sapiens
  siRNA target sequence for TEP1 (NM_007110.3,7419-7437).
cctagtaggaccctaatat

SEQ ID NO: 55502 - DNA, 19 bp, Homo sapiens
  siRNA target sequence for TEP1 (NM_007110.3,7423-7441).
gtaggaccctaatatcgat

SEQ ID NO: 55503 - DNA, 19 bp, Homo sapiens
  siRNA target sequence for TEP1 (NM_007110.3,7427-7445).
gaccctaatatcgataact

SEQ ID NO: 55504 - DNA, 19 bp, Homo sapiens
  siRNA target sequence for TEP1 (NM_007110.3,7429-7447).
ccctaatatcgataactca

SEQ ID NO: 55505 - DNA, 19 bp, Homo sapiens
  siRNA target sequence for TEP1 (NM_007110.3,7430-7448).
cctaatatcgataactcaa

SEQ ID NO: 55506 - DNA, 19 bp, Homo sapiens
  siRNA target sequence for TEP1 (NM_007110.3,7489-7507).
ctgatgggatcctatggaa

SEQ ID NO: 55507 - DNA, 19 bp, Homo sapiens
  siRNA target sequence for TEP1 (NM_007110.3,7606-7624).
ctacctgcagggaatctga

SEQ ID NO: 55508 - DNA, 19 bp, Homo sapiens
  siRNA target sequence for TEP1 (NM_007110.3,7659-7677).
gagccaacaccacatctaa

SEQ ID NO: 55509 - DNA, 19 bp, Homo sapiens
  siRNA target sequence for TEP1 (NM_007110.3,7662-7680).
ccaacaccacatctaaaga

SEQ ID NO: 55510 - DNA, 19 bp, Homo sapiens
  siRNA target sequence for TEP1 (NM_007110.3,7681-7699).
cacggcagcgtagaaagat

SEQ ID NO: 55511 - DNA, 19 bp, Homo sapiens
  siRNA target sequence for TEP1 (NM_007110.3,7684-7702).
ggcagcgtagaaagattca

SEQ ID NO: 55512 - DNA, 19 bp, Homo sapiens
  siRNA target sequence for TEP1 (NM_007110.3,7756-7774).
cgaaggacagagatgttaa

SEQ ID NO: 55513 - DNA, 19 bp, Homo sapiens
  siRNA target sequence for TRNT1 (NM_016000.2,157-175).
ccgaattccagtcactttt

SEQ ID NO: 55514 - DNA, 19 bp, Homo sapiens
  siRNA target sequence for TRNT1 (NM_016000.2,216-234).
gagaatcacgaattaagaa

SEQ ID NO: 55515 - DNA, 19 bp, Homo sapiens
  siRNA target sequence for TRNT1 (NM_016000.2,218-236).
gaatcacgaattaagaata

SEQ ID NO: 55516 - DNA, 19 bp, Homo sapiens
  siRNA target sequence for TRNT1 (NM_016000.2,244-262).
gagcagtgagggatttatt

SEQ ID NO: 55517 - DNA, 19 bp, Homo sapiens
  siRNA target sequence for TRNT1 (NM_016000.2,247-265).
cagtgagggatttattaaa

SEQ ID NO: 55518 - DNA, 19 bp, Homo sapiens
  siRNA target sequence for TRNT1 (NM_016000.2,251-269).
gagggatttattaaatgga

SEQ ID NO: 55519 - DNA, 19 bp, Homo sapiens
  siRNA target sequence for TRNT1 (NM_016000.2,338-356).
ggctgggattcggatgata

SEQ ID NO: 55520 - DNA, 19 bp, Homo sapiens
  siRNA target sequence for TRNT1 (NM_016000.2,339-357).
gctgggattcggatgataa

SEQ ID NO: 55521 - DNA, 19 bp, Homo sapiens
  siRNA target sequence for TRNT1 (NM_016000.2,340-358).
ctgggattcggatgataaa

SEQ ID NO: 55522 - DNA, 19 bp, Homo sapiens
  siRNA target sequence for TRNT1 (NM_016000.2,342-360).
gggattcggatgataaaca

SEQ ID NO: 55523 - DNA, 19 bp, Homo sapiens
  siRNA target sequence for TRNT1 (NM_016000.2,343-361).
ggattcggatgataaacaa

SEQ ID NO: 55524 - DNA, 19 bp, Homo sapiens
  siRNA target sequence for TRNT1 (NM_016000.2,421-439).
ctacactacggattgatgt

SEQ ID NO: 55525 - DNA, 19 bp, Homo sapiens
  siRNA target sequence for TRNT1 (NM_016000.2,440-458).
caccactgatggaagacat

SEQ ID NO: 55526 - DNA, 19 bp, Homo sapiens
  siRNA target sequence for TRNT1 (NM_016000.2,501-519).
cgcagagatctcactataa

SEQ ID NO: 55527 - DNA, 19 bp, Homo sapiens
  siRNA target sequence for TRNT1 (NM_016000.2,510-528).
ctcactataaattctatgt

SEQ ID NO: 55528 - DNA, 19 bp, Homo sapiens
  siRNA target sequence for TRNT1 (NM_016000.2,540-558).
gatggcactttatttgact

SEQ ID NO: 55529 - DNA, 19 bp, Homo sapiens
  siRNA target sequence for TRNT1 (NM_016000.2,544-562).
gcactttatttgactactt

SEQ ID NO: 55530 - DNA, 19 bp, Homo sapiens
  siRNA target sequence for TRNT1 (NM_016000.2,545-563).
cactttatttgactacttt

SEQ ID NO: 55531 - DNA, 19 bp, Homo sapiens
  siRNA target sequence for TRNT1 (NM_016000.2,560-578).
ctttaatggttatgaagat

SEQ ID NO: 55532 - DNA, 19 bp, Homo sapiens
  siRNA target sequence for TRNT1 (NM_016000.2,603-621).
gttggacatgctaaacaga

SEQ ID NO: 55533 - DNA, 19 bp, Homo sapiens
  siRNA target sequence for TRNT1 (NM_016000.2,607-625).
gacatgctaaacagagaat

SEQ ID NO: 55534 - DNA, 19 bp, Homo sapiens
  siRNA target sequence for TRNT1 (NM_016000.2,703-721).
ctgagactttggaagcaat

SEQ ID NO: 55535 - DNA, 19 bp, Homo sapiens
  siRNA target sequence for TRNT1 (NM_016000.2,789-807).
cttgttggtaaccatgtaa

SEQ ID NO: 55536 - DNA, 19 bp, Homo sapiens
  siRNA target sequence for TRNT1 (NM_016000.2,800-818).
ccatgtaaatcatttgatt

SEQ ID NO: 55537 - DNA, 19 bp, Homo sapiens
  siRNA target sequence for TRNT1 (NM_016000.2,810-828).
catttgattcaccttatct

SEQ ID NO: 55538 - DNA, 19 bp, Homo sapiens
  siRNA target sequence for TRNT1 (NM_016000.2,815-833).
gattcaccttatctatgat

SEQ ID NO: 55539 - DNA, 19 bp, Homo sapiens
  siRNA target sequence for TRNT1 (NM_016000.2,821-839).
ccttatctatgatcttgat

SEQ ID NO: 55540 - DNA, 19 bp, Homo sapiens
  siRNA target sequence for TRNT1 (NM_016000.2,842-860).
ggctccttatataggttta

SEQ ID NO: 55541 - DNA, 19 bp, Homo sapiens
  siRNA target sequence for TRNT1 (NM_016000.2,862-880).
ctgctaatgcaagtttaga

SEQ ID NO: 55542 - DNA, 19 bp, Homo sapiens
  siRNA target sequence for TRNT1 (NM_016000.2,865-883).
ctaatgcaagtttagaaga

SEQ ID NO: 55543 - DNA, 19 bp, Homo sapiens
  siRNA target sequence for TRNT1 (NM_016000.2,932-950).
gactcttttggcctcatta

SEQ ID NO: 55544 - DNA, 19 bp, Homo sapiens
  siRNA target sequence for TRNT1 (NM_016000.2,966-984).
gatgtcacaaaattggatt

SEQ ID NO: 55545 - DNA, 19 bp, Homo sapiens
  siRNA target sequence for TRNT1 (NM_016000.2,1021-1039).
gcttatttatagttaaaaa

SEQ ID NO: 55546 - DNA, 19 bp, Homo sapiens
  siRNA target sequence for TRNT1 (NM_016000.2,1086-1104).
ccctatcaagacttcatta

SEQ ID NO: 55547 - DNA, 19 bp, Homo sapiens
  siRNA target sequence for TRNT1 (NM_016000.2,1087-1105).
cctatcaagacttcattat

SEQ ID NO: 55548 - DNA, 19 bp, Homo sapiens
  siRNA target sequence for TRNT1 (NM_016000.2,1088-1106).
ctatcaagacttcattata

SEQ ID NO: 55549 - DNA, 19 bp, Homo sapiens
  siRNA target sequence for TRNT1 (NM_016000.2,1092-1110).
caagacttcattatagatt

SEQ ID NO: 55550 - DNA, 19 bp, Homo sapiens
  siRNA target sequence for TRNT1 (NM_016000.2,1095-1113).
gacttcattatagattcta

SEQ ID NO: 55551 - DNA, 19 bp, Homo sapiens
  siRNA target sequence for TRNT1 (NM_016000.2,1126-1144).
caactactcgtgtatgtga

SEQ ID NO: 55552 - DNA, 19 bp, Homo sapiens
  siRNA target sequence for TRNT1 (NM_016000.2,1132-1150).
ctcgtgtatgtgaactact

SEQ ID NO: 55553 - DNA, 19 bp, Homo sapiens
  siRNA target sequence for TRNT1 (NM_016000.2,1306-1324).
gtggttaccaaatggaaaa

SEQ ID NO: 55554 - DNA, 19 bp, Homo sapiens
  siRNA target sequence for TRNT1 (NM_016000.2,1309-1327).
gttaccaaatggaaaaaga

SEQ ID NO: 55555 - DNA, 19 bp, Homo sapiens
  siRNA target sequence for TTC14 (NM_133462.1,237-255).
cccgttgcagggcagaaaa

SEQ ID NO: 55556 - DNA, 19 bp, Homo sapiens
  siRNA target sequence for TTC14 (NM_133462.1,268-286).
gacaacatcgagatacaga

SEQ ID NO: 55557 - DNA, 19 bp, Homo sapiens
  siRNA target sequence for TTC14 (NM_133462.1,343-361).
cctgcaacttctgaaatta

SEQ ID NO: 55558 - DNA, 19 bp, Homo sapiens
  siRNA target sequence for TTC14 (NM_133462.1,371-389).
gtgaagatcattatgcaat

SEQ ID NO: 55559 - DNA, 19 bp, Homo sapiens
  siRNA target sequence for TTC14 (NM_133462.1,386-404).
caatcatgccacctttaga

SEQ ID NO: 55560 - DNA, 19 bp, Homo sapiens
  siRNA target sequence for TTC14 (NM_133462.1,406-424).
caattcatggagataccta

SEQ ID NO: 55561 - DNA, 19 bp, Homo sapiens
  siRNA target sequence for TTC14 (NM_133462.1,430-448).
gatcggagagagctgtttt

SEQ ID NO: 55562 - DNA, 19 bp, Homo sapiens
  siRNA target sequence for TTC14 (NM_133462.1,466-484).
ggtgatatagtgattggaa

SEQ ID NO: 55563 - DNA, 19 bp, Homo sapiens
  siRNA target sequence for TTC14 (NM_133462.1,499-517).
cgggaattcggttttttca

SEQ ID NO: 55564 - DNA, 19 bp, Homo sapiens
  siRNA target sequence for TTC14 (NM_133462.1,500-518).
gggaattcggttttttcat

SEQ ID NO: 55565 - DNA, 19 bp, Homo sapiens
  siRNA target sequence for TTC14 (NM_133462.1,519-537).
ggtgttgatctgtttagga

SEQ ID NO: 55566 - DNA, 19 bp, Homo sapiens
  siRNA target sequence for TTC14 (NM_133462.1,539-557).
gtggtatcatgagagatat

SEQ ID NO: 55567 - DNA, 19 bp, Homo sapiens
  siRNA target sequence for TTC14 (NM_133462.1,551-569).
gagatatagcccacttaga

SEQ ID NO: 55568 - DNA, 19 bp, Homo sapiens
  siRNA target sequence for TTC14 (NM_133462.1,553-571).
gatatagcccacttagaaa

SEQ ID NO: 55569 - DNA, 19 bp, Homo sapiens
  siRNA target sequence for TTC14 (NM_133462.1,600-618).
gccttctcacagtaaccat

SEQ ID NO: 55570 - DNA, 19 bp, Homo sapiens
  siRNA target sequence for TTC14 (NM_133462.1,615-633).
ccatggggatcctttatca

SEQ ID NO: 55571 - DNA, 19 bp, Homo sapiens
  siRNA target sequence for TTC14 (NM_133462.1,616-634).
catggggatcctttatcat

SEQ ID NO: 55572 - DNA, 19 bp, Homo sapiens
  siRNA target sequence for TTC14 (NM_133462.1,619-637).
ggggatcctttatcatatt

SEQ ID NO: 55573 - DNA, 19 bp, Homo sapiens
  siRNA target sequence for TTC14 (NM_133462.1,620-638).
gggatcctttatcatatta

SEQ ID NO: 55574 - DNA, 19 bp, Homo sapiens
  siRNA target sequence for TTC14 (NM_133462.1,625-643).
cctttatcatattaccaaa

SEQ ID NO: 55575 - DNA, 19 bp, Homo sapiens
  siRNA target sequence for TTC14 (NM_133462.1,639-657).
ccaaactggtgacatcatt

SEQ ID NO: 55576 - DNA, 19 bp, Homo sapiens
  siRNA target sequence for TTC14 (NM_133462.1,658-676).
cgagctggaatcaaggata

SEQ ID NO: 55577 - DNA, 19 bp, Homo sapiens
  siRNA target sequence for TTC14 (NM_133462.1,697-715).
ctagcagtatctctgtata

SEQ ID NO: 55578 - DNA, 19 bp, Homo sapiens
  siRNA target sequence for TTC14 (NM_133462.1,700-718).
gcagtatctctgtatagct

SEQ ID NO: 55579 - DNA, 19 bp, Homo sapiens
  siRNA target sequence for TTC14 (NM_133462.1,735-753).
cctatctggtattaaatta

SEQ ID NO: 55580 - DNA, 19 bp, Homo sapiens
  siRNA target sequence for TTC14 (NM_133462.1,772-790).
gagcttcctttatactaca

SEQ ID NO: 55581 - DNA, 19 bp, Homo sapiens
  siRNA target sequence for TTC14 (NM_133462.1,791-809).
ggagaagtgttgagctaaa

SEQ ID NO: 55582 - DNA, 19 bp, Homo sapiens
  siRNA target sequence for TTC14 (NM_133462.1,797-815).
gtgttgagctaaatagcaa

SEQ ID NO: 55583 - DNA, 19 bp, Homo sapiens
  siRNA target sequence for TTC14 (NM_133462.1,802-820).
gagctaaatagcaattctt

SEQ ID NO: 55584 - DNA, 19 bp, Homo sapiens
  siRNA target sequence for TTC14 (NM_133462.1,848-866).
gttccttgggatttgttaa

SEQ ID NO: 55585 - DNA, 19 bp, Homo sapiens
  siRNA target sequence for TTC14 (NM_133462.1,869-887).
caggagtagttgaattcct

SEQ ID NO: 55586 - DNA, 19 bp, Homo sapiens
  siRNA target sequence for TTC14 (NM_133462.1,898-916).
ctaggaatagatgaatcta

SEQ ID NO: 55587 - DNA, 19 bp, Homo sapiens
  siRNA target sequence for TTC14 (NM_133462.1,935-953).
gaggcctacaaagcaaaaa

SEQ ID NO: 55588 - DNA, 19 bp, Homo sapiens
  siRNA target sequence for TTC14 (NM_133462.1,937-955).
ggcctacaaagcaaaaatt

SEQ ID NO: 55589 - DNA, 19 bp, Homo sapiens
  siRNA target sequence for TTC14 (NM_133462.1,938-956).
gcctacaaagcaaaaattt

SEQ ID NO: 55590 - DNA, 19 bp, Homo sapiens
  siRNA target sequence for TTC14 (NM_133462.1,1023-1041).
gaagatcggagttgactat

SEQ ID NO: 55591 - DNA, 19 bp, Homo sapiens
  siRNA target sequence for TTC14 (NM_133462.1,1026-1044).
gatcggagttgactatttt

SEQ ID NO: 55592 - DNA, 19 bp, Homo sapiens
  siRNA target sequence for TTC14 (NM_133462.1,1029-1047).
cggagttgactattttaaa

SEQ ID NO: 55593 - DNA, 19 bp, Homo sapiens
  siRNA target sequence for TTC14 (NM_133462.1,1055-1073).
gccatgtggatgctatgaa

SEQ ID NO: 55594 - DNA, 19 bp, Homo sapiens
  siRNA target sequence for TTC14 (NM_133462.1,1144-1162).
gcgacaaaaggaagtttga

SEQ ID NO: 55595 - DNA, 19 bp, Homo sapiens
  siRNA target sequence for TTC14 (NM_133462.1,1145-1163).
cgacaaaaggaagtttgaa

SEQ ID NO: 55596 - DNA, 19 bp, Homo sapiens
  siRNA target sequence for TTC14 (NM_133462.1,1230-1248).
cctctgccagacacttgta

SEQ ID NO: 55597 - DNA, 19 bp, Homo sapiens
  siRNA target sequence for TTC14 (NM_133462.1,1292-1310).
ctgaaagttactataagaa

SEQ ID NO: 55598 - DNA, 19 bp, Homo sapiens
  siRNA target sequence for TTC14 (NM_133462.1,1317-1335).
ggctttggatgagactttt

SEQ ID NO: 55599 - DNA, 19 bp, Homo sapiens
  siRNA target sequence for TTC14 (NM_133462.1,1351-1369).
gctttgcagaaacttcata

SEQ ID NO: 55600 - DNA, 19 bp, Homo sapiens
  siRNA target sequence for TTC14 (NM_133462.1,1464-1482).
gcgtaagctcttaaaagaa

SEQ ID NO: 55601 - DNA, 19 bp, Homo sapiens
  siRNA target sequence for TTC14 (NM_133462.1,1535-1553).
cttctgctgatgaatcagt

SEQ ID NO: 55602 - DNA, 19 bp, Homo sapiens
  siRNA target sequence for TTC14 (NM_133462.1,1582-1600).
ggtcacaaaaggcataaga

SEQ ID NO: 55603 - DNA, 19 bp, Homo sapiens
  siRNA target sequence for TTC14 (NM_133462.1,1583-1601).
gtcacaaaaggcataagaa

SEQ ID NO: 55604 - DNA, 19 bp, Homo sapiens
  siRNA target sequence for TTC14 (NM_133462.1,1652-1670).
ctagggcatcctcaaatca

SEQ ID NO: 55605 - DNA, 19 bp, Homo sapiens
  siRNA target sequence for TTC14 (NM_133462.1,1655-1673).
gggcatcctcaaatcagat

SEQ ID NO: 55606 - DNA, 19 bp, Homo sapiens
  siRNA target sequence for TTC14 (NM_133462.1,1701-1719).
cccagttccagctaatact

SEQ ID NO: 55607 - DNA, 19 bp, Homo sapiens
  siRNA target sequence for TTC14 (NM_133462.1,1702-1720).
ccagttccagctaatactt

SEQ ID NO: 55608 - DNA, 19 bp, Homo sapiens
  siRNA target sequence for TTC14 (NM_133462.1,1764-1782).
ggggaagcaggataggtta

SEQ ID NO: 55609 - DNA, 19 bp, Homo sapiens
  siRNA target sequence for TTC14 (NM_133462.1,1770-1788).
gcaggataggttacagtat

SEQ ID NO: 55610 - DNA, 19 bp, Homo sapiens
  siRNA target sequence for TTC14 (NM_133462.1,1773-1791).
ggataggttacagtatgaa

SEQ ID NO: 55611 - DNA, 19 bp, Homo sapiens
  siRNA target sequence for TTC14 (NM_133462.1,1840-1858).
cttgaaataccggatgatt

SEQ ID NO: 55612 - DNA, 19 bp, Homo sapiens
  siRNA target sequence for TTC14 (NM_133462.1,1913-1931).
caggtagtagcaaaacaga

SEQ ID NO: 55613 - DNA, 19 bp, Homo sapiens
  siRNA target sequence for TTC14 (NM_133462.1,1915-1933).
ggtagtagcaaaacagaaa

SEQ ID NO: 55614 - DNA, 19 bp, Homo sapiens
  siRNA target sequence for TTC14 (NM_133462.1,2017-2035).
ggttataggagatttgaaa

SEQ ID NO: 55615 - DNA, 19 bp, Homo sapiens
  siRNA target sequence for TTC14 (NM_133462.1,2018-2036).
gttataggagatttgaaaa

SEQ ID NO: 55616 - DNA, 19 bp, Homo sapiens
  siRNA target sequence for TTC14 (NM_133462.1,2102-2120).
caccagcaagctcagaata

SEQ ID NO: 55617 - DNA, 19 bp, Homo sapiens
  siRNA target sequence for TTC14 (NM_133462.1,2123-2141).
cttggaagtcagttgagaa

SEQ ID NO: 55618 - DNA, 19 bp, Homo sapiens
  siRNA target sequence for TTC14 (NM_133462.1,2180-2198).
gtagacatgagcaaagata

SEQ ID NO: 55619 - DNA, 19 bp, Homo sapiens
  siRNA target sequence for TTC14 (NM_133462.1,2188-2206).
gagcaaagataccgtttaa

SEQ ID NO: 55620 - DNA, 19 bp, Homo sapiens
  siRNA target sequence for TTC14 (NM_133462.1,2190-2208).
gcaaagataccgtttaaat

SEQ ID NO: 55621 - DNA, 19 bp, Homo sapiens
  siRNA target sequence for TTC14 (NM_133462.1,2195-2213).
gataccgtttaaatacaaa

SEQ ID NO: 55622 - DNA, 19 bp, Homo sapiens
  siRNA target sequence for TTC14 (NM_133462.1,2246-2264).
gggaggatatcaaaacaga

SEQ ID NO: 55623 - DNA, 19 bp, Homo sapiens
  siRNA target sequence for TTC14 (NM_133462.1,2272-2290).
gaagaagatgcactaagta

SEQ ID NO: 55624 - DNA, 19 bp, Homo sapiens
  siRNA target sequence for TTC14 (NM_133462.1,2282-2300).
cactaagtagcaaagaaca

SEQ ID NO: 55625 - DNA, 19 bp, Homo sapiens
  siRNA target sequence for TTC14 (NM_133462.1,2356-2374).
cagatagctgaatttgaaa

SEQ ID NO: 55626 - DNA, 19 bp, Homo sapiens
  siRNA target sequence for UPF2 (NM_015542.2,180-198).
ggccaaaagacgatatcaa

SEQ ID NO: 55627 - DNA, 19 bp, Homo sapiens
  siRNA target sequence for UPF2 (NM_015542.2,399-417).
ccaaacgtcagcaagaaga

SEQ ID NO: 55628 - DNA, 19 bp, Homo sapiens
  siRNA target sequence for UPF2 (NM_015542.2,473-491).
gcttgggaacgacatcatt

SEQ ID NO: 55629 - DNA, 19 bp, Homo sapiens
  siRNA target sequence for UPF2 (NM_015542.2,474-492).
cttgggaacgacatcattt

SEQ ID NO: 55630 - DNA, 19 bp, Homo sapiens
  siRNA target sequence for UPF2 (NM_015542.2,534-552).
gccgaccagaggaaaactt

SEQ ID NO: 55631 - DNA, 19 bp, Homo sapiens
  siRNA target sequence for UPF2 (NM_015542.2,536-554).
cgaccagaggaaaacttct

SEQ ID NO: 55632 - DNA, 19 bp, Homo sapiens
  siRNA target sequence for UPF2 (NM_015542.2,560-578).
cgcctcgactcaagtttga

SEQ ID NO: 55633 - DNA, 19 bp, Homo sapiens
  siRNA target sequence for UPF2 (NM_015542.2,561-579).
gcctcgactcaagtttgaa

SEQ ID NO: 55634 - DNA, 19 bp, Homo sapiens
  siRNA target sequence for UPF2 (NM_015542.2,563-581).
ctcgactcaagtttgaaga

SEQ ID NO: 55635 - DNA, 19 bp, Homo sapiens
  siRNA target sequence for UPF2 (NM_015542.2,565-583).
cgactcaagtttgaagaaa

SEQ ID NO: 55636 - DNA, 19 bp, Homo sapiens
  siRNA target sequence for UPF2 (NM_015542.2,757-775).
ctttcaccagcgttatgct

SEQ ID NO: 55637 - DNA, 19 bp, Homo sapiens
  siRNA target sequence for UPF2 (NM_015542.2,763-781).
ccagcgttatgctgacttt

SEQ ID NO: 55638 - DNA, 19 bp, Homo sapiens
  siRNA target sequence for UPF2 (NM_015542.2,861-879).
gaactgatttgcgttttat

SEQ ID NO: 55639 - DNA, 19 bp, Homo sapiens
  siRNA target sequence for UPF2 (NM_015542.2,872-890).
cgttttattgcagaattga

SEQ ID NO: 55640 - DNA, 19 bp, Homo sapiens
  siRNA target sequence for UPF2 (NM_015542.2,938-956).
gaacagctaaaaaatatta

SEQ ID NO: 55641 - DNA, 19 bp, Homo sapiens
  siRNA target sequence for UPF2 (NM_015542.2,981-999).
ctcatgtctctgtagtgat

SEQ ID NO: 55642 - DNA, 19 bp, Homo sapiens
  siRNA target sequence for UPF2 (NM_015542.2,1010-1028).
cgacattgtggagatgata

SEQ ID NO: 55643 - DNA, 19 bp, Homo sapiens
  siRNA target sequence for UPF2 (NM_015542.2,1011-1029).
gacattgtggagatgatat

SEQ ID NO: 55644 - DNA, 19 bp, Homo sapiens
  siRNA target sequence for UPF2 (NM_015542.2,1088-1106).
cctcctagtgagataatta

SEQ ID NO: 55645 - DNA, 19 bp, Homo sapiens
  siRNA target sequence for UPF2 (NM_015542.2,1145-1163).
gagtactttacgtctttga

SEQ ID NO: 55646 - DNA, 19 bp, Homo sapiens
  siRNA target sequence for UPF2 (NM_015542.2,1218-1236).
ggcgcattctacattctaa

SEQ ID NO: 55647 - DNA, 19 bp, Homo sapiens
  siRNA target sequence for UPF2 (NM_015542.2,1219-1237).
gcgcattctacattctaaa

SEQ ID NO: 55648 - DNA, 19 bp, Homo sapiens
  siRNA target sequence for UPF2 (NM_015542.2,1297-1315).
gctgctggcaaattctcaa

SEQ ID NO: 55649 - DNA, 19 bp, Homo sapiens
  siRNA target sequence for UPF2 (NM_015542.2,1430-1448).
gacttggaaggtggtatat

SEQ ID NO: 55650 - DNA, 19 bp, Homo sapiens
  siRNA target sequence for UPF2 (NM_015542.2,1440-1458).
gtggtatatgggaagatga

SEQ ID NO: 55651 - DNA, 19 bp, Homo sapiens
  siRNA target sequence for UPF2 (NM_015542.2,1457-1475).
gaagatgctcggaattttt

SEQ ID NO: 55652 - DNA, 19 bp, Homo sapiens
  siRNA target sequence for UPF2 (NM_015542.2,1611-1629).
caagtcccgatgatttgga

SEQ ID NO: 55653 - DNA, 19 bp, Homo sapiens
  siRNA target sequence for UPF2 (NM_015542.2,1749-1767).
gcactggatctcatctcaa

SEQ ID NO: 55654 - DNA, 19 bp, Homo sapiens
  siRNA target sequence for UPF2 (NM_015542.2,1758-1776).
ctcatctcaagctcatagt

SEQ ID NO: 55655 - DNA, 19 bp, Homo sapiens
  siRNA target sequence for UPF2 (NM_015542.2,1806-1824).
gtgtcaaccgagatctgat

SEQ ID NO: 55656 - DNA, 19 bp, Homo sapiens
  siRNA target sequence for UPF2 (NM_015542.2,1852-1870).
gaacatgaacacaaaagca

SEQ ID NO: 55657 - DNA, 19 bp, Homo sapiens
  siRNA target sequence for UPF2 (NM_015542.2,1885-1903).
ggtacgggcactcttcata

SEQ ID NO: 55658 - DNA, 19 bp, Homo sapiens
  siRNA target sequence for UPF2 (NM_015542.2,1897-1915).
cttcatagttcctagacaa

SEQ ID NO: 55659 - DNA, 19 bp, Homo sapiens
  siRNA target sequence for UPF2 (NM_015542.2,1907-1925).
cctagacaaaggttggatt

SEQ ID NO: 55660 - DNA, 19 bp, Homo sapiens
  siRNA target sequence for UPF2 (NM_015542.2,1908-1926).
ctagacaaaggttggattt

SEQ ID NO: 55661 - DNA, 19 bp, Homo sapiens
  siRNA target sequence for UPF2 (NM_015542.2,1911-1929).
gacaaaggttggatttgct

SEQ ID NO: 55662 - DNA, 19 bp, Homo sapiens
  siRNA target sequence for UPF2 (NM_015542.2,1917-1935).
ggttggatttgctaccatt

SEQ ID NO: 55663 - DNA, 19 bp, Homo sapiens
  siRNA target sequence for UPF2 (NM_015542.2,1918-1936).
gttggatttgctaccattt

SEQ ID NO: 55664 - DNA, 19 bp, Homo sapiens
  siRNA target sequence for UPF2 (NM_015542.2,1976-1994).
gatgtagcagaggatcttt

SEQ ID NO: 55665 - DNA, 19 bp, Homo sapiens
  siRNA target sequence for UPF2 (NM_015542.2,1979-1997).
gtagcagaggatctttgtt

SEQ ID NO: 55666 - DNA, 19 bp, Homo sapiens
  siRNA target sequence for UPF2 (NM_015542.2,2002-2020).
gctgaggggggatttcaga

SEQ ID NO: 55667 - DNA, 19 bp, Homo sapiens
  siRNA target sequence for UPF2 (NM_015542.2,2008-2026).
gggggatttcagatttcat

SEQ ID NO: 55668 - DNA, 19 bp, Homo sapiens
  siRNA target sequence for UPF2 (NM_015542.2,2038-2056).
ggaccagatcaatattgaa

SEQ ID NO: 55669 - DNA, 19 bp, Homo sapiens
  siRNA target sequence for UPF2 (NM_015542.2,2041-2059).
ccagatcaatattgaaaca

SEQ ID NO: 55670 - DNA, 19 bp, Homo sapiens
  siRNA target sequence for UPF2 (NM_015542.2,2090-2108).
ctaactaagtttaagatgt

SEQ ID NO: 55671 - DNA, 19 bp, Homo sapiens
  siRNA target sequence for UPF2 (NM_015542.2,2160-2178).
ctcatcaccatattgaaat

SEQ ID NO: 55672 - DNA, 19 bp, Homo sapiens
  siRNA target sequence for UPF2 (NM_015542.2,2204-2222).
ggacggtttcttttcagat

SEQ ID NO: 55673 - DNA, 19 bp, Homo sapiens
  siRNA target sequence for UPF2 (NM_015542.2,2236-2254).
cctgaggaccagtgtactt

SEQ ID NO: 55674 - DNA, 19 bp, Homo sapiens
  siRNA target sequence for UPF2 (NM_015542.2,2241-2259).
ggaccagtgtacttttgga

SEQ ID NO: 55675 - DNA, 19 bp, Homo sapiens
  siRNA target sequence for UPF2 (NM_015542.2,2278-2296).
gcaagcaatgcatcttgat

SEQ ID NO: 55676 - DNA, 19 bp, Homo sapiens
  siRNA target sequence for UPF2 (NM_015542.2,2299-2317).
gagatacgtcacaatggta

SEQ ID NO: 55677 - DNA, 19 bp, Homo sapiens
  siRNA target sequence for UPF2 (NM_015542.2,2389-2407).
ggaatatgtccggaaactt

SEQ ID NO: 55678 - DNA, 19 bp, Homo sapiens
  siRNA target sequence for UPF2 (NM_015542.2,2390-2408).
gaatatgtccggaaacttt

SEQ ID NO: 55679 - DNA, 19 bp, Homo sapiens
  siRNA target sequence for UPF2 (NM_015542.2,2413-2431).
caaggatctctctaaggtt

SEQ ID NO: 55680 - DNA, 19 bp, Homo sapiens
  siRNA target sequence for UPF2 (NM_015542.2,2429-2447).
gttaccaccgagaaggttt

SEQ ID NO: 55681 - DNA, 19 bp, Homo sapiens
  siRNA target sequence for UPF2 (NM_015542.2,2492-2510).
gactatgttatttgttgta

SEQ ID NO: 55682 - DNA, 19 bp, Homo sapiens
  siRNA target sequence for UPF2 (NM_015542.2,2618-2636).
gtgttagaagatattcgat

SEQ ID NO: 55683 - DNA, 19 bp, Homo sapiens
  siRNA target sequence for UPF2 (NM_015542.2,2620-2638).
gttagaagatattcgatta

SEQ ID NO: 55684 - DNA, 19 bp, Homo sapiens
  siRNA target sequence for UPF2 (NM_015542.2,2634-2652).
gattaggaatggaggttaa

SEQ ID NO: 55685 - DNA, 19 bp, Homo sapiens
  siRNA target sequence for UPF2 (NM_015542.2,2644-2662).
ggaggttaatcaacctaaa

SEQ ID NO: 55686 - DNA, 19 bp, Homo sapiens
  siRNA target sequence for UPF2 (NM_015542.2,2645-2663).
gaggttaatcaacctaaat

SEQ ID NO: 55687 - DNA, 19 bp, Homo sapiens
  siRNA target sequence for UPF2 (NM_015542.2,2647-2665).
ggttaatcaacctaaattt

SEQ ID NO: 55688 - DNA, 19 bp, Homo sapiens
  siRNA target sequence for UPF2 (NM_015542.2,2680-2698).
cagcagtgccaagttctta

SEQ ID NO: 55689 - DNA, 19 bp, Homo sapiens
  siRNA target sequence for UPF2 (NM_015542.2,2832-2850).
gactcgtatgcactattct

SEQ ID NO: 55690 - DNA, 19 bp, Homo sapiens
  siRNA target sequence for UPF2 (NM_015542.2,2875-2893).
cagaggttccagtaaacga

SEQ ID NO: 55691 - DNA, 19 bp, Homo sapiens
  siRNA target sequence for UPF2 (NM_015542.2,2877-2895).
gaggttccagtaaacgaaa

SEQ ID NO: 55692 - DNA, 19 bp, Homo sapiens
  siRNA target sequence for UPF2 (NM_015542.2,2883-2901).
ccagtaaacgaaaacttga

SEQ ID NO: 55693 - DNA, 19 bp, Homo sapiens
  siRNA target sequence for UPF2 (NM_015542.2,2884-2902).
cagtaaacgaaaacttgat

SEQ ID NO: 55694 - DNA, 19 bp, Homo sapiens
  siRNA target sequence for UPF2 (NM_015542.2,2900-2918).
gattgtttccttgtatatt

SEQ ID NO: 55695 - DNA, 19 bp, Homo sapiens
  siRNA target sequence for UPF2 (NM_015542.2,2958-2976).
ggacaaaagaccatccatt

SEQ ID NO: 55696 - DNA, 19 bp, Homo sapiens
  siRNA target sequence for UPF2 (NM_015542.2,2959-2977).
gacaaaagaccatccattt

SEQ ID NO: 55697 - DNA, 19 bp, Homo sapiens
  siRNA target sequence for UPF2 (NM_015542.2,2968-2986).
ccatccatttcctattgat

SEQ ID NO: 55698 - DNA, 19 bp, Homo sapiens
  siRNA target sequence for UPF2 (NM_015542.2,2978-2996).
cctattgatatagattaca

SEQ ID NO: 55699 - DNA, 19 bp, Homo sapiens
  siRNA target sequence for UPF2 (NM_015542.2,2990-3008).
gattacatgatcagtgata

SEQ ID NO: 55700 - DNA, 19 bp, Homo sapiens
  siRNA target sequence for UPF2 (NM_015542.2,2995-3013).
catgatcagtgatacacta

SEQ ID NO: 55701 - DNA, 19 bp, Homo sapiens
  siRNA target sequence for UPF2 (NM_015542.2,3031-3049).
gatcaaactctgtaattct

SEQ ID NO: 55702 - DNA, 19 bp, Homo sapiens
  siRNA target sequence for UPF2 (NM_015542.2,3077-3095).
gacttggaacgagaattct

SEQ ID NO: 55703 - DNA, 19 bp, Homo sapiens
  siRNA target sequence for UPF2 (NM_015542.2,3083-3101).
gaacgagaattcttaataa

SEQ ID NO: 55704 - DNA, 19 bp, Homo sapiens
  siRNA target sequence for UPF2 (NM_015542.2,3104-3122).
ctaggcctagtaaatgaca

SEQ ID NO: 55705 - DNA, 19 bp, Homo sapiens
  siRNA target sequence for UPF2 (NM_015542.2,3247-3265).
ggagggttctgataatgat

SEQ ID NO: 55706 - DNA, 19 bp, Homo sapiens
  siRNA target sequence for UPF2 (NM_015542.2,3293-3311).
gagaatacagattacctta

SEQ ID NO: 55707 - DNA, 19 bp, Homo sapiens
  siRNA target sequence for UPF2 (NM_015542.2,3382-3400).
gcatgtaccttgtgtagaa

SEQ ID NO: 55708 - DNA, 19 bp, Homo sapiens
  siRNA target sequence for UPF2 (NM_015542.2,3455-3473).
cgaagtggtgaatctgtta

SEQ ID NO: 55709 - DNA, 19 bp, Homo sapiens
  siRNA target sequence for UPF2 (NM_015542.2,3456-3474).
gaagtggtgaatctgttaa

SEQ ID NO: 55710 - DNA, 19 bp, Homo sapiens
  siRNA target sequence for UPF2 (NM_015542.2,3459-3477).
gtggtgaatctgttaaagt

SEQ ID NO: 55711 - DNA, 19 bp, Homo sapiens
  siRNA target sequence for UPF2 (NM_015542.2,3576-3594).
caatgccgtttgtcatgtt

SEQ ID NO: 55712 - DNA, 19 bp, Homo sapiens
  siRNA target sequence for UPF2 (NM_015542.2,3580-3598).
gccgtttgtcatgttaaca

SEQ ID NO: 55713 - DNA, 19 bp, Homo sapiens
  siRNA target sequence for UPF2 (NM_015542.2,3581-3599).
ccgtttgtcatgttaacaa

SEQ ID NO: 55714 - DNA, 19 bp, Homo sapiens
  siRNA target sequence for UPF2 (NM_015542.2,3616-3634).
gcagtttaagatccttaat

SEQ ID NO: 55715 - DNA, 19 bp, Homo sapiens
  siRNA target sequence for UPF2 (NM_015542.2,3619-3637).
gtttaagatccttaatgta

SEQ ID NO: 55716 - DNA, 19 bp, Homo sapiens
  siRNA target sequence for UPF2 (NM_015542.2,3650-3668).
caacttgctgcaaatcact

SEQ ID NO: 55717 - DNA, 19 bp, Homo sapiens
  siRNA target sequence for UPF2 (NM_015542.2,3718-3736).
cacactagatatcaatgaa

SEQ ID NO: 55718 - DNA, 19 bp, Homo sapiens
  siRNA target sequence for UPF2 (NM_015542.2,3730-3748).
caatgaacggcaagaacaa

SEQ ID NO: 55719 - DNA, 19 bp, Homo sapiens
  siRNA target sequence for UPF2 (NM_015542.2,3838-3856).
gaagggagcacctaatgca

SEQ ID NO: 55720 - DNA, 19 bp, Homo sapiens
  siRNA target sequence for UPF2 (NM_015542.2,3845-3863).
gcacctaatgcagatctaa

SEQ ID NO: 55721 - DNA, 19 bp, Homo sapiens
  siRNA target sequence for UPF2 (NM_015542.2,3846-3864).
cacctaatgcagatctaat

SEQ ID NO: 55722 - DNA, 19 bp, Homo sapiens
  siRNA target sequence for UPF2 (NM_015542.2,3854-3872).
gcagatctaatctttaaga

SEQ ID NO: 55723 - DNA, 19 bp, Homo sapiens
  siRNA target sequence for WBP4 (NM_007187.3,139-157).
caaagaaattctgtgatta

SEQ ID NO: 55724 - DNA, 19 bp, Homo sapiens
  siRNA target sequence for WBP4 (NM_007187.3,164-182).
gtgctggatagcagacaat

SEQ ID NO: 55725 - DNA, 19 bp, Homo sapiens
  siRNA target sequence for WBP4 (NM_007187.3,179-197).
caataggcctagtgttgaa

SEQ ID NO: 55726 - DNA, 19 bp, Homo sapiens
  siRNA target sequence for WBP4 (NM_007187.3,184-202).
ggcctagtgttgaatttca

SEQ ID NO: 55727 - DNA, 19 bp, Homo sapiens
  siRNA target sequence for WBP4 (NM_007187.3,185-203).
gcctagtgttgaatttcat

SEQ ID NO: 55728 - DNA, 19 bp, Homo sapiens
  siRNA target sequence for WBP4 (NM_007187.3,241-259).
ggatcagtgagattaaaca

SEQ ID NO: 55729 - DNA, 19 bp, Homo sapiens
  siRNA target sequence for WBP4 (NM_007187.3,245-263).
cagtgagattaaacagaaa

SEQ ID NO: 55730 - DNA, 19 bp, Homo sapiens
  siRNA target sequence for WBP4 (NM_007187.3,322-340).
cagctgccctgaaagcata

SEQ ID NO: 55731 - DNA, 19 bp, Homo sapiens
  siRNA target sequence for WBP4 (NM_007187.3,421-439).
ctacctcgacatcaaatca

SEQ ID NO: 55732 - DNA, 19 bp, Homo sapiens
  siRNA target sequence for WBP4 (NM_007187.3,424-442).
cctcgacatcaaatcaaca

SEQ ID NO: 55733 - DNA, 19 bp, Homo sapiens
  siRNA target sequence for WBP4 (NM_007187.3,427-445).
cgacatcaaatcaacagaa

SEQ ID NO: 55734 - DNA, 19 bp, Homo sapiens
  siRNA target sequence for WBP4 (NM_007187.3,518-536).
gggttaccattactattat

SEQ ID NO: 55735 - DNA, 19 bp, Homo sapiens
  siRNA target sequence for WBP4 (NM_007187.3,520-538).
gttaccattactattatga

SEQ ID NO: 55736 - DNA, 19 bp, Homo sapiens
  siRNA target sequence for WBP4 (NM_007187.3,530-548).
ctattatgatcttatctca

SEQ ID NO: 55737 - DNA, 19 bp, Homo sapiens
  siRNA target sequence for WBP4 (NM_007187.3,577-595).
gatttcaaggagacttaaa

SEQ ID NO: 55738 - DNA, 19 bp, Homo sapiens
  siRNA target sequence for WBP4 (NM_007187.3,613-631).
ccgtttgggtagaaggttt

SEQ ID NO: 55739 - DNA, 19 bp, Homo sapiens
  siRNA target sequence for WBP4 (NM_007187.3,614-632).
cgtttgggtagaaggttta

SEQ ID NO: 55740 - DNA, 19 bp, Homo sapiens
  siRNA target sequence for WBP4 (NM_007187.3,619-637).
gggtagaaggtttaagtga

SEQ ID NO: 55741 - DNA, 19 bp, Homo sapiens
  siRNA target sequence for WBP4 (NM_007187.3,620-638).
ggtagaaggtttaagtgaa

SEQ ID NO: 55742 - DNA, 19 bp, Homo sapiens
  siRNA target sequence for WBP4 (NM_007187.3,634-652).
gtgaagatggttttaccta

SEQ ID NO: 55743 - DNA, 19 bp, Homo sapiens
  siRNA target sequence for WBP4 (NM_007187.3,639-657).
gatggttttacctattact

SEQ ID NO: 55744 - DNA, 19 bp, Homo sapiens
  siRNA target sequence for WBP4 (NM_007187.3,643-661).
gttttacctattactataa

SEQ ID NO: 55745 - DNA, 19 bp, Homo sapiens
  siRNA target sequence for WBP4 (NM_007187.3,704-722).
cattccacacactagtgat

SEQ ID NO: 55746 - DNA, 19 bp, Homo sapiens
  siRNA target sequence for WBP4 (NM_007187.3,727-745).
cttctagtaaggtcaatga

SEQ ID NO: 55747 - DNA, 19 bp, Homo sapiens
  siRNA target sequence for WBP4 (NM_007187.3,730-748).
ctagtaaggtcaatgaaaa

SEQ ID NO: 55748 - DNA, 19 bp, Homo sapiens
  siRNA target sequence for WBP4 (NM_007187.3,737-755).
ggtcaatgaaaattcactt

SEQ ID NO: 55749 - DNA, 19 bp, Homo sapiens
  siRNA target sequence for WBP4 (NM_007187.3,753-771).
cttggcaccctagatgaat

SEQ ID NO: 55750 - DNA, 19 bp, Homo sapiens
  siRNA target sequence for WBP4 (NM_007187.3,778-796).
catcagattcgcatagtga

SEQ ID NO: 55751 - DNA, 19 bp, Homo sapiens
  siRNA target sequence for WBP4 (NM_007187.3,960-978).
gaaaaatcgaaaactctta

SEQ ID NO: 55752 - DNA, 19 bp, Homo sapiens
  siRNA target sequence for WBP4 (NM_007187.3,980-998).
gaaatcaaacccatatgga

SEQ ID NO: 55753 - DNA, 19 bp, Homo sapiens
  siRNA target sequence for WBP4 (NM_007187.3,1056-1074).
ccaagcactgaaaatgagt

SEQ ID NO: 55754 - DNA, 19 bp, Homo sapiens
  siRNA target sequence for WBP4 (NM_007187.3,1224-1242).
caacgaggtgatgatcaat

SEQ ID NO: 55755 - DNA, 19 bp, Homo sapiens
  siRNA target sequence for WBSCR1 (NM_022170.1,422-440).
gggtagctctcgagaatct

SEQ ID NO: 55756 - DNA, 19 bp, Homo sapiens
  siRNA target sequence for WBSCR1 (NM_022170.1,423-441).
ggtagctctcgagaatcta

SEQ ID NO: 55757 - DNA, 19 bp, Homo sapiens
  siRNA target sequence for WBSCR1 (NM_022170.1,458-476).
ccgggatgacttcaattct

SEQ ID NO: 55758 - DNA, 19 bp, Homo sapiens
  siRNA target sequence for WIG1 (NM_022470.2,508-526).
gcaagcccaggctcattat

SEQ ID NO: 55759 - DNA, 19 bp, Homo sapiens
  siRNA target sequence for WIG1 (NM_022470.2,542-560).
ggtaagaaactccgaaatt

SEQ ID NO: 55760 - DNA, 19 bp, Homo sapiens
  siRNA target sequence for WIG1 (NM_022470.2,543-561).
gtaagaaactccgaaatta

SEQ ID NO: 55761 - DNA, 19 bp, Homo sapiens
  siRNA target sequence for WIG1 (NM_022470.2,547-565).
gaaactccgaaattactat

SEQ ID NO: 55762 - DNA, 19 bp, Homo sapiens
  siRNA target sequence for WIG1 (NM_022470.2,644-662).
ccgcagatgggctccttta

SEQ ID NO: 55763 - DNA, 19 bp, Homo sapiens
  siRNA target sequence for WIG1 (NM_022470.2,645-663).
cgcagatgggctcctttaa

SEQ ID NO: 55764 - DNA, 19 bp, Homo sapiens
  siRNA target sequence for WIG1 (NM_022470.2,683-701).
ctggccacggagaatgatt

SEQ ID NO: 55765 - DNA, 19 bp, Homo sapiens
  siRNA target sequence for WIG1 (NM_022470.2,686-704).
gccacggagaatgattact

SEQ ID NO: 55766 - DNA, 19 bp, Homo sapiens
  siRNA target sequence for WIG1 (NM_022470.2,688-706).
cacggagaatgattactgt

SEQ ID NO: 55767 - DNA, 19 bp, Homo sapiens
  siRNA target sequence for WIG1 (NM_022470.2,690-708).
cggagaatgattactgtaa

SEQ ID NO: 55768 - DNA, 19 bp, Homo sapiens
  siRNA target sequence for WIG1 (NM_022470.2,742-760).
ggctcaggctcactatcaa

SEQ ID NO: 55769 - DNA, 19 bp, Homo sapiens
  siRNA target sequence for WIG1 (NM_022470.2,793-811).
ggaagctcagagtaactca

SEQ ID NO: 55770 - DNA, 19 bp, Homo sapiens
  siRNA target sequence for WIG1 (NM_022470.2,794-812).
gaagctcagagtaactcat

SEQ ID NO: 55771 - DNA, 19 bp, Homo sapiens
  siRNA target sequence for WIG1 (NM_022470.2,874-892).
gatgcctaacaggagaaat

SEQ ID NO: 55772 - DNA, 19 bp, Homo sapiens
  siRNA target sequence for WIG1 (NM_022470.2,936-954).
cccgctctcggcagagaat

SEQ ID NO: 55773 - DNA, 19 bp, Homo sapiens
  siRNA target sequence for WIG1 (NM_022470.2,937-955).
ccgctctcggcagagaatt

SEQ ID NO: 55774 - DNA, 19 bp, Homo sapiens
  siRNA target sequence for WIG1 (NM_022470.2,981-999).
ctccaagtggccagtttta

SEQ ID NO: 55775 - DNA, 19 bp, Homo sapiens
  siRNA target sequence for WIG1 (NM_022470.2,983-1001).
ccaagtggccagttttact

SEQ ID NO: 55776 - DNA, 19 bp, Homo sapiens
  siRNA target sequence for WIG1 (NM_022470.2,1022-1040).
gctggcgaagagatggaat

SEQ ID NO: 55777 - DNA, 19 bp, Homo sapiens
  siRNA target sequence for WIG1 (NM_022470.2,1036-1054).
ggaattccggcagcattta

SEQ ID NO: 55778 - DNA, 19 bp, Homo sapiens
  siRNA target sequence for WIG1 (NM_022470.2,1109-1127).
gagaatctgggatatgtat

SEQ ID NO: 55779 - DNA, 19 bp, Homo sapiens
  siRNA target sequence for XRN2 (NM_012255.2,121-139).
caagtacccgtccatcata

SEQ ID NO: 55780 - DNA, 19 bp, Homo sapiens
  siRNA target sequence for XRN2 (NM_012255.2,198-216).
ccagtaaacctaatccaaa

SEQ ID NO: 55781 - DNA, 19 bp, Homo sapiens
  siRNA target sequence for XRN2 (NM_012255.2,201-219).
gtaaacctaatccaaatga

SEQ ID NO: 55782 - DNA, 19 bp, Homo sapiens
  siRNA target sequence for XRN2 (NM_012255.2,223-241).
ggagtttgataatctgtat

SEQ ID NO: 55783 - DNA, 19 bp, Homo sapiens
  siRNA target sequence for XRN2 (NM_012255.2,259-277).
catccatccctgtactcat

SEQ ID NO: 55784 - DNA, 19 bp, Homo sapiens
  siRNA target sequence for XRN2 (NM_012255.2,311-329).
gaaatgatggttgcaattt

SEQ ID NO: 55785 - DNA, 19 bp, Homo sapiens
  siRNA target sequence for XRN2 (NM_012255.2,324-342).
caatttttgagtacattga

SEQ ID NO: 55786 - DNA, 19 bp, Homo sapiens
  siRNA target sequence for XRN2 (NM_012255.2,363-381).
gaccaagaagacttctcta

SEQ ID NO: 55787 - DNA, 19 bp, Homo sapiens
  siRNA target sequence for XRN2 (NM_012255.2,366-384).
caagaagacttctctacat

SEQ ID NO: 55788 - DNA, 19 bp, Homo sapiens
  siRNA target sequence for XRN2 (NM_012255.2,398-416).
gtggcaccacgtgctaaaa

SEQ ID NO: 55789 - DNA, 19 bp, Homo sapiens
  siRNA target sequence for XRN2 (NM_012255.2,401-419).
gcaccacgtgctaaaatga

SEQ ID NO: 55790 - DNA, 19 bp, Homo sapiens
  siRNA target sequence for XRN2 (NM_012255.2,444-462).
gggcatcaaaagaaggaat

SEQ ID NO: 55791 - DNA, 19 bp, Homo sapiens
  siRNA target sequence for XRN2 (NM_012255.2,485-503).
cgagtcagggaagaaatat

SEQ ID NO: 55792 - DNA, 19 bp, Homo sapiens
  siRNA target sequence for XRN2 (NM_012255.2,505-523).
ggcaaaaggtggctttctt

SEQ ID NO: 55793 - DNA, 19 bp, Homo sapiens
  siRNA target sequence for XRN2 (NM_012255.2,576-594).
ctgaattcatggacaatct

SEQ ID NO: 55794 - DNA, 19 bp, Homo sapiens
  siRNA target sequence for XRN2 (NM_012255.2,597-615).
ctaaatgccttcgctatta

SEQ ID NO: 55795 - DNA, 19 bp, Homo sapiens
  siRNA target sequence for XRN2 (NM_012255.2,616-634).
catagctgatcgtttaaat

SEQ ID NO: 55796 - DNA, 19 bp, Homo sapiens
  siRNA target sequence for XRN2 (NM_012255.2,621-639).
ctgatcgtttaaataatga

SEQ ID NO: 55797 - DNA, 19 bp, Homo sapiens
  siRNA target sequence for XRN2 (NM_012255.2,641-659).
cctgggtggaaaaatttga

SEQ ID NO: 55798 - DNA, 19 bp, Homo sapiens
  siRNA target sequence for XRN2 (NM_012255.2,740-758).
cctaaccatgacccaaata

SEQ ID NO: 55799 - DNA, 19 bp, Homo sapiens
  siRNA target sequence for XRN2 (NM_012255.2,745-763).
ccatgacccaaatactcat

SEQ ID NO: 55800 - DNA, 19 bp, Homo sapiens
  siRNA target sequence for XRN2 (NM_012255.2,777-795).
gagcagatgctgatctcat

SEQ ID NO: 55801 - DNA, 19 bp, Homo sapiens
  siRNA target sequence for XRN2 (NM_012255.2,811-829).
cacacatgaaccgaacttt

SEQ ID NO: 55802 - DNA, 19 bp, Homo sapiens
  siRNA target sequence for XRN2 (NM_012255.2,818-836).
gaaccgaactttaccatta

SEQ ID NO: 55803 - DNA, 19 bp, Homo sapiens
  siRNA target sequence for XRN2 (NM_012255.2,821-839).
ccgaactttaccattatta

SEQ ID NO: 55804 - DNA, 19 bp, Homo sapiens
  siRNA target sequence for XRN2 (NM_012255.2,831-849).
ccattattagagaagaatt

SEQ ID NO: 55805 - DNA, 19 bp, Homo sapiens
  siRNA target sequence for XRN2 (NM_012255.2,893-911).
ggacatgaggtcaaagatt

SEQ ID NO: 55806 - DNA, 19 bp, Homo sapiens
  siRNA target sequence for XRN2 (NM_012255.2,994-1012).
ccttcggcttaatgttctt

SEQ ID NO: 55807 - DNA, 19 bp, Homo sapiens
  siRNA target sequence for XRN2 (NM_012255.2,1042-1060).
ggccagcctaccattcaca

SEQ ID NO: 55808 - DNA, 19 bp, Homo sapiens
  siRNA target sequence for XRN2 (NM_012255.2,1082-1100).
gatgactgggttttcatgt

SEQ ID NO: 55809 - DNA, 19 bp, Homo sapiens
  siRNA target sequence for XRN2 (NM_012255.2,1126-1144).
ccctcatttgccatcgtta

SEQ ID NO: 55810 - DNA, 19 bp, Homo sapiens
  siRNA target sequence for XRN2 (NM_012255.2,1160-1178).
gcaattgaccgtttggtta

SEQ ID NO: 55811 - DNA, 19 bp, Homo sapiens
  siRNA target sequence for XRN2 (NM_012255.2,1161-1179).
caattgaccgtttggttaa

SEQ ID NO: 55812 - DNA, 19 bp, Homo sapiens
  siRNA target sequence for XRN2 (NM_012255.2,1166-1184).
gaccgtttggttaacatat

SEQ ID NO: 55813 - DNA, 19 bp, Homo sapiens
  siRNA target sequence for XRN2 (NM_012255.2,1169-1187).
cgtttggttaacatataca

SEQ ID NO: 55814 - DNA, 19 bp, Homo sapiens
  siRNA target sequence for XRN2 (NM_012255.2,1170-1188).
gtttggttaacatatacaa

SEQ ID NO: 55815 - DNA, 19 bp, Homo sapiens
  siRNA target sequence for XRN2 (NM_012255.2,1201-1219).
caaaactgggggttacctt

SEQ ID NO: 55816 - DNA, 19 bp, Homo sapiens
  siRNA target sequence for XRN2 (NM_012255.2,1248-1266).
gagtacagatgatcatgtt

SEQ ID NO: 55817 - DNA, 19 bp, Homo sapiens
  siRNA target sequence for XRN2 (NM_012255.2,1275-1293).
gtgaagttgaggatagcat

SEQ ID NO: 55818 - DNA, 19 bp, Homo sapiens
  siRNA target sequence for XRN2 (NM_012255.2,1277-1295).
gaagttgaggatagcattt

SEQ ID NO: 55819 - DNA, 19 bp, Homo sapiens
  siRNA target sequence for XRN2 (NM_012255.2,1381-1399).
cactcctagtggaatatta

SEQ ID NO: 55820 - DNA, 19 bp, Homo sapiens
  siRNA target sequence for XRN2 (NM_012255.2,1406-1424).
catgccttgggttcaagaa

SEQ ID NO: 55821 - DNA, 19 bp, Homo sapiens
  siRNA target sequence for XRN2 (NM_012255.2,1409-1427).
gccttgggttcaagaaatt

SEQ ID NO: 55822 - DNA, 19 bp, Homo sapiens
  siRNA target sequence for XRN2 (NM_012255.2,1477-1495).
gaggatgcagaataactct

SEQ ID NO: 55823 - DNA, 19 bp, Homo sapiens
  siRNA target sequence for XRN2 (NM_012255.2,1492-1510).
ctctagtccttcgatatct

SEQ ID NO: 55824 - DNA, 19 bp, Homo sapiens
  siRNA target sequence for XRN2 (NM_012255.2,1499-1517).
ccttcgatatctcctaata

SEQ ID NO: 55825 - DNA, 19 bp, Homo sapiens
  siRNA target sequence for XRN2 (NM_012255.2,1511-1529).
cctaatacgagtttcacat

SEQ ID NO: 55826 - DNA, 19 bp, Homo sapiens
  siRNA target sequence for XRN2 (NM_012255.2,1537-1555).
ctccccgtctccattagga

SEQ ID NO: 55827 - DNA, 19 bp, Homo sapiens
  siRNA target sequence for XRN2 (NM_012255.2,1545-1563).
ctccattaggaggaattaa

SEQ ID NO: 55828 - DNA, 19 bp, Homo sapiens
  siRNA target sequence for XRN2 (NM_012255.2,1640-1658).
cggtactacaagaacaaat

SEQ ID NO: 55829 - DNA, 19 bp, Homo sapiens
  siRNA target sequence for XRN2 (NM_012255.2,1681-1699).
gaaattccgtcggaaagtt

SEQ ID NO: 55830 - DNA, 19 bp, Homo sapiens
  siRNA target sequence for XRN2 (NM_012255.2,1718-1736).
ggactttgctgggttctta

SEQ ID NO: 55831 - DNA, 19 bp, Homo sapiens
  siRNA target sequence for XRN2 (NM_012255.2,1725-1743).
gctgggttcttagatatta

SEQ ID NO: 55832 - DNA, 19 bp, Homo sapiens
  siRNA target sequence for XRN2 (NM_012255.2,1758-1776).
cttcctggaagtggtatta

SEQ ID NO: 55833 - DNA, 19 bp, Homo sapiens
  siRNA target sequence for XRN2 (NM_012255.2,1762-1780).
ctggaagtggtattatcca

SEQ ID NO: 55834 - DNA, 19 bp, Homo sapiens
  siRNA target sequence for XRN2 (NM_012255.2,1764-1782).
ggaagtggtattatccatt

SEQ ID NO: 55835 - DNA, 19 bp, Homo sapiens
  siRNA target sequence for XRN2 (NM_012255.2,1768-1786).
gtggtattatccatttcat

SEQ ID NO: 55836 - DNA, 19 bp, Homo sapiens
  siRNA target sequence for XRN2 (NM_012255.2,1821-1839).
cagacatgccatctgattt

SEQ ID NO: 55837 - DNA, 19 bp, Homo sapiens
  siRNA target sequence for XRN2 (NM_012255.2,1846-1864).
gggtacgaaaccgtttaaa

SEQ ID NO: 55838 - DNA, 19 bp, Homo sapiens
  siRNA target sequence for XRN2 (NM_012255.2,1857-1875).
cgtttaaaccactagaaca

SEQ ID NO: 55839 - DNA, 19 bp, Homo sapiens
  siRNA target sequence for XRN2 (NM_012255.2,1858-1876).
gtttaaaccactagaacaa

SEQ ID NO: 55840 - DNA, 19 bp, Homo sapiens
  siRNA target sequence for XRN2 (NM_012255.2,1949-1967).
gattctagtataattgact

SEQ ID NO: 55841 - DNA, 19 bp, Homo sapiens
  siRNA target sequence for XRN2 (NM_012255.2,1964-1982).
gacttctatcctgaagatt

SEQ ID NO: 55842 - DNA, 19 bp, Homo sapiens
  siRNA target sequence for XRN2 (NM_012255.2,2212-2230).
ggtaccccctgaactatgt

SEQ ID NO: 55843 - DNA, 19 bp, Homo sapiens
  siRNA target sequence for XRN2 (NM_012255.2,2229-2247).
gtcatgggattcaaggaaa

SEQ ID NO: 55844 - DNA, 19 bp, Homo sapiens
  siRNA target sequence for XRN2 (NM_012255.2,2257-2275).
ggatgaagaagccattctt

SEQ ID NO: 55845 - DNA, 19 bp, Homo sapiens
  siRNA target sequence for XRN2 (NM_012255.2,2417-2435).
gcagcagtactgaaaccta

SEQ ID NO: 55846 - DNA, 19 bp, Homo sapiens
  siRNA target sequence for XRN2 (NM_012255.2,2602-2620).
gacttaccagggaaactta

SEQ ID NO: 55847 - DNA, 19 bp, Homo sapiens
  siRNA target sequence for XRN2 (NM_012255.2,2604-2622).
cttaccagggaaacttata

SEQ ID NO: 55848 - DNA, 19 bp, Homo sapiens
  siRNA target sequence for XRN2 (NM_012255.2,2645-2663).
gcccagattccaaaactta

SEQ ID NO: 55849 - DNA, 19 bp, Homo sapiens
  siRNA target sequence for XRN2 (NM_012255.2,2714-2732).
cagcagcaaaggtttgaca

SEQ ID NO: 55850 - DNA, 19 bp, Homo sapiens
  siRNA target sequence for XRN2 (NM_012255.2,2910-2928).
caccctcaggaagatacaa

SEQ ID NO: 55851 - DNA, 19 bp, Homo sapiens
  siRNA target sequence for ZFR (NM_016107.3,149-167).
ggcgaccggcaactacttt

SEQ ID NO: 55852 - DNA, 19 bp, Homo sapiens
  siRNA target sequence for ZFR (NM_016107.3,232-250).
cgggtgtagcctattctca

SEQ ID NO: 55853 - DNA, 19 bp, Homo sapiens
  siRNA target sequence for ZFR (NM_016107.3,233-251).
gggtgtagcctattctcat

SEQ ID NO: 55854 - DNA, 19 bp, Homo sapiens
  siRNA target sequence for ZFR (NM_016107.3,242-260).
ctattctcatccaactaca

SEQ ID NO: 55855 - DNA, 19 bp, Homo sapiens
  siRNA target sequence for ZFR (NM_016107.3,291-309).
gtagctgctcacacagtta

SEQ ID NO: 55856 - DNA, 19 bp, Homo sapiens
  siRNA target sequence for ZFR (NM_016107.3,423-441).
gcaactgactatggttata

SEQ ID NO: 55857 - DNA, 19 bp, Homo sapiens
  siRNA target sequence for ZFR (NM_016107.3,474-492).
cccccagctactacacaaa

SEQ ID NO: 55858 - DNA, 19 bp, Homo sapiens
  siRNA target sequence for ZFR (NM_016107.3,477-495).
ccagctactacacaaaact

SEQ ID NO: 55859 - DNA, 19 bp, Homo sapiens
  siRNA target sequence for ZFR (NM_016107.3,494-512).
ctaccaggattcatactca

SEQ ID NO: 55860 - DNA, 19 bp, Homo sapiens
  siRNA target sequence for ZFR (NM_016107.3,500-518).
ggattcatactcatatgta

SEQ ID NO: 55861 - DNA, 19 bp, Homo sapiens
  siRNA target sequence for ZFR (NM_016107.3,540-558).
gcttatgatagtaagcaat

SEQ ID NO: 55862 - DNA, 19 bp, Homo sapiens
  siRNA target sequence for ZFR (NM_016107.3,666-684).
caaggtgcaactcagtata

SEQ ID NO: 55863 - DNA, 19 bp, Homo sapiens
  siRNA target sequence for ZFR (NM_016107.3,670-688).
gtgcaactcagtatactca

SEQ ID NO: 55864 - DNA, 19 bp, Homo sapiens
  siRNA target sequence for ZFR (NM_016107.3,703-721).
gacaagtgacagccataaa

SEQ ID NO: 55865 - DNA, 19 bp, Homo sapiens
  siRNA target sequence for ZFR (NM_016107.3,736-754).
gtccagctaccactacttt

SEQ ID NO: 55866 - DNA, 19 bp, Homo sapiens
  siRNA target sequence for ZFR (NM_016107.3,746-764).
cactactttctccatctat

SEQ ID NO: 55867 - DNA, 19 bp, Homo sapiens
  siRNA target sequence for ZFR (NM_016107.3,825-843).
cagagtgctacttacagta

SEQ ID NO: 55868 - DNA, 19 bp, Homo sapiens
  siRNA target sequence for ZFR (NM_016107.3,841-859).
gtaccacagcagttacata

SEQ ID NO: 55869 - DNA, 19 bp, Homo sapiens
  siRNA target sequence for ZFR (NM_016107.3,868-886).
cgtcttattcaggttatga

SEQ ID NO: 55870 - DNA, 19 bp, Homo sapiens
  siRNA target sequence for ZFR (NM_016107.3,904-922).
ctgcatcttcctactatca

SEQ ID NO: 55871 - DNA, 19 bp, Homo sapiens
  siRNA target sequence for ZFR (NM_016107.3,1054-1072).
ccaaaccaccacagattca

SEQ ID NO: 55872 - DNA, 19 bp, Homo sapiens
  siRNA target sequence for ZFR (NM_016107.3,1059-1077).
ccaccacagattcactatt

SEQ ID NO: 55873 - DNA, 19 bp, Homo sapiens
  siRNA target sequence for ZFR (NM_016107.3,1105-1123).
gaccacagacttataaaga

SEQ ID NO: 55874 - DNA, 19 bp, Homo sapiens
  siRNA target sequence for ZFR (NM_016107.3,1201-1219).
ctactcgtgggactcaaaa

SEQ ID NO: 55875 - DNA, 19 bp, Homo sapiens
  siRNA target sequence for ZFR (NM_016107.3,1204-1222).
ctcgtgggactcaaaatca

SEQ ID NO: 55876 - DNA, 19 bp, Homo sapiens
  siRNA target sequence for ZFR (NM_016107.3,1236-1254).
ctctgcgatgtgtcttgta

SEQ ID NO: 55877 - DNA, 19 bp, Homo sapiens
  siRNA target sequence for ZFR (NM_016107.3,1238-1256).
ctgcgatgtgtcttgtaca

SEQ ID NO: 55878 - DNA, 19 bp, Homo sapiens
  siRNA target sequence for ZFR (NM_016107.3,1326-1344).
cttggtaaacccattccat

SEQ ID NO: 55879 - DNA, 19 bp, Homo sapiens
  siRNA target sequence for ZFR (NM_016107.3,1342-1360).
catcaacagaaccaaatgt

SEQ ID NO: 55880 - DNA, 19 bp, Homo sapiens
  siRNA target sequence for ZFR (NM_016107.3,1362-1380).
gttagccaagctacttctt

SEQ ID NO: 55881 - DNA, 19 bp, Homo sapiens
  siRNA target sequence for ZFR (NM_016107.3,1459-1477).
cagttgcaacgtcttcaat

SEQ ID NO: 55882 - DNA, 19 bp, Homo sapiens
  siRNA target sequence for ZFR (NM_016107.3,1497-1515).
ggaaactcgtctcttaata

SEQ ID NO: 55883 - DNA, 19 bp, Homo sapiens
  siRNA target sequence for ZFR (NM_016107.3,1509-1527).
cttaatagcacatctaaca

SEQ ID NO: 55884 - DNA, 19 bp, Homo sapiens
  siRNA target sequence for ZFR (NM_016107.3,1516-1534).
gcacatctaacactaaagt

SEQ ID NO: 55885 - DNA, 19 bp, Homo sapiens
  siRNA target sequence for ZFR (NM_016107.3,1517-1535).
cacatctaacactaaagta

SEQ ID NO: 55886 - DNA, 19 bp, Homo sapiens
  siRNA target sequence for ZFR (NM_016107.3,1821-1839).
cggttccattgtaaattat

SEQ ID NO: 55887 - DNA, 19 bp, Homo sapiens
  siRNA target sequence for ZFR (NM_016107.3,1841-1859).
cgagtgcagctttaatgat

SEQ ID NO: 55888 - DNA, 19 bp, Homo sapiens
  siRNA target sequence for ZFR (NM_016107.3,1866-1884).
gctaaggagatgcacttaa

SEQ ID NO: 55889 - DNA, 19 bp, Homo sapiens
  siRNA target sequence for ZFR (NM_016107.3,1867-1885).
ctaaggagatgcacttaaa

SEQ ID NO: 55890 - DNA, 19 bp, Homo sapiens
  siRNA target sequence for ZFR (NM_016107.3,1889-1907).
gcgaagacacagacttcaa

SEQ ID NO: 55891 - DNA, 19 bp, Homo sapiens
  siRNA target sequence for ZFR (NM_016107.3,1894-1912).
gacacagacttcaatataa

SEQ ID NO: 55892 - DNA, 19 bp, Homo sapiens
  siRNA target sequence for ZFR (NM_016107.3,1951-1969).
ctagtattcgagcaagaaa

SEQ ID NO: 55893 - DNA, 19 bp, Homo sapiens
  siRNA target sequence for ZFR (NM_016107.3,2037-2055).
gagcgttggagaatggaaa

SEQ ID NO: 55894 - DNA, 19 bp, Homo sapiens
  siRNA target sequence for ZFR (NM_016107.3,2132-2150).
gccagatggaggttatcct

SEQ ID NO: 55895 - DNA, 19 bp, Homo sapiens
  siRNA target sequence for ZFR (NM_016107.3,2242-2260).
catctgatgaccgttatgt

SEQ ID NO: 55896 - DNA, 19 bp, Homo sapiens
  siRNA target sequence for ZFR (NM_016107.3,2245-2263).
ctgatgaccgttatgtaat

SEQ ID NO: 55897 - DNA, 19 bp, Homo sapiens
  siRNA target sequence for ZFR (NM_016107.3,2247-2265).
gatgaccgttatgtaatga

SEQ ID NO: 55898 - DNA, 19 bp, Homo sapiens
  siRNA target sequence for ZFR (NM_016107.3,2276-2294).
caccatttatccaactgaa

SEQ ID NO: 55899 - DNA, 19 bp, Homo sapiens
  siRNA target sequence for ZFR (NM_016107.3,2341-2359).
ctttaaaactcgtttcaga

SEQ ID NO: 55900 - DNA, 19 bp, Homo sapiens
  siRNA target sequence for ZFR (NM_016107.3,2362-2380).
gtttgtctgaacatgagaa

SEQ ID NO: 55901 - DNA, 19 bp, Homo sapiens
  siRNA target sequence for ZFR (NM_016107.3,2491-2509).
gaaatgtcaaccttgtttt

SEQ ID NO: 55902 - DNA, 19 bp, Homo sapiens
  siRNA target sequence for ZFR (NM_016107.3,2587-2605).
gccctgagaagtatgacat

SEQ ID NO: 55903 - DNA, 19 bp, Homo sapiens
  siRNA target sequence for ZFR (NM_016107.3,2616-2634).
gtatctgaagcggcaataa

SEQ ID NO: 55904 - DNA, 19 bp, Homo sapiens
  siRNA target sequence for ZFR (NM_016107.3,2656-2674).
ccaaaatgcaagtcactat

SEQ ID NO: 55905 - DNA, 19 bp, Homo sapiens
  siRNA target sequence for ZFR (NM_016107.3,2677-2695).
cactgacatctccaattat

SEQ ID NO: 55906 - DNA, 19 bp, Homo sapiens
  siRNA target sequence for ZFR (NM_016107.3,2681-2699).
gacatctccaattattcga

SEQ ID NO: 55907 - DNA, 19 bp, Homo sapiens
  siRNA target sequence for ZFR (NM_016107.3,2728-2746).
cctcgggtatggtgaaaga

SEQ ID NO: 55908 - DNA, 19 bp, Homo sapiens
  siRNA target sequence for ZFR (NM_016107.3,2813-2831).
gttccaggctagagctaat

SEQ ID NO: 55909 - DNA, 19 bp, Homo sapiens
  siRNA target sequence for ZFR (NM_016107.3,2849-2867).
gattatcatacgcattctt

SEQ ID NO: 55910 - DNA, 19 bp, Homo sapiens
  siRNA target sequence for ZFR (NM_016107.3,2886-2904).
gttccaacttggtctgatt

SEQ ID NO: 55911 - DNA, 19 bp, Homo sapiens
  siRNA target sequence for ZFR (NM_016107.3,2914-2932).
gggctatggagttactagt

SEQ ID NO: 55912 - DNA, 19 bp, Homo sapiens
  siRNA target sequence for ZFR (NM_016107.3,2915-2933).
ggctatggagttactagta

SEQ ID NO: 55913 - DNA, 19 bp, Homo sapiens
  siRNA target sequence for ZFR (NM_016107.3,2917-2935).
ctatggagttactagtaga

SEQ ID NO: 55914 - DNA, 19 bp, Homo sapiens
  siRNA target sequence for ZFR (NM_016107.3,3012-3030).
gggattattcttaaaggta

SEQ ID NO: 55915 - DNA, 19 bp, Homo sapiens
  siRNA target sequence for ZFR (NM_016107.3,3044-3062).
ggatccttgtgaaaaggat

SEQ ID NO: 55916 - DNA, 19 bp, Homo sapiens
  siRNA target sequence for ZFR (NM_016107.3,3054-3072).
gaaaaggatccctttgata

SEQ ID NO: 55917 - DNA, 19 bp, Homo sapiens
  siRNA target sequence for ZFR (NM_016107.3,3130-3148).
cattgagactccttgcatt

SEQ ID NO: 55918 - DNA, 19 bp, Homo sapiens
  siRNA target sequence for ZFR (NM_016107.3,3144-3162).
gcattccgccagatacaca

SEQ ID NO: 55919 - DNA, 19 bp, Homo sapiens
  siRNA target sequence for ZFR (NM_016107.3,3149-3167).
ccgccagatacacaaagtt

SEQ ID NO: 55920 - DNA, 19 bp, Homo sapiens
  siRNA target sequence for ZFR (NM_016107.3,3177-3195).
gatccattaccgcaaatga

SEQ ID NO: 55921 - DNA, 19 bp, Homo sapiens
  siRNA target sequence for ZFR (NM_016107.3,3187-3205).
cgcaaatgagccaacgttt

SEQ ID NO: 55922 - DNA, 19 bp, Homo sapiens
  siRNA target sequence for ZFR (NM_016107.3,3188-3206).
gcaaatgagccaacgtttt

SEQ ID NO: 55923 - DNA, 19 bp, Homo sapiens
  siRNA target sequence for ZFR (NM_016107.3,3189-3207).
caaatgagccaacgtttta

SEQ ID NO: 55924 - DNA, 19 bp, Homo sapiens
  siRNA target sequence for ZFR (NM_016107.3,3224-3242).
gaaacgaagaagagatagt

SEQ ID NO: 55925 - DNA, 19 bp, Homo sapiens
  siRNA target sequence for ZNF318 (NM_014345.1,630-648).
ggatgacctgactgatgat

SEQ ID NO: 55926 - DNA, 19 bp, Homo sapiens
  siRNA target sequence for ZNF318 (NM_014345.1,679-697).
cggggtcttgagcgatata

SEQ ID NO: 55927 - DNA, 19 bp, Homo sapiens
  siRNA target sequence for ZNF318 (NM_014345.1,682-700).
ggtcttgagcgatatattt

SEQ ID NO: 55928 - DNA, 19 bp, Homo sapiens
  siRNA target sequence for ZNF318 (NM_014345.1,725-743).
ccttcttgggacaacttga

SEQ ID NO: 55929 - DNA, 19 bp, Homo sapiens
  siRNA target sequence for ZNF318 (NM_014345.1,726-744).
cttcttgggacaacttgat

SEQ ID NO: 55930 - DNA, 19 bp, Homo sapiens
  siRNA target sequence for ZNF318 (NM_014345.1,747-765).
ggactaccgaacaaaagaa

SEQ ID NO: 55931 - DNA, 19 bp, Homo sapiens
  siRNA target sequence for ZNF318 (NM_014345.1,772-790).
ctgcatcgatctgattata

SEQ ID NO: 55932 - DNA, 19 bp, Homo sapiens
  siRNA target sequence for ZNF318 (NM_014345.1,774-792).
gcatcgatctgattatagt

SEQ ID NO: 55933 - DNA, 19 bp, Homo sapiens
  siRNA target sequence for ZNF318 (NM_014345.1,784-802).
gattatagtccccatatca

SEQ ID NO: 55934 - DNA, 19 bp, Homo sapiens
  siRNA target sequence for ZNF318 (NM_014345.1,836-854).
ggaatcgagaaaaactcaa

SEQ ID NO: 55935 - DNA, 19 bp, Homo sapiens
  siRNA target sequence for ZNF318 (NM_014345.1,858-876).
ctactccatacgatctgaa

SEQ ID NO: 55936 - DNA, 19 bp, Homo sapiens
  siRNA target sequence for ZNF318 (NM_014345.1,861-879).
ctccatacgatctgaagaa

SEQ ID NO: 55937 - DNA, 19 bp, Homo sapiens
  siRNA target sequence for ZNF318 (NM_014345.1,894-912).
caaaagaccccgttatgat

SEQ ID NO: 55938 - DNA, 19 bp, Homo sapiens
  siRNA target sequence for ZNF318 (NM_014345.1,938-956).
gaggggatcacccaagttt

SEQ ID NO: 55939 - DNA, 19 bp, Homo sapiens
  siRNA target sequence for ZNF318 (NM_014345.1,940-958).
ggggatcacccaagtttta

SEQ ID NO: 55940 - DNA, 19 bp, Homo sapiens
  siRNA target sequence for ZNF318 (NM_014345.1,942-960).
ggatcacccaagttttaca

SEQ ID NO: 55941 - DNA, 19 bp, Homo sapiens
  siRNA target sequence for ZNF318 (NM_014345.1,975-993).
ctatcgacagcgtagaaga

SEQ ID NO: 55942 - DNA, 19 bp, Homo sapiens
  siRNA target sequence for ZNF318 (NM_014345.1,1159-1177).
gcatcggagccaggatatt

SEQ ID NO: 55943 - DNA, 19 bp, Homo sapiens
  siRNA target sequence for ZNF318 (NM_014345.1,1163-1181).
cggagccaggatattcttt

SEQ ID NO: 55944 - DNA, 19 bp, Homo sapiens
  siRNA target sequence for ZNF318 (NM_014345.1,1167-1185).
gccaggatattctttgcat

SEQ ID NO: 55945 - DNA, 19 bp, Homo sapiens
  siRNA target sequence for ZNF318 (NM_014345.1,1183-1201).
catcggcctgaggaagtat

SEQ ID NO: 55946 - DNA, 19 bp, Homo sapiens
  siRNA target sequence for ZNF318 (NM_014345.1,1204-1222).
gtgatgcccaagaaatcca

SEQ ID NO: 55947 - DNA, 19 bp, Homo sapiens
  siRNA target sequence for ZNF318 (NM_014345.1,1234-1252).
cggattgaggtggacataa

SEQ ID NO: 55948 - DNA, 19 bp, Homo sapiens
  siRNA target sequence for ZNF318 (NM_014345.1,1235-1253).
ggattgaggtggacataat

SEQ ID NO: 55949 - DNA, 19 bp, Homo sapiens
  siRNA target sequence for ZNF318 (NM_014345.1,1267-1285).
cagcttgagagtttttcca

SEQ ID NO: 55950 - DNA, 19 bp, Homo sapiens
  siRNA target sequence for ZNF318 (NM_014345.1,1501-1519).
ctatgccacaaggataatt

SEQ ID NO: 55951 - DNA, 19 bp, Homo sapiens
  siRNA target sequence for ZNF318 (NM_014345.1,1505-1523).
gccacaaggataatttgga

SEQ ID NO: 55952 - DNA, 19 bp, Homo sapiens
  siRNA target sequence for ZNF318 (NM_014345.1,1506-1524).
ccacaaggataatttggat

SEQ ID NO: 55953 - DNA, 19 bp, Homo sapiens
  siRNA target sequence for ZNF318 (NM_014345.1,1507-1525).
cacaaggataatttggatt

SEQ ID NO: 55954 - DNA, 19 bp, Homo sapiens
  siRNA target sequence for ZNF318 (NM_014345.1,1597-1615).
ggtttttcccgcattctga

SEQ ID NO: 55955 - DNA, 19 bp, Homo sapiens
  siRNA target sequence for ZNF318 (NM_014345.1,1614-1632).
gagcatgttggctgattct

SEQ ID NO: 55956 - DNA, 19 bp, Homo sapiens
  siRNA target sequence for ZNF318 (NM_014345.1,1658-1676).
gtagctttcccgacattga

SEQ ID NO: 55957 - DNA, 19 bp, Homo sapiens
  siRNA target sequence for ZNF318 (NM_014345.1,1662-1680).
ctttcccgacattgaagat

SEQ ID NO: 55958 - DNA, 19 bp, Homo sapiens
  siRNA target sequence for ZNF318 (NM_014345.1,1804-1822).
ccagctgtaaagctagaat

SEQ ID NO: 55959 - DNA, 19 bp, Homo sapiens
  siRNA target sequence for ZNF318 (NM_014345.1,1872-1890).
gacaatagggctggatatt

SEQ ID NO: 55960 - DNA, 19 bp, Homo sapiens
  siRNA target sequence for ZNF318 (NM_014345.1,1894-1912).
gtagcagagattagtcaat

SEQ ID NO: 55961 - DNA, 19 bp, Homo sapiens
  siRNA target sequence for ZNF318 (NM_014345.1,1923-1941).
cacccaggaacgacttcat

SEQ ID NO: 55962 - DNA, 19 bp, Homo sapiens
  siRNA target sequence for ZNF318 (NM_014345.1,1983-2001).
ctcagttgaccgatacttt

SEQ ID NO: 55963 - DNA, 19 bp, Homo sapiens
  siRNA target sequence for ZNF318 (NM_014345.1,2112-2130).
gagcagggaggcacatcat

SEQ ID NO: 55964 - DNA, 19 bp, Homo sapiens
  siRNA target sequence for ZNF318 (NM_014345.1,2118-2136).
ggaggcacatcatagcaat

SEQ ID NO: 55965 - DNA, 19 bp, Homo sapiens
  siRNA target sequence for ZNF318 (NM_014345.1,2171-2189).
cttctcctgtggatcctta

SEQ ID NO: 55966 - DNA, 19 bp, Homo sapiens
  siRNA target sequence for ZNF318 (NM_014345.1,2208-2226).
ccctccattcctaaagtct

SEQ ID NO: 55967 - DNA, 19 bp, Homo sapiens
  siRNA target sequence for ZNF318 (NM_014345.1,2230-2248).
catccagtgggtcatattt

SEQ ID NO: 55968 - DNA, 19 bp, Homo sapiens
  siRNA target sequence for ZNF318 (NM_014345.1,2314-2332).
gccccatctgccccaatta

SEQ ID NO: 55969 - DNA, 19 bp, Homo sapiens
  siRNA target sequence for ZNF318 (NM_014345.1,2318-2336).
catctgccccaattagact

SEQ ID NO: 55970 - DNA, 19 bp, Homo sapiens
  siRNA target sequence for ZNF318 (NM_014345.1,2370-2388).
gccaagggcctctcagttt

SEQ ID NO: 55971 - DNA, 19 bp, Homo sapiens
  siRNA target sequence for ZNF318 (NM_014345.1,2478-2496).
ctccagatggcccatgtat

SEQ ID NO: 55972 - DNA, 19 bp, Homo sapiens
  siRNA target sequence for ZNF318 (NM_014345.1,2527-2545).
cctgaaccacacaggataa

SEQ ID NO: 55973 - DNA, 19 bp, Homo sapiens
  siRNA target sequence for ZNF318 (NM_014345.1,2631-2649).
gtctctgcgaggctcaatt

SEQ ID NO: 55974 - DNA, 19 bp, Homo sapiens
  siRNA target sequence for ZNF318 (NM_014345.1,2668-2686).
gtccaggtgtccattccat

SEQ ID NO: 55975 - DNA, 19 bp, Homo sapiens
  siRNA target sequence for ZNF318 (NM_014345.1,2696-2714).
gatataatccagagaagat

SEQ ID NO: 55976 - DNA, 19 bp, Homo sapiens
  siRNA target sequence for ZNF318 (NM_014345.1,2794-2812).
cgccagaagaagatgtact

SEQ ID NO: 55977 - DNA, 19 bp, Homo sapiens
  siRNA target sequence for ZNF318 (NM_014345.1,2826-2844).
gttagagcggcttcataaa

SEQ ID NO: 55978 - DNA, 19 bp, Homo sapiens
  siRNA target sequence for ZNF318 (NM_014345.1,2880-2898).
gaaggatggccacaaagat

SEQ ID NO: 55979 - DNA, 19 bp, Homo sapiens
  siRNA target sequence for ZNF318 (NM_014345.1,2918-2936).
gtcggcttcaggataacat

SEQ ID NO: 55980 - DNA, 19 bp, Homo sapiens
  siRNA target sequence for ZNF318 (NM_014345.1,2920-2938).
cggcttcaggataacatta

SEQ ID NO: 55981 - DNA, 19 bp, Homo sapiens
  siRNA target sequence for ZNF318 (NM_014345.1,3010-3028).
gctcagatcttgggaatta

SEQ ID NO: 55982 - DNA, 19 bp, Homo sapiens
  siRNA target sequence for ZNF318 (NM_014345.1,3011-3029).
ctcagatcttgggaattaa

SEQ ID NO: 55983 - DNA, 19 bp, Homo sapiens
  siRNA target sequence for ZNF318 (NM_014345.1,3143-3161).
cctccaacaaggaatcaaa

SEQ ID NO: 55984 - DNA, 19 bp, Homo sapiens
  siRNA target sequence for ZNF318 (NM_014345.1,3144-3162).
ctccaacaaggaatcaaaa

SEQ ID NO: 55985 - DNA, 19 bp, Homo sapiens
  siRNA target sequence for ZNF318 (NM_014345.1,3243-3261).
cactgctgcttatgagtat

SEQ ID NO: 55986 - DNA, 19 bp, Homo sapiens
  siRNA target sequence for ZNF318 (NM_014345.1,3245-3263).
ctgctgcttatgagtatta

SEQ ID NO: 55987 - DNA, 19 bp, Homo sapiens
  siRNA target sequence for ZNF318 (NM_014345.1,3305-3323).
gtgggaccatgtttgattt

SEQ ID NO: 55988 - DNA, 19 bp, Homo sapiens
  siRNA target sequence for ZNF318 (NM_014345.1,3426-3444).
gcgcactgacaagataact

SEQ ID NO: 55989 - DNA, 19 bp, Homo sapiens
  siRNA target sequence for ZNF318 (NM_014345.1,3429-3447).
cactgacaagataactgtt

SEQ ID NO: 55990 - DNA, 19 bp, Homo sapiens
  siRNA target sequence for ZNF318 (NM_014345.1,3472-3490).
gttcccatcagtggatttt

SEQ ID NO: 55991 - DNA, 19 bp, Homo sapiens
  siRNA target sequence for ZNF318 (NM_014345.1,3546-3564).
gaagggtcaccaacacaat

SEQ ID NO: 55992 - DNA, 19 bp, Homo sapiens
  siRNA target sequence for ZNF318 (NM_014345.1,3665-3683).
gacggcagagtgagctaaa

SEQ ID NO: 55993 - DNA, 19 bp, Homo sapiens
  siRNA target sequence for ZNF318 (NM_014345.1,3676-3694).
gagctaaagcgcaaactta

SEQ ID NO: 55994 - DNA, 19 bp, Homo sapiens
  siRNA target sequence for ZNF318 (NM_014345.1,3678-3696).
gctaaagcgcaaacttagt

SEQ ID NO: 55995 - DNA, 19 bp, Homo sapiens
  siRNA target sequence for ZNF318 (NM_014345.1,3765-3783).
ggtctctgagaaattagaa

SEQ ID NO: 55996 - DNA, 19 bp, Homo sapiens
  siRNA target sequence for ZNF318 (NM_014345.1,3800-3818).
gtaggaactcccctgaaaa

SEQ ID NO: 55997 - DNA, 19 bp, Homo sapiens
  siRNA target sequence for ZNF318 (NM_014345.1,3833-3851).
ggaacactggcatcaaact

SEQ ID NO: 55998 - DNA, 19 bp, Homo sapiens
  siRNA target sequence for ZNF318 (NM_014345.1,3876-3894).
ggaatcaccaacatcatct

SEQ ID NO: 55999 - DNA, 19 bp, Homo sapiens
  siRNA target sequence for ZNF318 (NM_014345.1,3877-3895).
gaatcaccaacatcatctt

SEQ ID NO: 56000 - DNA, 19 bp, Homo sapiens
  siRNA target sequence for ZNF318 (NM_014345.1,3890-3908).
catcttcttttgggaaatt

SEQ ID NO: 56001 - DNA, 19 bp, Homo sapiens
  siRNA target sequence for ZNF318 (NM_014345.1,3951-3969).
ggtgaccccaagtatctct

SEQ ID NO: 56002 - DNA, 19 bp, Homo sapiens
  siRNA target sequence for ZNF318 (NM_014345.1,3952-3970).
gtgaccccaagtatctcta

SEQ ID NO: 56003 - DNA, 19 bp, Homo sapiens
  siRNA target sequence for ZNF318 (NM_014345.1,3954-3972).
gaccccaagtatctctaaa

SEQ ID NO: 56004 - DNA, 19 bp, Homo sapiens
  siRNA target sequence for ZNF318 (NM_014345.1,3976-3994).
gagattctagaaagtagta

SEQ ID NO: 56005 - DNA, 19 bp, Homo sapiens
  siRNA target sequence for ZNF318 (NM_014345.1,4106-4124).
cttccacacagactaagat

SEQ ID NO: 56006 - DNA, 19 bp, Homo sapiens
  siRNA target sequence for ZNF318 (NM_014345.1,4129-4147).
cccaacctgcctattccat

SEQ ID NO: 56007 - DNA, 19 bp, Homo sapiens
  siRNA target sequence for ZNF318 (NM_014345.1,4153-4171).
gtactccgcaagtcatgtt

SEQ ID NO: 56008 - DNA, 19 bp, Homo sapiens
  siRNA target sequence for ZNF318 (NM_014345.1,4184-4202).
gcaagccagctcctcttaa

SEQ ID NO: 56009 - DNA, 19 bp, Homo sapiens
  siRNA target sequence for ZNF318 (NM_014345.1,4246-4264).
ctgccagtggttaaagagt

SEQ ID NO: 56010 - DNA, 19 bp, Homo sapiens
  siRNA target sequence for ZNF318 (NM_014345.1,4317-4335).
ggaagaggtgattctaaaa

SEQ ID NO: 56011 - DNA, 19 bp, Homo sapiens
  siRNA target sequence for ZNF318 (NM_014345.1,4356-4374).
ggtgttggctgaaaagagt

SEQ ID NO: 56012 - DNA, 19 bp, Homo sapiens
  siRNA target sequence for ZNF318 (NM_014345.1,4371-4389).
gagtgagccatctcattta

SEQ ID NO: 56013 - DNA, 19 bp, Homo sapiens
  siRNA target sequence for ZNF318 (NM_014345.1,4493-4511).
ctatcttggctccagtaaa

SEQ ID NO: 56014 - DNA, 19 bp, Homo sapiens
  siRNA target sequence for ZNF318 (NM_014345.1,4497-4515).
cttggctccagtaaaatca

SEQ ID NO: 56015 - DNA, 19 bp, Homo sapiens
  siRNA target sequence for ZNF318 (NM_014345.1,4671-4689).
cctgttctctgtgttagta

SEQ ID NO: 56016 - DNA, 19 bp, Homo sapiens
  siRNA target sequence for ZNF318 (NM_014345.1,4743-4761).
gaagcgaaattcatgctta

SEQ ID NO: 56017 - DNA, 19 bp, Homo sapiens
  siRNA target sequence for ZNF318 (NM_014345.1,4774-4792).
gctaaggacctgtatgaca

SEQ ID NO: 56018 - DNA, 19 bp, Homo sapiens
  siRNA target sequence for ZNF318 (NM_014345.1,4780-4798).
gacctgtatgacatattct

SEQ ID NO: 56019 - DNA, 19 bp, Homo sapiens
  siRNA target sequence for ZNF318 (NM_014345.1,4870-4888).
gccaatggggaaaatagca

SEQ ID NO: 56020 - DNA, 19 bp, Homo sapiens
  siRNA target sequence for ZNF318 (NM_014345.1,4871-4889).
ccaatggggaaaatagcaa

SEQ ID NO: 56021 - DNA, 19 bp, Homo sapiens
  siRNA target sequence for ZNF318 (NM_014345.1,4981-4999).
gtcgctgctcctatagtta

SEQ ID NO: 56022 - DNA, 19 bp, Homo sapiens
  siRNA target sequence for ZNF318 (NM_014345.1,5048-5066).
ggtcagttgtagaacatgt

SEQ ID NO: 56023 - DNA, 19 bp, Homo sapiens
  siRNA target sequence for ZNF318 (NM_014345.1,5062-5080).
catgtaggcccaaaaagca

SEQ ID NO: 56024 - DNA, 19 bp, Homo sapiens
  siRNA target sequence for ZNF318 (NM_014345.1,5129-5147).
gcaggccttatgaaacaat

SEQ ID NO: 56025 - DNA, 19 bp, Homo sapiens
  siRNA target sequence for ZNF318 (NM_014345.1,5170-5188).
gccatatggacctctagtt

SEQ ID NO: 56026 - DNA, 19 bp, Homo sapiens
  siRNA target sequence for ZNF318 (NM_014345.1,5200-5218).
gacactagtagggatatat

SEQ ID NO: 56027 - DNA, 19 bp, Homo sapiens
  siRNA target sequence for ZNF318 (NM_014345.1,5202-5220).
cactagtagggatatatct

SEQ ID NO: 56028 - DNA, 19 bp, Homo sapiens
  siRNA target sequence for ZNF318 (NM_014345.1,5273-5291).
cacctcctcaactgttaga

SEQ ID NO: 56029 - DNA, 19 bp, Homo sapiens
  siRNA target sequence for ZNF318 (NM_014345.1,5323-5341).
gaaatccacctcagagaat

SEQ ID NO: 56030 - DNA, 19 bp, Homo sapiens
  siRNA target sequence for ZNF318 (NM_014345.1,5342-5360).
ctgttaaccaggataagga

SEQ ID NO: 56031 - DNA, 19 bp, Homo sapiens
  siRNA target sequence for ZNF318 (NM_014345.1,5364-5382).
ccaagagctccgtaaatct

SEQ ID NO: 56032 - DNA, 19 bp, Homo sapiens
  siRNA target sequence for ZNF318 (NM_014345.1,5374-5392).
cgtaaatctgaggattgta

SEQ ID NO: 56033 - DNA, 19 bp, Homo sapiens
  siRNA target sequence for ZNF318 (NM_014345.1,5407-5425).
gagacaaacactgaactaa

SEQ ID NO: 56034 - DNA, 19 bp, Homo sapiens
  siRNA target sequence for ZNF318 (NM_014345.1,5442-5460).
gctgtctgaggggatagtt

SEQ ID NO: 56035 - DNA, 19 bp, Homo sapiens
  siRNA target sequence for ZNF318 (NM_014345.1,5445-5463).
gtctgaggggatagttgat

SEQ ID NO: 56036 - DNA, 19 bp, Homo sapiens
  siRNA target sequence for ZNF318 (NM_014345.1,5507-5525).
ctaatttgaaccatggaaa

SEQ ID NO: 56037 - DNA, 19 bp, Homo sapiens
  siRNA target sequence for ZNF318 (NM_014345.1,5556-5574).
gcccaacttgctaatgatt

SEQ ID NO: 56038 - DNA, 19 bp, Homo sapiens
  siRNA target sequence for ZNF318 (NM_014345.1,5562-5580).
cttgctaatgattgacaaa

SEQ ID NO: 56039 - DNA, 19 bp, Homo sapiens
  siRNA target sequence for ZNF318 (NM_014345.1,5615-5633).
gtgaaactccaagtaaagt

SEQ ID NO: 56040 - DNA, 19 bp, Homo sapiens
  siRNA target sequence for ZNF318 (NM_014345.1,5621-5639).
ctccaagtaaagtagtgat

SEQ ID NO: 56041 - DNA, 19 bp, Homo sapiens
  siRNA target sequence for ZNF318 (NM_014345.1,5624-5642).
caagtaaagtagtgatcaa

SEQ ID NO: 56042 - DNA, 19 bp, Homo sapiens
  siRNA target sequence for ZNF318 (NM_014345.1,5696-5714).
cagaagctaggtctttact

SEQ ID NO: 56043 - DNA, 19 bp, Homo sapiens
  siRNA target sequence for ZNF318 (NM_014345.1,5722-5740).
caagatacacctgtgaaaa

SEQ ID NO: 56044 - DNA, 19 bp, Homo sapiens
  siRNA target sequence for ZNF318 (NM_014345.1,5773-5791).
gccagatcagctatgtgtt

SEQ ID NO: 56045 - DNA, 19 bp, Homo sapiens
  siRNA target sequence for ZNF318 (NM_014345.1,5847-5865).
gaattcagctccagaatca

SEQ ID NO: 56046 - DNA, 19 bp, Homo sapiens
  siRNA target sequence for ZNF318 (NM_014345.1,5882-5900).
ggtacagaagtctcaaact

SEQ ID NO: 56047 - DNA, 19 bp, Homo sapiens
  siRNA target sequence for ZNF318 (NM_014345.1,5912-5930).
gatcaaaagactttcaagt

SEQ ID NO: 56048 - DNA, 19 bp, Homo sapiens
  siRNA target sequence for ZNF318 (NM_014345.1,6065-6083).
gcaaggccctagaagactt

SEQ ID NO: 56049 - DNA, 19 bp, Homo sapiens
  siRNA target sequence for ZNF318 (NM_014345.1,6066-6084).
caaggccctagaagacttt

SEQ ID NO: 56050 - DNA, 19 bp, Homo sapiens
  siRNA target sequence for ZNF318 (NM_014345.1,6069-6087).
ggccctagaagactttgaa

SEQ ID NO: 56051 - DNA, 19 bp, Homo sapiens
  siRNA target sequence for ZNF318 (NM_014345.1,6166-6184).
gtaagcccagcacatagat

SEQ ID NO: 56052 - DNA, 19 bp, Homo sapiens
  siRNA target sequence for ZNF318 (NM_014345.1,6232-6250).
cctatagggtgtaattcct

SEQ ID NO: 56053 - DNA, 19 bp, Homo sapiens
  siRNA target sequence for ZNF318 (NM_014345.1,6257-6275).
ccgctgacttcgaaccaat

SEQ ID NO: 56054 - DNA, 19 bp, Homo sapiens
  siRNA target sequence for ZNF318 (NM_014345.1,6267-6285).
cgaaccaatcccatctttt

SEQ ID NO: 56055 - DNA, 19 bp, Homo sapiens
  siRNA target sequence for ZNF318 (NM_014345.1,6314-6332).
ccttggtgcttgactttga

SEQ ID NO: 56056 - DNA, 19 bp, Homo sapiens
  siRNA target sequence for ZNF318 (NM_014345.1,6502-6520).
gaatcttcccaattagaca

SEQ ID NO: 56057 - DNA, 19 bp, Homo sapiens
  siRNA target sequence for ZNF318 (NM_014345.1,6509-6527).
cccaattagacaaacaaga

SEQ ID NO: 56058 - DNA, 19 bp, Homo sapiens
  siRNA target sequence for ZNF318 (NM_014345.1,6526-6544).
gagtcactcggattggaat

SEQ ID NO: 56059 - DNA, 19 bp, Homo sapiens
  siRNA target sequence for ZNF318 (NM_014345.1,6528-6546).
gtcactcggattggaatta

SEQ ID NO: 56060 - DNA, 19 bp, Homo sapiens
  siRNA target sequence for ZNF318 (NM_014345.1,6530-6548).
cactcggattggaattaaa

SEQ ID NO: 56061 - DNA, 19 bp, Homo sapiens
  siRNA target sequence for ZNF318 (NM_014345.1,6534-6552).
cggattggaattaaaaaca

SEQ ID NO: 56062 - DNA, 19 bp, Homo sapiens
  siRNA target sequence for ZNF318 (NM_014345.1,6584-6602).
gccttccagaccttgttga

SEQ ID NO: 56063 - DNA, 19 bp, Homo sapiens
  siRNA target sequence for ZNF318 (NM_014345.1,6592-6610).
gaccttgttgactttgtca

SEQ ID NO: 56064 - DNA, 19 bp, Homo sapiens
  siRNA target sequence for ZNF318 (NM_014345.1,6613-6631).
cggacctctggagttcaaa

SEQ ID NO: 56065 - DNA, 19 bp, Homo sapiens
  siRNA target sequence for ZNF318 (NM_014345.1,6664-6682).
ggtgacccttctaaatgta

SEQ ID NO: 56066 - DNA, 19 bp, Homo sapiens
  siRNA target sequence for ZNF318 (NM_014345.1,6667-6685).
gacccttctaaatgtagtt

SEQ ID NO: 56067 - DNA, 19 bp, Homo sapiens
  siRNA target sequence for ZNF318 (NM_014345.1,6731-6749).
ccacagaggtggcaattct

SEQ ID NO: 56068 - DNA, 19 bp, Homo sapiens
  siRNA target sequence for ZNF318 (NM_014345.1,6765-6783).
cagtggcgaccctctgaat

SEQ ID NO: 56069 - DNA, 19 bp, Homo sapiens
  siRNA target sequence for ZNF318 (NM_014345.1,6767-6785).
gtggcgaccctctgaattt

SEQ ID NO: 56070 - DNA, 19 bp, Homo sapiens
  siRNA target sequence for ZNF318 (NM_014345.1,6818-6836).
gggagcaggtaattgaaga

SEQ ID NO: 56071 - DNA, 19 bp, Homo sapiens
  siRNA target sequence for ZNF385 (NM_015481.1,357-375).
ctgtcaaatccgcttcaat

SEQ ID NO: 56072 - DNA, 19 bp, Homo sapiens
  siRNA target sequence for ZNF385 (NM_015481.1,414-432).
ccacgcccgacgagtcaaa

SEQ ID NO: 56073 - DNA, 19 bp, Homo sapiens
  siRNA target sequence for ZNF385 (NM_015481.1,629-647).
ctggtcagggtgtaaccaa

SEQ ID NO: 56074 - DNA, 19 bp, Homo sapiens
  siRNA target sequence for ZNF385 (NM_015481.1,768-786).
gcttgaggcacataacaaa

SEQ ID NO: 56075 - DNA, 19 bp, Homo sapiens
  siRNA target sequence for ZNF385 (NM_015481.1,772-790).
gaggcacataacaaaggta

SEQ ID NO: 56076 - DNA, 19 bp, Homo sapiens
  siRNA target sequence for ZNF385 (NM_015481.1,776-794).
cacataacaaaggtactaa

SEQ ID NO: 56077 - DNA, 19 bp, Homo sapiens
  siRNA target sequence for ZPR9 (NM_033414.2,124-142).
gcgacgtacacctgcataa

SEQ ID NO: 56078 - DNA, 19 bp, Homo sapiens
  siRNA target sequence for ZPR9 (NM_033414.2,329-347).
ccgtttgcagtaagaagtt

SEQ ID NO: 56079 - DNA, 19 bp, Homo sapiens
  siRNA target sequence for ZPR9 (NM_033414.2,330-348).
cgtttgcagtaagaagttt

SEQ ID NO: 56080 - DNA, 19 bp, Homo sapiens
  siRNA target sequence for ZPR9 (NM_033414.2,739-757).
ggagacgattgggaagata

SEQ ID NO: 56081 - DNA, 19 bp, Homo sapiens
  siRNA target sequence for ZPR9 (NM_033414.2,740-758).
gagacgattgggaagatat

SEQ ID NO: 56082 - DNA, 19 bp, Homo sapiens
  siRNA target sequence for ZPR9 (NM_033414.2,744-762).
cgattgggaagatattgat

SEQ ID NO: 56083 - DNA, 19 bp, Homo sapiens
  siRNA target sequence for ZPR9 (NM_033414.2,868-886).
cctatcacggactgcttat

SEQ ID NO: 56084 - DNA, 19 bp, Homo sapiens
  siRNA target sequence for ZPR9 (NM_033414.2,869-887).
ctatcacggactgcttatt

SEQ ID NO: 56085 - DNA, 19 bp, Homo sapiens
  siRNA target sequence for ZPR9 (NM_033414.2,873-891).
cacggactgcttattttgt

SEQ ID NO: 56086 - DNA, 19 bp, Homo sapiens
  siRNA target sequence for ZPR9 (NM_033414.2,958-976).
cctgatatagaatatcttt

SEQ ID NO: 56087 - DNA, 19 bp, Homo sapiens
  siRNA target sequence for ZPR9 (NM_033414.2,979-997).
gatattaagggactgatta

SEQ ID NO: 56088 - DNA, 19 bp, Homo sapiens
  siRNA target sequence for ZPR9 (NM_033414.2,1015-1033).
gttggtgttggcaagattt

SEQ ID NO: 56089 - DNA, 19 bp, Homo sapiens
  siRNA target sequence for ZPR9 (NM_033414.2,1078-1096).
gctgtacaggcacatatga

SEQ ID NO: 56090 - DNA, 19 bp, Homo sapiens
  siRNA target sequence for ZPR9 (NM_033414.2,1079-1097).
ctgtacaggcacatatgaa

SEQ ID NO: 56091 - DNA, 19 bp, Homo sapiens
  siRNA target sequence for ZPR9 (NM_033414.2,1086-1104).
ggcacatatgaatgacaaa

SEQ ID NO: 56092 - DNA, 19 bp, Homo sapiens
  siRNA target sequence for ZPR9 (NM_033414.2,1129-1147).
ggcgatgctgctttggaat

SEQ ID NO: 56093 - DNA, 19 bp, Homo sapiens
  siRNA target sequence for ZPR9 (NM_033414.2,1130-1148).
gcgatgctgctttggaatt

SEQ ID NO: 56094 - DNA, 19 bp, Homo sapiens
  siRNA target sequence for ZPR9 (NM_033414.2,1150-1168).
gcagacttctatgatttta

SEQ ID NO: 56095 - DNA, 19 bp, Homo sapiens
  siRNA target sequence for ZPR9 (NM_033414.2,1216-1234).
gaggagttgccctcagaaa

SEQ ID NO: 56096 - DNA, 19 bp, Homo sapiens
  siRNA target sequence for ZPR9 (NM_033414.2,1297-1315).
catcgctccttgatgagat

SEQ ID NO: 56097 - DNA, 19 bp, Homo sapiens
  siRNA target sequence for ZPR9 (NM_033414.2,1300-1318).
cgctccttgatgagatact

SEQ ID NO: 56098 - DNA, 19 bp, Homo sapiens
  siRNA target sequence for ZPR9 (NM_033414.2,1301-1319).
gctccttgatgagatacta

SEQ ID NO: 56099 - DNA, 19 bp, Homo sapiens
  siRNA target sequence for ZPR9 (NM_033414.2,1304-1322).
ccttgatgagatactacaa

SEQ ID NO: 56100 - DNA, 19 bp, Homo sapiens
  siRNA target sequence for ZPR9 (NM_033414.2,1305-1323).
cttgatgagatactacaaa

SEQ ID NO: 56101 - DNA, 19 bp, Homo sapiens
  siRNA target sequence for ZPR9 (NM_033414.2,1421-1439).
gcacaggagcggctcttat

SEQ ID NO: 56102 - DNA, 19 bp, Homo sapiens
  siRNA target sequence for ZPR9 (NM_033414.2,1534-1552).
cgggtccaagtgagattct

SEQ ID NO: 56103 - DNA, 19 bp, Homo sapiens
  siRNA target sequence for BRF2 (NM_018310.2,156-174).
gtggaagactcgcactatt

SEQ ID NO: 56104 - DNA, 19 bp, Homo sapiens
  siRNA target sequence for BRF2 (NM_018310.2,258-276).
ctccgagaggtaacatatt

SEQ ID NO: 56105 - DNA, 19 bp, Homo sapiens
  siRNA target sequence for BRF2 (NM_018310.2,288-306).
ggggaaaacgaacaagtta

SEQ ID NO: 56106 - DNA, 19 bp, Homo sapiens
  siRNA target sequence for BRF2 (NM_018310.2,290-308).
ggaaaacgaacaagttagt

SEQ ID NO: 56107 - DNA, 19 bp, Homo sapiens
  siRNA target sequence for BRF2 (NM_018310.2,433-451).
cggccaggctgcaaaagaa

SEQ ID NO: 56108 - DNA, 19 bp, Homo sapiens
  siRNA target sequence for BRF2 (NM_018310.2,462-480).
gttgggtgctgcgtcttaa

SEQ ID NO: 56109 - DNA, 19 bp, Homo sapiens
  siRNA target sequence for BRF2 (NM_018310.2,495-513).
cataactggcccctaacaa

SEQ ID NO: 56110 - DNA, 19 bp, Homo sapiens
  siRNA target sequence for BRF2 (NM_018310.2,521-539).
catctgcacgctgttgtat

SEQ ID NO: 56111 - DNA, 19 bp, Homo sapiens
  siRNA target sequence for BRF2 (NM_018310.2,529-547).
cgctgttgtatgcagattt

SEQ ID NO: 56112 - DNA, 19 bp, Homo sapiens
  siRNA target sequence for BRF2 (NM_018310.2,565-583).
cttacatgcagatagtgaa

SEQ ID NO: 56113 - DNA, 19 bp, Homo sapiens
  siRNA target sequence for BRF2 (NM_018310.2,683-701).
caaatacgtggaagacaaa

SEQ ID NO: 56114 - DNA, 19 bp, Homo sapiens
  siRNA target sequence for BRF2 (NM_018310.2,847-865).
cccttgcccgattttgtaa

SEQ ID NO: 56115 - DNA, 19 bp, Homo sapiens
  siRNA target sequence for BRF2 (NM_018310.2,848-866).
ccttgcccgattttgtaaa

SEQ ID NO: 56116 - DNA, 19 bp, Homo sapiens
  siRNA target sequence for BRF2 (NM_018310.2,849-867).
cttgcccgattttgtaaat

SEQ ID NO: 56117 - DNA, 19 bp, Homo sapiens
  siRNA target sequence for BRF2 (NM_018310.2,1116-1134).
ggggaggtgggaaataatt

SEQ ID NO: 56118 - DNA, 19 bp, Homo sapiens
  siRNA target sequence for BRF2 (NM_018310.2,1125-1143).
ggaaataattccttaggtt

SEQ ID NO: 56119 - DNA, 19 bp, Homo sapiens
  siRNA target sequence for BRF2 (NM_018310.2,1290-1308).
cgtacccctcaggaagtta

SEQ ID NO: 56120 - DNA, 19 bp, Homo sapiens
  siRNA target sequence for BRF2 (NM_018310.2,1302-1320).
gaagttagggactttcaga

SEQ ID NO: 56121 - DNA, 19 bp, Homo sapiens
  siRNA target sequence for BZW1 (NM_014670.1,111-129).
ctatcaggccagcgtttta

SEQ ID NO: 56122 - DNA, 19 bp, Homo sapiens
  siRNA target sequence for BZW1 (NM_014670.1,171-189).
cagtttcaagactgtatta

SEQ ID NO: 56123 - DNA, 19 bp, Homo sapiens
  siRNA target sequence for BZW1 (NM_014670.1,173-191).
gtttcaagactgtattatt

SEQ ID NO: 56124 - DNA, 19 bp, Homo sapiens
  siRNA target sequence for BZW1 (NM_014670.1,202-220).
ctgaaaccggtactgattt

SEQ ID NO: 56125 - DNA, 19 bp, Homo sapiens
  siRNA target sequence for BZW1 (NM_014670.1,221-239).
ggaagcagtagctaagttt

SEQ ID NO: 56126 - DNA, 19 bp, Homo sapiens
  siRNA target sequence for BZW1 (NM_014670.1,226-244).
cagtagctaagtttcttga

SEQ ID NO: 56127 - DNA, 19 bp, Homo sapiens
  siRNA target sequence for BZW1 (NM_014670.1,250-268).
ctggagcaaaacttgatta

SEQ ID NO: 56128 - DNA, 19 bp, Homo sapiens
  siRNA target sequence for BZW1 (NM_014670.1,269-287).
ccgtcgatatgcagaaaca

SEQ ID NO: 56129 - DNA, 19 bp, Homo sapiens
  siRNA target sequence for BZW1 (NM_014670.1,331-349).
gtacactggcagatgacat

SEQ ID NO: 56130 - DNA, 19 bp, Homo sapiens
  siRNA target sequence for BZW1 (NM_014670.1,371-389).
gtttgcagcccaagaagat

SEQ ID NO: 56131 - DNA, 19 bp, Homo sapiens
  siRNA target sequence for BZW1 (NM_014670.1,411-429).
gctcaggtttttaacaagt

SEQ ID NO: 56132 - DNA, 19 bp, Homo sapiens
  siRNA target sequence for BZW1 (NM_014670.1,414-432).
caggtttttaacaagttaa

SEQ ID NO: 56133 - DNA, 19 bp, Homo sapiens
  siRNA target sequence for BZW1 (NM_014670.1,428-446).
gttaatcaggcgctacaaa

SEQ ID NO: 56134 - DNA, 19 bp, Homo sapiens
  siRNA target sequence for BZW1 (NM_014670.1,491-509).
gttcttgaagggtttttca

SEQ ID NO: 56135 - DNA, 19 bp, Homo sapiens
  siRNA target sequence for BZW1 (NM_014670.1,949-967).
cagttgtcatcggaatagt

SEQ ID NO: 56136 - DNA, 19 bp, Homo sapiens
  siRNA target sequence for BZW1 (NM_014670.1,951-969).
gttgtcatcggaatagtct

SEQ ID NO: 56137 - DNA, 19 bp, Homo sapiens
  siRNA target sequence for BZW1 (NM_014670.1,1046-1064).
gcaatacagccctctactt

SEQ ID NO: 56138 - DNA, 19 bp, Homo sapiens
  siRNA target sequence for BZW2 (NM_014038.1,245-263).
cagtcttcagggatacact

SEQ ID NO: 56139 - DNA, 19 bp, Homo sapiens
  siRNA target sequence for BZW2 (NM_014038.1,323-341).
ctacaggctcaagattaga

SEQ ID NO: 56140 - DNA, 19 bp, Homo sapiens
  siRNA target sequence for BZW2 (NM_014038.1,330-348).
ctcaagattagattatcgt

SEQ ID NO: 56141 - DNA, 19 bp, Homo sapiens
  siRNA target sequence for BZW2 (NM_014038.1,404-422).
gaggaacgcgcatagatga

SEQ ID NO: 56142 - DNA, 19 bp, Homo sapiens
  siRNA target sequence for BZW2 (NM_014038.1,492-510).
ctatgctcaggtcttcaat

SEQ ID NO: 56143 - DNA, 19 bp, Homo sapiens
  siRNA target sequence for BZW2 (NM_014038.1,516-534).
catcaggagatataagtat

SEQ ID NO: 56144 - DNA, 19 bp, Homo sapiens
  siRNA target sequence for BZW2 (NM_014038.1,681-699).
caccgacagcttagtcaaa

SEQ ID NO: 56145 - DNA, 19 bp, Homo sapiens
  siRNA target sequence for BZW2 (NM_014038.1,684-702).
cgacagcttagtcaaagaa

SEQ ID NO: 56146 - DNA, 19 bp, Homo sapiens
  siRNA target sequence for BZW2 (NM_014038.1,705-723).
cattgcggcctcatttgct

SEQ ID NO: 56147 - DNA, 19 bp, Homo sapiens
  siRNA target sequence for BZW2 (NM_014038.1,769-787).
gttacctcgtctttgagaa

SEQ ID NO: 56148 - DNA, 19 bp, Homo sapiens
  siRNA target sequence for BZW2 (NM_014038.1,945-963).
gctccaggagcgtctttct

SEQ ID NO: 56149 - DNA, 19 bp, Homo sapiens
  siRNA target sequence for BZW2 (NM_014038.1,1045-1063).
ggtcttctgtggacatgta

SEQ ID NO: 56150 - DNA, 19 bp, Homo sapiens
  siRNA target sequence for BZW2 (NM_014038.1,1119-1137).
gaagcacctgaagcaatat

SEQ ID NO: 56151 - DNA, 19 bp, Homo sapiens
  siRNA target sequence for BZW2 (NM_014038.1,1122-1140).
gcacctgaagcaatatgct

SEQ ID NO: 56152 - DNA, 19 bp, Homo sapiens
  siRNA target sequence for BZW2 (NM_014038.1,1211-1229).
gctacgacaacatccattt

SEQ ID NO: 56153 - DNA, 19 bp, Homo sapiens
  siRNA target sequence for BZW2 (NM_014038.1,1291-1309).
gcaatactgaaatggtata

SEQ ID NO: 56154 - DNA, 19 bp, Homo sapiens
  siRNA target sequence for BZW2 (NM_014038.1,1311-1329).
ggaagcacatgttgctaaa

SEQ ID NO: 56155 - DNA, 19 bp, Homo sapiens
  siRNA target sequence for BZW2 (NM_014038.1,1325-1343).
ctaaaggcaaaagtgtttt

SEQ ID NO: 56156 - DNA, 19 bp, Homo sapiens
  siRNA target sequence for CGI-09 (NM_015939.3,200-218).
ggtgctgaaacgtgaagat

SEQ ID NO: 56157 - DNA, 19 bp, Homo sapiens
  siRNA target sequence for CGI-09 (NM_015939.3,290-308).
cgtcattggccatagttat

SEQ ID NO: 56158 - DNA, 19 bp, Homo sapiens
  siRNA target sequence for CGI-09 (NM_015939.3,293-311).
cattggccatagttatgga

SEQ ID NO: 56159 - DNA, 19 bp, Homo sapiens
  siRNA target sequence for CGI-09 (NM_015939.3,368-386).
gcctactgcagagactaaa

SEQ ID NO: 56160 - DNA, 19 bp, Homo sapiens
  siRNA target sequence for CGI-09 (NM_015939.3,390-408).
gcgggcactgataatcgaa

SEQ ID NO: 56161 - DNA, 19 bp, Homo sapiens
  siRNA target sequence for CGI-09 (NM_015939.3,391-409).
cgggcactgataatcgaaa

SEQ ID NO: 56162 - DNA, 19 bp, Homo sapiens
  siRNA target sequence for CGI-09 (NM_015939.3,392-410).
gggcactgataatcgaaat

SEQ ID NO: 56163 - DNA, 19 bp, Homo sapiens
  siRNA target sequence for CGI-09 (NM_015939.3,395-413).
cactgataatcgaaatata

SEQ ID NO: 56164 - DNA, 19 bp, Homo sapiens
  siRNA target sequence for CGI-09 (NM_015939.3,489-507).
gaaatagttcagcagttaa

SEQ ID NO: 56165 - DNA, 19 bp, Homo sapiens
  siRNA target sequence for CGI-09 (NM_015939.3,495-513).
gttcagcagttaattgaaa

SEQ ID NO: 56166 - DNA, 19 bp, Homo sapiens
  siRNA target sequence for CGI-09 (NM_015939.3,527-545).
ccgagacaagacagaattt

SEQ ID NO: 56167 - DNA, 19 bp, Homo sapiens
  siRNA target sequence for CGI-09 (NM_015939.3,589-607).
ccatcattactgttgtgaa

SEQ ID NO: 56168 - DNA, 19 bp, Homo sapiens
  siRNA target sequence for CGI-09 (NM_015939.3,608-626).
gccatccacccgtattctt

SEQ ID NO: 56169 - DNA, 19 bp, Homo sapiens
  siRNA target sequence for CGI-09 (NM_015939.3,609-627).
ccatccacccgtattcttt

SEQ ID NO: 56170 - DNA, 19 bp, Homo sapiens
  siRNA target sequence for CGI-09 (NM_015939.3,613-631).
ccacccgtattctttcaat

SEQ ID NO: 56171 - DNA, 19 bp, Homo sapiens
  siRNA target sequence for CGI-09 (NM_015939.3,614-632).
cacccgtattctttcaatt

SEQ ID NO: 56172 - DNA, 19 bp, Homo sapiens
  siRNA target sequence for CGI-09 (NM_015939.3,668-686).
catgagatacgatacacta

SEQ ID NO: 56173 - DNA, 19 bp, Homo sapiens
  siRNA target sequence for CGI-09 (NM_015939.3,714-732).
cgtgctggcaacaaaatga

SEQ ID NO: 56174 - DNA, 19 bp, Homo sapiens
  siRNA target sequence for CGI-09 (NM_015939.3,720-738).
ggcaacaaaatgattgtga

SEQ ID NO: 56175 - DNA, 19 bp, Homo sapiens
  siRNA target sequence for CGI-09 (NM_015939.3,776-794).
ggaacgaatgggaggtttt

SEQ ID NO: 56176 - DNA, 19 bp, Homo sapiens
  siRNA target sequence for CGI-09 (NM_015939.3,786-804).
ggaggttttggctccatta

SEQ ID NO: 56177 - DNA, 19 bp, Homo sapiens
  siRNA target sequence for CGI-09 (NM_015939.3,790-808).
gttttggctccattattca

SEQ ID NO: 56178 - DNA, 19 bp, Homo sapiens
  siRNA target sequence for CGI-09 (NM_015939.3,841-859).
caacagcatgttttggatt

SEQ ID NO: 56179 - DNA, 19 bp, Homo sapiens
  siRNA target sequence for CGI-09 (NM_015939.3,873-891).
ctcagtggtctttatgaat

SEQ ID NO: 56180 - DNA, 19 bp, Homo sapiens
  siRNA target sequence for CGI-09 (NM_015939.3,928-946).
cattttctgccaagatgtt

SEQ ID NO: 56181 - DNA, 19 bp, Homo sapiens
  siRNA target sequence for CGI-09 (NM_015939.3,969-987).
gctttggttgaagaaagta

SEQ ID NO: 56182 - DNA, 19 bp, Homo sapiens
  siRNA target sequence for CGI-09 (NM_015939.3,1110-1128).
cataaggggcctaaagaga

SEQ ID NO: 56183 - DNA, 19 bp, Homo sapiens
  siRNA target sequence for CGI-09 (NM_015939.3,1222-1240).
gaaacgcagatggtttaat

SEQ ID NO: 56184 - DNA, 19 bp, Homo sapiens
  siRNA target sequence for CGI-09 (NM_015939.3,1316-1334).
ggtctactgtcagtacaaa

SEQ ID NO: 56185 - DNA, 19 bp, Homo sapiens
  siRNA target sequence for CGI-09 (NM_015939.3,1432-1450).
cagatcgaagtcatcctaa

SEQ ID NO: 56186 - DNA, 19 bp, Homo sapiens
  siRNA target sequence for CGI-09 (NM_015939.3,1523-1541).
caccagcctcaaatctaat

SEQ ID NO: 56187 - DNA, 19 bp, Homo sapiens
  siRNA target sequence for COPS5 (NM_006837.2,350-368).
ggtatggcccagaaaacct

SEQ ID NO: 56188 - DNA, 19 bp, Homo sapiens
  siRNA target sequence for COPS5 (NM_006837.2,395-413).
gctcagagtatcgatgaaa

SEQ ID NO: 56189 - DNA, 19 bp, Homo sapiens
  siRNA target sequence for COPS5 (NM_006837.2,398-416).
cagagtatcgatgaaatct

SEQ ID NO: 56190 - DNA, 19 bp, Homo sapiens
  siRNA target sequence for COPS5 (NM_006837.2,402-420).
gtatcgatgaaatctacaa

SEQ ID NO: 56191 - DNA, 19 bp, Homo sapiens
  siRNA target sequence for COPS5 (NM_006837.2,415-433).
ctacaaatacgacaagaaa

SEQ ID NO: 56192 - DNA, 19 bp, Homo sapiens
  siRNA target sequence for COPS5 (NM_006837.2,465-483).
ggactaaggatcaccatta

SEQ ID NO: 56193 - DNA, 19 bp, Homo sapiens
  siRNA target sequence for COPS5 (NM_006837.2,468-486).
ctaaggatcaccattactt

SEQ ID NO: 56194 - DNA, 19 bp, Homo sapiens
  siRNA target sequence for COPS5 (NM_006837.2,476-494).
caccattactttaagtact

SEQ ID NO: 56195 - DNA, 19 bp, Homo sapiens
  siRNA target sequence for COPS5 (NM_006837.2,590-608).
ggtgaaaccatgatcatta

SEQ ID NO: 56196 - DNA, 19 bp, Homo sapiens
  siRNA target sequence for COPS5 (NM_006837.2,604-622).
cattatggacagttttgct

SEQ ID NO: 56197 - DNA, 19 bp, Homo sapiens
  siRNA target sequence for COPS5 (NM_006837.2,637-655).
cactgaaacccgagtaaat

SEQ ID NO: 56198 - DNA, 19 bp, Homo sapiens
  siRNA target sequence for COPS5 (NM_006837.2,682-700).
ggctgcatacatagaaaat

SEQ ID NO: 56199 - DNA, 19 bp, Homo sapiens
  siRNA target sequence for COPS5 (NM_006837.2,728-746).
gcaatcgggtggtatcata

SEQ ID NO: 56200 - DNA, 19 bp, Homo sapiens
  siRNA target sequence for COPS5 (NM_006837.2,835-853).
ggtgattgatccaacaaga

SEQ ID NO: 56201 - DNA, 19 bp, Homo sapiens
  siRNA target sequence for COPS5 (NM_006837.2,836-854).
gtgattgatccaacaagaa

SEQ ID NO: 56202 - DNA, 19 bp, Homo sapiens
  siRNA target sequence for COPS5 (NM_006837.2,838-856).
gattgatccaacaagaaca

SEQ ID NO: 56203 - DNA, 19 bp, Homo sapiens
  siRNA target sequence for COPS5 (NM_006837.2,861-879).
ccgcagggaaagtgaatct

SEQ ID NO: 56204 - DNA, 19 bp, Homo sapiens
  siRNA target sequence for COPS5 (NM_006837.2,862-880).
cgcagggaaagtgaatctt

SEQ ID NO: 56205 - DNA, 19 bp, Homo sapiens
  siRNA target sequence for COPS5 (NM_006837.2,907-925).
ctacaaacctcctgatgaa

SEQ ID NO: 56206 - DNA, 19 bp, Homo sapiens
  siRNA target sequence for COPS5 (NM_006837.2,943-961).
gactattccacttaataaa

SEQ ID NO: 56207 - DNA, 19 bp, Homo sapiens
  siRNA target sequence for COPS5 (NM_006837.2,974-992).
ggtgtacactgcaaacaat

SEQ ID NO: 56208 - DNA, 19 bp, Homo sapiens
  siRNA target sequence for COPS5 (NM_006837.2,975-993).
gtgtacactgcaaacaata

SEQ ID NO: 56209 - DNA, 19 bp, Homo sapiens
  siRNA target sequence for COPS5 (NM_006837.2,977-995).
gtacactgcaaacaatatt

SEQ ID NO: 56210 - DNA, 19 bp, Homo sapiens
  siRNA target sequence for COPS5 (NM_006837.2,998-1016).
gccttagaagtctcatatt

SEQ ID NO: 56211 - DNA, 19 bp, Homo sapiens
  siRNA target sequence for COPS5 (NM_006837.2,999-1017).
ccttagaagtctcatattt

SEQ ID NO: 56212 - DNA, 19 bp, Homo sapiens
  siRNA target sequence for COPS5 (NM_006837.2,1046-1064).
gagctgttgtggaataaat

SEQ ID NO: 56213 - DNA, 19 bp, Homo sapiens
  siRNA target sequence for COPS5 (NM_006837.2,1070-1088).
gtgaatacgttgagttctt

SEQ ID NO: 56214 - DNA, 19 bp, Homo sapiens
  siRNA target sequence for COPS5 (NM_006837.2,1072-1090).
gaatacgttgagttcttct

SEQ ID NO: 56215 - DNA, 19 bp, Homo sapiens
  siRNA target sequence for COPS5 (NM_006837.2,1086-1104).
cttctagcttgcttactaa

SEQ ID NO: 56216 - DNA, 19 bp, Homo sapiens
  siRNA target sequence for COPS5 (NM_006837.2,1116-1134).
ccactggtcaggtctttga

SEQ ID NO: 56217 - DNA, 19 bp, Homo sapiens
  siRNA target sequence for COPS5 (NM_006837.2,1117-1135).
cactggtcaggtctttgat

SEQ ID NO: 56218 - DNA, 19 bp, Homo sapiens
  siRNA target sequence for COPS5 (NM_006837.2,1169-1187).
ctgggacgagggagtttca

SEQ ID NO: 56219 - DNA, 19 bp, Homo sapiens
  siRNA target sequence for COPS5 (NM_006837.2,1173-1191).
gacgagggagtttcatgtt

SEQ ID NO: 56220 - DNA, 19 bp, Homo sapiens
  siRNA target sequence for COPS5 (NM_006837.2,1203-1221).
cgcatgaccgaaaatcaga

SEQ ID NO: 56221 - DNA, 19 bp, Homo sapiens
  siRNA target sequence for COPS5 (NM_006837.2,1249-1267).
cagctgtaaaactaccata

SEQ ID NO: 56222 - DNA, 19 bp, Homo sapiens
  siRNA target sequence for COPS5 (NM_006837.2,1281-1299).
gattgatgtctcaggttat

SEQ ID NO: 56223 - DNA, 19 bp, Homo sapiens
  siRNA target sequence for COPS5 (NM_006837.2,1290-1308).
ctcaggttattaaggataa

SEQ ID NO: 56224 - DNA, 19 bp, Homo sapiens
  siRNA target sequence for COPS5 (NM_006837.2,1304-1322).
gataaactgtttaatcaaa

SEQ ID NO: 56225 - DNA, 19 bp, Homo sapiens
  siRNA target sequence for COPS6 (NM_006833.4,161-179).
catccccttgtcattctca

SEQ ID NO: 56226 - DNA, 19 bp, Homo sapiens
  siRNA target sequence for COPS6 (NM_006833.4,167-185).
cttgtcattctcaacatct

SEQ ID NO: 56227 - DNA, 19 bp, Homo sapiens
  siRNA target sequence for COPS6 (NM_006833.4,232-250).
ggtgattggggctctgatt

SEQ ID NO: 56228 - DNA, 19 bp, Homo sapiens
  siRNA target sequence for COPS6 (NM_006833.4,303-321).
cccacaccgtggaagagaa

SEQ ID NO: 56229 - DNA, 19 bp, Homo sapiens
  siRNA target sequence for COPS6 (NM_006833.4,309-327).
ccgtggaagagaagattat

SEQ ID NO: 56230 - DNA, 19 bp, Homo sapiens
  siRNA target sequence for COPS6 (NM_006833.4,388-406).
ggagtttctgggttggtat

SEQ ID NO: 56231 - DNA, 19 bp, Homo sapiens
  siRNA target sequence for COPS6 (NM_006833.4,389-407).
gagtttctgggttggtata

SEQ ID NO: 56232 - DNA, 19 bp, Homo sapiens
  siRNA target sequence for COPS6 (NM_006833.4,634-652).
ccacgtagcccgaatgaca

SEQ ID NO: 56233 - DNA, 19 bp, Homo sapiens
  siRNA target sequence for COPS6 (NM_006833.4,771-789).
cgggagaggtcccctttaa

SEQ ID NO: 56234 - DNA, 19 bp, Homo sapiens
  siRNA target sequence for COPS6 (NM_006833.4,772-790).
gggagaggtcccctttaat

SEQ ID NO: 56235 - DNA, 19 bp, Homo sapiens
  siRNA target sequence for COPS6 (NM_006833.4,774-792).
gagaggtcccctttaatca

SEQ ID NO: 56236 - DNA, 19 bp, Homo sapiens
  siRNA target sequence for COPS6 (NM_006833.4,908-926).
ggcaccatcaccaaaacgt

SEQ ID NO: 56237 - DNA, 19 bp, Homo sapiens
  siRNA target sequence for DENR (NM_003677.2,163-181).
ggaacagtgccaagttaga

SEQ ID NO: 56238 - DNA, 19 bp, Homo sapiens
  siRNA target sequence for DENR (NM_003677.2,164-182).
gaacagtgccaagttagat

SEQ ID NO: 56239 - DNA, 19 bp, Homo sapiens
  siRNA target sequence for DENR (NM_003677.2,191-209).
cccacttcgagtcctttat

SEQ ID NO: 56240 - DNA, 19 bp, Homo sapiens
  siRNA target sequence for DENR (NM_003677.2,228-246).
ccaacagagtactgtgaat

SEQ ID NO: 56241 - DNA, 19 bp, Homo sapiens
  siRNA target sequence for DENR (NM_003677.2,229-247).
caacagagtactgtgaata

SEQ ID NO: 56242 - DNA, 19 bp, Homo sapiens
  siRNA target sequence for DENR (NM_003677.2,278-296).
gttagagaagaattttcca

SEQ ID NO: 56243 - DNA, 19 bp, Homo sapiens
  siRNA target sequence for DENR (NM_003677.2,405-423).
ggtggaaggggtcaaataa

SEQ ID NO: 56244 - DNA, 19 bp, Homo sapiens
  siRNA target sequence for DENR (NM_003677.2,437-455).
gaccgtaccacaaaaggtt

SEQ ID NO: 56245 - DNA, 19 bp, Homo sapiens
  siRNA target sequence for DENR (NM_003677.2,441-459).
gtaccacaaaaggttacta

SEQ ID NO: 56246 - DNA, 19 bp, Homo sapiens
  siRNA target sequence for DENR (NM_003677.2,452-470).
ggttactatagccaaaatt

SEQ ID NO: 56247 - DNA, 19 bp, Homo sapiens
  siRNA target sequence for DENR (NM_003677.2,569-587).
ctgtggtgcctcagtaaca

SEQ ID NO: 56248 - DNA, 19 bp, Homo sapiens
  siRNA target sequence for DENR (NM_003677.2,680-698).
cgaagatcttggagaagta

SEQ ID NO: 56249 - DNA, 19 bp, Homo sapiens
  siRNA target sequence for DENR (NM_003677.2,687-705).
cttggagaagtaaagaagt

SEQ ID NO: 56250 - DNA, 19 bp, Homo sapiens
  siRNA target sequence for EIF1AY (NM_004681.2,323-341).
gccatatcagagggaaatt

SEQ ID NO: 56251 - DNA, 19 bp, Homo sapiens
  siRNA target sequence for eIF2A (NM_032025.1,45-63).
cacccgagcggtttctctt

SEQ ID NO: 56252 - DNA, 19 bp, Homo sapiens
  siRNA target sequence for eIF2A (NM_032025.1,98-116).
gacagtccgaggatcagaa

SEQ ID NO: 56253 - DNA, 19 bp, Homo sapiens
  siRNA target sequence for eIF2A (NM_032025.1,109-127).
gatcagaaggactgtacat

SEQ ID NO: 56254 - DNA, 19 bp, Homo sapiens
  siRNA target sequence for eIF2A (NM_032025.1,131-149).
gaatggaccaccacatttt

SEQ ID NO: 56255 - DNA, 19 bp, Homo sapiens
  siRNA target sequence for eIF2A (NM_032025.1,318-336).
gaattctcacccaaaaata

SEQ ID NO: 56256 - DNA, 19 bp, Homo sapiens
  siRNA target sequence for eIF2A (NM_032025.1,394-412).
ccaacctacaactttatga

SEQ ID NO: 56257 - DNA, 19 bp, Homo sapiens
  siRNA target sequence for eIF2A (NM_032025.1,495-513).
ctttgtgcccgcaatgtta

SEQ ID NO: 56258 - DNA, 19 bp, Homo sapiens
  siRNA target sequence for eIF2A (NM_032025.1,499-517).
gtgcccgcaatgttaacaa

SEQ ID NO: 56259 - DNA, 19 bp, Homo sapiens
  siRNA target sequence for eIF2A (NM_032025.1,502-520).
cccgcaatgttaacaatga

SEQ ID NO: 56260 - DNA, 19 bp, Homo sapiens
  siRNA target sequence for eIF2A (NM_032025.1,515-533).
caatgaagttcacttcttt

SEQ ID NO: 56261 - DNA, 19 bp, Homo sapiens
  siRNA target sequence for eIF2A (NM_032025.1,601-619).
cacctggaccccaaccata

SEQ ID NO: 56262 - DNA, 19 bp, Homo sapiens
  siRNA target sequence for eIF2A (NM_032025.1,632-650).
ctatgttccaggaagtaaa

SEQ ID NO: 56263 - DNA, 19 bp, Homo sapiens
  siRNA target sequence for eIF2A (NM_032025.1,654-672).
gcaccttcatttgttagat

SEQ ID NO: 56264 - DNA, 19 bp, Homo sapiens
  siRNA target sequence for eIF2A (NM_032025.1,655-673).
caccttcatttgttagatt

SEQ ID NO: 56265 - DNA, 19 bp, Homo sapiens
  siRNA target sequence for eIF2A (NM_032025.1,657-675).
ccttcatttgttagattat

SEQ ID NO: 56266 - DNA, 19 bp, Homo sapiens
  siRNA target sequence for eIF2A (NM_032025.1,699-717).
cctcatgcagctttagcta

SEQ ID NO: 56267 - DNA, 19 bp, Homo sapiens
  siRNA target sequence for eIF2A (NM_032025.1,700-718).
ctcatgcagctttagctaa

SEQ ID NO: 56268 - DNA, 19 bp, Homo sapiens
  siRNA target sequence for eIF2A (NM_032025.1,702-720).
catgcagctttagctaata

SEQ ID NO: 56269 - DNA, 19 bp, Homo sapiens
  siRNA target sequence for eIF2A (NM_032025.1,774-792).
gctgtgttggtaatagcta

SEQ ID NO: 56270 - DNA, 19 bp, Homo sapiens
  siRNA target sequence for eIF2A (NM_032025.1,809-827).
gacaggagcttcctactat

SEQ ID NO: 56271 - DNA, 19 bp, Homo sapiens
  siRNA target sequence for eIF2A (NM_032025.1,821-839).
ctactatggagaacaaact

SEQ ID NO: 56272 - DNA, 19 bp, Homo sapiens
  siRNA target sequence for eIF2A (NM_032025.1,870-888).
gctgtagtgcaattaccaa

SEQ ID NO: 56273 - DNA, 19 bp, Homo sapiens
  siRNA target sequence for eIF2A (NM_032025.1,873-891).
gtagtgcaattaccaaaaa

SEQ ID NO: 56274 - DNA, 19 bp, Homo sapiens
  siRNA target sequence for eIF2A (NM_032025.1,886-904).
caaaaaatggccccattta

SEQ ID NO: 56275 - DNA, 19 bp, Homo sapiens
  siRNA target sequence for eIF2A (NM_032025.1,895-913).
gccccatttatgatgtagt

SEQ ID NO: 56276 - DNA, 19 bp, Homo sapiens
  siRNA target sequence for eIF2A (NM_032025.1,896-914).
ccccatttatgatgtagtt

SEQ ID NO: 56277 - DNA, 19 bp, Homo sapiens
  siRNA target sequence for eIF2A (NM_032025.1,969-987).
gcgacaattttcaacttga

SEQ ID NO: 56278 - DNA, 19 bp, Homo sapiens
  siRNA target sequence for eIF2A (NM_032025.1,970-988).
cgacaattttcaacttgaa

SEQ ID NO: 56279 - DNA, 19 bp, Homo sapiens
  siRNA target sequence for eIF2A (NM_032025.1,1023-1041).
cgtaatgcagcctactata

SEQ ID NO: 56280 - DNA, 19 bp, Homo sapiens
  siRNA target sequence for eIF2A (NM_032025.1,1042-1060).
gccctcatggacatatatt

SEQ ID NO: 56281 - DNA, 19 bp, Homo sapiens
  siRNA target sequence for eIF2A (NM_032025.1,1043-1061).
ccctcatggacatatatta

SEQ ID NO: 56282 - DNA, 19 bp, Homo sapiens
  siRNA target sequence for eIF2A (NM_032025.1,1078-1096).
gaaatctgaggggacaaat

SEQ ID NO: 56283 - DNA, 19 bp, Homo sapiens
  siRNA target sequence for eIF2A (NM_032025.1,1137-1155).
ccggtggcttctgattcta

SEQ ID NO: 56284 - DNA, 19 bp, Homo sapiens
  siRNA target sequence for eIF2A (NM_032025.1,1171-1189).
gcccggatggtgagcatat

SEQ ID NO: 56285 - DNA, 19 bp, Homo sapiens
  siRNA target sequence for eIF2A (NM_032025.1,1172-1190).
cccggatggtgagcatatt

SEQ ID NO: 56286 - DNA, 19 bp, Homo sapiens
  siRNA target sequence for eIF2A (NM_032025.1,1173-1191).
ccggatggtgagcatattt

SEQ ID NO: 56287 - DNA, 19 bp, Homo sapiens
  siRNA target sequence for eIF2A (NM_032025.1,1174-1192).
cggatggtgagcatatttt

SEQ ID NO: 56288 - DNA, 19 bp, Homo sapiens
  siRNA target sequence for eIF2A (NM_032025.1,1214-1232).
gttacgggttaataatgga

SEQ ID NO: 56289 - DNA, 19 bp, Homo sapiens
  siRNA target sequence for eIF2A (NM_032025.1,1256-1274).
ctctatcttgcacaagtat

SEQ ID NO: 56290 - DNA, 19 bp, Homo sapiens
  siRNA target sequence for eIF2A (NM_032025.1,1271-1289).
gtatgatgtgccatcaaat

SEQ ID NO: 56291 - DNA, 19 bp, Homo sapiens
  siRNA target sequence for eIF2A (NM_032025.1,1382-1400).
caatgaggaacctaaagtt

SEQ ID NO: 56292 - DNA, 19 bp, Homo sapiens
  siRNA target sequence for eIF2A (NM_032025.1,1422-1440).
gctttaagaaataaaccaa

SEQ ID NO: 56293 - DNA, 19 bp, Homo sapiens
  siRNA target sequence for eIF2A (NM_032025.1,1464-1482).
gaggaaccacctcagaata

SEQ ID NO: 56294 - DNA, 19 bp, Homo sapiens
  siRNA target sequence for eIF2A (NM_032025.1,1488-1506).
ccacaatcaggaaacgata

SEQ ID NO: 56295 - DNA, 19 bp, Homo sapiens
  siRNA target sequence for eIF2A (NM_032025.1,1497-1515).
ggaaacgataagccattat

SEQ ID NO: 56296 - DNA, 19 bp, Homo sapiens
  siRNA target sequence for eIF2A (NM_032025.1,1502-1520).
cgataagccattatcaaaa

SEQ ID NO: 56297 - DNA, 19 bp, Homo sapiens
  siRNA target sequence for eIF2A (NM_032025.1,1662-1680).
gaccctgagatagacaaaa

SEQ ID NO: 56298 - DNA, 19 bp, Homo sapiens
  siRNA target sequence for eIF2A (NM_032025.1,1700-1718).
gaaactgaaagcaatcgaa

SEQ ID NO: 56299 - DNA, 19 bp, Homo sapiens
  siRNA target sequence for eIF2A (NM_032025.1,1711-1729).
caatcgaacaactgaaaga

SEQ ID NO: 56300 - DNA, 19 bp, Homo sapiens
  siRNA target sequence for EIF2B1 (NM_001414.1,16-34).
cgacaaggagttaattgaa

SEQ ID NO: 56301 - DNA, 19 bp, Homo sapiens
  siRNA target sequence for EIF2B1 (NM_001414.1,22-40).
ggagttaattgaatacttt

SEQ ID NO: 56302 - DNA, 19 bp, Homo sapiens
  siRNA target sequence for EIF2B1 (NM_001414.1,93-111).
ggacgttgctggagttctt

SEQ ID NO: 56303 - DNA, 19 bp, Homo sapiens
  siRNA target sequence for EIF2B1 (NM_001414.1,251-269).
ctggaatactccgattact

SEQ ID NO: 56304 - DNA, 19 bp, Homo sapiens
  siRNA target sequence for EIF2B1 (NM_001414.1,259-277).
ctccgattactccaaatgt

SEQ ID NO: 56305 - DNA, 19 bp, Homo sapiens
  siRNA target sequence for EIF2B1 (NM_001414.1,261-279).
ccgattactccaaatgtaa

SEQ ID NO: 56306 - DNA, 19 bp, Homo sapiens
  siRNA target sequence for EIF2B1 (NM_001414.1,276-294).
gtaaaaagatcatgattga

SEQ ID NO: 56307 - DNA, 19 bp, Homo sapiens
  siRNA target sequence for EIF2B1 (NM_001414.1,344-362).
gcagatctgtgccatactt

SEQ ID NO: 56308 - DNA, 19 bp, Homo sapiens
  siRNA target sequence for EIF2B1 (NM_001414.1,347-365).
gatctgtgccatactttca

SEQ ID NO: 56309 - DNA, 19 bp, Homo sapiens
  siRNA target sequence for EIF2B1 (NM_001414.1,355-373).
ccatactttcatcaaagat

SEQ ID NO: 56310 - DNA, 19 bp, Homo sapiens
  siRNA target sequence for EIF2B1 (NM_001414.1,371-389).
gatggagcgacaatattga

SEQ ID NO: 56311 - DNA, 19 bp, Homo sapiens
  siRNA target sequence for EIF2B1 (NM_001414.1,439-457).
ggccaagaagcgatttagt

SEQ ID NO: 56312 - DNA, 19 bp, Homo sapiens
  siRNA target sequence for EIF2B1 (NM_001414.1,442-460).
caagaagcgatttagtgta

SEQ ID NO: 56313 - DNA, 19 bp, Homo sapiens
  siRNA target sequence for EIF2B1 (NM_001414.1,470-488).
gagtcacagcctgatttgt

SEQ ID NO: 56314 - DNA, 19 bp, Homo sapiens
  siRNA target sequence for EIF2B1 (NM_001414.1,611-629).
gttgaaaacggaggaatta

SEQ ID NO: 56315 - DNA, 19 bp, Homo sapiens
  siRNA target sequence for EIF2B1 (NM_001414.1,692-710).
gtggttgcagaaagtttca

SEQ ID NO: 56316 - DNA, 19 bp, Homo sapiens
  siRNA target sequence for EIF2B1 (NM_001414.1,720-738).
ggctctttccactaaacca

SEQ ID NO: 56317 - DNA, 19 bp, Homo sapiens
  siRNA target sequence for EIF2B1 (NM_001414.1,740-758).
caagacgtcccagataagt

SEQ ID NO: 56318 - DNA, 19 bp, Homo sapiens
  siRNA target sequence for EIF2B1 (NM_001414.1,743-761).
gacgtcccagataagttta

SEQ ID NO: 56319 - DNA, 19 bp, Homo sapiens
  siRNA target sequence for EIF2B1 (NM_001414.1,746-764).
gtcccagataagtttaagt

SEQ ID NO: 56320 - DNA, 19 bp, Homo sapiens
  siRNA target sequence for EIF2B1 (NM_001414.1,832-850).
ctacactgccccttcctta

SEQ ID NO: 56321 - DNA, 19 bp, Homo sapiens
  siRNA target sequence for EIF2B2 (NM_014239.1,165-183).
ggttgctgcgccagatcat

SEQ ID NO: 56322 - DNA, 19 bp, Homo sapiens
  siRNA target sequence for EIF2B2 (NM_014239.1,371-389).
ctgcacaaactgttgacat

SEQ ID NO: 56323 - DNA, 19 bp, Homo sapiens
  siRNA target sequence for EIF2B2 (NM_014239.1,395-413).
ggcctaaacgaggatttca

SEQ ID NO: 56324 - DNA, 19 bp, Homo sapiens
  siRNA target sequence for EIF2B2 (NM_014239.1,587-605).
gctgcccgaaagaggaaat

SEQ ID NO: 56325 - DNA, 19 bp, Homo sapiens
  siRNA target sequence for EIF2B2 (NM_014239.1,588-606).
ctgcccgaaagaggaaatt

SEQ ID NO: 56326 - DNA, 19 bp, Homo sapiens
  siRNA target sequence for EIF2B2 (NM_014239.1,592-610).
ccgaaagaggaaattccat

SEQ ID NO: 56327 - DNA, 19 bp, Homo sapiens
  siRNA target sequence for EIF2B2 (NM_014239.1,600-618).
ggaaattccatgtcattgt

SEQ ID NO: 56328 - DNA, 19 bp, Homo sapiens
  siRNA target sequence for EIF2B2 (NM_014239.1,647-665).
catgaaatggctgtgaatt

SEQ ID NO: 56329 - DNA, 19 bp, Homo sapiens
  siRNA target sequence for EIF2B2 (NM_014239.1,707-725).
gccatttttgccgttatgt

SEQ ID NO: 56330 - DNA, 19 bp, Homo sapiens
  siRNA target sequence for EIF2B2 (NM_014239.1,847-865).
ctgtgcacctatgttcaaa

SEQ ID NO: 56331 - DNA, 19 bp, Homo sapiens
  siRNA target sequence for EIF2B2 (NM_014239.1,849-867).
gtgcacctatgttcaaact

SEQ ID NO: 56332 - DNA, 19 bp, Homo sapiens
  siRNA target sequence for EIF2B2 (NM_014239.1,1004-1022).
ctcattaccctctttatct

SEQ ID NO: 56333 - DNA, 19 bp, Homo sapiens
  siRNA target sequence for EIF2B2 (NM_014239.1,1059-1077).
gcctgatgagtgaactcta

SEQ ID NO: 56334 - DNA, 19 bp, Homo sapiens
  siRNA target sequence for EIF2B2 (NM_014239.1,1075-1093).
ctaccatcctgatgatcat

SEQ ID NO: 56335 - DNA, 19 bp, Homo sapiens
  siRNA target sequence for EIF2B3 (NM_020365.1,145-163).
cggatgacagacctaactt

SEQ ID NO: 56336 - DNA, 19 bp, Homo sapiens
  siRNA target sequence for EIF2B3 (NM_020365.1,193-211).
gggaacaaacctttaattt

SEQ ID NO: 56337 - DNA, 19 bp, Homo sapiens
  siRNA target sequence for EIF2B3 (NM_020365.1,228-246).
gcttgagcgtgttggattt

SEQ ID NO: 56338 - DNA, 19 bp, Homo sapiens
  siRNA target sequence for EIF2B3 (NM_020365.1,250-268).
gaagtcattgtggttacaa

SEQ ID NO: 56339 - DNA, 19 bp, Homo sapiens
  siRNA target sequence for EIF2B3 (NM_020365.1,266-284).
caaccagggatgttcaaaa

SEQ ID NO: 56340 - DNA, 19 bp, Homo sapiens
  siRNA target sequence for EIF2B3 (NM_020365.1,286-304).
gctctatgtgcagaattca

SEQ ID NO: 56341 - DNA, 19 bp, Homo sapiens
  siRNA target sequence for EIF2B3 (NM_020365.1,364-382).
gattctttgcgctacatat

SEQ ID NO: 56342 - DNA, 19 bp, Homo sapiens
  siRNA target sequence for EIF2B3 (NM_020365.1,372-390).
gcgctacatatatccaaaa

SEQ ID NO: 56343 - DNA, 19 bp, Homo sapiens
  siRNA target sequence for EIF2B3 (NM_020365.1,411-429).
gctgagctgtgatctgata

SEQ ID NO: 56344 - DNA, 19 bp, Homo sapiens
  siRNA target sequence for EIF2B3 (NM_020365.1,414-432).
gagctgtgatctgataaca

SEQ ID NO: 56345 - DNA, 19 bp, Homo sapiens
  siRNA target sequence for EIF2B3 (NM_020365.1,431-449).
cagacgttgccttacatga

SEQ ID NO: 56346 - DNA, 19 bp, Homo sapiens
  siRNA target sequence for EIF2B3 (NM_020365.1,459-477).
cctgtttagagcttatgat

SEQ ID NO: 56347 - DNA, 19 bp, Homo sapiens
  siRNA target sequence for EIF2B3 (NM_020365.1,530-548).
ccggtcaaaaggggaaaaa

SEQ ID NO: 56348 - DNA, 19 bp, Homo sapiens
  siRNA target sequence for EIF2B3 (NM_020365.1,603-621).
gctcttcatggctaatgaa

SEQ ID NO: 56349 - DNA, 19 bp, Homo sapiens
  siRNA target sequence for EIF2B3 (NM_020365.1,666-684).
gaagcatcctagaatacgt

SEQ ID NO: 56350 - DNA, 19 bp, Homo sapiens
  siRNA target sequence for EIF2B3 (NM_020365.1,775-793).
cggagtgaactgattccat

SEQ ID NO: 56351 - DNA, 19 bp, Homo sapiens
  siRNA target sequence for EIF2B3 (NM_020365.1,777-795).
gagtgaactgattccatat

SEQ ID NO: 56352 - DNA, 19 bp, Homo sapiens
  siRNA target sequence for EIF2B3 (NM_020365.1,825-843).
ctcacaacagggacaagaa

SEQ ID NO: 56353 - DNA, 19 bp, Homo sapiens
  siRNA target sequence for EIF2B3 (NM_020365.1,870-888).
ggagctgaagtccttagat

SEQ ID NO: 56354 - DNA, 19 bp, Homo sapiens
  siRNA target sequence for EIF2B3 (NM_020365.1,921-939).
gaacctggctccctatgat

SEQ ID NO: 56355 - DNA, 19 bp, Homo sapiens
  siRNA target sequence for EIF2B3 (NM_020365.1,1043-1061).
gcacactgggactctacat

SEQ ID NO: 56356 - DNA, 19 bp, Homo sapiens
  siRNA target sequence for EIF2B3 (NM_020365.1,1056-1074).
ctacatggaagcaaacaga

SEQ ID NO: 56357 - DNA, 19 bp, Homo sapiens
  siRNA target sequence for EIF2B3 (NM_020365.1,1073-1091).
gacaggtgcccaaattgct

SEQ ID NO: 56358 - DNA, 19 bp, Homo sapiens
  siRNA target sequence for EIF2B3 (NM_020365.1,1209-1227).
cattaagcgctcagtcatt

SEQ ID NO: 56359 - DNA, 19 bp, Homo sapiens
  siRNA target sequence for EIF2B3 (NM_020365.1,1404-1422).
caaagctaaacgagtgaat

SEQ ID NO: 56360 - DNA, 19 bp, Homo sapiens
  siRNA target sequence for EIF2B4 (NM_015636.2,196-214).
gactggctctgctgtatct

SEQ ID NO: 56361 - DNA, 19 bp, Homo sapiens
  siRNA target sequence for EIF2B4 (NM_015636.2,249-267).
cagaatcgggcattcagtt

SEQ ID NO: 56362 - DNA, 19 bp, Homo sapiens
  siRNA target sequence for EIF2B4 (NM_015636.2,270-288).
gcactcctcgggagaaagt

SEQ ID NO: 56363 - DNA, 19 bp, Homo sapiens
  siRNA target sequence for EIF2B4 (NM_015636.2,476-494).
cttctgagaaggcttgtta

SEQ ID NO: 56364 - DNA, 19 bp, Homo sapiens
  siRNA target sequence for EIF2B4 (NM_015636.2,514-532).
ggttcctacacgaaaggat

SEQ ID NO: 56365 - DNA, 19 bp, Homo sapiens
  siRNA target sequence for EIF2B4 (NM_015636.2,515-533).
gttcctacacgaaaggatt

SEQ ID NO: 56366 - DNA, 19 bp, Homo sapiens
  siRNA target sequence for EIF2B4 (NM_015636.2,530-548).
gattatggatccaaagtca

SEQ ID NO: 56367 - DNA, 19 bp, Homo sapiens
  siRNA target sequence for EIF2B4 (NM_015636.2,566-584).
ccccagtacagcagacaaa

SEQ ID NO: 56368 - DNA, 19 bp, Homo sapiens
  siRNA target sequence for EIF2B4 (NM_015636.2,567-585).
cccagtacagcagacaaaa

SEQ ID NO: 56369 - DNA, 19 bp, Homo sapiens
  siRNA target sequence for EIF2B4 (NM_015636.2,569-587).
cagtacagcagacaaaact

SEQ ID NO: 56370 - DNA, 19 bp, Homo sapiens
  siRNA target sequence for EIF2B4 (NM_015636.2,571-589).
gtacagcagacaaaactct

SEQ ID NO: 56371 - DNA, 19 bp, Homo sapiens
  siRNA target sequence for EIF2B4 (NM_015636.2,736-754).
cacaacaccgcctaatgaa

SEQ ID NO: 56372 - DNA, 19 bp, Homo sapiens
  siRNA target sequence for EIF2B4 (NM_015636.2,738-756).
caacaccgcctaatgaaga

SEQ ID NO: 56373 - DNA, 19 bp, Homo sapiens
  siRNA target sequence for EIF2B4 (NM_015636.2,741-759).
caccgcctaatgaagaact

SEQ ID NO: 56374 - DNA, 19 bp, Homo sapiens
  siRNA target sequence for EIF2B4 (NM_015636.2,765-783).
gggatctagtgaataaact

SEQ ID NO: 56375 - DNA, 19 bp, Homo sapiens
  siRNA target sequence for EIF2B4 (NM_015636.2,969-987).
caatttcacgctttgctta

SEQ ID NO: 56376 - DNA, 19 bp, Homo sapiens
  siRNA target sequence for EIF2B4 (NM_015636.2,984-1002).
cttaccagaagatcagtaa

SEQ ID NO: 56377 - DNA, 19 bp, Homo sapiens
  siRNA target sequence for EIF2B4 (NM_015636.2,1035-1053).
ctctggtatcacgaattct

SEQ ID NO: 56378 - DNA, 19 bp, Homo sapiens
  siRNA target sequence for EIF2B4 (NM_015636.2,1267-1285).
ggtagggacagcacagtta

SEQ ID NO: 56379 - DNA, 19 bp, Homo sapiens
  siRNA target sequence for EIF2B4 (NM_015636.2,1294-1312).
ggctcgagcccataatgta

SEQ ID NO: 56380 - DNA, 19 bp, Homo sapiens
  siRNA target sequence for EIF2B4 (NM_015636.2,1326-1344).
gctgtgaaacatacaagtt

SEQ ID NO: 56381 - DNA, 19 bp, Homo sapiens
  siRNA target sequence for EIF2B4 (NM_015636.2,1362-1380).
ctgatgcctttgtctctaa

SEQ ID NO: 56382 - DNA, 19 bp, Homo sapiens
  siRNA target sequence for EIF2B4 (NM_015636.2,1410-1428).
gtaagcggggagaacatgt

SEQ ID NO: 56383 - DNA, 19 bp, Homo sapiens
  siRNA target sequence for EIF2B4 (NM_015636.2,1454-1472).
gcatccctacggttgttga

SEQ ID NO: 56384 - DNA, 19 bp, Homo sapiens
  siRNA target sequence for EIF2B4 (NM_015636.2,1455-1473).
catccctacggttgttgaa

SEQ ID NO: 56385 - DNA, 19 bp, Homo sapiens
  siRNA target sequence for EIF2B4 (NM_015636.2,1458-1476).
ccctacggttgttgaatct

SEQ ID NO: 56386 - DNA, 19 bp, Homo sapiens
  siRNA target sequence for EIF2B4 (NM_015636.2,1459-1477).
cctacggttgttgaatcta

SEQ ID NO: 56387 - DNA, 19 bp, Homo sapiens
  siRNA target sequence for EIF2B4 (NM_015636.2,1465-1483).
gttgttgaatctagtctat

SEQ ID NO: 56388 - DNA, 19 bp, Homo sapiens
  siRNA target sequence for EIF2B4 (NM_015636.2,1534-1552).
gatcccttgcagttctgta

SEQ ID NO: 56389 - DNA, 19 bp, Homo sapiens
  siRNA target sequence for EIF2B4 (NM_015636.2,1543-1561).
cagttctgtacctgttgtt

SEQ ID NO: 56390 - DNA, 19 bp, Homo sapiens
  siRNA target sequence for EIF2B5 (NM_003907.1,260-278).
ggccaatgtggcattaatt

SEQ ID NO: 56391 - DNA, 19 bp, Homo sapiens
  siRNA target sequence for EIF2B5 (NM_003907.1,340-358).
ggaaagctgctcaaatcaa

SEQ ID NO: 56392 - DNA, 19 bp, Homo sapiens
  siRNA target sequence for EIF2B5 (NM_003907.1,388-406).
gccctacatctctcaatgt

SEQ ID NO: 56393 - DNA, 19 bp, Homo sapiens
  siRNA target sequence for EIF2B5 (NM_003907.1,397-415).
ctctcaatgtggttcgaat

SEQ ID NO: 56394 - DNA, 19 bp, Homo sapiens
  siRNA target sequence for EIF2B5 (NM_003907.1,399-417).
ctcaatgtggttcgaataa

SEQ ID NO: 56395 - DNA, 19 bp, Homo sapiens
  siRNA target sequence for EIF2B5 (NM_003907.1,401-419).
caatgtggttcgaataatt

SEQ ID NO: 56396 - DNA, 19 bp, Homo sapiens
  siRNA target sequence for EIF2B5 (NM_003907.1,405-423).
gtggttcgaataattacat

SEQ ID NO: 56397 - DNA, 19 bp, Homo sapiens
  siRNA target sequence for EIF2B5 (NM_003907.1,407-425).
ggttcgaataattacatca

SEQ ID NO: 56398 - DNA, 19 bp, Homo sapiens
  siRNA target sequence for EIF2B5 (NM_003907.1,479-497).
ggtgcgctctgactttctt

SEQ ID NO: 56399 - DNA, 19 bp, Homo sapiens
  siRNA target sequence for EIF2B5 (NM_003907.1,508-526).
gggatgtcatctcaaacat

SEQ ID NO: 56400 - DNA, 19 bp, Homo sapiens
  siRNA target sequence for EIF2B5 (NM_003907.1,588-606).
gtgatgacgatgatcttca

SEQ ID NO: 56401 - DNA, 19 bp, Homo sapiens
  siRNA target sequence for EIF2B5 (NM_003907.1,631-649).
ctcgttgccacgaagacaa

SEQ ID NO: 56402 - DNA, 19 bp, Homo sapiens
  siRNA target sequence for EIF2B5 (NM_003907.1,634-652).
gttgccacgaagacaatgt

SEQ ID NO: 56403 - DNA, 19 bp, Homo sapiens
  siRNA target sequence for EIF2B5 (NM_003907.1,654-672).
gtagtggctgtggatagta

SEQ ID NO: 56404 - DNA, 19 bp, Homo sapiens
  siRNA target sequence for EIF2B5 (NM_003907.1,707-725).
gggtctccggcgttttgca

SEQ ID NO: 56405 - DNA, 19 bp, Homo sapiens
  siRNA target sequence for EIF2B5 (NM_003907.1,708-726).
ggtctccggcgttttgcat

SEQ ID NO: 56406 - DNA, 19 bp, Homo sapiens
  siRNA target sequence for EIF2B5 (NM_003907.1,709-727).
gtctccggcgttttgcatt

SEQ ID NO: 56407 - DNA, 19 bp, Homo sapiens
  siRNA target sequence for EIF2B5 (NM_003907.1,713-731).
ccggcgttttgcatttcct

SEQ ID NO: 56408 - DNA, 19 bp, Homo sapiens
  siRNA target sequence for EIF2B5 (NM_003907.1,760-778).
gagtggaggttcgatatga

SEQ ID NO: 56409 - DNA, 19 bp, Homo sapiens
  siRNA target sequence for EIF2B5 (NM_003907.1,762-780).
gtggaggttcgatatgatt

SEQ ID NO: 56410 - DNA, 19 bp, Homo sapiens
  siRNA target sequence for EIF2B5 (NM_003907.1,764-782).
ggaggttcgatatgattta

SEQ ID NO: 56411 - DNA, 19 bp, Homo sapiens
  siRNA target sequence for EIF2B5 (NM_003907.1,815-833).
ggtggcacaactctttaca

SEQ ID NO: 56412 - DNA, 19 bp, Homo sapiens
  siRNA target sequence for EIF2B5 (NM_003907.1,863-881).
ctttgtgcgaggtctctta

SEQ ID NO: 56413 - DNA, 19 bp, Homo sapiens
  siRNA target sequence for EIF2B5 (NM_003907.1,867-885).
gtgcgaggtctcttagtga

SEQ ID NO: 56414 - DNA, 19 bp, Homo sapiens
  siRNA target sequence for EIF2B5 (NM_003907.1,871-889).
gaggtctcttagtgaatga

SEQ ID NO: 56415 - DNA, 19 bp, Homo sapiens
  siRNA target sequence for EIF2B5 (NM_003907.1,918-936).
cacgtaacagctaaggaat

SEQ ID NO: 56416 - DNA, 19 bp, Homo sapiens
  siRNA target sequence for EIF2B5 (NM_003907.1,920-938).
cgtaacagctaaggaatat

SEQ ID NO: 56417 - DNA, 19 bp, Homo sapiens
  siRNA target sequence for EIF2B5 (NM_003907.1,946-964).
gtgtctccaacctacacat

SEQ ID NO: 56418 - DNA, 19 bp, Homo sapiens
  siRNA target sequence for EIF2B5 (NM_003907.1,1057-1075).
ctcattcccggcacaacat

SEQ ID NO: 56419 - DNA, 19 bp, Homo sapiens
  siRNA target sequence for EIF2B5 (NM_003907.1,1059-1077).
cattcccggcacaacatct

SEQ ID NO: 56420 - DNA, 19 bp, Homo sapiens
  siRNA target sequence for EIF2B5 (NM_003907.1,1136-1154).
gggctctggcactgtcatt

SEQ ID NO: 56421 - DNA, 19 bp, Homo sapiens
  siRNA target sequence for EIF2B5 (NM_003907.1,1151-1169).
cattggcagcaattgcttt

SEQ ID NO: 56422 - DNA, 19 bp, Homo sapiens
  siRNA target sequence for EIF2B5 (NM_003907.1,1195-1213).
gctgccacattggtgataa

SEQ ID NO: 56423 - DNA, 19 bp, Homo sapiens
  siRNA target sequence for EIF2B5 (NM_003907.1,1198-1216).
gccacattggtgataacgt

SEQ ID NO: 56424 - DNA, 19 bp, Homo sapiens
  siRNA target sequence for EIF2B5 (NM_003907.1,1353-1371).
gtggtcgtgggcccaaata

SEQ ID NO: 56425 - DNA, 19 bp, Homo sapiens
  siRNA target sequence for EIF2B5 (NM_003907.1,1356-1374).
gtcgtgggcccaaatatca

SEQ ID NO: 56426 - DNA, 19 bp, Homo sapiens
  siRNA target sequence for EIF2B5 (NM_003907.1,1383-1401).
gagggctcggtgatctctt

SEQ ID NO: 56427 - DNA, 19 bp, Homo sapiens
  siRNA target sequence for EIF2B5 (NM_003907.1,1439-1457).
cgagttcagtgatgattct

SEQ ID NO: 56428 - DNA, 19 bp, Homo sapiens
  siRNA target sequence for EIF2B5 (NM_003907.1,1681-1699).
cccctcagatggatgacat

SEQ ID NO: 56429 - DNA, 19 bp, Homo sapiens
  siRNA target sequence for EIF2B5 (NM_003907.1,1938-1956).
cctgtttttaggaactaca

SEQ ID NO: 56430 - DNA, 19 bp, Homo sapiens
  siRNA target sequence for EIF2B5 (NM_003907.1,1939-1957).
ctgtttttaggaactacat

SEQ ID NO: 56431 - DNA, 19 bp, Homo sapiens
  siRNA target sequence for EIF2B5 (NM_003907.1,1963-1981).
gcgcagccgaccatttgga

SEQ ID NO: 56432 - DNA, 19 bp, Homo sapiens
  siRNA target sequence for EIF2B5 (NM_003907.1,1964-1982).
cgcagccgaccatttggaa

SEQ ID NO: 56433 - DNA, 19 bp, Homo sapiens
  siRNA target sequence for EIF2B5 (NM_003907.1,2015-2033).
gcatgaagctcttggtatt

SEQ ID NO: 56434 - DNA, 19 bp, Homo sapiens
  siRNA target sequence for EIF2B5 (NM_003907.1,2016-2034).
catgaagctcttggtattt

SEQ ID NO: 56435 - DNA, 19 bp, Homo sapiens
  siRNA target sequence for EIF2B5 (NM_003907.1,2098-2116).
gctggttcagccaaagaga

SEQ ID NO: 56436 - DNA, 19 bp, Homo sapiens
  siRNA target sequence for EIF2B5 (NM_003907.1,2099-2117).
ctggttcagccaaagagat

SEQ ID NO: 56437 - DNA, 19 bp, Homo sapiens
  siRNA target sequence for EIF2C1 (NM_012199.2,387-405).
catcaagccggataagtgt

SEQ ID NO: 56438 - DNA, 19 bp, Homo sapiens
  siRNA target sequence for EIF2C1 (NM_012199.2,422-440).
gggaagtggtggaatacat

SEQ ID NO: 56439 - DNA, 19 bp, Homo sapiens
  siRNA target sequence for EIF2C1 (NM_012199.2,574-592).
gggaaggatcgaatcttta

SEQ ID NO: 56440 - DNA, 19 bp, Homo sapiens
  siRNA target sequence for EIF2C1 (NM_012199.2,575-593).
ggaaggatcgaatctttaa

SEQ ID NO: 56441 - DNA, 19 bp, Homo sapiens
  siRNA target sequence for EIF2C1 (NM_012199.2,921-939).
ggacatcaggaacatagat

SEQ ID NO: 56442 - DNA, 19 bp, Homo sapiens
  siRNA target sequence for EIF2C1 (NM_012199.2,1041-1059).
gtaccgcgtgtgtaatgtt

SEQ ID NO: 56443 - DNA, 19 bp, Homo sapiens
  siRNA target sequence for EIF2C1 (NM_012199.2,1070-1088).
ctgctagccatcagacatt

SEQ ID NO: 56444 - DNA, 19 bp, Homo sapiens
  siRNA target sequence for EIF2C1 (NM_012199.2,1143-1161).
caagcagaaatataacctt

SEQ ID NO: 56445 - DNA, 19 bp, Homo sapiens
  siRNA target sequence for EIF2C1 (NM_012199.2,1248-1266).
ggctgggcagcgctgtatt

SEQ ID NO: 56446 - DNA, 19 bp, Homo sapiens
  siRNA target sequence for EIF2C1 (NM_012199.2,1249-1267).
gctgggcagcgctgtatta

SEQ ID NO: 56447 - DNA, 19 bp, Homo sapiens
  siRNA target sequence for EIF2C1 (NM_012199.2,1252-1270).
gggcagcgctgtattaaaa

SEQ ID NO: 56448 - DNA, 19 bp, Homo sapiens
  siRNA target sequence for EIF2C1 (NM_012199.2,1253-1271).
ggcagcgctgtattaaaaa

SEQ ID NO: 56449 - DNA, 19 bp, Homo sapiens
  siRNA target sequence for EIF2C1 (NM_012199.2,1284-1302).
ccagacctcgaccatgata

SEQ ID NO: 56450 - DNA, 19 bp, Homo sapiens
  siRNA target sequence for EIF2C1 (NM_012199.2,1359-1377).
gaatgccagctacaactta

SEQ ID NO: 56451 - DNA, 19 bp, Homo sapiens
  siRNA target sequence for EIF2C1 (NM_012199.2,1389-1407).
ccaggaatttgggatcaaa

SEQ ID NO: 56452 - DNA, 19 bp, Homo sapiens
  siRNA target sequence for EIF2C1 (NM_012199.2,1393-1411).
gaatttgggatcaaagtga

SEQ ID NO: 56453 - DNA, 19 bp, Homo sapiens
  siRNA target sequence for EIF2C1 (NM_012199.2,1540-1558).
gggattgagatcaaagtct

SEQ ID NO: 56454 - DNA, 19 bp, Homo sapiens
  siRNA target sequence for EIF2C1 (NM_012199.2,1569-1587).
ctgcttcgcaccccaaaaa

SEQ ID NO: 56455 - DNA, 19 bp, Homo sapiens
  siRNA target sequence for EIF2C1 (NM_012199.2,1748-1766).
ggctgcagctcattattgt

SEQ ID NO: 56456 - DNA, 19 bp, Homo sapiens
  siRNA target sequence for EIF2C1 (NM_012199.2,1918-1936).
cttggtggcattaacaaca

SEQ ID NO: 56457 - DNA, 19 bp, Homo sapiens
  siRNA target sequence for EIF2C1 (NM_012199.2,1953-1971).
gcgctctgccgtttttcaa

SEQ ID NO: 56458 - DNA, 19 bp, Homo sapiens
  siRNA target sequence for EIF2C1 (NM_012199.2,1955-1973).
gctctgccgtttttcaaca

SEQ ID NO: 56459 - DNA, 19 bp, Homo sapiens
  siRNA target sequence for EIF2C1 (NM_012199.2,2023-2041).
gggaaaaaaccttctatca

SEQ ID NO: 56460 - DNA, 19 bp, Homo sapiens
  siRNA target sequence for EIF2C1 (NM_012199.2,2270-2288).
gtgatgcctgcatcaaact

SEQ ID NO: 56461 - DNA, 19 bp, Homo sapiens
  siRNA target sequence for EIF2C1 (NM_012199.2,2302-2320).
cagcctgggatcacttata

SEQ ID NO: 56462 - DNA, 19 bp, Homo sapiens
  siRNA target sequence for EIF2C1 (NM_012199.2,2338-2356).
catcacacccgccttttct

SEQ ID NO: 56463 - DNA, 19 bp, Homo sapiens
  siRNA target sequence for EIF2C1 (NM_012199.2,2486-2504).
gccgaccatcccattacta

SEQ ID NO: 56464 - DNA, 19 bp, Homo sapiens
  siRNA target sequence for EIF2C1 (NM_012199.2,2487-2505).
ccgaccatcccattactat

SEQ ID NO: 56465 - DNA, 19 bp, Homo sapiens
  siRNA target sequence for EIF2C1 (NM_012199.2,2514-2532).
ggatgacaaccgtttcaca

SEQ ID NO: 56466 - DNA, 19 bp, Homo sapiens
  siRNA target sequence for EIF2C2 (NM_012154.2,161-179).
caggccaatttcttcgaaa

SEQ ID NO: 56467 - DNA, 19 bp, Homo sapiens
  siRNA target sequence for EIF2C2 (NM_012154.2,197-215).
gacatctatcattatgaat

SEQ ID NO: 56468 - DNA, 19 bp, Homo sapiens
  siRNA target sequence for EIF2C2 (NM_012154.2,202-220).
ctatcattatgaattggat

SEQ ID NO: 56469 - DNA, 19 bp, Homo sapiens
  siRNA target sequence for EIF2C2 (NM_012154.2,206-224).
cattatgaattggatatca

SEQ ID NO: 56470 - DNA, 19 bp, Homo sapiens
  siRNA target sequence for EIF2C2 (NM_012154.2,274-292).
ggtccagcactttaaaaca

SEQ ID NO: 56471 - DNA, 19 bp, Homo sapiens
  siRNA target sequence for EIF2C2 (NM_012154.2,323-341).
gacggcaggaagaatctat

SEQ ID NO: 56472 - DNA, 19 bp, Homo sapiens
  siRNA target sequence for EIF2C2 (NM_012154.2,326-344).
ggcaggaagaatctataca

SEQ ID NO: 56473 - DNA, 19 bp, Homo sapiens
  siRNA target sequence for EIF2C2 (NM_012154.2,328-346).
caggaagaatctatacaca

SEQ ID NO: 56474 - DNA, 19 bp, Homo sapiens
  siRNA target sequence for EIF2C2 (NM_012154.2,408-426).
gcaaggatcgcatcttcaa

SEQ ID NO: 56475 - DNA, 19 bp, Homo sapiens
  siRNA target sequence for EIF2C2 (NM_012154.2,466-484).
gttacacgatgcactttca

SEQ ID NO: 56476 - DNA, 19 bp, Homo sapiens
  siRNA target sequence for EIF2C2 (NM_012154.2,699-717).
cagcaacagcgttttacaa

SEQ ID NO: 56477 - DNA, 19 bp, Homo sapiens
  siRNA target sequence for EIF2C2 (NM_012154.2,725-743).
ccagtaatcgagtttgttt

SEQ ID NO: 56478 - DNA, 19 bp, Homo sapiens
  siRNA target sequence for EIF2C2 (NM_012154.2,733-751).
cgagtttgtttgtgaagtt

SEQ ID NO: 56479 - DNA, 19 bp, Homo sapiens
  siRNA target sequence for EIF2C2 (NM_012154.2,779-797).
caaaaacctctgacagatt

SEQ ID NO: 56480 - DNA, 19 bp, Homo sapiens
  siRNA target sequence for EIF2C2 (NM_012154.2,794-812).
gattcccaaagggtaaagt

SEQ ID NO: 56481 - DNA, 19 bp, Homo sapiens
  siRNA target sequence for EIF2C2 (NM_012154.2,830-848).
ggtctaaaggtggagataa

SEQ ID NO: 56482 - DNA, 19 bp, Homo sapiens
  siRNA target sequence for EIF2C2 (NM_012154.2,1075-1093).
cattgtggcaggacaaaga

SEQ ID NO: 56483 - DNA, 19 bp, Homo sapiens
  siRNA target sequence for EIF2C2 (NM_012154.2,1158-1176).
ccgatcggcaagaagagat

SEQ ID NO: 56484 - DNA, 19 bp, Homo sapiens
  siRNA target sequence for EIF2C2 (NM_012154.2,1159-1177).
cgatcggcaagaagagatt

SEQ ID NO: 56485 - DNA, 19 bp, Homo sapiens
  siRNA target sequence for EIF2C2 (NM_012154.2,1163-1181).
cggcaagaagagattagca

SEQ ID NO: 56486 - DNA, 19 bp, Homo sapiens
  siRNA target sequence for EIF2C2 (NM_012154.2,1190-1208).
cgaagtgcaagtttcaaca

SEQ ID NO: 56487 - DNA, 19 bp, Homo sapiens
  siRNA target sequence for EIF2C2 (NM_012154.2,1200-1218).
gtttcaacacagatccata

SEQ ID NO: 56488 - DNA, 19 bp, Homo sapiens
  siRNA target sequence for EIF2C2 (NM_012154.2,1233-1251).
gaatcatggtcaaagatga

SEQ ID NO: 56489 - DNA, 19 bp, Homo sapiens
  siRNA target sequence for EIF2C2 (NM_012154.2,1303-1321).
gggcaggaataaagctatt

SEQ ID NO: 56490 - DNA, 19 bp, Homo sapiens
  siRNA target sequence for EIF2C2 (NM_012154.2,1425-1443).
gcacggaagtccatctgaa

SEQ ID NO: 56491 - DNA, 19 bp, Homo sapiens
  siRNA target sequence for EIF2C2 (NM_012154.2,1939-1957).
gcaccggcaggagatcata

SEQ ID NO: 56492 - DNA, 19 bp, Homo sapiens
  siRNA target sequence for EIF2C2 (NM_012154.2,1942-1960).
ccggcaggagatcatacaa

SEQ ID NO: 56493 - DNA, 19 bp, Homo sapiens
  siRNA target sequence for EIF2C2 (NM_012154.2,1944-1962).
ggcaggagatcatacaaga

SEQ ID NO: 56494 - DNA, 19 bp, Homo sapiens
  siRNA target sequence for EIF2C2 (NM_012154.2,2108-2126).
gcctgtatcaagctagaaa

SEQ ID NO: 56495 - DNA, 19 bp, Homo sapiens
  siRNA target sequence for EIF2C2 (NM_012154.2,2109-2127).
cctgtatcaagctagaaaa

SEQ ID NO: 56496 - DNA, 19 bp, Homo sapiens
  siRNA target sequence for EIF2C2 (NM_012154.2,2110-2128).
ctgtatcaagctagaaaaa

SEQ ID NO: 56497 - DNA, 19 bp, Homo sapiens
  siRNA target sequence for EIF2C2 (NM_012154.2,2203-2221).
cgagcgggttgggaaaagt

SEQ ID NO: 56498 - DNA, 19 bp, Homo sapiens
  siRNA target sequence for EIF2C2 (NM_012154.2,2241-2259).
cgactgtggacacgaaaat

SEQ ID NO: 56499 - DNA, 19 bp, Homo sapiens
  siRNA target sequence for EIF2C2 (NM_012154.2,2268-2286).
ccaccgagttcgacttcta

SEQ ID NO: 56500 - DNA, 19 bp, Homo sapiens
  siRNA target sequence for EIF2C2 (NM_012154.2,2319-2337).
gcaggccttcgcactatca

SEQ ID NO: 56501 - DNA, 19 bp, Homo sapiens
  siRNA target sequence for EIF2C2 (NM_012154.2,2342-2360).
ctctgggacgacaatcgtt

SEQ ID NO: 56502 - DNA, 19 bp, Homo sapiens
  siRNA target sequence for eIF3k (NM_013234.1,463-481).
ccaatccgacagattttgt

SEQ ID NO: 56503 - DNA, 19 bp, Homo sapiens
  siRNA target sequence for eIF3k (NM_013234.1,464-482).
caatccgacagattttgta

SEQ ID NO: 56504 - DNA, 19 bp, Homo sapiens
  siRNA target sequence for EIF3S1 (NM_003758.1,193-211).
gacgaggacgtcaaggata

SEQ ID NO: 56505 - DNA, 19 bp, Homo sapiens
  siRNA target sequence for EIF3S1 (NM_003758.1,444-462).
cctcgaattagcaaaggaa

SEQ ID NO: 56506 - DNA, 19 bp, Homo sapiens
  siRNA target sequence for EIF3S1 (NM_003758.1,780-798).
ggcagattatggtggttat

SEQ ID NO: 56507 - DNA, 19 bp, Homo sapiens
  siRNA target sequence for EIF3S1 (NM_003758.1,803-821).
gaggatatgtacaagacta

SEQ ID NO: 56508 - DNA, 19 bp, Homo sapiens
  siRNA target sequence for EIF3S1 (NM_003758.1,817-835).
gactatgaagacttcatgt

SEQ ID NO: 56509 - DNA, 19 bp, Homo sapiens
  siRNA target sequence for EIF3S10 (NM_003750.1,147-165).
ctcaaacgcgccaacgaat

SEQ ID NO: 56510 - DNA, 19 bp, Homo sapiens
  siRNA target sequence for EIF3S10 (NM_003750.1,149-167).
caaacgcgccaacgaattt

SEQ ID NO: 56511 - DNA, 19 bp, Homo sapiens
  siRNA target sequence for EIF3S10 (NM_003750.1,154-172).
gcgccaacgaatttcttga

SEQ ID NO: 56512 - DNA, 19 bp, Homo sapiens
  siRNA target sequence for EIF3S10 (NM_003750.1,193-211).
ctctggatgttctttatga

SEQ ID NO: 56513 - DNA, 19 bp, Homo sapiens
  siRNA target sequence for EIF3S10 (NM_003750.1,197-215).
ggatgttctttatgatgtt

SEQ ID NO: 56514 - DNA, 19 bp, Homo sapiens
  siRNA target sequence for EIF3S10 (NM_003750.1,201-219).
gttctttatgatgttatga

SEQ ID NO: 56515 - DNA, 19 bp, Homo sapiens
  siRNA target sequence for EIF3S10 (NM_003750.1,322-340).
ggttataccagtataagaa

SEQ ID NO: 56516 - DNA, 19 bp, Homo sapiens
  siRNA target sequence for EIF3S10 (NM_003750.1,348-366).
caacaggtgaacataaaat

SEQ ID NO: 56517 - DNA, 19 bp, Homo sapiens
  siRNA target sequence for EIF3S10 (NM_003750.1,375-393).
gatgttgttagggcatatt

SEQ ID NO: 56518 - DNA, 19 bp, Homo sapiens
  siRNA target sequence for EIF3S10 (NM_003750.1,378-396).
gttgttagggcatatttga

SEQ ID NO: 56519 - DNA, 19 bp, Homo sapiens
  siRNA target sequence for EIF3S10 (NM_003750.1,421-439).
ctgctaaagaagaatctca

SEQ ID NO: 56520 - DNA, 19 bp, Homo sapiens
  siRNA target sequence for EIF3S10 (NM_003750.1,438-456).
cagcagatggtcttagata

SEQ ID NO: 56521 - DNA, 19 bp, Homo sapiens
  siRNA target sequence for EIF3S10 (NM_003750.1,527-545).
ggatcgtactgacagatta

SEQ ID NO: 56522 - DNA, 19 bp, Homo sapiens
  siRNA target sequence for EIF3S10 (NM_003750.1,553-571).
ctccatgggttaaattcct

SEQ ID NO: 56523 - DNA, 19 bp, Homo sapiens
  siRNA target sequence for EIF3S10 (NM_003750.1,624-642).
gagcgcctgtaccatgata

SEQ ID NO: 56524 - DNA, 19 bp, Homo sapiens
  siRNA target sequence for EIF3S10 (NM_003750.1,626-644).
gcgcctgtaccatgatatt

SEQ ID NO: 56525 - DNA, 19 bp, Homo sapiens
  siRNA target sequence for EIF3S10 (NM_003750.1,645-663).
gcccagcaagctttcaaat

SEQ ID NO: 56526 - DNA, 19 bp, Homo sapiens
  siRNA target sequence for EIF3S10 (NM_003750.1,648-666).
cagcaagctttcaaattct

SEQ ID NO: 56527 - DNA, 19 bp, Homo sapiens
  siRNA target sequence for EIF3S10 (NM_003750.1,695-713).
ccgtaaactgtgtgacaat

SEQ ID NO: 56528 - DNA, 19 bp, Homo sapiens
  siRNA target sequence for EIF3S10 (NM_003750.1,696-714).
cgtaaactgtgtgacaatt

SEQ ID NO: 56529 - DNA, 19 bp, Homo sapiens
  siRNA target sequence for EIF3S10 (NM_003750.1,697-715).
gtaaactgtgtgacaattt

SEQ ID NO: 56530 - DNA, 19 bp, Homo sapiens
  siRNA target sequence for EIF3S10 (NM_003750.1,741-759).
cgccaccataaccaaagta

SEQ ID NO: 56531 - DNA, 19 bp, Homo sapiens
  siRNA target sequence for EIF3S10 (NM_003750.1,752-770).
ccaaagtacggcaatcaat

SEQ ID NO: 56532 - DNA, 19 bp, Homo sapiens
  siRNA target sequence for EIF3S10 (NM_003750.1,757-775).
gtacggcaatcaatcttaa

SEQ ID NO: 56533 - DNA, 19 bp, Homo sapiens
  siRNA target sequence for EIF3S10 (NM_003750.1,760-778).
cggcaatcaatcttaataa

SEQ ID NO: 56534 - DNA, 19 bp, Homo sapiens
  siRNA target sequence for EIF3S10 (NM_003750.1,831-849).
gctatcagcatggaattgt

SEQ ID NO: 56535 - DNA, 19 bp, Homo sapiens
  siRNA target sequence for EIF3S10 (NM_003750.1,863-881).
caaagctgtggaagatatt

SEQ ID NO: 56536 - DNA, 19 bp, Homo sapiens
  siRNA target sequence for EIF3S10 (NM_003750.1,876-894).
gatattcacgggctattct

SEQ ID NO: 56537 - DNA, 19 bp, Homo sapiens
  siRNA target sequence for EIF3S10 (NM_003750.1,885-903).
gggctattctccttgtcta

SEQ ID NO: 56538 - DNA, 19 bp, Homo sapiens
  siRNA target sequence for EIF3S10 (NM_003750.1,886-904).
ggctattctccttgtctaa

SEQ ID NO: 56539 - DNA, 19 bp, Homo sapiens
  siRNA target sequence for EIF3S10 (NM_003750.1,887-905).
gctattctccttgtctaaa

SEQ ID NO: 56540 - DNA, 19 bp, Homo sapiens
  siRNA target sequence for EIF3S10 (NM_003750.1,893-911).
ctccttgtctaaaaaacca

SEQ ID NO: 56541 - DNA, 19 bp, Homo sapiens
  siRNA target sequence for EIF3S10 (NM_003750.1,899-917).
gtctaaaaaaccacctaaa

SEQ ID NO: 56542 - DNA, 19 bp, Homo sapiens
  siRNA target sequence for EIF3S10 (NM_003750.1,910-928).
cacctaaacctcagttgat

SEQ ID NO: 56543 - DNA, 19 bp, Homo sapiens
  siRNA target sequence for EIF3S10 (NM_003750.1,918-936).
cctcagttgatggcaaatt

SEQ ID NO: 56544 - DNA, 19 bp, Homo sapiens
  siRNA target sequence for EIF3S10 (NM_003750.1,919-937).
ctcagttgatggcaaatta

SEQ ID NO: 56545 - DNA, 19 bp, Homo sapiens
  siRNA target sequence for EIF3S10 (NM_003750.1,994-1012).
ctacactccatcgtcttta

SEQ ID NO: 56546 - DNA, 19 bp, Homo sapiens
  siRNA target sequence for EIF3S10 (NM_003750.1,1129-1147).
ctcgacttctggatatgga

SEQ ID NO: 56547 - DNA, 19 bp, Homo sapiens
  siRNA target sequence for EIF3S10 (NM_003750.1,1169-1187).
gcgtcgccttgcaacacta

SEQ ID NO: 56548 - DNA, 19 bp, Homo sapiens
  siRNA target sequence for EIF3S10 (NM_003750.1,1208-1226).
gacacgaattggccttatt

SEQ ID NO: 56549 - DNA, 19 bp, Homo sapiens
  siRNA target sequence for EIF3S10 (NM_003750.1,1210-1228).
cacgaattggccttattaa

SEQ ID NO: 56550 - DNA, 19 bp, Homo sapiens
  siRNA target sequence for EIF3S10 (NM_003750.1,1219-1237).
gccttattaatgatatggt

SEQ ID NO: 56551 - DNA, 19 bp, Homo sapiens
  siRNA target sequence for EIF3S10 (NM_003750.1,1235-1253).
ggtcagatttaatgtacta

SEQ ID NO: 56552 - DNA, 19 bp, Homo sapiens
  siRNA target sequence for EIF3S10 (NM_003750.1,1240-1258).
gatttaatgtactacaata

SEQ ID NO: 56553 - DNA, 19 bp, Homo sapiens
  siRNA target sequence for EIF3S10 (NM_003750.1,1332-1350).
gtcacaaaggttctaaatt

SEQ ID NO: 56554 - DNA, 19 bp, Homo sapiens
  siRNA target sequence for EIF3S10 (NM_003750.1,1378-1396).
cggaattgcagcagtatgt

SEQ ID NO: 56555 - DNA, 19 bp, Homo sapiens
  siRNA target sequence for EIF3S10 (NM_003750.1,1434-1452).
cagcaggtgtcacagattt

SEQ ID NO: 56556 - DNA, 19 bp, Homo sapiens
  siRNA target sequence for EIF3S10 (NM_003750.1,1440-1458).
gtgtcacagatttatcaga

SEQ ID NO: 56557 - DNA, 19 bp, Homo sapiens
  siRNA target sequence for EIF3S10 (NM_003750.1,1514-1532).
ggaacgggccatagtagat

SEQ ID NO: 56558 - DNA, 19 bp, Homo sapiens
  siRNA target sequence for EIF3S10 (NM_003750.1,1546-1564).
gcgacttgcaggttcgtat

SEQ ID NO: 56559 - DNA, 19 bp, Homo sapiens
  siRNA target sequence for EIF3S10 (NM_003750.1,1547-1565).
cgacttgcaggttcgtatt

SEQ ID NO: 56560 - DNA, 19 bp, Homo sapiens
  siRNA target sequence for EIF3S10 (NM_003750.1,1578-1596).
cggaccctgagttttggat

SEQ ID NO: 56561 - DNA, 19 bp, Homo sapiens
  siRNA target sequence for EIF3S10 (NM_003750.1,1627-1645).
ctccgattggtcctcattt

SEQ ID NO: 56562 - DNA, 19 bp, Homo sapiens
  siRNA target sequence for EIF3S10 (NM_003750.1,1770-1788).
gctgtcactgcatacctta

SEQ ID NO: 56563 - DNA, 19 bp, Homo sapiens
  siRNA target sequence for EIF3S10 (NM_003750.1,1853-1871).
gcgccttgagagtctgaat

SEQ ID NO: 56564 - DNA, 19 bp, Homo sapiens
  siRNA target sequence for EIF3S10 (NM_003750.1,1854-1872).
cgccttgagagtctgaata

SEQ ID NO: 56565 - DNA, 19 bp, Homo sapiens
  siRNA target sequence for EIF3S10 (NM_003750.1,1855-1873).
gccttgagagtctgaatat

SEQ ID NO: 56566 - DNA, 19 bp, Homo sapiens
  siRNA target sequence for EIF3S10 (NM_003750.1,1856-1874).
ccttgagagtctgaatatt

SEQ ID NO: 56567 - DNA, 19 bp, Homo sapiens
  siRNA target sequence for EIF3S10 (NM_003750.1,1868-1886).
gaatattcagcgtgagaaa

SEQ ID NO: 56568 - DNA, 19 bp, Homo sapiens
  siRNA target sequence for EIF3S10 (NM_003750.1,1981-1999).
gtatcttacaggaacatga

SEQ ID NO: 56569 - DNA, 19 bp, Homo sapiens
  siRNA target sequence for EIF3S10 (NM_003750.1,2028-2046).
cgtttggagcagatcaaga

SEQ ID NO: 56570 - DNA, 19 bp, Homo sapiens
  siRNA target sequence for EIF3S10 (NM_003750.1,2067-2085).
gcattcaaagatattgata

SEQ ID NO: 56571 - DNA, 19 bp, Homo sapiens
  siRNA target sequence for EIF3S10 (NM_003750.1,2123-2141).
ggctaaacaggttgaacaa

SEQ ID NO: 56572 - DNA, 19 bp, Homo sapiens
  siRNA target sequence for EIF3S10 (NM_003750.1,2125-2143).
ctaaacaggttgaacaact

SEQ ID NO: 56573 - DNA, 19 bp, Homo sapiens
  siRNA target sequence for EIF3S10 (NM_003750.1,2163-2181).
cttcaagaacgcctaaaga

SEQ ID NO: 56574 - DNA, 19 bp, Homo sapiens
  siRNA target sequence for EIF3S10 (NM_003750.1,2172-2190).
cgcctaaagaatcaagaaa

SEQ ID NO: 56575 - DNA, 19 bp, Homo sapiens
  siRNA target sequence for EIF3S10 (NM_003750.1,2195-2213).
gattgactattttgaaaga

SEQ ID NO: 56576 - DNA, 19 bp, Homo sapiens
  siRNA target sequence for EIF3S10 (NM_003750.1,2372-2390).
gcttgaagacagagattta

SEQ ID NO: 56577 - DNA, 19 bp, Homo sapiens
  siRNA target sequence for EIF3S10 (NM_003750.1,2373-2391).
cttgaagacagagatttat

SEQ ID NO: 56578 - DNA, 19 bp, Homo sapiens
  siRNA target sequence for EIF3S10 (NM_003750.1,2410-2428).
ctgcacggcagtctgttta

SEQ ID NO: 56579 - DNA, 19 bp, Homo sapiens
  siRNA target sequence for EIF3S10 (NM_003750.1,2413-2431).
cacggcagtctgtttatga

SEQ ID NO: 56580 - DNA, 19 bp, Homo sapiens
  siRNA target sequence for EIF3S10 (NM_003750.1,2447-2465).
gtttgaagagcgattagca

SEQ ID NO: 56581 - DNA, 19 bp, Homo sapiens
  siRNA target sequence for EIF3S10 (NM_003750.1,2466-2484).
gaagaaaggcataatcgat

SEQ ID NO: 56582 - DNA, 19 bp, Homo sapiens
  siRNA target sequence for EIF3S10 (NM_003750.1,2494-2512).
ggaaaaggcagcgtaaaga

SEQ ID NO: 56583 - DNA, 19 bp, Homo sapiens
  siRNA target sequence for EIF3S10 (NM_003750.1,2511-2529).
gaagaacgcaggataacat

SEQ ID NO: 56584 - DNA, 19 bp, Homo sapiens
  siRNA target sequence for EIF3S10 (NM_003750.1,2514-2532).
gaacgcaggataacatact

SEQ ID NO: 56585 - DNA, 19 bp, Homo sapiens
  siRNA target sequence for EIF3S10 (NM_003750.1,2519-2537).
caggataacatactataga

SEQ ID NO: 56586 - DNA, 19 bp, Homo sapiens
  siRNA target sequence for EIF3S10 (NM_003750.1,2521-2539).
ggataacatactatagaga

SEQ ID NO: 56587 - DNA, 19 bp, Homo sapiens
  siRNA target sequence for EIF3S10 (NM_003750.1,2522-2540).
gataacatactatagagaa

SEQ ID NO: 56588 - DNA, 19 bp, Homo sapiens
  siRNA target sequence for EIF3S10 (NM_003750.1,2527-2545).
catactatagagaaaaaga

SEQ ID NO: 56589 - DNA, 19 bp, Homo sapiens
  siRNA target sequence for EIF3S10 (NM_003750.1,2648-2666).
ggagcgggtgaagaaatta

SEQ ID NO: 56590 - DNA, 19 bp, Homo sapiens
  siRNA target sequence for EIF3S10 (NM_003750.1,2748-2766).
ggcgatagttccctttcta

SEQ ID NO: 56591 - DNA, 19 bp, Homo sapiens
  siRNA target sequence for EIF3S10 (NM_003750.1,2750-2768).
cgatagttccctttctaga

SEQ ID NO: 56592 - DNA, 19 bp, Homo sapiens
  siRNA target sequence for EIF3S10 (NM_003750.1,2751-2769).
gatagttccctttctagaa

SEQ ID NO: 56593 - DNA, 19 bp, Homo sapiens
  siRNA target sequence for EIF3S10 (NM_003750.1,2774-2792).
ctctcgttggggagataga

SEQ ID NO: 56594 - DNA, 19 bp, Homo sapiens
  siRNA target sequence for EIF3S10 (NM_003750.1,2778-2796).
cgttggggagatagagatt

SEQ ID NO: 56595 - DNA, 19 bp, Homo sapiens
  siRNA target sequence for EIF3S10 (NM_003750.1,2891-2909).
ggacaggtctcatagaaga

SEQ ID NO: 56596 - DNA, 19 bp, Homo sapiens
  siRNA target sequence for EIF3S10 (NM_003750.1,2946-2964).
gatagagagccctctctta

SEQ ID NO: 56597 - DNA, 19 bp, Homo sapiens
  siRNA target sequence for EIF3S10 (NM_003750.1,3071-3089).
gccttcctggcgtaacaca

SEQ ID NO: 56598 - DNA, 19 bp, Homo sapiens
  siRNA target sequence for EIF3S10 (NM_003750.1,3077-3095).
ctggcgtaacacagatgat

SEQ ID NO: 56599 - DNA, 19 bp, Homo sapiens
  siRNA target sequence for EIF3S10 (NM_003750.1,3109-3127).
gacgaattgccgatgaaga

SEQ ID NO: 56600 - DNA, 19 bp, Homo sapiens
  siRNA target sequence for EIF3S10 (NM_003750.1,3472-3490).
ggaggaacgccgatgatga

SEQ ID NO: 56601 - DNA, 19 bp, Homo sapiens
  siRNA target sequence for EIF3S10 (NM_003750.1,3479-3497).
cgccgatgatgacagaatt

SEQ ID NO: 56602 - DNA, 19 bp, Homo sapiens
  siRNA target sequence for EIF3S10 (NM_003750.1,3613-3631).
gtccttggagaccattagt

SEQ ID NO: 56603 - DNA, 19 bp, Homo sapiens
  siRNA target sequence for EIF3S10 (NM_003750.1,3615-3633).
ccttggagaccattagtca

SEQ ID NO: 56604 - DNA, 19 bp, Homo sapiens
  siRNA target sequence for EIF3S10 (NM_003750.1,3616-3634).
cttggagaccattagtcaa

SEQ ID NO: 56605 - DNA, 19 bp, Homo sapiens
  siRNA target sequence for EIF3S10 (NM_003750.1,3681-3699).
ggtccacctcgagaatcaa

SEQ ID NO: 56606 - DNA, 19 bp, Homo sapiens
  siRNA target sequence for EIF3S10 (NM_003750.1,3739-3757).
gggacagagataatcaaga

SEQ ID NO: 56607 - DNA, 19 bp, Homo sapiens
  siRNA target sequence for EIF3S10 (NM_003750.1,3756-3774).
gatcgggaggagaatgaca

SEQ ID NO: 56608 - DNA, 19 bp, Homo sapiens
  siRNA target sequence for EIF3S10 (NM_003750.1,3864-3882).
ggaccagctgaggaatctt

SEQ ID NO: 56609 - DNA, 19 bp, Homo sapiens
  siRNA target sequence for EIF3S10 (NM_003750.1,3945-3963).
gatgaccggcgtgatctaa

SEQ ID NO: 56610 - DNA, 19 bp, Homo sapiens
  siRNA target sequence for EIF3S10 (NM_003750.1,3950-3968).
ccggcgtgatctaagagaa

SEQ ID NO: 56611 - DNA, 19 bp, Homo sapiens
  siRNA target sequence for EIF3S10 (NM_003750.1,3951-3969).
cggcgtgatctaagagaaa

SEQ ID NO: 56612 - DNA, 19 bp, Homo sapiens
  siRNA target sequence for EIF3S10 (NM_003750.1,3953-3971).
gcgtgatctaagagaaaga

SEQ ID NO: 56613 - DNA, 19 bp, Homo sapiens
  siRNA target sequence for EIF3S10 (NM_003750.1,4015-4033).
gatcagaacgtgaagaagt

SEQ ID NO: 56614 - DNA, 19 bp, Homo sapiens
  siRNA target sequence for EIF3S10 (NM_003750.1,4023-4041).
cgtgaagaagtaagttctt

SEQ ID NO: 56615 - DNA, 19 bp, Homo sapiens
  siRNA target sequence for EIF3S10 (NM_003750.1,4209-4227).
cgtcgtactaaaaatgaga

SEQ ID NO: 56616 - DNA, 19 bp, Homo sapiens
  siRNA target sequence for EIF3S2 (NM_003757.1,39-57).
ggccatgagcggtccatta

SEQ ID NO: 56617 - DNA, 19 bp, Homo sapiens
  siRNA target sequence for EIF3S2 (NM_003757.1,48-66).
cggtccattacgcagatta

SEQ ID NO: 56618 - DNA, 19 bp, Homo sapiens
  siRNA target sequence for EIF3S2 (NM_003757.1,49-67).
ggtccattacgcagattaa

SEQ ID NO: 56619 - DNA, 19 bp, Homo sapiens
  siRNA target sequence for EIF3S2 (NM_003757.1,52-70).
ccattacgcagattaagta

SEQ ID NO: 56620 - DNA, 19 bp, Homo sapiens
  siRNA target sequence for EIF3S2 (NM_003757.1,53-71).
cattacgcagattaagtat

SEQ ID NO: 56621 - DNA, 19 bp, Homo sapiens
  siRNA target sequence for EIF3S2 (NM_003757.1,78-96).
gaaggagacctcctcttta

SEQ ID NO: 56622 - DNA, 19 bp, Homo sapiens
  siRNA target sequence for EIF3S2 (NM_003757.1,107-125).
ggaccctatcgtcaatgta

SEQ ID NO: 56623 - DNA, 19 bp, Homo sapiens
  siRNA target sequence for EIF3S2 (NM_003757.1,108-126).
gaccctatcgtcaatgtat

SEQ ID NO: 56624 - DNA, 19 bp, Homo sapiens
  siRNA target sequence for EIF3S2 (NM_003757.1,112-130).
ctatcgtcaatgtatggta

SEQ ID NO: 56625 - DNA, 19 bp, Homo sapiens
  siRNA target sequence for EIF3S2 (NM_003757.1,306-324).
cggacctgcggttttgact

SEQ ID NO: 56626 - DNA, 19 bp, Homo sapiens
  siRNA target sequence for EIF3S2 (NM_003757.1,327-345).
gggggcaacatcatcatgt

SEQ ID NO: 56627 - DNA, 19 bp, Homo sapiens
  siRNA target sequence for EIF3S2 (NM_003757.1,328-346).
ggggcaacatcatcatgtt

SEQ ID NO: 56628 - DNA, 19 bp, Homo sapiens
  siRNA target sequence for EIF3S2 (NM_003757.1,372-390).
cagtgctttgtgagctttt

SEQ ID NO: 56629 - DNA, 19 bp, Homo sapiens
  siRNA target sequence for EIF3S2 (NM_003757.1,402-420).
gatccgagccagattgaca

SEQ ID NO: 56630 - DNA, 19 bp, Homo sapiens
  siRNA target sequence for EIF3S2 (NM_003757.1,406-424).
cgagccagattgacaacaa

SEQ ID NO: 56631 - DNA, 19 bp, Homo sapiens
  siRNA target sequence for EIF3S2 (NM_003757.1,519-537).
ggagagctcaaccagtata

SEQ ID NO: 56632 - DNA, 19 bp, Homo sapiens
  siRNA target sequence for EIF3S2 (NM_003757.1,608-626).
cagggacatgaccatgttt

SEQ ID NO: 56633 - DNA, 19 bp, Homo sapiens
  siRNA target sequence for EIF3S2 (NM_003757.1,610-628).
gggacatgaccatgtttgt

SEQ ID NO: 56634 - DNA, 19 bp, Homo sapiens
  siRNA target sequence for EIF3S2 (NM_003757.1,642-660).
gacaacacagccaagcttt

SEQ ID NO: 56635 - DNA, 19 bp, Homo sapiens
  siRNA target sequence for EIF3S2 (NM_003757.1,670-688).
caactcttgaacatcagaa

SEQ ID NO: 56636 - DNA, 19 bp, Homo sapiens
  siRNA target sequence for EIF3S2 (NM_003757.1,867-885).
cactttggacctatcaaca

SEQ ID NO: 56637 - DNA, 19 bp, Homo sapiens
  siRNA target sequence for EIF3S2 (NM_003757.1,936-954).
ggttacgtccgtatccatt

SEQ ID NO: 56638 - DNA, 19 bp, Homo sapiens
  siRNA target sequence for EIF3S2 (NM_003757.1,937-955).
gttacgtccgtatccatta

SEQ ID NO: 56639 - DNA, 19 bp, Homo sapiens
  siRNA target sequence for EIF3S3 (NM_003756.1,288-306).
gatgaagtccaatatcaga

SEQ ID NO: 56640 - DNA, 19 bp, Homo sapiens
  siRNA target sequence for EIF3S3 (NM_003756.1,318-336).
cggagccttcgccatgtaa

SEQ ID NO: 56641 - DNA, 19 bp, Homo sapiens
  siRNA target sequence for EIF3S3 (NM_003756.1,323-341).
ccttcgccatgtaaacatt

SEQ ID NO: 56642 - DNA, 19 bp, Homo sapiens
  siRNA target sequence for EIF3S3 (NM_003756.1,328-346).
gccatgtaaacattgatca

SEQ ID NO: 56643 - DNA, 19 bp, Homo sapiens
  siRNA target sequence for EIF3S3 (NM_003756.1,329-347).
ccatgtaaacattgatcat

SEQ ID NO: 56644 - DNA, 19 bp, Homo sapiens
  siRNA target sequence for EIF3S3 (NM_003756.1,351-369).
cacgtgggctggtatcagt

SEQ ID NO: 56645 - DNA, 19 bp, Homo sapiens
  siRNA target sequence for EIF3S3 (NM_003756.1,361-379).
ggtatcagtccacatacta

SEQ ID NO: 56646 - DNA, 19 bp, Homo sapiens
  siRNA target sequence for EIF3S3 (NM_003756.1,362-380).
gtatcagtccacatactat

SEQ ID NO: 56647 - DNA, 19 bp, Homo sapiens
  siRNA target sequence for EIF3S3 (NM_003756.1,404-422).
cctggactctcagtttagt

SEQ ID NO: 56648 - DNA, 19 bp, Homo sapiens
  siRNA target sequence for EIF3S3 (NM_003756.1,428-446).
gcatgccattgaagaatct

SEQ ID NO: 56649 - DNA, 19 bp, Homo sapiens
  siRNA target sequence for EIF3S3 (NM_003756.1,441-459).
gaatctgtcgttctcattt

SEQ ID NO: 56650 - DNA, 19 bp, Homo sapiens
  siRNA target sequence for EIF3S3 (NM_003756.1,445-463).
ctgtcgttctcatttatga

SEQ ID NO: 56651 - DNA, 19 bp, Homo sapiens
  siRNA target sequence for EIF3S3 (NM_003756.1,573-591).
gcaaatatcacctttgagt

SEQ ID NO: 56652 - DNA, 19 bp, Homo sapiens
  siRNA target sequence for EIF3S3 (NM_003756.1,574-592).
caaatatcacctttgagta

SEQ ID NO: 56653 - DNA, 19 bp, Homo sapiens
  siRNA target sequence for EIF3S3 (NM_003756.1,581-599).
cacctttgagtacatgttt

SEQ ID NO: 56654 - DNA, 19 bp, Homo sapiens
  siRNA target sequence for EIF3S3 (NM_003756.1,600-618).
gaagaagtgccgattgtaa

SEQ ID NO: 56655 - DNA, 19 bp, Homo sapiens
  siRNA target sequence for EIF3S3 (NM_003756.1,603-621).
gaagtgccgattgtaatta

SEQ ID NO: 56656 - DNA, 19 bp, Homo sapiens
  siRNA target sequence for EIF3S3 (NM_003756.1,644-662).
cctaatgtgggaacttgaa

SEQ ID NO: 56657 - DNA, 19 bp, Homo sapiens
  siRNA target sequence for EIF3S3 (NM_003756.1,701-719).
ccttgccagcagcaatcat

SEQ ID NO: 56658 - DNA, 19 bp, Homo sapiens
  siRNA target sequence for EIF3S3 (NM_003756.1,702-720).
cttgccagcagcaatcatt

SEQ ID NO: 56659 - DNA, 19 bp, Homo sapiens
  siRNA target sequence for EIF3S3 (NM_003756.1,713-731).
caatcatttggggaagaat

SEQ ID NO: 56660 - DNA, 19 bp, Homo sapiens
  siRNA target sequence for EIF3S3 (NM_003756.1,777-795).
gttaaatacaacacataca

SEQ ID NO: 56661 - DNA, 19 bp, Homo sapiens
  siRNA target sequence for EIF3S3 (NM_003756.1,843-861).
cgtcgccagcaggagaata

SEQ ID NO: 56662 - DNA, 19 bp, Homo sapiens
  siRNA target sequence for EIF3S3 (NM_003756.1,844-862).
gtcgccagcaggagaatat

SEQ ID NO: 56663 - DNA, 19 bp, Homo sapiens
  siRNA target sequence for EIF3S3 (NM_003756.1,999-1017).
gagttcactgcccaaaact

SEQ ID NO: 56664 - DNA, 19 bp, Homo sapiens
  siRNA target sequence for EIF3S6 (NM_001568.1,26-44).
gcggagtacgacttgacta

SEQ ID NO: 56665 - DNA, 19 bp, Homo sapiens
  siRNA target sequence for EIF3S6 (NM_001568.1,45-63).
ctcgcatcgcgcacttttt

SEQ ID NO: 56666 - DNA, 19 bp, Homo sapiens
  siRNA target sequence for EIF3S6 (NM_001568.1,48-66).
gcatcgcgcactttttgga

SEQ ID NO: 56667 - DNA, 19 bp, Homo sapiens
  siRNA target sequence for EIF3S6 (NM_001568.1,49-67).
catcgcgcactttttggat

SEQ ID NO: 56668 - DNA, 19 bp, Homo sapiens
  siRNA target sequence for EIF3S6 (NM_001568.1,64-82).
ggatcggcatctagtcttt

SEQ ID NO: 56669 - DNA, 19 bp, Homo sapiens
  siRNA target sequence for EIF3S6 (NM_001568.1,98-116).
ctctctgtaaaggagatat

SEQ ID NO: 56670 - DNA, 19 bp, Homo sapiens
  siRNA target sequence for EIF3S6 (NM_001568.1,127-145).
ggaattattacaaggtaaa

SEQ ID NO: 56671 - DNA, 19 bp, Homo sapiens
  siRNA target sequence for EIF3S6 (NM_001568.1,183-201).
ctatggatgtatacaaaaa

SEQ ID NO: 56672 - DNA, 19 bp, Homo sapiens
  siRNA target sequence for EIF3S6 (NM_001568.1,202-220).
cctttattctgatgatatt

SEQ ID NO: 56673 - DNA, 19 bp, Homo sapiens
  siRNA target sequence for EIF3S6 (NM_001568.1,291-309).
caattgtgaagatgtttga

SEQ ID NO: 56674 - DNA, 19 bp, Homo sapiens
  siRNA target sequence for EIF3S6 (NM_001568.1,351-369).
gtaggatgctctttgacta

SEQ ID NO: 56675 - DNA, 19 bp, Homo sapiens
  siRNA target sequence for EIF3S6 (NM_001568.1,373-391).
ggcggacaagcatggtttt

SEQ ID NO: 56676 - DNA, 19 bp, Homo sapiens
  siRNA target sequence for EIF3S6 (NM_001568.1,374-392).
gcggacaagcatggtttta

SEQ ID NO: 56677 - DNA, 19 bp, Homo sapiens
  siRNA target sequence for EIF3S6 (NM_001568.1,387-405).
gttttaggcaggaatattt

SEQ ID NO: 56678 - DNA, 19 bp, Homo sapiens
  siRNA target sequence for EIF3S6 (NM_001568.1,413-431).
ctctacagatatgcaaaat

SEQ ID NO: 56679 - DNA, 19 bp, Homo sapiens
  siRNA target sequence for EIF3S6 (NM_001568.1,459-477).
gagcagcagaatatcttta

SEQ ID NO: 56680 - DNA, 19 bp, Homo sapiens
  siRNA target sequence for EIF3S6 (NM_001568.1,538-556).
gctggcctctgaaatctta

SEQ ID NO: 56681 - DNA, 19 bp, Homo sapiens
  siRNA target sequence for EIF3S6 (NM_001568.1,587-605).
cttacacggttaaaagaga

SEQ ID NO: 56682 - DNA, 19 bp, Homo sapiens
  siRNA target sequence for EIF3S6 (NM_001568.1,697-715).
ccccaaaggtcgcgataat

SEQ ID NO: 56683 - DNA, 19 bp, Homo sapiens
  siRNA target sequence for EIF3S6 (NM_001568.1,698-716).
cccaaaggtcgcgataata

SEQ ID NO: 56684 - DNA, 19 bp, Homo sapiens
  siRNA target sequence for EIF3S6 (NM_001568.1,699-717).
ccaaaggtcgcgataatat

SEQ ID NO: 56685 - DNA, 19 bp, Homo sapiens
  siRNA target sequence for EIF3S6 (NM_001568.1,700-718).
caaaggtcgcgataatatt

SEQ ID NO: 56686 - DNA, 19 bp, Homo sapiens
  siRNA target sequence for EIF3S6 (NM_001568.1,705-723).
gtcgcgataatattattga

SEQ ID NO: 56687 - DNA, 19 bp, Homo sapiens
  siRNA target sequence for EIF3S6 (NM_001568.1,739-757).
gccacaatatcttaatgca

SEQ ID NO: 56688 - DNA, 19 bp, Homo sapiens
  siRNA target sequence for EIF3S6 (NM_001568.1,740-758).
ccacaatatcttaatgcaa

SEQ ID NO: 56689 - DNA, 19 bp, Homo sapiens
  siRNA target sequence for EIF3S6 (NM_001568.1,741-759).
cacaatatcttaatgcaat

SEQ ID NO: 56690 - DNA, 19 bp, Homo sapiens
  siRNA target sequence for EIF3S6 (NM_001568.1,763-781).
gacaatgtgtccacacatt

SEQ ID NO: 56691 - DNA, 19 bp, Homo sapiens
  siRNA target sequence for EIF3S6 (NM_001568.1,776-794).
cacattcttcgctatttga

SEQ ID NO: 56692 - DNA, 19 bp, Homo sapiens
  siRNA target sequence for EIF3S6 (NM_001568.1,814-832).
caaggatgttcgaaaacgt

SEQ ID NO: 56693 - DNA, 19 bp, Homo sapiens
  siRNA target sequence for EIF3S6 (NM_001568.1,831-849).
gtcggcaggttctaaaaga

SEQ ID NO: 56694 - DNA, 19 bp, Homo sapiens
  siRNA target sequence for EIF3S6 (NM_001568.1,839-857).
gttctaaaagatctagtta

SEQ ID NO: 56695 - DNA, 19 bp, Homo sapiens
  siRNA target sequence for EIF3S6 (NM_001568.1,866-884).
caacaggagtcttacacat

SEQ ID NO: 56696 - DNA, 19 bp, Homo sapiens
  siRNA target sequence for EIF3S6 (NM_001568.1,869-887).
caggagtcttacacatata

SEQ ID NO: 56697 - DNA, 19 bp, Homo sapiens
  siRNA target sequence for EIF3S6 (NM_001568.1,908-926).
gttgaatgtttatatgtta

SEQ ID NO: 56698 - DNA, 19 bp, Homo sapiens
  siRNA target sequence for EIF3S6 (NM_001568.1,966-984).
gtgaatcagtgcttgtgaa

SEQ ID NO: 56699 - DNA, 19 bp, Homo sapiens
  siRNA target sequence for EIF3S6 (NM_001568.1,1002-1020).
cttgtcttgaggatttcat

SEQ ID NO: 56700 - DNA, 19 bp, Homo sapiens
  siRNA target sequence for EIF3S6 (NM_001568.1,1007-1025).
cttgaggatttcattgaaa

SEQ ID NO: 56701 - DNA, 19 bp, Homo sapiens
  siRNA target sequence for EIF3S6 (NM_001568.1,1029-1047).
cccgtctcttcatatttga

SEQ ID NO: 56702 - DNA, 19 bp, Homo sapiens
  siRNA target sequence for EIF3S6 (NM_001568.1,1056-1074).
gtcgcatccaccagtgtat

SEQ ID NO: 56703 - DNA, 19 bp, Homo sapiens
  siRNA target sequence for EIF3S6 (NM_001568.1,1071-1089).
gtatcagcattaacatgtt

SEQ ID NO: 56704 - DNA, 19 bp, Homo sapiens
  siRNA target sequence for EIF3S6 (NM_001568.1,1132-1150).
gattgtaaatttgattaga

SEQ ID NO: 56705 - DNA, 19 bp, Homo sapiens
  siRNA target sequence for EIF3S6 (NM_001568.1,1166-1184).
gccaagattgattctaaat

SEQ ID NO: 56706 - DNA, 19 bp, Homo sapiens
  siRNA target sequence for EIF3S6 (NM_001568.1,1171-1189).
gattgattctaaattaggt

SEQ ID NO: 56707 - DNA, 19 bp, Homo sapiens
  siRNA target sequence for EIF3S6 (NM_001568.1,1221-1239).
cctatcagcaagtgattga

SEQ ID NO: 56708 - DNA, 19 bp, Homo sapiens
  siRNA target sequence for EIF3S6 (NM_001568.1,1222-1240).
ctatcagcaagtgattgaa

SEQ ID NO: 56709 - DNA, 19 bp, Homo sapiens
  siRNA target sequence for EIF3S6 (NM_001568.1,1243-1261).
gaccaaaagcctttccttt

SEQ ID NO: 56710 - DNA, 19 bp, Homo sapiens
  siRNA target sequence for EIF3S6IP (NM_016091.1,36-54).
gtcttatcccgctgatgat

SEQ ID NO: 56711 - DNA, 19 bp, Homo sapiens
  siRNA target sequence for EIF3S6IP (NM_016091.1,86-104).
cttatcccagcgactatga

SEQ ID NO: 56712 - DNA, 19 bp, Homo sapiens
  siRNA target sequence for EIF3S6IP (NM_016091.1,122-140).
caaagcaggaccttgctta

SEQ ID NO: 56713 - DNA, 19 bp, Homo sapiens
  siRNA target sequence for EIF3S6IP (NM_016091.1,150-168).
gtatgaacagcaaacctat

SEQ ID NO: 56714 - DNA, 19 bp, Homo sapiens
  siRNA target sequence for EIF3S6IP (NM_016091.1,266-284).
gtgtctccagtgatgtcat

SEQ ID NO: 56715 - DNA, 19 bp, Homo sapiens
  siRNA target sequence for EIF3S6IP (NM_016091.1,337-355).
ctgactgaaagattcttca

SEQ ID NO: 56716 - DNA, 19 bp, Homo sapiens
  siRNA target sequence for EIF3S6IP (NM_016091.1,409-427).
gctgtcttcctgattttat

SEQ ID NO: 56717 - DNA, 19 bp, Homo sapiens
  siRNA target sequence for EIF3S6IP (NM_016091.1,448-466).
cacatatatgccaaagtca

SEQ ID NO: 56718 - DNA, 19 bp, Homo sapiens
  siRNA target sequence for EIF3S6IP (NM_016091.1,486-504).
gcagaggtttgaatcctat

SEQ ID NO: 56719 - DNA, 19 bp, Homo sapiens
  siRNA target sequence for EIF3S6IP (NM_016091.1,515-533).
gcaatctcttcaactacat

SEQ ID NO: 56720 - DNA, 19 bp, Homo sapiens
  siRNA target sequence for EIF3S6IP (NM_016091.1,520-538).
ctcttcaactacattctta

SEQ ID NO: 56721 - DNA, 19 bp, Homo sapiens
  siRNA target sequence for EIF3S6IP (NM_016091.1,584-602).
gggatattatcgatgagtt

SEQ ID NO: 56722 - DNA, 19 bp, Homo sapiens
  siRNA target sequence for EIF3S6IP (NM_016091.1,712-730).
gtcctcaatgtccttcatt

SEQ ID NO: 56723 - DNA, 19 bp, Homo sapiens
  siRNA target sequence for EIF3S6IP (NM_016091.1,727-745).
cattccctggtagacaaat

SEQ ID NO: 56724 - DNA, 19 bp, Homo sapiens
  siRNA target sequence for EIF3S6IP (NM_016091.1,731-749).
ccctggtagacaaatccaa

SEQ ID NO: 56725 - DNA, 19 bp, Homo sapiens
  siRNA target sequence for EIF3S6IP (NM_016091.1,757-775).
cgacagttggaggtataca

SEQ ID NO: 56726 - DNA, 19 bp, Homo sapiens
  siRNA target sequence for EIF3S6IP (NM_016091.1,760-778).
cagttggaggtatacacaa

SEQ ID NO: 56727 - DNA, 19 bp, Homo sapiens
  siRNA target sequence for EIF3S6IP (NM_016091.1,878-896).
ccctgttaggagattacta

SEQ ID NO: 56728 - DNA, 19 bp, Homo sapiens
  siRNA target sequence for EIF3S6IP (NM_016091.1,1195-1213).
ctccagctgcgggagaaat

SEQ ID NO: 56729 - DNA, 19 bp, Homo sapiens
  siRNA target sequence for EIF3S7 (NM_003753.2,510-528).
ggagccacataccaagata

SEQ ID NO: 56730 - DNA, 19 bp, Homo sapiens
  siRNA target sequence for EIF3S7 (NM_003753.2,511-529).
gagccacataccaagataa

SEQ ID NO: 56731 - DNA, 19 bp, Homo sapiens
  siRNA target sequence for EIF3S7 (NM_003753.2,522-540).
caagataagaggtacacaa

SEQ ID NO: 56732 - DNA, 19 bp, Homo sapiens
  siRNA target sequence for EIF3S7 (NM_003753.2,525-543).
gataagaggtacacaaata

SEQ ID NO: 56733 - DNA, 19 bp, Homo sapiens
  siRNA target sequence for EIF3S7 (NM_003753.2,564-582).
ggtggaagtcaatatgctt

SEQ ID NO: 56734 - DNA, 19 bp, Homo sapiens
  siRNA target sequence for EIF3S7 (NM_003753.2,645-663).
gcctaccagcggaatcgaa

SEQ ID NO: 56735 - DNA, 19 bp, Homo sapiens
  siRNA target sequence for EIF3S7 (NM_003753.2,650-668).
ccagcggaatcgaatgaga

SEQ ID NO: 56736 - DNA, 19 bp, Homo sapiens
  siRNA target sequence for EIF3S7 (NM_003753.2,653-671).
gcggaatcgaatgagattt

SEQ ID NO: 56737 - DNA, 19 bp, Homo sapiens
  siRNA target sequence for EIF3S7 (NM_003753.2,728-746).
gcagatcctgcctaagagt

SEQ ID NO: 56738 - DNA, 19 bp, Homo sapiens
  siRNA target sequence for EIF3S7 (NM_003753.2,738-756).
cctaagagtgccaaacaga

SEQ ID NO: 56739 - DNA, 19 bp, Homo sapiens
  siRNA target sequence for EIF3S7 (NM_003753.2,739-757).
ctaagagtgccaaacagaa

SEQ ID NO: 56740 - DNA, 19 bp, Homo sapiens
  siRNA target sequence for EIF3S7 (NM_003753.2,768-786).
cgcattcgactgcagaaaa

SEQ ID NO: 56741 - DNA, 19 bp, Homo sapiens
  siRNA target sequence for EIF3S7 (NM_003753.2,815-833).
gaaatgggatcagaaatca

SEQ ID NO: 56742 - DNA, 19 bp, Homo sapiens
  siRNA target sequence for EIF3S7 (NM_003753.2,842-860).
ccgagactcttcagttgaa

SEQ ID NO: 56743 - DNA, 19 bp, Homo sapiens
  siRNA target sequence for EIF3S7 (NM_003753.2,855-873).
gttgaagttcgtagtgatt

SEQ ID NO: 56744 - DNA, 19 bp, Homo sapiens
  siRNA target sequence for EIF3S7 (NM_003753.2,917-935).
gcgctacttggaagtatca

SEQ ID NO: 56745 - DNA, 19 bp, Homo sapiens
  siRNA target sequence for EIF3S7 (NM_003753.2,919-937).
gctacttggaagtatcaga

SEQ ID NO: 56746 - DNA, 19 bp, Homo sapiens
  siRNA target sequence for EIF3S7 (NM_003753.2,1076-1094).
ccgcaagctggcaaaaact

SEQ ID NO: 56747 - DNA, 19 bp, Homo sapiens
  siRNA target sequence for EIF3S7 (NM_003753.2,1078-1096).
gcaagctggcaaaaactca

SEQ ID NO: 56748 - DNA, 19 bp, Homo sapiens
  siRNA target sequence for EIF3S7 (NM_003753.2,1142-1160).
ctgtacccgctcagtgtat

SEQ ID NO: 56749 - DNA, 19 bp, Homo sapiens
  siRNA target sequence for EIF3S7 (NM_003753.2,1183-1201).
gagttgggtccaaactctt

SEQ ID NO: 56750 - DNA, 19 bp, Homo sapiens
  siRNA target sequence for EIF3S7 (NM_003753.2,1189-1207).
ggtccaaactcttctttga

SEQ ID NO: 56751 - DNA, 19 bp, Homo sapiens
  siRNA target sequence for EIF3S7 (NM_003753.2,1192-1210).
ccaaactcttctttgacaa

SEQ ID NO: 56752 - DNA, 19 bp, Homo sapiens
  siRNA target sequence for EIF3S7 (NM_003753.2,1213-1231).
gagacaactctgactttga

SEQ ID NO: 56753 - DNA, 19 bp, Homo sapiens
  siRNA target sequence for EIF3S7 (NM_003753.2,1256-1274).
caatgagccccctcaagat

SEQ ID NO: 56754 - DNA, 19 bp, Homo sapiens
  siRNA target sequence for EIF3S7 (NM_003753.2,1264-1282).
cccctcaagatgaaggtaa

SEQ ID NO: 56755 - DNA, 19 bp, Homo sapiens
  siRNA target sequence for EIF3S7 (NM_003753.2,1265-1283).
ccctcaagatgaaggtaat

SEQ ID NO: 56756 - DNA, 19 bp, Homo sapiens
  siRNA target sequence for EIF3S7 (NM_003753.2,1269-1287).
caagatgaaggtaattcct

SEQ ID NO: 56757 - DNA, 19 bp, Homo sapiens
  siRNA target sequence for EIF3S7 (NM_003753.2,1275-1293).
gaaggtaattccttcaatt

SEQ ID NO: 56758 - DNA, 19 bp, Homo sapiens
  siRNA target sequence for EIF3S7 (NM_003753.2,1321-1339).
cctacatcaaccacaattt

SEQ ID NO: 56759 - DNA, 19 bp, Homo sapiens
  siRNA target sequence for EIF3S7 (NM_003753.2,1401-1419).
gtggaggacgacatggata

SEQ ID NO: 56760 - DNA, 19 bp, Homo sapiens
  siRNA target sequence for EIF3S7 (NM_003753.2,1409-1427).
cgacatggataagaatgaa

SEQ ID NO: 56761 - DNA, 19 bp, Homo sapiens
  siRNA target sequence for EIF3S7 (NM_003753.2,1528-1546).
gggaagtgtccttcatcaa

SEQ ID NO: 56762 - DNA, 19 bp, Homo sapiens
  siRNA target sequence for EIF3S7 (NM_003753.2,1544-1562).
caacatcaagacactcaat

SEQ ID NO: 56763 - DNA, 19 bp, Homo sapiens
  siRNA target sequence for EIF3S7 (NM_003753.2,1706-1724).
gtacctcaagcttggttat

SEQ ID NO: 56764 - DNA, 19 bp, Homo sapiens
  siRNA target sequence for EIF3S7 (NM_003753.2,1729-1747).
ctcggtaccacgtgaaaga

SEQ ID NO: 56765 - DNA, 19 bp, Homo sapiens
  siRNA target sequence for EIF3S7 (NM_003753.2,1731-1749).
cggtaccacgtgaaagact

SEQ ID NO: 56766 - DNA, 19 bp, Homo sapiens
  siRNA target sequence for EIF3S7 (NM_003753.2,1781-1799).
gttcaagcctaatgagttt

SEQ ID NO: 56767 - DNA, 19 bp, Homo sapiens
  siRNA target sequence for EIF3S7 (NM_003753.2,1826-1844).
gaatgcctggggcatttta

SEQ ID NO: 56768 - DNA, 19 bp, Homo sapiens
  siRNA target sequence for EIF3S8 (NM_003752.2,286-304).
ccgtaatgccatgaagatt

SEQ ID NO: 56769 - DNA, 19 bp, Homo sapiens
  siRNA target sequence for EIF3S8 (NM_003752.2,417-435).
ctgacctagaggactatct

SEQ ID NO: 56770 - DNA, 19 bp, Homo sapiens
  siRNA target sequence for EIF3S8 (NM_003752.2,419-437).
gacctagaggactatctta

SEQ ID NO: 56771 - DNA, 19 bp, Homo sapiens
  siRNA target sequence for EIF3S8 (NM_003752.2,522-540).
gaaaatacaaccgtgattt

SEQ ID NO: 56772 - DNA, 19 bp, Homo sapiens
  siRNA target sequence for EIF3S8 (NM_003752.2,536-554).
gatttcgagtcccatatca

SEQ ID NO: 56773 - DNA, 19 bp, Homo sapiens
  siRNA target sequence for EIF3S8 (NM_003752.2,577-595).
gcagtctgcggatgaagat

SEQ ID NO: 56774 - DNA, 19 bp, Homo sapiens
  siRNA target sequence for EIF3S8 (NM_003752.2,654-672).
gagtcagtgctgcaacttt

SEQ ID NO: 56775 - DNA, 19 bp, Homo sapiens
  siRNA target sequence for EIF3S8 (NM_003752.2,656-674).
gtcagtgctgcaactttct

SEQ ID NO: 56776 - DNA, 19 bp, Homo sapiens
  siRNA target sequence for EIF3S8 (NM_003752.2,660-678).
gtgctgcaactttcttgaa

SEQ ID NO: 56777 - DNA, 19 bp, Homo sapiens
  siRNA target sequence for EIF3S8 (NM_003752.2,662-680).
gctgcaactttcttgaaga

SEQ ID NO: 56778 - DNA, 19 bp, Homo sapiens
  siRNA target sequence for EIF3S8 (NM_003752.2,779-797).
gacacaggttccacatctt

SEQ ID NO: 56779 - DNA, 19 bp, Homo sapiens
  siRNA target sequence for EIF3S8 (NM_003752.2,837-855).
cgctggcctcaagatttct

SEQ ID NO: 56780 - DNA, 19 bp, Homo sapiens
  siRNA target sequence for EIF3S8 (NM_003752.2,838-856).
gctggcctcaagatttctt

SEQ ID NO: 56781 - DNA, 19 bp, Homo sapiens
  siRNA target sequence for EIF3S8 (NM_003752.2,839-857).
ctggcctcaagatttctta

SEQ ID NO: 56782 - DNA, 19 bp, Homo sapiens
  siRNA target sequence for EIF3S8 (NM_003752.2,841-859).
ggcctcaagatttcttaaa

SEQ ID NO: 56783 - DNA, 19 bp, Homo sapiens
  siRNA target sequence for EIF4EBP1 (NM_004095.2,359-377).
cgcaatagcccagaagata

SEQ ID NO: 56784 - DNA, 19 bp, Homo sapiens
  siRNA target sequence for EIF4EBP1 (NM_004095.2,388-406).
cggtgaagagtcacagttt

SEQ ID NO: 56785 - DNA, 19 bp, Homo sapiens
  siRNA target sequence for EIF4EBP2 (NM_004096.3,319-337).
cgcagctacctcatgacta

SEQ ID NO: 56786 - DNA, 19 bp, Homo sapiens
  siRNA target sequence for EIF4EBP2 (NM_004096.3,320-338).
gcagctacctcatgactat

SEQ ID NO: 56787 - DNA, 19 bp, Homo sapiens
  siRNA target sequence for EIF4EBP2 (NM_004096.3,324-342).
ctacctcatgactattgca

SEQ ID NO: 56788 - DNA, 19 bp, Homo sapiens
  siRNA target sequence for EIF4EBP2 (NM_004096.3,376-394).
cgggaggaactcgaatcat

SEQ ID NO: 56789 - DNA, 19 bp, Homo sapiens
  siRNA target sequence for EIF4EBP2 (NM_004096.3,413-431).
gttggatcgtcgcaattct

SEQ ID NO: 56790 - DNA, 19 bp, Homo sapiens
  siRNA target sequence for EIF4EBP2 (NM_004096.3,487-505).
ctggcaccttaattgaaga

SEQ ID NO: 56791 - DNA, 19 bp, Homo sapiens
  siRNA target sequence for EIF4EBP2 (NM_004096.3,504-522).
gactccaaagtagaagtaa

SEQ ID NO: 56792 - DNA, 19 bp, Homo sapiens
  siRNA target sequence for EIF4EBP3 (NM_003732.1,344-362).
ccgatgacgcacaatttga

SEQ ID NO: 56793 - DNA, 19 bp, Homo sapiens
  siRNA target sequence for EIF4EBP3 (NM_003732.1,345-363).
cgatgacgcacaatttgaa

SEQ ID NO: 56794 - DNA, 19 bp, Homo sapiens
  siRNA target sequence for EIF5 (NM_001969.3,545-563).
gcgtgtcagaccagttcta

SEQ ID NO: 56795 - DNA, 19 bp, Homo sapiens
  siRNA target sequence for EIF5 (NM_001969.3,546-564).
cgtgtcagaccagttctat

SEQ ID NO: 56796 - DNA, 19 bp, Homo sapiens
  siRNA target sequence for EIF5 (NM_001969.3,556-574).
cagttctatcgctacaaga

SEQ ID NO: 56797 - DNA, 19 bp, Homo sapiens
  siRNA target sequence for EIF5 (NM_001969.3,570-588).
caagatgccccgtctgatt

SEQ ID NO: 56798 - DNA, 19 bp, Homo sapiens
  siRNA target sequence for EIF5 (NM_001969.3,614-632).
gaatcaagacagttatagt

SEQ ID NO: 56799 - DNA, 19 bp, Homo sapiens
  siRNA target sequence for EIF5 (NM_001969.3,645-663).
cgttgcaaaggcgcttaat

SEQ ID NO: 56800 - DNA, 19 bp, Homo sapiens
  siRNA target sequence for EIF5 (NM_001969.3,670-688).
ccaacgtatcccaccaaat

SEQ ID NO: 56801 - DNA, 19 bp, Homo sapiens
  siRNA target sequence for EIF5 (NM_001969.3,671-689).
caacgtatcccaccaaata

SEQ ID NO: 56802 - DNA, 19 bp, Homo sapiens
  siRNA target sequence for EIF5 (NM_001969.3,712-730).
cagacccagtttgatgtta

SEQ ID NO: 56803 - DNA, 19 bp, Homo sapiens
  siRNA target sequence for EIF5 (NM_001969.3,755-773).
gatctcatgaggcgaataa

SEQ ID NO: 56804 - DNA, 19 bp, Homo sapiens
  siRNA target sequence for EIF5 (NM_001969.3,758-776).
ctcatgaggcgaataagct

SEQ ID NO: 56805 - DNA, 19 bp, Homo sapiens
  siRNA target sequence for EIF5 (NM_001969.3,767-785).
cgaataagctgcaagacat

SEQ ID NO: 56806 - DNA, 19 bp, Homo sapiens
  siRNA target sequence for EIF5 (NM_001969.3,844-862).
gatttgcatgtcaatccaa

SEQ ID NO: 56807 - DNA, 19 bp, Homo sapiens
  siRNA target sequence for EIF5 (NM_001969.3,912-930).
gcttgacacacatcataaa

SEQ ID NO: 56808 - DNA, 19 bp, Homo sapiens
  siRNA target sequence for EIF5 (NM_001969.3,935-953).
gcacattcattctcaaaaa

SEQ ID NO: 56809 - DNA, 19 bp, Homo sapiens
  siRNA target sequence for EIF5 (NM_001969.3,948-966).
caaaaacccacctgagaat

SEQ ID NO: 56810 - DNA, 19 bp, Homo sapiens
  siRNA target sequence for EIF5 (NM_001969.3,1126-1144).
gactggggagaagatacaa

SEQ ID NO: 56811 - DNA, 19 bp, Homo sapiens
  siRNA target sequence for EIF5 (NM_001969.3,1160-1178).
ggcgtcgaatggatgaaat

SEQ ID NO: 56812 - DNA, 19 bp, Homo sapiens
  siRNA target sequence for EIF5 (NM_001969.3,1162-1180).
cgtcgaatggatgaaatca

SEQ ID NO: 56813 - DNA, 19 bp, Homo sapiens
  siRNA target sequence for EIF5 (NM_001969.3,1179-1197).
cagtgaccatgcaaaagtt

SEQ ID NO: 56814 - DNA, 19 bp, Homo sapiens
  siRNA target sequence for EIF5 (NM_001969.3,1242-1260).
caatatcctctttgatttt

SEQ ID NO: 56815 - DNA, 19 bp, Homo sapiens
  siRNA target sequence for EIF5 (NM_001969.3,1276-1294).
gaagagggtgttattgatt

SEQ ID NO: 56816 - DNA, 19 bp, Homo sapiens
  siRNA target sequence for EIF5 (NM_001969.3,1281-1299).
gggtgttattgattcatct

SEQ ID NO: 56817 - DNA, 19 bp, Homo sapiens
  siRNA target sequence for EIF5 (NM_001969.3,1343-1361).
ccatgggccctcttgttct

SEQ ID NO: 56818 - DNA, 19 bp, Homo sapiens
  siRNA target sequence for EIF5 (NM_001969.3,1347-1365).
gggccctcttgttctaact

SEQ ID NO: 56819 - DNA, 19 bp, Homo sapiens
  siRNA target sequence for EIF5 (NM_001969.3,1412-1430).
ggcgccatttcctacgatt

SEQ ID NO: 56820 - DNA, 19 bp, Homo sapiens
  siRNA target sequence for EIF5 (NM_001969.3,1426-1444).
cgattttgtcacaacaaca

SEQ ID NO: 56821 - DNA, 19 bp, Homo sapiens
  siRNA target sequence for EIF5 (NM_001969.3,1452-1470).
ccaacggtaccttcttcat

SEQ ID NO: 56822 - DNA, 19 bp, Homo sapiens
  siRNA target sequence for EIF5 (NM_001969.3,1457-1475).
ggtaccttcttcatggttt

SEQ ID NO: 56823 - DNA, 19 bp, Homo sapiens
  siRNA target sequence for EIF5 (NM_001969.3,1542-1560).
gtacgatgcagacctttta

SEQ ID NO: 56824 - DNA, 19 bp, Homo sapiens
  siRNA target sequence for EIF5 (NM_001969.3,1626-1644).
caaagagattcgtgtcaaa

SEQ ID NO: 56825 - DNA, 19 bp, Homo sapiens
  siRNA target sequence for EIF5 (NM_001969.3,1648-1666).
gaaccatttataaaatggt

SEQ ID NO: 56826 - DNA, 19 bp, Homo sapiens
  siRNA target sequence for EIF5 (NM_001969.3,1748-1766).
ccagtgtaccgaaagttga

SEQ ID NO: 56827 - DNA, 19 bp, Homo sapiens
  siRNA target sequence for EIF5 (NM_001969.3,1756-1774).
ccgaaagttgagactgtaa

SEQ ID NO: 56828 - DNA, 19 bp, Homo sapiens
  siRNA target sequence for EIF5 (NM_001969.3,1757-1775).
cgaaagttgagactgtaaa

SEQ ID NO: 56829 - DNA, 19 bp, Homo sapiens
  siRNA target sequence for EIF5 (NM_001969.3,1788-1806).
ggatgacgacatcgatatt

SEQ ID NO: 56830 - DNA, 19 bp, Homo sapiens
  siRNA target sequence for EIF5A2 (NM_020390.5,134-152).
gcagacgaaattgatttca

SEQ ID NO: 56831 - DNA, 19 bp, Homo sapiens
  siRNA target sequence for EIF5A2 (NM_020390.5,137-155).
gacgaaattgatttcacta

SEQ ID NO: 56832 - DNA, 19 bp, Homo sapiens
  siRNA target sequence for EIF5A2 (NM_020390.5,195-213).
gctcggccttgcgcaaaaa

SEQ ID NO: 56833 - DNA, 19 bp, Homo sapiens
  siRNA target sequence for EIF5A2 (NM_020390.5,234-252).
gacgaccatgcaaaatagt

SEQ ID NO: 56834 - DNA, 19 bp, Homo sapiens
  siRNA target sequence for EIF5A2 (NM_020390.5,295-313).
ggttcaccttgttggaatt

SEQ ID NO: 56835 - DNA, 19 bp, Homo sapiens
  siRNA target sequence for EIF5A2 (NM_020390.5,299-317).
caccttgttggaattgata

SEQ ID NO: 56836 - DNA, 19 bp, Homo sapiens
  siRNA target sequence for EIF5A2 (NM_020390.5,301-319).
ccttgttggaattgatatt

SEQ ID NO: 56837 - DNA, 19 bp, Homo sapiens
  siRNA target sequence for EIF5A2 (NM_020390.5,302-320).
cttgttggaattgatattt

SEQ ID NO: 56838 - DNA, 19 bp, Homo sapiens
  siRNA target sequence for EIF5A2 (NM_020390.5,324-342).
cgggcaaaaaatatgaaga

SEQ ID NO: 56839 - DNA, 19 bp, Homo sapiens
  siRNA target sequence for EIF5A2 (NM_020390.5,348-366).
gtccttctactcacaacat

SEQ ID NO: 56840 - DNA, 19 bp, Homo sapiens
  siRNA target sequence for EIF5A2 (NM_020390.5,364-382).
catggatgttccaaatatt

SEQ ID NO: 56841 - DNA, 19 bp, Homo sapiens
  siRNA target sequence for EIF5A2 (NM_020390.5,368-386).
gatgttccaaatattaaga

SEQ ID NO: 56842 - DNA, 19 bp, Homo sapiens
  siRNA target sequence for EIF5A2 (NM_020390.5,392-410).
gattatcaactgatatgca

SEQ ID NO: 56843 - DNA, 19 bp, Homo sapiens
  siRNA target sequence for EIF5A2 (NM_020390.5,409-427).
cattcaagatggttacctt

SEQ ID NO: 56844 - DNA, 19 bp, Homo sapiens
  siRNA target sequence for EIF5A2 (NM_020390.5,436-454).
gacagaaactggtgaagtt

SEQ ID NO: 56845 - DNA, 19 bp, Homo sapiens
  siRNA target sequence for EIF5A2 (NM_020390.5,479-497).
ggtgaactaggcaaagaaa

SEQ ID NO: 56846 - DNA, 19 bp, Homo sapiens
  siRNA target sequence for EIF5A2 (NM_020390.5,480-498).
gtgaactaggcaaagaaat

SEQ ID NO: 56847 - DNA, 19 bp, Homo sapiens
  siRNA target sequence for EIF5A2 (NM_020390.5,544-562).
gtgtgcaatgagtgaagaa

SEQ ID NO: 56848 - DNA, 19 bp, Homo sapiens
  siRNA target sequence for EIF5A2 (NM_020390.5,546-564).
gtgcaatgagtgaagaata

SEQ ID NO: 56849 - DNA, 19 bp, Homo sapiens
  siRNA target sequence for EIF5A2 (NM_020390.5,572-590).
gccataaaaccctgcaaat

SEQ ID NO: 56850 - DNA, 19 bp, Homo sapiens
  siRNA target sequence for FLJ20288 (NM_024668.1,1888-1906).
caggaggacatgaagacta

SEQ ID NO: 56851 - DNA, 19 bp, Homo sapiens
  siRNA target sequence for FLJ20288 (NM_024668.1,1958-1976).
cttgtaagctactacgtaa

SEQ ID NO: 56852 - DNA, 19 bp, Homo sapiens
  siRNA target sequence for FLJ20288 (NM_024668.1,1961-1979).
gtaagctactacgtaaaga

SEQ ID NO: 56853 - DNA, 19 bp, Homo sapiens
  siRNA target sequence for GC20 (NM_005875.1,291-309).
ctaagggtgacgacttact

SEQ ID NO: 56854 - DNA, 19 bp, Homo sapiens
  siRNA target sequence for GC20 (NM_005875.1,315-333).
cagggactgaggattacat

SEQ ID NO: 56855 - DNA, 19 bp, Homo sapiens
  siRNA target sequence for GC20 (NM_005875.1,350-368).
caacggaacggcagaaaga

SEQ ID NO: 56856 - DNA, 19 bp, Homo sapiens
  siRNA target sequence for GC20 (NM_005875.1,385-403).
gggcattgcagatgattat

SEQ ID NO: 56857 - DNA, 19 bp, Homo sapiens
  siRNA target sequence for GC20 (NM_005875.1,471-489).
ctgaatacggagaggttat

SEQ ID NO: 56858 - DNA, 19 bp, Homo sapiens
  siRNA target sequence for GC20 (NM_005875.1,532-550).
cttggaggttggcattgta

SEQ ID NO: 56859 - DNA, 19 bp, Homo sapiens
  siRNA target sequence for IF2 (NM_015904.2,227-245).
ctggtgctgccaaagaaca

SEQ ID NO: 56860 - DNA, 19 bp, Homo sapiens
  siRNA target sequence for IF2 (NM_015904.2,408-426).
ggaattcacctcaaaagat

SEQ ID NO: 56861 - DNA, 19 bp, Homo sapiens
  siRNA target sequence for IF2 (NM_015904.2,409-427).
gaattcacctcaaaagata

SEQ ID NO: 56862 - DNA, 19 bp, Homo sapiens
  siRNA target sequence for IF2 (NM_015904.2,540-558).
gtactctgggagtgatgat

SEQ ID NO: 56863 - DNA, 19 bp, Homo sapiens
  siRNA target sequence for IF2 (NM_015904.2,601-619).
gctcaaaaatcaaataaga

SEQ ID NO: 56864 - DNA, 19 bp, Homo sapiens
  siRNA target sequence for IF2 (NM_015904.2,667-685).
gagcgttcaagaataaatt

SEQ ID NO: 56865 - DNA, 19 bp, Homo sapiens
  siRNA target sequence for IF2 (NM_015904.2,670-688).
cgttcaagaataaattctt

SEQ ID NO: 56866 - DNA, 19 bp, Homo sapiens
  siRNA target sequence for IF2 (NM_015904.2,759-777).
caagccaggtcctaacata

SEQ ID NO: 56867 - DNA, 19 bp, Homo sapiens
  siRNA target sequence for IF2 (NM_015904.2,762-780).
gccaggtcctaacatagaa

SEQ ID NO: 56868 - DNA, 19 bp, Homo sapiens
  siRNA target sequence for IF2 (NM_015904.2,763-781).
ccaggtcctaacatagaaa

SEQ ID NO: 56869 - DNA, 19 bp, Homo sapiens
  siRNA target sequence for IF2 (NM_015904.2,774-792).
catagaaagtgggaatgaa

SEQ ID NO: 56870 - DNA, 19 bp, Homo sapiens
  siRNA target sequence for IF2 (NM_015904.2,796-814).
gatgacgcctccttcaaaa

SEQ ID NO: 56871 - DNA, 19 bp, Homo sapiens
  siRNA target sequence for IF2 (NM_015904.2,799-817).
gacgcctccttcaaaatta

SEQ ID NO: 56872 - DNA, 19 bp, Homo sapiens
  siRNA target sequence for IF2 (NM_015904.2,998-1016).
ctgttgatactggagtaat

SEQ ID NO: 56873 - DNA, 19 bp, Homo sapiens
  siRNA target sequence for IF2 (NM_015904.2,1147-1165).
cctagcaaagccactgtta

SEQ ID NO: 56874 - DNA, 19 bp, Homo sapiens
  siRNA target sequence for IF2 (NM_015904.2,1177-1195).
gaagctctggctaagctta

SEQ ID NO: 56875 - DNA, 19 bp, Homo sapiens
  siRNA target sequence for IF2 (NM_015904.2,1235-1253).
gtataaaacggcttgaaga

SEQ ID NO: 56876 - DNA, 19 bp, Homo sapiens
  siRNA target sequence for IF2 (NM_015904.2,1392-1410).
cagagccgaagctactctt

SEQ ID NO: 56877 - DNA, 19 bp, Homo sapiens
  siRNA target sequence for IF2 (NM_015904.2,1397-1415).
ccgaagctactcttaaact

SEQ ID NO: 56878 - DNA, 19 bp, Homo sapiens
  siRNA target sequence for IF2 (NM_015904.2,1430-1448).
gtgttgaagtgccatcaaa

SEQ ID NO: 56879 - DNA, 19 bp, Homo sapiens
  siRNA target sequence for IF2 (NM_015904.2,1450-1468).
gactctttgccaaagaaga

SEQ ID NO: 56880 - DNA, 19 bp, Homo sapiens
  siRNA target sequence for IF2 (NM_015904.2,1460-1478).
caaagaagaggccaattta

SEQ ID NO: 56881 - DNA, 19 bp, Homo sapiens
  siRNA target sequence for IF2 (NM_015904.2,1504-1522).
ccacagcagctagaaagta

SEQ ID NO: 56882 - DNA, 19 bp, Homo sapiens
  siRNA target sequence for IF2 (NM_015904.2,1865-1883).
cagggaagacattagataa

SEQ ID NO: 56883 - DNA, 19 bp, Homo sapiens
  siRNA target sequence for IF2 (NM_015904.2,1933-1951).
gatcggactaaagaagaaa

SEQ ID NO: 56884 - DNA, 19 bp, Homo sapiens
  siRNA target sequence for IF2 (NM_015904.2,1952-1970).
gggcttatgacaaagcaaa

SEQ ID NO: 56885 - DNA, 19 bp, Homo sapiens
  siRNA target sequence for IF2 (NM_015904.2,1966-1984).
gcaaaacggaggattgaga

SEQ ID NO: 56886 - DNA, 19 bp, Homo sapiens
  siRNA target sequence for IF2 (NM_015904.2,1967-1985).
caaaacggaggattgagaa

SEQ ID NO: 56887 - DNA, 19 bp, Homo sapiens
  siRNA target sequence for IF2 (NM_015904.2,1983-2001).
gaaacggcgacttgaacat

SEQ ID NO: 56888 - DNA, 19 bp, Homo sapiens
  siRNA target sequence for IF2 (NM_015904.2,1987-2005).
cggcgacttgaacatagta

SEQ ID NO: 56889 - DNA, 19 bp, Homo sapiens
  siRNA target sequence for IF2 (NM_015904.2,1989-2007).
gcgacttgaacatagtaaa

SEQ ID NO: 56890 - DNA, 19 bp, Homo sapiens
  siRNA target sequence for IF2 (NM_015904.2,1990-2008).
cgacttgaacatagtaaaa

SEQ ID NO: 56891 - DNA, 19 bp, Homo sapiens
  siRNA target sequence for IF2 (NM_015904.2,2026-2044).
ctaagagcccctattatct

SEQ ID NO: 56892 - DNA, 19 bp, Homo sapiens
  siRNA target sequence for IF2 (NM_015904.2,2091-2109).
gctccgtcacacacatgta

SEQ ID NO: 56893 - DNA, 19 bp, Homo sapiens
  siRNA target sequence for IF2 (NM_015904.2,2126-2144).
gtggtatcacacaacaaat

SEQ ID NO: 56894 - DNA, 19 bp, Homo sapiens
  siRNA target sequence for IF2 (NM_015904.2,2184-2202).
gactaagatgattaaaaat

SEQ ID NO: 56895 - DNA, 19 bp, Homo sapiens
  siRNA target sequence for IF2 (NM_015904.2,2221-2239).
cggattccaggaatgctaa

SEQ ID NO: 56896 - DNA, 19 bp, Homo sapiens
  siRNA target sequence for IF2 (NM_015904.2,2222-2240).
ggattccaggaatgctaat

SEQ ID NO: 56897 - DNA, 19 bp, Homo sapiens
  siRNA target sequence for IF2 (NM_015904.2,2228-2246).
caggaatgctaattattga

SEQ ID NO: 56898 - DNA, 19 bp, Homo sapiens
  siRNA target sequence for IF2 (NM_015904.2,2230-2248).
ggaatgctaattattgata

SEQ ID NO: 56899 - DNA, 19 bp, Homo sapiens
  siRNA target sequence for IF2 (NM_015904.2,2251-2269).
cctgggcatgaatctttca

SEQ ID NO: 56900 - DNA, 19 bp, Homo sapiens
  siRNA target sequence for IF2 (NM_015904.2,2254-2272).
gggcatgaatctttcagta

SEQ ID NO: 56901 - DNA, 19 bp, Homo sapiens
  siRNA target sequence for IF2 (NM_015904.2,2255-2273).
ggcatgaatctttcagtaa

SEQ ID NO: 56902 - DNA, 19 bp, Homo sapiens
  siRNA target sequence for IF2 (NM_015904.2,2285-2303).
gaggaagctctctttgtga

SEQ ID NO: 56903 - DNA, 19 bp, Homo sapiens
  siRNA target sequence for IF2 (NM_015904.2,2304-2322).
cattgccattttagttgtt

SEQ ID NO: 56904 - DNA, 19 bp, Homo sapiens
  siRNA target sequence for IF2 (NM_015904.2,2358-2376).
gtctatcaaccttctcaaa

SEQ ID NO: 56905 - DNA, 19 bp, Homo sapiens
  siRNA target sequence for IF2 (NM_015904.2,2401-2419).
gcactcaataagattgata

SEQ ID NO: 56906 - DNA, 19 bp, Homo sapiens
  siRNA target sequence for IF2 (NM_015904.2,2406-2424).
caataagattgataggtta

SEQ ID NO: 56907 - DNA, 19 bp, Homo sapiens
  siRNA target sequence for IF2 (NM_015904.2,2508-2526).
gcgagcaaaggctattatt

SEQ ID NO: 56908 - DNA, 19 bp, Homo sapiens
  siRNA target sequence for IF2 (NM_015904.2,2578-2596).
gatccccgcacttttgtgt

SEQ ID NO: 56909 - DNA, 19 bp, Homo sapiens
  siRNA target sequence for IF2 (NM_015904.2,2630-2648).
gcatgggaagtctgatcta

SEQ ID NO: 56910 - DNA, 19 bp, Homo sapiens
  siRNA target sequence for IF2 (NM_015904.2,2646-2664).
ctaccttcttgtagagtta

SEQ ID NO: 56911 - DNA, 19 bp, Homo sapiens
  siRNA target sequence for IF2 (NM_015904.2,2649-2667).
ccttcttgtagagttaact

SEQ ID NO: 56912 - DNA, 19 bp, Homo sapiens
  siRNA target sequence for IF2 (NM_015904.2,2714-2732).
cacaggtgatggaggttaa

SEQ ID NO: 56913 - DNA, 19 bp, Homo sapiens
  siRNA target sequence for IF2 (NM_015904.2,2742-2760).
ggggatgggcaccactata

SEQ ID NO: 56914 - DNA, 19 bp, Homo sapiens
  siRNA target sequence for IF2 (NM_015904.2,2745-2763).
gatgggcaccactatagat

SEQ ID NO: 56915 - DNA, 19 bp, Homo sapiens
  siRNA target sequence for IF2 (NM_015904.2,2818-2836).
gtagaagggcccattgtaa

SEQ ID NO: 56916 - DNA, 19 bp, Homo sapiens
  siRNA target sequence for IF2 (NM_015904.2,2826-2844).
gcccattgtaactcagatt

SEQ ID NO: 56917 - DNA, 19 bp, Homo sapiens
  siRNA target sequence for IF2 (NM_015904.2,2882-2900).
gagtgaagaaccagtatga

SEQ ID NO: 56918 - DNA, 19 bp, Homo sapiens
  siRNA target sequence for IF2 (NM_015904.2,2889-2907).
gaaccagtatgaaaagcat

SEQ ID NO: 56919 - DNA, 19 bp, Homo sapiens
  siRNA target sequence for IF2 (NM_015904.2,2892-2910).
ccagtatgaaaagcataaa

SEQ ID NO: 56920 - DNA, 19 bp, Homo sapiens
  siRNA target sequence for IF2 (NM_015904.2,2921-2939).
cagctcagggggtaaagat

SEQ ID NO: 56921 - DNA, 19 bp, Homo sapiens
  siRNA target sequence for IF2 (NM_015904.2,2924-2942).
ctcagggggtaaagattct

SEQ ID NO: 56922 - DNA, 19 bp, Homo sapiens
  siRNA target sequence for IF2 (NM_015904.2,2930-2948).
gggtaaagattcttggaaa

SEQ ID NO: 56923 - DNA, 19 bp, Homo sapiens
  siRNA target sequence for IF2 (NM_015904.2,2978-2996).
ccctccttgtggcttataa

SEQ ID NO: 56924 - DNA, 19 bp, Homo sapiens
  siRNA target sequence for IF2 (NM_015904.2,3037-3055).
gagttaaagcagacactaa

SEQ ID NO: 56925 - DNA, 19 bp, Homo sapiens
  siRNA target sequence for IF2 (NM_015904.2,3048-3066).
gacactaaatgctatcaaa

SEQ ID NO: 56926 - DNA, 19 bp, Homo sapiens
  siRNA target sequence for IF2 (NM_015904.2,3114-3132).
ggaagctctactggaattt

SEQ ID NO: 56927 - DNA, 19 bp, Homo sapiens
  siRNA target sequence for IF2 (NM_015904.2,3148-3166).
gtgccctatgcaggaatta

SEQ ID NO: 56928 - DNA, 19 bp, Homo sapiens
  siRNA target sequence for IF2 (NM_015904.2,3216-3234).
ggaacatgaccctcagtat

SEQ ID NO: 56929 - DNA, 19 bp, Homo sapiens
  siRNA target sequence for IF2 (NM_015904.2,3225-3243).
ccctcagtatgcagtaatt

SEQ ID NO: 56930 - DNA, 19 bp, Homo sapiens
  siRNA target sequence for IF2 (NM_015904.2,3289-3307).
gatagtttaggagttagaa

SEQ ID NO: 56931 - DNA, 19 bp, Homo sapiens
  siRNA target sequence for IF2 (NM_015904.2,3340-3358).
gatgcctttacaaaatata

SEQ ID NO: 56932 - DNA, 19 bp, Homo sapiens
  siRNA target sequence for IF2 (NM_015904.2,3430-3448).
ctccctcagtacattttta

SEQ ID NO: 56933 - DNA, 19 bp, Homo sapiens
  siRNA target sequence for IF2 (NM_015904.2,3452-3470).
ctcgagatccgatagtgat

SEQ ID NO: 56934 - DNA, 19 bp, Homo sapiens
  siRNA target sequence for IF2 (NM_015904.2,3538-3556).
gttgacatcggaatagtaa

SEQ ID NO: 56935 - DNA, 19 bp, Homo sapiens
  siRNA target sequence for IF2 (NM_015904.2,3541-3559).
gacatcggaatagtaacaa

SEQ ID NO: 56936 - DNA, 19 bp, Homo sapiens
  siRNA target sequence for IF2 (NM_015904.2,3543-3561).
catcggaatagtaacaagt

SEQ ID NO: 56937 - DNA, 19 bp, Homo sapiens
  siRNA target sequence for IF2 (NM_015904.2,3546-3564).
cggaatagtaacaagtatt

SEQ ID NO: 56938 - DNA, 19 bp, Homo sapiens
  siRNA target sequence for IF2 (NM_015904.2,3614-3632).
gtgtaaaaatagaacctat

SEQ ID NO: 56939 - DNA, 19 bp, Homo sapiens
  siRNA target sequence for IF2 (NM_015904.2,3637-3655).
ggtgagtcacccaaaatgt

SEQ ID NO: 56940 - DNA, 19 bp, Homo sapiens
  siRNA target sequence for IF2 (NM_015904.2,3708-3726).
gtccattgatgcactcaaa

SEQ ID NO: 56941 - DNA, 19 bp, Homo sapiens
  siRNA target sequence for ITGB4BP (NM_002212.2,82-100).
gagcttcgttcgagaacaa

SEQ ID NO: 56942 - DNA, 19 bp, Homo sapiens
  siRNA target sequence for ITGB4BP (NM_002212.2,84-102).
gcttcgttcgagaacaact

SEQ ID NO: 56943 - DNA, 19 bp, Homo sapiens
  siRNA target sequence for ITGB4BP (NM_002212.2,190-208).
gcgagctctccgataccat

SEQ ID NO: 56944 - DNA, 19 bp, Homo sapiens
  siRNA target sequence for ITGB4BP (NM_002212.2,279-297).
ctcctggtacccaacaata

SEQ ID NO: 56945 - DNA, 19 bp, Homo sapiens
  siRNA target sequence for ITGB4BP (NM_002212.2,336-354).
ccagacacagtgcagatta

SEQ ID NO: 56946 - DNA, 19 bp, Homo sapiens
  siRNA target sequence for ITGB4BP (NM_002212.2,552-570).
gtgcatcccaagacttcaa

SEQ ID NO: 56947 - DNA, 19 bp, Homo sapiens
  siRNA target sequence for ITGB4BP (NM_002212.2,559-577).
ccaagacttcaattgaaga

SEQ ID NO: 56948 - DNA, 19 bp, Homo sapiens
  siRNA target sequence for KIAA0664 (NM_015229.2,213-231).
ccggccaggaagtcattgt

SEQ ID NO: 56949 - DNA, 19 bp, Homo sapiens
  siRNA target sequence for KIAA0664 (NM_015229.2,243-261).
cgggcttttctgtgaagat

SEQ ID NO: 56950 - DNA, 19 bp, Homo sapiens
  siRNA target sequence for KIAA0664 (NM_015229.2,873-891).
ggggcttttacctgaatca

SEQ ID NO: 56951 - DNA, 19 bp, Homo sapiens
  siRNA target sequence for KIAA0664 (NM_015229.2,886-904).
gaatcagtccacagcttat

SEQ ID NO: 56952 - DNA, 19 bp, Homo sapiens
  siRNA target sequence for KIAA0664 (NM_015229.2,1238-1256).
cgagaaagggccatattca

SEQ ID NO: 56953 - DNA, 19 bp, Homo sapiens
  siRNA target sequence for KIAA0664 (NM_015229.2,1753-1771).
cgagtgcaagggcatcatt

SEQ ID NO: 56954 - DNA, 19 bp, Homo sapiens
  siRNA target sequence for KIAA0664 (NM_015229.2,2023-2041).
ctcctccctggaaaatggt

SEQ ID NO: 56955 - DNA, 19 bp, Homo sapiens
  siRNA target sequence for KIAA0664 (NM_015229.2,2242-2260).
cttcgacattcgcttcaat

SEQ ID NO: 56956 - DNA, 19 bp, Homo sapiens
  siRNA target sequence for KIAA0664 (NM_015229.2,2562-2580).
gctcggccaagcacatctt

SEQ ID NO: 56957 - DNA, 19 bp, Homo sapiens
  siRNA target sequence for KIAA0664 (NM_015229.2,2565-2583).
cggccaagcacatcttcaa

SEQ ID NO: 56958 - DNA, 19 bp, Homo sapiens
  siRNA target sequence for KIAA0664 (NM_015229.2,2575-2593).
catcttcaagacgtactta

SEQ ID NO: 56959 - DNA, 19 bp, Homo sapiens
  siRNA target sequence for LAMA5 (NM_005560.3,531-549).
cctacgtcctcatcaagtt

SEQ ID NO: 56960 - DNA, 19 bp, Homo sapiens
  siRNA target sequence for LAMA5 (NM_005560.3,532-550).
ctacgtcctcatcaagttt

SEQ ID NO: 56961 - DNA, 19 bp, Homo sapiens
  siRNA target sequence for LAMA5 (NM_005560.3,1130-1148).
gagtgccagtcctgtaact

SEQ ID NO: 56962 - DNA, 19 bp, Homo sapiens
  siRNA target sequence for LAMA5 (NM_005560.3,1490-1508).
ccctcgtcctccaatgaca

SEQ ID NO: 56963 - DNA, 19 bp, Homo sapiens
  siRNA target sequence for LAMA5 (NM_005560.3,2521-2539).
ggatcaggctgactatttt

SEQ ID NO: 56964 - DNA, 19 bp, Homo sapiens
  siRNA target sequence for LAMA5 (NM_005560.3,2753-2771).
ctcgagttcgagaacttca

SEQ ID NO: 56965 - DNA, 19 bp, Homo sapiens
  siRNA target sequence for LAMA5 (NM_005560.3,4243-4261).
gcccctggataaatcctat

SEQ ID NO: 56966 - DNA, 19 bp, Homo sapiens
  siRNA target sequence for LAMA5 (NM_005560.3,4346-4364).
ctctccctcttctataaca

SEQ ID NO: 56967 - DNA, 19 bp, Homo sapiens
  siRNA target sequence for LAMA5 (NM_005560.3,4845-4863).
cagggcagtgctactgtaa

SEQ ID NO: 56968 - DNA, 19 bp, Homo sapiens
  siRNA target sequence for LAMA5 (NM_005560.3,6229-6247).
ccaggagggacattttggt

SEQ ID NO: 56969 - DNA, 19 bp, Homo sapiens
  siRNA target sequence for LAMA5 (NM_005560.3,6230-6248).
caggagggacattttggtt

SEQ ID NO: 56970 - DNA, 19 bp, Homo sapiens
  siRNA target sequence for LAMA5 (NM_005560.3,6235-6253).
gggacattttggtttcgat

SEQ ID NO: 56971 - DNA, 19 bp, Homo sapiens
  siRNA target sequence for LAMA5 (NM_005560.3,6637-6655).
gcaactgcgtggcatcaat

SEQ ID NO: 56972 - DNA, 19 bp, Homo sapiens
  siRNA target sequence for LAMA5 (NM_005560.3,8397-8415).
ccgaggatcgctttgtgat

SEQ ID NO: 56973 - DNA, 19 bp, Homo sapiens
  siRNA target sequence for LAMA5 (NM_005560.3,8402-8420).
gatcgctttgtgatgtaca

SEQ ID NO: 56974 - DNA, 19 bp, Homo sapiens
  siRNA target sequence for LAMA5 (NM_005560.3,8679-8697).
cagacgacttcgtcttcta

SEQ ID NO: 56975 - DNA, 19 bp, Homo sapiens
  siRNA target sequence for LAMA5 (NM_005560.3,9055-9073).
cagcctcgtgctgttgtat

SEQ ID NO: 56976 - DNA, 19 bp, Homo sapiens
  siRNA target sequence for LAMA5 (NM_005560.3,9057-9075).
gcctcgtgctgttgtatga

SEQ ID NO: 56977 - DNA, 19 bp, Homo sapiens
  siRNA target sequence for LAMA5 (NM_005560.3,9059-9077).
ctcgtgctgttgtatgact

SEQ ID NO: 56978 - DNA, 19 bp, Homo sapiens
  siRNA target sequence for LAMA5 (NM_005560.3,9061-9079).
cgtgctgttgtatgacttt

SEQ ID NO: 56979 - DNA, 19 bp, Homo sapiens
  siRNA target sequence for LAMA5 (NM_005560.3,9217-9235).
cgtggagcaggacaatgat

SEQ ID NO: 56980 - DNA, 19 bp, Homo sapiens
  siRNA target sequence for LAMA5 (NM_005560.3,9699-9717).
cgggagtctggctgtatgt

SEQ ID NO: 56981 - DNA, 19 bp, Homo sapiens
  siRNA target sequence for LAMA5 (NM_005560.3,9816-9834).
ctgagtctggcaccattta

SEQ ID NO: 56982 - DNA, 19 bp, Homo sapiens
  siRNA target sequence for LAMA5 (NM_005560.3,9880-9898).
gggcccacagcgcgtattt

SEQ ID NO: 56983 - DNA, 19 bp, Homo sapiens
  siRNA target sequence for LAMA5 (NM_005560.3,9882-9900).
gcccacagcgcgtatttga

SEQ ID NO: 56984 - DNA, 19 bp, Homo sapiens
  siRNA target sequence for LAMA5 (NM_005560.3,9883-9901).
cccacagcgcgtatttgat

SEQ ID NO: 56985 - DNA, 19 bp, Homo sapiens
  siRNA target sequence for LAMA5 (NM_005560.3,9885-9903).
cacagcgcgtatttgatct

SEQ ID NO: 56986 - DNA, 19 bp, Homo sapiens
  siRNA target sequence for LAMA5 (NM_005560.3,10725-10743).
cagtcaccggactgatctt

SEQ ID NO: 56987 - DNA, 19 bp, Homo sapiens
  siRNA target sequence for LAMA5 (NM_005560.3,10885-10903).
ccggctagcggtgatgaaa

SEQ ID NO: 56988 - DNA, 19 bp, Homo sapiens
  siRNA target sequence for LAMA5 (NM_005560.3,10886-10904).
cggctagcggtgatgaaaa

SEQ ID NO: 56989 - DNA, 19 bp, Homo sapiens
  siRNA target sequence for LRIG2 (NM_014813.1,237-255).
gctggggtgtcgatctaga

SEQ ID NO: 56990 - DNA, 19 bp, Homo sapiens
  siRNA target sequence for LRIG2 (NM_014813.1,429-447).
cgctatcctggatttcagt

SEQ ID NO: 56991 - DNA, 19 bp, Homo sapiens
  siRNA target sequence for LRIG2 (NM_014813.1,446-464).
gtcataatcggttgtctaa

SEQ ID NO: 56992 - DNA, 19 bp, Homo sapiens
  siRNA target sequence for LRIG2 (NM_014813.1,448-466).
cataatcggttgtctaact

SEQ ID NO: 56993 - DNA, 19 bp, Homo sapiens
  siRNA target sequence for LRIG2 (NM_014813.1,544-562).
ggagaacctacatctaata

SEQ ID NO: 56994 - DNA, 19 bp, Homo sapiens
  siRNA target sequence for LRIG2 (NM_014813.1,575-593).
cattagtccataatataat

SEQ ID NO: 56995 - DNA, 19 bp, Homo sapiens
  siRNA target sequence for LRIG2 (NM_014813.1,648-666).
cctcagctcaaatataata

SEQ ID NO: 56996 - DNA, 19 bp, Homo sapiens
  siRNA target sequence for LRIG2 (NM_014813.1,653-671).
gctcaaatataatatcaga

SEQ ID NO: 56997 - DNA, 19 bp, Homo sapiens
  siRNA target sequence for LRIG2 (NM_014813.1,675-693).
caagacatcttcatttcct

SEQ ID NO: 56998 - DNA, 19 bp, Homo sapiens
  siRNA target sequence for LRIG2 (NM_014813.1,692-710).
ctcgcatgcagcttaaata

SEQ ID NO: 56999 - DNA, 19 bp, Homo sapiens
  siRNA target sequence for LRIG2 (NM_014813.1,695-713).
gcatgcagcttaaatacct

SEQ ID NO: 57000 - DNA, 19 bp, Homo sapiens
  siRNA target sequence for LRIG2 (NM_014813.1,748-766).
gctggttgcttcgataatt

SEQ ID NO: 57001 - DNA, 19 bp, Homo sapiens
  siRNA target sequence for LRIG2 (NM_014813.1,749-767).
ctggttgcttcgataattt

SEQ ID NO: 57002 - DNA, 19 bp, Homo sapiens
  siRNA target sequence for LRIG2 (NM_014813.1,751-769).
ggttgcttcgataatttat

SEQ ID NO: 57003 - DNA, 19 bp, Homo sapiens
  siRNA target sequence for LRIG2 (NM_014813.1,756-774).
cttcgataatttatcaagt

SEQ ID NO: 57004 - DNA, 19 bp, Homo sapiens
  siRNA target sequence for LRIG2 (NM_014813.1,773-791).
gttccttattagtggtaaa

SEQ ID NO: 57005 - DNA, 19 bp, Homo sapiens
  siRNA target sequence for LRIG2 (NM_014813.1,776-794).
ccttattagtggtaaagtt

SEQ ID NO: 57006 - DNA, 19 bp, Homo sapiens
  siRNA target sequence for LRIG2 (NM_014813.1,777-795).
cttattagtggtaaagtta

SEQ ID NO: 57007 - DNA, 19 bp, Homo sapiens
  siRNA target sequence for LRIG2 (NM_014813.1,904-922).
caagggcttgactccttaa

SEQ ID NO: 57008 - DNA, 19 bp, Homo sapiens
  siRNA target sequence for LRIG2 (NM_014813.1,910-928).
cttgactccttaagatctt

SEQ ID NO: 57009 - DNA, 19 bp, Homo sapiens
  siRNA target sequence for LRIG2 (NM_014813.1,913-931).
gactccttaagatctttga

SEQ ID NO: 57010 - DNA, 19 bp, Homo sapiens
  siRNA target sequence for LRIG2 (NM_014813.1,937-955).
cagcggaatggaattagca

SEQ ID NO: 57011 - DNA, 19 bp, Homo sapiens
  siRNA target sequence for LRIG2 (NM_014813.1,1080-1098).
gagccagaatgctattgaa

SEQ ID NO: 57012 - DNA, 19 bp, Homo sapiens
  siRNA target sequence for LRIG2 (NM_014813.1,1135-1153).
ctatccgaacttgatttgt

SEQ ID NO: 57013 - DNA, 19 bp, Homo sapiens
  siRNA target sequence for LRIG2 (NM_014813.1,1165-1183).
ctgacccgcctggatgaat

SEQ ID NO: 57014 - DNA, 19 bp, Homo sapiens
  siRNA target sequence for LRIG2 (NM_014813.1,1230-1248).
caacagagtcactcatatt

SEQ ID NO: 57015 - DNA, 19 bp, Homo sapiens
  siRNA target sequence for LRIG2 (NM_014813.1,1349-1367).
gactcacaagtctcactaa

SEQ ID NO: 57016 - DNA, 19 bp, Homo sapiens
  siRNA target sequence for LRIG2 (NM_014813.1,1355-1373).
caagtctcactaaactaat

SEQ ID NO: 57017 - DNA, 19 bp, Homo sapiens
  siRNA target sequence for LRIG2 (NM_014813.1,1382-1400).
gaaaccagattaagtcaat

SEQ ID NO: 57018 - DNA, 19 bp, Homo sapiens
  siRNA target sequence for LRIG2 (NM_014813.1,1411-1429).
gcattcattggtcttgaat

SEQ ID NO: 57019 - DNA, 19 bp, Homo sapiens
  siRNA target sequence for LRIG2 (NM_014813.1,1437-1455).
gcatctagatttgaacaat

SEQ ID NO: 57020 - DNA, 19 bp, Homo sapiens
  siRNA target sequence for LRIG2 (NM_014813.1,1483-1501).
gctttttctcagactcatt

SEQ ID NO: 57021 - DNA, 19 bp, Homo sapiens
  siRNA target sequence for LRIG2 (NM_014813.1,1496-1514).
ctcatttaaaagaactgat

SEQ ID NO: 57022 - DNA, 19 bp, Homo sapiens
  siRNA target sequence for LRIG2 (NM_014813.1,1534-1552).
ctctgtgactgccatttga

SEQ ID NO: 57023 - DNA, 19 bp, Homo sapiens
  siRNA target sequence for LRIG2 (NM_014813.1,1561-1579).
cttcaatggttggttgata

SEQ ID NO: 57024 - DNA, 19 bp, Homo sapiens
  siRNA target sequence for LRIG2 (NM_014813.1,1564-1582).
caatggttggttgataata

SEQ ID NO: 57025 - DNA, 19 bp, Homo sapiens
  siRNA target sequence for LRIG2 (NM_014813.1,1576-1594).
gataataactttcaacatt

SEQ ID NO: 57026 - DNA, 19 bp, Homo sapiens
  siRNA target sequence for LRIG2 (NM_014813.1,1625-1643).
ggctagcagggcaaagcat

SEQ ID NO: 57027 - DNA, 19 bp, Homo sapiens
  siRNA target sequence for LRIG2 (NM_014813.1,1701-1719).
gacacatcctgaaaccata

SEQ ID NO: 57028 - DNA, 19 bp, Homo sapiens
  siRNA target sequence for LRIG2 (NM_014813.1,1726-1744).
ctaagaggcatgaatgtga

SEQ ID NO: 57029 - DNA, 19 bp, Homo sapiens
  siRNA target sequence for LRIG2 (NM_014813.1,1822-1840).
gacgtggatactgagaatt

SEQ ID NO: 57030 - DNA, 19 bp, Homo sapiens
  siRNA target sequence for LRIG2 (NM_014813.1,1937-1955).
gtattgttactaatcactt

SEQ ID NO: 57031 - DNA, 19 bp, Homo sapiens
  siRNA target sequence for LRIG2 (NM_014813.1,1946-1964).
ctaatcactttggttctaa

SEQ ID NO: 57032 - DNA, 19 bp, Homo sapiens
  siRNA target sequence for LRIG2 (NM_014813.1,2018-2036).
cgccaatggatctgactat

SEQ ID NO: 57033 - DNA, 19 bp, Homo sapiens
  siRNA target sequence for LRIG2 (NM_014813.1,2045-2063).
gtgccatggccagattaga

SEQ ID NO: 57034 - DNA, 19 bp, Homo sapiens
  siRNA target sequence for LRIG2 (NM_014813.1,2047-2065).
gccatggccagattagaat

SEQ ID NO: 57035 - DNA, 19 bp, Homo sapiens
  siRNA target sequence for LRIG2 (NM_014813.1,2049-2067).
catggccagattagaatgt

SEQ ID NO: 57036 - DNA, 19 bp, Homo sapiens
  siRNA target sequence for LRIG2 (NM_014813.1,2200-2218).
gaagatatgggaatctata

SEQ ID NO: 57037 - DNA, 19 bp, Homo sapiens
  siRNA target sequence for LRIG2 (NM_014813.1,2255-2273).
caaatgcttccctaacagt

SEQ ID NO: 57038 - DNA, 19 bp, Homo sapiens
  siRNA target sequence for LRIG2 (NM_014813.1,2278-2296).
gagacaccctcatttatta

SEQ ID NO: 57039 - DNA, 19 bp, Homo sapiens
  siRNA target sequence for LRIG2 (NM_014813.1,2327-2345).
gtgaaactgcggtgttaca

SEQ ID NO: 57040 - DNA, 19 bp, Homo sapiens
  siRNA target sequence for LRIG2 (NM_014813.1,2375-2393).
gtctcaactggactaaaga

SEQ ID NO: 57041 - DNA, 19 bp, Homo sapiens
  siRNA target sequence for LRIG2 (NM_014813.1,2412-2430).
gacagaacgacatttcttt

SEQ ID NO: 57042 - DNA, 19 bp, Homo sapiens
  siRNA target sequence for LRIG2 (NM_014813.1,2483-2501).
ggaaatatacctgcattat

SEQ ID NO: 57043 - DNA, 19 bp, Homo sapiens
  siRNA target sequence for LRIG2 (NM_014813.1,2519-2537).
cagaacgtggccacattta

SEQ ID NO: 57044 - DNA, 19 bp, Homo sapiens
  siRNA target sequence for LRIG2 (NM_014813.1,2524-2542).
cgtggccacatttacctaa

SEQ ID NO: 57045 - DNA, 19 bp, Homo sapiens
  siRNA target sequence for LRIG2 (NM_014813.1,2525-2543).
gtggccacatttacctaaa

SEQ ID NO: 57046 - DNA, 19 bp, Homo sapiens
  siRNA target sequence for LRIG2 (NM_014813.1,2645-2663).
gtgttgttggcacttcttt

SEQ ID NO: 57047 - DNA, 19 bp, Homo sapiens
  siRNA target sequence for LRIG2 (NM_014813.1,2647-2665).
gttgttggcacttctttga

SEQ ID NO: 57048 - DNA, 19 bp, Homo sapiens
  siRNA target sequence for LRIG2 (NM_014813.1,2650-2668).
gttggcacttctttgatct

SEQ ID NO: 57049 - DNA, 19 bp, Homo sapiens
  siRNA target sequence for LRIG2 (NM_014813.1,2664-2682).
gatctgggtcattgttatt

SEQ ID NO: 57050 - DNA, 19 bp, Homo sapiens
  siRNA target sequence for LRIG2 (NM_014813.1,2669-2687).
gggtcattgttatttacca

SEQ ID NO: 57051 - DNA, 19 bp, Homo sapiens
  siRNA target sequence for LRIG2 (NM_014813.1,2841-2859).
gcctcctgccaatggatat

SEQ ID NO: 57052 - DNA, 19 bp, Homo sapiens
  siRNA target sequence for LRIG2 (NM_014813.1,2842-2860).
cctcctgccaatggatata

SEQ ID NO: 57053 - DNA, 19 bp, Homo sapiens
  siRNA target sequence for LRIG2 (NM_014813.1,2843-2861).
ctcctgccaatggatatat

SEQ ID NO: 57054 - DNA, 19 bp, Homo sapiens
  siRNA target sequence for LRIG2 (NM_014813.1,2846-2864).
ctgccaatggatatataca

SEQ ID NO: 57055 - DNA, 19 bp, Homo sapiens
  siRNA target sequence for LRIG2 (NM_014813.1,2887-2905).
ggtacccgggtgatttgct

SEQ ID NO: 57056 - DNA, 19 bp, Homo sapiens
  siRNA target sequence for LRIG2 (NM_014813.1,2893-2911).
cgggtgatttgctcagatt

SEQ ID NO: 57057 - DNA, 19 bp, Homo sapiens
  siRNA target sequence for LRIG2 (NM_014813.1,2937-2955).
caggacccgagaatactgt

SEQ ID NO: 57058 - DNA, 19 bp, Homo sapiens
  siRNA target sequence for LRIG2 (NM_014813.1,3043-3061).
catcctccccaggatacta

SEQ ID NO: 57059 - DNA, 19 bp, Homo sapiens
  siRNA target sequence for LRIG2 (NM_014813.1,3157-3175).
cagatgagcggtgaaacat

SEQ ID NO: 57060 - DNA, 19 bp, Homo sapiens
  siRNA target sequence for LRIG2 (NM_014813.1,3192-3210).
gaacataaacagagaacta

SEQ ID NO: 57061 - DNA, 19 bp, Homo sapiens
  siRNA target sequence for LRIG2 (NM_014813.1,3329-3347).
ggttacaggatcatgcttt

SEQ ID NO: 57062 - DNA, 19 bp, Homo sapiens
  siRNA target sequence for LRIG2 (NM_014813.1,3330-3348).
gttacaggatcatgctttt

SEQ ID NO: 57063 - DNA, 19 bp, Homo sapiens
  siRNA target sequence for LRIG2 (NM_014813.1,3356-3374).
gtaggactcggaacattca

SEQ ID NO: 57064 - DNA, 19 bp, Homo sapiens
  siRNA target sequence for LRIG2 (NM_014813.1,3359-3377).
ggactcggaacattcaaga

SEQ ID NO: 57065 - DNA, 19 bp, Homo sapiens
  siRNA target sequence for LRIG2 (NM_014813.1,3360-3378).
gactcggaacattcaagat

SEQ ID NO: 57066 - DNA, 19 bp, Homo sapiens
  siRNA target sequence for MFHAS1 (NM_004225.1,179-197).
ccaacctcggggacattga

SEQ ID NO: 57067 - DNA, 19 bp, Homo sapiens
  siRNA target sequence for MFHAS1 (NM_004225.1,761-779).
gcctcatgctagacaacaa

SEQ ID NO: 57068 - DNA, 19 bp, Homo sapiens
  siRNA target sequence for MFHAS1 (NM_004225.1,1099-1117).
gtgggtttgtggaagatca

SEQ ID NO: 57069 - DNA, 19 bp, Homo sapiens
  siRNA target sequence for MFHAS1 (NM_004225.1,1103-1121).
gtttgtggaagatcaaaga

SEQ ID NO: 57070 - DNA, 19 bp, Homo sapiens
  siRNA target sequence for MFHAS1 (NM_004225.1,1414-1432).
cggttcatcgtgtatgact

SEQ ID NO: 57071 - DNA, 19 bp, Homo sapiens
  siRNA target sequence for MFHAS1 (NM_004225.1,1415-1433).
ggttcatcgtgtatgactt

SEQ ID NO: 57072 - DNA, 19 bp, Homo sapiens
  siRNA target sequence for MFHAS1 (NM_004225.1,1416-1434).
gttcatcgtgtatgactta

SEQ ID NO: 57073 - DNA, 19 bp, Homo sapiens
  siRNA target sequence for MFHAS1 (NM_004225.1,1522-1540).
gagcctcgccactttccta

SEQ ID NO: 57074 - DNA, 19 bp, Homo sapiens
  siRNA target sequence for MFHAS1 (NM_004225.1,1814-1832).
ggcgcaaggcccattttca

SEQ ID NO: 57075 - DNA, 19 bp, Homo sapiens
  siRNA target sequence for MFHAS1 (NM_004225.1,1815-1833).
gcgcaaggcccattttcaa

SEQ ID NO: 57076 - DNA, 19 bp, Homo sapiens
  siRNA target sequence for MFHAS1 (NM_004225.1,1816-1834).
cgcaaggcccattttcaat

SEQ ID NO: 57077 - DNA, 19 bp, Homo sapiens
  siRNA target sequence for MFHAS1 (NM_004225.1,1817-1835).
gcaaggcccattttcaata

SEQ ID NO: 57078 - DNA, 19 bp, Homo sapiens
  siRNA target sequence for MFHAS1 (NM_004225.1,1907-1925).
gacgccttcgggacaagtt

SEQ ID NO: 57079 - DNA, 19 bp, Homo sapiens
  siRNA target sequence for MFHAS1 (NM_004225.1,1937-1955).
ctgagcaccgagagatctt

SEQ ID NO: 57080 - DNA, 19 bp, Homo sapiens
  siRNA target sequence for MFHAS1 (NM_004225.1,2129-2147).
gcggcaagctactctactt

SEQ ID NO: 57081 - DNA, 19 bp, Homo sapiens
  siRNA target sequence for MFHAS1 (NM_004225.1,2130-2148).
cggcaagctactctacttt

SEQ ID NO: 57082 - DNA, 19 bp, Homo sapiens
  siRNA target sequence for MFHAS1 (NM_004225.1,2132-2150).
gcaagctactctactttga

SEQ ID NO: 57083 - DNA, 19 bp, Homo sapiens
  siRNA target sequence for MFHAS1 (NM_004225.1,2234-2252).
cctctttgctgctgcataa

SEQ ID NO: 57084 - DNA, 19 bp, Homo sapiens
  siRNA target sequence for MFHAS1 (NM_004225.1,2345-2363).
ccacccagctccatcagta

SEQ ID NO: 57085 - DNA, 19 bp, Homo sapiens
  siRNA target sequence for MFHAS1 (NM_004225.1,2348-2366).
cccagctccatcagtatgt

SEQ ID NO: 57086 - DNA, 19 bp, Homo sapiens
  siRNA target sequence for MFHAS1 (NM_004225.1,2507-2525).
ccaagggcaagcctttgaa

SEQ ID NO: 57087 - DNA, 19 bp, Homo sapiens
  siRNA target sequence for MFHAS1 (NM_004225.1,2541-2559).
gtacaagttcccatgctat

SEQ ID NO: 57088 - DNA, 19 bp, Homo sapiens
  siRNA target sequence for MFHAS1 (NM_004225.1,2640-2658).
gcagattgaatatagcttt

SEQ ID NO: 57089 - DNA, 19 bp, Homo sapiens
  siRNA target sequence for MFHAS1 (NM_004225.1,2690-2708).
gctacagtgtccagatcaa

SEQ ID NO: 57090 - DNA, 19 bp, Homo sapiens
  siRNA target sequence for MFHAS1 (NM_004225.1,2721-2739).
gcacaggtcggatggtaaa

SEQ ID NO: 57091 - DNA, 19 bp, Homo sapiens
  siRNA target sequence for MFHAS1 (NM_004225.1,2724-2742).
caggtcggatggtaaattt

SEQ ID NO: 57092 - DNA, 19 bp, Homo sapiens
  siRNA target sequence for MFHAS1 (NM_004225.1,2839-2857).
gcatcattaccaaatatat

SEQ ID NO: 57093 - DNA, 19 bp, Homo sapiens
  siRNA target sequence for MFHAS1 (NM_004225.1,2938-2956).
gtgcacattctctgttcta

SEQ ID NO: 57094 - DNA, 19 bp, Homo sapiens
  siRNA target sequence for MFHAS1 (NM_004225.1,2941-2959).
cacattctctgttctaagt

SEQ ID NO: 57095 - DNA, 19 bp, Homo sapiens
  siRNA target sequence for MFHAS1 (NM_004225.1,2976-2994).
gcccaatccacatgctttt

SEQ ID NO: 57096 - DNA, 19 bp, Homo sapiens
  siRNA target sequence for MFHAS1 (NM_004225.1,3057-3075).
cggcagcgagcgagtaaat

SEQ ID NO: 57097 - DNA, 19 bp, Homo sapiens
  siRNA target sequence for MFHAS1 (NM_004225.1,3059-3077).
gcagcgagcgagtaaatgt

SEQ ID NO: 57098 - DNA, 19 bp, Homo sapiens
  siRNA target sequence for MFHAS1 (NM_004225.1,3060-3078).
cagcgagcgagtaaatgtt

SEQ ID NO: 57099 - DNA, 19 bp, Homo sapiens
  siRNA target sequence for MGC11102 (NM_032325.2,613-631).
gctgagaaacacaacaaca

SEQ ID NO: 57100 - DNA, 19 bp, Homo sapiens
  siRNA target sequence for MGC11102 (NM_032325.2,684-702).
ggagtccagctcagaagat

SEQ ID NO: 57101 - DNA, 19 bp, Homo sapiens
  siRNA target sequence for MGC11102 (NM_032325.2,723-741).
cacaaaccgcagacagtat

SEQ ID NO: 57102 - DNA, 19 bp, Homo sapiens
  siRNA target sequence for MGC11102 (NM_032325.2,725-743).
caaaccgcagacagtatca

SEQ ID NO: 57103 - DNA, 19 bp, Homo sapiens
  siRNA target sequence for MGC3207 (NM_032285.1,788-806).
ccggcaaggagatcattat

SEQ ID NO: 57104 - DNA, 19 bp, Homo sapiens
  siRNA target sequence for MGC3207 (NM_032285.1,789-807).
cggcaaggagatcattatt

SEQ ID NO: 57105 - DNA, 19 bp, Homo sapiens
  siRNA target sequence for MGC3207 (NM_032285.1,791-809).
gcaaggagatcattattga

SEQ ID NO: 57106 - DNA, 19 bp, Homo sapiens
  siRNA target sequence for MGC3207 (NM_032285.1,823-841).
caggagctgaccgatgtta

SEQ ID NO: 57107 - DNA, 19 bp, Homo sapiens
  siRNA target sequence for MGC3207 (NM_032285.1,825-843).
ggagctgaccgatgttaat

SEQ ID NO: 57108 - DNA, 19 bp, Homo sapiens
  siRNA target sequence for MRPL49 (NM_004927.2,206-224).
gtggagtctgtggatgaat

SEQ ID NO: 57109 - DNA, 19 bp, Homo sapiens
  siRNA target sequence for MRPL49 (NM_004927.2,270-288).
ccccaaagcatgaacatta

SEQ ID NO: 57110 - DNA, 19 bp, Homo sapiens
  siRNA target sequence for MRPL49 (NM_004927.2,271-289).
cccaaagcatgaacattat

SEQ ID NO: 57111 - DNA, 19 bp, Homo sapiens
  siRNA target sequence for MRPL49 (NM_004927.2,331-349).
caacctgccttactttgta

SEQ ID NO: 57112 - DNA, 19 bp, Homo sapiens
  siRNA target sequence for MRPL49 (NM_004927.2,354-372).
gctctcggatgcacaacat

SEQ ID NO: 57113 - DNA, 19 bp, Homo sapiens
  siRNA target sequence for MRPL49 (NM_004927.2,458-476).
gacgtggaagattttctga

SEQ ID NO: 57114 - DNA, 19 bp, Homo sapiens
  siRNA target sequence for MRPL49 (NM_004927.2,534-552).
ggatcaagggctactttga

SEQ ID NO: 57115 - DNA, 19 bp, Homo sapiens
  siRNA target sequence for MTIF2 (NM_002453.1,303-321).
gctacgatttcacactatt

SEQ ID NO: 57116 - DNA, 19 bp, Homo sapiens
  siRNA target sequence for MTIF2 (NM_002453.1,304-322).
ctacgatttcacactattt

SEQ ID NO: 57117 - DNA, 19 bp, Homo sapiens
  siRNA target sequence for MTIF2 (NM_002453.1,461-479).
ctcagtataggcttctagt

SEQ ID NO: 57118 - DNA, 19 bp, Homo sapiens
  siRNA target sequence for MTIF2 (NM_002453.1,463-481).
cagtataggcttctagtaa

SEQ ID NO: 57119 - DNA, 19 bp, Homo sapiens
  siRNA target sequence for MTIF2 (NM_002453.1,465-483).
gtataggcttctagtaaca

SEQ ID NO: 57120 - DNA, 19 bp, Homo sapiens
  siRNA target sequence for MTIF2 (NM_002453.1,509-527).
ctcagttatcttcaacaaa

SEQ ID NO: 57121 - DNA, 19 bp, Homo sapiens
  siRNA target sequence for MTIF2 (NM_002453.1,537-555).
ggtggtagaagtatggatt

SEQ ID NO: 57122 - DNA, 19 bp, Homo sapiens
  siRNA target sequence for MTIF2 (NM_002453.1,541-559).
gtagaagtatggattggaa

SEQ ID NO: 57123 - DNA, 19 bp, Homo sapiens
  siRNA target sequence for MTIF2 (NM_002453.1,547-565).
gtatggattggaatgacta

SEQ ID NO: 57124 - DNA, 19 bp, Homo sapiens
  siRNA target sequence for MTIF2 (NM_002453.1,576-594).
ggccagggcaatggaaaaa

SEQ ID NO: 57125 - DNA, 19 bp, Homo sapiens
  siRNA target sequence for MTIF2 (NM_002453.1,577-595).
gccagggcaatggaaaaaa

SEQ ID NO: 57126 - DNA, 19 bp, Homo sapiens
  siRNA target sequence for MTIF2 (NM_002453.1,607-625).
gtatatgaagctttattga

SEQ ID NO: 57127 - DNA, 19 bp, Homo sapiens
  siRNA target sequence for MTIF2 (NM_002453.1,624-642).
gaacactgatattgacata

SEQ ID NO: 57128 - DNA, 19 bp, Homo sapiens
  siRNA target sequence for MTIF2 (NM_002453.1,714-732).
gttaaagtggagtaaatta

SEQ ID NO: 57129 - DNA, 19 bp, Homo sapiens
  siRNA target sequence for MTIF2 (NM_002453.1,778-796).
caggcagatccagctttat

SEQ ID NO: 57130 - DNA, 19 bp, Homo sapiens
  siRNA target sequence for MTIF2 (NM_002453.1,780-798).
ggcagatccagctttatta

SEQ ID NO: 57131 - DNA, 19 bp, Homo sapiens
  siRNA target sequence for MTIF2 (NM_002453.1,802-820).
ccaaggtccccagttgtta

SEQ ID NO: 57132 - DNA, 19 bp, Homo sapiens
  siRNA target sequence for MTIF2 (NM_002453.1,806-824).
ggtccccagttgttactat

SEQ ID NO: 57133 - DNA, 19 bp, Homo sapiens
  siRNA target sequence for MTIF2 (NM_002453.1,835-853).
gttgatcacgggaaaacga

SEQ ID NO: 57134 - DNA, 19 bp, Homo sapiens
  siRNA target sequence for MTIF2 (NM_002453.1,843-861).
cgggaaaacgacattactt

SEQ ID NO: 57135 - DNA, 19 bp, Homo sapiens
  siRNA target sequence for MTIF2 (NM_002453.1,845-863).
ggaaaacgacattacttga

SEQ ID NO: 57136 - DNA, 19 bp, Homo sapiens
  siRNA target sequence for MTIF2 (NM_002453.1,851-869).
cgacattacttgacaaatt

SEQ ID NO: 57137 - DNA, 19 bp, Homo sapiens
  siRNA target sequence for MTIF2 (NM_002453.1,1052-1070).
cagatgatggagtgatgaa

SEQ ID NO: 57138 - DNA, 19 bp, Homo sapiens
  siRNA target sequence for MTIF2 (NM_002453.1,1102-1120).
gatgcacaggttcctatta

SEQ ID NO: 57139 - DNA, 19 bp, Homo sapiens
  siRNA target sequence for MTIF2 (NM_002453.1,1122-1140).
ccttgccgtaaataaatgt

SEQ ID NO: 57140 - DNA, 19 bp, Homo sapiens
  siRNA target sequence for MTIF2 (NM_002453.1,1128-1146).
cgtaaataaatgtgacaaa

SEQ ID NO: 57141 - DNA, 19 bp, Homo sapiens
  siRNA target sequence for MTIF2 (NM_002453.1,1187-1205).
cttacgatgtggtatgtga

SEQ ID NO: 57142 - DNA, 19 bp, Homo sapiens
  siRNA target sequence for MTIF2 (NM_002453.1,1197-1215).
ggtatgtgaagattatgga

SEQ ID NO: 57143 - DNA, 19 bp, Homo sapiens
  siRNA target sequence for MTIF2 (NM_002453.1,1242-1260).
cgcacttacgggcgataat

SEQ ID NO: 57144 - DNA, 19 bp, Homo sapiens
  siRNA target sequence for MTIF2 (NM_002453.1,1244-1262).
cacttacgggcgataatct

SEQ ID NO: 57145 - DNA, 19 bp, Homo sapiens
  siRNA target sequence for MTIF2 (NM_002453.1,1246-1264).
cttacgggcgataatctga

SEQ ID NO: 57146 - DNA, 19 bp, Homo sapiens
  siRNA target sequence for MTIF2 (NM_002453.1,1289-1307).
ctcttgcagaaatgttaga

SEQ ID NO: 57147 - DNA, 19 bp, Homo sapiens
  siRNA target sequence for MTIF2 (NM_002453.1,1331-1349).
cagtggaaggaacagtaat

SEQ ID NO: 57148 - DNA, 19 bp, Homo sapiens
  siRNA target sequence for MTIF2 (NM_002453.1,1340-1358).
gaacagtaatagagtcttt

SEQ ID NO: 57149 - DNA, 19 bp, Homo sapiens
  siRNA target sequence for MTIF2 (NM_002453.1,1369-1387).
ggaagaggtcttgttacta

SEQ ID NO: 57150 - DNA, 19 bp, Homo sapiens
  siRNA target sequence for MTIF2 (NM_002453.1,1450-1468).
gcaaaagtacgcttaatgt

SEQ ID NO: 57151 - DNA, 19 bp, Homo sapiens
  siRNA target sequence for MTIF2 (NM_002453.1,1451-1469).
caaaagtacgcttaatgtt

SEQ ID NO: 57152 - DNA, 19 bp, Homo sapiens
  siRNA target sequence for MTIF2 (NM_002453.1,1460-1478).
gcttaatgtttgatgaaaa

SEQ ID NO: 57153 - DNA, 19 bp, Homo sapiens
  siRNA target sequence for MTIF2 (NM_002453.1,1725-1743).
gtggaagaagagatcaatt

SEQ ID NO: 57154 - DNA, 19 bp, Homo sapiens
  siRNA target sequence for MTIF2 (NM_002453.1,1736-1754).
gatcaattctacggttttt

SEQ ID NO: 57155 - DNA, 19 bp, Homo sapiens
  siRNA target sequence for MTIF2 (NM_002453.1,1796-1814).
gggaaagagattcaaatgt

SEQ ID NO: 57156 - DNA, 19 bp, Homo sapiens
  siRNA target sequence for MTIF2 (NM_002453.1,1869-1887).
cattatagatacctatgat

SEQ ID NO: 57157 - DNA, 19 bp, Homo sapiens
  siRNA target sequence for MTIF2 (NM_002453.1,1892-1910).
cacacgagtgtgaactaga

SEQ ID NO: 57158 - DNA, 19 bp, Homo sapiens
  siRNA target sequence for MTIF2 (NM_002453.1,1894-1912).
cacgagtgtgaactagaat

SEQ ID NO: 57159 - DNA, 19 bp, Homo sapiens
  siRNA target sequence for MTIF2 (NM_002453.1,1896-1914).
cgagtgtgaactagaatta

SEQ ID NO: 57160 - DNA, 19 bp, Homo sapiens
  siRNA target sequence for MTIF2 (NM_002453.1,1899-1917).
gtgtgaactagaattagta

SEQ ID NO: 57161 - DNA, 19 bp, Homo sapiens
  siRNA target sequence for MTIF2 (NM_002453.1,1901-1919).
gtgaactagaattagtaca

SEQ ID NO: 57162 - DNA, 19 bp, Homo sapiens
  siRNA target sequence for MTIF2 (NM_002453.1,1903-1921).
gaactagaattagtacatt

SEQ ID NO: 57163 - DNA, 19 bp, Homo sapiens
  siRNA target sequence for MTIF2 (NM_002453.1,1951-1969).
gttaaccttgctgaaacat

SEQ ID NO: 57164 - DNA, 19 bp, Homo sapiens
  siRNA target sequence for MTIF2 (NM_002453.1,1967-1985).
catttgatggtgttatata

SEQ ID NO: 57165 - DNA, 19 bp, Homo sapiens
  siRNA target sequence for MTIF2 (NM_002453.1,2016-2034).
ccaacagtcagctgcaaaa

SEQ ID NO: 57166 - DNA, 19 bp, Homo sapiens
  siRNA target sequence for MTIF2 (NM_002453.1,2072-2090).
gtcttgttgaagatttgca

SEQ ID NO: 57167 - DNA, 19 bp, Homo sapiens
  siRNA target sequence for MTIF2 (NM_002453.1,2135-2153).
cagtaggtgaggcatctat

SEQ ID NO: 57168 - DNA, 19 bp, Homo sapiens
  siRNA target sequence for MTIF2 (NM_002453.1,2155-2173).
ctagctaccttctctgtaa

SEQ ID NO: 57169 - DNA, 19 bp, Homo sapiens
  siRNA target sequence for MTIF2 (NM_002453.1,2256-2274).
ccgtaatggacatgtaatt

SEQ ID NO: 57170 - DNA, 19 bp, Homo sapiens
  siRNA target sequence for MTIF2 (NM_002453.1,2257-2275).
cgtaatggacatgtaattt

SEQ ID NO: 57171 - DNA, 19 bp, Homo sapiens
  siRNA target sequence for MTIF2 (NM_002453.1,2282-2300).
gctcattaacctcattgaa

SEQ ID NO: 57172 - DNA, 19 bp, Homo sapiens
  siRNA target sequence for MTIF2 (NM_002453.1,2283-2301).
ctcattaacctcattgaaa

SEQ ID NO: 57173 - DNA, 19 bp, Homo sapiens
  siRNA target sequence for MTIF2 (NM_002453.1,2311-2329).
gatgacatttcaattgtca

SEQ ID NO: 57174 - DNA, 19 bp, Homo sapiens
  siRNA target sequence for MTIF2 (NM_002453.1,2326-2344).
gtcaaaacgggaatggatt

SEQ ID NO: 57175 - DNA, 19 bp, Homo sapiens
  siRNA target sequence for MTIF2 (NM_002453.1,2340-2358).
ggattgtggtctcagttta

SEQ ID NO: 57176 - DNA, 19 bp, Homo sapiens
  siRNA target sequence for MTIF3 (NM_152912.3,146-164).
ctttttctaaagaggttaa

SEQ ID NO: 57177 - DNA, 19 bp, Homo sapiens
  siRNA target sequence for MTIF3 (NM_152912.3,157-175).
gaggttaacactacaaact

SEQ ID NO: 57178 - DNA, 19 bp, Homo sapiens
  siRNA target sequence for MTIF3 (NM_152912.3,176-194).
gtaaagtctgaaaatagtt

SEQ ID NO: 57179 - DNA, 19 bp, Homo sapiens
  siRNA target sequence for MTIF3 (NM_152912.3,195-213).
gcattagatgttttggtaa

SEQ ID NO: 57180 - DNA, 19 bp, Homo sapiens
  siRNA target sequence for MTIF3 (NM_152912.3,242-260).
cagttgtcccctattgctt

SEQ ID NO: 57181 - DNA, 19 bp, Homo sapiens
  siRNA target sequence for MTIF3 (NM_152912.3,270-288).
gactctccttcctaattca

SEQ ID NO: 57182 - DNA, 19 bp, Homo sapiens
  siRNA target sequence for MTIF3 (NM_152912.3,363-381).
gtaacgttggaagaaaaat

SEQ ID NO: 57183 - DNA, 19 bp, Homo sapiens
  siRNA target sequence for MTIF3 (NM_152912.3,384-402).
gtcagcgagttattcactt

SEQ ID NO: 57184 - DNA, 19 bp, Homo sapiens
  siRNA target sequence for MTIF3 (NM_152912.3,388-406).
gcgagttattcacttattt

SEQ ID NO: 57185 - DNA, 19 bp, Homo sapiens
  siRNA target sequence for MTIF3 (NM_152912.3,436-454).
gcaccgagcaaatgtgatt

SEQ ID NO: 57186 - DNA, 19 bp, Homo sapiens
  siRNA target sequence for MTIF3 (NM_152912.3,437-455).
caccgagcaaatgtgatta

SEQ ID NO: 57187 - DNA, 19 bp, Homo sapiens
  siRNA target sequence for MTIF3 (NM_152912.3,473-491).
gacctgcgactggttcaaa

SEQ ID NO: 57188 - DNA, 19 bp, Homo sapiens
  siRNA target sequence for MTIF3 (NM_152912.3,504-522).
cagaacctgcagagtatca

SEQ ID NO: 57189 - DNA, 19 bp, Homo sapiens
  siRNA target sequence for MTIF3 (NM_152912.3,603-621).
ccctgagaaaggaactgat

SEQ ID NO: 57190 - DNA, 19 bp, Homo sapiens
  siRNA target sequence for MTIF3 (NM_152912.3,647-665).
gatttggacacaaagacta

SEQ ID NO: 57191 - DNA, 19 bp, Homo sapiens
  siRNA target sequence for MTIF3 (NM_152912.3,695-713).
cacctagtccagattacca

SEQ ID NO: 57192 - DNA, 19 bp, Homo sapiens
  siRNA target sequence for MTIF3 (NM_152912.3,697-715).
cctagtccagattaccata

SEQ ID NO: 57193 - DNA, 19 bp, Homo sapiens
  siRNA target sequence for MTIF3 (NM_152912.3,698-716).
ctagtccagattaccataa

SEQ ID NO: 57194 - DNA, 19 bp, Homo sapiens
  siRNA target sequence for PSMD7 (NM_002811.3,206-224).
gaatcggcaaggttggaaa

SEQ ID NO: 57195 - DNA, 19 bp, Homo sapiens
  siRNA target sequence for PSMD7 (NM_002811.3,274-292).
cttgatgtatcgaacagtt

SEQ ID NO: 57196 - DNA, 19 bp, Homo sapiens
  siRNA target sequence for PSMD7 (NM_002811.3,324-342).
cgattctgtatggttttta

SEQ ID NO: 57197 - DNA, 19 bp, Homo sapiens
  siRNA target sequence for PSMD7 (NM_002811.3,335-353).
ggtttttagaccatgatta

SEQ ID NO: 57198 - DNA, 19 bp, Homo sapiens
  siRNA target sequence for PSMD7 (NM_002811.3,336-354).
gtttttagaccatgattat

SEQ ID NO: 57199 - DNA, 19 bp, Homo sapiens
  siRNA target sequence for PSMD7 (NM_002811.3,371-389).
gaatgtttaagaaagtcaa

SEQ ID NO: 57200 - DNA, 19 bp, Homo sapiens
  siRNA target sequence for PSMD7 (NM_002811.3,417-435).
ccacacaggccctaaacta

SEQ ID NO: 57201 - DNA, 19 bp, Homo sapiens
  siRNA target sequence for PSMD7 (NM_002811.3,425-443).
gccctaaactacacaagaa

SEQ ID NO: 57202 - DNA, 19 bp, Homo sapiens
  siRNA target sequence for PSMD7 (NM_002811.3,426-444).
ccctaaactacacaagaat

SEQ ID NO: 57203 - DNA, 19 bp, Homo sapiens
  siRNA target sequence for PSMD7 (NM_002811.3,479-497).
gtcctaattccgtattggt

SEQ ID NO: 57204 - DNA, 19 bp, Homo sapiens
  siRNA target sequence for PSMD7 (NM_002811.3,488-506).
ccgtattggtcatcattga

SEQ ID NO: 57205 - DNA, 19 bp, Homo sapiens
  siRNA target sequence for PSMD7 (NM_002811.3,489-507).
cgtattggtcatcattgat

SEQ ID NO: 57206 - DNA, 19 bp, Homo sapiens
  siRNA target sequence for PSMD7 (NM_002811.3,531-549).
gcctacagaagcgtacatt

SEQ ID NO: 57207 - DNA, 19 bp, Homo sapiens
  siRNA target sequence for PSMD7 (NM_002811.3,532-550).
cctacagaagcgtacattt

SEQ ID NO: 57208 - DNA, 19 bp, Homo sapiens
  siRNA target sequence for PSMD7 (NM_002811.3,574-592).
ggaactccaacctcgaaaa

SEQ ID NO: 57209 - DNA, 19 bp, Homo sapiens
  siRNA target sequence for PSMD7 (NM_002811.3,584-602).
cctcgaaaacatttgaaca

SEQ ID NO: 57210 - DNA, 19 bp, Homo sapiens
  siRNA target sequence for PSMD7 (NM_002811.3,652-670).
cacttgttacgagatatca

SEQ ID NO: 57211 - DNA, 19 bp, Homo sapiens
  siRNA target sequence for PSMD7 (NM_002811.3,654-672).
cttgttacgagatatcaaa

SEQ ID NO: 57212 - DNA, 19 bp, Homo sapiens
  siRNA target sequence for PSMD7 (NM_002811.3,691-709).
ctgtcccagcggatcacaa

SEQ ID NO: 57213 - DNA, 19 bp, Homo sapiens
  siRNA target sequence for PSMD7 (NM_002811.3,707-725).
caaaccaggtccatggttt

SEQ ID NO: 57214 - DNA, 19 bp, Homo sapiens
  siRNA target sequence for PSMD7 (NM_002811.3,758-776).
ggagctacctggaaaaagt

SEQ ID NO: 57215 - DNA, 19 bp, Homo sapiens
  siRNA target sequence for RRN3 (NM_018427.2,72-90).
cgtcctctgcagttaagaa

SEQ ID NO: 57216 - DNA, 19 bp, Homo sapiens
  siRNA target sequence for RRN3 (NM_018427.2,1009-1027).
ctatgtagatggtaaggtt

SEQ ID NO: 57217 - DNA, 19 bp, Homo sapiens
  siRNA target sequence for RRN3 (NM_018427.2,1049-1067).
ctatatcgcgacctgataa

SEQ ID NO: 57218 - DNA, 19 bp, Homo sapiens
  siRNA target sequence for RRN3 (NM_018427.2,1055-1073).
cgcgacctgataaacatct

SEQ ID NO: 57219 - DNA, 19 bp, Homo sapiens
  siRNA target sequence for RRN3 (NM_018427.2,1056-1074).
gcgacctgataaacatctt

SEQ ID NO: 57220 - DNA, 19 bp, Homo sapiens
  siRNA target sequence for RRN3 (NM_018427.2,1057-1075).
cgacctgataaacatcttt

SEQ ID NO: 57221 - DNA, 19 bp, Homo sapiens
  siRNA target sequence for RRN3 (NM_018427.2,1806-1824).
ccatgaaaaaggacatagt

SEQ ID NO: 57222 - DNA, 19 bp, Homo sapiens
  siRNA target sequence for RRN3 (NM_018427.2,1816-1834).
ggacatagtggaagatgaa

SEQ ID NO: 57223 - DNA, 19 bp, Homo sapiens
  siRNA target sequence for RRN3 (NM_018427.2,1938-1956).
gctccccacccgtgttgta

SEQ ID NO: 57224 - DNA, 19 bp, Homo sapiens
  siRNA target sequence for EEF1A2 (NM_001958.2,250-268).
ctacaaatgcggaggtatt

SEQ ID NO: 57225 - DNA, 19 bp, Homo sapiens
  siRNA target sequence for EEF1A2 (NM_001958.2,449-467).
caccgcgacttcatcaaga

SEQ ID NO: 57226 - DNA, 19 bp, Homo sapiens
  siRNA target sequence for EEF1A2 (NM_001958.2,1002-1020).
cctttgcgccagtgaacat

SEQ ID NO: 57227 - DNA, 19 bp, Homo sapiens
  siRNA target sequence for EEF1A2 (NM_001958.2,1081-1099).
cgacaacgtcggcttcaat

SEQ ID NO: 57228 - DNA, 19 bp, Homo sapiens
  siRNA target sequence for EEF1A2 (NM_001958.2,1466-1484).
gccgtaggcgtcatcaaga

SEQ ID NO: 57229 - DNA, 19 bp, Homo sapiens
  siRNA target sequence for EEF1A2 (NM_001958.2,1467-1485).
ccgtaggcgtcatcaagaa

SEQ ID NO: 57230 - DNA, 19 bp, Homo sapiens
  siRNA target sequence for EEF1D (NM_032378.2,239-257).
ggaagacaagcacaagtat

SEQ ID NO: 57231 - DNA, 19 bp, Homo sapiens
  siRNA target sequence for EEF1D (NM_032378.2,681-699).
gggatctgggtcaacaagt

SEQ ID NO: 57232 - DNA, 19 bp, Homo sapiens
  siRNA target sequence for EEF1D (NM_032378.2,1098-1116).
gccttgccctactgttact

SEQ ID NO: 57233 - DNA, 19 bp, Homo sapiens
  siRNA target sequence for EEF1D (NM_032378.2,1099-1117).
ccttgccctactgttactt

SEQ ID NO: 57234 - DNA, 19 bp, Homo sapiens
  siRNA target sequence for EEF1D (NM_032378.2,1277-1295).
cctgagacccaacagaaaa

SEQ ID NO: 57235 - DNA, 19 bp, Homo sapiens
  siRNA target sequence for EEF1D (NM_032378.2,1278-1296).
ctgagacccaacagaaaaa

SEQ ID NO: 57236 - DNA, 19 bp, Homo sapiens
  siRNA target sequence for EEF1G (NM_001404.3,458-476).
ctgctggatgcttacttga

SEQ ID NO: 57237 - DNA, 19 bp, Homo sapiens
  siRNA target sequence for EEF2 (NM_001961.2,117-135).
gccaacatccgcaacatgt

SEQ ID NO: 57238 - DNA, 19 bp, Homo sapiens
  siRNA target sequence for EEF2 (NM_001961.2,352-370).
gtgccggcttcctcatcaa

SEQ ID NO: 57239 - DNA, 19 bp, Homo sapiens
  siRNA target sequence for EEF2 (NM_001961.2,746-764).
gcagtttgccgagatgtat

SEQ ID NO: 57240 - DNA, 19 bp, Homo sapiens
  siRNA target sequence for EEF2 (NM_001961.2,968-986).
gtttgatgcgatcatgaat

SEQ ID NO: 57241 - DNA, 19 bp, Homo sapiens
  siRNA target sequence for EEF2 (NM_001961.2,972-990).
gatgcgatcatgaatttca

SEQ ID NO: 57242 - DNA, 19 bp, Homo sapiens
  siRNA target sequence for EEF2 (NM_001961.2,975-993).
gcgatcatgaatttcaaga

SEQ ID NO: 57243 - DNA, 19 bp, Homo sapiens
  siRNA target sequence for EEF2 (NM_001961.2,976-994).
cgatcatgaatttcaagaa

SEQ ID NO: 57244 - DNA, 19 bp, Homo sapiens
  siRNA target sequence for EFG1 (NM_024996.5,201-219).
gcctgccgatggtcttcat

SEQ ID NO: 57245 - DNA, 19 bp, Homo sapiens
  siRNA target sequence for EFG1 (NM_024996.5,203-221).
ctgccgatggtcttcatca

SEQ ID NO: 57246 - DNA, 19 bp, Homo sapiens
  siRNA target sequence for EFG1 (NM_024996.5,217-235).
catcaggggtgattcctaa

SEQ ID NO: 57247 - DNA, 19 bp, Homo sapiens
  siRNA target sequence for EFG1 (NM_024996.5,220-238).
caggggtgattcctaatga

SEQ ID NO: 57248 - DNA, 19 bp, Homo sapiens
  siRNA target sequence for EFG1 (NM_024996.5,224-242).
ggtgattcctaatgaaaaa

SEQ ID NO: 57249 - DNA, 19 bp, Homo sapiens
  siRNA target sequence for EFG1 (NM_024996.5,360-378).
gttggtgctgtcatggatt

SEQ ID NO: 57250 - DNA, 19 bp, Homo sapiens
  siRNA target sequence for EFG1 (NM_024996.5,566-584).
ccagaccatgactgtcaat

SEQ ID NO: 57251 - DNA, 19 bp, Homo sapiens
  siRNA target sequence for EFG1 (NM_024996.5,577-595).
ctgtcaatcgtcagatgaa

SEQ ID NO: 57252 - DNA, 19 bp, Homo sapiens
  siRNA target sequence for EFG1 (NM_024996.5,599-617).
ctacaacgttccgtttcta

SEQ ID NO: 57253 - DNA, 19 bp, Homo sapiens
  siRNA target sequence for EFG1 (NM_024996.5,602-620).
caacgttccgtttctaact

SEQ ID NO: 57254 - DNA, 19 bp, Homo sapiens
  siRNA target sequence for EFG1 (NM_024996.5,605-623).
cgttccgtttctaactttt

SEQ ID NO: 57255 - DNA, 19 bp, Homo sapiens
  siRNA target sequence for EFG1 (NM_024996.5,609-627).
ccgtttctaacttttatta

SEQ ID NO: 57256 - DNA, 19 bp, Homo sapiens
  siRNA target sequence for EFG1 (NM_024996.5,671-689).
gcaaatgaggtctaaacta

SEQ ID NO: 57257 - DNA, 19 bp, Homo sapiens
  siRNA target sequence for EFG1 (NM_024996.5,672-690).
caaatgaggtctaaactaa

SEQ ID NO: 57258 - DNA, 19 bp, Homo sapiens
  siRNA target sequence for EFG1 (NM_024996.5,677-695).
gaggtctaaactaaatcat

SEQ ID NO: 57259 - DNA, 19 bp, Homo sapiens
  siRNA target sequence for EFG1 (NM_024996.5,679-697).
ggtctaaactaaatcataa

SEQ ID NO: 57260 - DNA, 19 bp, Homo sapiens
  siRNA target sequence for EFG1 (NM_024996.5,680-698).
gtctaaactaaatcataat

SEQ ID NO: 57261 - DNA, 19 bp, Homo sapiens
  siRNA target sequence for EFG1 (NM_024996.5,787-805).
gagactttggtcagattgt

SEQ ID NO: 57262 - DNA, 19 bp, Homo sapiens
  siRNA target sequence for EFG1 (NM_024996.5,851-869).
ccaccggcaggagctaatt

SEQ ID NO: 57263 - DNA, 19 bp, Homo sapiens
  siRNA target sequence for EFG1 (NM_024996.5,860-878).
ggagctaattgaatgtgtt

SEQ ID NO: 57264 - DNA, 19 bp, Homo sapiens
  siRNA target sequence for EFG1 (NM_024996.5,918-936).
gaaaaaatcccctcgattt

SEQ ID NO: 57265 - DNA, 19 bp, Homo sapiens
  siRNA target sequence for EFG1 (NM_024996.5,926-944).
cccctcgatttctgattta

SEQ ID NO: 57266 - DNA, 19 bp, Homo sapiens
  siRNA target sequence for EFG1 (NM_024996.5,927-945).
ccctcgatttctgatttaa

SEQ ID NO: 57267 - DNA, 19 bp, Homo sapiens
  siRNA target sequence for EFG1 (NM_024996.5,928-946).
cctcgatttctgatttaaa

SEQ ID NO: 57268 - DNA, 19 bp, Homo sapiens
  siRNA target sequence for EFG1 (NM_024996.5,963-981).
gctactctgaaaagatcat

SEQ ID NO: 57269 - DNA, 19 bp, Homo sapiens
  siRNA target sequence for EFG1 (NM_024996.5,976-994).
gatcatttactcctgtatt

SEQ ID NO: 57270 - DNA, 19 bp, Homo sapiens
  siRNA target sequence for EFG1 (NM_024996.5,1055-1073).
cctcccaaatccatctgaa

SEQ ID NO: 57271 - DNA, 19 bp, Homo sapiens
  siRNA target sequence for EFG1 (NM_024996.5,1066-1084).
catctgaagtccagaacta

SEQ ID NO: 57272 - DNA, 19 bp, Homo sapiens
  siRNA target sequence for EFG1 (NM_024996.5,1071-1089).
gaagtccagaactatgcta

SEQ ID NO: 57273 - DNA, 19 bp, Homo sapiens
  siRNA target sequence for EFG1 (NM_024996.5,1079-1097).
gaactatgctattctcaat

SEQ ID NO: 57274 - DNA, 19 bp, Homo sapiens
  siRNA target sequence for EFG1 (NM_024996.5,1116-1134).
gagaaaaccaaaatcctaa

SEQ ID NO: 57275 - DNA, 19 bp, Homo sapiens
  siRNA target sequence for EFG1 (NM_024996.5,1136-1154).
gaactccagtagagacaat

SEQ ID NO: 57276 - DNA, 19 bp, Homo sapiens
  siRNA target sequence for EFG1 (NM_024996.5,1151-1169).
caattcccacccatttgta

SEQ ID NO: 57277 - DNA, 19 bp, Homo sapiens
  siRNA target sequence for EFG1 (NM_024996.5,1187-1205).
ggaggtaggtcgatttgga

SEQ ID NO: 57278 - DNA, 19 bp, Homo sapiens
  siRNA target sequence for EFG1 (NM_024996.5,1194-1212).
ggtcgatttggacaattaa

SEQ ID NO: 57279 - DNA, 19 bp, Homo sapiens
  siRNA target sequence for EFG1 (NM_024996.5,1197-1215).
cgatttggacaattaactt

SEQ ID NO: 57280 - DNA, 19 bp, Homo sapiens
  siRNA target sequence for EFG1 (NM_024996.5,1213-1231).
cttatgttcgcagttatca

SEQ ID NO: 57281 - DNA, 19 bp, Homo sapiens
  siRNA target sequence for EFG1 (NM_024996.5,1225-1243).
gttatcagggagagctaaa

SEQ ID NO: 57282 - DNA, 19 bp, Homo sapiens
  siRNA target sequence for EFG1 (NM_024996.5,1244-1262).
gaagggtgacaccatctat

SEQ ID NO: 57283 - DNA, 19 bp, Homo sapiens
  siRNA target sequence for EFG1 (NM_024996.5,1251-1269).
gacaccatctataacacaa

SEQ ID NO: 57284 - DNA, 19 bp, Homo sapiens
  siRNA target sequence for EFG1 (NM_024996.5,1362-1380).
gcattgtttggcattgact

SEQ ID NO: 57285 - DNA, 19 bp, Homo sapiens
  siRNA target sequence for EFG1 (NM_024996.5,1381-1399).
gtgctagtggagacacatt

SEQ ID NO: 57286 - DNA, 19 bp, Homo sapiens
  siRNA target sequence for EFG1 (NM_024996.5,1383-1401).
gctagtggagacacattca

SEQ ID NO: 57287 - DNA, 19 bp, Homo sapiens
  siRNA target sequence for EFG1 (NM_024996.5,1410-1428).
gccaacagcggcctttcta

SEQ ID NO: 57288 - DNA, 19 bp, Homo sapiens
  siRNA target sequence for EFG1 (NM_024996.5,1420-1438).
gcctttctatggagtcaat

SEQ ID NO: 57289 - DNA, 19 bp, Homo sapiens
  siRNA target sequence for EFG1 (NM_024996.5,1453-1471).
ctgtcatttcaatagcaat

SEQ ID NO: 57290 - DNA, 19 bp, Homo sapiens
  siRNA target sequence for EFG1 (NM_024996.5,1484-1502).
caagaacgatctggaaaaa

SEQ ID NO: 57291 - DNA, 19 bp, Homo sapiens
  siRNA target sequence for EFG1 (NM_024996.5,1512-1530).
ggtattggcaggtttacaa

SEQ ID NO: 57292 - DNA, 19 bp, Homo sapiens
  siRNA target sequence for EFG1 (NM_024996.5,1588-1606).
ctggaatgggagaattaca

SEQ ID NO: 57293 - DNA, 19 bp, Homo sapiens
  siRNA target sequence for EFG1 (NM_024996.5,1597-1615).
gagaattacacctggaaat

SEQ ID NO: 57294 - DNA, 19 bp, Homo sapiens
  siRNA target sequence for EFG1 (NM_024996.5,1599-1617).
gaattacacctggaaatct

SEQ ID NO: 57295 - DNA, 19 bp, Homo sapiens
  siRNA target sequence for EFG1 (NM_024996.5,1677-1695).
gcctttcgagagaccatta

SEQ ID NO: 57296 - DNA, 19 bp, Homo sapiens
  siRNA target sequence for EFG1 (NM_024996.5,1679-1697).
ctttcgagagaccattact

SEQ ID NO: 57297 - DNA, 19 bp, Homo sapiens
  siRNA target sequence for EFG1 (NM_024996.5,1708-1726).
cgtttgactttacacataa

SEQ ID NO: 57298 - DNA, 19 bp, Homo sapiens
  siRNA target sequence for EFG1 (NM_024996.5,1748-1766).
ccagtatggaaaagtaata

SEQ ID NO: 57299 - DNA, 19 bp, Homo sapiens
  siRNA target sequence for EFG1 (NM_024996.5,1785-1803).
gacccagaggactacacta

SEQ ID NO: 57300 - DNA, 19 bp, Homo sapiens
  siRNA target sequence for EFG1 (NM_024996.5,1794-1812).
gactacactaaattggaat

SEQ ID NO: 57301 - DNA, 19 bp, Homo sapiens
  siRNA target sequence for EFG1 (NM_024996.5,1950-1968).
gcacaccacatggttgatt

SEQ ID NO: 57302 - DNA, 19 bp, Homo sapiens
  siRNA target sequence for EFG1 (NM_024996.5,1953-1971).
caccacatggttgattcta

SEQ ID NO: 57303 - DNA, 19 bp, Homo sapiens
  siRNA target sequence for EFG1 (NM_024996.5,1965-1983).
gattctaatgaaatctctt

SEQ ID NO: 57304 - DNA, 19 bp, Homo sapiens
  siRNA target sequence for EFG1 (NM_024996.5,1993-2011).
caggagaaggtgctcttaa

SEQ ID NO: 57305 - DNA, 19 bp, Homo sapiens
  siRNA target sequence for EFG1 (NM_024996.5,2013-2031).
caagccttggcaaatgcaa

SEQ ID NO: 57306 - DNA, 19 bp, Homo sapiens
  siRNA target sequence for EFG1 (NM_024996.5,2022-2040).
gcaaatgcaacattatgta

SEQ ID NO: 57307 - DNA, 19 bp, Homo sapiens
  siRNA target sequence for EFG1 (NM_024996.5,2038-2056).
gtattcttgaacctattat

SEQ ID NO: 57308 - DNA, 19 bp, Homo sapiens
  siRNA target sequence for EFG1 (NM_024996.5,2063-2081).
ggaagttgtagctccaaat

SEQ ID NO: 57309 - DNA, 19 bp, Homo sapiens
  siRNA target sequence for EFG1 (NM_024996.5,2115-2133).
cgacgccatggggtaatca

SEQ ID NO: 57310 - DNA, 19 bp, Homo sapiens
  siRNA target sequence for EFG1 (NM_024996.5,2180-2198).
ccctctaaatgatatgttt

SEQ ID NO: 57311 - DNA, 19 bp, Homo sapiens
  siRNA target sequence for EFG1 (NM_024996.5,2190-2208).
gatatgtttggttattcca

SEQ ID NO: 57312 - DNA, 19 bp, Homo sapiens
  siRNA target sequence for EFG1 (NM_024996.5,2199-2217).
ggttattccactgaactta

SEQ ID NO: 57313 - DNA, 19 bp, Homo sapiens
  siRNA target sequence for EFG1 (NM_024996.5,2241-2259).
gaatacacaatggagtata

SEQ ID NO: 57314 - DNA, 19 bp, Homo sapiens
  siRNA target sequence for EFG1 (NM_024996.5,2260-2278).
gcaggtatcagccatgttt

SEQ ID NO: 57315 - DNA, 19 bp, Homo sapiens
  siRNA target sequence for EFG1 (NM_024996.5,2261-2279).
caggtatcagccatgttta

SEQ ID NO: 57316 - DNA, 19 bp, Homo sapiens
  siRNA target sequence for EFG1 (NM_024996.5,2289-2307).
caagaagacgtcattaata

SEQ ID NO: 57317 - DNA, 19 bp, Homo sapiens
  siRNA target sequence for EFG1 (NM_024996.5,2295-2313).
gacgtcattaataagtatt

SEQ ID NO: 57318 - DNA, 19 bp, Homo sapiens
  siRNA target sequence for EFG1 (NM_024996.5,2323-2341).
caggtcaacttcctgttaa

SEQ ID NO: 57319 - DNA, 19 bp, Homo sapiens
  siRNA target sequence for EFG1 (NM_024996.5,2325-2343).
ggtcaacttcctgttaaaa

SEQ ID NO: 57320 - DNA, 19 bp, Homo sapiens
  siRNA target sequence for EFG2 (NM_032380.3,319-337).
gaggatatttgcaatgagt

SEQ ID NO: 57321 - DNA, 19 bp, Homo sapiens
  siRNA target sequence for EFG2 (NM_032380.3,330-348).
caatgagtcatcagacaat

SEQ ID NO: 57322 - DNA, 19 bp, Homo sapiens
  siRNA target sequence for EFG2 (NM_032380.3,345-363).
caatacccagtgtgtatat

SEQ ID NO: 57323 - DNA, 19 bp, Homo sapiens
  siRNA target sequence for EFG2 (NM_032380.3,441-459).
gttctctaccaggcttaat

SEQ ID NO: 57324 - DNA, 19 bp, Homo sapiens
  siRNA target sequence for EFG2 (NM_032380.3,467-485).
gatatcaaatcccttcatt

SEQ ID NO: 57325 - DNA, 19 bp, Homo sapiens
  siRNA target sequence for EFG2 (NM_032380.3,493-511).
caatcctcccatagctaaa

SEQ ID NO: 57326 - DNA, 19 bp, Homo sapiens
  siRNA target sequence for EFG2 (NM_032380.3,577-595).
gtactattccggatataca

SEQ ID NO: 57327 - DNA, 19 bp, Homo sapiens
  siRNA target sequence for EFG2 (NM_032380.3,580-598).
ctattccggatatacaaga

SEQ ID NO: 57328 - DNA, 19 bp, Homo sapiens
  siRNA target sequence for EFG2 (NM_032380.3,643-661).
ggcccaagagcgagaaaga

SEQ ID NO: 57329 - DNA, 19 bp, Homo sapiens
  siRNA target sequence for EFG2 (NM_032380.3,653-671).
cgagaaagaggcattacta

SEQ ID NO: 57330 - DNA, 19 bp, Homo sapiens
  siRNA target sequence for EFG2 (NM_032380.3,674-692).
caatcagctgctgttacat

SEQ ID NO: 57331 - DNA, 19 bp, Homo sapiens
  siRNA target sequence for EFG2 (NM_032380.3,680-698).
gctgctgttacatttgatt

SEQ ID NO: 57332 - DNA, 19 bp, Homo sapiens
  siRNA target sequence for EFG2 (NM_032380.3,704-722).
ggttatagagtcaatctaa

SEQ ID NO: 57333 - DNA, 19 bp, Homo sapiens
  siRNA target sequence for EFG2 (NM_032380.3,705-723).
gttatagagtcaatctaat

SEQ ID NO: 57334 - DNA, 19 bp, Homo sapiens
  siRNA target sequence for EFG2 (NM_032380.3,734-752).
ggtcatgtggactttacct

SEQ ID NO: 57335 - DNA, 19 bp, Homo sapiens
  siRNA target sequence for EFG2 (NM_032380.3,786-804).
gtgcagtggctgtatttga

SEQ ID NO: 57336 - DNA, 19 bp, Homo sapiens
  siRNA target sequence for EFG2 (NM_032380.3,843-861).
ggaggcaagctgataaaca

SEQ ID NO: 57337 - DNA, 19 bp, Homo sapiens
  siRNA target sequence for EFG2 (NM_032380.3,847-865).
gcaagctgataaacacaat

SEQ ID NO: 57338 - DNA, 19 bp, Homo sapiens
  siRNA target sequence for EFG2 (NM_032380.3,862-880).
caatatacctcgaatctgt

SEQ ID NO: 57339 - DNA, 19 bp, Homo sapiens
  siRNA target sequence for EFG2 (NM_032380.3,1005-1023).
gagtggtggatgtagtaat

SEQ ID NO: 57340 - DNA, 19 bp, Homo sapiens
  siRNA target sequence for EFG2 (NM_032380.3,1131-1149).
caaggaatgccttaattga

SEQ ID NO: 57341 - DNA, 19 bp, Homo sapiens
  siRNA target sequence for EFG2 (NM_032380.3,1134-1152).
ggaatgccttaattgaaca

SEQ ID NO: 57342 - DNA, 19 bp, Homo sapiens
  siRNA target sequence for EFG2 (NM_032380.3,1135-1153).
gaatgccttaattgaacaa

SEQ ID NO: 57343 - DNA, 19 bp, Homo sapiens
  siRNA target sequence for EFG2 (NM_032380.3,1356-1374).
cacctgaagagcgtaacta

SEQ ID NO: 57344 - DNA, 19 bp, Homo sapiens
  siRNA target sequence for EFG2 (NM_032380.3,1359-1377).
ctgaagagcgtaactatga

SEQ ID NO: 57345 - DNA, 19 bp, Homo sapiens
  siRNA target sequence for EFG2 (NM_032380.3,1361-1379).
gaagagcgtaactatgaat

SEQ ID NO: 57346 - DNA, 19 bp, Homo sapiens
  siRNA target sequence for EFG2 (NM_032380.3,1387-1405).
gtggtataaggatgactta

SEQ ID NO: 57347 - DNA, 19 bp, Homo sapiens
  siRNA target sequence for EFG2 (NM_032380.3,1390-1408).
gtataaggatgacttatgt

SEQ ID NO: 57348 - DNA, 19 bp, Homo sapiens
  siRNA target sequence for EFG2 (NM_032380.3,1407-1425).
gtgcattggcatttaaagt

SEQ ID NO: 57349 - DNA, 19 bp, Homo sapiens
  siRNA target sequence for EFG2 (NM_032380.3,1441-1459).
gcgaggaccactggttttt

SEQ ID NO: 57350 - DNA, 19 bp, Homo sapiens
  siRNA target sequence for EFG2 (NM_032380.3,1454-1472).
gtttttatgcgcatttact

SEQ ID NO: 57351 - DNA, 19 bp, Homo sapiens
  siRNA target sequence for EFG2 (NM_032380.3,1487-1505).
ccccagttggccattcata

SEQ ID NO: 57352 - DNA, 19 bp, Homo sapiens
  siRNA target sequence for EFG2 (NM_032380.3,1488-1506).
cccagttggccattcataa

SEQ ID NO: 57353 - DNA, 19 bp, Homo sapiens
  siRNA target sequence for EFG2 (NM_032380.3,1490-1508).
cagttggccattcataata

SEQ ID NO: 57354 - DNA, 19 bp, Homo sapiens
  siRNA target sequence for EFG2 (NM_032380.3,1492-1510).
gttggccattcataatatt

SEQ ID NO: 57355 - DNA, 19 bp, Homo sapiens
  siRNA target sequence for EFG2 (NM_032380.3,1519-1537).
ctgcacggagagaataagt

SEQ ID NO: 57356 - DNA, 19 bp, Homo sapiens
  siRNA target sequence for EFG2 (NM_032380.3,1530-1548).
gaataagtcgtctgctttt

SEQ ID NO: 57357 - DNA, 19 bp, Homo sapiens
  siRNA target sequence for EFG2 (NM_032380.3,1551-1569).
cgtttgctgaccaacatgt

SEQ ID NO: 57358 - DNA, 19 bp, Homo sapiens
  siRNA target sequence for EFG2 (NM_032380.3,1581-1599).
cattgactgctggtaacat

SEQ ID NO: 57359 - DNA, 19 bp, Homo sapiens
  siRNA target sequence for EFG2 (NM_032380.3,1606-1624).
gactgttgggcttaaacat

SEQ ID NO: 57360 - DNA, 19 bp, Homo sapiens
  siRNA target sequence for EFG2 (NM_032380.3,1686-1704).
ccgaacgggagggagaaaa

SEQ ID NO: 57361 - DNA, 19 bp, Homo sapiens
  siRNA target sequence for EFG2 (NM_032380.3,1803-1821).
ctaagcagccagatttgga

SEQ ID NO: 57362 - DNA, 19 bp, Homo sapiens
  siRNA target sequence for EFG2 (NM_032380.3,1844-1862).
cgtgaagatcccagtttga

SEQ ID NO: 57363 - DNA, 19 bp, Homo sapiens
  siRNA target sequence for EFG2 (NM_032380.3,1850-1868).
gatcccagtttgaaagtga

SEQ ID NO: 57364 - DNA, 19 bp, Homo sapiens
  siRNA target sequence for EFG2 (NM_032380.3,1902-1920).
gtggtatgggggagttaca

SEQ ID NO: 57365 - DNA, 19 bp, Homo sapiens
  siRNA target sequence for EFG2 (NM_032380.3,1904-1922).
ggtatgggggagttacata

SEQ ID NO: 57366 - DNA, 19 bp, Homo sapiens
  siRNA target sequence for EFG2 (NM_032380.3,1905-1923).
gtatgggggagttacatat

SEQ ID NO: 57367 - DNA, 19 bp, Homo sapiens
  siRNA target sequence for EFG2 (NM_032380.3,1910-1928).
ggggagttacatatagaga

SEQ ID NO: 57368 - DNA, 19 bp, Homo sapiens
  siRNA target sequence for EFG2 (NM_032380.3,1911-1929).
gggagttacatatagagat

SEQ ID NO: 57369 - DNA, 19 bp, Homo sapiens
  siRNA target sequence for EFG2 (NM_032380.3,1915-1933).
gttacatatagagattatt

SEQ ID NO: 57370 - DNA, 19 bp, Homo sapiens
  siRNA target sequence for EFG2 (NM_032380.3,1997-2015).
cgagagaccatcctaaact

SEQ ID NO: 57371 - DNA, 19 bp, Homo sapiens
  siRNA target sequence for EFG2 (NM_032380.3,2026-2044).
cacagataccttagataga

SEQ ID NO: 57372 - DNA, 19 bp, Homo sapiens
  siRNA target sequence for EFG2 (NM_032380.3,2030-2048).
gataccttagatagaactt

SEQ ID NO: 57373 - DNA, 19 bp, Homo sapiens
  siRNA target sequence for EFG2 (NM_032380.3,2083-2101).
ggaagcaaggccaattgaa

SEQ ID NO: 57374 - DNA, 19 bp, Homo sapiens
  siRNA target sequence for EFG2 (NM_032380.3,2087-2105).
gcaaggccaattgaaacat

SEQ ID NO: 57375 - DNA, 19 bp, Homo sapiens
  siRNA target sequence for EFG2 (NM_032380.3,2109-2127).
ctgttatgcctgtgattga

SEQ ID NO: 57376 - DNA, 19 bp, Homo sapiens
  siRNA target sequence for EFG2 (NM_032380.3,2111-2129).
gttatgcctgtgattgagt

SEQ ID NO: 57377 - DNA, 19 bp, Homo sapiens
  siRNA target sequence for EFG2 (NM_032380.3,2134-2152).
gtatgctgaaagtatcaat

SEQ ID NO: 57378 - DNA, 19 bp, Homo sapiens
  siRNA target sequence for EFG2 (NM_032380.3,2246-2264).
gtagcaattactttacatt

SEQ ID NO: 57379 - DNA, 19 bp, Homo sapiens
  siRNA target sequence for EFG2 (NM_032380.3,2256-2274).
ctttacattccctgacaat

SEQ ID NO: 57380 - DNA, 19 bp, Homo sapiens
  siRNA target sequence for EFG2 (NM_032380.3,2280-2298).
ctggcacctccacaactat

SEQ ID NO: 57381 - DNA, 19 bp, Homo sapiens
  siRNA target sequence for EFG2 (NM_032380.3,2282-2300).
ggcacctccacaactatga

SEQ ID NO: 57382 - DNA, 19 bp, Homo sapiens
  siRNA target sequence for EFG2 (NM_032380.3,2283-2301).
gcacctccacaactatgat

SEQ ID NO: 57383 - DNA, 19 bp, Homo sapiens
  siRNA target sequence for EFG2 (NM_032380.3,2346-2364).
ctgataagcaagttttgga

SEQ ID NO: 57384 - DNA, 19 bp, Homo sapiens
  siRNA target sequence for EFG2 (NM_032380.3,2362-2380).
ggagcctctgatgaatctt

SEQ ID NO: 57385 - DNA, 19 bp, Homo sapiens
  siRNA target sequence for EFG2 (NM_032380.3,2390-2408).
gtagctagagattatctca

SEQ ID NO: 57386 - DNA, 19 bp, Homo sapiens
  siRNA target sequence for EFG2 (NM_032380.3,2463-2481).
ctcgccaggacaacaaagt

SEQ ID NO: 57387 - DNA, 19 bp, Homo sapiens
  siRNA target sequence for EFG2 (NM_032380.3,2473-2491).
caacaaagttgttattgga

SEQ ID NO: 57388 - DNA, 19 bp, Homo sapiens
  siRNA target sequence for EFG2 (NM_032380.3,2507-2525).
gaaattatgggttattcaa

SEQ ID NO: 57389 - DNA, 19 bp, Homo sapiens
  siRNA target sequence for EFG2 (NM_032380.3,2528-2546).
gtgcttcgaacgctaacat

SEQ ID NO: 57390 - DNA, 19 bp, Homo sapiens
  siRNA target sequence for EFG2 (NM_032380.3,2530-2548).
gcttcgaacgctaacatca

SEQ ID NO: 57391 - DNA, 19 bp, Homo sapiens
  siRNA target sequence for EFG2 (NM_032380.3,2564-2582).
gccttagaactatctactt

SEQ ID NO: 57392 - DNA, 19 bp, Homo sapiens
  siRNA target sequence for EFG2 (NM_032380.3,2566-2584).
cttagaactatctacttat

SEQ ID NO: 57393 - DNA, 19 bp, Homo sapiens
  siRNA target sequence for EFG2 (NM_170681.1,1807-1825).
gcagccaggtataaatggt

SEQ ID NO: 57394 - DNA, 19 bp, Homo sapiens
  siRNA target sequence for EFG2 (NM_170681.1,1815-1833).
gtataaatggtcttagtgt

SEQ ID NO: 57395 - DNA, 19 bp, Homo sapiens
  siRNA target sequence for EFG2 (NM_170681.1,1823-1841).
ggtcttagtgtgtcaacta

SEQ ID NO: 57396 - DNA, 19 bp, Homo sapiens
  siRNA target sequence for EFG2 (NM_170681.1,1824-1842).
gtcttagtgtgtcaactaa

SEQ ID NO: 57397 - DNA, 19 bp, Homo sapiens
  siRNA target sequence for ELL3 (NM_025165.1,242-260).
ggccaccgagggtatctga

SEQ ID NO: 57398 - DNA, 19 bp, Homo sapiens
  siRNA target sequence for ELL3 (NM_025165.1,508-526).
gaacacaggaggctattct

SEQ ID NO: 57399 - DNA, 19 bp, Homo sapiens
  siRNA target sequence for ELL3 (NM_025165.1,511-529).
cacaggaggctattctgaa

SEQ ID NO: 57400 - DNA, 19 bp, Homo sapiens
  siRNA target sequence for ELL3 (NM_025165.1,744-762).
ctgtagccactgtagaact

SEQ ID NO: 57401 - DNA, 19 bp, Homo sapiens
  siRNA target sequence for ELL3 (NM_025165.1,814-832).
cctgaccaatcaggattta

SEQ ID NO: 57402 - DNA, 19 bp, Homo sapiens
  siRNA target sequence for ELL3 (NM_025165.1,817-835).
gaccaatcaggatttacaa

SEQ ID NO: 57403 - DNA, 19 bp, Homo sapiens
  siRNA target sequence for ELL3 (NM_025165.1,819-837).
ccaatcaggatttacaaga

SEQ ID NO: 57404 - DNA, 19 bp, Homo sapiens
  siRNA target sequence for ELL3 (NM_025165.1,865-883).
ggacatggaccccagatta

SEQ ID NO: 57405 - DNA, 19 bp, Homo sapiens
  siRNA target sequence for ELL3 (NM_025165.1,868-886).
catggaccccagattagaa

SEQ ID NO: 57406 - DNA, 19 bp, Homo sapiens
  siRNA target sequence for ELL3 (NM_025165.1,897-915).
cagttcaagaagattctga

SEQ ID NO: 57407 - DNA, 19 bp, Homo sapiens
  siRNA target sequence for ELL3 (NM_025165.1,918-936).
ccccaagtcctgaagatat

SEQ ID NO: 57408 - DNA, 19 bp, Homo sapiens
  siRNA target sequence for ELL3 (NM_025165.1,1003-1021).
ctttgagacagattatgct

SEQ ID NO: 57409 - DNA, 19 bp, Homo sapiens
  siRNA target sequence for ELL3 (NM_025165.1,1101-1119).
ggcgaggaactccagaata

SEQ ID NO: 57410 - DNA, 19 bp, Homo sapiens
  siRNA target sequence for ELL3 (NM_025165.1,1205-1223).
gagtaccttcaccagaaat

SEQ ID NO: 57411 - DNA, 19 bp, Homo sapiens
  siRNA target sequence for FLJ13119 (NM_024580.3,103-121).
ctgccaacatcaggaatat

SEQ ID NO: 57412 - DNA, 19 bp, Homo sapiens
  siRNA target sequence for FLJ13119 (NM_024580.3,124-142).
gtgttttggctcatgttga

SEQ ID NO: 57413 - DNA, 19 bp, Homo sapiens
  siRNA target sequence for FLJ13119 (NM_024580.3,167-185).
ctgtcttatatctagcaat

SEQ ID NO: 57414 - DNA, 19 bp, Homo sapiens
  siRNA target sequence for FLJ13119 (NM_024580.3,200-218).
ccgcctagcaggcaagtta

SEQ ID NO: 57415 - DNA, 19 bp, Homo sapiens
  siRNA target sequence for FLJ13119 (NM_024580.3,201-219).
cgcctagcaggcaagttaa

SEQ ID NO: 57416 - DNA, 19 bp, Homo sapiens
  siRNA target sequence for FLJ13119 (NM_024580.3,204-222).
ctagcaggcaagttaaggt

SEQ ID NO: 57417 - DNA, 19 bp, Homo sapiens
  siRNA target sequence for FLJ13119 (NM_024580.3,246-264).
cagatccgagggatcacta

SEQ ID NO: 57418 - DNA, 19 bp, Homo sapiens
  siRNA target sequence for FLJ13119 (NM_024580.3,251-269).
ccgagggatcactatgaaa

SEQ ID NO: 57419 - DNA, 19 bp, Homo sapiens
  siRNA target sequence for FLJ13119 (NM_024580.3,252-270).
cgagggatcactatgaaat

SEQ ID NO: 57420 - DNA, 19 bp, Homo sapiens
  siRNA target sequence for FLJ13119 (NM_024580.3,278-296).
catttccctacattatgca

SEQ ID NO: 57421 - DNA, 19 bp, Homo sapiens
  siRNA target sequence for FLJ13119 (NM_024580.3,315-333).
ctgatcaatctgatagact

SEQ ID NO: 57422 - DNA, 19 bp, Homo sapiens
  siRNA target sequence for FLJ13119 (NM_024580.3,336-354).
ccaggacacgtggactttt

SEQ ID NO: 57423 - DNA, 19 bp, Homo sapiens
  siRNA target sequence for FLJ13119 (NM_024580.3,347-365).
ggacttttcctcagaagta

SEQ ID NO: 57424 - DNA, 19 bp, Homo sapiens
  siRNA target sequence for FLJ13119 (NM_024580.3,350-368).
cttttcctcagaagtatca

SEQ ID NO: 57425 - DNA, 19 bp, Homo sapiens
  siRNA target sequence for FLJ13119 (NM_024580.3,370-388).
ccgctgttcgcatttgtga

SEQ ID NO: 57426 - DNA, 19 bp, Homo sapiens
  siRNA target sequence for FLJ13119 (NM_024580.3,371-389).
cgctgttcgcatttgtgat

SEQ ID NO: 57427 - DNA, 19 bp, Homo sapiens
  siRNA target sequence for FLJ13119 (NM_024580.3,473-491).
ccgtccggttttagtgatt

SEQ ID NO: 57428 - DNA, 19 bp, Homo sapiens
  siRNA target sequence for FLJ13119 (NM_024580.3,474-492).
cgtccggttttagtgatta

SEQ ID NO: 57429 - DNA, 19 bp, Homo sapiens
  siRNA target sequence for FLJ13119 (NM_024580.3,475-493).
gtccggttttagtgattaa

SEQ ID NO: 57430 - DNA, 19 bp, Homo sapiens
  siRNA target sequence for FLJ13119 (NM_024580.3,477-495).
ccggttttagtgattaata

SEQ ID NO: 57431 - DNA, 19 bp, Homo sapiens
  siRNA target sequence for FLJ13119 (NM_024580.3,530-548).
cccacaagaggcctattct

SEQ ID NO: 57432 - DNA, 19 bp, Homo sapiens
  siRNA target sequence for FLJ13119 (NM_024580.3,541-559).
cctattctcacctcaagaa

SEQ ID NO: 57433 - DNA, 19 bp, Homo sapiens
  siRNA target sequence for FLJ13119 (NM_024580.3,542-560).
ctattctcacctcaagaat

SEQ ID NO: 57434 - DNA, 19 bp, Homo sapiens
  siRNA target sequence for FLJ13119 (NM_024580.3,580-598).
cgctcacagggactctttt

SEQ ID NO: 57435 - DNA, 19 bp, Homo sapiens
  siRNA target sequence for FLJ13119 (NM_024580.3,581-599).
gctcacagggactcttttt

SEQ ID NO: 57436 - DNA, 19 bp, Homo sapiens
  siRNA target sequence for FLJ13119 (NM_024580.3,588-606).
gggactctttttacttcta

SEQ ID NO: 57437 - DNA, 19 bp, Homo sapiens
  siRNA target sequence for FLJ13119 (NM_024580.3,589-607).
ggactctttttacttctaa

SEQ ID NO: 57438 - DNA, 19 bp, Homo sapiens
  siRNA target sequence for FLJ13119 (NM_024580.3,601-619).
cttctaaagtcctagaaga

SEQ ID NO: 57439 - DNA, 19 bp, Homo sapiens
  siRNA target sequence for FLJ13119 (NM_024580.3,635-653).
gactgaatcccaagtgaat

SEQ ID NO: 57440 - DNA, 19 bp, Homo sapiens
  siRNA target sequence for FLJ13119 (NM_024580.3,639-657).
gaatcccaagtgaatccaa

SEQ ID NO: 57441 - DNA, 19 bp, Homo sapiens
  siRNA target sequence for FLJ13119 (NM_024580.3,744-762).
ggaaatgtggtgtttacca

SEQ ID NO: 57442 - DNA, 19 bp, Homo sapiens
  siRNA target sequence for FLJ13119 (NM_024580.3,792-810).
gagcacttcgccagaatct

SEQ ID NO: 57443 - DNA, 19 bp, Homo sapiens
  siRNA target sequence for FLJ13119 (NM_024580.3,853-871).
ccttgtggggagattacta

SEQ ID NO: 57444 - DNA, 19 bp, Homo sapiens
  siRNA target sequence for FLJ13119 (NM_024580.3,854-872).
cttgtggggagattactat

SEQ ID NO: 57445 - DNA, 19 bp, Homo sapiens
  siRNA target sequence for FLJ13119 (NM_024580.3,864-882).
gattactatataaatatga

SEQ ID NO: 57446 - DNA, 19 bp, Homo sapiens
  siRNA target sequence for FLJ13119 (NM_024580.3,1859-1877).
gccatcctgcccaccattt

SEQ ID NO: 57447 - DNA, 19 bp, Homo sapiens
  siRNA target sequence for FLJ13119 (NM_024580.3,1860-1878).
ccatcctgcccaccattta

SEQ ID NO: 57448 - DNA, 19 bp, Homo sapiens
  siRNA target sequence for FLJ13119 (NM_024580.3,1861-1879).
catcctgcccaccatttat

SEQ ID NO: 57449 - DNA, 19 bp, Homo sapiens
  siRNA target sequence for FLJ13119 (NM_024580.3,1873-1891).
catttataccactcaactt

SEQ ID NO: 57450 - DNA, 19 bp, Homo sapiens
  siRNA target sequence for FLJ13119 (NM_024580.3,1946-1964).
gcctcagctcgtaaaagga

SEQ ID NO: 57451 - DNA, 19 bp, Homo sapiens
  siRNA target sequence for FLJ13119 (NM_024580.3,1948-1966).
ctcagctcgtaaaaggaat

SEQ ID NO: 57452 - DNA, 19 bp, Homo sapiens
  siRNA target sequence for FLJ13119 (NM_024580.3,1963-1981).
gaatgaaactgttaaacca

SEQ ID NO: 57453 - DNA, 19 bp, Homo sapiens
  siRNA target sequence for FLJ13119 (NM_024580.3,1989-2007).
ccctgtgtccagattttaa

SEQ ID NO: 57454 - DNA, 19 bp, Homo sapiens
  siRNA target sequence for FLJ13119 (NM_024580.3,1991-2009).
ctgtgtccagattttaatt

SEQ ID NO: 57455 - DNA, 19 bp, Homo sapiens
  siRNA target sequence for FLJ13119 (NM_024580.3,2017-2035).
cgggagagcacgttttagt

SEQ ID NO: 57456 - DNA, 19 bp, Homo sapiens
  siRNA target sequence for FLJ13119 (NM_024580.3,2060-2078).
gcgatgcctggatgactta

SEQ ID NO: 57457 - DNA, 19 bp, Homo sapiens
  siRNA target sequence for FLJ13119 (NM_024580.3,2061-2079).
cgatgcctggatgacttaa

SEQ ID NO: 57458 - DNA, 19 bp, Homo sapiens
  siRNA target sequence for FLJ13119 (NM_024580.3,2062-2080).
gatgcctggatgacttaaa

SEQ ID NO: 57459 - DNA, 19 bp, Homo sapiens
  siRNA target sequence for FLJ13119 (NM_024580.3,2107-2125).
gtgtatctgaacctattat

SEQ ID NO: 57460 - DNA, 19 bp, Homo sapiens
  siRNA target sequence for FLJ13119 (NM_024580.3,2127-2145).
ccattcagagaaacaatca

SEQ ID NO: 57461 - DNA, 19 bp, Homo sapiens
  siRNA target sequence for FLJ13119 (NM_024580.3,2202-2220).
gcagtcatacaccaaatga

SEQ ID NO: 57462 - DNA, 19 bp, Homo sapiens
  siRNA target sequence for FLJ13119 (NM_024580.3,2233-2251).
gcaaaatccctgaaggaat

SEQ ID NO: 57463 - DNA, 19 bp, Homo sapiens
  siRNA target sequence for FLJ13119 (NM_024580.3,2259-2277).
gactctgacgggctaatca

SEQ ID NO: 57464 - DNA, 19 bp, Homo sapiens
  siRNA target sequence for FLJ13119 (NM_024580.3,2265-2283).
gacgggctaatcaccataa

SEQ ID NO: 57465 - DNA, 19 bp, Homo sapiens
  siRNA target sequence for FLJ13119 (NM_024580.3,2267-2285).
cgggctaatcaccataaca

SEQ ID NO: 57466 - DNA, 19 bp, Homo sapiens
  siRNA target sequence for FLJ13119 (NM_024580.3,2268-2286).
gggctaatcaccataacaa

SEQ ID NO: 57467 - DNA, 19 bp, Homo sapiens
  siRNA target sequence for FLJ13119 (NM_024580.3,2270-2288).
gctaatcaccataacaact

SEQ ID NO: 57468 - DNA, 19 bp, Homo sapiens
  siRNA target sequence for FLJ13119 (NM_024580.3,2552-2570).
gcccaacatactagtcaat

SEQ ID NO: 57469 - DNA, 19 bp, Homo sapiens
  siRNA target sequence for FLJ13119 (NM_024580.3,2553-2571).
cccaacatactagtcaata

SEQ ID NO: 57470 - DNA, 19 bp, Homo sapiens
  siRNA target sequence for FLJ13119 (NM_024580.3,2554-2572).
ccaacatactagtcaataa

SEQ ID NO: 57471 - DNA, 19 bp, Homo sapiens
  siRNA target sequence for FLJ13119 (NM_024580.3,2600-2618).
gacaggtccagctgacaaa

SEQ ID NO: 57472 - DNA, 19 bp, Homo sapiens
  siRNA target sequence for FLJ13119 (NM_024580.3,2632-2650).
ccagtagataccgagattt

SEQ ID NO: 57473 - DNA, 19 bp, Homo sapiens
  siRNA target sequence for FLJ13220 (NM_021927.1,413-431).
gacaggctcctagaactta

SEQ ID NO: 57474 - DNA, 19 bp, Homo sapiens
  siRNA target sequence for FLJ13220 (NM_021927.1,415-433).
caggctcctagaacttaca

SEQ ID NO: 57475 - DNA, 19 bp, Homo sapiens
  siRNA target sequence for FLJ13220 (NM_021927.1,428-446).
cttacagggacaattgata

SEQ ID NO: 57476 - DNA, 19 bp, Homo sapiens
  siRNA target sequence for FLJ13220 (NM_021927.1,466-484).
ggttcttgataaattgcaa

SEQ ID NO: 57477 - DNA, 19 bp, Homo sapiens
  siRNA target sequence for FLJ13220 (NM_021927.1,524-542).
gcatctctcttttacaatt

SEQ ID NO: 57478 - DNA, 19 bp, Homo sapiens
  siRNA target sequence for FLJ13220 (NM_021927.1,554-572).
cagtaccttttaaatctca

SEQ ID NO: 57479 - DNA, 19 bp, Homo sapiens
  siRNA target sequence for FLJ13220 (NM_021927.1,675-693).
cccaaactgtagcaaactt

SEQ ID NO: 57480 - DNA, 19 bp, Homo sapiens
  siRNA target sequence for FLJ13220 (NM_021927.1,720-738).
cggtaattccagttataaa

SEQ ID NO: 57481 - DNA, 19 bp, Homo sapiens
  siRNA target sequence for FLJ13220 (NM_021927.1,765-783).
ctgaaagggttgaaaacca

SEQ ID NO: 57482 - DNA, 19 bp, Homo sapiens
  siRNA target sequence for FLJ13220 (NM_021927.1,773-791).
gttgaaaaccaaattgaga

SEQ ID NO: 57483 - DNA, 19 bp, Homo sapiens
  siRNA target sequence for FLJ13220 (NM_021927.1,790-808).
gaaagtgtttgatattcca

SEQ ID NO: 57484 - DNA, 19 bp, Homo sapiens
  siRNA target sequence for FLJ13220 (NM_021927.1,796-814).
gtttgatattccaagtgat

SEQ ID NO: 57485 - DNA, 19 bp, Homo sapiens
  siRNA target sequence for FLJ13220 (NM_021927.1,834-852).
ctaaacttggaacaaatgt

SEQ ID NO: 57486 - DNA, 19 bp, Homo sapiens
  siRNA target sequence for FLJ13220 (NM_021927.1,914-932).
cctctgagagctttggtat

SEQ ID NO: 57487 - DNA, 19 bp, Homo sapiens
  siRNA target sequence for FLJ13220 (NM_021927.1,915-933).
ctctgagagctttggtatt

SEQ ID NO: 57488 - DNA, 19 bp, Homo sapiens
  siRNA target sequence for FLJ13220 (NM_021927.1,940-958).
cacctttgaccagtataga

SEQ ID NO: 57489 - DNA, 19 bp, Homo sapiens
  siRNA target sequence for FLJ13220 (NM_021927.1,949-967).
ccagtatagaggtgtgata

SEQ ID NO: 57490 - DNA, 19 bp, Homo sapiens
  siRNA target sequence for FLJ13220 (NM_021927.1,964-982).
gatagccaatgtagcatta

SEQ ID NO: 57491 - DNA, 19 bp, Homo sapiens
  siRNA target sequence for FLJ13220 (NM_021927.1,1016-1034).
gtatctgcacatactcaaa

SEQ ID NO: 57492 - DNA, 19 bp, Homo sapiens
  siRNA target sequence for FLJ13220 (NM_021927.1,1023-1041).
cacatactcaaaagacata

SEQ ID NO: 57493 - DNA, 19 bp, Homo sapiens
  siRNA target sequence for FLJ13220 (NM_021927.1,1036-1054).
gacatacgaagttaatgaa

SEQ ID NO: 57494 - DNA, 19 bp, Homo sapiens
  siRNA target sequence for FLJ13220 (NM_021927.1,1055-1073).
gtaggagtcttgaatccta

SEQ ID NO: 57495 - DNA, 19 bp, Homo sapiens
  siRNA target sequence for FLJ13220 (NM_021927.1,1076-1094).
gagcagccaactcataaat

SEQ ID NO: 57496 - DNA, 19 bp, Homo sapiens
  siRNA target sequence for FLJ13220 (NM_021927.1,1081-1099).
gccaactcataaattatat

SEQ ID NO: 57497 - DNA, 19 bp, Homo sapiens
  siRNA target sequence for FLJ13220 (NM_021927.1,1120-1138).
gattgctgggatgaaagat

SEQ ID NO: 57498 - DNA, 19 bp, Homo sapiens
  siRNA target sequence for FLJ13220 (NM_021927.1,1141-1159).
cactgaagcgcaaatagga

SEQ ID NO: 57499 - DNA, 19 bp, Homo sapiens
  siRNA target sequence for FLJ13220 (NM_021927.1,1149-1167).
cgcaaataggagatacatt

SEQ ID NO: 57500 - DNA, 19 bp, Homo sapiens
  siRNA target sequence for FLJ13220 (NM_021927.1,1244-1262).
cctctagaccaatctgaat

SEQ ID NO: 57501 - DNA, 19 bp, Homo sapiens
  siRNA target sequence for FLJ13220 (NM_021927.1,1245-1263).
ctctagaccaatctgaata

SEQ ID NO: 57502 - DNA, 19 bp, Homo sapiens
  siRNA target sequence for FLJ13220 (NM_021927.1,1267-1285).
caatctgaagagtgctata

SEQ ID NO: 57503 - DNA, 19 bp, Homo sapiens
  siRNA target sequence for FLJ13220 (NM_021927.1,1350-1368).
ctggctggaggctaggatt

SEQ ID NO: 57504 - DNA, 19 bp, Homo sapiens
  siRNA target sequence for FLJ13220 (NM_021927.1,1376-1394).
cttttgcacatggaagttt

SEQ ID NO: 57505 - DNA, 19 bp, Homo sapiens
  siRNA target sequence for FLJ13220 (NM_021927.1,1486-1504).
gataaaggaacatagagaa

SEQ ID NO: 57506 - DNA, 19 bp, Homo sapiens
  siRNA target sequence for FLJ13220 (NM_021927.1,1529-1547).
gcacaattccccgataaat

SEQ ID NO: 57507 - DNA, 19 bp, Homo sapiens
  siRNA target sequence for FLJ13220 (NM_021927.1,1532-1550).
caattccccgataaatcaa

SEQ ID NO: 57508 - DNA, 19 bp, Homo sapiens
  siRNA target sequence for FLJ13220 (NM_021927.1,1537-1555).
ccccgataaatcaaaagta

SEQ ID NO: 57509 - DNA, 19 bp, Homo sapiens
  siRNA target sequence for FLJ13220 (NM_021927.1,1538-1556).
cccgataaatcaaaagtaa

SEQ ID NO: 57510 - DNA, 19 bp, Homo sapiens
  siRNA target sequence for FLJ13220 (NM_021927.1,1574-1592).
gttgttttgggcactatta

SEQ ID NO: 57511 - DNA, 19 bp, Homo sapiens
  siRNA target sequence for FLJ13220 (NM_021927.1,1638-1656).
ctcgaagagcagttcagaa

SEQ ID NO: 57512 - DNA, 19 bp, Homo sapiens
  siRNA target sequence for FLJ13220 (NM_021927.1,1644-1662).
gagcagttcagaagaatat

SEQ ID NO: 57513 - DNA, 19 bp, Homo sapiens
  siRNA target sequence for FLJ13220 (NM_021927.1,1751-1769).
ctatcttctggatatgcta

SEQ ID NO: 57514 - DNA, 19 bp, Homo sapiens
  siRNA target sequence for FLJ13220 (NM_021927.1,1758-1776).
ctggatatgctagttttga

SEQ ID NO: 57515 - DNA, 19 bp, Homo sapiens
  siRNA target sequence for FLJ13220 (NM_021927.1,1760-1778).
ggatatgctagttttgatt

SEQ ID NO: 57516 - DNA, 19 bp, Homo sapiens
  siRNA target sequence for FLJ13220 (NM_021927.1,1761-1779).
gatatgctagttttgatta

SEQ ID NO: 57517 - DNA, 19 bp, Homo sapiens
  siRNA target sequence for FLJ13220 (NM_021927.1,1796-1814).
cagactgcagaacttgtaa

SEQ ID NO: 57518 - DNA, 19 bp, Homo sapiens
  siRNA target sequence for FLJ13220 (NM_021927.1,1803-1821).
cagaacttgtaaaaatgga

SEQ ID NO: 57519 - DNA, 19 bp, Homo sapiens
  siRNA target sequence for FLJ13220 (NM_021927.1,1849-1867).
ggagctagtaactgttgta

SEQ ID NO: 57520 - DNA, 19 bp, Homo sapiens
  siRNA target sequence for FLJ13220 (NM_021927.1,1860-1878).
ctgttgtacacaaagacaa

SEQ ID NO: 57521 - DNA, 19 bp, Homo sapiens
  siRNA target sequence for FLJ13220 (NM_021927.1,1958-1976).
gctgctattggaagtaaaa

SEQ ID NO: 57522 - DNA, 19 bp, Homo sapiens
  siRNA target sequence for FLJ13220 (NM_021927.1,1959-1977).
ctgctattggaagtaaaat

SEQ ID NO: 57523 - DNA, 19 bp, Homo sapiens
  siRNA target sequence for FLJ13220 (NM_021927.1,1962-1980).
ctattggaagtaaaatcat

SEQ ID NO: 57524 - DNA, 19 bp, Homo sapiens
  siRNA target sequence for FLJ13220 (NM_021927.1,2039-2057).
gatattacccgaaaaatga

SEQ ID NO: 57525 - DNA, 19 bp, Homo sapiens
  siRNA target sequence for FLJ13220 (NM_021927.1,2106-2124).
gcaacgttgaagttccaaa

SEQ ID NO: 57526 - DNA, 19 bp, Homo sapiens
  siRNA target sequence for FLJ13220 (NM_021927.1,2144-2162).
ctgaaaacacaatcttcta

SEQ ID NO: 57527 - DNA, 19 bp, Homo sapiens
  siRNA target sequence for GSPT1 (NM_002094.1,845-863).
cgccaggtgctcctaagaa

SEQ ID NO: 57528 - DNA, 19 bp, Homo sapiens
  siRNA target sequence for GSPT1 (NM_002094.1,960-978).
gacgcttgaaaagtatgaa

SEQ ID NO: 57529 - DNA, 19 bp, Homo sapiens
  siRNA target sequence for GSPT1 (NM_002094.1,1288-1306).
cacctaattgtgctaatta

SEQ ID NO: 57530 - DNA, 19 bp, Homo sapiens
  siRNA target sequence for GSPT1 (NM_002094.1,1290-1308).
cctaattgtgctaattaat

SEQ ID NO: 57531 - DNA, 19 bp, Homo sapiens
  siRNA target sequence for GSPT1 (NM_002094.1,1291-1309).
ctaattgtgctaattaata

SEQ ID NO: 57532 - DNA, 19 bp, Homo sapiens
  siRNA target sequence for GSPT1 (NM_002094.1,1436-1454).
gacttactggagcaaatct

SEQ ID NO: 57533 - DNA, 19 bp, Homo sapiens
  siRNA target sequence for GSPT1 (NM_002094.1,1438-1456).
cttactggagcaaatctca

SEQ ID NO: 57534 - DNA, 19 bp, Homo sapiens
  siRNA target sequence for GSPT1 (NM_002094.1,1524-1542).
gaacttcaatagatcagtt

SEQ ID NO: 57535 - DNA, 19 bp, Homo sapiens
  siRNA target sequence for GSPT1 (NM_002094.1,1682-1700).
gaatactttccgatgatgt

SEQ ID NO: 57536 - DNA, 19 bp, Homo sapiens
  siRNA target sequence for GSPT1 (NM_002094.1,1832-1850).
cccagatagtgattataga

SEQ ID NO: 57537 - DNA, 19 bp, Homo sapiens
  siRNA target sequence for GSPT1 (NM_002094.1,2041-2059).
cttgagacctttaaagact

SEQ ID NO: 57538 - DNA, 19 bp, Homo sapiens
  siRNA target sequence for GSPT2 (NM_018094.1,467-485).
cgggataccctcaaggtaa

SEQ ID NO: 57539 - DNA, 19 bp, Homo sapiens
  siRNA target sequence for GSPT2 (NM_018094.1,540-558).
gcttgaaggttccaattca

SEQ ID NO: 57540 - DNA, 19 bp, Homo sapiens
  siRNA target sequence for GSPT2 (NM_018094.1,630-648).
ggagcacagtaaagaagta

SEQ ID NO: 57541 - DNA, 19 bp, Homo sapiens
  siRNA target sequence for GSPT2 (NM_018094.1,765-783).
ctcaggtgcacctaagaaa

SEQ ID NO: 57542 - DNA, 19 bp, Homo sapiens
  siRNA target sequence for GSPT2 (NM_018094.1,837-855).
cggaggacagataatgttt

SEQ ID NO: 57543 - DNA, 19 bp, Homo sapiens
  siRNA target sequence for GSPT2 (NM_018094.1,1196-1214).
caggggtaaaacatttaat

SEQ ID NO: 57544 - DNA, 19 bp, Homo sapiens
  siRNA target sequence for GSPT2 (NM_018094.1,1309-1327).
gtaggcttcagtccaaaaa

SEQ ID NO: 57545 - DNA, 19 bp, Homo sapiens
  siRNA target sequence for GSPT2 (NM_018094.1,1441-1459).
ccaaacttcaacagatcaa

SEQ ID NO: 57546 - DNA, 19 bp, Homo sapiens
  siRNA target sequence for GSPT2 (NM_018094.1,1530-1548).
ggaatccgggtccattttt

SEQ ID NO: 57547 - DNA, 19 bp, Homo sapiens
  siRNA target sequence for GSPT2 (NM_018094.1,1531-1549).
gaatccgggtccattttta

SEQ ID NO: 57548 - DNA, 19 bp, Homo sapiens
  siRNA target sequence for GSPT2 (NM_018094.1,1736-1754).
gacgcacgtttgatgttca

SEQ ID NO: 57549 - DNA, 19 bp, Homo sapiens
  siRNA target sequence for GSPT2 (NM_018094.1,1739-1757).
gcacgtttgatgttcagat

SEQ ID NO: 57550 - DNA, 19 bp, Homo sapiens
  siRNA target sequence for GSPT2 (NM_018094.1,1740-1758).
cacgtttgatgttcagata

SEQ ID NO: 57551 - DNA, 19 bp, Homo sapiens
  siRNA target sequence for GSPT2 (NM_018094.1,1742-1760).
cgtttgatgttcagatagt

SEQ ID NO: 57552 - DNA, 19 bp, Homo sapiens
  siRNA target sequence for GSPT2 (NM_018094.1,1898-1916).
cccgcttcgtgaaacaaga

SEQ ID NO: 57553 - DNA, 19 bp, Homo sapiens
  siRNA target sequence for GSPT2 (NM_018094.1,1899-1917).
ccgcttcgtgaaacaagat

SEQ ID NO: 57554 - DNA, 19 bp, Homo sapiens
  siRNA target sequence for GSPT2 (NM_018094.1,1901-1919).
gcttcgtgaaacaagatca

SEQ ID NO: 57555 - DNA, 19 bp, Homo sapiens
  siRNA target sequence for GSPT2 (NM_018094.1,1902-1920).
cttcgtgaaacaagatcaa

SEQ ID NO: 57556 - DNA, 19 bp, Homo sapiens
  siRNA target sequence for GSPT2 (NM_018094.1,1956-1974).
ctgcctcgagacgttcaaa

SEQ ID NO: 57557 - DNA, 19 bp, Homo sapiens
  siRNA target sequence for GSPT2 (NM_018094.1,1958-1976).
gcctcgagacgttcaaaga

SEQ ID NO: 57558 - DNA, 19 bp, Homo sapiens
  siRNA target sequence for GSPT2 (NM_018094.1,1959-1977).
cctcgagacgttcaaagat

SEQ ID NO: 57559 - DNA, 19 bp, Homo sapiens
  siRNA target sequence for GSPT2 (NM_018094.1,1960-1978).
ctcgagacgttcaaagatt

SEQ ID NO: 57560 - DNA, 19 bp, Homo sapiens
  siRNA target sequence for GSPT2 (NM_018094.1,1962-1980).
cgagacgttcaaagatttt

SEQ ID NO: 57561 - DNA, 19 bp, Homo sapiens
  siRNA target sequence for GSPT2 (NM_018094.1,1965-1983).
gacgttcaaagattttcct

SEQ ID NO: 57562 - DNA, 19 bp, Homo sapiens
  siRNA target sequence for GTPBP1 (NM_004286.3,257-275).
ggatgcggagagaccatat

SEQ ID NO: 57563 - DNA, 19 bp, Homo sapiens
  siRNA target sequence for GTPBP1 (NM_004286.3,258-276).
gatgcggagagaccatata

SEQ ID NO: 57564 - DNA, 19 bp, Homo sapiens
  siRNA target sequence for GTPBP1 (NM_004286.3,261-279).
gcggagagaccatatatgt

SEQ ID NO: 57565 - DNA, 19 bp, Homo sapiens
  siRNA target sequence for GTPBP1 (NM_004286.3,264-282).
gagagaccatatatgtcat

SEQ ID NO: 57566 - DNA, 19 bp, Homo sapiens
  siRNA target sequence for GTPBP1 (NM_004286.3,357-375).
gcatggcggaacagataga

SEQ ID NO: 57567 - DNA, 19 bp, Homo sapiens
  siRNA target sequence for GTPBP1 (NM_004286.3,446-464).
cgagtaggagacaatgact

SEQ ID NO: 57568 - DNA, 19 bp, Homo sapiens
  siRNA target sequence for GTPBP1 (NM_004286.3,580-598).
cttccgccacaaacatgaa

SEQ ID NO: 57569 - DNA, 19 bp, Homo sapiens
  siRNA target sequence for GTPBP1 (NM_004286.3,718-736).
gaagtccacgaaagtcatt

SEQ ID NO: 57570 - DNA, 19 bp, Homo sapiens
  siRNA target sequence for GTPBP1 (NM_004286.3,723-741).
ccacgaaagtcattacctt

SEQ ID NO: 57571 - DNA, 19 bp, Homo sapiens
  siRNA target sequence for GTPBP1 (NM_004286.3,877-895).
ggcactggcactcaatgta

SEQ ID NO: 57572 - DNA, 19 bp, Homo sapiens
  siRNA target sequence for GTPBP1 (NM_004286.3,1098-1116).
caggcgagaacctagatct

SEQ ID NO: 57573 - DNA, 19 bp, Homo sapiens
  siRNA target sequence for GTPBP1 (NM_004286.3,1173-1191).
ctgctgagtttcagattga

SEQ ID NO: 57574 - DNA, 19 bp, Homo sapiens
  siRNA target sequence for GTPBP1 (NM_004286.3,1239-1257).
cactgagaggcctgatcaa

SEQ ID NO: 57575 - DNA, 19 bp, Homo sapiens
  siRNA target sequence for GTPBP1 (NM_004286.3,1248-1266).
gcctgatcaagctgaatga

SEQ ID NO: 57576 - DNA, 19 bp, Homo sapiens
  siRNA target sequence for GTPBP1 (NM_004286.3,1250-1268).
ctgatcaagctgaatgaca

SEQ ID NO: 57577 - DNA, 19 bp, Homo sapiens
  siRNA target sequence for GTPBP1 (NM_004286.3,1308-1326).
ccattgctgtcaaatccat

SEQ ID NO: 57578 - DNA, 19 bp, Homo sapiens
  siRNA target sequence for GTPBP1 (NM_004286.3,1374-1392).
catcctttgcgctgaagaa

SEQ ID NO: 57579 - DNA, 19 bp, Homo sapiens
  siRNA target sequence for GTPBP1 (NM_004286.3,1377-1395).
cctttgcgctgaagaagat

SEQ ID NO: 57580 - DNA, 19 bp, Homo sapiens
  siRNA target sequence for GTPBP1 (NM_004286.3,1490-1508).
caccaccccaccacaatta

SEQ ID NO: 57581 - DNA, 19 bp, Homo sapiens
  siRNA target sequence for GTPBP1 (NM_004286.3,1635-1653).
ctgagtacctgcacataga

SEQ ID NO: 57582 - DNA, 19 bp, Homo sapiens
  siRNA target sequence for GTPBP1 (NM_004286.3,1743-1761).
ccaagccgcagcagattaa

SEQ ID NO: 57583 - DNA, 19 bp, Homo sapiens
  siRNA target sequence for GTPBP1 (NM_004286.3,1744-1762).
caagccgcagcagattaaa

SEQ ID NO: 57584 - DNA, 19 bp, Homo sapiens
  siRNA target sequence for GTPBP2 (NM_019096.2,352-370).
gagagcgagaagtggatta

SEQ ID NO: 57585 - DNA, 19 bp, Homo sapiens
  siRNA target sequence for GTPBP2 (NM_019096.2,356-374).
gcgagaagtggattatgat

SEQ ID NO: 57586 - DNA, 19 bp, Homo sapiens
  siRNA target sequence for GTPBP2 (NM_019096.2,397-415).
ccgaggtgctagtacgaaa

SEQ ID NO: 57587 - DNA, 19 bp, Homo sapiens
  siRNA target sequence for GTPBP2 (NM_019096.2,535-553).
gggctcggctcaacctttt

SEQ ID NO: 57588 - DNA, 19 bp, Homo sapiens
  siRNA target sequence for GTPBP2 (NM_019096.2,652-670).
cacggacagcagaagagat

SEQ ID NO: 57589 - DNA, 19 bp, Homo sapiens
  siRNA target sequence for GTPBP2 (NM_019096.2,728-746).
cctacacaccaccatcttt

SEQ ID NO: 57590 - DNA, 19 bp, Homo sapiens
  siRNA target sequence for GTPBP2 (NM_019096.2,1014-1032).
gctcagtcacccaatgtca

SEQ ID NO: 57591 - DNA, 19 bp, Homo sapiens
  siRNA target sequence for GTPBP2 (NM_019096.2,1449-1467).
gcagagatagtcttactgt

SEQ ID NO: 57592 - DNA, 19 bp, Homo sapiens
  siRNA target sequence for GTPBP2 (NM_019096.2,1594-1612).
gtttccgcttcctgaaaca

SEQ ID NO: 57593 - DNA, 19 bp, Homo sapiens
  siRNA target sequence for GTPBP2 (NM_019096.2,1673-1691).
cggccatgtcactgatgta

SEQ ID NO: 57594 - DNA, 19 bp, Homo sapiens
  siRNA target sequence for GTPBP2 (NM_019096.2,1675-1693).
gccatgtcactgatgtaca

SEQ ID NO: 57595 - DNA, 19 bp, Homo sapiens
  siRNA target sequence for HBS1L (NM_006620.2,207-225).
ggaatgttcgaggctataa

SEQ ID NO: 57596 - DNA, 19 bp, Homo sapiens
  siRNA target sequence for HBS1L (NM_006620.2,219-237).
gctataactacgatgaaga

SEQ ID NO: 57597 - DNA, 19 bp, Homo sapiens
  siRNA target sequence for HBS1L (NM_006620.2,265-283).
gtctgtagaggatgattat

SEQ ID NO: 57598 - DNA, 19 bp, Homo sapiens
  siRNA target sequence for HBS1L (NM_006620.2,269-287).
gtagaggatgattattgta

SEQ ID NO: 57599 - DNA, 19 bp, Homo sapiens
  siRNA target sequence for HBS1L (NM_006620.2,346-364).
gcctgtggaagaatatgat

SEQ ID NO: 57600 - DNA, 19 bp, Homo sapiens
  siRNA target sequence for HBS1L (NM_006620.2,374-392).
ctgaaagaatcttccaatt

SEQ ID NO: 57601 - DNA, 19 bp, Homo sapiens
  siRNA target sequence for HBS1L (NM_006620.2,388-406).
caattctgtttcaaaccat

SEQ ID NO: 57602 - DNA, 19 bp, Homo sapiens
  siRNA target sequence for HBS1L (NM_006620.2,409-427).
gctcagtggatttgatcaa

SEQ ID NO: 57603 - DNA, 19 bp, Homo sapiens
  siRNA target sequence for HBS1L (NM_006620.2,422-440).
gatcaagctcgtctttatt

SEQ ID NO: 57604 - DNA, 19 bp, Homo sapiens
  siRNA target sequence for HBS1L (NM_006620.2,425-443).
caagctcgtctttattcat

SEQ ID NO: 57605 - DNA, 19 bp, Homo sapiens
  siRNA target sequence for HBS1L (NM_006620.2,547-565).
ggttctggaacaagataga

SEQ ID NO: 57606 - DNA, 19 bp, Homo sapiens
  siRNA target sequence for HBS1L (NM_006620.2,560-578).
gatagagtgcagagtttga

SEQ ID NO: 57607 - DNA, 19 bp, Homo sapiens
  siRNA target sequence for HBS1L (NM_006620.2,583-601).
caagaatgaggcaacagta

SEQ ID NO: 57608 - DNA, 19 bp, Homo sapiens
  siRNA target sequence for HBS1L (NM_006620.2,640-658).
ccagacatcgcgaagtgaa

SEQ ID NO: 57609 - DNA, 19 bp, Homo sapiens
  siRNA target sequence for HBS1L (NM_006620.2,643-661).
gacatcgcgaagtgaatct

SEQ ID NO: 57610 - DNA, 19 bp, Homo sapiens
  siRNA target sequence for HBS1L (NM_006620.2,648-666).
cgcgaagtgaatctgaaat

SEQ ID NO: 57611 - DNA, 19 bp, Homo sapiens
  siRNA target sequence for HBS1L (NM_006620.2,649-667).
gcgaagtgaatctgaaatt

SEQ ID NO: 57612 - DNA, 19 bp, Homo sapiens
  siRNA target sequence for HBS1L (NM_006620.2,651-669).
gaagtgaatctgaaattgt

SEQ ID NO: 57613 - DNA, 19 bp, Homo sapiens
  siRNA target sequence for HBS1L (NM_006620.2,668-686).
gtgccaaaagttgctaaaa

SEQ ID NO: 57614 - DNA, 19 bp, Homo sapiens
  siRNA target sequence for HBS1L (NM_006620.2,677-695).
gttgctaaaatgactgtat

SEQ ID NO: 57615 - DNA, 19 bp, Homo sapiens
  siRNA target sequence for HBS1L (NM_006620.2,727-745).
gcctggagtatcttctgaa

SEQ ID NO: 57616 - DNA, 19 bp, Homo sapiens
  siRNA target sequence for HBS1L (NM_006620.2,759-777).
gtttccacacacctcaaaa

SEQ ID NO: 57617 - DNA, 19 bp, Homo sapiens
  siRNA target sequence for HBS1L (NM_006620.2,887-905).
ccagcaccggtgaaaaagt

SEQ ID NO: 57618 - DNA, 19 bp, Homo sapiens
  siRNA target sequence for HBS1L (NM_006620.2,963-981).
ggaagcagctactcaactt

SEQ ID NO: 57619 - DNA, 19 bp, Homo sapiens
  siRNA target sequence for HBS1L (NM_006620.2,964-982).
gaagcagctactcaactta

SEQ ID NO: 57620 - DNA, 19 bp, Homo sapiens
  siRNA target sequence for HBS1L (NM_006620.2,985-1003).
ggtcattggtcatgttgat

SEQ ID NO: 57621 - DNA, 19 bp, Homo sapiens
  siRNA target sequence for HBS1L (NM_006620.2,1062-1080).
gaactatgcataagtatga

SEQ ID NO: 57622 - DNA, 19 bp, Homo sapiens
  siRNA target sequence for HBS1L (NM_006620.2,1065-1083).
ctatgcataagtatgaaca

SEQ ID NO: 57623 - DNA, 19 bp, Homo sapiens
  siRNA target sequence for HBS1L (NM_006620.2,1075-1093).
gtatgaacaggagtctaaa

SEQ ID NO: 57624 - DNA, 19 bp, Homo sapiens
  siRNA target sequence for HBS1L (NM_006620.2,1168-1186).
catggatgttggtatgaca

SEQ ID NO: 57625 - DNA, 19 bp, Homo sapiens
  siRNA target sequence for HBS1L (NM_006620.2,1172-1190).
gatgttggtatgacaaagt

SEQ ID NO: 57626 - DNA, 19 bp, Homo sapiens
  siRNA target sequence for HBS1L (NM_006620.2,1198-1216).
cacaaccaaagttattaca

SEQ ID NO: 57627 - DNA, 19 bp, Homo sapiens
  siRNA target sequence for HBS1L (NM_006620.2,1278-1296).
cggatgtagctgttttagt

SEQ ID NO: 57628 - DNA, 19 bp, Homo sapiens
  siRNA target sequence for HBS1L (NM_006620.2,1279-1297).
ggatgtagctgttttagtt

SEQ ID NO: 57629 - DNA, 19 bp, Homo sapiens
  siRNA target sequence for HBS1L (NM_006620.2,1423-1441).
ggttaattggcaacaagaa

SEQ ID NO: 57630 - DNA, 19 bp, Homo sapiens
  siRNA target sequence for HBS1L (NM_006620.2,1461-1479).
gaaaacttgggcactttct

SEQ ID NO: 57631 - DNA, 19 bp, Homo sapiens
  siRNA target sequence for HBS1L (NM_006620.2,1532-1550).
ctcagtggtgaaaatctaa

SEQ ID NO: 57632 - DNA, 19 bp, Homo sapiens
  siRNA target sequence for HBS1L (NM_006620.2,1538-1556).
ggtgaaaatctaatcacaa

SEQ ID NO: 57633 - DNA, 19 bp, Homo sapiens
  siRNA target sequence for HBS1L (NM_006620.2,1569-1587).
gtgaactcacaaaatggta

SEQ ID NO: 57634 - DNA, 19 bp, Homo sapiens
  siRNA target sequence for HBS1L (NM_006620.2,1584-1602).
ggtataaaggactatgttt

SEQ ID NO: 57635 - DNA, 19 bp, Homo sapiens
  siRNA target sequence for HBS1L (NM_006620.2,1627-1645).
gcctccccagcgatctatt

SEQ ID NO: 57636 - DNA, 19 bp, Homo sapiens
  siRNA target sequence for HBS1L (NM_006620.2,1631-1649).
ccccagcgatctattgaca

SEQ ID NO: 57637 - DNA, 19 bp, Homo sapiens
  siRNA target sequence for HBS1L (NM_006620.2,1632-1650).
cccagcgatctattgacaa

SEQ ID NO: 57638 - DNA, 19 bp, Homo sapiens
  siRNA target sequence for HBS1L (NM_006620.2,1669-1687).
gtccgatgttttcaaagat

SEQ ID NO: 57639 - DNA, 19 bp, Homo sapiens
  siRNA target sequence for HBS1L (NM_006620.2,1671-1689).
ccgatgttttcaaagatca

SEQ ID NO: 57640 - DNA, 19 bp, Homo sapiens
  siRNA target sequence for HBS1L (NM_006620.2,1672-1690).
cgatgttttcaaagatcaa

SEQ ID NO: 57641 - DNA, 19 bp, Homo sapiens
  siRNA target sequence for HBS1L (NM_006620.2,1691-1709).
ggatctggattttgcataa

SEQ ID NO: 57642 - DNA, 19 bp, Homo sapiens
  siRNA target sequence for HBS1L (NM_006620.2,1756-1774).
ggcaatgcctcctaatgaa

SEQ ID NO: 57643 - DNA, 19 bp, Homo sapiens
  siRNA target sequence for HBS1L (NM_006620.2,1757-1775).
gcaatgcctcctaatgaaa

SEQ ID NO: 57644 - DNA, 19 bp, Homo sapiens
  siRNA target sequence for HBS1L (NM_006620.2,1763-1781).
cctcctaatgaaacttgta

SEQ ID NO: 57645 - DNA, 19 bp, Homo sapiens
  siRNA target sequence for HBS1L (NM_006620.2,1776-1794).
cttgtaccgtgaaaggaat

SEQ ID NO: 57646 - DNA, 19 bp, Homo sapiens
  siRNA target sequence for HBS1L (NM_006620.2,1830-1848).
caggcgatcatgttagtct

SEQ ID NO: 57647 - DNA, 19 bp, Homo sapiens
  siRNA target sequence for HBS1L (NM_006620.2,1832-1850).
ggcgatcatgttagtctta

SEQ ID NO: 57648 - DNA, 19 bp, Homo sapiens
  siRNA target sequence for HBS1L (NM_006620.2,1834-1852).
cgatcatgttagtcttact

SEQ ID NO: 57649 - DNA, 19 bp, Homo sapiens
  siRNA target sequence for HBS1L (NM_006620.2,1856-1874).
gttgggatggatatcatca

SEQ ID NO: 57650 - DNA, 19 bp, Homo sapiens
  siRNA target sequence for HBS1L (NM_006620.2,1864-1882).
ggatatcatcaaaatcaat

SEQ ID NO: 57651 - DNA, 19 bp, Homo sapiens
  siRNA target sequence for HBS1L (NM_006620.2,1938-1956).
gagcccgaatcctcatctt

SEQ ID NO: 57652 - DNA, 19 bp, Homo sapiens
  siRNA target sequence for HBS1L (NM_006620.2,1942-1960).
ccgaatcctcatctttaat

SEQ ID NO: 57653 - DNA, 19 bp, Homo sapiens
  siRNA target sequence for HBS1L (NM_006620.2,1943-1961).
cgaatcctcatctttaata

SEQ ID NO: 57654 - DNA, 19 bp, Homo sapiens
  siRNA target sequence for HBS1L (NM_006620.2,1991-2009).
gtgctgttacactaccaaa

SEQ ID NO: 57655 - DNA, 19 bp, Homo sapiens
  siRNA target sequence for HBS1L (NM_006620.2,2025-2043).
ccgttattaaacgattgat

SEQ ID NO: 57656 - DNA, 19 bp, Homo sapiens
  siRNA target sequence for HBS1L (NM_006620.2,2026-2044).
cgttattaaacgattgatt

SEQ ID NO: 57657 - DNA, 19 bp, Homo sapiens
  siRNA target sequence for HBS1L (NM_006620.2,2036-2054).
cgattgattagtgtcttaa

SEQ ID NO: 57658 - DNA, 19 bp, Homo sapiens
  siRNA target sequence for HBS1L (NM_006620.2,2037-2055).
gattgattagtgtcttaaa

SEQ ID NO: 57659 - DNA, 19 bp, Homo sapiens
  siRNA target sequence for HBS1L (NM_006620.2,2065-2083).
gggtgaagtcacaaagaaa

SEQ ID NO: 57660 - DNA, 19 bp, Homo sapiens
  siRNA target sequence for HBS1L (NM_006620.2,2086-2104).
gcctaagtttttgactaaa

SEQ ID NO: 57661 - DNA, 19 bp, Homo sapiens
  siRNA target sequence for HBS1L (NM_006620.2,2142-2160).
caatagctcttgagctata

SEQ ID NO: 57662 - DNA, 19 bp, Homo sapiens
  siRNA target sequence for HBS1L (NM_006620.2,2150-2168).
cttgagctatataaagact

SEQ ID NO: 57663 - DNA, 19 bp, Homo sapiens
  siRNA target sequence for HBS1L (NM_006620.2,2181-2199).
ggaggttcatgctacgtta

SEQ ID NO: 57664 - DNA, 19 bp, Homo sapiens
  siRNA target sequence for HBS1L (NM_006620.2,2195-2213).
cgttacggtggttctacaa

SEQ ID NO: 57665 - DNA, 19 bp, Homo sapiens
  siRNA target sequence for HBS1L (NM_006620.2,2196-2214).
gttacggtggttctacaat

SEQ ID NO: 57666 - DNA, 19 bp, Homo sapiens
  siRNA target sequence for HBS1L (NM_006620.2,2200-2218).
cggtggttctacaatagct

SEQ ID NO: 57667 - DNA, 19 bp, Homo sapiens
  siRNA target sequence for HBS1L (NM_006620.2,2222-2240).
ggtgttgtcactgagataa

SEQ ID NO: 57668 - DNA, 19 bp, Homo sapiens
  siRNA target sequence for HTATSF1 (NM_014500.3,216-234).
cagttgcgaatgcaagaat

SEQ ID NO: 57669 - DNA, 19 bp, Homo sapiens
  siRNA target sequence for HTATSF1 (NM_014500.3,277-295).
gcggagaacccgattctct

SEQ ID NO: 57670 - DNA, 19 bp, Homo sapiens
  siRNA target sequence for HTATSF1 (NM_014500.3,344-362).
ggcttggttccccaagatt

SEQ ID NO: 57671 - DNA, 19 bp, Homo sapiens
  siRNA target sequence for HTATSF1 (NM_014500.3,345-363).
gcttggttccccaagatta

SEQ ID NO: 57672 - DNA, 19 bp, Homo sapiens
  siRNA target sequence for HTATSF1 (NM_014500.3,379-397).
ctacatatcaggccaatta

SEQ ID NO: 57673 - DNA, 19 bp, Homo sapiens
  siRNA target sequence for HTATSF1 (NM_014500.3,410-428).
cgatggcgcatctagttct

SEQ ID NO: 57674 - DNA, 19 bp, Homo sapiens
  siRNA target sequence for HTATSF1 (NM_014500.3,411-429).
gatggcgcatctagttcta

SEQ ID NO: 57675 - DNA, 19 bp, Homo sapiens
  siRNA target sequence for HTATSF1 (NM_014500.3,421-439).
ctagttctaccgcaaatgt

SEQ ID NO: 57676 - DNA, 19 bp, Homo sapiens
  siRNA target sequence for HTATSF1 (NM_014500.3,424-442).
gttctaccgcaaatgttga

SEQ ID NO: 57677 - DNA, 19 bp, Homo sapiens
  siRNA target sequence for HTATSF1 (NM_014500.3,430-448).
ccgcaaatgttgaagatgt

SEQ ID NO: 57678 - DNA, 19 bp, Homo sapiens
  siRNA target sequence for HTATSF1 (NM_014500.3,541-559).
gatggtttcatgttgaaga

SEQ ID NO: 57679 - DNA, 19 bp, Homo sapiens
  siRNA target sequence for HTATSF1 (NM_014500.3,600-618).
gatattacagtggatgaat

SEQ ID NO: 57680 - DNA, 19 bp, Homo sapiens
  siRNA target sequence for HTATSF1 (NM_014500.3,607-625).
cagtggatgaatttataca

SEQ ID NO: 57681 - DNA, 19 bp, Homo sapiens
  siRNA target sequence for HTATSF1 (NM_014500.3,611-629).
ggatgaatttatacaactt

SEQ ID NO: 57682 - DNA, 19 bp, Homo sapiens
  siRNA target sequence for HTATSF1 (NM_014500.3,632-650).
gtccaagtttggcattatt

SEQ ID NO: 57683 - DNA, 19 bp, Homo sapiens
  siRNA target sequence for HTATSF1 (NM_014500.3,634-652).
ccaagtttggcattattat

SEQ ID NO: 57684 - DNA, 19 bp, Homo sapiens
  siRNA target sequence for HTATSF1 (NM_014500.3,720-738).
gacggtctttgctgttatt

SEQ ID NO: 57685 - DNA, 19 bp, Homo sapiens
  siRNA target sequence for HTATSF1 (NM_014500.3,884-902).
gaagaagctgtctatgcaa

SEQ ID NO: 57686 - DNA, 19 bp, Homo sapiens
  siRNA target sequence for HTATSF1 (NM_014500.3,955-973).
gccatgagcgagttgtcat

SEQ ID NO: 57687 - DNA, 19 bp, Homo sapiens
  siRNA target sequence for HTATSF1 (NM_014500.3,1146-1164).
gctgattattgtattcaga

SEQ ID NO: 57688 - DNA, 19 bp, Homo sapiens
  siRNA target sequence for HTATSF1 (NM_014500.3,1214-1232).
ggatgggactacagattat

SEQ ID NO: 57689 - DNA, 19 bp, Homo sapiens
  siRNA target sequence for HTATSF1 (NM_014500.3,1314-1332).
ggccttaggcgttcagatt

SEQ ID NO: 57690 - DNA, 19 bp, Homo sapiens
  siRNA target sequence for HTATSF1 (NM_014500.3,1316-1334).
ccttaggcgttcagattct

SEQ ID NO: 57691 - DNA, 19 bp, Homo sapiens
  siRNA target sequence for HTATSF1 (NM_014500.3,1383-1401).
gagcaccccagcacatcta

SEQ ID NO: 57692 - DNA, 19 bp, Homo sapiens
  siRNA target sequence for HTATSF1 (NM_014500.3,1385-1403).
gcaccccagcacatctaaa

SEQ ID NO: 57693 - DNA, 19 bp, Homo sapiens
  siRNA target sequence for HTATSF1 (NM_014500.3,1386-1404).
caccccagcacatctaaaa

SEQ ID NO: 57694 - DNA, 19 bp, Homo sapiens
  siRNA target sequence for HTATSF1 (NM_014500.3,1389-1407).
cccagcacatctaaaatga

SEQ ID NO: 57695 - DNA, 19 bp, Homo sapiens
  siRNA target sequence for HTATSF1 (NM_014500.3,1433-1451).
ggcgtttgaagaacctata

SEQ ID NO: 57696 - DNA, 19 bp, Homo sapiens
  siRNA target sequence for HTATSF1 (NM_014500.3,1435-1453).
cgtttgaagaacctataga

SEQ ID NO: 57697 - DNA, 19 bp, Homo sapiens
  siRNA target sequence for HTATSF1 (NM_014500.3,1446-1464).
cctatagatgagaagaagt

SEQ ID NO: 57698 - DNA, 19 bp, Homo sapiens
  siRNA target sequence for HTATSF1 (NM_014500.3,1447-1465).
ctatagatgagaagaagtt

SEQ ID NO: 57699 - DNA, 19 bp, Homo sapiens
  siRNA target sequence for HTATSF1 (NM_014500.3,1509-1527).
gaaaacaatgctaaggaaa

SEQ ID NO: 57700 - DNA, 19 bp, Homo sapiens
  siRNA target sequence for HTATSF1 (NM_014500.3,1558-1576).
gccctgaaaaagaatctga

SEQ ID NO: 57701 - DNA, 19 bp, Homo sapiens
  siRNA target sequence for HTATSF1 (NM_014500.3,1586-1604).
ccccaaaagagggtttgaa

SEQ ID NO: 57702 - DNA, 19 bp, Homo sapiens
  siRNA target sequence for HTATSF1 (NM_014500.3,1666-1684).
gtcctaaaaaagagtctaa

SEQ ID NO: 57703 - DNA, 19 bp, Homo sapiens
  siRNA target sequence for HTATSF1 (NM_014500.3,1693-1711).
cactcaaaaatgattgtga

SEQ ID NO: 57704 - DNA, 19 bp, Homo sapiens
  siRNA target sequence for HTATSF1 (NM_014500.3,1766-1784).
ggaggttggccccacaaaa

SEQ ID NO: 57705 - DNA, 19 bp, Homo sapiens
  siRNA target sequence for HTATSF1 (NM_014500.3,1770-1788).
gttggccccacaaaagagt

SEQ ID NO: 57706 - DNA, 19 bp, Homo sapiens
  siRNA target sequence for HTATSF1 (NM_014500.3,1848-1866).
gatggctccgaaagagaat

SEQ ID NO: 57707 - DNA, 19 bp, Homo sapiens
  siRNA target sequence for HTATSF1 (NM_014500.3,1852-1870).
gctccgaaagagaatttga

SEQ ID NO: 57708 - DNA, 19 bp, Homo sapiens
  siRNA target sequence for HTATSF1 (NM_014500.3,1853-1871).
ctccgaaagagaatttgaa

SEQ ID NO: 57709 - DNA, 19 bp, Homo sapiens
  siRNA target sequence for HTATSF1 (NM_014500.3,1879-1897).
gtctcgagaaagatttgga

SEQ ID NO: 57710 - DNA, 19 bp, Homo sapiens
  siRNA target sequence for HTATSF1 (NM_014500.3,1961-1979).
ctctgaaaactccgaattt

SEQ ID NO: 57711 - DNA, 19 bp, Homo sapiens
  siRNA target sequence for HTATSF1 (NM_014500.3,1963-1981).
ctgaaaactccgaatttga

SEQ ID NO: 57712 - DNA, 19 bp, Homo sapiens
  siRNA target sequence for HTATSF1 (NM_014500.3,1986-2004).
gacggctctgaaaaagtgt

SEQ ID NO: 57713 - DNA, 19 bp, Homo sapiens
  siRNA target sequence for HTATSF1 (NM_014500.3,1988-2006).
cggctctgaaaaagtgtta

SEQ ID NO: 57714 - DNA, 19 bp, Homo sapiens
  siRNA target sequence for HTATSF1 (NM_014500.3,1990-2008).
gctctgaaaaagtgttaga

SEQ ID NO: 57715 - DNA, 19 bp, Homo sapiens
  siRNA target sequence for HTATSF1 (NM_014500.3,1993-2011).
ctgaaaaagtgttagatga

SEQ ID NO: 57716 - DNA, 19 bp, Homo sapiens
  siRNA target sequence for HTATSF1 (NM_014500.3,2017-2035).
gctctgagagagagtttga

SEQ ID NO: 57717 - DNA, 19 bp, Homo sapiens
  siRNA target sequence for HTATSF1 (NM_014500.3,2030-2048).
gtttgacgaagattcagat

SEQ ID NO: 57718 - DNA, 19 bp, Homo sapiens
  siRNA target sequence for HTATSF1 (NM_014500.3,2258-2276).
gttgttcgaagatgatgat

SEQ ID NO: 57719 - DNA, 19 bp, Homo sapiens
  siRNA target sequence for HTATSF1 (NM_014500.3,2321-2339).
gttgtttgacgattctgat

SEQ ID NO: 57720 - DNA, 19 bp, Homo sapiens
  siRNA target sequence for HTATSF1 (NM_014500.3,2389-2407).
ccactggcagcagctttat

SEQ ID NO: 57721 - DNA, 19 bp, Homo sapiens
  siRNA target sequence for HTATSF1 (NM_014500.3,2390-2408).
cactggcagcagctttatt

SEQ ID NO: 57722 - DNA, 19 bp, Homo sapiens
  siRNA target sequence for HTATSF1 (NM_014500.3,2394-2412).
ggcagcagctttattctca

SEQ ID NO: 57723 - DNA, 19 bp, Homo sapiens
  siRNA target sequence for SELB (NM_021937.2,249-267).
cccagatcattgatctgat

SEQ ID NO: 57724 - DNA, 19 bp, Homo sapiens
  siRNA target sequence for SELB (NM_021937.2,309-327).
cagcggaatgccttgtgat

SEQ ID NO: 57725 - DNA, 19 bp, Homo sapiens
  siRNA target sequence for SELB (NM_021937.2,352-370).
ggtcgtggtgctgaacaaa

SEQ ID NO: 57726 - DNA, 19 bp, Homo sapiens
  siRNA target sequence for SELB (NM_021937.2,355-373).
cgtggtgctgaacaaaata

SEQ ID NO: 57727 - DNA, 19 bp, Homo sapiens
  siRNA target sequence for SELB (NM_021937.2,394-412).
gagacaggcagcaattgat

SEQ ID NO: 57728 - DNA, 19 bp, Homo sapiens
  siRNA target sequence for SELB (NM_021937.2,457-475).
ccgaggtgcaccgattata

SEQ ID NO: 57729 - DNA, 19 bp, Homo sapiens
  siRNA target sequence for SELB (NM_021937.2,551-569).
ctcctgacgtcccagattt

SEQ ID NO: 57730 - DNA, 19 bp, Homo sapiens
  siRNA target sequence for SELB (NM_021937.2,554-572).
ctgacgtcccagatttcca

SEQ ID NO: 57731 - DNA, 19 bp, Homo sapiens
  siRNA target sequence for SELB (NM_021937.2,616-634).
ccactgtttctccatcaaa

SEQ ID NO: 57732 - DNA, 19 bp, Homo sapiens
  siRNA target sequence for SELB (NM_021937.2,984-1002).
gtcctgctccagataactt

SEQ ID NO: 57733 - DNA, 19 bp, Homo sapiens
  siRNA target sequence for SELB (NM_021937.2,1013-1031).
cctatactggactctttca

SEQ ID NO: 57734 - DNA, 19 bp, Homo sapiens
  siRNA target sequence for SELB (NM_021937.2,1033-1051).
cttctctcaagaatacctt

SEQ ID NO: 57735 - DNA, 19 bp, Homo sapiens
  siRNA target sequence for SELB (NM_021937.2,1224-1242).
ggctagatgcggacattca

SEQ ID NO: 57736 - DNA, 19 bp, Homo sapiens
  siRNA target sequence for SELB (NM_021937.2,1497-1515).
gccagagcggcaagttcaa

SEQ ID NO: 57737 - DNA, 19 bp, Homo sapiens
  siRNA target sequence for SELB (NM_021937.2,1655-1673).
gtgctcagcctgactttca

SEQ ID NO: 57738 - DNA, 19 bp, Homo sapiens
  siRNA target sequence for SELB (NM_021937.2,1668-1686).
ctttcaagcgttatgtctt

SEQ ID NO: 57739 - DNA, 19 bp, Homo sapiens
  siRNA target sequence for SUPT16H (NM_007192.2,429-447).
cgttgatgccattgttgta

SEQ ID NO: 57740 - DNA, 19 bp, Homo sapiens
  siRNA target sequence for SUPT16H (NM_007192.2,430-448).
gttgatgccattgttgtat

SEQ ID NO: 57741 - DNA, 19 bp, Homo sapiens
  siRNA target sequence for SUPT16H (NM_007192.2,498-516).
gacatggctctttggttat

SEQ ID NO: 57742 - DNA, 19 bp, Homo sapiens
  siRNA target sequence for SUPT16H (NM_007192.2,517-535).
gaactaactgatactatca

SEQ ID NO: 57743 - DNA, 19 bp, Homo sapiens
  siRNA target sequence for SUPT16H (NM_007192.2,609-627).
cactaagggcaatgagaat

SEQ ID NO: 57744 - DNA, 19 bp, Homo sapiens
  siRNA target sequence for SUPT16H (NM_007192.2,615-633).
gggcaatgagaatgctaat

SEQ ID NO: 57745 - DNA, 19 bp, Homo sapiens
  siRNA target sequence for SUPT16H (NM_007192.2,641-659).
ctgccatcacactgctaat

SEQ ID NO: 57746 - DNA, 19 bp, Homo sapiens
  siRNA target sequence for SUPT16H (NM_007192.2,652-670).
ctgctaatacgagaaaaga

SEQ ID NO: 57747 - DNA, 19 bp, Homo sapiens
  siRNA target sequence for SUPT16H (NM_007192.2,686-704).
gtagctttgacaaaatgat

SEQ ID NO: 57748 - DNA, 19 bp, Homo sapiens
  siRNA target sequence for SUPT16H (NM_007192.2,835-853).
gcagttgtggcatatacca

SEQ ID NO: 57749 - DNA, 19 bp, Homo sapiens
  siRNA target sequence for SUPT16H (NM_007192.2,836-854).
cagttgtggcatataccat

SEQ ID NO: 57750 - DNA, 19 bp, Homo sapiens
  siRNA target sequence for SUPT16H (NM_007192.2,845-863).
catataccatcgctgtaaa

SEQ ID NO: 57751 - DNA, 19 bp, Homo sapiens
  siRNA target sequence for SUPT16H (NM_007192.2,902-920).
gcatcacttctgaagtctt

SEQ ID NO: 57752 - DNA, 19 bp, Homo sapiens
  siRNA target sequence for SUPT16H (NM_007192.2,941-959).
gagtcatggaaatagttga

SEQ ID NO: 57753 - DNA, 19 bp, Homo sapiens
  siRNA target sequence for SUPT16H (NM_007192.2,1064-1082).
gttaccctcctatcattca

SEQ ID NO: 57754 - DNA, 19 bp, Homo sapiens
  siRNA target sequence for SUPT16H (NM_007192.2,1083-1101).
gagtggtggcaactataat

SEQ ID NO: 57755 - DNA, 19 bp, Homo sapiens
  siRNA target sequence for SUPT16H (NM_007192.2,1085-1103).
gtggtggcaactataatct

SEQ ID NO: 57756 - DNA, 19 bp, Homo sapiens
  siRNA target sequence for SUPT16H (NM_007192.2,1088-1106).
gtggcaactataatctcaa

SEQ ID NO: 57757 - DNA, 19 bp, Homo sapiens
  siRNA target sequence for SUPT16H (NM_007192.2,1209-1227).
gatggttgatccttctcaa

SEQ ID NO: 57758 - DNA, 19 bp, Homo sapiens
  siRNA target sequence for SUPT16H (NM_007192.2,1275-1293).
gctgaaggaattaagacat

SEQ ID NO: 57759 - DNA, 19 bp, Homo sapiens
  siRNA target sequence for SUPT16H (NM_007192.2,1322-1340).
ctgtcatggacgtggttaa

SEQ ID NO: 57760 - DNA, 19 bp, Homo sapiens
  siRNA target sequence for SUPT16H (NM_007192.2,1411-1429).
gaaggctccctagtaatca

SEQ ID NO: 57761 - DNA, 19 bp, Homo sapiens
  siRNA target sequence for SUPT16H (NM_007192.2,1473-1491).
catcaatttaggattctca

SEQ ID NO: 57762 - DNA, 19 bp, Homo sapiens
  siRNA target sequence for SUPT16H (NM_007192.2,1499-1517).
ctaacaaggaggggaaaaa

SEQ ID NO: 57763 - DNA, 19 bp, Homo sapiens
  siRNA target sequence for SUPT16H (NM_007192.2,1617-1635).
gaatgtggggattttccta

SEQ ID NO: 57764 - DNA, 19 bp, Homo sapiens
  siRNA target sequence for SUPT16H (NM_007192.2,1700-1718).
gttctcgggcagcattact

SEQ ID NO: 57765 - DNA, 19 bp, Homo sapiens
  siRNA target sequence for SUPT16H (NM_007192.2,1809-1827).
gaggcgattgactgaacaa

SEQ ID NO: 57766 - DNA, 19 bp, Homo sapiens
  siRNA target sequence for SUPT16H (NM_007192.2,1811-1829).
ggcgattgactgaacaaaa

SEQ ID NO: 57767 - DNA, 19 bp, Homo sapiens
  siRNA target sequence for SUPT16H (NM_007192.2,1848-1866).
gaaagctcgcaagtctaat

SEQ ID NO: 57768 - DNA, 19 bp, Homo sapiens
  siRNA target sequence for SUPT16H (NM_007192.2,1906-1924).
catattcgggaaatgaaga

SEQ ID NO: 57769 - DNA, 19 bp, Homo sapiens
  siRNA target sequence for SUPT16H (NM_007192.2,1923-1941).
gatctacatcgataagaaa

SEQ ID NO: 57770 - DNA, 19 bp, Homo sapiens
  siRNA target sequence for SUPT16H (NM_007192.2,1960-1978).
cccgtgtttggcattgcaa

SEQ ID NO: 57771 - DNA, 19 bp, Homo sapiens
  siRNA target sequence for SUPT16H (NM_007192.2,1993-2011).
gccacaatcaagaatataa

SEQ ID NO: 57772 - DNA, 19 bp, Homo sapiens
  siRNA target sequence for SUPT16H (NM_007192.2,2016-2034).
gtccgtggaaggagattat

SEQ ID NO: 57773 - DNA, 19 bp, Homo sapiens
  siRNA target sequence for SUPT16H (NM_007192.2,2108-2126).
ctgaagcgacttttgtcaa

SEQ ID NO: 57774 - DNA, 19 bp, Homo sapiens
  siRNA target sequence for SUPT16H (NM_007192.2,2135-2153).
cataccgagcatcaaatat

SEQ ID NO: 57775 - DNA, 19 bp, Homo sapiens
  siRNA target sequence for SUPT16H (NM_007192.2,2196-2214).
gaatgctttccgaattatt

SEQ ID NO: 57776 - DNA, 19 bp, Homo sapiens
  siRNA target sequence for SUPT16H (NM_007192.2,2201-2219).
ctttccgaattattaaaga

SEQ ID NO: 57777 - DNA, 19 bp, Homo sapiens
  siRNA target sequence for SUPT16H (NM_007192.2,2205-2223).
ccgaattattaaagaagta

SEQ ID NO: 57778 - DNA, 19 bp, Homo sapiens
  siRNA target sequence for SUPT16H (NM_007192.2,2218-2236).
gaagtacagaaacgttata

SEQ ID NO: 57779 - DNA, 19 bp, Homo sapiens
  siRNA target sequence for SUPT16H (NM_007192.2,2265-2283).
ggaggggattgtaaaacaa

SEQ ID NO: 57780 - DNA, 19 bp, Homo sapiens
  siRNA target sequence for SUPT16H (NM_007192.2,2286-2304).
ctcactggtgatcaatcta

SEQ ID NO: 57781 - DNA, 19 bp, Homo sapiens
  siRNA target sequence for SUPT16H (NM_007192.2,2288-2306).
cactggtgatcaatctaaa

SEQ ID NO: 57782 - DNA, 19 bp, Homo sapiens
  siRNA target sequence for SUPT16H (NM_007192.2,2308-2326).
cggagtaatccgaaactga

SEQ ID NO: 57783 - DNA, 19 bp, Homo sapiens
  siRNA target sequence for SUPT16H (NM_007192.2,2318-2336).
cgaaactgaaagatctata

SEQ ID NO: 57784 - DNA, 19 bp, Homo sapiens
  siRNA target sequence for SUPT16H (NM_007192.2,2332-2350).
ctatacattcgcccaaata

SEQ ID NO: 57785 - DNA, 19 bp, Homo sapiens
  siRNA target sequence for SUPT16H (NM_007192.2,2411-2429).
ctgttcgaggagacaaagt

SEQ ID NO: 57786 - DNA, 19 bp, Homo sapiens
  siRNA target sequence for SUPT16H (NM_007192.2,2583-2601).
cacggacttggggaaacat

SEQ ID NO: 57787 - DNA, 19 bp, Homo sapiens
  siRNA target sequence for SUPT16H (NM_007192.2,2585-2603).
cggacttggggaaacatca

SEQ ID NO: 57788 - DNA, 19 bp, Homo sapiens
  siRNA target sequence for SUPT16H (NM_007192.2,2785-2803).
ctccttcagcccactagta

SEQ ID NO: 57789 - DNA, 19 bp, Homo sapiens
  siRNA target sequence for SUPT16H (NM_007192.2,2787-2805).
ccttcagcccactagtagt

SEQ ID NO: 57790 - DNA, 19 bp, Homo sapiens
  siRNA target sequence for SUPT16H (NM_007192.2,2822-2840).
cggaatggccaccttttgt

SEQ ID NO: 57791 - DNA, 19 bp, Homo sapiens
  siRNA target sequence for SUPT16H (NM_007192.2,2886-2904).
gtttcacctgaagaacttt

SEQ ID NO: 57792 - DNA, 19 bp, Homo sapiens
  siRNA target sequence for SUPT16H (NM_007192.2,2890-2908).
cacctgaagaactttgata

SEQ ID NO: 57793 - DNA, 19 bp, Homo sapiens
  siRNA target sequence for SUPT16H (NM_007192.2,2982-3000).
catcaaggaatggttgaat

SEQ ID NO: 57794 - DNA, 19 bp, Homo sapiens
  siRNA target sequence for SUPT16H (NM_007192.2,3037-3055).
ctcaactggactaaaatca

SEQ ID NO: 57795 - DNA, 19 bp, Homo sapiens
  siRNA target sequence for SUPT16H (NM_007192.2,3172-3190).
gatgagacttttaatcctt

SEQ ID NO: 57796 - DNA, 19 bp, Homo sapiens
  siRNA target sequence for SUPT16H (NM_007192.2,3250-3268).
gaagagtcagactattcta

SEQ ID NO: 57797 - DNA, 19 bp, Homo sapiens
  siRNA target sequence for SUPT16H (NM_007192.2,3270-3288).
ggagtcattgggtagtgaa

SEQ ID NO: 57798 - DNA, 19 bp, Homo sapiens
  siRNA target sequence for SUPT16H (NM_007192.2,3370-3388).
gaacaaagtcgaagtatga

SEQ ID NO: 57799 - DNA, 19 bp, Homo sapiens
  siRNA target sequence for TUFM (NM_003321.3,312-330).
ggaggtggggctaagttca

SEQ ID NO: 57800 - DNA, 19 bp, Homo sapiens
  siRNA target sequence for TUFM (NM_003321.3,313-331).
gaggtggggctaagttcaa

SEQ ID NO: 57801 - DNA, 19 bp, Homo sapiens
  siRNA target sequence for TUFM (NM_003321.3,315-333).
ggtggggctaagttcaaga

SEQ ID NO: 57802 - DNA, 19 bp, Homo sapiens
  siRNA target sequence for TUFM (NM_003321.3,316-334).
gtggggctaagttcaagaa

SEQ ID NO: 57803 - DNA, 19 bp, Homo sapiens
  siRNA target sequence for TUFM (NM_003321.3,390-408).
gcggctcatgtggagtata

SEQ ID NO: 57804 - DNA, 19 bp, Homo sapiens
  siRNA target sequence for TUFM (NM_003321.3,393-411).
gctcatgtggagtatagca

SEQ ID NO: 57805 - DNA, 19 bp, Homo sapiens
  siRNA target sequence for TUFM (NM_003321.3,445-463).
cgggtcatgcagattatgt

SEQ ID NO: 57806 - DNA, 19 bp, Homo sapiens
  siRNA target sequence for TUFM (NM_003321.3,446-464).
gggtcatgcagattatgtt

SEQ ID NO: 57807 - DNA, 19 bp, Homo sapiens
  siRNA target sequence for TUFM (NM_003321.3,448-466).
gtcatgcagattatgttaa

SEQ ID NO: 57808 - DNA, 19 bp, Homo sapiens
  siRNA target sequence for TUFM (NM_003321.3,450-468).
catgcagattatgttaaga

SEQ ID NO: 57809 - DNA, 19 bp, Homo sapiens
  siRNA target sequence for TUFM (NM_003321.3,540-558).
cagacccgagagcacttat

SEQ ID NO: 57810 - DNA, 19 bp, Homo sapiens
  siRNA target sequence for TUFM (NM_003321.3,542-560).
gacccgagagcacttatta

SEQ ID NO: 57811 - DNA, 19 bp, Homo sapiens
  siRNA target sequence for TUFM (NM_003321.3,544-562).
cccgagagcacttattact

SEQ ID NO: 57812 - DNA, 19 bp, Homo sapiens
  siRNA target sequence for TUFM (NM_003321.3,881-899).
cgtggtgacaggtacacta

SEQ ID NO: 57813 - DNA, 19 bp, Homo sapiens
  siRNA target sequence for TUFM (NM_003321.3,900-918).
gagcgtggcattttaaaga

SEQ ID NO: 57814 - DNA, 19 bp, Homo sapiens
  siRNA target sequence for TUFM (NM_003321.3,1006-1024).
gggccgaggccggagataa

SEQ ID NO: 57815 - DNA, 19 bp, Homo sapiens
  siRNA target sequence for TUFM (NM_003321.3,1009-1027).
ccgaggccggagataacct

SEQ ID NO: 57816 - DNA, 19 bp, Homo sapiens
  siRNA target sequence for TUFM (NM_003321.3,1158-1176).
cgccacaagccctttgtgt

SEQ ID NO: 57817 - DNA, 19 bp, Homo sapiens
  siRNA target sequence for TUFM (NM_003321.3,1269-1287).
gacctgaagttcaacctaa

SEQ ID NO: 57818 - DNA, 19 bp, Homo sapiens
  siRNA target sequence for TUFM (NM_003321.3,1272-1290).
ctgaagttcaacctaatct

SEQ ID NO: 57819 - DNA, 19 bp, Homo sapiens
  siRNA target sequence for TUFM (NM_003321.3,1292-1310).
gcggcagccaatgatctta

SEQ ID NO: 57820 - DNA, 19 bp, Homo sapiens
  siRNA target sequence for FLJ38663 (NM_152269.1,648-666).
gcaccgtgggtttatttca

SEQ ID NO: 57821 - DNA, 19 bp, Homo sapiens
  siRNA target sequence for FLJ38663 (NM_152269.1,649-667).
caccgtgggtttatttcat

SEQ ID NO: 57822 - DNA, 19 bp, Homo sapiens
  siRNA target sequence for FLJ38663 (NM_152269.1,721-739).
ggagaagctgacgttgtta

SEQ ID NO: 57823 - DNA, 19 bp, Homo sapiens
  siRNA target sequence for FLJ38663 (NM_152269.1,722-740).
gagaagctgacgttgttat

SEQ ID NO: 57824 - DNA, 19 bp, Homo sapiens
  siRNA target sequence for FLJ38663 (NM_152269.1,733-751).
gttgttatccccaggaata

SEQ ID NO: 57825 - DNA, 19 bp, Homo sapiens
  siRNA target sequence for FLJ38663 (NM_152269.1,823-841).
cgaagagcagtttgtgaaa

SEQ ID NO: 57826 - DNA, 19 bp, Homo sapiens
  siRNA target sequence for FLJ38663 (NM_152269.1,860-878).
caggcaaccaacaaaacca

SEQ ID NO: 57827 - DNA, 19 bp, Homo sapiens
  siRNA target sequence for FLJ38663 (NM_152269.1,905-923).
ccctcaggcatcgttgtaa

SEQ ID NO: 57828 - DNA, 19 bp, Homo sapiens
  siRNA target sequence for FLJ38663 (NM_152269.1,906-924).
cctcaggcatcgttgtaaa

SEQ ID NO: 57829 - DNA, 19 bp, Homo sapiens
  siRNA target sequence for FLJ38663 (NM_152269.1,925-943).
gtgccatcagacaagatca

SEQ ID NO: 57830 - DNA, 19 bp, Homo sapiens
  siRNA target sequence for FLJ38663 (NM_152269.1,1044-1062).
cggcgaagaaaaaacaaga

SEQ ID NO: 57831 - DNA, 19 bp, Homo sapiens
  siRNA target sequence for ICT1 (NM_001545.1,105-123).
gacggcactgagttcaaga

SEQ ID NO: 57832 - DNA, 19 bp, Homo sapiens
  siRNA target sequence for ICT1 (NM_001545.1,114-132).
gagttcaagagcatctaca

SEQ ID NO: 57833 - DNA, 19 bp, Homo sapiens
  siRNA target sequence for ICT1 (NM_001545.1,185-203).
cccgaatggtgcaaagcaa

SEQ ID NO: 57834 - DNA, 19 bp, Homo sapiens
  siRNA target sequence for ICT1 (NM_001545.1,219-237).
cctctagatcgcttgacaa

SEQ ID NO: 57835 - DNA, 19 bp, Homo sapiens
  siRNA target sequence for ICT1 (NM_001545.1,220-238).
ctctagatcgcttgacaat

SEQ ID NO: 57836 - DNA, 19 bp, Homo sapiens
  siRNA target sequence for ICT1 (NM_001545.1,222-240).
ctagatcgcttgacaatat

SEQ ID NO: 57837 - DNA, 19 bp, Homo sapiens
  siRNA target sequence for ICT1 (NM_001545.1,225-243).
gatcgcttgacaatatctt

SEQ ID NO: 57838 - DNA, 19 bp, Homo sapiens
  siRNA target sequence for ICT1 (NM_001545.1,228-246).
cgcttgacaatatcttatt

SEQ ID NO: 57839 - DNA, 19 bp, Homo sapiens
  siRNA target sequence for ICT1 (NM_001545.1,230-248).
cttgacaatatcttattgt

SEQ ID NO: 57840 - DNA, 19 bp, Homo sapiens
  siRNA target sequence for ICT1 (NM_001545.1,341-359).
gcccgtgcggcagaagata

SEQ ID NO: 57841 - DNA, 19 bp, Homo sapiens
  siRNA target sequence for ICT1 (NM_001545.1,356-374).
gatagccatcacgcataaa

SEQ ID NO: 57842 - DNA, 19 bp, Homo sapiens
  siRNA target sequence for ICT1 (NM_001545.1,493-511).
caccgaaggagccaacaaa

SEQ ID NO: 57843 - DNA, 19 bp, Homo sapiens
  siRNA target sequence for ICT1 (NM_001545.1,496-514).
cgaaggagccaacaaaaga

SEQ ID NO: 57844 - DNA, 19 bp, Homo sapiens
  siRNA target sequence for ICT1 (NM_001545.1,532-550).
gaatcaggatagaaaacat

SEQ ID NO: 57845 - DNA, 19 bp, Homo sapiens
  siRNA target sequence for MTRF1 (NM_004294.2,118-136).
gtgtttggctttttagaca

SEQ ID NO: 57846 - DNA, 19 bp, Homo sapiens
  siRNA target sequence for MTRF1 (NM_004294.2,135-153).
catccatctcttaatggtt

SEQ ID NO: 57847 - DNA, 19 bp, Homo sapiens
  siRNA target sequence for MTRF1 (NM_004294.2,167-185).
catccagctccattctcat

SEQ ID NO: 57848 - DNA, 19 bp, Homo sapiens
  siRNA target sequence for MTRF1 (NM_004294.2,176-194).
ccattctcatcaatttaga

SEQ ID NO: 57849 - DNA, 19 bp, Homo sapiens
  siRNA target sequence for MTRF1 (NM_004294.2,195-213).
cagatacatcttgatacaa

SEQ ID NO: 57850 - DNA, 19 bp, Homo sapiens
  siRNA target sequence for MTRF1 (NM_004294.2,255-273).
ctgttaagtaagaattggt

SEQ ID NO: 57851 - DNA, 19 bp, Homo sapiens
  siRNA target sequence for MTRF1 (NM_004294.2,345-363).
ctgagtaaggagtaccaaa

SEQ ID NO: 57852 - DNA, 19 bp, Homo sapiens
  siRNA target sequence for MTRF1 (NM_004294.2,445-463).
ctcttgcagccatttacca

SEQ ID NO: 57853 - DNA, 19 bp, Homo sapiens
  siRNA target sequence for MTRF1 (NM_004294.2,473-491).
ggagactgaacaagcaatt

SEQ ID NO: 57854 - DNA, 19 bp, Homo sapiens
  siRNA target sequence for MTRF1 (NM_004294.2,518-536).
cctaaataaacaagatgaa

SEQ ID NO: 57855 - DNA, 19 bp, Homo sapiens
  siRNA target sequence for MTRF1 (NM_004294.2,579-597).
gatcaaaaaatcaacatgt

SEQ ID NO: 57856 - DNA, 19 bp, Homo sapiens
  siRNA target sequence for MTRF1 (NM_004294.2,582-600).
caaaaaatcaacatgttgt

SEQ ID NO: 57857 - DNA, 19 bp, Homo sapiens
  siRNA target sequence for MTRF1 (NM_004294.2,712-730).
cccgagaaatatttgacat

SEQ ID NO: 57858 - DNA, 19 bp, Homo sapiens
  siRNA target sequence for MTRF1 (NM_004294.2,726-744).
gacatgtaccagaattatt

SEQ ID NO: 57859 - DNA, 19 bp, Homo sapiens
  siRNA target sequence for MTRF1 (NM_004294.2,735-753).
cagaattattcgtgctata

SEQ ID NO: 57860 - DNA, 19 bp, Homo sapiens
  siRNA target sequence for MTRF1 (NM_004294.2,737-755).
gaattattcgtgctataaa

SEQ ID NO: 57861 - DNA, 19 bp, Homo sapiens
  siRNA target sequence for MTRF1 (NM_004294.2,829-847).
ccggtgacggtgtctataa

SEQ ID NO: 57862 - DNA, 19 bp, Homo sapiens
  siRNA target sequence for MTRF1 (NM_004294.2,934-952).
gaacgatgtcggttattgt

SEQ ID NO: 57863 - DNA, 19 bp, Homo sapiens
  siRNA target sequence for MTRF1 (NM_004294.2,991-1009).
ccaaggatttgcgaataga

SEQ ID NO: 57864 - DNA, 19 bp, Homo sapiens
  siRNA target sequence for MTRF1 (NM_004294.2,995-1013).
ggatttgcgaatagataca

SEQ ID NO: 57865 - DNA, 19 bp, Homo sapiens
  siRNA target sequence for MTRF1 (NM_004294.2,996-1014).
gatttgcgaatagatacat

SEQ ID NO: 57866 - DNA, 19 bp, Homo sapiens
  siRNA target sequence for MTRF1 (NM_004294.2,1001-1019).
gcgaatagatacatttcga

SEQ ID NO: 57867 - DNA, 19 bp, Homo sapiens
  siRNA target sequence for MTRF1 (NM_004294.2,1029-1047).
gcaggagggcagcatgtta

SEQ ID NO: 57868 - DNA, 19 bp, Homo sapiens
  siRNA target sequence for MTRF1 (NM_004294.2,1033-1051).
gagggcagcatgttaataa

SEQ ID NO: 57869 - DNA, 19 bp, Homo sapiens
  siRNA target sequence for MTRF1 (NM_004294.2,1084-1102).
ccacagggctagtagtaga

SEQ ID NO: 57870 - DNA, 19 bp, Homo sapiens
  siRNA target sequence for MTRF1 (NM_004294.2,1085-1103).
cacagggctagtagtagaa

SEQ ID NO: 57871 - DNA, 19 bp, Homo sapiens
  siRNA target sequence for MTRF1 (NM_004294.2,1250-1268).
gcgaattcggacatataat

SEQ ID NO: 57872 - DNA, 19 bp, Homo sapiens
  siRNA target sequence for MTRF1 (NM_004294.2,1251-1269).
cgaattcggacatataatt

SEQ ID NO: 57873 - DNA, 19 bp, Homo sapiens
  siRNA target sequence for MTRF1 (NM_004294.2,1311-1329).
gttcgtgatattaaggaat

SEQ ID NO: 57874 - DNA, 19 bp, Homo sapiens
  siRNA target sequence for MTRF1 (NM_004294.2,1346-1364).
gggcctggatcagctaatt

SEQ ID NO: 57875 - DNA, 19 bp, Homo sapiens
  siRNA target sequence for MTRF1 (NM_004294.2,1348-1366).
gcctggatcagctaattca

SEQ ID NO: 57876 - DNA, 19 bp, Homo sapiens
  siRNA target sequence for ABCF1 (NM_001090.1,156-174).
cgagcccatcagacaaagt

SEQ ID NO: 57877 - DNA, 19 bp, Homo sapiens
  siRNA target sequence for ABCF1 (NM_001090.1,202-220).
gatcaaaaaaacgttcttt

SEQ ID NO: 57878 - DNA, 19 bp, Homo sapiens
  siRNA target sequence for ABCF1 (NM_001090.1,383-401).
ctcatggagcgtcttaaga

SEQ ID NO: 57879 - DNA, 19 bp, Homo sapiens
  siRNA target sequence for ABCF1 (NM_001090.1,471-489).
ccaagggtggtaatgtttt

SEQ ID NO: 57880 - DNA, 19 bp, Homo sapiens
  siRNA target sequence for ABCF1 (NM_001090.1,472-490).
caagggtggtaatgttttt

SEQ ID NO: 57881 - DNA, 19 bp, Homo sapiens
  siRNA target sequence for ABCF1 (NM_001090.1,552-570).
ctgccaagccggagaagaa

SEQ ID NO: 57882 - DNA, 19 bp, Homo sapiens
  siRNA target sequence for ABCF1 (NM_001090.1,673-691).
cgctgctctggacaatgaa

SEQ ID NO: 57883 - DNA, 19 bp, Homo sapiens
  siRNA target sequence for ABCF1 (NM_001090.1,784-802).
gcgccaagtggcttcatta

SEQ ID NO: 57884 - DNA, 19 bp, Homo sapiens
  siRNA target sequence for ABCF1 (NM_001090.1,785-803).
cgccaagtggcttcattaa

SEQ ID NO: 57885 - DNA, 19 bp, Homo sapiens
  siRNA target sequence for ABCF1 (NM_001090.1,859-877).
ccgccaagccatgttagaa

SEQ ID NO: 57886 - DNA, 19 bp, Homo sapiens
  siRNA target sequence for ABCF1 (NM_001090.1,866-884).
gccatgttagaaaatgcat

SEQ ID NO: 57887 - DNA, 19 bp, Homo sapiens
  siRNA target sequence for ABCF1 (NM_001090.1,1044-1062).
gcatccctcccaacattga

SEQ ID NO: 57888 - DNA, 19 bp, Homo sapiens
  siRNA target sequence for ABCF1 (NM_001090.1,1128-1146).
ctgacaccaagcgattgaa

SEQ ID NO: 57889 - DNA, 19 bp, Homo sapiens
  siRNA target sequence for ABCF1 (NM_001090.1,1296-1314).
gctttgaccctgaaatgca

SEQ ID NO: 57890 - DNA, 19 bp, Homo sapiens
  siRNA target sequence for ABCF1 (NM_001090.1,1319-1337).
cgacccacacagaagttct

SEQ ID NO: 57891 - DNA, 19 bp, Homo sapiens
  siRNA target sequence for ABCF1 (NM_001090.1,1435-1453).
cgctgtcatctggcttaat

SEQ ID NO: 57892 - DNA, 19 bp, Homo sapiens
  siRNA target sequence for ABCF1 (NM_001090.1,1439-1457).
gtcatctggcttaataact

SEQ ID NO: 57893 - DNA, 19 bp, Homo sapiens
  siRNA target sequence for ABCF1 (NM_001090.1,1885-1903).
gggacagaaaccactcttt

SEQ ID NO: 57894 - DNA, 19 bp, Homo sapiens
  siRNA target sequence for ABCF1 (NM_001090.1,1886-1904).
ggacagaaaccactcttta

SEQ ID NO: 57895 - DNA, 19 bp, Homo sapiens
  siRNA target sequence for ABCF1 (NM_001090.1,1919-1937).
ggcatcgacatggattcaa

SEQ ID NO: 57896 - DNA, 19 bp, Homo sapiens
  siRNA target sequence for ABCF1 (NM_001090.1,1945-1963).
cattgtgggccctaatggt

SEQ ID NO: 57897 - DNA, 19 bp, Homo sapiens
  siRNA target sequence for ABCF1 (NM_001090.1,2009-2027).
ccgacccatggggaaatga

SEQ ID NO: 57898 - DNA, 19 bp, Homo sapiens
  siRNA target sequence for ABCF1 (NM_001090.1,2032-2050).
gaaccaccggctgaaaatt

SEQ ID NO: 57899 - DNA, 19 bp, Homo sapiens
  siRNA target sequence for ABCF1 (NM_001090.1,2221-2239).
gaaggcgcgagttgtgttt

SEQ ID NO: 57900 - DNA, 19 bp, Homo sapiens
  siRNA target sequence for ABCF1 (NM_001090.1,2275-2293).
cttggacgagccaaccaat

SEQ ID NO: 57901 - DNA, 19 bp, Homo sapiens
  siRNA target sequence for ABCF1 (NM_001090.1,2289-2307).
ccaataacctggacataga

SEQ ID NO: 57902 - DNA, 19 bp, Homo sapiens
  siRNA target sequence for ABCF1 (NM_001090.1,2296-2314).
cctggacatagagtctatt

SEQ ID NO: 57903 - DNA, 19 bp, Homo sapiens
  siRNA target sequence for ABCF1 (NM_001090.1,2325-2343).
gggaggccatcaatgaata

SEQ ID NO: 57904 - DNA, 19 bp, Homo sapiens
  siRNA target sequence for ABCF1 (NM_001090.1,2327-2345).
gaggccatcaatgaataca

SEQ ID NO: 57905 - DNA, 19 bp, Homo sapiens
  siRNA target sequence for ABCF1 (NM_001090.1,2375-2393).
gcccgactcatcacagaaa

SEQ ID NO: 57906 - DNA, 19 bp, Homo sapiens
  siRNA target sequence for ABCF1 (NM_001090.1,2425-2443).
gagtgttagccaaatcgat

SEQ ID NO: 57907 - DNA, 19 bp, Homo sapiens
  siRNA target sequence for EEF2K (NM_013302.2,190-208).
cagacgaagatctcatctt

SEQ ID NO: 57908 - DNA, 19 bp, Homo sapiens
  siRNA target sequence for EEF2K (NM_013302.2,277-295).
gcgacgatgaggaaggtta

SEQ ID NO: 57909 - DNA, 19 bp, Homo sapiens
  siRNA target sequence for EEF2K (NM_013302.2,285-303).
gaggaaggttacttcatct

SEQ ID NO: 57910 - DNA, 19 bp, Homo sapiens
  siRNA target sequence for EEF2K (NM_013302.2,322-340).
caagctcgaaccagaatgt

SEQ ID NO: 57911 - DNA, 19 bp, Homo sapiens
  siRNA target sequence for EEF2K (NM_013302.2,339-357).
gtcaattccaaggttaata

SEQ ID NO: 57912 - DNA, 19 bp, Homo sapiens
  siRNA target sequence for EEF2K (NM_013302.2,346-364).
ccaaggttaataagtacta

SEQ ID NO: 57913 - DNA, 19 bp, Homo sapiens
  siRNA target sequence for EEF2K (NM_013302.2,486-504).
gagttccacctggaagata

SEQ ID NO: 57914 - DNA, 19 bp, Homo sapiens
  siRNA target sequence for EEF2K (NM_013302.2,916-934).
gctttgtccgcgatgacaa

SEQ ID NO: 57915 - DNA, 19 bp, Homo sapiens
  siRNA target sequence for EEF2K (NM_013302.2,955-973).
ccttcagccacttcacttt

SEQ ID NO: 57916 - DNA, 19 bp, Homo sapiens
  siRNA target sequence for EEF2K (NM_013302.2,982-1000).
ccggccatcagctgatagt

SEQ ID NO: 57917 - DNA, 19 bp, Homo sapiens
  siRNA target sequence for EEF2K (NM_013302.2,1096-1114).
ggatggcgctcttcttcta

SEQ ID NO: 57918 - DNA, 19 bp, Homo sapiens
  siRNA target sequence for EEF2K (NM_013302.2,1481-1499).
ccgggagtctgagaatagt

SEQ ID NO: 57919 - DNA, 19 bp, Homo sapiens
  siRNA target sequence for EEF2K (NM_013302.2,1557-1575).
gaacatggccactcataca

SEQ ID NO: 57920 - DNA, 19 bp, Homo sapiens
  siRNA target sequence for EEF2K (NM_013302.2,1560-1578).
catggccactcatacagta

SEQ ID NO: 57921 - DNA, 19 bp, Homo sapiens
  siRNA target sequence for EEF2K (NM_013302.2,1615-1633).
gctctggacgggtatgtgt

SEQ ID NO: 57922 - DNA, 19 bp, Homo sapiens
  siRNA target sequence for EEF2K (NM_013302.2,1616-1634).
ctctggacgggtatgtgta

SEQ ID NO: 57923 - DNA, 19 bp, Homo sapiens
  siRNA target sequence for EEF2K (NM_013302.2,1621-1639).
gacgggtatgtgtagagaa

SEQ ID NO: 57924 - DNA, 19 bp, Homo sapiens
  siRNA target sequence for EEF2K (NM_013302.2,1716-1734).
gctctggacctcgaaaaga

SEQ ID NO: 57925 - DNA, 19 bp, Homo sapiens
  siRNA target sequence for EEF2K (NM_013302.2,1717-1735).
ctctggacctcgaaaagaa

SEQ ID NO: 57926 - DNA, 19 bp, Homo sapiens
  siRNA target sequence for EEF2K (NM_013302.2,1909-1927).
cgcagttgcctcatcacat

SEQ ID NO: 57927 - DNA, 19 bp, Homo sapiens
  siRNA target sequence for EEF2K (NM_013302.2,2031-2049).
gtggcgcgagcttttgact

SEQ ID NO: 57928 - DNA, 19 bp, Homo sapiens
  siRNA target sequence for EEF2K (NM_013302.2,2094-2112).
gccctgcactggtacaaca

SEQ ID NO: 57929 - DNA, 19 bp, Homo sapiens
  siRNA target sequence for EEF2K (NM_013302.2,2246-2264).
gagatcaggggacttgtat

SEQ ID NO: 57930 - DNA, 19 bp, Homo sapiens
  siRNA target sequence for EEF2K (NM_013302.2,2311-2329).
ccaaccagtactaccaaaa

SEQ ID NO: 57931 - DNA, 19 bp, Homo sapiens
  siRNA target sequence for PET112L (NM_004564.1,210-228).
ggtaggtttggaaattcat

SEQ ID NO: 57932 - DNA, 19 bp, Homo sapiens
  siRNA target sequence for PET112L (NM_004564.1,220-238).
gaaattcatgcccagattt

SEQ ID NO: 57933 - DNA, 19 bp, Homo sapiens
  siRNA target sequence for PET112L (NM_004564.1,329-347).
gaactttgccggttctcaa

SEQ ID NO: 57934 - DNA, 19 bp, Homo sapiens
  siRNA target sequence for PET112L (NM_004564.1,345-363).
caacaggaggtgtgtagaa

SEQ ID NO: 57935 - DNA, 19 bp, Homo sapiens
  siRNA target sequence for PET112L (NM_004564.1,386-404).
ctctgaactgccacataaa

SEQ ID NO: 57936 - DNA, 19 bp, Homo sapiens
  siRNA target sequence for PET112L (NM_004564.1,388-406).
ctgaactgccacataaaca

SEQ ID NO: 57937 - DNA, 19 bp, Homo sapiens
  siRNA target sequence for PET112L (NM_004564.1,421-439).
gacaggaagcactacttct

SEQ ID NO: 57938 - DNA, 19 bp, Homo sapiens
  siRNA target sequence for PET112L (NM_004564.1,448-466).
ctccctgcaggctaccaaa

SEQ ID NO: 57939 - DNA, 19 bp, Homo sapiens
  siRNA target sequence for PET112L (NM_004564.1,450-468).
ccctgcaggctaccaaatt

SEQ ID NO: 57940 - DNA, 19 bp, Homo sapiens
  siRNA target sequence for PET112L (NM_004564.1,451-469).
cctgcaggctaccaaatta

SEQ ID NO: 57941 - DNA, 19 bp, Homo sapiens
  siRNA target sequence for PET112L (NM_004564.1,474-492).
gcagaggctcccaattgct

SEQ ID NO: 57942 - DNA, 19 bp, Homo sapiens
  siRNA target sequence for PET112L (NM_004564.1,480-498).
gctcccaattgctgtgaat

SEQ ID NO: 57943 - DNA, 19 bp, Homo sapiens
  siRNA target sequence for PET112L (NM_004564.1,493-511).
gtgaatgggagcttgatat

SEQ ID NO: 57944 - DNA, 19 bp, Homo sapiens
  siRNA target sequence for PET112L (NM_004564.1,495-513).
gaatgggagcttgatatat

SEQ ID NO: 57945 - DNA, 19 bp, Homo sapiens
  siRNA target sequence for PET112L (NM_004564.1,620-638).
ggtctcagacgctcattga

SEQ ID NO: 57946 - DNA, 19 bp, Homo sapiens
  siRNA target sequence for PET112L (NM_004564.1,621-639).
gtctcagacgctcattgat

SEQ ID NO: 57947 - DNA, 19 bp, Homo sapiens
  siRNA target sequence for PET112L (NM_004564.1,625-643).
cagacgctcattgatttga

SEQ ID NO: 57948 - DNA, 19 bp, Homo sapiens
  siRNA target sequence for PET112L (NM_004564.1,786-804).
gagagtggatgccaatata

SEQ ID NO: 57949 - DNA, 19 bp, Homo sapiens
  siRNA target sequence for PET112L (NM_004564.1,833-851).
gcgttcgaacggaagtgaa

SEQ ID NO: 57950 - DNA, 19 bp, Homo sapiens
  siRNA target sequence for PET112L (NM_004564.1,839-857).
gaacggaagtgaagaatct

SEQ ID NO: 57951 - DNA, 19 bp, Homo sapiens
  siRNA target sequence for PET112L (NM_004564.1,895-913).
gaaattcagaggcaaatca

SEQ ID NO: 57952 - DNA, 19 bp, Homo sapiens
  siRNA target sequence for PET112L (NM_004564.1,931-949).
ggtgaaattctgaacgaaa

SEQ ID NO: 57953 - DNA, 19 bp, Homo sapiens
  siRNA target sequence for PET112L (NM_004564.1,942-960).
gaacgaaacacgctcattt

SEQ ID NO: 57954 - DNA, 19 bp, Homo sapiens
  siRNA target sequence for PET112L (NM_004564.1,945-963).
cgaaacacgctcatttcat

SEQ ID NO: 57955 - DNA, 19 bp, Homo sapiens
  siRNA target sequence for PET112L (NM_004564.1,950-968).
cacgctcatttcatcacaa

SEQ ID NO: 57956 - DNA, 19 bp, Homo sapiens
  siRNA target sequence for PET112L (NM_004564.1,973-991).
gggtgcaccatgtcaatga

SEQ ID NO: 57957 - DNA, 19 bp, Homo sapiens
  siRNA target sequence for PET112L (NM_004564.1,1089-1107).
cccacagcaagtgatcaat

SEQ ID NO: 57958 - DNA, 19 bp, Homo sapiens
  siRNA target sequence for PET112L (NM_004564.1,1222-1240).
ctactggagttcttccaaa

SEQ ID NO: 57959 - DNA, 19 bp, Homo sapiens
  siRNA target sequence for PET112L (NM_004564.1,1230-1248).
gttcttccaaaatgtgata

SEQ ID NO: 57960 - DNA, 19 bp, Homo sapiens
  siRNA target sequence for PET112L (NM_004564.1,1259-1277).
gggcagagccaaaaaaggt

SEQ ID NO: 57961 - DNA, 19 bp, Homo sapiens
  siRNA target sequence for PET112L (NM_004564.1,1361-1379).
cactcgctgagcttcttga

SEQ ID NO: 57962 - DNA, 19 bp, Homo sapiens
  siRNA target sequence for PET112L (NM_004564.1,1575-1593).
cagaaaccccagagctata

SEQ ID NO: 57963 - DNA, 19 bp, Homo sapiens
  siRNA target sequence for PET112L (NM_004564.1,1612-1630).
gtccggaaagcgactcaaa

SEQ ID NO: 57964 - DNA, 19 bp, Homo sapiens
  siRNA target sequence for AF020591 (NM_014480.1,404-422).
ggggcttttcctttccaaa

SEQ ID NO: 57965 - DNA, 19 bp, Homo sapiens
  siRNA target sequence for AF020591 (NM_014480.1,517-535).
ggttgaattctgaaaaaga

SEQ ID NO: 57966 - DNA, 19 bp, Homo sapiens
  siRNA target sequence for AF020591 (NM_014480.1,537-555).
cgagctagggaagaactat

SEQ ID NO: 57967 - DNA, 19 bp, Homo sapiens
  siRNA target sequence for AF020591 (NM_014480.1,593-611).
gccaccctctttggtatta

SEQ ID NO: 57968 - DNA, 19 bp, Homo sapiens
  siRNA target sequence for AF020591 (NM_014480.1,597-615).
ccctctttggtattaggaa

SEQ ID NO: 57969 - DNA, 19 bp, Homo sapiens
  siRNA target sequence for AF020591 (NM_014480.1,601-619).
ctttggtattaggaaaagt

SEQ ID NO: 57970 - DNA, 19 bp, Homo sapiens
  siRNA target sequence for AF020591 (NM_014480.1,765-783).
ctacctacaacattaccta

SEQ ID NO: 57971 - DNA, 19 bp, Homo sapiens
  siRNA target sequence for AF020591 (NM_014480.1,906-924).
gctttctgtcagagtattt

SEQ ID NO: 57972 - DNA, 19 bp, Homo sapiens
  siRNA target sequence for AF020591 (NM_014480.1,907-925).
ctttctgtcagagtattta

SEQ ID NO: 57973 - DNA, 19 bp, Homo sapiens
  siRNA target sequence for AF020591 (NM_014480.1,915-933).
cagagtatttacttgagta

SEQ ID NO: 57974 - DNA, 19 bp, Homo sapiens
  siRNA target sequence for AF020591 (NM_014480.1,917-935).
gagtatttacttgagtaaa

SEQ ID NO: 57975 - DNA, 19 bp, Homo sapiens
  siRNA target sequence for AF020591 (NM_014480.1,919-937).
gtatttacttgagtaaact

SEQ ID NO: 57976 - DNA, 19 bp, Homo sapiens
  siRNA target sequence for AF020591 (NM_014480.1,985-1003).
gtggtgactctctcaacta

SEQ ID NO: 57977 - DNA, 19 bp, Homo sapiens
  siRNA target sequence for AF020591 (NM_014480.1,990-1008).
gactctctcaactatggtt

SEQ ID NO: 57978 - DNA, 19 bp, Homo sapiens
  siRNA target sequence for AF020591 (NM_014480.1,1051-1069).
gtgatgactgtaaggatta

SEQ ID NO: 57979 - DNA, 19 bp, Homo sapiens
  siRNA target sequence for AF020591 (NM_014480.1,1178-1196).
gtgccttgtacaaacagaa

SEQ ID NO: 57980 - DNA, 19 bp, Homo sapiens
  siRNA target sequence for AF020591 (NM_014480.1,1209-1227).
ggagagacccccttcagat

SEQ ID NO: 57981 - DNA, 19 bp, Homo sapiens
  siRNA target sequence for AF020591 (NM_014480.1,1250-1268).
ccccatggcctcatctttt

SEQ ID NO: 57982 - DNA, 19 bp, Homo sapiens
  siRNA target sequence for AF020591 (NM_014480.1,1251-1269).
cccatggcctcatcttttt

SEQ ID NO: 57983 - DNA, 19 bp, Homo sapiens
  siRNA target sequence for AF020591 (NM_014480.1,1421-1439).
ctatgaccttgtcatacat

SEQ ID NO: 57984 - DNA, 19 bp, Homo sapiens
  siRNA target sequence for AF020591 (NM_014480.1,1925-1943).
ctctaacctcgtcatacat

SEQ ID NO: 57985 - DNA, 19 bp, Homo sapiens
  siRNA target sequence for AF020591 (NM_014480.1,1927-1945).
ctaacctcgtcatacatca

SEQ ID NO: 57986 - DNA, 19 bp, Homo sapiens
  siRNA target sequence for AF020591 (NM_014480.1,2102-2120).
catcaggcatctgcaaatt

SEQ ID NO: 57987 - DNA, 19 bp, Homo sapiens
  siRNA target sequence for AFG3L2 (NM_006796.1,223-241).
ggacgctttaccgatttgt

SEQ ID NO: 57988 - DNA, 19 bp, Homo sapiens
  siRNA target sequence for AFG3L2 (NM_006796.1,224-242).
gacgctttaccgatttgtt

SEQ ID NO: 57989 - DNA, 19 bp, Homo sapiens
  siRNA target sequence for AFG3L2 (NM_006796.1,227-245).
gctttaccgatttgttaca

SEQ ID NO: 57990 - DNA, 19 bp, Homo sapiens
  siRNA target sequence for AFG3L2 (NM_006796.1,233-251).
ccgatttgttacaactcaa

SEQ ID NO: 57991 - DNA, 19 bp, Homo sapiens
  siRNA target sequence for AFG3L2 (NM_006796.1,252-270).
gcaagggccagcagaaatt

SEQ ID NO: 57992 - DNA, 19 bp, Homo sapiens
  siRNA target sequence for AFG3L2 (NM_006796.1,313-331).
ctcgacccccaaaaggatt

SEQ ID NO: 57993 - DNA, 19 bp, Homo sapiens
  siRNA target sequence for AFG3L2 (NM_006796.1,370-388).
ctagtgaacctaaagaagt

SEQ ID NO: 57994 - DNA, 19 bp, Homo sapiens
  siRNA target sequence for AFG3L2 (NM_006796.1,468-486).
ggtggcaagaaagatgatt

SEQ ID NO: 57995 - DNA, 19 bp, Homo sapiens
  siRNA target sequence for AFG3L2 (NM_006796.1,493-511).
ggtggtccaggtttcagaa

SEQ ID NO: 57996 - DNA, 19 bp, Homo sapiens
  siRNA target sequence for AFG3L2 (NM_006796.1,503-521).
gtttcagaagggtgacatt

SEQ ID NO: 57997 - DNA, 19 bp, Homo sapiens
  siRNA target sequence for AFG3L2 (NM_006796.1,507-525).
cagaagggtgacattccat

SEQ ID NO: 57998 - DNA, 19 bp, Homo sapiens
  siRNA target sequence for AFG3L2 (NM_006796.1,522-540).
ccatgggacgacaaggatt

SEQ ID NO: 57999 - DNA, 19 bp, Homo sapiens
  siRNA target sequence for AFG3L2 (NM_006796.1,523-541).
catgggacgacaaggattt

SEQ ID NO: 58000 - DNA, 19 bp, Homo sapiens
  siRNA target sequence for AFG3L2 (NM_006796.1,628-646).
ggaaggactttgtcaataa

SEQ ID NO: 58001 - DNA, 19 bp, Homo sapiens
  siRNA target sequence for AFG3L2 (NM_006796.1,632-650).
ggactttgtcaataactat

SEQ ID NO: 58002 - DNA, 19 bp, Homo sapiens
  siRNA target sequence for AFG3L2 (NM_006796.1,639-657).
gtcaataactatctttcaa

SEQ ID NO: 58003 - DNA, 19 bp, Homo sapiens
  siRNA target sequence for AFG3L2 (NM_006796.1,673-691).
gattggaagtcgtcaacaa

SEQ ID NO: 58004 - DNA, 19 bp, Homo sapiens
  siRNA target sequence for AFG3L2 (NM_006796.1,683-701).
cgtcaacaagcgttttgtt

SEQ ID NO: 58005 - DNA, 19 bp, Homo sapiens
  siRNA target sequence for AFG3L2 (NM_006796.1,707-725).
gacctttacaccaggaaaa

SEQ ID NO: 58006 - DNA, 19 bp, Homo sapiens
  siRNA target sequence for AFG3L2 (NM_006796.1,730-748).
ctgttgatgggcaatacgt

SEQ ID NO: 58007 - DNA, 19 bp, Homo sapiens
  siRNA target sequence for AFG3L2 (NM_006796.1,741-759).
caatacgtttggtttaata

SEQ ID NO: 58008 - DNA, 19 bp, Homo sapiens
  siRNA target sequence for AFG3L2 (NM_006796.1,764-782).
cagtgtggacacctttgaa

SEQ ID NO: 58009 - DNA, 19 bp, Homo sapiens
  siRNA target sequence for AFG3L2 (NM_006796.1,1064-1082).
gctagagatcatggaattt

SEQ ID NO: 58010 - DNA, 19 bp, Homo sapiens
  siRNA target sequence for AFG3L2 (NM_006796.1,1231-1249).
gtggatctgagtttttgga

SEQ ID NO: 58011 - DNA, 19 bp, Homo sapiens
  siRNA target sequence for AFG3L2 (NM_006796.1,1272-1290).
gctagagtccgagacttat

SEQ ID NO: 58012 - DNA, 19 bp, Homo sapiens
  siRNA target sequence for AFG3L2 (NM_006796.1,1273-1291).
ctagagtccgagacttatt

SEQ ID NO: 58013 - DNA, 19 bp, Homo sapiens
  siRNA target sequence for AFG3L2 (NM_006796.1,1419-1437).
gtggagatggatggtttta

SEQ ID NO: 58014 - DNA, 19 bp, Homo sapiens
  siRNA target sequence for AFG3L2 (NM_006796.1,1422-1440).
gagatggatggttttaata

SEQ ID NO: 58015 - DNA, 19 bp, Homo sapiens
  siRNA target sequence for AFG3L2 (NM_006796.1,1427-1445).
ggatggttttaatacaaca

SEQ ID NO: 58016 - DNA, 19 bp, Homo sapiens
  siRNA target sequence for AFG3L2 (NM_006796.1,1444-1462).
caacaaatgtcgtcatttt

SEQ ID NO: 58017 - DNA, 19 bp, Homo sapiens
  siRNA target sequence for AFG3L2 (NM_006796.1,1468-1486).
gcaccaatcgaccagatat

SEQ ID NO: 58018 - DNA, 19 bp, Homo sapiens
  siRNA target sequence for AFG3L2 (NM_006796.1,1471-1489).
ccaatcgaccagatatcct

SEQ ID NO: 58019 - DNA, 19 bp, Homo sapiens
  siRNA target sequence for AFG3L2 (NM_006796.1,1666-1684).
gtgctgatgttgctaatgt

SEQ ID NO: 58020 - DNA, 19 bp, Homo sapiens
  siRNA target sequence for AFG3L2 (NM_006796.1,1767-1785).
gtgattggtggcttagaga

SEQ ID NO: 58021 - DNA, 19 bp, Homo sapiens
  siRNA target sequence for AFG3L2 (NM_006796.1,1871-1889).
gcacgcagacccgctttta

SEQ ID NO: 58022 - DNA, 19 bp, Homo sapiens
  siRNA target sequence for AFG3L2 (NM_006796.1,1872-1890).
cacgcagacccgcttttaa

SEQ ID NO: 58023 - DNA, 19 bp, Homo sapiens
  siRNA target sequence for AFG3L2 (NM_006796.1,1878-1896).
gacccgcttttaaaggtat

SEQ ID NO: 58024 - DNA, 19 bp, Homo sapiens
  siRNA target sequence for AFG3L2 (NM_006796.1,1882-1900).
cgcttttaaaggtatccat

SEQ ID NO: 58025 - DNA, 19 bp, Homo sapiens
  siRNA target sequence for AFG3L2 (NM_006796.1,1913-1931).
caaaggactaggttatgct

SEQ ID NO: 58026 - DNA, 19 bp, Homo sapiens
  siRNA target sequence for AFG3L2 (NM_006796.1,1920-1938).
ctaggttatgctcagtatt

SEQ ID NO: 58027 - DNA, 19 bp, Homo sapiens
  siRNA target sequence for AFG3L2 (NM_006796.1,1947-1965).
gaacaatacctctatacca

SEQ ID NO: 58028 - DNA, 19 bp, Homo sapiens
  siRNA target sequence for AFG3L2 (NM_006796.1,1979-1997).
ggataggatgtgtatgact

SEQ ID NO: 58029 - DNA, 19 bp, Homo sapiens
  siRNA target sequence for AFG3L2 (NM_006796.1,1980-1998).
gataggatgtgtatgactt

SEQ ID NO: 58030 - DNA, 19 bp, Homo sapiens
  siRNA target sequence for AFG3L2 (NM_006796.1,2041-2059).
caactggtgctcaagatga

SEQ ID NO: 58031 - DNA, 19 bp, Homo sapiens
  siRNA target sequence for AFG3L2 (NM_006796.1,2078-2096).
gagtgcatatgcccaaatt

SEQ ID NO: 58032 - DNA, 19 bp, Homo sapiens
  siRNA target sequence for AFG3L2 (NM_006796.1,2080-2098).
gtgcatatgcccaaattgt

SEQ ID NO: 58033 - DNA, 19 bp, Homo sapiens
  siRNA target sequence for AFG3L2 (NM_006796.1,2083-2101).
catatgcccaaattgttca

SEQ ID NO: 58034 - DNA, 19 bp, Homo sapiens
  siRNA target sequence for AFG3L2 (NM_006796.1,2148-2166).
cgtcagggggacatggtat

SEQ ID NO: 58035 - DNA, 19 bp, Homo sapiens
  siRNA target sequence for AFG3L2 (NM_006796.1,2188-2206).
ccactgcaagattgataga

SEQ ID NO: 58036 - DNA, 19 bp, Homo sapiens
  siRNA target sequence for AFG3L2 (NM_006796.1,2189-2207).
cactgcaagattgatagat

SEQ ID NO: 58037 - DNA, 19 bp, Homo sapiens
  siRNA target sequence for AFG3L2 (NM_006796.1,2191-2209).
ctgcaagattgatagatga

SEQ ID NO: 58038 - DNA, 19 bp, Homo sapiens
  siRNA target sequence for AFG3L2 (NM_006796.1,2197-2215).
gattgatagatgatgaagt

SEQ ID NO: 58039 - DNA, 19 bp, Homo sapiens
  siRNA target sequence for AFG3L2 (NM_006796.1,2208-2226).
gatgaagtacgaatactta

SEQ ID NO: 58040 - DNA, 19 bp, Homo sapiens
  siRNA target sequence for AFG3L2 (NM_006796.1,2211-2229).
gaagtacgaatacttatta

SEQ ID NO: 58041 - DNA, 19 bp, Homo sapiens
  siRNA target sequence for AFG3L2 (NM_006796.1,2300-2318).
gttgttagaaaaagaagta

SEQ ID NO: 58042 - DNA, 19 bp, Homo sapiens
  siRNA target sequence for AFG3L2 (NM_006796.1,2327-2345).
gaatgatatggttgaactt

SEQ ID NO: 58043 - DNA, 19 bp, Homo sapiens
  siRNA target sequence for AFG3L2 (NM_006796.1,2354-2372).
cagaccatttgcggaaaaa

SEQ ID NO: 58044 - DNA, 19 bp, Homo sapiens
  siRNA target sequence for AFG3L2 (NM_006796.1,2358-2376).
ccatttgcggaaaaatcta

SEQ ID NO: 58045 - DNA, 19 bp, Homo sapiens
  siRNA target sequence for ARIH2 (NM_006321.1,350-368).
ctgagggtgccctcaatga

SEQ ID NO: 58046 - DNA, 19 bp, Homo sapiens
  siRNA target sequence for ARIH2 (NM_006321.1,385-403).
gcttctgtcctaaaggtat

SEQ ID NO: 58047 - DNA, 19 bp, Homo sapiens
  siRNA target sequence for ARIH2 (NM_006321.1,391-409).
gtcctaaaggtatctcatt

SEQ ID NO: 58048 - DNA, 19 bp, Homo sapiens
  siRNA target sequence for ARIH2 (NM_006321.1,393-411).
cctaaaggtatctcattca

SEQ ID NO: 58049 - DNA, 19 bp, Homo sapiens
  siRNA target sequence for ARIH2 (NM_006321.1,406-424).
cattcagttgctaaactta

SEQ ID NO: 58050 - DNA, 19 bp, Homo sapiens
  siRNA target sequence for ARIH2 (NM_006321.1,410-428).
cagttgctaaacttatatt

SEQ ID NO: 58051 - DNA, 19 bp, Homo sapiens
  siRNA target sequence for ARIH2 (NM_006321.1,415-433).
gctaaacttatattagtta

SEQ ID NO: 58052 - DNA, 19 bp, Homo sapiens
  siRNA target sequence for ARIH2 (NM_006321.1,416-434).
ctaaacttatattagttaa

SEQ ID NO: 58053 - DNA, 19 bp, Homo sapiens
  siRNA target sequence for ARIH2 (NM_006321.1,452-470).
cagagatattggacagata

SEQ ID NO: 58054 - DNA, 19 bp, Homo sapiens
  siRNA target sequence for ARIH2 (NM_006321.1,482-500).
ctgctcaactgcttgttga

SEQ ID NO: 58055 - DNA, 19 bp, Homo sapiens
  siRNA target sequence for ARIH2 (NM_006321.1,505-523).
cgagttcagcctaatccat

SEQ ID NO: 58056 - DNA, 19 bp, Homo sapiens
  siRNA target sequence for ARIH2 (NM_006321.1,573-591).
gcagtttgtgcgaaaggaa

SEQ ID NO: 58057 - DNA, 19 bp, Homo sapiens
  siRNA target sequence for ARIH2 (NM_006321.1,716-734).
gtacaccagaggactttgt

SEQ ID NO: 58058 - DNA, 19 bp, Homo sapiens
  siRNA target sequence for ARIH2 (NM_006321.1,793-811).
gactatgtggagagtcatt

SEQ ID NO: 58059 - DNA, 19 bp, Homo sapiens
  siRNA target sequence for ARIH2 (NM_006321.1,835-853).
gcagactgccccatggtta

SEQ ID NO: 58060 - DNA, 19 bp, Homo sapiens
  siRNA target sequence for ARIH2 (NM_006321.1,899-917).
gcaacgaggtcttctgttt

SEQ ID NO: 58061 - DNA, 19 bp, Homo sapiens
  siRNA target sequence for ARIH2 (NM_006321.1,904-922).
gaggtcttctgtttcaagt

SEQ ID NO: 58062 - DNA, 19 bp, Homo sapiens
  siRNA target sequence for ARIH2 (NM_006321.1,918-936).
caagtgtcgtcagatgtat

SEQ ID NO: 58063 - DNA, 19 bp, Homo sapiens
  siRNA target sequence for ARIH2 (NM_006321.1,1078-1096).
cacatgcaatgctccaaat

SEQ ID NO: 58064 - DNA, 19 bp, Homo sapiens
  siRNA target sequence for ARIH2 (NM_006321.1,1139-1157).
ctcatggcagtgaatacta

SEQ ID NO: 58065 - DNA, 19 bp, Homo sapiens
  siRNA target sequence for ARIH2 (NM_006321.1,1144-1162).
ggcagtgaatactatgagt

SEQ ID NO: 58066 - DNA, 19 bp, Homo sapiens
  siRNA target sequence for ARIH2 (NM_006321.1,1222-1240).
gaagccctcaagaagtact

SEQ ID NO: 58067 - DNA, 19 bp, Homo sapiens
  siRNA target sequence for ARIH2 (NM_006321.1,1225-1243).
gccctcaagaagtacttat

SEQ ID NO: 58068 - DNA, 19 bp, Homo sapiens
  siRNA target sequence for ARIH2 (NM_006321.1,1228-1246).
ctcaagaagtacttattct

SEQ ID NO: 58069 - DNA, 19 bp, Homo sapiens
  siRNA target sequence for ARIH2 (NM_006321.1,1257-1275).
gtgggaaaaccacaataaa

SEQ ID NO: 58070 - DNA, 19 bp, Homo sapiens
  siRNA target sequence for ARIH2 (NM_006321.1,1261-1279).
gaaaaccacaataaaagct

SEQ ID NO: 58071 - DNA, 19 bp, Homo sapiens
  siRNA target sequence for ARIH2 (NM_006321.1,1305-1323).
gcggattcacgagaagatt

SEQ ID NO: 58072 - DNA, 19 bp, Homo sapiens
  siRNA target sequence for ARIH2 (NM_006321.1,1307-1325).
ggattcacgagaagattca

SEQ ID NO: 58073 - DNA, 19 bp, Homo sapiens
  siRNA target sequence for ARIH2 (NM_006321.1,1422-1440).
cacctacccatatgcatat

SEQ ID NO: 58074 - DNA, 19 bp, Homo sapiens
  siRNA target sequence for ARIH2 (NM_006321.1,1424-1442).
cctacccatatgcatatta

SEQ ID NO: 58075 - DNA, 19 bp, Homo sapiens
  siRNA target sequence for ASK (NM_006716.2,1245-1263).
gtgagcaacacagaaactt

SEQ ID NO: 58076 - DNA, 19 bp, Homo sapiens
  siRNA target sequence for ASK (NM_006716.2,1272-1290).
gtaaccagtatcaagttgt

SEQ ID NO: 58077 - DNA, 19 bp, Homo sapiens
  siRNA target sequence for ASK (NM_006716.2,1276-1294).
ccagtatcaagttgttgat

SEQ ID NO: 58078 - DNA, 19 bp, Homo sapiens
  siRNA target sequence for ASK (NM_006716.2,1279-1297).
gtatcaagttgttgatgat

SEQ ID NO: 58079 - DNA, 19 bp, Homo sapiens
  siRNA target sequence for BANK1 (NM_017935.2,266-284).
ctgtacttgacagaagtat

SEQ ID NO: 58080 - DNA, 19 bp, Homo sapiens
  siRNA target sequence for BANK1 (NM_017935.2,303-321).
gggaagccatcctgttata

SEQ ID NO: 58081 - DNA, 19 bp, Homo sapiens
  siRNA target sequence for BANK1 (NM_017935.2,304-322).
ggaagccatcctgttatat

SEQ ID NO: 58082 - DNA, 19 bp, Homo sapiens
  siRNA target sequence for BANK1 (NM_017935.2,323-341).
cgcttggagaatttctctt

SEQ ID NO: 58083 - DNA, 19 bp, Homo sapiens
  siRNA target sequence for BANK1 (NM_017935.2,324-342).
gcttggagaatttctcttt

SEQ ID NO: 58084 - DNA, 19 bp, Homo sapiens
  siRNA target sequence for BANK1 (NM_017935.2,353-371).
gagttgctgaacttaacgt

SEQ ID NO: 58085 - DNA, 19 bp, Homo sapiens
  siRNA target sequence for BANK1 (NM_017935.2,364-382).
cttaacgtcttacaaatgt

SEQ ID NO: 58086 - DNA, 19 bp, Homo sapiens
  siRNA target sequence for BANK1 (NM_017935.2,369-387).
cgtcttacaaatgtaaact

SEQ ID NO: 58087 - DNA, 19 bp, Homo sapiens
  siRNA target sequence for BANK1 (NM_017935.2,414-432).
gagacctaactccaaagaa

SEQ ID NO: 58088 - DNA, 19 bp, Homo sapiens
  siRNA target sequence for BANK1 (NM_017935.2,426-444).
caaagaaatgtcagtttct

SEQ ID NO: 58089 - DNA, 19 bp, Homo sapiens
  siRNA target sequence for BANK1 (NM_017935.2,509-527).
cagctctatgaattactaa

SEQ ID NO: 58090 - DNA, 19 bp, Homo sapiens
  siRNA target sequence for BANK1 (NM_017935.2,512-530).
ctctatgaattactaaata

SEQ ID NO: 58091 - DNA, 19 bp, Homo sapiens
  siRNA target sequence for BANK1 (NM_017935.2,587-605).
gtaatccagagtatcatat

SEQ ID NO: 58092 - DNA, 19 bp, Homo sapiens
  siRNA target sequence for BANK1 (NM_017935.2,592-610).
ccagagtatcatattcaaa

SEQ ID NO: 58093 - DNA, 19 bp, Homo sapiens
  siRNA target sequence for BANK1 (NM_017935.2,647-665).
gacctacgagcaaaacatt

SEQ ID NO: 58094 - DNA, 19 bp, Homo sapiens
  siRNA target sequence for BANK1 (NM_017935.2,701-719).
ctatcagaagcttcaagaa

SEQ ID NO: 58095 - DNA, 19 bp, Homo sapiens
  siRNA target sequence for BANK1 (NM_017935.2,742-760).
gcttcccactgaaattcca

SEQ ID NO: 58096 - DNA, 19 bp, Homo sapiens
  siRNA target sequence for BANK1 (NM_017935.2,770-788).
cctggtgaaatattcataa

SEQ ID NO: 58097 - DNA, 19 bp, Homo sapiens
  siRNA target sequence for BANK1 (NM_017935.2,818-836).
gtagaggttgaatttacat

SEQ ID NO: 58098 - DNA, 19 bp, Homo sapiens
  siRNA target sequence for BANK1 (NM_017935.2,821-839).
gaggttgaatttacatcaa

SEQ ID NO: 58099 - DNA, 19 bp, Homo sapiens
  siRNA target sequence for BANK1 (NM_017935.2,824-842).
gttgaatttacatcaagta

SEQ ID NO: 58100 - DNA, 19 bp, Homo sapiens
  siRNA target sequence for BANK1 (NM_017935.2,860-878).
cggccagccctttggaata

SEQ ID NO: 58101 - DNA, 19 bp, Homo sapiens
  siRNA target sequence for BANK1 (NM_017935.2,888-906).
ggtgcatgaaagctttaga

SEQ ID NO: 58102 - DNA, 19 bp, Homo sapiens
  siRNA target sequence for BANK1 (NM_017935.2,918-936).
gttcagtccatgtcaatgt

SEQ ID NO: 58103 - DNA, 19 bp, Homo sapiens
  siRNA target sequence for BANK1 (NM_017935.2,937-955).
ctactgtgatggaatcgtt

SEQ ID NO: 58104 - DNA, 19 bp, Homo sapiens
  siRNA target sequence for BANK1 (NM_017935.2,940-958).
ctgtgatggaatcgttaaa

SEQ ID NO: 58105 - DNA, 19 bp, Homo sapiens
  siRNA target sequence for BANK1 (NM_017935.2,953-971).
gttaaagctacaaccaaaa

SEQ ID NO: 58106 - DNA, 19 bp, Homo sapiens
  siRNA target sequence for BANK1 (NM_017935.2,959-977).
gctacaaccaaaattaagt

SEQ ID NO: 58107 - DNA, 19 bp, Homo sapiens
  siRNA target sequence for BANK1 (NM_017935.2,1031-1049).
gagagtttgtgccagaata

SEQ ID NO: 58108 - DNA, 19 bp, Homo sapiens
  siRNA target sequence for BANK1 (NM_017935.2,1035-1053).
gtttgtgccagaatagcat

SEQ ID NO: 58109 - DNA, 19 bp, Homo sapiens
  siRNA target sequence for BANK1 (NM_017935.2,1039-1057).
gtgccagaatagcattgaa

SEQ ID NO: 58110 - DNA, 19 bp, Homo sapiens
  siRNA target sequence for BANK1 (NM_017935.2,1041-1059).
gccagaatagcattgaaga

SEQ ID NO: 58111 - DNA, 19 bp, Homo sapiens
  siRNA target sequence for BANK1 (NM_017935.2,1042-1060).
ccagaatagcattgaagaa

SEQ ID NO: 58112 - DNA, 19 bp, Homo sapiens
  siRNA target sequence for BANK1 (NM_017935.2,1067-1085).
ggtgtccttacatccatat

SEQ ID NO: 58113 - DNA, 19 bp, Homo sapiens
  siRNA target sequence for BANK1 (NM_017935.2,1068-1086).
gtgtccttacatccatatt

SEQ ID NO: 58114 - DNA, 19 bp, Homo sapiens
  siRNA target sequence for BANK1 (NM_017935.2,1077-1095).
catccatattcaaacatga

SEQ ID NO: 58115 - DNA, 19 bp, Homo sapiens
  siRNA target sequence for BANK1 (NM_017935.2,1094-1112).
gagataccatattatgagt

SEQ ID NO: 58116 - DNA, 19 bp, Homo sapiens
  siRNA target sequence for BANK1 (NM_017935.2,1181-1199).
ctccactgtgcagcaaaat

SEQ ID NO: 58117 - DNA, 19 bp, Homo sapiens
  siRNA target sequence for BANK1 (NM_017935.2,1183-1201).
ccactgtgcagcaaaattt

SEQ ID NO: 58118 - DNA, 19 bp, Homo sapiens
  siRNA target sequence for BANK1 (NM_017935.2,1245-1263).
caacctgggcatctaagat

SEQ ID NO: 58119 - DNA, 19 bp, Homo sapiens
  siRNA target sequence for BANK1 (NM_017935.2,1278-1296).
gttcagaccccgcacatat

SEQ ID NO: 58120 - DNA, 19 bp, Homo sapiens
  siRNA target sequence for BANK1 (NM_017935.2,1340-1358).
gacttttcaatccaagaaa

SEQ ID NO: 58121 - DNA, 19 bp, Homo sapiens
  siRNA target sequence for BANK1 (NM_017935.2,1588-1606).
ccagtatgatgacttgtat

SEQ ID NO: 58122 - DNA, 19 bp, Homo sapiens
  siRNA target sequence for BANK1 (NM_017935.2,1620-1638).
gtgctgatccagaaaataa

SEQ ID NO: 58123 - DNA, 19 bp, Homo sapiens
  siRNA target sequence for BANK1 (NM_017935.2,1744-1762).
ggtggaaggccaaatggaa

SEQ ID NO: 58124 - DNA, 19 bp, Homo sapiens
  siRNA target sequence for BANK1 (NM_017935.2,1754-1772).
caaatggaaagaagtcaaa

SEQ ID NO: 58125 - DNA, 19 bp, Homo sapiens
  siRNA target sequence for BANK1 (NM_017935.2,1777-1795).
gggtcatcctggtgttaga

SEQ ID NO: 58126 - DNA, 19 bp, Homo sapiens
  siRNA target sequence for BANK1 (NM_017935.2,1779-1797).
gtcatcctggtgttagaca

SEQ ID NO: 58127 - DNA, 19 bp, Homo sapiens
  siRNA target sequence for BANK1 (NM_017935.2,1861-1879).
ggaagaagacccatatact

SEQ ID NO: 58128 - DNA, 19 bp, Homo sapiens
  siRNA target sequence for BANK1 (NM_017935.2,1862-1880).
gaagaagacccatatactt

SEQ ID NO: 58129 - DNA, 19 bp, Homo sapiens
  siRNA target sequence for BANK1 (NM_017935.2,1886-1904).
gagattgatgacagtgaat

SEQ ID NO: 58130 - DNA, 19 bp, Homo sapiens
  siRNA target sequence for BANK1 (NM_017935.2,1947-1965).
ggagtcggtctttcattat

SEQ ID NO: 58131 - DNA, 19 bp, Homo sapiens
  siRNA target sequence for BANK1 (NM_017935.2,1948-1966).
gagtcggtctttcattata

SEQ ID NO: 58132 - DNA, 19 bp, Homo sapiens
  siRNA target sequence for BANK1 (NM_017935.2,1952-1970).
cggtctttcattataaata

SEQ ID NO: 58133 - DNA, 19 bp, Homo sapiens
  siRNA target sequence for BANK1 (NM_017935.2,1986-2004).
caccccgacccacaagtat

SEQ ID NO: 58134 - DNA, 19 bp, Homo sapiens
  siRNA target sequence for BANK1 (NM_017935.2,1990-2008).
ccgacccacaagtatacct

SEQ ID NO: 58135 - DNA, 19 bp, Homo sapiens
  siRNA target sequence for BANK1 (NM_017935.2,1996-2014).
cacaagtatacctccaaaa

SEQ ID NO: 58136 - DNA, 19 bp, Homo sapiens
  siRNA target sequence for BANK1 (NM_017935.2,2036-2054).
gctcaagtgtttcaacaaa

SEQ ID NO: 58137 - DNA, 19 bp, Homo sapiens
  siRNA target sequence for BANK1 (NM_017935.2,2039-2057).
caagtgtttcaacaaaaga

SEQ ID NO: 58138 - DNA, 19 bp, Homo sapiens
  siRNA target sequence for BANK1 (NM_017935.2,2056-2074).
gacagccagaagacaatct

SEQ ID NO: 58139 - DNA, 19 bp, Homo sapiens
  siRNA target sequence for BANK1 (NM_017935.2,2067-2085).
gacaatctgatgatgacaa

SEQ ID NO: 58140 - DNA, 19 bp, Homo sapiens
  siRNA target sequence for BANK1 (NM_017935.2,2111-2129).
gacagagctcggatagaga

SEQ ID NO: 58141 - DNA, 19 bp, Homo sapiens
  siRNA target sequence for BANK1 (NM_017935.2,2126-2144).
gagagtccagccttttcta

SEQ ID NO: 58142 - DNA, 19 bp, Homo sapiens
  siRNA target sequence for BANK1 (NM_017935.2,2281-2299).
gattcagcaggagaaatta

SEQ ID NO: 58143 - DNA, 19 bp, Homo sapiens
  siRNA target sequence for BANK1 (NM_017935.2,2290-2308).
ggagaaattacgacaacta

SEQ ID NO: 58144 - DNA, 19 bp, Homo sapiens
  siRNA target sequence for BANK1 (NM_017935.2,2303-2321).
caactacgagactgcatta

SEQ ID NO: 58145 - DNA, 19 bp, Homo sapiens
  siRNA target sequence for BANK1 (NM_017935.2,2396-2414).
gcccacaatgaaaataagt

SEQ ID NO: 58146 - DNA, 19 bp, Homo sapiens
  siRNA target sequence for BANK1 (NM_017935.2,2398-2416).
ccacaatgaaaataagttt

SEQ ID NO: 58147 - DNA, 19 bp, Homo sapiens
  siRNA target sequence for BANK1 (NM_017935.2,2447-2465).
gctcgaccccaagttgaaa

SEQ ID NO: 58148 - DNA, 19 bp, Homo sapiens
  siRNA target sequence for BANK1 (NM_017935.2,2448-2466).
ctcgaccccaagttgaaaa

SEQ ID NO: 58149 - DNA, 19 bp, Homo sapiens
  siRNA target sequence for BANK1 (NM_017935.2,2451-2469).
gaccccaagttgaaaagga

SEQ ID NO: 58150 - DNA, 19 bp, Homo sapiens
  siRNA target sequence for BANK1 (NM_017935.2,2454-2472).
cccaagttgaaaaggaatt

SEQ ID NO: 58151 - DNA, 19 bp, Homo sapiens
  siRNA target sequence for BANK1 (NM_017935.2,2459-2477).
gttgaaaaggaatttggtt

SEQ ID NO: 58152 - DNA, 19 bp, Homo sapiens
  siRNA target sequence for BAT4 (NM_033177.2,758-776).
ctgcagcccgagctttcta

SEQ ID NO: 58153 - DNA, 19 bp, Homo sapiens
  siRNA target sequence for BAT4 (NM_033177.2,1185-1203).
ggctcagctcgctgaagaa

SEQ ID NO: 58154 - DNA, 19 bp, Homo sapiens
  siRNA target sequence for BAT4 (NM_033177.2,1309-1327).
gacacccacttccaagatt

SEQ ID NO: 58155 - DNA, 19 bp, Homo sapiens
  siRNA target sequence for BDG29 (NM_015144.1,288-306).
cccaagaggcccttaggaa

SEQ ID NO: 58156 - DNA, 19 bp, Homo sapiens
  siRNA target sequence for BDG29 (NM_015144.1,289-307).
ccaagaggcccttaggaaa

SEQ ID NO: 58157 - DNA, 19 bp, Homo sapiens
  siRNA target sequence for BDG29 (NM_015144.1,313-331).
gcaaagtgagtgttgaaaa

SEQ ID NO: 58158 - DNA, 19 bp, Homo sapiens
  siRNA target sequence for BDG29 (NM_015144.1,390-408).
gaggtcttgtggtctgatt

SEQ ID NO: 58159 - DNA, 19 bp, Homo sapiens
  siRNA target sequence for BDG29 (NM_015144.1,398-416).
gtggtctgattcttcaata

SEQ ID NO: 58160 - DNA, 19 bp, Homo sapiens
  siRNA target sequence for BDG29 (NM_015144.1,401-419).
gtctgattcttcaataaca

SEQ ID NO: 58161 - DNA, 19 bp, Homo sapiens
  siRNA target sequence for BDG29 (NM_015144.1,497-515).
gaaactcattccttgctta

SEQ ID NO: 58162 - DNA, 19 bp, Homo sapiens
  siRNA target sequence for BDG29 (NM_015144.1,516-534).
gctggtccggacgcatttt

SEQ ID NO: 58163 - DNA, 19 bp, Homo sapiens
  siRNA target sequence for BDG29 (NM_015144.1,517-535).
ctggtccggacgcatttta

SEQ ID NO: 58164 - DNA, 19 bp, Homo sapiens
  siRNA target sequence for BDG29 (NM_015144.1,520-538).
gtccggacgcattttatgt

SEQ ID NO: 58165 - DNA, 19 bp, Homo sapiens
  siRNA target sequence for BDG29 (NM_015144.1,572-590).
gaggtacctggcctcatta

SEQ ID NO: 58166 - DNA, 19 bp, Homo sapiens
  siRNA target sequence for BDG29 (NM_015144.1,595-613).
ctcacgtgttgaaaaatga

SEQ ID NO: 58167 - DNA, 19 bp, Homo sapiens
  siRNA target sequence for BDG29 (NM_015144.1,675-693).
ggcaatccctccctttcta

SEQ ID NO: 58168 - DNA, 19 bp, Homo sapiens
  siRNA target sequence for BDG29 (NM_015144.1,676-694).
gcaatccctccctttctaa

SEQ ID NO: 58169 - DNA, 19 bp, Homo sapiens
  siRNA target sequence for BDG29 (NM_015144.1,1015-1033).
gccttactgaagaagatct

SEQ ID NO: 58170 - DNA, 19 bp, Homo sapiens
  siRNA target sequence for BDG29 (NM_015144.1,1029-1047).
gatctgaataaatttgagt

SEQ ID NO: 58171 - DNA, 19 bp, Homo sapiens
  siRNA target sequence for BDG29 (NM_015144.1,1366-1384).
gacgtgtggagattcactt

SEQ ID NO: 58172 - DNA, 19 bp, Homo sapiens
  siRNA target sequence for BDG29 (NM_015144.1,1408-1426).
cggtgatgctgctgaatca

SEQ ID NO: 58173 - DNA, 19 bp, Homo sapiens
  siRNA target sequence for BDG29 (NM_015144.1,1410-1428).
gtgatgctgctgaatcact

SEQ ID NO: 58174 - DNA, 19 bp, Homo sapiens
  siRNA target sequence for BDG29 (NM_015144.1,1479-1497).
gaggccagctccaatccat

SEQ ID NO: 58175 - DNA, 19 bp, Homo sapiens
  siRNA target sequence for BDG29 (NM_015144.1,1551-1569).
cccatccgcatgctgaatt

SEQ ID NO: 58176 - DNA, 19 bp, Homo sapiens
  siRNA target sequence for BDG29 (NM_015144.1,1588-1606).
gagggagcgcggacatgaa

SEQ ID NO: 58177 - DNA, 19 bp, Homo sapiens
  siRNA target sequence for BDG29 (NM_015144.1,1618-1636).
cttctgtgcactcactttt

SEQ ID NO: 58178 - DNA, 19 bp, Homo sapiens
  siRNA target sequence for BDG29 (NM_015144.1,1630-1648).
cacttttgtctctagaaga

SEQ ID NO: 58179 - DNA, 19 bp, Homo sapiens
  siRNA target sequence for BDG29 (NM_015144.1,1933-1951).
cccgtccgcccatcaaact

SEQ ID NO: 58180 - DNA, 19 bp, Homo sapiens
  siRNA target sequence for BDG29 (NM_015144.1,1983-2001).
gccatttctgggcaaactt

SEQ ID NO: 58181 - DNA, 19 bp, Homo sapiens
  siRNA target sequence for BDG29 (NM_015144.1,1994-2012).
gcaaacttcctgtcctaat

SEQ ID NO: 58182 - DNA, 19 bp, Homo sapiens
  siRNA target sequence for BDG29 (NM_015144.1,2005-2023).
gtcctaataatgtgcaaat

SEQ ID NO: 58183 - DNA, 19 bp, Homo sapiens
  siRNA target sequence for BDG29 (NM_015144.1,2007-2025).
cctaataatgtgcaaataa

SEQ ID NO: 58184 - DNA, 19 bp, Homo sapiens
  siRNA target sequence for BDG29 (NM_015144.1,2028-2046).
gtgccccctgcaataataa

SEQ ID NO: 58185 - DNA, 19 bp, Homo sapiens
  siRNA target sequence for BDG29 (NM_015144.1,2249-2267).
ccctgaaagcagtttctat

SEQ ID NO: 58186 - DNA, 19 bp, Homo sapiens
  siRNA target sequence for BDG29 (NM_015144.1,2285-2303).
cggctccacaggaaacatt

SEQ ID NO: 58187 - DNA, 19 bp, Homo sapiens
  siRNA target sequence for BDG29 (NM_015144.1,2709-2727).
gtgggcagtagcaatggtt

SEQ ID NO: 58188 - DNA, 19 bp, Homo sapiens
  siRNA target sequence for BDG29 (NM_015144.1,2745-2763).
gggaacctatcttgttaca

SEQ ID NO: 58189 - DNA, 19 bp, Homo sapiens
  siRNA target sequence for BDG29 (NM_015144.1,2819-2837).
caaccggccaggtactttt

SEQ ID NO: 58190 - DNA, 19 bp, Homo sapiens
  siRNA target sequence for BDG29 (NM_015144.1,2823-2841).
cggccaggtacttttaggt

SEQ ID NO: 58191 - DNA, 19 bp, Homo sapiens
  siRNA target sequence for BDG29 (NM_015144.1,2849-2867).
cgcccctccagcagaaagt

SEQ ID NO: 58192 - DNA, 19 bp, Homo sapiens
  siRNA target sequence for BOLL (NM_033030.3,372-390).
caacaagtgccccaagata

SEQ ID NO: 58193 - DNA, 19 bp, Homo sapiens
  siRNA target sequence for BOLL (NM_033030.3,400-418).
gatccctaatcgcatcttt

SEQ ID NO: 58194 - DNA, 19 bp, Homo sapiens
  siRNA target sequence for BOLL (NM_033030.3,439-457).
gacaaacgaaagtgattta

SEQ ID NO: 58195 - DNA, 19 bp, Homo sapiens
  siRNA target sequence for BOLL (NM_033030.3,472-490).
ccagtatgggtctgtgaaa

SEQ ID NO: 58196 - DNA, 19 bp, Homo sapiens
  siRNA target sequence for BOLL (NM_033030.3,521-539).
gtatccaaagggtatggtt

SEQ ID NO: 58197 - DNA, 19 bp, Homo sapiens
  siRNA target sequence for BOLL (NM_033030.3,532-550).
gtatggtttcgtcactttt

SEQ ID NO: 58198 - DNA, 19 bp, Homo sapiens
  siRNA target sequence for BOLL (NM_033030.3,541-559).
cgtcacttttgaaacacaa

SEQ ID NO: 58199 - DNA, 19 bp, Homo sapiens
  siRNA target sequence for BOLL (NM_033030.3,581-599).
caagaggctgaaaaactta

SEQ ID NO: 58200 - DNA, 19 bp, Homo sapiens
  siRNA target sequence for BOLL (NM_033030.3,619-637).
gaacattggtccagcaata

SEQ ID NO: 58201 - DNA, 19 bp, Homo sapiens
  siRNA target sequence for BOLL (NM_033030.3,622-640).
cattggtccagcaataaga

SEQ ID NO: 58202 - DNA, 19 bp, Homo sapiens
  siRNA target sequence for BOLL (NM_033030.3,627-645).
gtccagcaataagaaaaca

SEQ ID NO: 58203 - DNA, 19 bp, Homo sapiens
  siRNA target sequence for BOLL (NM_033030.3,653-671).
gggatccctcgttctagta

SEQ ID NO: 58204 - DNA, 19 bp, Homo sapiens
  siRNA target sequence for BOLL (NM_033030.3,654-672).
ggatccctcgttctagtat

SEQ ID NO: 58205 - DNA, 19 bp, Homo sapiens
  siRNA target sequence for BOLL (NM_033030.3,655-673).
gatccctcgttctagtata

SEQ ID NO: 58206 - DNA, 19 bp, Homo sapiens
  siRNA target sequence for BOLL (NM_033030.3,681-699).
cagctggaacaatgtatct

SEQ ID NO: 58207 - DNA, 19 bp, Homo sapiens
  siRNA target sequence for BOLL (NM_033030.3,683-701).
gctggaacaatgtatctaa

SEQ ID NO: 58208 - DNA, 19 bp, Homo sapiens
  siRNA target sequence for BOLL (NM_033030.3,705-723).
cttcaactggatatcctta

SEQ ID NO: 58209 - DNA, 19 bp, Homo sapiens
  siRNA target sequence for BOLL (NM_033030.3,752-770).
catactccagaggtaactt

SEQ ID NO: 58210 - DNA, 19 bp, Homo sapiens
  siRNA target sequence for BOLL (NM_033030.3,839-857).
cagcaacctgcatatcact

SEQ ID NO: 58211 - DNA, 19 bp, Homo sapiens
  siRNA target sequence for BOLL (NM_033030.3,860-878).
caggccaccacacagtatt

SEQ ID NO: 58212 - DNA, 19 bp, Homo sapiens
  siRNA target sequence for BOLL (NM_033030.3,862-880).
ggccaccacacagtattta

SEQ ID NO: 58213 - DNA, 19 bp, Homo sapiens
  siRNA target sequence for BOLL (NM_033030.3,865-883).
caccacacagtatttacca

SEQ ID NO: 58214 - DNA, 19 bp, Homo sapiens
  siRNA target sequence for BOLL (NM_033030.3,921-939).
cttctgctccattcttata

SEQ ID NO: 58215 - DNA, 19 bp, Homo sapiens
  siRNA target sequence for BOLL (NM_033030.3,924-942).
ctgctccattcttatacct

SEQ ID NO: 58216 - DNA, 19 bp, Homo sapiens
  siRNA target sequence for BOLL (NM_033030.3,1065-1083).
caacatatcaccaggttta

SEQ ID NO: 58217 - DNA, 19 bp, Homo sapiens
  siRNA target sequence for BOLL (NM_033030.3,1085-1103).
gctccaagtgccatcacta

SEQ ID NO: 58218 - DNA, 19 bp, Homo sapiens
  siRNA target sequence for BOLL (NM_033030.3,1123-1141).
gcctgagccaattaaaaca

SEQ ID NO: 58219 - DNA, 19 bp, Homo sapiens
  siRNA target sequence for BOLL (NM_033030.3,1140-1158).
cagtgtggagcattcatta

SEQ ID NO: 58220 - DNA, 19 bp, Homo sapiens
  siRNA target sequence for BOLL (NM_033030.3,1142-1160).
gtgtggagcattcattatt

SEQ ID NO: 58221 - DNA, 19 bp, Homo sapiens
  siRNA target sequence for BOLL (NM_197970.1,245-263).
cagatgcaaacagattcat

SEQ ID NO: 58222 - DNA, 19 bp, Homo sapiens
  siRNA target sequence for BOLL (NM_197970.1,247-265).
gatgcaaacagattcatta

SEQ ID NO: 58223 - DNA, 19 bp, Homo sapiens
  siRNA target sequence for BRUNOL6 (NM_052840.2,948-966).
ccatcggggtcaatggatt

SEQ ID NO: 58224 - DNA, 19 bp, Homo sapiens
  siRNA target sequence for BRUNOL6 (NM_052840.2,1002-1020).
gctccgacacgctctacaa

SEQ ID NO: 58225 - DNA, 19 bp, Homo sapiens
  siRNA target sequence for BRUNOL6 (NM_052840.2,1003-1021).
ctccgacacgctctacaat

SEQ ID NO: 58226 - DNA, 19 bp, Homo sapiens
  siRNA target sequence for BRUNOL6 (NM_052840.2,1005-1023).
ccgacacgctctacaataa

SEQ ID NO: 58227 - DNA, 19 bp, Homo sapiens
  siRNA target sequence for BRUNOL6 (NM_052840.2,1242-1260).
cggaactcatacagacatt

SEQ ID NO: 58228 - DNA, 19 bp, Homo sapiens
  siRNA target sequence for BRUNOL6 (NM_052840.2,1275-1293).
ccgttgtctctgctaaagt

SEQ ID NO: 58229 - DNA, 19 bp, Homo sapiens
  siRNA target sequence for BRUNOL6 (NM_052840.2,1332-1350).
ggtttgttagttttgacaa

SEQ ID NO: 58230 - DNA, 19 bp, Homo sapiens
  siRNA target sequence for BRUNOL6 (NM_052840.2,1337-1355).
gttagttttgacaatccaa

SEQ ID NO: 58231 - DNA, 19 bp, Homo sapiens
  siRNA target sequence for C13orf10 (NM_022118.3,103-121).
ccgccctagcaaaatatgt

SEQ ID NO: 58232 - DNA, 19 bp, Homo sapiens
  siRNA target sequence for C13orf10 (NM_022118.3,104-122).
cgccctagcaaaatatgtt

SEQ ID NO: 58233 - DNA, 19 bp, Homo sapiens
  siRNA target sequence for C13orf10 (NM_022118.3,106-124).
ccctagcaaaatatgttct

SEQ ID NO: 58234 - DNA, 19 bp, Homo sapiens
  siRNA target sequence for C13orf10 (NM_022118.3,286-304).
gaagcctgaaggtagaatt

SEQ ID NO: 58235 - DNA, 19 bp, Homo sapiens
  siRNA target sequence for C13orf10 (NM_022118.3,371-389).
gttttctagaaggctaaat

SEQ ID NO: 58236 - DNA, 19 bp, Homo sapiens
  siRNA target sequence for C13orf10 (NM_022118.3,410-428).
ctcccgatacagggaaaat

SEQ ID NO: 58237 - DNA, 19 bp, Homo sapiens
  siRNA target sequence for C13orf10 (NM_022118.3,413-431).
ccgatacagggaaaataga

SEQ ID NO: 58238 - DNA, 19 bp, Homo sapiens
  siRNA target sequence for C13orf10 (NM_022118.3,414-432).
cgatacagggaaaatagaa

SEQ ID NO: 58239 - DNA, 19 bp, Homo sapiens
  siRNA target sequence for C13orf10 (NM_022118.3,434-452).
ccgtgatgagaggaaaaaa

SEQ ID NO: 58240 - DNA, 19 bp, Homo sapiens
  siRNA target sequence for C13orf10 (NM_022118.3,459-477).
cgttctcgcaaaagagatt

SEQ ID NO: 58241 - DNA, 19 bp, Homo sapiens
  siRNA target sequence for C13orf10 (NM_022118.3,463-481).
ctcgcaaaagagattatga

SEQ ID NO: 58242 - DNA, 19 bp, Homo sapiens
  siRNA target sequence for C13orf10 (NM_022118.3,492-510).
cctcgaagagattcataca

SEQ ID NO: 58243 - DNA, 19 bp, Homo sapiens
  siRNA target sequence for C13orf10 (NM_022118.3,509-527).
cagagaccggtacaataga

SEQ ID NO: 58244 - DNA, 19 bp, Homo sapiens
  siRNA target sequence for C13orf10 (NM_022118.3,565-583).
gtcgaagttggagtaaaga

SEQ ID NO: 58245 - DNA, 19 bp, Homo sapiens
  siRNA target sequence for C13orf10 (NM_022118.3,567-585).
cgaagttggagtaaagaga

SEQ ID NO: 58246 - DNA, 19 bp, Homo sapiens
  siRNA target sequence for C13orf10 (NM_022118.3,652-670).
gggatctggtaaaacctaa

SEQ ID NO: 58247 - DNA, 19 bp, Homo sapiens
  siRNA target sequence for C13orf10 (NM_022118.3,654-672).
gatctggtaaaacctaaat

SEQ ID NO: 58248 - DNA, 19 bp, Homo sapiens
  siRNA target sequence for C13orf10 (NM_022118.3,680-698).
ggatagaacagatccatta

SEQ ID NO: 58249 - DNA, 19 bp, Homo sapiens
  siRNA target sequence for C13orf10 (NM_022118.3,719-737).
ctcttcggtacctagtatt

SEQ ID NO: 58250 - DNA, 19 bp, Homo sapiens
  siRNA target sequence for C13orf10 (NM_022118.3,769-787).
gcagcactattacagtaat

SEQ ID NO: 58251 - DNA, 19 bp, Homo sapiens
  siRNA target sequence for C13orf10 (NM_022118.3,770-788).
cagcactattacagtaatt

SEQ ID NO: 58252 - DNA, 19 bp, Homo sapiens
  siRNA target sequence for C13orf10 (NM_022118.3,773-791).
cactattacagtaattgct

SEQ ID NO: 58253 - DNA, 19 bp, Homo sapiens
  siRNA target sequence for C13orf10 (NM_022118.3,790-808).
ctcctactcatcatggaaa

SEQ ID NO: 58254 - DNA, 19 bp, Homo sapiens
  siRNA target sequence for C13orf10 (NM_022118.3,817-835).
ccgaaagttggtctgaatt

SEQ ID NO: 58255 - DNA, 19 bp, Homo sapiens
  siRNA target sequence for C13orf10 (NM_022118.3,843-861).
gaccaagtggaccataact

SEQ ID NO: 58256 - DNA, 19 bp, Homo sapiens
  siRNA target sequence for C13orf10 (NM_022118.3,845-863).
ccaagtggaccataactct

SEQ ID NO: 58257 - DNA, 19 bp, Homo sapiens
  siRNA target sequence for C13orf10 (NM_022118.3,851-869).
ggaccataactcttacgta

SEQ ID NO: 58258 - DNA, 19 bp, Homo sapiens
  siRNA target sequence for C13orf10 (NM_022118.3,852-870).
gaccataactcttacgtaa

SEQ ID NO: 58259 - DNA, 19 bp, Homo sapiens
  siRNA target sequence for C13orf10 (NM_022118.3,887-905).
gaaacggtgtagagactat

SEQ ID NO: 58260 - DNA, 19 bp, Homo sapiens
  siRNA target sequence for C13orf10 (NM_022118.3,958-976).
gtgatccagtagttgtaga

SEQ ID NO: 58261 - DNA, 19 bp, Homo sapiens
  siRNA target sequence for C13orf10 (NM_022118.3,1077-1095).
cccccacctgtgaatctca

SEQ ID NO: 58262 - DNA, 19 bp, Homo sapiens
  siRNA target sequence for C13orf10 (NM_022118.3,1214-1232).
cagttctgttcctactgta

SEQ ID NO: 58263 - DNA, 19 bp, Homo sapiens
  siRNA target sequence for C13orf10 (NM_022118.3,1278-1296).
ctttttactgcagatacat

SEQ ID NO: 58264 - DNA, 19 bp, Homo sapiens
  siRNA target sequence for C13orf10 (NM_022118.3,1323-1341).
gccccaagcataacaaaca

SEQ ID NO: 58265 - DNA, 19 bp, Homo sapiens
  siRNA target sequence for C13orf10 (NM_022118.3,1325-1343).
cccaagcataacaaacact

SEQ ID NO: 58266 - DNA, 19 bp, Homo sapiens
  siRNA target sequence for C13orf10 (NM_022118.3,1375-1393).
cacaaaggcccaacttgat

SEQ ID NO: 58267 - DNA, 19 bp, Homo sapiens
  siRNA target sequence for C13orf10 (NM_022118.3,1385-1403).
caacttgataggactaaca

SEQ ID NO: 58268 - DNA, 19 bp, Homo sapiens
  siRNA target sequence for C13orf10 (NM_022118.3,1402-1420).
catcaggggatatggattt

SEQ ID NO: 58269 - DNA, 19 bp, Homo sapiens
  siRNA target sequence for C13orf10 (NM_022118.3,1416-1434).
gatttgccacccagagaaa

SEQ ID NO: 58270 - DNA, 19 bp, Homo sapiens
  siRNA target sequence for C13orf10 (NM_022118.3,1440-1458).
cccaataaaagcagtatga

SEQ ID NO: 58271 - DNA, 19 bp, Homo sapiens
  siRNA target sequence for C13orf10 (NM_022118.3,1450-1468).
gcagtatgaggatagtagt

SEQ ID NO: 58272 - DNA, 19 bp, Homo sapiens
  siRNA target sequence for C13orf10 (NM_022118.3,1629-1647).
gttcctccagaattaaata

SEQ ID NO: 58273 - DNA, 19 bp, Homo sapiens
  siRNA target sequence for C13orf10 (NM_022118.3,1668-1686).
cattttagtcgatttggaa

SEQ ID NO: 58274 - DNA, 19 bp, Homo sapiens
  siRNA target sequence for C13orf10 (NM_022118.3,1677-1695).
cgatttggaaccttggtta

SEQ ID NO: 58275 - DNA, 19 bp, Homo sapiens
  siRNA target sequence for C13orf10 (NM_022118.3,1739-1757).
ccaatttgcaacatacgaa

SEQ ID NO: 58276 - DNA, 19 bp, Homo sapiens
  siRNA target sequence for C13orf10 (NM_022118.3,1747-1765).
caacatacgaagaagcaaa

SEQ ID NO: 58277 - DNA, 19 bp, Homo sapiens
  siRNA target sequence for C13orf10 (NM_022118.3,1780-1798).
gtacggaagcagtattaaa

SEQ ID NO: 58278 - DNA, 19 bp, Homo sapiens
  siRNA target sequence for C13orf10 (NM_022118.3,1783-1801).
cggaagcagtattaaacaa

SEQ ID NO: 58279 - DNA, 19 bp, Homo sapiens
  siRNA target sequence for C13orf10 (NM_022118.3,1841-1859).
ccaacagttacaaactact

SEQ ID NO: 58280 - DNA, 19 bp, Homo sapiens
  siRNA target sequence for C13orf10 (NM_022118.3,1986-2004).
cctcaggtgttgtctacat

SEQ ID NO: 58281 - DNA, 19 bp, Homo sapiens
  siRNA target sequence for C13orf10 (NM_022118.3,1989-2007).
caggtgttgtctacatcta

SEQ ID NO: 58282 - DNA, 19 bp, Homo sapiens
  siRNA target sequence for C13orf10 (NM_022118.3,1991-2009).
ggtgttgtctacatctact

SEQ ID NO: 58283 - DNA, 19 bp, Homo sapiens
  siRNA target sequence for C13orf10 (NM_022118.3,2002-2020).
catctactggcctaacaaa

SEQ ID NO: 58284 - DNA, 19 bp, Homo sapiens
  siRNA target sequence for C13orf10 (NM_022118.3,2048-2066).
ggctgcacagaaaacctta

SEQ ID NO: 58285 - DNA, 19 bp, Homo sapiens
  siRNA target sequence for C13orf10 (NM_022118.3,2078-2096).
ctctgcagttgataataat

SEQ ID NO: 58286 - DNA, 19 bp, Homo sapiens
  siRNA target sequence for C13orf10 (NM_022118.3,2320-2338).
ctggacgctgtcttccaaa

SEQ ID NO: 58287 - DNA, 19 bp, Homo sapiens
  siRNA target sequence for C13orf10 (NM_022118.3,2385-2403).
gaactggatttatataaga

SEQ ID NO: 58288 - DNA, 19 bp, Homo sapiens
  siRNA target sequence for C13orf10 (NM_022118.3,2469-2487).
gccaaacgagggattcttt

SEQ ID NO: 58289 - DNA, 19 bp, Homo sapiens
  siRNA target sequence for C13orf10 (NM_022118.3,2494-2512).
gtcggggcagaggaattca

SEQ ID NO: 58290 - DNA, 19 bp, Homo sapiens
  siRNA target sequence for C13orf10 (NM_022118.3,2603-2621).
cagggcattggagatttct

SEQ ID NO: 58291 - DNA, 19 bp, Homo sapiens
  siRNA target sequence for C13orf10 (NM_022118.3,2630-2648).
ggagagcgatagagaagat

SEQ ID NO: 58292 - DNA, 19 bp, Homo sapiens
  siRNA target sequence for C13orf10 (NM_022118.3,2665-2683).
cgcaatatggtgaaattga

SEQ ID NO: 58293 - DNA, 19 bp, Homo sapiens
  siRNA target sequence for C13orf10 (NM_022118.3,2709-2727).
cttcatgcagtaattacat

SEQ ID NO: 58294 - DNA, 19 bp, Homo sapiens
  siRNA target sequence for C13orf10 (NM_022118.3,2712-2730).
catgcagtaattacattca

SEQ ID NO: 58295 - DNA, 19 bp, Homo sapiens
  siRNA target sequence for C13orf10 (NM_022118.3,2773-2791).
gtttcaaagggcaagatct

SEQ ID NO: 58296 - DNA, 19 bp, Homo sapiens
  siRNA target sequence for C13orf10 (NM_022118.3,2777-2795).
caaagggcaagatctaaaa

SEQ ID NO: 58297 - DNA, 19 bp, Homo sapiens
  siRNA target sequence for C13orf10 (NM_022118.3,2803-2821).
ggaataaaccagtaactaa

SEQ ID NO: 58298 - DNA, 19 bp, Homo sapiens
  siRNA target sequence for C13orf10 (NM_022118.3,2888-2906).
ggatgactcattacttcaa

SEQ ID NO: 58299 - DNA, 19 bp, Homo sapiens
  siRNA target sequence for C14orf114 (NM_018199.1,116-134).
gttcgcctgcccaagctaa

SEQ ID NO: 58300 - DNA, 19 bp, Homo sapiens
  siRNA target sequence for C14orf114 (NM_018199.1,119-137).
cgcctgcccaagctaatct

SEQ ID NO: 58301 - DNA, 19 bp, Homo sapiens
  siRNA target sequence for C14orf114 (NM_018199.1,121-139).
cctgcccaagctaatctgt

SEQ ID NO: 58302 - DNA, 19 bp, Homo sapiens
  siRNA target sequence for C14orf114 (NM_018199.1,150-168).
cactaccaagaacgttatt

SEQ ID NO: 58303 - DNA, 19 bp, Homo sapiens
  siRNA target sequence for C14orf114 (NM_018199.1,155-173).
ccaagaacgttattggata

SEQ ID NO: 58304 - DNA, 19 bp, Homo sapiens
  siRNA target sequence for C14orf114 (NM_018199.1,156-174).
caagaacgttattggatat

SEQ ID NO: 58305 - DNA, 19 bp, Homo sapiens
  siRNA target sequence for C14orf114 (NM_018199.1,159-177).
gaacgttattggatatttt

SEQ ID NO: 58306 - DNA, 19 bp, Homo sapiens
  siRNA target sequence for C14orf114 (NM_018199.1,179-197).
gcagatggcaccattttga

SEQ ID NO: 58307 - DNA, 19 bp, Homo sapiens
  siRNA target sequence for C14orf114 (NM_018199.1,242-260).
gattatggcctcgttgtta

SEQ ID NO: 58308 - DNA, 19 bp, Homo sapiens
  siRNA target sequence for C14orf114 (NM_018199.1,268-286).
cctggacctccgataccta

SEQ ID NO: 58309 - DNA, 19 bp, Homo sapiens
  siRNA target sequence for C14orf114 (NM_018199.1,287-305).
gccatgcggcagagaaaca

SEQ ID NO: 58310 - DNA, 19 bp, Homo sapiens
  siRNA target sequence for C14orf114 (NM_018199.1,294-312).
ggcagagaaacaatttgct

SEQ ID NO: 58311 - DNA, 19 bp, Homo sapiens
  siRNA target sequence for C14orf114 (NM_018199.1,421-439).
ggaccaggtaatttatgct

SEQ ID NO: 58312 - DNA, 19 bp, Homo sapiens
  siRNA target sequence for C14orf114 (NM_018199.1,490-508).
ccctttctctaggaattca

SEQ ID NO: 58313 - DNA, 19 bp, Homo sapiens
  siRNA target sequence for C14orf114 (NM_018199.1,534-552).
gtagctggagaaaagtctt

SEQ ID NO: 58314 - DNA, 19 bp, Homo sapiens
  siRNA target sequence for C14orf114 (NM_018199.1,571-589).
ggtcgacatcccatttcga

SEQ ID NO: 58315 - DNA, 19 bp, Homo sapiens
  siRNA target sequence for C14orf114 (NM_018199.1,572-590).
gtcgacatcccatttcgaa

SEQ ID NO: 58316 - DNA, 19 bp, Homo sapiens
  siRNA target sequence for C14orf114 (NM_018199.1,706-724).
gagagaccccagaaaacat

SEQ ID NO: 58317 - DNA, 19 bp, Homo sapiens
  siRNA target sequence for C14orf114 (NM_018199.1,746-764).
ggctattctgccagaaaat

SEQ ID NO: 58318 - DNA, 19 bp, Homo sapiens
  siRNA target sequence for C14orf114 (NM_018199.1,812-830).
ctctgcacttgtgatagaa

SEQ ID NO: 58319 - DNA, 19 bp, Homo sapiens
  siRNA target sequence for C14orf114 (NM_018199.1,892-910).
ggtgaagctacggtttgaa

SEQ ID NO: 58320 - DNA, 19 bp, Homo sapiens
  siRNA target sequence for C14orf114 (NM_018199.1,925-943).
cgaatctcctggagactat

SEQ ID NO: 58321 - DNA, 19 bp, Homo sapiens
  siRNA target sequence for C14orf114 (NM_018199.1,1101-1119).
ccatttccaactactatga

SEQ ID NO: 58322 - DNA, 19 bp, Homo sapiens
  siRNA target sequence for C14orf114 (NM_018199.1,1282-1300).
gcaagcactcagagagttt

SEQ ID NO: 58323 - DNA, 19 bp, Homo sapiens
  siRNA target sequence for C14orf114 (NM_018199.1,1286-1304).
gcactcagagagttttata

SEQ ID NO: 58324 - DNA, 19 bp, Homo sapiens
  siRNA target sequence for C14orf114 (NM_018199.1,1287-1305).
cactcagagagttttataa

SEQ ID NO: 58325 - DNA, 19 bp, Homo sapiens
  siRNA target sequence for C14orf114 (NM_018199.1,1289-1307).
ctcagagagttttataaca

SEQ ID NO: 58326 - DNA, 19 bp, Homo sapiens
  siRNA target sequence for C14orf114 (NM_018199.1,1359-1377).
gaatctccaatgaaaacta

SEQ ID NO: 58327 - DNA, 19 bp, Homo sapiens
  siRNA target sequence for C14orf114 (NM_018199.1,1539-1557).
ggaaattcggggaagatct

SEQ ID NO: 58328 - DNA, 19 bp, Homo sapiens
  siRNA target sequence for C14orf114 (NM_018199.1,1540-1558).
gaaattcggggaagatctt

SEQ ID NO: 58329 - DNA, 19 bp, Homo sapiens
  siRNA target sequence for C14orf6 (NM_145250.1,173-191).
gcacaatgaagataattaa

SEQ ID NO: 58330 - DNA, 19 bp, Homo sapiens
  siRNA target sequence for C14orf6 (NM_145250.1,270-288).
gaacccgatcctgttagtt

SEQ ID NO: 58331 - DNA, 19 bp, Homo sapiens
  siRNA target sequence for C14orf6 (NM_145250.1,347-365).
gaagtttacattataatga

SEQ ID NO: 58332 - DNA, 19 bp, Homo sapiens
  siRNA target sequence for C14orf6 (NM_145250.1,374-392).
gaaacagttcgggtaatga

SEQ ID NO: 58333 - DNA, 19 bp, Homo sapiens
  siRNA target sequence for C14orf6 (NM_145250.1,378-396).
cagttcgggtaatgacaaa

SEQ ID NO: 58334 - DNA, 19 bp, Homo sapiens
  siRNA target sequence for C14orf6 (NM_145250.1,414-432).
gacagtctggagaaaagtt

SEQ ID NO: 58335 - DNA, 19 bp, Homo sapiens
  siRNA target sequence for C14orf6 (NM_145250.1,449-467).
cgtgcaagtggagcaataa

SEQ ID NO: 58336 - DNA, 19 bp, Homo sapiens
  siRNA target sequence for C14orf6 (NM_145250.1,452-470).
gcaagtggagcaataactt

SEQ ID NO: 58337 - DNA, 19 bp, Homo sapiens
  siRNA target sequence for C14orf6 (NM_145250.1,513-531).
ccccagctgcaagtttgta

SEQ ID NO: 58338 - DNA, 19 bp, Homo sapiens
  siRNA target sequence for C14orf6 (NM_145250.1,609-627).
ccccaggtgccaataccat

SEQ ID NO: 58339 - DNA, 19 bp, Homo sapiens
  siRNA target sequence for C14orf6 (NM_145250.1,610-628).
cccaggtgccaataccata

SEQ ID NO: 58340 - DNA, 19 bp, Homo sapiens
  siRNA target sequence for C14orf6 (NM_145250.1,614-632).
ggtgccaataccatagtgt

SEQ ID NO: 58341 - DNA, 19 bp, Homo sapiens
  siRNA target sequence for C14orf6 (NM_145250.1,615-633).
gtgccaataccatagtgtt

SEQ ID NO: 58342 - DNA, 19 bp, Homo sapiens
  siRNA target sequence for C14orf6 (NM_145250.1,691-709).
gtttgtggctctaagttgt

SEQ ID NO: 58343 - DNA, 19 bp, Homo sapiens
  siRNA target sequence for C20orf99 (NM_033089.4,139-157).
cccaggtggtgaagaatct

SEQ ID NO: 58344 - DNA, 19 bp, Homo sapiens
  siRNA target sequence for C20orf99 (NM_033089.4,140-158).
ccaggtggtgaagaatcta

SEQ ID NO: 58345 - DNA, 19 bp, Homo sapiens
  siRNA target sequence for C20orf99 (NM_033089.4,769-787).
gcttgaagacgctcttcat

SEQ ID NO: 58346 - DNA, 19 bp, Homo sapiens
  siRNA target sequence for C20orf99 (NM_033089.4,893-911).
ctggaccggggagtacaaa

SEQ ID NO: 58347 - DNA, 19 bp, Homo sapiens
  siRNA target sequence for C20orf99 (NM_033089.4,1010-1028).
gcccaagacatgctttaaa

SEQ ID NO: 58348 - DNA, 19 bp, Homo sapiens
  siRNA target sequence for C20orf99 (NM_033089.4,1011-1029).
cccaagacatgctttaaat

SEQ ID NO: 58349 - DNA, 19 bp, Homo sapiens
  siRNA target sequence for C20orf99 (NM_033089.4,1173-1191).
cccaaagcagtgcacaatt

SEQ ID NO: 58350 - DNA, 19 bp, Homo sapiens
  siRNA target sequence for C21orf107 (NM_018963.3,473-491).
ctacgtacagcaaaagact

SEQ ID NO: 58351 - DNA, 19 bp, Homo sapiens
  siRNA target sequence for C21orf107 (NM_018963.3,518-536).
gcctttgctgctcttcata

SEQ ID NO: 58352 - DNA, 19 bp, Homo sapiens
  siRNA target sequence for C21orf107 (NM_018963.3,520-538).
ctttgctgctcttcataga

SEQ ID NO: 58353 - DNA, 19 bp, Homo sapiens
  siRNA target sequence for C21orf107 (NM_018963.3,570-588).
gttccccaccaaatcttgt

SEQ ID NO: 58354 - DNA, 19 bp, Homo sapiens
  siRNA target sequence for C21orf107 (NM_018963.3,579-597).
caaatcttgtggagataca

SEQ ID NO: 58355 - DNA, 19 bp, Homo sapiens
  siRNA target sequence for C21orf107 (NM_018963.3,592-610).
gatacatcgaggaaaacaa

SEQ ID NO: 58356 - DNA, 19 bp, Homo sapiens
  siRNA target sequence for C21orf107 (NM_018963.3,648-666).
gaactatgtatcagcatat

SEQ ID NO: 58357 - DNA, 19 bp, Homo sapiens
  siRNA target sequence for C21orf107 (NM_018963.3,682-700).
gattctcggacatctatct

SEQ ID NO: 58358 - DNA, 19 bp, Homo sapiens
  siRNA target sequence for C21orf107 (NM_018963.3,726-744).
ggacaggacatagaatctt

SEQ ID NO: 58359 - DNA, 19 bp, Homo sapiens
  siRNA target sequence for C21orf107 (NM_018963.3,785-803).
cataatggccgcttgttat

SEQ ID NO: 58360 - DNA, 19 bp, Homo sapiens
  siRNA target sequence for C21orf107 (NM_018963.3,791-809).
ggccgcttgttatctacat

SEQ ID NO: 58361 - DNA, 19 bp, Homo sapiens
  siRNA target sequence for C21orf107 (NM_018963.3,792-810).
gccgcttgttatctacatt

SEQ ID NO: 58362 - DNA, 19 bp, Homo sapiens
  siRNA target sequence for C21orf107 (NM_018963.3,793-811).
ccgcttgttatctacatta

SEQ ID NO: 58363 - DNA, 19 bp, Homo sapiens
  siRNA target sequence for C21orf107 (NM_018963.3,794-812).
cgcttgttatctacattaa

SEQ ID NO: 58364 - DNA, 19 bp, Homo sapiens
  siRNA target sequence for C21orf107 (NM_018963.3,872-890).
gcggggagctgtgataaaa

SEQ ID NO: 58365 - DNA, 19 bp, Homo sapiens
  siRNA target sequence for C21orf107 (NM_018963.3,873-891).
cggggagctgtgataaaat

SEQ ID NO: 58366 - DNA, 19 bp, Homo sapiens
  siRNA target sequence for C21orf107 (NM_018963.3,875-893).
gggagctgtgataaaatta

SEQ ID NO: 58367 - DNA, 19 bp, Homo sapiens
  siRNA target sequence for C21orf107 (NM_018963.3,876-894).
ggagctgtgataaaattat

SEQ ID NO: 58368 - DNA, 19 bp, Homo sapiens
  siRNA target sequence for C21orf107 (NM_018963.3,882-900).
gtgataaaattattagagt

SEQ ID NO: 58369 - DNA, 19 bp, Homo sapiens
  siRNA target sequence for C21orf107 (NM_018963.3,941-959).
ggacacacaggatcaatta

SEQ ID NO: 58370 - DNA, 19 bp, Homo sapiens
  siRNA target sequence for C21orf107 (NM_018963.3,946-964).
cacaggatcaattacatct

SEQ ID NO: 58371 - DNA, 19 bp, Homo sapiens
  siRNA target sequence for C21orf107 (NM_018963.3,983-1001).
gccaaaggctctcaaagat

SEQ ID NO: 58372 - DNA, 19 bp, Homo sapiens
  siRNA target sequence for C21orf107 (NM_018963.3,1047-1065).
gggatttagaatccttaaa

SEQ ID NO: 58373 - DNA, 19 bp, Homo sapiens
  siRNA target sequence for C21orf107 (NM_018963.3,1100-1118).
cctaggccaggcgttcaaa

SEQ ID NO: 58374 - DNA, 19 bp, Homo sapiens
  siRNA target sequence for C21orf107 (NM_018963.3,1101-1119).
ctaggccaggcgttcaaat

SEQ ID NO: 58375 - DNA, 19 bp, Homo sapiens
  siRNA target sequence for C21orf107 (NM_018963.3,1104-1122).
ggccaggcgttcaaatgct

SEQ ID NO: 58376 - DNA, 19 bp, Homo sapiens
  siRNA target sequence for C21orf107 (NM_018963.3,1111-1129).
cgttcaaatgctttgttct

SEQ ID NO: 58377 - DNA, 19 bp, Homo sapiens
  siRNA target sequence for C21orf107 (NM_018963.3,1172-1190).
gatcatgtaatcagaatgt

SEQ ID NO: 58378 - DNA, 19 bp, Homo sapiens
  siRNA target sequence for C21orf107 (NM_018963.3,1175-1193).
catgtaatcagaatgtatt

SEQ ID NO: 58379 - DNA, 19 bp, Homo sapiens
  siRNA target sequence for C21orf107 (NM_018963.3,1213-1231).
cgaaaaaatcgcagaactt

SEQ ID NO: 58380 - DNA, 19 bp, Homo sapiens
  siRNA target sequence for C21orf107 (NM_018963.3,1229-1247).
cttgaaagccacactgata

SEQ ID NO: 58381 - DNA, 19 bp, Homo sapiens
  siRNA target sequence for C21orf107 (NM_018963.3,1238-1256).
cacactgataaagtagata

SEQ ID NO: 58382 - DNA, 19 bp, Homo sapiens
  siRNA target sequence for C21orf107 (NM_018963.3,1307-1325).
ggaacagcacggatttgga

SEQ ID NO: 58383 - DNA, 19 bp, Homo sapiens
  siRNA target sequence for C21orf107 (NM_018963.3,1314-1332).
cacggatttggagatttga

SEQ ID NO: 58384 - DNA, 19 bp, Homo sapiens
  siRNA target sequence for C21orf107 (NM_018963.3,1395-1413).
ccgaagaggaaaggtttat

SEQ ID NO: 58385 - DNA, 19 bp, Homo sapiens
  siRNA target sequence for C21orf107 (NM_018963.3,1408-1426).
gtttatgaaacctaaagta

SEQ ID NO: 58386 - DNA, 19 bp, Homo sapiens
  siRNA target sequence for C21orf107 (NM_018963.3,1478-1496).
gatcatgtcctcaaagtgt

SEQ ID NO: 58387 - DNA, 19 bp, Homo sapiens
  siRNA target sequence for C21orf107 (NM_018963.3,1484-1502).
gtcctcaaagtgtggaatt

SEQ ID NO: 58388 - DNA, 19 bp, Homo sapiens
  siRNA target sequence for C21orf107 (NM_018963.3,1509-1527).
ctggacaactgcttcataa

SEQ ID NO: 58389 - DNA, 19 bp, Homo sapiens
  siRNA target sequence for C21orf107 (NM_018963.3,1511-1529).
ggacaactgcttcataact

SEQ ID NO: 58390 - DNA, 19 bp, Homo sapiens
  siRNA target sequence for C21orf107 (NM_018963.3,1514-1532).
caactgcttcataacttaa

SEQ ID NO: 58391 - DNA, 19 bp, Homo sapiens
  siRNA target sequence for C21orf107 (NM_018963.3,1562-1580).
gagacacatccctttgatt

SEQ ID NO: 58392 - DNA, 19 bp, Homo sapiens
  siRNA target sequence for C21orf107 (NM_018963.3,1577-1595).
gattccagaattatgttat

SEQ ID NO: 58393 - DNA, 19 bp, Homo sapiens
  siRNA target sequence for C21orf107 (NM_018963.3,1607-1625).
gatggcagcatatttatat

SEQ ID NO: 58394 - DNA, 19 bp, Homo sapiens
  siRNA target sequence for C21orf107 (NM_018963.3,1635-1653).
caaaaggtaccaagatgaa

SEQ ID NO: 58395 - DNA, 19 bp, Homo sapiens
  siRNA target sequence for C21orf107 (NM_018963.3,1640-1658).
ggtaccaagatgaaacatt

SEQ ID NO: 58396 - DNA, 19 bp, Homo sapiens
  siRNA target sequence for C21orf107 (NM_018963.3,1641-1659).
gtaccaagatgaaacatta

SEQ ID NO: 58397 - DNA, 19 bp, Homo sapiens
  siRNA target sequence for C21orf107 (NM_018963.3,1685-1703).
catggagctgtgtttgact

SEQ ID NO: 58398 - DNA, 19 bp, Homo sapiens
  siRNA target sequence for C21orf107 (NM_018963.3,1689-1707).
gagctgtgtttgactgtaa

SEQ ID NO: 58399 - DNA, 19 bp, Homo sapiens
  siRNA target sequence for C21orf107 (NM_018963.3,1713-1731).
cacaggatggacagcattt

SEQ ID NO: 58400 - DNA, 19 bp, Homo sapiens
  siRNA target sequence for C21orf107 (NM_018963.3,1824-1842).
ctgactatcgaccacttat

SEQ ID NO: 58401 - DNA, 19 bp, Homo sapiens
  siRNA target sequence for C21orf107 (NM_018963.3,1826-1844).
gactatcgaccacttatta

SEQ ID NO: 58402 - DNA, 19 bp, Homo sapiens
  siRNA target sequence for C21orf107 (NM_018963.3,1828-1846).
ctatcgaccacttattaga

SEQ ID NO: 58403 - DNA, 19 bp, Homo sapiens
  siRNA target sequence for C21orf107 (NM_018963.3,1832-1850).
cgaccacttattagagatt

SEQ ID NO: 58404 - DNA, 19 bp, Homo sapiens
  siRNA target sequence for C21orf107 (NM_018963.3,1937-1955).
catccaaccaagtatcaga

SEQ ID NO: 58405 - DNA, 19 bp, Homo sapiens
  siRNA target sequence for C21orf107 (NM_018963.3,1941-1959).
caaccaagtatcagagatt

SEQ ID NO: 58406 - DNA, 19 bp, Homo sapiens
  siRNA target sequence for C21orf107 (NM_018963.3,2008-2026).
gggctatgtggcaacaagt

SEQ ID NO: 58407 - DNA, 19 bp, Homo sapiens
  siRNA target sequence for C21orf107 (NM_018963.3,2055-2073).
gcctgcaaaccaatgataa

SEQ ID NO: 58408 - DNA, 19 bp, Homo sapiens
  siRNA target sequence for C21orf107 (NM_018963.3,2056-2074).
cctgcaaaccaatgataat

SEQ ID NO: 58409 - DNA, 19 bp, Homo sapiens
  siRNA target sequence for C21orf107 (NM_018963.3,2059-2077).
gcaaaccaatgataatgat

SEQ ID NO: 58410 - DNA, 19 bp, Homo sapiens
  siRNA target sequence for C21orf107 (NM_018963.3,2088-2106).
cagaatcgagtattcttga

SEQ ID NO: 58411 - DNA, 19 bp, Homo sapiens
  siRNA target sequence for C21orf107 (NM_018963.3,2151-2169).
gagcagatcaggatactat

SEQ ID NO: 58412 - DNA, 19 bp, Homo sapiens
  siRNA target sequence for C21orf107 (NM_018963.3,2156-2174).
gatcaggatactattccaa

SEQ ID NO: 58413 - DNA, 19 bp, Homo sapiens
  siRNA target sequence for C21orf107 (NM_018963.3,2201-2219).
ccccggagaggttttagaa

SEQ ID NO: 58414 - DNA, 19 bp, Homo sapiens
  siRNA target sequence for C21orf107 (NM_018963.3,2217-2235).
gaaggctgagcttagacat

SEQ ID NO: 58415 - DNA, 19 bp, Homo sapiens
  siRNA target sequence for C21orf107 (NM_018963.3,2220-2238).
ggctgagcttagacattca

SEQ ID NO: 58416 - DNA, 19 bp, Homo sapiens
  siRNA target sequence for C21orf107 (NM_018963.3,2222-2240).
ctgagcttagacattcagt

SEQ ID NO: 58417 - DNA, 19 bp, Homo sapiens
  siRNA target sequence for C21orf107 (NM_018963.3,2239-2257).
gtcccctccaaatattggt

SEQ ID NO: 58418 - DNA, 19 bp, Homo sapiens
  siRNA target sequence for C21orf107 (NM_018963.3,2305-2323).
cgctccacgcagtcagatt

SEQ ID NO: 58419 - DNA, 19 bp, Homo sapiens
  siRNA target sequence for C21orf107 (NM_018963.3,2309-2327).
ccacgcagtcagattgcta

SEQ ID NO: 58420 - DNA, 19 bp, Homo sapiens
  siRNA target sequence for C21orf107 (NM_018963.3,2374-2392).
ggtaccactaggcatattt

SEQ ID NO: 58421 - DNA, 19 bp, Homo sapiens
  siRNA target sequence for C21orf107 (NM_018963.3,2375-2393).
gtaccactaggcatattta

SEQ ID NO: 58422 - DNA, 19 bp, Homo sapiens
  siRNA target sequence for C21orf107 (NM_018963.3,2402-2420).
gaagacttccgattagaga

SEQ ID NO: 58423 - DNA, 19 bp, Homo sapiens
  siRNA target sequence for C21orf107 (NM_018963.3,2481-2499).
cacataagtcggattcagt

SEQ ID NO: 58424 - DNA, 19 bp, Homo sapiens
  siRNA target sequence for C21orf107 (NM_018963.3,2506-2524).
ggtatcacagtctagacaa

SEQ ID NO: 58425 - DNA, 19 bp, Homo sapiens
  siRNA target sequence for C21orf107 (NM_018963.3,2507-2525).
gtatcacagtctagacaaa

SEQ ID NO: 58426 - DNA, 19 bp, Homo sapiens
  siRNA target sequence for C21orf107 (NM_018963.3,2526-2544).
ggacatgtaggcgtaaata

SEQ ID NO: 58427 - DNA, 19 bp, Homo sapiens
  siRNA target sequence for C21orf107 (NM_018963.3,2527-2545).
gacatgtaggcgtaaatat

SEQ ID NO: 58428 - DNA, 19 bp, Homo sapiens
  siRNA target sequence for C21orf107 (NM_018963.3,2532-2550).
gtaggcgtaaatatccaaa

SEQ ID NO: 58429 - DNA, 19 bp, Homo sapiens
  siRNA target sequence for C21orf107 (NM_018963.3,2567-2585).
cgtagctggcgtgagttat

SEQ ID NO: 58430 - DNA, 19 bp, Homo sapiens
  siRNA target sequence for C21orf107 (NM_018963.3,2572-2590).
ctggcgtgagttatcttct

SEQ ID NO: 58431 - DNA, 19 bp, Homo sapiens
  siRNA target sequence for C21orf107 (NM_018963.3,2597-2615).
gagtcttcaagctctgtaa

SEQ ID NO: 58432 - DNA, 19 bp, Homo sapiens
  siRNA target sequence for C21orf107 (NM_018963.3,2601-2619).
cttcaagctctgtaagaca

SEQ ID NO: 58433 - DNA, 19 bp, Homo sapiens
  siRNA target sequence for C21orf107 (NM_018963.3,2693-2711).
gagagttacagcgaaagtt

SEQ ID NO: 58434 - DNA, 19 bp, Homo sapiens
  siRNA target sequence for C21orf107 (NM_018963.3,2695-2713).
gagttacagcgaaagttca

SEQ ID NO: 58435 - DNA, 19 bp, Homo sapiens
  siRNA target sequence for C21orf107 (NM_018963.3,2747-2765).
gctgatgcgggcatcaatt

SEQ ID NO: 58436 - DNA, 19 bp, Homo sapiens
  siRNA target sequence for C21orf107 (NM_018963.3,2748-2766).
ctgatgcgggcatcaattt

SEQ ID NO: 58437 - DNA, 19 bp, Homo sapiens
  siRNA target sequence for C21orf107 (NM_018963.3,2767-2785).
gcagcctcctttaagaaca

SEQ ID NO: 58438 - DNA, 19 bp, Homo sapiens
  siRNA target sequence for C21orf107 (NM_018963.3,2768-2786).
cagcctcctttaagaacat

SEQ ID NO: 58439 - DNA, 19 bp, Homo sapiens
  siRNA target sequence for C21orf107 (NM_018963.3,2795-2813).
cgacgaattactcgatttt

SEQ ID NO: 58440 - DNA, 19 bp, Homo sapiens
  siRNA target sequence for C21orf107 (NM_018963.3,2798-2816).
cgaattactcgattttgta

SEQ ID NO: 58441 - DNA, 19 bp, Homo sapiens
  siRNA target sequence for C21orf107 (NM_018963.3,2831-2849).
gaaatatctactgagaatt

SEQ ID NO: 58442 - DNA, 19 bp, Homo sapiens
  siRNA target sequence for C21orf107 (NM_018963.3,2982-3000).
ctgacaccacacttagaaa

SEQ ID NO: 58443 - DNA, 19 bp, Homo sapiens
  siRNA target sequence for C21orf107 (NM_018963.3,2986-3004).
caccacacttagaaaatct

SEQ ID NO: 58444 - DNA, 19 bp, Homo sapiens
  siRNA target sequence for C21orf107 (NM_018963.3,3022-3040).
gggtgatgaggtaatatat

SEQ ID NO: 58445 - DNA, 19 bp, Homo sapiens
  siRNA target sequence for C21orf107 (NM_018963.3,3045-3063).
gacagggtcatgaagctta

SEQ ID NO: 58446 - DNA, 19 bp, Homo sapiens
  siRNA target sequence for C21orf107 (NM_018963.3,3047-3065).
cagggtcatgaagcttata

SEQ ID NO: 58447 - DNA, 19 bp, Homo sapiens
  siRNA target sequence for C21orf107 (NM_018963.3,3139-3157).
ggatcaagaattggttaaa

SEQ ID NO: 58448 - DNA, 19 bp, Homo sapiens
  siRNA target sequence for C21orf107 (NM_018963.3,3192-3210).
cactctgttgcctaaaact

SEQ ID NO: 58449 - DNA, 19 bp, Homo sapiens
  siRNA target sequence for C21orf107 (NM_018963.3,3201-3219).
gcctaaaactagcatttat

SEQ ID NO: 58450 - DNA, 19 bp, Homo sapiens
  siRNA target sequence for C21orf107 (NM_018963.3,3202-3220).
cctaaaactagcatttata

SEQ ID NO: 58451 - DNA, 19 bp, Homo sapiens
  siRNA target sequence for C21orf107 (NM_018963.3,3252-3270).
ctttctctattagatatca

SEQ ID NO: 58452 - DNA, 19 bp, Homo sapiens
  siRNA target sequence for C21orf107 (NM_018963.3,3256-3274).
ctctattagatatcatgat

SEQ ID NO: 58453 - DNA, 19 bp, Homo sapiens
  siRNA target sequence for C21orf107 (NM_018963.3,3258-3276).
ctattagatatcatgatat

SEQ ID NO: 58454 - DNA, 19 bp, Homo sapiens
  siRNA target sequence for C21orf107 (NM_018963.3,3284-3302).
gttattgactttcttgtat

SEQ ID NO: 58455 - DNA, 19 bp, Homo sapiens
  siRNA target sequence for C21orf107 (NM_018963.3,3352-3370).
cagattccgctctattatt

SEQ ID NO: 58456 - DNA, 19 bp, Homo sapiens
  siRNA target sequence for C21orf107 (NM_018963.3,3354-3372).
gattccgctctattattga

SEQ ID NO: 58457 - DNA, 19 bp, Homo sapiens
  siRNA target sequence for C21orf107 (NM_018963.3,3358-3376).
ccgctctattattgatgat

SEQ ID NO: 58458 - DNA, 19 bp, Homo sapiens
  siRNA target sequence for C21orf107 (NM_018963.3,3385-3403).
gtttggaacagtgttaagt

SEQ ID NO: 58459 - DNA, 19 bp, Homo sapiens
  siRNA target sequence for C21orf107 (NM_018963.3,3409-3427).
gccatatcaaccacagtat

SEQ ID NO: 58460 - DNA, 19 bp, Homo sapiens
  siRNA target sequence for C21orf107 (NM_018963.3,3420-3438).
cacagtatcctgatagtca

SEQ ID NO: 58461 - DNA, 19 bp, Homo sapiens
  siRNA target sequence for C21orf107 (NM_018963.3,3422-3440).
cagtatcctgatagtcatt

SEQ ID NO: 58462 - DNA, 19 bp, Homo sapiens
  siRNA target sequence for C21orf107 (NM_018963.3,3459-3477).
ggtgggataatactgaaat

SEQ ID NO: 58463 - DNA, 19 bp, Homo sapiens
  siRNA target sequence for C21orf107 (NM_018963.3,3460-3478).
gtgggataatactgaaatt

SEQ ID NO: 58464 - DNA, 19 bp, Homo sapiens
  siRNA target sequence for C21orf107 (NM_018963.3,3463-3481).
ggataatactgaaattgaa

SEQ ID NO: 58465 - DNA, 19 bp, Homo sapiens
  siRNA target sequence for C21orf107 (NM_018963.3,3496-3514).
ggacatggaaccaattcct

SEQ ID NO: 58466 - DNA, 19 bp, Homo sapiens
  siRNA target sequence for C21orf107 (NM_018963.3,3577-3595).
gaaattgctctataaacca

SEQ ID NO: 58467 - DNA, 19 bp, Homo sapiens
  siRNA target sequence for C21orf107 (NM_018963.3,3653-3671).
ggtatagatcaacttttga

SEQ ID NO: 58468 - DNA, 19 bp, Homo sapiens
  siRNA target sequence for C21orf107 (NM_018963.3,3743-3761).
gcttatccaaccgatcttt

SEQ ID NO: 58469 - DNA, 19 bp, Homo sapiens
  siRNA target sequence for C21orf107 (NM_018963.3,3744-3762).
cttatccaaccgatcttta

SEQ ID NO: 58470 - DNA, 19 bp, Homo sapiens
  siRNA target sequence for C21orf107 (NM_018963.3,3749-3767).
ccaaccgatctttacacaa

SEQ ID NO: 58471 - DNA, 19 bp, Homo sapiens
  siRNA target sequence for C21orf107 (NM_018963.3,3750-3768).
caaccgatctttacacaat

SEQ ID NO: 58472 - DNA, 19 bp, Homo sapiens
  siRNA target sequence for C21orf107 (NM_018963.3,3754-3772).
cgatctttacacaattcga

SEQ ID NO: 58473 - DNA, 19 bp, Homo sapiens
  siRNA target sequence for C21orf107 (NM_018963.3,3755-3773).
gatctttacacaattcgaa

SEQ ID NO: 58474 - DNA, 19 bp, Homo sapiens
  siRNA target sequence for C21orf107 (NM_018963.3,3775-3793).
gagacttgttaatcgattt

SEQ ID NO: 58475 - DNA, 19 bp, Homo sapiens
  siRNA target sequence for C21orf107 (NM_018963.3,3777-3795).
gacttgttaatcgatttta

SEQ ID NO: 58476 - DNA, 19 bp, Homo sapiens
  siRNA target sequence for C21orf107 (NM_018963.3,3799-3817).
gaggctgtctgcgttagtt

SEQ ID NO: 58477 - DNA, 19 bp, Homo sapiens
  siRNA target sequence for C21orf107 (NM_018963.3,3859-3877).
cgaacctgagagtgtaatt

SEQ ID NO: 58478 - DNA, 19 bp, Homo sapiens
  siRNA target sequence for C21orf107 (NM_018963.3,3905-3923).
caacttttaaaatttatca

SEQ ID NO: 58479 - DNA, 19 bp, Homo sapiens
  siRNA target sequence for C21orf107 (NM_018963.3,4060-4078).
catcagagctacgaactat

SEQ ID NO: 58480 - DNA, 19 bp, Homo sapiens
  siRNA target sequence for C21orf107 (NM_018963.3,4071-4089).
cgaactatgttgaaagcaa

SEQ ID NO: 58481 - DNA, 19 bp, Homo sapiens
  siRNA target sequence for C21orf107 (NM_018963.3,4104-4122).
gtaaggaactagtgaactt

SEQ ID NO: 58482 - DNA, 19 bp, Homo sapiens
  siRNA target sequence for C21orf107 (NM_018963.3,4109-4127).
gaactagtgaacttaattt

SEQ ID NO: 58483 - DNA, 19 bp, Homo sapiens
  siRNA target sequence for C21orf107 (NM_018963.3,4236-4254).
ctctagatgcgggaaatta

SEQ ID NO: 58484 - DNA, 19 bp, Homo sapiens
  siRNA target sequence for C21orf107 (NM_018963.3,4241-4259).
gatgcgggaaattatgaca

SEQ ID NO: 58485 - DNA, 19 bp, Homo sapiens
  siRNA target sequence for C21orf107 (NM_018963.3,4280-4298).
gacatccggctgatattta

SEQ ID NO: 58486 - DNA, 19 bp, Homo sapiens
  siRNA target sequence for C21orf107 (NM_018963.3,4285-4303).
ccggctgatatttagcaat

SEQ ID NO: 58487 - DNA, 19 bp, Homo sapiens
  siRNA target sequence for C21orf107 (NM_018963.3,4450-4468).
gttcaagcaacggcaaaat

SEQ ID NO: 58488 - DNA, 19 bp, Homo sapiens
  siRNA target sequence for C21orf107 (NM_018963.3,4456-4474).
gcaacggcaaaattgtaaa

SEQ ID NO: 58489 - DNA, 19 bp, Homo sapiens
  siRNA target sequence for C21orf107 (NM_018963.3,4476-4494).
gtgacagtcagcctaacaa

SEQ ID NO: 58490 - DNA, 19 bp, Homo sapiens
  siRNA target sequence for C21orf107 (NM_018963.3,4480-4498).
cagtcagcctaacaaaagt

SEQ ID NO: 58491 - DNA, 19 bp, Homo sapiens
  siRNA target sequence for C21orf107 (NM_018963.3,4482-4500).
gtcagcctaacaaaagtat

SEQ ID NO: 58492 - DNA, 19 bp, Homo sapiens
  siRNA target sequence for C21orf107 (NM_018963.3,4508-4526).
ctcaagccgaagaggttaa

SEQ ID NO: 58493 - DNA, 19 bp, Homo sapiens
  siRNA target sequence for C21orf107 (NM_018963.3,4510-4528).
caagccgaagaggttaaaa

SEQ ID NO: 58494 - DNA, 19 bp, Homo sapiens
  siRNA target sequence for C21orf107 (NM_018963.3,4513-4531).
gccgaagaggttaaaatct

SEQ ID NO: 58495 - DNA, 19 bp, Homo sapiens
  siRNA target sequence for C21orf107 (NM_018963.3,4515-4533).
cgaagaggttaaaatctca

SEQ ID NO: 58496 - DNA, 19 bp, Homo sapiens
  siRNA target sequence for C21orf107 (NM_018963.3,4522-4540).
gttaaaatctcagacaaaa

SEQ ID NO: 58497 - DNA, 19 bp, Homo sapiens
  siRNA target sequence for C21orf107 (NM_018963.3,4579-4597).
ctcaagtaggacagcttat

SEQ ID NO: 58498 - DNA, 19 bp, Homo sapiens
  siRNA target sequence for C21orf107 (NM_018963.3,4684-4702).
gaaaagaaatagacctata

SEQ ID NO: 58499 - DNA, 19 bp, Homo sapiens
  siRNA target sequence for C21orf107 (NM_018963.3,4709-4727).
ggttctacattatctgaaa

SEQ ID NO: 58500 - DNA, 19 bp, Homo sapiens
  siRNA target sequence for C21orf107 (NM_018963.3,4853-4871).
ctcagggtaaccagaacta

SEQ ID NO: 58501 - DNA, 19 bp, Homo sapiens
  siRNA target sequence for C21orf107 (NM_018963.3,4869-4887).
ctagagctgctcaaagaaa

SEQ ID NO: 58502 - DNA, 19 bp, Homo sapiens
  siRNA target sequence for C21orf107 (NM_018963.3,4930-4948).
cactcgaaagagagtctat

SEQ ID NO: 58503 - DNA, 19 bp, Homo sapiens
  siRNA target sequence for C21orf107 (NM_018963.3,4932-4950).
ctcgaaagagagtctattt

SEQ ID NO: 58504 - DNA, 19 bp, Homo sapiens
  siRNA target sequence for C21orf107 (NM_018963.3,4934-4952).
cgaaagagagtctatttaa

SEQ ID NO: 58505 - DNA, 19 bp, Homo sapiens
  siRNA target sequence for C21orf107 (NM_018963.3,5007-5025).
gaaataaccgaaaagtctt

SEQ ID NO: 58506 - DNA, 19 bp, Homo sapiens
  siRNA target sequence for C21orf107 (NM_018963.3,5120-5138).
ctgcctcaccgcaatgctt

SEQ ID NO: 58507 - DNA, 19 bp, Homo sapiens
  siRNA target sequence for C21orf107 (NM_018963.3,5136-5154).
cttctgctgtagctagaaa

SEQ ID NO: 58508 - DNA, 19 bp, Homo sapiens
  siRNA target sequence for C21orf107 (NM_018963.3,5259-5277).
ctgcccagagcaatgttga

SEQ ID NO: 58509 - DNA, 19 bp, Homo sapiens
  siRNA target sequence for C21orf107 (NM_018963.3,5262-5280).
cccagagcaatgttgatga

SEQ ID NO: 58510 - DNA, 19 bp, Homo sapiens
  siRNA target sequence for C21orf107 (NM_018963.3,5263-5281).
ccagagcaatgttgatgaa

SEQ ID NO: 58511 - DNA, 19 bp, Homo sapiens
  siRNA target sequence for C21orf107 (NM_018963.3,5317-5335).
gcgggtagcccggaaaaat

SEQ ID NO: 58512 - DNA, 19 bp, Homo sapiens
  siRNA target sequence for C21orf107 (NM_018963.3,5318-5336).
cgggtagcccggaaaaatt

SEQ ID NO: 58513 - DNA, 19 bp, Homo sapiens
  siRNA target sequence for C21orf107 (NM_018963.3,5339-5357).
catgctaatggttacaagt

SEQ ID NO: 58514 - DNA, 19 bp, Homo sapiens
  siRNA target sequence for C21orf107 (NM_018963.3,5366-5384).
ccagcaccttcaaagacaa

SEQ ID NO: 58515 - DNA, 19 bp, Homo sapiens
  siRNA target sequence for C21orf107 (NM_018963.3,5403-5421).
cttctgaggaagactctaa

SEQ ID NO: 58516 - DNA, 19 bp, Homo sapiens
  siRNA target sequence for C21orf107 (NM_018963.3,5416-5434).
ctctaaaagtcatgattca

SEQ ID NO: 58517 - DNA, 19 bp, Homo sapiens
  siRNA target sequence for C21orf107 (NM_018963.3,5466-5484).
caacgtctgtgcagaaact

SEQ ID NO: 58518 - DNA, 19 bp, Homo sapiens
  siRNA target sequence for C21orf107 (NM_018963.3,5469-5487).
cgtctgtgcagaaacttaa

SEQ ID NO: 58519 - DNA, 19 bp, Homo sapiens
  siRNA target sequence for C21orf107 (NM_018963.3,5560-5578).
caagaatgcgagtttcttt

SEQ ID NO: 58520 - DNA, 19 bp, Homo sapiens
  siRNA target sequence for C21orf107 (NM_018963.3,5563-5581).
gaatgcgagtttctttaaa

SEQ ID NO: 58521 - DNA, 19 bp, Homo sapiens
  siRNA target sequence for C21orf107 (NM_018963.3,5665-5683).
gaacccaatttcaggaaat

SEQ ID NO: 58522 - DNA, 19 bp, Homo sapiens
  siRNA target sequence for C21orf107 (NM_018963.3,5686-5704).
gaactgtgaccctattgct

SEQ ID NO: 58523 - DNA, 19 bp, Homo sapiens
  siRNA target sequence for C21orf107 (NM_018963.3,5809-5827).
caatggactaagcagaaaa

SEQ ID NO: 58524 - DNA, 19 bp, Homo sapiens
  siRNA target sequence for C21orf107 (NM_018963.3,5816-5834).
ctaagcagaaaaatttcca

SEQ ID NO: 58525 - DNA, 19 bp, Homo sapiens
  siRNA target sequence for C21orf107 (NM_018963.3,5914-5932).
gaggattactcgaagatgt

SEQ ID NO: 58526 - DNA, 19 bp, Homo sapiens
  siRNA target sequence for C21orf107 (NM_018963.3,5934-5952).
cagctacggctgccaataa

SEQ ID NO: 58527 - DNA, 19 bp, Homo sapiens
  siRNA target sequence for C21orf107 (NM_018963.3,5936-5954).
gctacggctgccaataaga

SEQ ID NO: 58528 - DNA, 19 bp, Homo sapiens
  siRNA target sequence for C21orf107 (NM_018963.3,5937-5955).
ctacggctgccaataagat

SEQ ID NO: 58529 - DNA, 19 bp, Homo sapiens
  siRNA target sequence for C21orf107 (NM_018963.3,5996-6014).
gtgcacactagaagcaaaa

SEQ ID NO: 58530 - DNA, 19 bp, Homo sapiens
  siRNA target sequence for C21orf107 (NM_018963.3,5998-6016).
gcacactagaagcaaaaat

SEQ ID NO: 58531 - DNA, 19 bp, Homo sapiens
  siRNA target sequence for C21orf107 (NM_018963.3,6032-6050).
ctccatcttgcttgtacta

SEQ ID NO: 58532 - DNA, 19 bp, Homo sapiens
  siRNA target sequence for C21orf107 (NM_018963.3,6143-6161).
gactccgaaggtagtacaa

SEQ ID NO: 58533 - DNA, 19 bp, Homo sapiens
  siRNA target sequence for C21orf107 (NM_018963.3,6145-6163).
ctccgaaggtagtacaaaa

SEQ ID NO: 58534 - DNA, 19 bp, Homo sapiens
  siRNA target sequence for C21orf107 (NM_018963.3,6147-6165).
ccgaaggtagtacaaaagt

SEQ ID NO: 58535 - DNA, 19 bp, Homo sapiens
  siRNA target sequence for C21orf107 (NM_018963.3,6156-6174).
gtacaaaagtgcttagtca

SEQ ID NO: 58536 - DNA, 19 bp, Homo sapiens
  siRNA target sequence for C21orf107 (NM_018963.3,6223-6241).
caagcacaggcataccaat

SEQ ID NO: 58537 - DNA, 19 bp, Homo sapiens
  siRNA target sequence for C21orf107 (NM_018963.3,6237-6255).
ccaatattcacaaaataga

SEQ ID NO: 58538 - DNA, 19 bp, Homo sapiens
  siRNA target sequence for C21orf107 (NM_018963.3,6438-6456).
gactcaggacctatggaaa

SEQ ID NO: 58539 - DNA, 19 bp, Homo sapiens
  siRNA target sequence for C21orf107 (NM_018963.3,6448-6466).
ctatggaaaggctcctttt

SEQ ID NO: 58540 - DNA, 19 bp, Homo sapiens
  siRNA target sequence for C21orf107 (NM_018963.3,6452-6470).
ggaaaggctccttttagta

SEQ ID NO: 58541 - DNA, 19 bp, Homo sapiens
  siRNA target sequence for C21orf107 (NM_018963.3,6453-6471).
gaaaggctccttttagtaa

SEQ ID NO: 58542 - DNA, 19 bp, Homo sapiens
  siRNA target sequence for C21orf107 (NM_018963.3,6457-6475).
ggctccttttagtaagaca

SEQ ID NO: 58543 - DNA, 19 bp, Homo sapiens
  siRNA target sequence for C21orf107 (NM_018963.3,6458-6476).
gctccttttagtaagacaa

SEQ ID NO: 58544 - DNA, 19 bp, Homo sapiens
  siRNA target sequence for C21orf107 (NM_018963.3,6462-6480).
cttttagtaagacaaaagt

SEQ ID NO: 58545 - DNA, 19 bp, Homo sapiens
  siRNA target sequence for C21orf107 (NM_018963.3,6528-6546).
gatcgcatcctgaattgga

SEQ ID NO: 58546 - DNA, 19 bp, Homo sapiens
  siRNA target sequence for C21orf107 (NM_018963.3,6583-6601).
gtttagacctgatactagt

SEQ ID NO: 58547 - DNA, 19 bp, Homo sapiens
  siRNA target sequence for C21orf107 (NM_018963.3,6590-6608).
cctgatactagttccaaat

SEQ ID NO: 58548 - DNA, 19 bp, Homo sapiens
  siRNA target sequence for C21orf107 (NM_018963.3,6593-6611).
gatactagttccaaatcat

SEQ ID NO: 58549 - DNA, 19 bp, Homo sapiens
  siRNA target sequence for C21orf107 (NM_018963.3,6729-6747).
gagaacccaatacaaaagt

SEQ ID NO: 58550 - DNA, 19 bp, Homo sapiens
  siRNA target sequence for C21orf107 (NM_018963.3,6731-6749).
gaacccaatacaaaagtga

SEQ ID NO: 58551 - DNA, 19 bp, Homo sapiens
  siRNA target sequence for C21orf107 (NM_018963.3,6748-6766).
gagaacatgtatgcataat

SEQ ID NO: 58552 - DNA, 19 bp, Homo sapiens
  siRNA target sequence for C21orf107 (NM_018963.3,6753-6771).
catgtatgcataatcagaa

SEQ ID NO: 58553 - DNA, 19 bp, Homo sapiens
  siRNA target sequence for C21orf107 (NM_018963.3,6779-6797).
gtgcagatgcctagtgaaa

SEQ ID NO: 58554 - DNA, 19 bp, Homo sapiens
  siRNA target sequence for C21orf107 (NM_018963.3,6842-6860).
gctactgttgctgcaaata

SEQ ID NO: 58555 - DNA, 19 bp, Homo sapiens
  siRNA target sequence for C21orf107 (NM_018963.3,6876-6894).
gtaatctaaaagaaacgat

SEQ ID NO: 58556 - DNA, 19 bp, Homo sapiens
  siRNA target sequence for C21orf107 (NM_018963.3,6905-6923).
gaaaatgtctggattagga

SEQ ID NO: 58557 - DNA, 19 bp, Homo sapiens
  siRNA target sequence for C21orf107 (NM_018963.3,6959-6977).
gctgcggctaagaaaaaat

SEQ ID NO: 58558 - DNA, 19 bp, Homo sapiens
  siRNA target sequence for C21orf107 (NM_018963.3,6963-6981).
cggctaagaaaaaattact

SEQ ID NO: 58559 - DNA, 19 bp, Homo sapiens
  siRNA target sequence for C21orf107 (NM_033656.2,6741-6759).
ctgtgagacgtcaaagaca

SEQ ID NO: 58560 - DNA, 19 bp, Homo sapiens
  siRNA target sequence for C21orf107 (NM_033656.2,6763-6781).
caaacgccctaggttaagt

SEQ ID NO: 58561 - DNA, 19 bp, Homo sapiens
  siRNA target sequence for C21orf107 (NM_033656.2,6800-6818).
gaggatttggactatgcaa

SEQ ID NO: 58562 - DNA, 19 bp, Homo sapiens
  siRNA target sequence for C21orf107 (NM_033656.2,6828-6846).
gagttcttcgacgttcaaa

SEQ ID NO: 58563 - DNA, 19 bp, Homo sapiens
  siRNA target sequence for C21orf107 (NM_033656.2,6833-6851).
cttcgacgttcaaaaataa

SEQ ID NO: 58564 - DNA, 19 bp, Homo sapiens
  siRNA target sequence for C21orf107 (NM_033656.2,6867-6885).
gtagaaggactgtgagata

SEQ ID NO: 58565 - DNA, 19 bp, Homo sapiens
  siRNA target sequence for CGI-18 (NM_015947.1,430-448).
ctgcgtccacagcttataa

SEQ ID NO: 58566 - DNA, 19 bp, Homo sapiens
  siRNA target sequence for CGI-18 (NM_015947.1,459-477).
ccggaattacaggaagaat

SEQ ID NO: 58567 - DNA, 19 bp, Homo sapiens
  siRNA target sequence for CGI-18 (NM_015947.1,483-501).
ccaagaacagacctatcaa

SEQ ID NO: 58568 - DNA, 19 bp, Homo sapiens
  siRNA target sequence for CGI-18 (NM_015947.1,492-510).
gacctatcaacatgaagaa

SEQ ID NO: 58569 - DNA, 19 bp, Homo sapiens
  siRNA target sequence for CGI-18 (NM_015947.1,589-607).
caaggattccggtctactt

SEQ ID NO: 58570 - DNA, 19 bp, Homo sapiens
  siRNA target sequence for CGI-18 (NM_015947.1,620-638).
gcttgctctataagcatat

SEQ ID NO: 58571 - DNA, 19 bp, Homo sapiens
  siRNA target sequence for CGI-18 (NM_015947.1,621-639).
cttgctctataagcatata

SEQ ID NO: 58572 - DNA, 19 bp, Homo sapiens
  siRNA target sequence for CGI-18 (NM_015947.1,633-651).
gcatatagttggaaagaga

SEQ ID NO: 58573 - DNA, 19 bp, Homo sapiens
  siRNA target sequence for CGI-18 (NM_015947.1,689-707).
cttctattagcattcctaa

SEQ ID NO: 58574 - DNA, 19 bp, Homo sapiens
  siRNA target sequence for CGI-18 (NM_015947.1,718-736).
gacggggaaattgtaatca

SEQ ID NO: 58575 - DNA, 19 bp, Homo sapiens
  siRNA target sequence for CGI-18 (NM_015947.1,720-738).
cggggaaattgtaatcact

SEQ ID NO: 58576 - DNA, 19 bp, Homo sapiens
  siRNA target sequence for CGI-18 (NM_015947.1,735-753).
cactggccagcatcgaaat

SEQ ID NO: 58577 - DNA, 19 bp, Homo sapiens
  siRNA target sequence for CGI-18 (NM_015947.1,745-763).
catcgaaatggtgtaattt

SEQ ID NO: 58578 - DNA, 19 bp, Homo sapiens
  siRNA target sequence for CGI-18 (NM_015947.1,767-785).
cccgaacacggattgatgt

SEQ ID NO: 58579 - DNA, 19 bp, Homo sapiens
  siRNA target sequence for CGI-18 (NM_015947.1,768-786).
ccgaacacggattgatgtt

SEQ ID NO: 58580 - DNA, 19 bp, Homo sapiens
  siRNA target sequence for CGI-18 (NM_015947.1,770-788).
gaacacggattgatgttct

SEQ ID NO: 58581 - DNA, 19 bp, Homo sapiens
  siRNA target sequence for CGI-18 (NM_015947.1,773-791).
cacggattgatgttctttt

SEQ ID NO: 58582 - DNA, 19 bp, Homo sapiens
  siRNA target sequence for CGI-18 (NM_015947.1,1082-1100).
cagggatagaatacatgaa

SEQ ID NO: 58583 - DNA, 19 bp, Homo sapiens
  siRNA target sequence for CGI-18 (NM_015947.1,1112-1130).
gcatggtggatgttcttta

SEQ ID NO: 58584 - DNA, 19 bp, Homo sapiens
  siRNA target sequence for CGI-18 (NM_015947.1,1131-1149).
cgccaaagtccatatgaaa

SEQ ID NO: 58585 - DNA, 19 bp, Homo sapiens
  siRNA target sequence for CGI-18 (NM_015947.1,1133-1151).
ccaaagtccatatgaaaga

SEQ ID NO: 58586 - DNA, 19 bp, Homo sapiens
  siRNA target sequence for CGI-18 (NM_015947.1,1154-1172).
gctccaacaggctacaaga

SEQ ID NO: 58587 - DNA, 19 bp, Homo sapiens
  siRNA target sequence for CGI-18 (NM_015947.1,1158-1176).
caacaggctacaagaatta

SEQ ID NO: 58588 - DNA, 19 bp, Homo sapiens
  siRNA target sequence for CGI-18 (NM_015947.1,1204-1222).
gcatctggactaatagtga

SEQ ID NO: 58589 - DNA, 19 bp, Homo sapiens
  siRNA target sequence for CGI-18 (NM_015947.1,1205-1223).
catctggactaatagtgaa

SEQ ID NO: 58590 - DNA, 19 bp, Homo sapiens
  siRNA target sequence for CGI-18 (NM_015947.1,1210-1228).
ggactaatagtgaaagagt

SEQ ID NO: 58591 - DNA, 19 bp, Homo sapiens
  siRNA target sequence for CGI-18 (NM_015947.1,1239-1257).
gaaactgcatgctacagtt

SEQ ID NO: 58592 - DNA, 19 bp, Homo sapiens
  siRNA target sequence for CGI-18 (NM_015947.1,1255-1273).
gttatgaatacactattca

SEQ ID NO: 58593 - DNA, 19 bp, Homo sapiens
  siRNA target sequence for CGI-18 (NM_015947.1,1313-1331).
cagcggaaggcaaatatat

SEQ ID NO: 58594 - DNA, 19 bp, Homo sapiens
  siRNA target sequence for CGI-18 (NM_015947.1,1315-1333).
gcggaaggcaaatatatct

SEQ ID NO: 58595 - DNA, 19 bp, Homo sapiens
  siRNA target sequence for CGI-18 (NM_015947.1,1316-1334).
cggaaggcaaatatatctt

SEQ ID NO: 58596 - DNA, 19 bp, Homo sapiens
  siRNA target sequence for CGI-18 (NM_015947.1,1396-1414).
ggctccctaaagctgaatt

SEQ ID NO: 58597 - DNA, 19 bp, Homo sapiens
  siRNA target sequence for CGI-18 (NM_015947.1,1401-1419).
cctaaagctgaattcaatt

SEQ ID NO: 58598 - DNA, 19 bp, Homo sapiens
  siRNA target sequence for CGI-18 (NM_015947.1,1439-1457).
ccgtagacagctttggaaa

SEQ ID NO: 58599 - DNA, 19 bp, Homo sapiens
  siRNA target sequence for CGI-72 (NM_016018.3,382-400).
ggaggcactggactactta

SEQ ID NO: 58600 - DNA, 19 bp, Homo sapiens
  siRNA target sequence for CGI-72 (NM_016018.3,385-403).
ggcactggactacttacaa

SEQ ID NO: 58601 - DNA, 19 bp, Homo sapiens
  siRNA target sequence for CGI-72 (NM_016018.3,408-426).
ggtatccatcacgaattga

SEQ ID NO: 58602 - DNA, 19 bp, Homo sapiens
  siRNA target sequence for CGI-72 (NM_016018.3,409-427).
gtatccatcacgaattgaa

SEQ ID NO: 58603 - DNA, 19 bp, Homo sapiens
  siRNA target sequence for CGI-72 (NM_016018.3,414-432).
catcacgaattgaaaaaat

SEQ ID NO: 58604 - DNA, 19 bp, Homo sapiens
  siRNA target sequence for CGI-72 (NM_016018.3,469-487).
gcgctggagtcatcgttat

SEQ ID NO: 58605 - DNA, 19 bp, Homo sapiens
  siRNA target sequence for CGI-72 (NM_016018.3,495-513).
ggatttactgggatagcaa

SEQ ID NO: 58606 - DNA, 19 bp, Homo sapiens
  siRNA target sequence for CGI-72 (NM_016018.3,496-514).
gatttactgggatagcaat

SEQ ID NO: 58607 - DNA, 19 bp, Homo sapiens
  siRNA target sequence for CGI-72 (NM_016018.3,615-633).
ggacagactgtcgctatta

SEQ ID NO: 58608 - DNA, 19 bp, Homo sapiens
  siRNA target sequence for CGI-72 (NM_016018.3,628-646).
ctattaccctgccaagatt

SEQ ID NO: 58609 - DNA, 19 bp, Homo sapiens
  siRNA target sequence for CGI-72 (NM_016018.3,692-710).
ggagtaattcgttgtttaa

SEQ ID NO: 58610 - DNA, 19 bp, Homo sapiens
  siRNA target sequence for CGI-72 (NM_016018.3,693-711).
gagtaattcgttgtttaaa

SEQ ID NO: 58611 - DNA, 19 bp, Homo sapiens
  siRNA target sequence for CGI-72 (NM_016018.3,695-713).
gtaattcgttgtttaaaaa

SEQ ID NO: 58612 - DNA, 19 bp, Homo sapiens
  siRNA target sequence for CGI-72 (NM_016018.3,804-822).
gatcgtgtaaccagtctat

SEQ ID NO: 58613 - DNA, 19 bp, Homo sapiens
  siRNA target sequence for CGI-72 (NM_016018.3,833-851).
gattggatagctttagtca

SEQ ID NO: 58614 - DNA, 19 bp, Homo sapiens
  siRNA target sequence for CGI-72 (NM_016018.3,880-898).
caaaacagggagtaaacct

SEQ ID NO: 58615 - DNA, 19 bp, Homo sapiens
  siRNA target sequence for CGI-72 (NM_016018.3,904-922).
cagcgctaacagcaataaa

SEQ ID NO: 58616 - DNA, 19 bp, Homo sapiens
  siRNA target sequence for CGI-72 (NM_016018.3,907-925).
cgctaacagcaataaagat

SEQ ID NO: 58617 - DNA, 19 bp, Homo sapiens
  siRNA target sequence for CGI-72 (NM_016018.3,908-926).
gctaacagcaataaagata

SEQ ID NO: 58618 - DNA, 19 bp, Homo sapiens
  siRNA target sequence for CGI-72 (NM_016018.3,913-931).
cagcaataaagataaggat

SEQ ID NO: 58619 - DNA, 19 bp, Homo sapiens
  siRNA target sequence for CGI-72 (NM_016018.3,935-953).
gatgagagaaagtggttta

SEQ ID NO: 58620 - DNA, 19 bp, Homo sapiens
  siRNA target sequence for CGI-72 (NM_016018.3,948-966).
ggtttaaagtaccttcaaa

SEQ ID NO: 58621 - DNA, 19 bp, Homo sapiens
  siRNA target sequence for CGI-72 (NM_016018.3,993-1011).
ccacaccagacgtagagaa

SEQ ID NO: 58622 - DNA, 19 bp, Homo sapiens
  siRNA target sequence for CGI-72 (NM_016018.3,1016-1034).
gaagatctgcctacatcta

SEQ ID NO: 58623 - DNA, 19 bp, Homo sapiens
  siRNA target sequence for CGI-72 (NM_016018.3,1026-1044).
ctacatctagtgaaacatt

SEQ ID NO: 58624 - DNA, 19 bp, Homo sapiens
  siRNA target sequence for CGI-72 (NM_016018.3,1087-1105).
gccagagagcacattatca

SEQ ID NO: 58625 - DNA, 19 bp, Homo sapiens
  siRNA target sequence for CGI-72 (NM_016018.3,1089-1107).
cagagagcacattatcaaa

SEQ ID NO: 58626 - DNA, 19 bp, Homo sapiens
  siRNA target sequence for CGI-72 (NM_016018.3,1149-1167).
gagctcgacttaacaagat

SEQ ID NO: 58627 - DNA, 19 bp, Homo sapiens
  siRNA target sequence for CGI-72 (NM_016018.3,1151-1169).
gctcgacttaacaagatta

SEQ ID NO: 58628 - DNA, 19 bp, Homo sapiens
  siRNA target sequence for CGI-72 (NM_016018.3,1255-1273).
ggcgatttcacctaaacct

SEQ ID NO: 58629 - DNA, 19 bp, Homo sapiens
  siRNA target sequence for CGI-72 (NM_016018.3,1263-1281).
cacctaaacctcaaagtca

SEQ ID NO: 58630 - DNA, 19 bp, Homo sapiens
  siRNA target sequence for CGI-72 (NM_016018.3,1431-1449).
cactttccccagaattaat

SEQ ID NO: 58631 - DNA, 19 bp, Homo sapiens
  siRNA target sequence for CGI-72 (NM_016018.3,1437-1455).
ccccagaattaatacaagt

SEQ ID NO: 58632 - DNA, 19 bp, Homo sapiens
  siRNA target sequence for CGI-72 (NM_016018.3,1457-1475).
gaggatttgacgcttgtat

SEQ ID NO: 58633 - DNA, 19 bp, Homo sapiens
  siRNA target sequence for CGI-72 (NM_016018.3,1459-1477).
ggatttgacgcttgtatct

SEQ ID NO: 58634 - DNA, 19 bp, Homo sapiens
  siRNA target sequence for CGI-72 (NM_016018.3,1469-1487).
cttgtatctcagctttctt

SEQ ID NO: 58635 - DNA, 19 bp, Homo sapiens
  siRNA target sequence for CGI-72 (NM_016018.3,1532-1550).
cctagacctttcaagcata

SEQ ID NO: 58636 - DNA, 19 bp, Homo sapiens
  siRNA target sequence for CGI-72 (NM_016018.3,1536-1554).
gacctttcaagcatagtga

SEQ ID NO: 58637 - DNA, 19 bp, Homo sapiens
  siRNA target sequence for CGI-72 (NM_016018.3,1547-1565).
catagtgagcggagaagaa

SEQ ID NO: 58638 - DNA, 19 bp, Homo sapiens
  siRNA target sequence for CGI-72 (NM_016018.3,1656-1674).
ccatcagttctcaaaatca

SEQ ID NO: 58639 - DNA, 19 bp, Homo sapiens
  siRNA target sequence for CGI-72 (NM_016018.3,1778-1796).
gcaccggtagcctcagatt

SEQ ID NO: 58640 - DNA, 19 bp, Homo sapiens
  siRNA target sequence for CGI-72 (NM_016018.3,1898-1916).
gcagcaggaatatcgaaaa

SEQ ID NO: 58641 - DNA, 19 bp, Homo sapiens
  siRNA target sequence for CGI-72 (NM_016018.3,1902-1920).
caggaatatcgaaaacaga

SEQ ID NO: 58642 - DNA, 19 bp, Homo sapiens
  siRNA target sequence for CGI-72 (NM_016018.3,1996-2014).
gaagatcccctcttatagt

SEQ ID NO: 58643 - DNA, 19 bp, Homo sapiens
  siRNA target sequence for CGI-72 (NM_016018.3,2002-2020).
cccctcttatagtccaata

SEQ ID NO: 58644 - DNA, 19 bp, Homo sapiens
  siRNA target sequence for CGI-72 (NM_016018.3,2003-2021).
ccctcttatagtccaataa

SEQ ID NO: 58645 - DNA, 19 bp, Homo sapiens
  siRNA target sequence for CGI-72 (NM_198513.1,745-763).
gggcaggattggatagctt

SEQ ID NO: 58646 - DNA, 19 bp, Homo sapiens
  siRNA target sequence for CNOT4 (NM_013316.1,335-353).
ggagcccttggagatagat

SEQ ID NO: 58647 - DNA, 19 bp, Homo sapiens
  siRNA target sequence for CNOT4 (NM_013316.1,339-357).
cccttggagatagatgata

SEQ ID NO: 58648 - DNA, 19 bp, Homo sapiens
  siRNA target sequence for CNOT4 (NM_013316.1,498-516).
gaagagctgcaaaggataa

SEQ ID NO: 58649 - DNA, 19 bp, Homo sapiens
  siRNA target sequence for CNOT4 (NM_013316.1,501-519).
gagctgcaaaggataaaga

SEQ ID NO: 58650 - DNA, 19 bp, Homo sapiens
  siRNA target sequence for CNOT4 (NM_013316.1,586-604).
gtgtacgtgtcgtacaaaa

SEQ ID NO: 58651 - DNA, 19 bp, Homo sapiens
  siRNA target sequence for CNOT4 (NM_013316.1,588-606).
gtacgtgtcgtacaaaaaa

SEQ ID NO: 58652 - DNA, 19 bp, Homo sapiens
  siRNA target sequence for CNOT4 (NM_013316.1,611-629).
cgtctttgttgtaggttta

SEQ ID NO: 58653 - DNA, 19 bp, Homo sapiens
  siRNA target sequence for CNOT4 (NM_013316.1,710-728).
caataatagcacatcatat

SEQ ID NO: 58654 - DNA, 19 bp, Homo sapiens
  siRNA target sequence for CNOT4 (NM_013316.1,752-770).
cagtgcttatgtaacctat

SEQ ID NO: 58655 - DNA, 19 bp, Homo sapiens
  siRNA target sequence for CNOT4 (NM_013316.1,754-772).
gtgcttatgtaacctatat

SEQ ID NO: 58656 - DNA, 19 bp, Homo sapiens
  siRNA target sequence for CNOT4 (NM_013316.1,796-814).
ccatacagtgtgtcaacaa

SEQ ID NO: 58657 - DNA, 19 bp, Homo sapiens
  siRNA target sequence for CNOT4 (NM_013316.1,797-815).
catacagtgtgtcaacaat

SEQ ID NO: 58658 - DNA, 19 bp, Homo sapiens
  siRNA target sequence for CNOT4 (NM_013316.1,822-840).
gtagatggcagaacactta

SEQ ID NO: 58659 - DNA, 19 bp, Homo sapiens
  siRNA target sequence for CNOT4 (NM_013316.1,842-860).
ggcatctctaggtacaaca

SEQ ID NO: 58660 - DNA, 19 bp, Homo sapiens
  siRNA target sequence for CNOT4 (NM_013316.1,843-861).
gcatctctaggtacaacaa

SEQ ID NO: 58661 - DNA, 19 bp, Homo sapiens
  siRNA target sequence for CNOT4 (NM_013316.1,849-867).
ctaggtacaacaaaatact

SEQ ID NO: 58662 - DNA, 19 bp, Homo sapiens
  siRNA target sequence for CNOT4 (NM_013316.1,884-902).
gaatatgcagtgtccaaaa

SEQ ID NO: 58663 - DNA, 19 bp, Homo sapiens
  siRNA target sequence for CNOT4 (NM_013316.1,969-987).
gcgggtaaacaccaagaat

SEQ ID NO: 58664 - DNA, 19 bp, Homo sapiens
  siRNA target sequence for CNOT4 (NM_013316.1,970-988).
cgggtaaacaccaagaata

SEQ ID NO: 58665 - DNA, 19 bp, Homo sapiens
  siRNA target sequence for CNOT4 (NM_013316.1,971-989).
gggtaaacaccaagaatat

SEQ ID NO: 58666 - DNA, 19 bp, Homo sapiens
  siRNA target sequence for CNOT4 (NM_013316.1,1040-1058).
gctatctacgggttcagtt

SEQ ID NO: 58667 - DNA, 19 bp, Homo sapiens
  siRNA target sequence for CNOT4 (NM_013316.1,1045-1063).
ctacgggttcagttgataa

SEQ ID NO: 58668 - DNA, 19 bp, Homo sapiens
  siRNA target sequence for CNOT4 (NM_013316.1,1048-1066).
cgggttcagttgataaaaa

SEQ ID NO: 58669 - DNA, 19 bp, Homo sapiens
  siRNA target sequence for CNOT4 (NM_013316.1,1132-1150).
gtatagggaacggtgataa

SEQ ID NO: 58670 - DNA, 19 bp, Homo sapiens
  siRNA target sequence for CNOT4 (NM_013316.1,1186-1204).
caccacctggtttgtcaaa

SEQ ID NO: 58671 - DNA, 19 bp, Homo sapiens
  siRNA target sequence for CNOT4 (NM_013316.1,1215-1233).
gtcatccccatcagttcat

SEQ ID NO: 58672 - DNA, 19 bp, Homo sapiens
  siRNA target sequence for CNOT4 (NM_013316.1,1243-1261).
gtgcacggtccccttttga

SEQ ID NO: 58673 - DNA, 19 bp, Homo sapiens
  siRNA target sequence for CNOT4 (NM_013316.1,1273-1291).
cagagtcacagtcgttatt

SEQ ID NO: 58674 - DNA, 19 bp, Homo sapiens
  siRNA target sequence for CNOT4 (NM_013316.1,1275-1293).
gagtcacagtcgttattct

SEQ ID NO: 58675 - DNA, 19 bp, Homo sapiens
  siRNA target sequence for CNOT4 (NM_013316.1,1277-1295).
gtcacagtcgttattctca

SEQ ID NO: 58676 - DNA, 19 bp, Homo sapiens
  siRNA target sequence for CNOT4 (NM_013316.1,1283-1301).
gtcgttattctcagacaat

SEQ ID NO: 58677 - DNA, 19 bp, Homo sapiens
  siRNA target sequence for CNOT4 (NM_013316.1,1456-1474).
ctttggttcttctaaacaa

SEQ ID NO: 58678 - DNA, 19 bp, Homo sapiens
  siRNA target sequence for CNOT4 (NM_013316.1,1502-1520).
cttcgatgtcactcgaaaa

SEQ ID NO: 58679 - DNA, 19 bp, Homo sapiens
  siRNA target sequence for CNOT4 (NM_013316.1,1699-1717).
cccagaggttccctcaatt

SEQ ID NO: 58680 - DNA, 19 bp, Homo sapiens
  siRNA target sequence for CNOT4 (NM_013316.1,1700-1718).
ccagaggttccctcaattt

SEQ ID NO: 58681 - DNA, 19 bp, Homo sapiens
  siRNA target sequence for CNOT4 (NM_013316.1,1721-1739).
gcagcaccgagcggtttat

SEQ ID NO: 58682 - DNA, 19 bp, Homo sapiens
  siRNA target sequence for CNOT4 (NM_013316.1,1722-1740).
cagcaccgagcggtttata

SEQ ID NO: 58683 - DNA, 19 bp, Homo sapiens
  siRNA target sequence for CNOT4 (NM_013316.1,1724-1742).
gcaccgagcggtttataat

SEQ ID NO: 58684 - DNA, 19 bp, Homo sapiens
  siRNA target sequence for CNOT4 (NM_013316.1,1725-1743).
caccgagcggtttataatt

SEQ ID NO: 58685 - DNA, 19 bp, Homo sapiens
  siRNA target sequence for CNOT4 (NM_013316.1,1727-1745).
ccgagcggtttataattca

SEQ ID NO: 58686 - DNA, 19 bp, Homo sapiens
  siRNA target sequence for CNOT4 (NM_013316.1,1728-1746).
cgagcggtttataattcat

SEQ ID NO: 58687 - DNA, 19 bp, Homo sapiens
  siRNA target sequence for CNOT4 (NM_013316.1,1729-1747).
gagcggtttataattcatt

SEQ ID NO: 58688 - DNA, 19 bp, Homo sapiens
  siRNA target sequence for CNOT4 (NM_013316.1,1761-1779).
caggcagcccgctatcctt

SEQ ID NO: 58689 - DNA, 19 bp, Homo sapiens
  siRNA target sequence for CNOT4 (NM_013316.1,1785-1803).
gcctttccacgcaatagca

SEQ ID NO: 58690 - DNA, 19 bp, Homo sapiens
  siRNA target sequence for CNOT4 (NM_013316.1,1895-1913).
gatccctgtagcaggtatt

SEQ ID NO: 58691 - DNA, 19 bp, Homo sapiens
  siRNA target sequence for CNOT4 (NM_013316.1,1931-1949).
cagtttagactctcttcaa

SEQ ID NO: 58692 - DNA, 19 bp, Homo sapiens
  siRNA target sequence for CNOT4 (NM_013316.1,1933-1951).
gtttagactctcttcaaga

SEQ ID NO: 58693 - DNA, 19 bp, Homo sapiens
  siRNA target sequence for CNOT4 (NM_013316.1,1940-1958).
ctctcttcaagatgacaat

SEQ ID NO: 58694 - DNA, 19 bp, Homo sapiens
  siRNA target sequence for CNOT4 (NM_013316.1,1959-1977).
cctccacactggctaaaat

SEQ ID NO: 58695 - DNA, 19 bp, Homo sapiens
  siRNA target sequence for CNOT4 (NM_013316.1,2066-2084).
gcacagagccagttggaat

SEQ ID NO: 58696 - DNA, 19 bp, Homo sapiens
  siRNA target sequence for CNOT4 (NM_013316.1,2167-2185).
cccccacagatttactaca

SEQ ID NO: 58697 - DNA, 19 bp, Homo sapiens
  siRNA target sequence for CNOT4 (NM_013316.1,2175-2193).
gatttactacagagttcaa

SEQ ID NO: 58698 - DNA, 19 bp, Homo sapiens
  siRNA target sequence for COL4A3 (NM_000091.2,529-547).
caggatgcagtggttctaa

SEQ ID NO: 58699 - DNA, 19 bp, Homo sapiens
  siRNA target sequence for COL4A3 (NM_000091.2,751-769).
ctggtcctccgggattctt

SEQ ID NO: 58700 - DNA, 19 bp, Homo sapiens
  siRNA target sequence for COL4A3 (NM_000091.2,806-824).
gggtcacatgggtgaaaga

SEQ ID NO: 58701 - DNA, 19 bp, Homo sapiens
  siRNA target sequence for COL4A3 (NM_000091.2,901-919).
ccctaactggcccagataa

SEQ ID NO: 58702 - DNA, 19 bp, Homo sapiens
  siRNA target sequence for COL4A3 (NM_000091.2,903-921).
ctaactggcccagataaca

SEQ ID NO: 58703 - DNA, 19 bp, Homo sapiens
  siRNA target sequence for COL4A3 (NM_000091.2,1186-1204).
gtccaacagaatattatga

SEQ ID NO: 58704 - DNA, 19 bp, Homo sapiens
  siRNA target sequence for COL4A3 (NM_000091.2,1472-1490).
gccaggtgacatcgttttt

SEQ ID NO: 58705 - DNA, 19 bp, Homo sapiens
  siRNA target sequence for COL4A3 (NM_000091.2,1640-1658).
gttacatggtgtaaaagga

SEQ ID NO: 58706 - DNA, 19 bp, Homo sapiens
  siRNA target sequence for COL4A3 (NM_000091.2,1852-1870).
gaaagggcttggatggaat

SEQ ID NO: 58707 - DNA, 19 bp, Homo sapiens
  siRNA target sequence for COL4A3 (NM_000091.2,1856-1874).
gggcttggatggaattcct

SEQ ID NO: 58708 - DNA, 19 bp, Homo sapiens
  siRNA target sequence for COL4A3 (NM_000091.2,1883-1901).
gggagtgaaaggattacca

SEQ ID NO: 58709 - DNA, 19 bp, Homo sapiens
  siRNA target sequence for COL4A3 (NM_000091.2,1919-1937).
ggctctgagtggtgagaaa

SEQ ID NO: 58710 - DNA, 19 bp, Homo sapiens
  siRNA target sequence for COL4A3 (NM_000091.2,2616-2634).
cttccaggcttaaatggat

SEQ ID NO: 58711 - DNA, 19 bp, Homo sapiens
  siRNA target sequence for COL4A3 (NM_000091.2,2620-2638).
caggcttaaatggattgaa

SEQ ID NO: 58712 - DNA, 19 bp, Homo sapiens
  siRNA target sequence for COL4A3 (NM_000091.2,2696-2714).
cttggatagatcaggattt

SEQ ID NO: 58713 - DNA, 19 bp, Homo sapiens
  siRNA target sequence for COL4A3 (NM_000091.2,2787-2805).
ccaggaaatccgggaattt

SEQ ID NO: 58714 - DNA, 19 bp, Homo sapiens
  siRNA target sequence for COL4A3 (NM_000091.2,2995-3013).
cagagatatcccacgtaat

SEQ ID NO: 58715 - DNA, 19 bp, Homo sapiens
  siRNA target sequence for COL4A3 (NM_000091.2,3027-3045).
gaaccaggtctcaaaggat

SEQ ID NO: 58716 - DNA, 19 bp, Homo sapiens
  siRNA target sequence for COL4A3 (NM_000091.2,3038-3056).
caaaggattcgcaggaaat

SEQ ID NO: 58717 - DNA, 19 bp, Homo sapiens
  siRNA target sequence for COL4A3 (NM_000091.2,3224-3242).
catgccaggttctaaagga

SEQ ID NO: 58718 - DNA, 19 bp, Homo sapiens
  siRNA target sequence for COL4A3 (NM_000091.2,3379-3397).
caggactgccgggtgatat

SEQ ID NO: 58719 - DNA, 19 bp, Homo sapiens
  siRNA target sequence for COL4A3 (NM_000091.2,3388-3406).
cgggtgatatgggaaagaa

SEQ ID NO: 58720 - DNA, 19 bp, Homo sapiens
  siRNA target sequence for COL4A3 (NM_000091.2,3524-3542).
gggttttaaaggaatcaaa

SEQ ID NO: 58721 - DNA, 19 bp, Homo sapiens
  siRNA target sequence for COL4A3 (NM_000091.2,3669-3687).
ggagaaacgggtttattga

SEQ ID NO: 58722 - DNA, 19 bp, Homo sapiens
  siRNA target sequence for COL4A3 (NM_000091.2,3843-3861).
ggtctgcccggtgcaatta

SEQ ID NO: 58723 - DNA, 19 bp, Homo sapiens
  siRNA target sequence for COL4A3 (NM_000091.2,3844-3862).
gtctgcccggtgcaattat

SEQ ID NO: 58724 - DNA, 19 bp, Homo sapiens
  siRNA target sequence for COL4A3 (NM_000091.2,3933-3951).
cctccagggagtcatgtaa

SEQ ID NO: 58725 - DNA, 19 bp, Homo sapiens
  siRNA target sequence for COL4A3 (NM_000091.2,3934-3952).
ctccagggagtcatgtaat

SEQ ID NO: 58726 - DNA, 19 bp, Homo sapiens
  siRNA target sequence for COL4A3 (NM_000091.2,4202-4220).
ccctggcacacttaagatt

SEQ ID NO: 58727 - DNA, 19 bp, Homo sapiens
  siRNA target sequence for COL4A3 (NM_000091.2,4417-4435).
cagctggatcagatggatt

SEQ ID NO: 58728 - DNA, 19 bp, Homo sapiens
  siRNA target sequence for COL4A3 (NM_000091.2,4486-4504).
caacgagaggctttgtctt

SEQ ID NO: 58729 - DNA, 19 bp, Homo sapiens
  siRNA target sequence for COL4A3 (NM_000091.2,4518-4536).
caaaccacagcaattcctt

SEQ ID NO: 58730 - DNA, 19 bp, Homo sapiens
  siRNA target sequence for COL4A3 (NM_000091.2,4560-4578).
ctctacagtgggttttctt

SEQ ID NO: 58731 - DNA, 19 bp, Homo sapiens
  siRNA target sequence for COL4A3 (NM_000091.2,4701-4719).
gcatctcgaaatgattatt

SEQ ID NO: 58732 - DNA, 19 bp, Homo sapiens
  siRNA target sequence for COL4A3 (NM_000091.2,4707-4725).
cgaaatgattattcatact

SEQ ID NO: 58733 - DNA, 19 bp, Homo sapiens
  siRNA target sequence for COL4A3 (NM_000091.2,4754-4772).
gaacatggctcccattact

SEQ ID NO: 58734 - DNA, 19 bp, Homo sapiens
  siRNA target sequence for COL4A3 (NM_000091.2,4777-4795).
gagcccttgagccttatat

SEQ ID NO: 58735 - DNA, 19 bp, Homo sapiens
  siRNA target sequence for COL4A3 (NM_000091.2,4873-4891).
ctcacggctggatttctct

SEQ ID NO: 58736 - DNA, 19 bp, Homo sapiens
  siRNA target sequence for COL4A3 (NM_000091.2,4985-5003).
ccgagccagcccatttcta

SEQ ID NO: 58737 - DNA, 19 bp, Homo sapiens
  siRNA target sequence for COL4A3 (NM_000091.2,4987-5005).
gagccagcccatttctaga

SEQ ID NO: 58738 - DNA, 19 bp, Homo sapiens
  siRNA target sequence for COL4A3 (NM_000091.2,4989-5007).
gccagcccatttctagaat

SEQ ID NO: 58739 - DNA, 19 bp, Homo sapiens
  siRNA target sequence for COL4A3 (NM_000091.2,5017-5035).
gaggaacgtgcaactacta

SEQ ID NO: 58740 - DNA, 19 bp, Homo sapiens
  siRNA target sequence for COL4A3 (NM_000091.2,5019-5037).
ggaacgtgcaactactatt

SEQ ID NO: 58741 - DNA, 19 bp, Homo sapiens
  siRNA target sequence for COL4A3 (NM_000091.2,5023-5041).
cgtgcaactactattcaaa

SEQ ID NO: 58742 - DNA, 19 bp, Homo sapiens
  siRNA target sequence for COL4A3 (NM_000091.2,5024-5042).
gtgcaactactattcaaat

SEQ ID NO: 58743 - DNA, 19 bp, Homo sapiens
  siRNA target sequence for COL4A3 (NM_031362.1,5046-5064).
caaagtaatgacagaacat

SEQ ID NO: 58744 - DNA, 19 bp, Homo sapiens
  siRNA target sequence for COL4A3 (NM_031362.1,5065-5083).
gctgttatttaggtatttt

SEQ ID NO: 58745 - DNA, 19 bp, Homo sapiens
  siRNA target sequence for COL4A3 (NM_031363.1,4620-4638).
cttgatgcactgtttgtga

SEQ ID NO: 58746 - DNA, 19 bp, Homo sapiens
  siRNA target sequence for COVA1 (NM_006375.2,487-505).
gaattgccggacaaccaat

SEQ ID NO: 58747 - DNA, 19 bp, Homo sapiens
  siRNA target sequence for COVA1 (NM_006375.2,550-568).
caccaataactccaatgat

SEQ ID NO: 58748 - DNA, 19 bp, Homo sapiens
  siRNA target sequence for COVA1 (NM_006375.2,647-665).
cacgctcttccctccaaat

SEQ ID NO: 58749 - DNA, 19 bp, Homo sapiens
  siRNA target sequence for COVA1 (NM_006375.2,703-721).
caggatgcaaaacagtatt

SEQ ID NO: 58750 - DNA, 19 bp, Homo sapiens
  siRNA target sequence for COVA1 (NM_006375.2,725-743).
gggtggtctgcctgaaaat

SEQ ID NO: 58751 - DNA, 19 bp, Homo sapiens
  siRNA target sequence for COVA1 (NM_006375.2,949-967).
ctcgagatgacctgtatga

SEQ ID NO: 58752 - DNA, 19 bp, Homo sapiens
  siRNA target sequence for COVA1 (NM_006375.2,951-969).
cgagatgacctgtatgagt

SEQ ID NO: 58753 - DNA, 19 bp, Homo sapiens
  siRNA target sequence for COVA1 (NM_006375.2,974-992).
gtgtaaacagcgtatgcta

SEQ ID NO: 58754 - DNA, 19 bp, Homo sapiens
  siRNA target sequence for COVA1 (NM_006375.2,1001-1019).
ggagcgccatcgtagaaga

SEQ ID NO: 58755 - DNA, 19 bp, Homo sapiens
  siRNA target sequence for COVA1 (NM_006375.2,1002-1020).
gagcgccatcgtagaagaa

SEQ ID NO: 58756 - DNA, 19 bp, Homo sapiens
  siRNA target sequence for COVA1 (NM_006375.2,1053-1071).
cccccagtggtccactatt

SEQ ID NO: 58757 - DNA, 19 bp, Homo sapiens
  siRNA target sequence for COVA1 (NM_006375.2,1061-1079).
ggtccactattcagatcat

SEQ ID NO: 58758 - DNA, 19 bp, Homo sapiens
  siRNA target sequence for COVA1 (NM_006375.2,1176-1194).
cgtcgtagcgccaataact

SEQ ID NO: 58759 - DNA, 19 bp, Homo sapiens
  siRNA target sequence for COVA1 (NM_006375.2,1177-1195).
gtcgtagcgccaataactt

SEQ ID NO: 58760 - DNA, 19 bp, Homo sapiens
  siRNA target sequence for COVA1 (NM_006375.2,1179-1197).
cgtagcgccaataacttct

SEQ ID NO: 58761 - DNA, 19 bp, Homo sapiens
  siRNA target sequence for COVA1 (NM_006375.2,1180-1198).
gtagcgccaataacttcta

SEQ ID NO: 58762 - DNA, 19 bp, Homo sapiens
  siRNA target sequence for COVA1 (NM_006375.2,1295-1313).
gcaggccctttctggaatt

SEQ ID NO: 58763 - DNA, 19 bp, Homo sapiens
  siRNA target sequence for COVA1 (NM_006375.2,1368-1386).
gcatgggaccacttcacaa

SEQ ID NO: 58764 - DNA, 19 bp, Homo sapiens
  siRNA target sequence for COVA1 (NM_006375.2,1369-1387).
catgggaccacttcacaaa

SEQ ID NO: 58765 - DNA, 19 bp, Homo sapiens
  siRNA target sequence for COVA1 (NM_006375.2,1417-1435).
gcaaacaagctgaggaaat

SEQ ID NO: 58766 - DNA, 19 bp, Homo sapiens
  siRNA target sequence for COVA1 (NM_006375.2,1430-1448).
ggaaattcgcaacattcat

SEQ ID NO: 58767 - DNA, 19 bp, Homo sapiens
  siRNA target sequence for COVA1 (NM_006375.2,1431-1449).
gaaattcgcaacattcata

SEQ ID NO: 58768 - DNA, 19 bp, Homo sapiens
  siRNA target sequence for COVA1 (NM_006375.2,1536-1554).
gaggaatcagccttagtat

SEQ ID NO: 58769 - DNA, 19 bp, Homo sapiens
  siRNA target sequence for COVA1 (NM_006375.2,1604-1622).
cgatgcctaccggaatgaa

SEQ ID NO: 58770 - DNA, 19 bp, Homo sapiens
  siRNA target sequence for COVA1 (NM_006375.2,1609-1627).
cctaccggaatgaagtaga

SEQ ID NO: 58771 - DNA, 19 bp, Homo sapiens
  siRNA target sequence for COVA1 (NM_006375.2,1610-1628).
ctaccggaatgaagtagaa

SEQ ID NO: 58772 - DNA, 19 bp, Homo sapiens
  siRNA target sequence for COVA1 (NM_006375.2,1876-1894).
gcgaataccctcttgagaa

SEQ ID NO: 58773 - DNA, 19 bp, Homo sapiens
  siRNA target sequence for COVA1 (NM_006375.2,1901-1919).
gaacagcagtcctatcaaa

SEQ ID NO: 58774 - DNA, 19 bp, Homo sapiens
  siRNA target sequence for COVA1 (NM_006375.2,1904-1922).
cagcagtcctatcaaatct

SEQ ID NO: 58775 - DNA, 19 bp, Homo sapiens
  siRNA target sequence for COVA1 (NM_006375.2,1906-1924).
gcagtcctatcaaatctga

SEQ ID NO: 58776 - DNA, 19 bp, Homo sapiens
  siRNA target sequence for COVA1 (NM_006375.2,1935-1953).
ctgctagtggggattatct

SEQ ID NO: 58777 - DNA, 19 bp, Homo sapiens
  siRNA target sequence for COVA1 (NM_006375.2,1981-1999).
gagcaagcattgaatacat

SEQ ID NO: 58778 - DNA, 19 bp, Homo sapiens
  siRNA target sequence for COVA1 (NM_006375.2,1983-2001).
gcaagcattgaatacatct

SEQ ID NO: 58779 - DNA, 19 bp, Homo sapiens
  siRNA target sequence for COVA1 (NM_006375.2,2006-2024).
ctacttgcaccgtcttgat

SEQ ID NO: 58780 - DNA, 19 bp, Homo sapiens
  siRNA target sequence for COVA1 (NM_006375.2,2009-2027).
cttgcaccgtcttgataat

SEQ ID NO: 58781 - DNA, 19 bp, Homo sapiens
  siRNA target sequence for COVA1 (NM_006375.2,2013-2031).
caccgtcttgataataaga

SEQ ID NO: 58782 - DNA, 19 bp, Homo sapiens
  siRNA target sequence for COVA1 (NM_182314.1,458-476).
ggctatgcagccgataaca

SEQ ID NO: 58783 - DNA, 19 bp, Homo sapiens
  siRNA target sequence for COVA1 (NM_182314.1,501-519).
ctgcaatgacactacctat

SEQ ID NO: 58784 - DNA, 19 bp, Homo sapiens
  siRNA target sequence for CPEB1 (NM_030594.2,384-402).
gctctctccacgtgtagta

SEQ ID NO: 58785 - DNA, 19 bp, Homo sapiens
  siRNA target sequence for CPEB1 (NM_030594.2,394-412).
cgtgtagtaatgccaatat

SEQ ID NO: 58786 - DNA, 19 bp, Homo sapiens
  siRNA target sequence for CPEB1 (NM_030594.2,422-440).
gataaatgccatattggat

SEQ ID NO: 58787 - DNA, 19 bp, Homo sapiens
  siRNA target sequence for CPEB1 (NM_030594.2,430-448).
ccatattggataattctct

SEQ ID NO: 58788 - DNA, 19 bp, Homo sapiens
  siRNA target sequence for CPEB1 (NM_030594.2,475-493).
ctataaaccgaggaattca

SEQ ID NO: 58789 - DNA, 19 bp, Homo sapiens
  siRNA target sequence for CPEB1 (NM_030594.2,483-501).
cgaggaattcatgatcatt

SEQ ID NO: 58790 - DNA, 19 bp, Homo sapiens
  siRNA target sequence for CPEB1 (NM_030594.2,531-549).
gttacaagcaggatgcttt

SEQ ID NO: 58791 - DNA, 19 bp, Homo sapiens
  siRNA target sequence for CPEB1 (NM_030594.2,552-570).
ccaacctctgcgcaagaat

SEQ ID NO: 58792 - DNA, 19 bp, Homo sapiens
  siRNA target sequence for CPEB1 (NM_030594.2,890-908).
cagctctggatcagatcat

SEQ ID NO: 58793 - DNA, 19 bp, Homo sapiens
  siRNA target sequence for CPEB1 (NM_030594.2,906-924).
catctctcagatttgattt

SEQ ID NO: 58794 - DNA, 19 bp, Homo sapiens
  siRNA target sequence for CPEB1 (NM_030594.2,975-993).
ggtcccagagaccctttaa

SEQ ID NO: 58795 - DNA, 19 bp, Homo sapiens
  siRNA target sequence for CPEB1 (NM_030594.2,976-994).
gtcccagagaccctttaaa

SEQ ID NO: 58796 - DNA, 19 bp, Homo sapiens
  siRNA target sequence for CPEB1 (NM_030594.2,979-997).
ccagagaccctttaaagat

SEQ ID NO: 58797 - DNA, 19 bp, Homo sapiens
  siRNA target sequence for CPEB1 (NM_030594.2,1056-1074).
ccaaccagtgcttcaaaga

SEQ ID NO: 58798 - DNA, 19 bp, Homo sapiens
  siRNA target sequence for CPEB1 (NM_030594.2,1128-1146).
gaccccttcagcatagaga

SEQ ID NO: 58799 - DNA, 19 bp, Homo sapiens
  siRNA target sequence for CPEB1 (NM_030594.2,1215-1233).
cctccccggaactataaga

SEQ ID NO: 58800 - DNA, 19 bp, Homo sapiens
  siRNA target sequence for CPEB1 (NM_030594.2,1216-1234).
ctccccggaactataagaa

SEQ ID NO: 58801 - DNA, 19 bp, Homo sapiens
  siRNA target sequence for CPEB1 (NM_030594.2,1244-1262).
ctcttgcaaggtgtttcta

SEQ ID NO: 58802 - DNA, 19 bp, Homo sapiens
  siRNA target sequence for CPEB1 (NM_030594.2,1266-1284).
ggtgttccttgggatatta

SEQ ID NO: 58803 - DNA, 19 bp, Homo sapiens
  siRNA target sequence for CPEB1 (NM_030594.2,1365-1383).
cggtgtcctcccaaaggta

SEQ ID NO: 58804 - DNA, 19 bp, Homo sapiens
  siRNA target sequence for CPEB1 (NM_030594.2,1388-1406).
gcctaaagggtatgtgtat

SEQ ID NO: 58805 - DNA, 19 bp, Homo sapiens
  siRNA target sequence for CPEB1 (NM_030594.2,1390-1408).
ctaaagggtatgtgtatct

SEQ ID NO: 58806 - DNA, 19 bp, Homo sapiens
  siRNA target sequence for CPEB1 (NM_030594.2,1476-1494).
gatggcctgagtgaatatt

SEQ ID NO: 58807 - DNA, 19 bp, Homo sapiens
  siRNA target sequence for CPEB1 (NM_030594.2,1538-1556).
ggtgatcccctgggtatta

SEQ ID NO: 58808 - DNA, 19 bp, Homo sapiens
  siRNA target sequence for CPEB1 (NM_030594.2,1549-1567).
gggtattagccgacagtaa

SEQ ID NO: 58809 - DNA, 19 bp, Homo sapiens
  siRNA target sequence for CPEB1 (NM_030594.2,1551-1569).
gtattagccgacagtaact

SEQ ID NO: 58810 - DNA, 19 bp, Homo sapiens
  siRNA target sequence for CPEB1 (NM_030594.2,1664-1682).
cttgaacgacctatttggt

SEQ ID NO: 58811 - DNA, 19 bp, Homo sapiens
  siRNA target sequence for CPEB1 (NM_030594.2,1689-1707).
gtgtatgccgggattgaca

SEQ ID NO: 58812 - DNA, 19 bp, Homo sapiens
  siRNA target sequence for CPEB1 (NM_030594.2,1695-1713).
gccgggattgacacagata

SEQ ID NO: 58813 - DNA, 19 bp, Homo sapiens
  siRNA target sequence for CPEB1 (NM_030594.2,1696-1714).
ccgggattgacacagataa

SEQ ID NO: 58814 - DNA, 19 bp, Homo sapiens
  siRNA target sequence for CPEB1 (NM_030594.2,1737-1755).
ggtcgtgtgactttcaata

SEQ ID NO: 58815 - DNA, 19 bp, Homo sapiens
  siRNA target sequence for CPEB1 (NM_030594.2,1738-1756).
gtcgtgtgactttcaataa

SEQ ID NO: 58816 - DNA, 19 bp, Homo sapiens
  siRNA target sequence for CPEB1 (NM_030594.2,1777-1795).
cagtcagcgctgcttttgt

SEQ ID NO: 58817 - DNA, 19 bp, Homo sapiens
  siRNA target sequence for CPEB1 (NM_030594.2,1819-1837).
caaagaaggttcagattga

SEQ ID NO: 58818 - DNA, 19 bp, Homo sapiens
  siRNA target sequence for CPEB1 (NM_030594.2,1836-1854).
gacccctacctagaagatt

SEQ ID NO: 58819 - DNA, 19 bp, Homo sapiens
  siRNA target sequence for CPEB1 (NM_030594.2,1851-1869).
gattctctgtgtcatatct

SEQ ID NO: 58820 - DNA, 19 bp, Homo sapiens
  siRNA target sequence for CPEB1 (NM_030594.2,1902-1920).
gatcaggtctgcttcaaat

SEQ ID NO: 58821 - DNA, 19 bp, Homo sapiens
  siRNA target sequence for CPEB3 (NM_014912.1,525-543).
gtcttcggaggcactttct

SEQ ID NO: 58822 - DNA, 19 bp, Homo sapiens
  siRNA target sequence for CPEB3 (NM_014912.1,951-969).
cccatctcgccgctcaaaa

SEQ ID NO: 58823 - DNA, 19 bp, Homo sapiens
  siRNA target sequence for CPEB3 (NM_014912.1,952-970).
ccatctcgccgctcaaaaa

SEQ ID NO: 58824 - DNA, 19 bp, Homo sapiens
  siRNA target sequence for CPEB3 (NM_014912.1,1052-1070).
cgctttccggaccgataat

SEQ ID NO: 58825 - DNA, 19 bp, Homo sapiens
  siRNA target sequence for CPEB3 (NM_014912.1,1060-1078).
ggaccgataatggtaacaa

SEQ ID NO: 58826 - DNA, 19 bp, Homo sapiens
  siRNA target sequence for CPEB3 (NM_014912.1,1063-1081).
ccgataatggtaacaatct

SEQ ID NO: 58827 - DNA, 19 bp, Homo sapiens
  siRNA target sequence for CPEB3 (NM_014912.1,1097-1115).
ccggagtaggccctatgat

SEQ ID NO: 58828 - DNA, 19 bp, Homo sapiens
  siRNA target sequence for CPEB3 (NM_014912.1,1098-1116).
cggagtaggccctatgata

SEQ ID NO: 58829 - DNA, 19 bp, Homo sapiens
  siRNA target sequence for CPEB3 (NM_014912.1,1100-1118).
gagtaggccctatgatact

SEQ ID NO: 58830 - DNA, 19 bp, Homo sapiens
  siRNA target sequence for CPEB3 (NM_014912.1,1102-1120).
gtaggccctatgatacttt

SEQ ID NO: 58831 - DNA, 19 bp, Homo sapiens
  siRNA target sequence for CPEB3 (NM_014912.1,1132-1150).
cgttggagaactccttaat

SEQ ID NO: 58832 - DNA, 19 bp, Homo sapiens
  siRNA target sequence for CPEB3 (NM_014912.1,1137-1155).
gagaactccttaatggata

SEQ ID NO: 58833 - DNA, 19 bp, Homo sapiens
  siRNA target sequence for CPEB3 (NM_014912.1,1142-1160).
ctccttaatggatatgata

SEQ ID NO: 58834 - DNA, 19 bp, Homo sapiens
  siRNA target sequence for CPEB3 (NM_014912.1,1157-1175).
gataaggactgatcatgaa

SEQ ID NO: 58835 - DNA, 19 bp, Homo sapiens
  siRNA target sequence for CPEB3 (NM_014912.1,1185-1203).
ggacgcatggggataaatt

SEQ ID NO: 58836 - DNA, 19 bp, Homo sapiens
  siRNA target sequence for CPEB3 (NM_014912.1,1186-1204).
gacgcatggggataaattt

SEQ ID NO: 58837 - DNA, 19 bp, Homo sapiens
  siRNA target sequence for CPEB3 (NM_014912.1,1205-1223).
ccatcatccaggaacagat

SEQ ID NO: 58838 - DNA, 19 bp, Homo sapiens
  siRNA target sequence for CPEB3 (NM_014912.1,1209-1227).
catccaggaacagataata

SEQ ID NO: 58839 - DNA, 19 bp, Homo sapiens
  siRNA target sequence for CPEB3 (NM_014912.1,1293-1311).
ggtgatcaagccttgtcat

SEQ ID NO: 58840 - DNA, 19 bp, Homo sapiens
  siRNA target sequence for CPEB3 (NM_014912.1,1304-1322).
cttgtcatctggcttaagt

SEQ ID NO: 58841 - DNA, 19 bp, Homo sapiens
  siRNA target sequence for CPEB3 (NM_014912.1,1324-1342).
ctcccactcgctgtcaaaa

SEQ ID NO: 58842 - DNA, 19 bp, Homo sapiens
  siRNA target sequence for CPEB3 (NM_014912.1,1350-1368).
cgagtagaacgctactcta

SEQ ID NO: 58843 - DNA, 19 bp, Homo sapiens
  siRNA target sequence for CPEB3 (NM_014912.1,1353-1371).
gtagaacgctactctagaa

SEQ ID NO: 58844 - DNA, 19 bp, Homo sapiens
  siRNA target sequence for CPEB3 (NM_014912.1,1531-1549).
gctcagtacaagctttgat

SEQ ID NO: 58845 - DNA, 19 bp, Homo sapiens
  siRNA target sequence for CPEB3 (NM_014912.1,1532-1550).
ctcagtacaagctttgata

SEQ ID NO: 58846 - DNA, 19 bp, Homo sapiens
  siRNA target sequence for CPEB3 (NM_014912.1,1732-1750).
ctgttgaactggcaatgat

SEQ ID NO: 58847 - DNA, 19 bp, Homo sapiens
  siRNA target sequence for CPEB3 (NM_014912.1,1795-1813).
cggacccagagctgaagta

SEQ ID NO: 58848 - DNA, 19 bp, Homo sapiens
  siRNA target sequence for CPEB3 (NM_014912.1,1867-1885).
ccatcagcgctcgttttgt

SEQ ID NO: 58849 - DNA, 19 bp, Homo sapiens
  siRNA target sequence for CPEB3 (NM_014912.1,1889-1907).
gcttcagcacaatgacatt

SEQ ID NO: 58850 - DNA, 19 bp, Homo sapiens
  siRNA target sequence for CPEB3 (NM_014912.1,1908-1926).
gacaaacgggttgaagtaa

SEQ ID NO: 58851 - DNA, 19 bp, Homo sapiens
  siRNA target sequence for CPEB4 (NM_030627.1,570-588).
gtgctagtgcaaagcaata

SEQ ID NO: 58852 - DNA, 19 bp, Homo sapiens
  siRNA target sequence for CPEB4 (NM_030627.1,572-590).
gctagtgcaaagcaatact

SEQ ID NO: 58853 - DNA, 19 bp, Homo sapiens
  siRNA target sequence for CPEB4 (NM_030627.1,601-619).
ctgcttttccagtcagatt

SEQ ID NO: 58854 - DNA, 19 bp, Homo sapiens
  siRNA target sequence for CPEB4 (NM_030627.1,738-756).
gctccagctacccataaca

SEQ ID NO: 58855 - DNA, 19 bp, Homo sapiens
  siRNA target sequence for CPEB4 (NM_030627.1,739-757).
ctccagctacccataacat

SEQ ID NO: 58856 - DNA, 19 bp, Homo sapiens
  siRNA target sequence for CPEB4 (NM_030627.1,742-760).
cagctacccataacattca

SEQ ID NO: 58857 - DNA, 19 bp, Homo sapiens
  siRNA target sequence for CPEB4 (NM_030627.1,807-825).
cagcaagaccccttagaaa

SEQ ID NO: 58858 - DNA, 19 bp, Homo sapiens
  siRNA target sequence for CPEB4 (NM_030627.1,1037-1055).
gtctcttactggtttcagt

SEQ ID NO: 58859 - DNA, 19 bp, Homo sapiens
  siRNA target sequence for CPEB4 (NM_030627.1,1078-1096).
cttcctcctctacaataat

SEQ ID NO: 58860 - DNA, 19 bp, Homo sapiens
  siRNA target sequence for CPEB4 (NM_030627.1,1081-1099).
cctcctctacaataatcaa

SEQ ID NO: 58861 - DNA, 19 bp, Homo sapiens
  siRNA target sequence for CPEB4 (NM_030627.1,1082-1100).
ctcctctacaataatcaat

SEQ ID NO: 58862 - DNA, 19 bp, Homo sapiens
  siRNA target sequence for CPEB4 (NM_030627.1,1134-1152).
cctgctgcttcggctaata

SEQ ID NO: 58863 - DNA, 19 bp, Homo sapiens
  siRNA target sequence for CPEB4 (NM_030627.1,1135-1153).
ctgctgcttcggctaataa

SEQ ID NO: 58864 - DNA, 19 bp, Homo sapiens
  siRNA target sequence for CPEB4 (NM_030627.1,1154-1172).
cggtgctctgttgtttcaa

SEQ ID NO: 58865 - DNA, 19 bp, Homo sapiens
  siRNA target sequence for CPEB4 (NM_030627.1,1324-1342).
cacccttcacacatagaaa

SEQ ID NO: 58866 - DNA, 19 bp, Homo sapiens
  siRNA target sequence for CPEB4 (NM_030627.1,1361-1379).
gcctcatttggcgaataat

SEQ ID NO: 58867 - DNA, 19 bp, Homo sapiens
  siRNA target sequence for CPEB4 (NM_030627.1,1363-1381).
ctcatttggcgaataatct

SEQ ID NO: 58868 - DNA, 19 bp, Homo sapiens
  siRNA target sequence for CPEB4 (NM_030627.1,1370-1388).
ggcgaataatcttaacaaa

SEQ ID NO: 58869 - DNA, 19 bp, Homo sapiens
  siRNA target sequence for CPEB4 (NM_030627.1,1506-1524).
gggctgaatggtggaataa

SEQ ID NO: 58870 - DNA, 19 bp, Homo sapiens
  siRNA target sequence for CPEB4 (NM_030627.1,1709-1727).
gagttcactcattgacata

SEQ ID NO: 58871 - DNA, 19 bp, Homo sapiens
  siRNA target sequence for CPEB4 (NM_030627.1,1747-1765).
ccattaaaggtcgtctaaa

SEQ ID NO: 58872 - DNA, 19 bp, Homo sapiens
  siRNA target sequence for CPEB4 (NM_030627.1,1755-1773).
ggtcgtctaaactattcat

SEQ ID NO: 58873 - DNA, 19 bp, Homo sapiens
  siRNA target sequence for CPEB4 (NM_030627.1,1756-1774).
gtcgtctaaactattcata

SEQ ID NO: 58874 - DNA, 19 bp, Homo sapiens
  siRNA target sequence for CPEB4 (NM_030627.1,1783-1801).
ccgatagctctctgcttat

SEQ ID NO: 58875 - DNA, 19 bp, Homo sapiens
  siRNA target sequence for CPEB4 (NM_030627.1,1784-1802).
cgatagctctctgcttatt

SEQ ID NO: 58876 - DNA, 19 bp, Homo sapiens
  siRNA target sequence for CPEB4 (NM_030627.1,1883-1901).
ggatcagcctcttcatagt

SEQ ID NO: 58877 - DNA, 19 bp, Homo sapiens
  siRNA target sequence for CPEB4 (NM_030627.1,1941-1959).
gaaagagtggaacgatatt

SEQ ID NO: 58878 - DNA, 19 bp, Homo sapiens
  siRNA target sequence for CPEB4 (NM_030627.1,1981-1999).
gattgcctccagacattga

SEQ ID NO: 58879 - DNA, 19 bp, Homo sapiens
  siRNA target sequence for CPEB4 (NM_030627.1,2029-2047).
gctttggccctctgattgt

SEQ ID NO: 58880 - DNA, 19 bp, Homo sapiens
  siRNA target sequence for CPEB4 (NM_030627.1,2058-2076).
cataaagctgagagcaaat

SEQ ID NO: 58881 - DNA, 19 bp, Homo sapiens
  siRNA target sequence for CPEB4 (NM_030627.1,2105-2123).
cctgctgtttcaagatgaa

SEQ ID NO: 58882 - DNA, 19 bp, Homo sapiens
  siRNA target sequence for CPEB4 (NM_030627.1,2126-2144).
ctctgtgcaggctctcatt

SEQ ID NO: 58883 - DNA, 19 bp, Homo sapiens
  siRNA target sequence for CPEB4 (NM_030627.1,2184-2202).
gtatcaagtcccactatca

SEQ ID NO: 58884 - DNA, 19 bp, Homo sapiens
  siRNA target sequence for CPEB4 (NM_030627.1,2270-2288).
gccacttgacccacgaaaa

SEQ ID NO: 58885 - DNA, 19 bp, Homo sapiens
  siRNA target sequence for CPEB4 (NM_030627.1,2271-2289).
ccacttgacccacgaaaaa

SEQ ID NO: 58886 - DNA, 19 bp, Homo sapiens
  siRNA target sequence for CPEB4 (NM_030627.1,2274-2292).
cttgacccacgaaaaacta

SEQ ID NO: 58887 - DNA, 19 bp, Homo sapiens
  siRNA target sequence for CPEB4 (NM_030627.1,2277-2295).
gacccacgaaaaactatat

SEQ ID NO: 58888 - DNA, 19 bp, Homo sapiens
  siRNA target sequence for CPEB4 (NM_030627.1,2281-2299).
cacgaaaaactatatttgt

SEQ ID NO: 58889 - DNA, 19 bp, Homo sapiens
  siRNA target sequence for CPEB4 (NM_030627.1,2328-2346).
gtggagcttgcgatgataa

SEQ ID NO: 58890 - DNA, 19 bp, Homo sapiens
  siRNA target sequence for CPEB4 (NM_030627.1,2333-2351).
gcttgcgatgataatggat

SEQ ID NO: 58891 - DNA, 19 bp, Homo sapiens
  siRNA target sequence for CPEB4 (NM_030627.1,2342-2360).
gataatggatcggctatat

SEQ ID NO: 58892 - DNA, 19 bp, Homo sapiens
  siRNA target sequence for CPEB4 (NM_030627.1,2369-2387).
gtgctacgctgggattgat

SEQ ID NO: 58893 - DNA, 19 bp, Homo sapiens
  siRNA target sequence for CPEB4 (NM_030627.1,2486-2504).
gcagcatggagagatagat

SEQ ID NO: 58894 - DNA, 19 bp, Homo sapiens
  siRNA target sequence for CPEB4 (NM_030627.1,2502-2520).
gataaacgggtggaagtta

SEQ ID NO: 58895 - DNA, 19 bp, Homo sapiens
  siRNA target sequence for CPEB4 (NM_030627.1,2576-2594).
ggggaaatttgctccattt

SEQ ID NO: 58896 - DNA, 19 bp, Homo sapiens
  siRNA target sequence for CPEB4 (NM_030627.1,2703-2721).
gaccgccctcggcatattt

SEQ ID NO: 58897 - DNA, 19 bp, Homo sapiens
  siRNA target sequence for CPEB4 (NM_030627.1,2705-2723).
ccgccctcggcatatttca

SEQ ID NO: 58898 - DNA, 19 bp, Homo sapiens
  siRNA target sequence for CPEB4 (NM_030627.1,2706-2724).
cgccctcggcatatttcat

SEQ ID NO: 58899 - DNA, 19 bp, Homo sapiens
  siRNA target sequence for CPEB4 (NM_030627.1,2707-2725).
gccctcggcatatttcatt

SEQ ID NO: 58900 - DNA, 19 bp, Homo sapiens
  siRNA target sequence for CPSF4 (NM_006693.1,248-266).
ggctgcgtggcctatgcaa

SEQ ID NO: 58901 - DNA, 19 bp, Homo sapiens
  siRNA target sequence for CPSF4 (NM_006693.1,252-270).
gcgtggcctatgcaagaaa

SEQ ID NO: 58902 - DNA, 19 bp, Homo sapiens
  siRNA target sequence for CPSF4 (NM_006693.1,399-417).
caaggactgtccttggtat

SEQ ID NO: 58903 - DNA, 19 bp, Homo sapiens
  siRNA target sequence for CPSF4 (NM_006693.1,528-546).
catgcaccctcgatttgaa

SEQ ID NO: 58904 - DNA, 19 bp, Homo sapiens
  siRNA target sequence for CPSF4 (NM_006693.1,599-617).
cagcaaagcaaagtaacaa

SEQ ID NO: 58905 - DNA, 19 bp, Homo sapiens
  siRNA target sequence for CPSF4 (NM_006693.1,611-629).
gtaacaatccgccattaca

SEQ ID NO: 58906 - DNA, 19 bp, Homo sapiens
  siRNA target sequence for CSTF2T (NM_015235.1,60-78).
gagagacccggcaatggat

SEQ ID NO: 58907 - DNA, 19 bp, Homo sapiens
  siRNA target sequence for CSTF2T (NM_015235.1,173-191).
gtttccggctggtatacga

SEQ ID NO: 58908 - DNA, 19 bp, Homo sapiens
  siRNA target sequence for CSTF2T (NM_015235.1,356-374).
ggcctgcagcgcccattat

SEQ ID NO: 58909 - DNA, 19 bp, Homo sapiens
  siRNA target sequence for CSTF2T (NM_015235.1,359-377).
ctgcagcgcccattattga

SEQ ID NO: 58910 - DNA, 19 bp, Homo sapiens
  siRNA target sequence for CSTF2T (NM_015235.1,361-379).
gcagcgcccattattgact

SEQ ID NO: 58911 - DNA, 19 bp, Homo sapiens
  siRNA target sequence for CSTF2T (NM_015235.1,702-720).
gctctgcccaggacctaat

SEQ ID NO: 58912 - DNA, 19 bp, Homo sapiens
  siRNA target sequence for CSTF2T (NM_015235.1,705-723).
ctgcccaggacctaatgtt

SEQ ID NO: 58913 - DNA, 19 bp, Homo sapiens
  siRNA target sequence for CSTF2T (NM_015235.1,865-883).
gctggtcctggttccttaa

SEQ ID NO: 58914 - DNA, 19 bp, Homo sapiens
  siRNA target sequence for CSTF2T (NM_015235.1,1014-1032).
gcctcctcgaggactgtta

SEQ ID NO: 58915 - DNA, 19 bp, Homo sapiens
  siRNA target sequence for CSTF2T (NM_015235.1,1058-1076).
gagggactttgctttcagt

SEQ ID NO: 58916 - DNA, 19 bp, Homo sapiens
  siRNA target sequence for CSTF2T (NM_015235.1,1163-1181).
gcccttcctcacatgagat

SEQ ID NO: 58917 - DNA, 19 bp, Homo sapiens
  siRNA target sequence for CSTF2T (NM_015235.1,1182-1200).
gaggggagggccattagga

SEQ ID NO: 58918 - DNA, 19 bp, Homo sapiens
  siRNA target sequence for CSTF2T (NM_015235.1,1357-1375).
gagacctgtgcgatggaaa

SEQ ID NO: 58919 - DNA, 19 bp, Homo sapiens
  siRNA target sequence for CSTF2T (NM_015235.1,1428-1446).
ccctgtccccagttcaaga

SEQ ID NO: 58920 - DNA, 19 bp, Homo sapiens
  siRNA target sequence for CSTF2T (NM_015235.1,1451-1469).
ctatgactggtggaattca

SEQ ID NO: 58921 - DNA, 19 bp, Homo sapiens
  siRNA target sequence for CSTF2T (NM_015235.1,1471-1489).
ggtcctggtcccattaata

SEQ ID NO: 58922 - DNA, 19 bp, Homo sapiens
  siRNA target sequence for CSTF2T (NM_015235.1,1472-1490).
gtcctggtcccattaatat

SEQ ID NO: 58923 - DNA, 19 bp, Homo sapiens
  siRNA target sequence for CSTF2T (NM_015235.1,1713-1731).
ccagcctagcagttttagt

SEQ ID NO: 58924 - DNA, 19 bp, Homo sapiens
  siRNA target sequence for DARS (NM_001349.1,164-182).
ctaaagagagatatggaat

SEQ ID NO: 58925 - DNA, 19 bp, Homo sapiens
  siRNA target sequence for DARS (NM_001349.1,229-247).
cgggttagagacttgacaa

SEQ ID NO: 58926 - DNA, 19 bp, Homo sapiens
  siRNA target sequence for DARS (NM_001349.1,240-258).
cttgacaatacaaaaagct

SEQ ID NO: 58927 - DNA, 19 bp, Homo sapiens
  siRNA target sequence for DARS (NM_001349.1,277-295).
cgtgcaagagttcatacaa

SEQ ID NO: 58928 - DNA, 19 bp, Homo sapiens
  siRNA target sequence for DARS (NM_001349.1,380-398).
caagcaagcagatggttaa

SEQ ID NO: 58929 - DNA, 19 bp, Homo sapiens
  siRNA target sequence for DARS (NM_001349.1,448-466).
gtgagaaaagtgaatcaga

SEQ ID NO: 58930 - DNA, 19 bp, Homo sapiens
  siRNA target sequence for DARS (NM_001349.1,482-500).
cacagcaagacgttgagtt

SEQ ID NO: 58931 - DNA, 19 bp, Homo sapiens
  siRNA target sequence for DARS (NM_001349.1,486-504).
gcaagacgttgagttacat

SEQ ID NO: 58932 - DNA, 19 bp, Homo sapiens
  siRNA target sequence for DARS (NM_001349.1,599-617).
gaagagctactgttaacca

SEQ ID NO: 58933 - DNA, 19 bp, Homo sapiens
  siRNA target sequence for DARS (NM_001349.1,633-651).
caacagagtcattgatctt

SEQ ID NO: 58934 - DNA, 19 bp, Homo sapiens
  siRNA target sequence for DARS (NM_001349.1,646-664).
gatcttaggacatcaacta

SEQ ID NO: 58935 - DNA, 19 bp, Homo sapiens
  siRNA target sequence for DARS (NM_001349.1,700-718).
catctcttccgagaaactt

SEQ ID NO: 58936 - DNA, 19 bp, Homo sapiens
  siRNA target sequence for DARS (NM_001349.1,705-723).
cttccgagaaactttaatt

SEQ ID NO: 58937 - DNA, 19 bp, Homo sapiens
  siRNA target sequence for DARS (NM_001349.1,709-727).
cgagaaactttaattaaca

SEQ ID NO: 58938 - DNA, 19 bp, Homo sapiens
  siRNA target sequence for DARS (NM_001349.1,710-728).
gagaaactttaattaacaa

SEQ ID NO: 58939 - DNA, 19 bp, Homo sapiens
  siRNA target sequence for DARS (NM_001349.1,730-748).
ggttttgtggaaatccaaa

SEQ ID NO: 58940 - DNA, 19 bp, Homo sapiens
  siRNA target sequence for DARS (NM_001349.1,744-762).
ccaaactcctaaaattatt

SEQ ID NO: 58941 - DNA, 19 bp, Homo sapiens
  siRNA target sequence for DARS (NM_001349.1,745-763).
caaactcctaaaattattt

SEQ ID NO: 58942 - DNA, 19 bp, Homo sapiens
  siRNA target sequence for DARS (NM_001349.1,918-936).
ctctaatacccatagacat

SEQ ID NO: 58943 - DNA, 19 bp, Homo sapiens
  siRNA target sequence for DARS (NM_001349.1,932-950).
gacatctaactgagtttgt

SEQ ID NO: 58944 - DNA, 19 bp, Homo sapiens
  siRNA target sequence for DARS (NM_001349.1,1009-1027).
gctgacaccatggtacaaa

SEQ ID NO: 58945 - DNA, 19 bp, Homo sapiens
  siRNA target sequence for DARS (NM_001349.1,1012-1030).
gacaccatggtacaaatat

SEQ ID NO: 58946 - DNA, 19 bp, Homo sapiens
  siRNA target sequence for DARS (NM_001349.1,1086-1104).
cccatgtgagccattcaaa

SEQ ID NO: 58947 - DNA, 19 bp, Homo sapiens
  siRNA target sequence for DARS (NM_001349.1,1087-1105).
ccatgtgagccattcaaat

SEQ ID NO: 58948 - DNA, 19 bp, Homo sapiens
  siRNA target sequence for DARS (NM_001349.1,1088-1106).
catgtgagccattcaaatt

SEQ ID NO: 58949 - DNA, 19 bp, Homo sapiens
  siRNA target sequence for DARS (NM_001349.1,1091-1109).
gtgagccattcaaattttt

SEQ ID NO: 58950 - DNA, 19 bp, Homo sapiens
  siRNA target sequence for DARS (NM_001349.1,1114-1132).
ccaactctaagactagaat

SEQ ID NO: 58951 - DNA, 19 bp, Homo sapiens
  siRNA target sequence for DARS (NM_001349.1,1115-1133).
caactctaagactagaata

SEQ ID NO: 58952 - DNA, 19 bp, Homo sapiens
  siRNA target sequence for DARS (NM_001349.1,1138-1156).
gaagcattggctatgctta

SEQ ID NO: 58953 - DNA, 19 bp, Homo sapiens
  siRNA target sequence for DARS (NM_001349.1,1157-1175).
gggaagctggagtcgaaat

SEQ ID NO: 58954 - DNA, 19 bp, Homo sapiens
  siRNA target sequence for DARS (NM_001349.1,1212-1230).
gctgttgggtcatttggta

SEQ ID NO: 58955 - DNA, 19 bp, Homo sapiens
  siRNA target sequence for DARS (NM_001349.1,1278-1296).
ggctgtaagacctttctat

SEQ ID NO: 58956 - DNA, 19 bp, Homo sapiens
  siRNA target sequence for DARS (NM_001349.1,1279-1297).
gctgtaagacctttctata

SEQ ID NO: 58957 - DNA, 19 bp, Homo sapiens
  siRNA target sequence for DARS (NM_001349.1,1282-1300).
gtaagacctttctatacca

SEQ ID NO: 58958 - DNA, 19 bp, Homo sapiens
  siRNA target sequence for DARS (NM_001349.1,1344-1362).
gttcatgagaggagaagaa

SEQ ID NO: 58959 - DNA, 19 bp, Homo sapiens
  siRNA target sequence for DARS (NM_001349.1,1505-1523).
gattggaacgagttactat

SEQ ID NO: 58960 - DNA, 19 bp, Homo sapiens
  siRNA target sequence for DARS (NM_001349.1,1514-1532).
gagttactatgctgtttct

SEQ ID NO: 58961 - DNA, 19 bp, Homo sapiens
  siRNA target sequence for DARS (NM_001349.1,1527-1545).
gtttctgggattgcataat

SEQ ID NO: 58962 - DNA, 19 bp, Homo sapiens
  siRNA target sequence for DC50 (NM_031210.3,51-69).
gcgctgcgtagaagtatca

SEQ ID NO: 58963 - DNA, 19 bp, Homo sapiens
  siRNA target sequence for DC50 (NM_031210.3,52-70).
cgctgcgtagaagtatcaa

SEQ ID NO: 58964 - DNA, 19 bp, Homo sapiens
  siRNA target sequence for DC50 (NM_031210.3,53-71).
gctgcgtagaagtatcaat

SEQ ID NO: 58965 - DNA, 19 bp, Homo sapiens
  siRNA target sequence for DDX26 (NM_012141.1,567-585).
gcggtagagaccttcatga

SEQ ID NO: 58966 - DNA, 19 bp, Homo sapiens
  siRNA target sequence for DDX26 (NM_012141.1,568-586).
cggtagagaccttcatgaa

SEQ ID NO: 58967 - DNA, 19 bp, Homo sapiens
  siRNA target sequence for DDX26 (NM_012141.1,610-628).
gcagaggagacaggtatat

SEQ ID NO: 58968 - DNA, 19 bp, Homo sapiens
  siRNA target sequence for DDX26 (NM_012141.1,622-640).
ggtatatgctggtcacttt

SEQ ID NO: 58969 - DNA, 19 bp, Homo sapiens
  siRNA target sequence for DDX26 (NM_012141.1,678-696).
gaaaaccatgcaacgttta

SEQ ID NO: 58970 - DNA, 19 bp, Homo sapiens
  siRNA target sequence for DDX26 (NM_012141.1,683-701).
ccatgcaacgtttatgaat

SEQ ID NO: 58971 - DNA, 19 bp, Homo sapiens
  siRNA target sequence for DDX26 (NM_012141.1,687-705).
gcaacgtttatgaatgaat

SEQ ID NO: 58972 - DNA, 19 bp, Homo sapiens
  siRNA target sequence for DDX26 (NM_012141.1,864-882).
gatgggagcaagttgacta

SEQ ID NO: 58973 - DNA, 19 bp, Homo sapiens
  siRNA target sequence for DDX26 (NM_012141.1,894-912).
gtccaggatgagcttcatt

SEQ ID NO: 58974 - DNA, 19 bp, Homo sapiens
  siRNA target sequence for DDX26 (NM_012141.1,896-914).
ccaggatgagcttcattta

SEQ ID NO: 58975 - DNA, 19 bp, Homo sapiens
  siRNA target sequence for DDX26 (NM_012141.1,899-917).
ggatgagcttcatttacct

SEQ ID NO: 58976 - DNA, 19 bp, Homo sapiens
  siRNA target sequence for DDX26 (NM_012141.1,976-994).
gactctttgcattagtgtt

SEQ ID NO: 58977 - DNA, 19 bp, Homo sapiens
  siRNA target sequence for DDX26 (NM_012141.1,1007-1025).
caccatgtcagtagaatca

SEQ ID NO: 58978 - DNA, 19 bp, Homo sapiens
  siRNA target sequence for DDX26 (NM_012141.1,1010-1028).
catgtcagtagaatcagaa

SEQ ID NO: 58979 - DNA, 19 bp, Homo sapiens
  siRNA target sequence for DDX26 (NM_012141.1,1034-1052).
gacaggtgtgcctttagat

SEQ ID NO: 58980 - DNA, 19 bp, Homo sapiens
  siRNA target sequence for DDX26 (NM_012141.1,1108-1126).
gttctccaagaatgcttaa

SEQ ID NO: 58981 - DNA, 19 bp, Homo sapiens
  siRNA target sequence for DDX26 (NM_012141.1,1111-1129).
ctccaagaatgcttaatca

SEQ ID NO: 58982 - DNA, 19 bp, Homo sapiens
  siRNA target sequence for DDX26 (NM_012141.1,1113-1131).
ccaagaatgcttaatcagt

SEQ ID NO: 58983 - DNA, 19 bp, Homo sapiens
  siRNA target sequence for DDX26 (NM_012141.1,1139-1157).
gtccttggtgcagaaagta

SEQ ID NO: 58984 - DNA, 19 bp, Homo sapiens
  siRNA target sequence for DDX26 (NM_012141.1,1142-1160).
cttggtgcagaaagtacaa

SEQ ID NO: 58985 - DNA, 19 bp, Homo sapiens
  siRNA target sequence for DDX26 (NM_012141.1,1324-1342).
ggcctgttccagagtcttt

SEQ ID NO: 58986 - DNA, 19 bp, Homo sapiens
  siRNA target sequence for DDX26 (NM_012141.1,1325-1343).
gcctgttccagagtctttt

SEQ ID NO: 58987 - DNA, 19 bp, Homo sapiens
  siRNA target sequence for DDX26 (NM_012141.1,1389-1407).
cctgtagtgaagttttcct

SEQ ID NO: 58988 - DNA, 19 bp, Homo sapiens
  siRNA target sequence for DDX26 (NM_012141.1,1415-1433).
ctgtgaaccaatggttatt

SEQ ID NO: 58989 - DNA, 19 bp, Homo sapiens
  siRNA target sequence for DDX26 (NM_012141.1,1474-1492).
cactgactcaatttatcct

SEQ ID NO: 58990 - DNA, 19 bp, Homo sapiens
  siRNA target sequence for DDX26 (NM_012141.1,1521-1539).
caggtgtacgtgagcaata

SEQ ID NO: 58991 - DNA, 19 bp, Homo sapiens
  siRNA target sequence for DDX26 (NM_012141.1,1523-1541).
ggtgtacgtgagcaatagt

SEQ ID NO: 58992 - DNA, 19 bp, Homo sapiens
  siRNA target sequence for DDX26 (NM_012141.1,1529-1547).
cgtgagcaatagtgcaaaa

SEQ ID NO: 58993 - DNA, 19 bp, Homo sapiens
  siRNA target sequence for DDX26 (NM_012141.1,1552-1570).
gtgaacttggtcatccttt

SEQ ID NO: 58994 - DNA, 19 bp, Homo sapiens
  siRNA target sequence for DDX26 (NM_012141.1,1596-1614).
ctgaactgtgtcaacttat

SEQ ID NO: 58995 - DNA, 19 bp, Homo sapiens
  siRNA target sequence for DDX26 (NM_012141.1,1650-1668).
ctcttagatgacttgttta

SEQ ID NO: 58996 - DNA, 19 bp, Homo sapiens
  siRNA target sequence for DDX26 (NM_012141.1,1727-1745).
gacaatgcctccctactat

SEQ ID NO: 58997 - DNA, 19 bp, Homo sapiens
  siRNA target sequence for DDX26 (NM_012141.1,1778-1796).
gggagcacctaacctaata

SEQ ID NO: 58998 - DNA, 19 bp, Homo sapiens
  siRNA target sequence for DDX26 (NM_012141.1,1857-1875).
caacaggccaaaatagaat

SEQ ID NO: 58999 - DNA, 19 bp, Homo sapiens
  siRNA target sequence for DDX26 (NM_012141.1,1936-1954).
ggagccgatcacatggttt

SEQ ID NO: 59000 - DNA, 19 bp, Homo sapiens
  siRNA target sequence for DDX26 (NM_012141.1,1937-1955).
gagccgatcacatggttta

SEQ ID NO: 59001 - DNA, 19 bp, Homo sapiens
  siRNA target sequence for DDX26 (NM_012141.1,1940-1958).
ccgatcacatggtttatca

SEQ ID NO: 59002 - DNA, 19 bp, Homo sapiens
  siRNA target sequence for DDX26 (NM_012141.1,1941-1959).
cgatcacatggtttatcaa

SEQ ID NO: 59003 - DNA, 19 bp, Homo sapiens
  siRNA target sequence for DDX26 (NM_012141.1,1950-1968).
ggtttatcaatggcatata

SEQ ID NO: 59004 - DNA, 19 bp, Homo sapiens
  siRNA target sequence for DDX26 (NM_012141.1,2018-2036).
cagactgctagaccttaat

SEQ ID NO: 59005 - DNA, 19 bp, Homo sapiens
  siRNA target sequence for DDX26 (NM_012141.1,2020-2038).
gactgctagaccttaatat

SEQ ID NO: 59006 - DNA, 19 bp, Homo sapiens
  siRNA target sequence for DDX26 (NM_012141.1,2022-2040).
ctgctagaccttaatatga

SEQ ID NO: 59007 - DNA, 19 bp, Homo sapiens
  siRNA target sequence for DDX26 (NM_012141.1,2028-2046).
gaccttaatatgaaggaat

SEQ ID NO: 59008 - DNA, 19 bp, Homo sapiens
  siRNA target sequence for DDX26 (NM_012141.1,2058-2076).
caagttgctttgctgaata

SEQ ID NO: 59009 - DNA, 19 bp, Homo sapiens
  siRNA target sequence for DDX26 (NM_012141.1,2114-2132).
cataccaagacgaaatctt

SEQ ID NO: 59010 - DNA, 19 bp, Homo sapiens
  siRNA target sequence for DDX26 (NM_012141.1,2119-2137).
caagacgaaatcttttgga

SEQ ID NO: 59011 - DNA, 19 bp, Homo sapiens
  siRNA target sequence for DDX26 (NM_012141.1,2136-2154).
gatcacttaacaagaatga

SEQ ID NO: 59012 - DNA, 19 bp, Homo sapiens
  siRNA target sequence for DDX26 (NM_012141.1,2149-2167).
gaatgagatctaatctttt

SEQ ID NO: 59013 - DNA, 19 bp, Homo sapiens
  siRNA target sequence for DDX26 (NM_012141.1,2168-2186).
gaagagcactcgcagattt

SEQ ID NO: 59014 - DNA, 19 bp, Homo sapiens
  siRNA target sequence for DDX26 (NM_012141.1,2174-2192).
cactcgcagatttctgaaa

SEQ ID NO: 59015 - DNA, 19 bp, Homo sapiens
  siRNA target sequence for DDX26 (NM_012141.1,2194-2212).
gacaggacgaagatcaagt

SEQ ID NO: 59016 - DNA, 19 bp, Homo sapiens
  siRNA target sequence for DDX26 (NM_012141.1,2213-2231).
gcacagtgttcctatagca

SEQ ID NO: 59017 - DNA, 19 bp, Homo sapiens
  siRNA target sequence for DDX26 (NM_012141.1,2239-2257).
ggaactaccaggaatacct

SEQ ID NO: 59018 - DNA, 19 bp, Homo sapiens
  siRNA target sequence for DDX26 (NM_012141.1,2298-2316).
cagccacgaaggttgcata

SEQ ID NO: 59019 - DNA, 19 bp, Homo sapiens
  siRNA target sequence for DDX26 (NM_012141.1,2301-2319).
ccacgaaggttgcatacat

SEQ ID NO: 59020 - DNA, 19 bp, Homo sapiens
  siRNA target sequence for DDX26 (NM_012141.1,2302-2320).
cacgaaggttgcatacatt

SEQ ID NO: 59021 - DNA, 19 bp, Homo sapiens
  siRNA target sequence for DDX26 (NM_012141.1,2328-2346).
ccctttaagctggataaga

SEQ ID NO: 59022 - DNA, 19 bp, Homo sapiens
  siRNA target sequence for DDX26 (NM_012141.1,2379-2397).
gtggctggacctcaaaata

SEQ ID NO: 59023 - DNA, 19 bp, Homo sapiens
  siRNA target sequence for DDX26 (NM_012141.1,2406-2424).
cgacccggagaaccaaata

SEQ ID NO: 59024 - DNA, 19 bp, Homo sapiens
  siRNA target sequence for DDX26 (NM_012141.1,2407-2425).
gacccggagaaccaaatat

SEQ ID NO: 59025 - DNA, 19 bp, Homo sapiens
  siRNA target sequence for DDX26 (NM_012141.1,2410-2428).
ccggagaaccaaatatgca

SEQ ID NO: 59026 - DNA, 19 bp, Homo sapiens
  siRNA target sequence for DDX26 (NM_012141.1,2411-2429).
cggagaaccaaatatgcaa

SEQ ID NO: 59027 - DNA, 19 bp, Homo sapiens
  siRNA target sequence for DDX26 (NM_012141.1,2426-2444).
gcaagggatccctaaaaga

SEQ ID NO: 59028 - DNA, 19 bp, Homo sapiens
  siRNA target sequence for DDX26 (NM_012141.1,2450-2468).
gtgtatgtctccactacta

SEQ ID NO: 59029 - DNA, 19 bp, Homo sapiens
  siRNA target sequence for DDX26 (NM_012141.1,2481-2499).
cagaatcctgttgtaaaca

SEQ ID NO: 59030 - DNA, 19 bp, Homo sapiens
  siRNA target sequence for DDX26 (NM_012141.1,2483-2501).
gaatcctgttgtaaacaat

SEQ ID NO: 59031 - DNA, 19 bp, Homo sapiens
  siRNA target sequence for DDX26 (NM_012141.1,2546-2564).
gccagatcttattaaacct

SEQ ID NO: 59032 - DNA, 19 bp, Homo sapiens
  siRNA target sequence for DDX26 (NM_012141.1,2590-2608).
ccactaatgattcgataat

SEQ ID NO: 59033 - DNA, 19 bp, Homo sapiens
  siRNA target sequence for DDX26 (NM_012141.1,2593-2611).
ctaatgattcgataataca

SEQ ID NO: 59034 - DNA, 19 bp, Homo sapiens
  siRNA target sequence for DDX26 (NM_012141.1,2652-2670).
gacattacaccaaatgcta

SEQ ID NO: 59035 - DNA, 19 bp, Homo sapiens
  siRNA target sequence for DDX26 (NM_012141.1,2667-2685).
gctatggatacggaatttt

SEQ ID NO: 59036 - DNA, 19 bp, Homo sapiens
  siRNA target sequence for DDX26 (NM_012141.1,2711-2729).
ggaacggccaaccaatcat

SEQ ID NO: 59037 - DNA, 19 bp, Homo sapiens
  siRNA target sequence for DDX26 (NM_012141.1,2712-2730).
gaacggccaaccaatcata

SEQ ID NO: 59038 - DNA, 19 bp, Homo sapiens
  siRNA target sequence for DDX26 (NM_012141.1,2716-2734).
ggccaaccaatcatatgga

SEQ ID NO: 59039 - DNA, 19 bp, Homo sapiens
  siRNA target sequence for DDX26 (NM_012141.1,2742-2760).
ggtcatgaccatttaggaa

SEQ ID NO: 59040 - DNA, 19 bp, Homo sapiens
  siRNA target sequence for DDX26 (NM_012141.1,2842-2860).
cagcatcttcactcaacaa

SEQ ID NO: 59041 - DNA, 19 bp, Homo sapiens
  siRNA target sequence for DDX26 (NM_012141.1,2888-2906).
ccatgaagaggtcaatact

SEQ ID NO: 59042 - DNA, 19 bp, Homo sapiens
  siRNA target sequence for DDX26 (NM_012141.1,3047-3065).
gtttaaaaaacgaatgcta

SEQ ID NO: 59043 - DNA, 19 bp, Homo sapiens
  siRNA target sequence for DDX26 (NM_012141.1,3099-3117).
catcgaagagccaatcaga

SEQ ID NO: 59044 - DNA, 19 bp, Homo sapiens
  siRNA target sequence for DDX26 (NM_012141.1,3103-3121).
gaagagccaatcagatcaa

SEQ ID NO: 59045 - DNA, 19 bp, Homo sapiens
  siRNA target sequence for DDX26 (NM_012141.1,3108-3126).
gccaatcagatcaaccata

SEQ ID NO: 59046 - DNA, 19 bp, Homo sapiens
  siRNA target sequence for DDX26 (NM_012141.1,3114-3132).
cagatcaaccatattaata

SEQ ID NO: 59047 - DNA, 19 bp, Homo sapiens
  siRNA target sequence for DDX31 (NM_022779.7,208-226).
ctcggccgaatgtaatttt

SEQ ID NO: 59048 - DNA, 19 bp, Homo sapiens
  siRNA target sequence for DDX31 (NM_022779.7,546-564).
gcaaaggctacgaaaagaa

SEQ ID NO: 59049 - DNA, 19 bp, Homo sapiens
  siRNA target sequence for DDX31 (NM_022779.7,594-612).
gcgaaacggaggaacgaaa

SEQ ID NO: 59050 - DNA, 19 bp, Homo sapiens
  siRNA target sequence for DDX31 (NM_022779.7,600-618).
cggaggaacgaaacttcat

SEQ ID NO: 59051 - DNA, 19 bp, Homo sapiens
  siRNA target sequence for DDX31 (NM_022779.7,601-619).
ggaggaacgaaacttcatt

SEQ ID NO: 59052 - DNA, 19 bp, Homo sapiens
  siRNA target sequence for DDX31 (NM_022779.7,602-620).
gaggaacgaaacttcattt

SEQ ID NO: 59053 - DNA, 19 bp, Homo sapiens
  siRNA target sequence for DDX31 (NM_022779.7,627-645).
gccaagaaaactagtgtta

SEQ ID NO: 59054 - DNA, 19 bp, Homo sapiens
  siRNA target sequence for DDX31 (NM_022779.7,628-646).
ccaagaaaactagtgttaa

SEQ ID NO: 59055 - DNA, 19 bp, Homo sapiens
  siRNA target sequence for DDX31 (NM_022779.7,629-647).
caagaaaactagtgttaaa

SEQ ID NO: 59056 - DNA, 19 bp, Homo sapiens
  siRNA target sequence for DDX31 (NM_022779.7,707-725).
ggttagcacaagtgataga

SEQ ID NO: 59057 - DNA, 19 bp, Homo sapiens
  siRNA target sequence for DDX31 (NM_022779.7,708-726).
gttagcacaagtgatagaa

SEQ ID NO: 59058 - DNA, 19 bp, Homo sapiens
  siRNA target sequence for DDX31 (NM_022779.7,743-761).
gtgcattaagacttcatca

SEQ ID NO: 59059 - DNA, 19 bp, Homo sapiens
  siRNA target sequence for DDX31 (NM_022779.7,815-833).
ggtgcaagaaaaagtgttt

SEQ ID NO: 59060 - DNA, 19 bp, Homo sapiens
  siRNA target sequence for DDX31 (NM_022779.7,816-834).
gtgcaagaaaaagtgttta

SEQ ID NO: 59061 - DNA, 19 bp, Homo sapiens
  siRNA target sequence for DDX31 (NM_022779.7,818-836).
gcaagaaaaagtgtttact

SEQ ID NO: 59062 - DNA, 19 bp, Homo sapiens
  siRNA target sequence for DDX31 (NM_022779.7,883-901).
caataaatacggtcttaaa

SEQ ID NO: 59063 - DNA, 19 bp, Homo sapiens
  siRNA target sequence for DDX31 (NM_022779.7,919-937).
gtgttcagaagcaaagtat

SEQ ID NO: 59064 - DNA, 19 bp, Homo sapiens
  siRNA target sequence for DDX31 (NM_022779.7,977-995).
ccagacgggctcaggtaaa

SEQ ID NO: 59065 - DNA, 19 bp, Homo sapiens
  siRNA target sequence for DDX31 (NM_022779.7,1094-1112).
gagagagctagctctacaa

SEQ ID NO: 59066 - DNA, 19 bp, Homo sapiens
  siRNA target sequence for DDX31 (NM_022779.7,1100-1118).
gctagctctacaaagcttt

SEQ ID NO: 59067 - DNA, 19 bp, Homo sapiens
  siRNA target sequence for DDX31 (NM_022779.7,1203-1221).
gccagactccgcaaaggaa

SEQ ID NO: 59068 - DNA, 19 bp, Homo sapiens
  siRNA target sequence for DDX31 (NM_022779.7,1204-1222).
ccagactccgcaaaggaat

SEQ ID NO: 59069 - DNA, 19 bp, Homo sapiens
  siRNA target sequence for DDX31 (NM_022779.7,1205-1223).
cagactccgcaaaggaata

SEQ ID NO: 59070 - DNA, 19 bp, Homo sapiens
  siRNA target sequence for DDX31 (NM_022779.7,1207-1225).
gactccgcaaaggaataaa

SEQ ID NO: 59071 - DNA, 19 bp, Homo sapiens
  siRNA target sequence for DDX31 (NM_022779.7,1245-1263).
ggacgcctggtggatcata

SEQ ID NO: 59072 - DNA, 19 bp, Homo sapiens
  siRNA target sequence for DDX31 (NM_022779.7,1246-1264).
gacgcctggtggatcatat

SEQ ID NO: 59073 - DNA, 19 bp, Homo sapiens
  siRNA target sequence for DDX31 (NM_022779.7,1248-1266).
cgcctggtggatcatataa

SEQ ID NO: 59074 - DNA, 19 bp, Homo sapiens
  siRNA target sequence for DDX31 (NM_022779.7,1254-1272).
gtggatcatataaaatcca

SEQ ID NO: 59075 - DNA, 19 bp, Homo sapiens
  siRNA target sequence for DDX31 (NM_022779.7,1353-1371).
gacatcacagtgatactta

SEQ ID NO: 59076 - DNA, 19 bp, Homo sapiens
  siRNA target sequence for DDX31 (NM_022779.7,1390-1408).
gccaaaaacgacagaatgt

SEQ ID NO: 59077 - DNA, 19 bp, Homo sapiens
  siRNA target sequence for DDX31 (NM_022779.7,1442-1460).
gcggctagctgatatcagt

SEQ ID NO: 59078 - DNA, 19 bp, Homo sapiens
  siRNA target sequence for DDX31 (NM_022779.7,1443-1461).
cggctagctgatatcagtt

SEQ ID NO: 59079 - DNA, 19 bp, Homo sapiens
  siRNA target sequence for DDX31 (NM_022779.7,1444-1462).
ggctagctgatatcagttt

SEQ ID NO: 59080 - DNA, 19 bp, Homo sapiens
  siRNA target sequence for DDX31 (NM_022779.7,1463-1481).
gcatgatccagtcagtatt

SEQ ID NO: 59081 - DNA, 19 bp, Homo sapiens
  siRNA target sequence for DDX31 (NM_022779.7,1688-1706).
gatggttgtctttttctca

SEQ ID NO: 59082 - DNA, 19 bp, Homo sapiens
  siRNA target sequence for DDX31 (NM_022779.7,1692-1710).
gttgtctttttctcaagtt

SEQ ID NO: 59083 - DNA, 19 bp, Homo sapiens
  siRNA target sequence for DDX31 (NM_022779.7,1797-1815).
gcctccatgcgattaaaat

SEQ ID NO: 59084 - DNA, 19 bp, Homo sapiens
  siRNA target sequence for DDX31 (NM_022779.7,1798-1816).
cctccatgcgattaaaatt

SEQ ID NO: 59085 - DNA, 19 bp, Homo sapiens
  siRNA target sequence for DDX31 (NM_022779.7,1802-1820).
catgcgattaaaattccta

SEQ ID NO: 59086 - DNA, 19 bp, Homo sapiens
  siRNA target sequence for DDX31 (NM_022779.7,1958-1976).
gtacaacgctccatcttca

SEQ ID NO: 59087 - DNA, 19 bp, Homo sapiens
  siRNA target sequence for DDX31 (NM_022779.7,2050-2068).
ctccttcggaggcagaata

SEQ ID NO: 59088 - DNA, 19 bp, Homo sapiens
  siRNA target sequence for DDX31 (NM_022779.7,2075-2093).
ctcgttggcttctcacaaa

SEQ ID NO: 59089 - DNA, 19 bp, Homo sapiens
  siRNA target sequence for DDX31 (NM_022779.7,2077-2095).
cgttggcttctcacaaaat

SEQ ID NO: 59090 - DNA, 19 bp, Homo sapiens
  siRNA target sequence for DDX31 (NM_022779.7,2133-2151).
gttctgacaagagatgatt

SEQ ID NO: 59091 - DNA, 19 bp, Homo sapiens
  siRNA target sequence for DDX31 (NM_022779.7,2228-2246).
cttgcagacggtatttgaa

SEQ ID NO: 59092 - DNA, 19 bp, Homo sapiens
  siRNA target sequence for DDX31 (NM_022779.7,2236-2254).
cggtatttgaagattacgt

SEQ ID NO: 59093 - DNA, 19 bp, Homo sapiens
  siRNA target sequence for DDX31 (NM_022779.7,2387-2405).
gagcttcggactaagagat

SEQ ID NO: 59094 - DNA, 19 bp, Homo sapiens
  siRNA target sequence for DDX31 (NM_022779.7,2495-2513).
cagcctcgctgaaatccta

SEQ ID NO: 59095 - DNA, 19 bp, Homo sapiens
  siRNA target sequence for DDX31 (NM_022779.7,2510-2528).
cctacgttcggaatactca

SEQ ID NO: 59096 - DNA, 19 bp, Homo sapiens
  siRNA target sequence for DDX31 (NM_022779.7,2511-2529).
ctacgttcggaatactcaa

SEQ ID NO: 59097 - DNA, 19 bp, Homo sapiens
  siRNA target sequence for DDX31 (NM_022779.7,2544-2562).
gacatcgccaaggtcaaaa

SEQ ID NO: 59098 - DNA, 19 bp, Homo sapiens
  siRNA target sequence for DDX31 (NM_022779.7,2549-2567).
cgccaaggtcaaaaagcaa

SEQ ID NO: 59099 - DNA, 19 bp, Homo sapiens
  siRNA target sequence for DDX31 (NM_022779.7,2631-2649).
ggccgtgggaaaacattaa

SEQ ID NO: 59100 - DNA, 19 bp, Homo sapiens
  siRNA target sequence for DDX31 (NM_022779.7,2632-2650).
gccgtgggaaaacattaaa

SEQ ID NO: 59101 - DNA, 19 bp, Homo sapiens
  siRNA target sequence for DDX31 (NM_022779.7,2633-2651).
ccgtgggaaaacattaaaa

SEQ ID NO: 59102 - DNA, 19 bp, Homo sapiens
  siRNA target sequence for DDX39 (NM_005804.2,107-125).
gatgtggaaaacgatcttt

SEQ ID NO: 59103 - DNA, 19 bp, Homo sapiens
  siRNA target sequence for DDX39 (NM_005804.2,113-131).
gaaaacgatcttttggatt

SEQ ID NO: 59104 - DNA, 19 bp, Homo sapiens
  siRNA target sequence for DDX39 (NM_005804.2,118-136).
cgatcttttggattacgat

SEQ ID NO: 59105 - DNA, 19 bp, Homo sapiens
  siRNA target sequence for DDX39 (NM_005804.2,623-641).
gcgctcgtgcggaatagga

SEQ ID NO: 59106 - DNA, 19 bp, Homo sapiens
  siRNA target sequence for DDX39 (NM_005804.2,883-901).
gtactacgtcaaactcaaa

SEQ ID NO: 59107 - DNA, 19 bp, Homo sapiens
  siRNA target sequence for DDX39 (NM_005804.2,947-965).
gagtttaaccaggtgataa

SEQ ID NO: 59108 - DNA, 19 bp, Homo sapiens
  siRNA target sequence for DDX39 (NM_005804.2,1154-1172).
cgagtcaacatcgtcttta

SEQ ID NO: 59109 - DNA, 19 bp, Homo sapiens
  siRNA target sequence for DDX39 (NM_005804.2,1155-1173).
gagtcaacatcgtctttaa

SEQ ID NO: 59110 - DNA, 19 bp, Homo sapiens
  siRNA target sequence for DDX39 (NM_005804.2,1157-1175).
gtcaacatcgtctttaact

SEQ ID NO: 59111 - DNA, 19 bp, Homo sapiens
  siRNA target sequence for DDX39 (NM_005804.2,1245-1263).
gcctagccatcacttttgt

SEQ ID NO: 59112 - DNA, 19 bp, Homo sapiens
  siRNA target sequence for DDX39 (NM_005804.2,1247-1265).
ctagccatcacttttgtgt

SEQ ID NO: 59113 - DNA, 19 bp, Homo sapiens
  siRNA target sequence for DDX39 (NM_005804.2,1297-1315).
cgtccaggaccggtttgaa

SEQ ID NO: 59114 - DNA, 19 bp, Homo sapiens
  siRNA target sequence for DDX39 (NM_005804.2,1301-1319).
caggaccggtttgaagtta

SEQ ID NO: 59115 - DNA, 19 bp, Homo sapiens
  siRNA target sequence for DDX39 (NM_005804.2,1303-1321).
ggaccggtttgaagttaat

SEQ ID NO: 59116 - DNA, 19 bp, Homo sapiens
  siRNA target sequence for DDX4 (NM_019039.1,30-48).
gattgggaagcagaaatca

SEQ ID NO: 59117 - DNA, 19 bp, Homo sapiens
  siRNA target sequence for DDX4 (NM_019039.1,72-90).
cccatatttgagaaggata

SEQ ID NO: 59118 - DNA, 19 bp, Homo sapiens
  siRNA target sequence for DDX4 (NM_019039.1,160-178).
cttctcgaagagatcattt

SEQ ID NO: 59119 - DNA, 19 bp, Homo sapiens
  siRNA target sequence for DDX4 (NM_019039.1,197-215).
ctctgggcggaattttgga

SEQ ID NO: 59120 - DNA, 19 bp, Homo sapiens
  siRNA target sequence for DDX4 (NM_019039.1,199-217).
ctgggcggaattttggaaa

SEQ ID NO: 59121 - DNA, 19 bp, Homo sapiens
  siRNA target sequence for DDX4 (NM_019039.1,203-221).
gcggaattttggaaacaga

SEQ ID NO: 59122 - DNA, 19 bp, Homo sapiens
  siRNA target sequence for DDX4 (NM_019039.1,233-251).
gtgtaataagcgagataat

SEQ ID NO: 59123 - DNA, 19 bp, Homo sapiens
  siRNA target sequence for DDX4 (NM_019039.1,291-309).
ggaaacagaggtttttcaa

SEQ ID NO: 59124 - DNA, 19 bp, Homo sapiens
  siRNA target sequence for DDX4 (NM_019039.1,344-362).
ctggagagagtctagtaat

SEQ ID NO: 59125 - DNA, 19 bp, Homo sapiens
  siRNA target sequence for DDX4 (NM_019039.1,358-376).
gtaatgactgcgaagataa

SEQ ID NO: 59126 - DNA, 19 bp, Homo sapiens
  siRNA target sequence for DDX4 (NM_019039.1,363-381).
gactgcgaagataatccaa

SEQ ID NO: 59127 - DNA, 19 bp, Homo sapiens
  siRNA target sequence for DDX4 (NM_019039.1,409-427).
gcggctatcgagatggaaa

SEQ ID NO: 59128 - DNA, 19 bp, Homo sapiens
  siRNA target sequence for DDX4 (NM_019039.1,410-428).
cggctatcgagatggaaat

SEQ ID NO: 59129 - DNA, 19 bp, Homo sapiens
  siRNA target sequence for DDX4 (NM_019039.1,411-429).
ggctatcgagatggaaata

SEQ ID NO: 59130 - DNA, 19 bp, Homo sapiens
  siRNA target sequence for DDX4 (NM_019039.1,412-430).
gctatcgagatggaaataa

SEQ ID NO: 59131 - DNA, 19 bp, Homo sapiens
  siRNA target sequence for DDX4 (NM_019039.1,413-431).
ctatcgagatggaaataat

SEQ ID NO: 59132 - DNA, 19 bp, Homo sapiens
  siRNA target sequence for DDX4 (NM_019039.1,438-456).
gcttcagggccatacagaa

SEQ ID NO: 59133 - DNA, 19 bp, Homo sapiens
  siRNA target sequence for DDX4 (NM_019039.1,498-516).
ggtctaggaagtccaaata

SEQ ID NO: 59134 - DNA, 19 bp, Homo sapiens
  siRNA target sequence for DDX4 (NM_019039.1,499-517).
gtctaggaagtccaaataa

SEQ ID NO: 59135 - DNA, 19 bp, Homo sapiens
  siRNA target sequence for DDX4 (NM_019039.1,504-522).
ggaagtccaaataatgact

SEQ ID NO: 59136 - DNA, 19 bp, Homo sapiens
  siRNA target sequence for DDX4 (NM_019039.1,505-523).
gaagtccaaataatgactt

SEQ ID NO: 59137 - DNA, 19 bp, Homo sapiens
  siRNA target sequence for DDX4 (NM_019039.1,508-526).
gtccaaataatgacttaga

SEQ ID NO: 59138 - DNA, 19 bp, Homo sapiens
  siRNA target sequence for DDX4 (NM_019039.1,545-563).
gcgcactggtggccttttt

SEQ ID NO: 59139 - DNA, 19 bp, Homo sapiens
  siRNA target sequence for DDX4 (NM_019039.1,548-566).
cactggtggcctttttggt

SEQ ID NO: 59140 - DNA, 19 bp, Homo sapiens
  siRNA target sequence for DDX4 (NM_019039.1,634-652).
gtgaacgaggtggttacaa

SEQ ID NO: 59141 - DNA, 19 bp, Homo sapiens
  siRNA target sequence for DDX4 (NM_019039.1,639-657).
cgaggtggttacaaaggtt

SEQ ID NO: 59142 - DNA, 19 bp, Homo sapiens
  siRNA target sequence for DDX4 (NM_019039.1,640-658).
gaggtggttacaaaggttt

SEQ ID NO: 59143 - DNA, 19 bp, Homo sapiens
  siRNA target sequence for DDX4 (NM_019039.1,642-660).
ggtggttacaaaggtttaa

SEQ ID NO: 59144 - DNA, 19 bp, Homo sapiens
  siRNA target sequence for DDX4 (NM_019039.1,643-661).
gtggttacaaaggtttaaa

SEQ ID NO: 59145 - DNA, 19 bp, Homo sapiens
  siRNA target sequence for DDX4 (NM_019039.1,821-839).
cgacaaatacgacactatt

SEQ ID NO: 59146 - DNA, 19 bp, Homo sapiens
  siRNA target sequence for DDX4 (NM_019039.1,824-842).
caaatacgacactattctt

SEQ ID NO: 59147 - DNA, 19 bp, Homo sapiens
  siRNA target sequence for DDX4 (NM_019039.1,845-863).
ggaagtgtctggacatgat

SEQ ID NO: 59148 - DNA, 19 bp, Homo sapiens
  siRNA target sequence for DDX4 (NM_019039.1,908-926).
gacactgaataacaacatt

SEQ ID NO: 59149 - DNA, 19 bp, Homo sapiens
  siRNA target sequence for DDX4 (NM_019039.1,927-945).
gctaaagctggttatacta

SEQ ID NO: 59150 - DNA, 19 bp, Homo sapiens
  siRNA target sequence for DDX4 (NM_019039.1,928-946).
ctaaagctggttatactaa

SEQ ID NO: 59151 - DNA, 19 bp, Homo sapiens
  siRNA target sequence for DDX4 (NM_019039.1,933-951).
gctggttatactaagctta

SEQ ID NO: 59152 - DNA, 19 bp, Homo sapiens
  siRNA target sequence for DDX4 (NM_019039.1,984-1002).
cttgcaggacgagatttga

SEQ ID NO: 59153 - DNA, 19 bp, Homo sapiens
  siRNA target sequence for DDX4 (NM_019039.1,1027-1045).
ggaagactgcggcttttct

SEQ ID NO: 59154 - DNA, 19 bp, Homo sapiens
  siRNA target sequence for DDX4 (NM_019039.1,1036-1054).
cggcttttctcctaccaat

SEQ ID NO: 59155 - DNA, 19 bp, Homo sapiens
  siRNA target sequence for DDX4 (NM_019039.1,1086-1104).
gccagtcgttttaaagagt

SEQ ID NO: 59156 - DNA, 19 bp, Homo sapiens
  siRNA target sequence for DDX4 (NM_019039.1,1087-1105).
ccagtcgttttaaagagtt

SEQ ID NO: 59157 - DNA, 19 bp, Homo sapiens
  siRNA target sequence for DDX4 (NM_019039.1,1106-1124).
gcaggaaccagagtgtatt

SEQ ID NO: 59158 - DNA, 19 bp, Homo sapiens
  siRNA target sequence for DDX4 (NM_019039.1,1143-1161).
gaattggtcaaccagattt

SEQ ID NO: 59159 - DNA, 19 bp, Homo sapiens
  siRNA target sequence for DDX4 (NM_019039.1,1240-1258).
caattcgacaaatagtaca

SEQ ID NO: 59160 - DNA, 19 bp, Homo sapiens
  siRNA target sequence for DDX4 (NM_019039.1,1298-1316).
ggatatcataggcaaagaa

SEQ ID NO: 59161 - DNA, 19 bp, Homo sapiens
  siRNA target sequence for DDX4 (NM_019039.1,1299-1317).
gatatcataggcaaagaaa

SEQ ID NO: 59162 - DNA, 19 bp, Homo sapiens
  siRNA target sequence for DDX4 (NM_019039.1,1323-1341).
ggtctcaaacagatcaaat

SEQ ID NO: 59163 - DNA, 19 bp, Homo sapiens
  siRNA target sequence for DDX4 (NM_019039.1,1324-1342).
gtctcaaacagatcaaata

SEQ ID NO: 59164 - DNA, 19 bp, Homo sapiens
  siRNA target sequence for DDX4 (NM_019039.1,1326-1344).
ctcaaacagatcaaatact

SEQ ID NO: 59165 - DNA, 19 bp, Homo sapiens
  siRNA target sequence for DDX4 (NM_019039.1,1414-1432).
gcccaggaatgccatcaaa

SEQ ID NO: 59166 - DNA, 19 bp, Homo sapiens
  siRNA target sequence for DDX4 (NM_019039.1,1437-1455).
cagcgccaaacccttatgt

SEQ ID NO: 59167 - DNA, 19 bp, Homo sapiens
  siRNA target sequence for DDX4 (NM_019039.1,1471-1489).
cagaggaaattcaaaggtt

SEQ ID NO: 59168 - DNA, 19 bp, Homo sapiens
  siRNA target sequence for DDX4 (NM_019039.1,1581-1599).
gttggccagttctcaaaaa

SEQ ID NO: 59169 - DNA, 19 bp, Homo sapiens
  siRNA target sequence for DDX4 (NM_019039.1,1623-1641).
cgaaacataggggatgaaa

SEQ ID NO: 59170 - DNA, 19 bp, Homo sapiens
  siRNA target sequence for DDX4 (NM_019039.1,1628-1646).
cataggggatgaaagaact

SEQ ID NO: 59171 - DNA, 19 bp, Homo sapiens
  siRNA target sequence for DDX4 (NM_019039.1,1675-1693).
cagattttattgcaacttt

SEQ ID NO: 59172 - DNA, 19 bp, Homo sapiens
  siRNA target sequence for DDX4 (NM_019039.1,1757-1775).
gcaagctcttggagatttt

SEQ ID NO: 59173 - DNA, 19 bp, Homo sapiens
  siRNA target sequence for DDX4 (NM_019039.1,1819-1837).
ccagagggctggatattga

SEQ ID NO: 59174 - DNA, 19 bp, Homo sapiens
  siRNA target sequence for DDX4 (NM_019039.1,1930-1948).
gcagagcaatttccttttt

SEQ ID NO: 59175 - DNA, 19 bp, Homo sapiens
  siRNA target sequence for DDX4 (NM_019039.1,1931-1949).
cagagcaatttcctttttt

SEQ ID NO: 59176 - DNA, 19 bp, Homo sapiens
  siRNA target sequence for DDX4 (NM_019039.1,1953-1971).
cttgaatcggataaccatt

SEQ ID NO: 59177 - DNA, 19 bp, Homo sapiens
  siRNA target sequence for DDX4 (NM_019039.1,1980-1998).
cctctagtaaaagtattga

SEQ ID NO: 59178 - DNA, 19 bp, Homo sapiens
  siRNA target sequence for DDX4 (NM_019039.1,2020-2038).
ctgcatggttggaagaaat

SEQ ID NO: 59179 - DNA, 19 bp, Homo sapiens
  siRNA target sequence for DDX4 (NM_019039.1,2031-2049).
gaagaaattgcctttagta

SEQ ID NO: 59180 - DNA, 19 bp, Homo sapiens
  siRNA target sequence for DDX4 (NM_019039.1,2063-2081).
cttcagtggtagtacaaga

SEQ ID NO: 59181 - DNA, 19 bp, Homo sapiens
  siRNA target sequence for DDX4 (NM_019039.1,2158-2176).
ctcccaatccagtagatga

SEQ ID NO: 59182 - DNA, 19 bp, Homo sapiens
  siRNA target sequence for DDX42 (NM_007372.1,123-141).
gatgaccaagaagcttatt

SEQ ID NO: 59183 - DNA, 19 bp, Homo sapiens
  siRNA target sequence for DDX42 (NM_007372.1,197-215).
caatctagaatatgatagt

SEQ ID NO: 59184 - DNA, 19 bp, Homo sapiens
  siRNA target sequence for DDX42 (NM_007372.1,210-228).
gatagtgacggaaatccaa

SEQ ID NO: 59185 - DNA, 19 bp, Homo sapiens
  siRNA target sequence for DDX42 (NM_007372.1,225-243).
ccaattgcacctaccaaaa

SEQ ID NO: 59186 - DNA, 19 bp, Homo sapiens
  siRNA target sequence for DDX42 (NM_007372.1,256-274).
ctcttccccccattgatca

SEQ ID NO: 59187 - DNA, 19 bp, Homo sapiens
  siRNA target sequence for DDX42 (NM_007372.1,258-276).
cttccccccattgatcatt

SEQ ID NO: 59188 - DNA, 19 bp, Homo sapiens
  siRNA target sequence for DDX42 (NM_007372.1,281-299).
gattgactatccaccattt

SEQ ID NO: 59189 - DNA, 19 bp, Homo sapiens
  siRNA target sequence for DDX42 (NM_007372.1,318-336).
gagcatgaagagataacca

SEQ ID NO: 59190 - DNA, 19 bp, Homo sapiens
  siRNA target sequence for DDX42 (NM_007372.1,339-357).
ctcactccacagcagttaa

SEQ ID NO: 59191 - DNA, 19 bp, Homo sapiens
  siRNA target sequence for DDX42 (NM_007372.1,341-359).
cactccacagcagttaata

SEQ ID NO: 59192 - DNA, 19 bp, Homo sapiens
  siRNA target sequence for DDX42 (NM_007372.1,346-364).
cacagcagttaatagatct

SEQ ID NO: 59193 - DNA, 19 bp, Homo sapiens
  siRNA target sequence for DDX42 (NM_007372.1,435-453).
gggtttgacgaacaactta

SEQ ID NO: 59194 - DNA, 19 bp, Homo sapiens
  siRNA target sequence for DDX42 (NM_007372.1,436-454).
ggtttgacgaacaacttat

SEQ ID NO: 59195 - DNA, 19 bp, Homo sapiens
  siRNA target sequence for DDX42 (NM_007372.1,455-473).
gcaccagattcggaaatct

SEQ ID NO: 59196 - DNA, 19 bp, Homo sapiens
  siRNA target sequence for DDX42 (NM_007372.1,459-477).
cagattcggaaatctgaat

SEQ ID NO: 59197 - DNA, 19 bp, Homo sapiens
  siRNA target sequence for DDX42 (NM_007372.1,528-546).
ggtagagacatgattggta

SEQ ID NO: 59198 - DNA, 19 bp, Homo sapiens
  siRNA target sequence for DDX42 (NM_007372.1,529-547).
gtagagacatgattggtat

SEQ ID NO: 59199 - DNA, 19 bp, Homo sapiens
  siRNA target sequence for DDX42 (NM_007372.1,639-657).
ccaattgcagtgattgtgt

SEQ ID NO: 59200 - DNA, 19 bp, Homo sapiens
  siRNA target sequence for DDX42 (NM_007372.1,701-719).
gcggtttggaaaagcatat

SEQ ID NO: 59201 - DNA, 19 bp, Homo sapiens
  siRNA target sequence for DDX42 (NM_007372.1,809-827).
cccaggtcgactgatagat

SEQ ID NO: 59202 - DNA, 19 bp, Homo sapiens
  siRNA target sequence for DDX42 (NM_007372.1,811-829).
caggtcgactgatagatca

SEQ ID NO: 59203 - DNA, 19 bp, Homo sapiens
  siRNA target sequence for DDX42 (NM_007372.1,814-832).
gtcgactgatagatcatgt

SEQ ID NO: 59204 - DNA, 19 bp, Homo sapiens
  siRNA target sequence for DDX42 (NM_007372.1,817-835).
gactgatagatcatgtgaa

SEQ ID NO: 59205 - DNA, 19 bp, Homo sapiens
  siRNA target sequence for DDX42 (NM_007372.1,844-862).
ctaccaatcttcaaagagt

SEQ ID NO: 59206 - DNA, 19 bp, Homo sapiens
  siRNA target sequence for DDX42 (NM_007372.1,859-877).
gagtctcttaccttgtgtt

SEQ ID NO: 59207 - DNA, 19 bp, Homo sapiens
  siRNA target sequence for DDX42 (NM_007372.1,914-932).
gtaccaagttcgatccata

SEQ ID NO: 59208 - DNA, 19 bp, Homo sapiens
  siRNA target sequence for DDX42 (NM_007372.1,918-936).
caagttcgatccatagcaa

SEQ ID NO: 59209 - DNA, 19 bp, Homo sapiens
  siRNA target sequence for DDX42 (NM_007372.1,956-974).
gcagactctcttatttagt

SEQ ID NO: 59210 - DNA, 19 bp, Homo sapiens
  siRNA target sequence for DDX42 (NM_007372.1,976-994).
caacttttcggaagaagat

SEQ ID NO: 59211 - DNA, 19 bp, Homo sapiens
  siRNA target sequence for DDX42 (NM_007372.1,979-997).
cttttcggaagaagattga

SEQ ID NO: 59212 - DNA, 19 bp, Homo sapiens
  siRNA target sequence for DDX42 (NM_007372.1,1016-1034).
cctgatcgaccctattcga

SEQ ID NO: 59213 - DNA, 19 bp, Homo sapiens
  siRNA target sequence for DDX42 (NM_007372.1,1037-1055).
ggtgcagggagatattgga

SEQ ID NO: 59214 - DNA, 19 bp, Homo sapiens
  siRNA target sequence for DDX42 (NM_007372.1,1156-1174).
ggagtgtcctcctctttgt

SEQ ID NO: 59215 - DNA, 19 bp, Homo sapiens
  siRNA target sequence for DDX42 (NM_007372.1,1161-1179).
gtcctcctctttgttacta

SEQ ID NO: 59216 - DNA, 19 bp, Homo sapiens
  siRNA target sequence for DDX42 (NM_007372.1,1166-1184).
cctctttgttactaaaaaa

SEQ ID NO: 59217 - DNA, 19 bp, Homo sapiens
  siRNA target sequence for DDX42 (NM_007372.1,1192-1210).
ctgaagagctagcgaataa

SEQ ID NO: 59218 - DNA, 19 bp, Homo sapiens
  siRNA target sequence for DDX42 (NM_007372.1,1197-1215).
gagctagcgaataacctta

SEQ ID NO: 59219 - DNA, 19 bp, Homo sapiens
  siRNA target sequence for DDX42 (NM_007372.1,1199-1217).
gctagcgaataaccttaaa

SEQ ID NO: 59220 - DNA, 19 bp, Homo sapiens
  siRNA target sequence for DDX42 (NM_007372.1,1278-1296).
gtcatttcagactttaaga

SEQ ID NO: 59221 - DNA, 19 bp, Homo sapiens
  siRNA target sequence for DDX42 (NM_007372.1,1342-1360).
gtctggacattccttcaat

SEQ ID NO: 59222 - DNA, 19 bp, Homo sapiens
  siRNA target sequence for DDX42 (NM_007372.1,1344-1362).
ctggacattccttcaatta

SEQ ID NO: 59223 - DNA, 19 bp, Homo sapiens
  siRNA target sequence for DDX42 (NM_007372.1,1349-1367).
cattccttcaattaagact

SEQ ID NO: 59224 - DNA, 19 bp, Homo sapiens
  siRNA target sequence for DDX42 (NM_007372.1,1364-1382).
gactgtcattaactatgat

SEQ ID NO: 59225 - DNA, 19 bp, Homo sapiens
  siRNA target sequence for DDX42 (NM_007372.1,1383-1401).
gtggcacgagacattgata

SEQ ID NO: 59226 - DNA, 19 bp, Homo sapiens
  siRNA target sequence for DDX42 (NM_007372.1,1518-1536).
gccaatcaacacgtttcta

SEQ ID NO: 59227 - DNA, 19 bp, Homo sapiens
  siRNA target sequence for DDX42 (NM_007372.1,1519-1537).
ccaatcaacacgtttctaa

SEQ ID NO: 59228 - DNA, 19 bp, Homo sapiens
  siRNA target sequence for DDX42 (NM_007372.1,1534-1552).
ctaaggaactcctagatct

SEQ ID NO: 59229 - DNA, 19 bp, Homo sapiens
  siRNA target sequence for DDX42 (NM_007372.1,1673-1691).
ggatcgaggaaataacaat

SEQ ID NO: 59230 - DNA, 19 bp, Homo sapiens
  siRNA target sequence for DDX42 (NM_007372.1,1765-1783).
ctttccagtcacagtacaa

SEQ ID NO: 59231 - DNA, 19 bp, Homo sapiens
  siRNA target sequence for DDX42 (NM_007372.1,1794-1812).
gttgcagccagtttaagta

SEQ ID NO: 59232 - DNA, 19 bp, Homo sapiens
  siRNA target sequence for DDX42 (NM_007372.1,1893-1911).
gcacaacagggccataaca

SEQ ID NO: 59233 - DNA, 19 bp, Homo sapiens
  siRNA target sequence for DDX42 (NM_007372.1,1949-1967).
cccaggctttggcaatact

SEQ ID NO: 59234 - DNA, 19 bp, Homo sapiens
  siRNA target sequence for DDX42 (NM_007372.1,1959-1977).
ggcaatactggcaacatca

SEQ ID NO: 59235 - DNA, 19 bp, Homo sapiens
  siRNA target sequence for DDX42 (NM_007372.1,2008-2026).
gagcccaaggagtcaacaa

SEQ ID NO: 59236 - DNA, 19 bp, Homo sapiens
  siRNA target sequence for DDX42 (NM_007372.1,2010-2028).
gcccaaggagtcaacaaca

SEQ ID NO: 59237 - DNA, 19 bp, Homo sapiens
  siRNA target sequence for DDX42 (NM_007372.1,2063-2081).
gggcagcaacgggaaaaga

SEQ ID NO: 59238 - DNA, 19 bp, Homo sapiens
  siRNA target sequence for DDX42 (NM_007372.1,2065-2083).
gcagcaacgggaaaagaga

SEQ ID NO: 59239 - DNA, 19 bp, Homo sapiens
  siRNA target sequence for DDX46 (NM_014829.1,154-172).
gagtcacgccactatcgaa

SEQ ID NO: 59240 - DNA, 19 bp, Homo sapiens
  siRNA target sequence for DDX46 (NM_014829.1,156-174).
gtcacgccactatcgaaaa

SEQ ID NO: 59241 - DNA, 19 bp, Homo sapiens
  siRNA target sequence for DDX46 (NM_014829.1,160-178).
cgccactatcgaaaacgat

SEQ ID NO: 59242 - DNA, 19 bp, Homo sapiens
  siRNA target sequence for DDX46 (NM_014829.1,217-235).
cgctcaccctcagacaaaa

SEQ ID NO: 59243 - DNA, 19 bp, Homo sapiens
  siRNA target sequence for DDX46 (NM_014829.1,250-268).
gatgacagacggtctagaa

SEQ ID NO: 59244 - DNA, 19 bp, Homo sapiens
  siRNA target sequence for DDX46 (NM_014829.1,253-271).
gacagacggtctagaagta

SEQ ID NO: 59245 - DNA, 19 bp, Homo sapiens
  siRNA target sequence for DDX46 (NM_014829.1,255-273).
cagacggtctagaagtaga

SEQ ID NO: 59246 - DNA, 19 bp, Homo sapiens
  siRNA target sequence for DDX46 (NM_014829.1,259-277).
cggtctagaagtagagata

SEQ ID NO: 59247 - DNA, 19 bp, Homo sapiens
  siRNA target sequence for DDX46 (NM_014829.1,297-315).
gtctcgtagcagggataaa

SEQ ID NO: 59248 - DNA, 19 bp, Homo sapiens
  siRNA target sequence for DDX46 (NM_014829.1,346-364).
ctgagacgttccagaagta

SEQ ID NO: 59249 - DNA, 19 bp, Homo sapiens
  siRNA target sequence for DDX46 (NM_014829.1,455-473).
cctccagtcctggaaataa

SEQ ID NO: 59250 - DNA, 19 bp, Homo sapiens
  siRNA target sequence for DDX46 (NM_014829.1,523-541).
ggggaaagttctaaagaga

SEQ ID NO: 59251 - DNA, 19 bp, Homo sapiens
  siRNA target sequence for DDX46 (NM_014829.1,653-671).
ggcgagaagagcaacgtaa

SEQ ID NO: 59252 - DNA, 19 bp, Homo sapiens
  siRNA target sequence for DDX46 (NM_014829.1,804-822).
ggagggtgaggagttagat

SEQ ID NO: 59253 - DNA, 19 bp, Homo sapiens
  siRNA target sequence for DDX46 (NM_014829.1,809-827).
gtgaggagttagatccatt

SEQ ID NO: 59254 - DNA, 19 bp, Homo sapiens
  siRNA target sequence for DDX46 (NM_014829.1,813-831).
ggagttagatccattagat

SEQ ID NO: 59255 - DNA, 19 bp, Homo sapiens
  siRNA target sequence for DDX46 (NM_014829.1,914-932).
ctgggccaacggtcacaaa

SEQ ID NO: 59256 - DNA, 19 bp, Homo sapiens
  siRNA target sequence for DDX46 (NM_014829.1,917-935).
ggccaacggtcacaaaagt

SEQ ID NO: 59257 - DNA, 19 bp, Homo sapiens
  siRNA target sequence for DDX46 (NM_014829.1,920-938).
caacggtcacaaaagttgt

SEQ ID NO: 59258 - DNA, 19 bp, Homo sapiens
  siRNA target sequence for DDX46 (NM_014829.1,1012-1030).
gatgccatggagtattctt

SEQ ID NO: 59259 - DNA, 19 bp, Homo sapiens
  siRNA target sequence for DDX46 (NM_014829.1,1063-1081).
cttacagggtatcaaacaa

SEQ ID NO: 59260 - DNA, 19 bp, Homo sapiens
  siRNA target sequence for DDX46 (NM_014829.1,1067-1085).
cagggtatcaaacaaaaca

SEQ ID NO: 59261 - DNA, 19 bp, Homo sapiens
  siRNA target sequence for DDX46 (NM_014829.1,1108-1126).
gatcatggaaaaattgagt

SEQ ID NO: 59262 - DNA, 19 bp, Homo sapiens
  siRNA target sequence for DDX46 (NM_014829.1,1189-1207).
gaggtaaatgtgtttcgat

SEQ ID NO: 59263 - DNA, 19 bp, Homo sapiens
  siRNA target sequence for DDX46 (NM_014829.1,1240-1258).
ggttgccccaaaccaatta

SEQ ID NO: 59264 - DNA, 19 bp, Homo sapiens
  siRNA target sequence for DDX46 (NM_014829.1,1274-1292).
gtggaatttccatgaagat

SEQ ID NO: 59265 - DNA, 19 bp, Homo sapiens
  siRNA target sequence for DDX46 (NM_014829.1,1276-1294).
ggaatttccatgaagatct

SEQ ID NO: 59266 - DNA, 19 bp, Homo sapiens
  siRNA target sequence for DDX46 (NM_014829.1,1345-1363).
caagctattcctgctataa

SEQ ID NO: 59267 - DNA, 19 bp, Homo sapiens
  siRNA target sequence for DDX46 (NM_014829.1,1348-1366).
gctattcctgctataatgt

SEQ ID NO: 59268 - DNA, 19 bp, Homo sapiens
  siRNA target sequence for DDX46 (NM_014829.1,1365-1383).
gtctggacgagatttgatt

SEQ ID NO: 59269 - DNA, 19 bp, Homo sapiens
  siRNA target sequence for DDX46 (NM_014829.1,1478-1496).
ggccaatagctgtcatcat

SEQ ID NO: 59270 - DNA, 19 bp, Homo sapiens
  siRNA target sequence for DDX46 (NM_014829.1,1505-1523).
ctcgagaactggctttaca

SEQ ID NO: 59271 - DNA, 19 bp, Homo sapiens
  siRNA target sequence for DDX46 (NM_014829.1,1507-1525).
cgagaactggctttacaga

SEQ ID NO: 59272 - DNA, 19 bp, Homo sapiens
  siRNA target sequence for DDX46 (NM_014829.1,1529-1547).
ctaaagagtgtaagaagtt

SEQ ID NO: 59273 - DNA, 19 bp, Homo sapiens
  siRNA target sequence for DDX46 (NM_014829.1,1551-1569).
caagactttgggacttaga

SEQ ID NO: 59274 - DNA, 19 bp, Homo sapiens
  siRNA target sequence for DDX46 (NM_014829.1,1584-1602).
cggaggaacaggaatcagt

SEQ ID NO: 59275 - DNA, 19 bp, Homo sapiens
  siRNA target sequence for DDX46 (NM_014829.1,1625-1643).
gaggtgctgaaattattgt

SEQ ID NO: 59276 - DNA, 19 bp, Homo sapiens
  siRNA target sequence for DDX46 (NM_014829.1,1627-1645).
ggtgctgaaattattgttt

SEQ ID NO: 59277 - DNA, 19 bp, Homo sapiens
  siRNA target sequence for DDX46 (NM_014829.1,1646-1664).
gcacacctggtcgaatgat

SEQ ID NO: 59278 - DNA, 19 bp, Homo sapiens
  siRNA target sequence for DDX46 (NM_014829.1,1647-1665).
cacacctggtcgaatgatt

SEQ ID NO: 59279 - DNA, 19 bp, Homo sapiens
  siRNA target sequence for DDX46 (NM_014829.1,1655-1673).
gtcgaatgattgacatgtt

SEQ ID NO: 59280 - DNA, 19 bp, Homo sapiens
  siRNA target sequence for DDX46 (NM_014829.1,1668-1686).
catgttagccgctaacagt

SEQ ID NO: 59281 - DNA, 19 bp, Homo sapiens
  siRNA target sequence for DDX46 (NM_014829.1,1683-1701).
cagtggtcgggtcacaaat

SEQ ID NO: 59282 - DNA, 19 bp, Homo sapiens
  siRNA target sequence for DDX46 (NM_014829.1,1685-1703).
gtggtcgggtcacaaatct

SEQ ID NO: 59283 - DNA, 19 bp, Homo sapiens
  siRNA target sequence for DDX46 (NM_014829.1,1773-1791).
catgcgcatcgtggataat

SEQ ID NO: 59284 - DNA, 19 bp, Homo sapiens
  siRNA target sequence for DDX46 (NM_014829.1,1801-1819).
gatcgacagacggttatgt

SEQ ID NO: 59285 - DNA, 19 bp, Homo sapiens
  siRNA target sequence for DDX46 (NM_014829.1,1804-1822).
cgacagacggttatgtttt

SEQ ID NO: 59286 - DNA, 19 bp, Homo sapiens
  siRNA target sequence for DDX46 (NM_014829.1,1863-1881).
gatcctcagtaaacctatt

SEQ ID NO: 59287 - DNA, 19 bp, Homo sapiens
  siRNA target sequence for DDX46 (NM_014829.1,1869-1887).
cagtaaacctattgaagta

SEQ ID NO: 59288 - DNA, 19 bp, Homo sapiens
  siRNA target sequence for DDX46 (NM_014829.1,1871-1889).
gtaaacctattgaagtaca

SEQ ID NO: 59289 - DNA, 19 bp, Homo sapiens
  siRNA target sequence for DDX46 (NM_014829.1,1926-1944).
gcaacaagtgattgtgatt

SEQ ID NO: 59290 - DNA, 19 bp, Homo sapiens
  siRNA target sequence for DDX46 (NM_014829.1,1977-1995).
gcttctaggccattatcaa

SEQ ID NO: 59291 - DNA, 19 bp, Homo sapiens
  siRNA target sequence for DDX46 (NM_014829.1,1998-2016).
gtcaggatctgtcattata

SEQ ID NO: 59292 - DNA, 19 bp, Homo sapiens
  siRNA target sequence for DDX46 (NM_014829.1,2000-2018).
caggatctgtcattatatt

SEQ ID NO: 59293 - DNA, 19 bp, Homo sapiens
  siRNA target sequence for DDX46 (NM_014829.1,2180-2198).
ctgcccgaggtctagatgt

SEQ ID NO: 59294 - DNA, 19 bp, Homo sapiens
  siRNA target sequence for DDX46 (NM_014829.1,2183-2201).
cccgaggtctagatgtgaa

SEQ ID NO: 59295 - DNA, 19 bp, Homo sapiens
  siRNA target sequence for DDX46 (NM_014829.1,2184-2202).
ccgaggtctagatgtgaaa

SEQ ID NO: 59296 - DNA, 19 bp, Homo sapiens
  siRNA target sequence for DDX46 (NM_014829.1,2208-2226).
gattcttgtagtaaattat

SEQ ID NO: 59297 - DNA, 19 bp, Homo sapiens
  siRNA target sequence for DDX46 (NM_014829.1,2212-2230).
cttgtagtaaattatagct

SEQ ID NO: 59298 - DNA, 19 bp, Homo sapiens
  siRNA target sequence for DDX46 (NM_014829.1,2234-2252).
ccaaccattatgaggatta

SEQ ID NO: 59299 - DNA, 19 bp, Homo sapiens
  siRNA target sequence for DDX46 (NM_014829.1,2235-2253).
caaccattatgaggattat

SEQ ID NO: 59300 - DNA, 19 bp, Homo sapiens
  siRNA target sequence for DDX46 (NM_014829.1,2238-2256).
ccattatgaggattatgta

SEQ ID NO: 59301 - DNA, 19 bp, Homo sapiens
  siRNA target sequence for DDX46 (NM_014829.1,2329-2347).
cgctatgctggtgacataa

SEQ ID NO: 59302 - DNA, 19 bp, Homo sapiens
  siRNA target sequence for DDX46 (NM_014829.1,2331-2349).
ctatgctggtgacataatt

SEQ ID NO: 59303 - DNA, 19 bp, Homo sapiens
  siRNA target sequence for DDX46 (NM_014829.1,2377-2395).
gtacctcctgatttagaga

SEQ ID NO: 59304 - DNA, 19 bp, Homo sapiens
  siRNA target sequence for DDX46 (NM_014829.1,2429-2447).
ctgaggggaaaataattaa

SEQ ID NO: 59305 - DNA, 19 bp, Homo sapiens
  siRNA target sequence for DDX46 (NM_014829.1,2465-2483).
ctggtaagggattcaagtt

SEQ ID NO: 59306 - DNA, 19 bp, Homo sapiens
  siRNA target sequence for DDX46 (NM_014829.1,2468-2486).
gtaagggattcaagtttga

SEQ ID NO: 59307 - DNA, 19 bp, Homo sapiens
  siRNA target sequence for DDX46 (NM_014829.1,2600-2618).
gcatgtttaattcaaagaa

SEQ ID NO: 59308 - DNA, 19 bp, Homo sapiens
  siRNA target sequence for DDX46 (NM_014829.1,2705-2723).
gattggctcttagaatcaa

SEQ ID NO: 59309 - DNA, 19 bp, Homo sapiens
  siRNA target sequence for DDX46 (NM_014829.1,2769-2787).
gcaggccaccaatgcaatt

SEQ ID NO: 59310 - DNA, 19 bp, Homo sapiens
  siRNA target sequence for DDX46 (NM_014829.1,2859-2877).
caatgccaagctcaattat

SEQ ID NO: 59311 - DNA, 19 bp, Homo sapiens
  siRNA target sequence for DDX46 (NM_014829.1,2910-2928).
ggatggtggacagaatgaa

SEQ ID NO: 59312 - DNA, 19 bp, Homo sapiens
  siRNA target sequence for DDX46 (NM_014829.1,2911-2929).
gatggtggacagaatgaat

SEQ ID NO: 59313 - DNA, 19 bp, Homo sapiens
  siRNA target sequence for DDX46 (NM_014829.1,3013-3031).
cagagaatcagtgaatact

SEQ ID NO: 59314 - DNA, 19 bp, Homo sapiens
  siRNA target sequence for DDX46 (NM_014829.1,3032-3050).
ctgaagccgcaattacaat

SEQ ID NO: 59315 - DNA, 19 bp, Homo sapiens
  siRNA target sequence for DDX46 (NM_014829.1,3034-3052).
gaagccgcaattacaatca

SEQ ID NO: 59316 - DNA, 19 bp, Homo sapiens
  siRNA target sequence for DDX46 (NM_014829.1,3087-3105).
ggaaggcgagcggaagatt

SEQ ID NO: 59317 - DNA, 19 bp, Homo sapiens
  siRNA target sequence for DDX46 (NM_014829.1,3088-3106).
gaaggcgagcggaagattt

SEQ ID NO: 59318 - DNA, 19 bp, Homo sapiens
  siRNA target sequence for DDX46 (NM_014829.1,3184-3202).
ctgatccggctgcaaaatt

SEQ ID NO: 59319 - DNA, 19 bp, Homo sapiens
  siRNA target sequence for DDX47 (NM_016355.2,199-217).
ccttacaaggtcgtgatat

SEQ ID NO: 59320 - DNA, 19 bp, Homo sapiens
  siRNA target sequence for DDX47 (NM_016355.2,290-308).
gaccccgcagcgtttgttt

SEQ ID NO: 59321 - DNA, 19 bp, Homo sapiens
  siRNA target sequence for DDX47 (NM_016355.2,301-319).
gtttgtttgccctagttct

SEQ ID NO: 59322 - DNA, 19 bp, Homo sapiens
  siRNA target sequence for DDX47 (NM_016355.2,408-426).
ggtggaattgattcaatgt

SEQ ID NO: 59323 - DNA, 19 bp, Homo sapiens
  siRNA target sequence for DDX47 (NM_016355.2,433-451).
ctttggcccttgcaaaaaa

SEQ ID NO: 59324 - DNA, 19 bp, Homo sapiens
  siRNA target sequence for DDX47 (NM_016355.2,549-567).
gaagccgaccgaatactga

SEQ ID NO: 59325 - DNA, 19 bp, Homo sapiens
  siRNA target sequence for DDX47 (NM_016355.2,552-570).
gccgaccgaatactgaata

SEQ ID NO: 59326 - DNA, 19 bp, Homo sapiens
  siRNA target sequence for DDX47 (NM_016355.2,553-571).
ccgaccgaatactgaatat

SEQ ID NO: 59327 - DNA, 19 bp, Homo sapiens
  siRNA target sequence for DDX47 (NM_016355.2,557-575).
ccgaatactgaatatggat

SEQ ID NO: 59328 - DNA, 19 bp, Homo sapiens
  siRNA target sequence for DDX47 (NM_016355.2,558-576).
cgaatactgaatatggatt

SEQ ID NO: 59329 - DNA, 19 bp, Homo sapiens
  siRNA target sequence for DDX47 (NM_016355.2,612-630).
cctcgagatcggaaaacat

SEQ ID NO: 59330 - DNA, 19 bp, Homo sapiens
  siRNA target sequence for DDX47 (NM_016355.2,613-631).
ctcgagatcggaaaacatt

SEQ ID NO: 59331 - DNA, 19 bp, Homo sapiens
  siRNA target sequence for DDX47 (NM_016355.2,653-671).
caagaaggttcaaaaactt

SEQ ID NO: 59332 - DNA, 19 bp, Homo sapiens
  siRNA target sequence for DDX47 (NM_016355.2,674-692).
gcgagcagctctgaagaat

SEQ ID NO: 59333 - DNA, 19 bp, Homo sapiens
  siRNA target sequence for DDX47 (NM_016355.2,703-721).
gtgccgtttcctctaaata

SEQ ID NO: 59334 - DNA, 19 bp, Homo sapiens
  siRNA target sequence for DDX47 (NM_016355.2,706-724).
ccgtttcctctaaatacca

SEQ ID NO: 59335 - DNA, 19 bp, Homo sapiens
  siRNA target sequence for DDX47 (NM_016355.2,766-784).
ctaaattcaaggataccta

SEQ ID NO: 59336 - DNA, 19 bp, Homo sapiens
  siRNA target sequence for DDX47 (NM_016355.2,777-795).
gatacctacctggtttata

SEQ ID NO: 59337 - DNA, 19 bp, Homo sapiens
  siRNA target sequence for DDX47 (NM_016355.2,810-828).
gctggaaactcctttatga

SEQ ID NO: 59338 - DNA, 19 bp, Homo sapiens
  siRNA target sequence for DDX47 (NM_016355.2,811-829).
ctggaaactcctttatgat

SEQ ID NO: 59339 - DNA, 19 bp, Homo sapiens
  siRNA target sequence for DDX47 (NM_016355.2,865-883).
ctttgctactgcgaaatct

SEQ ID NO: 59340 - DNA, 19 bp, Homo sapiens
  siRNA target sequence for DDX47 (NM_016355.2,902-920).
cctccatggacaaatgagt

SEQ ID NO: 59341 - DNA, 19 bp, Homo sapiens
  siRNA target sequence for DDX47 (NM_016355.2,929-947).
gcgcctaggatcccttaat

SEQ ID NO: 59342 - DNA, 19 bp, Homo sapiens
  siRNA target sequence for DDX47 (NM_016355.2,930-948).
cgcctaggatcccttaata

SEQ ID NO: 59343 - DNA, 19 bp, Homo sapiens
  siRNA target sequence for DDX47 (NM_016355.2,931-949).
gcctaggatcccttaataa

SEQ ID NO: 59344 - DNA, 19 bp, Homo sapiens
  siRNA target sequence for DDX47 (NM_016355.2,933-951).
ctaggatcccttaataagt

SEQ ID NO: 59345 - DNA, 19 bp, Homo sapiens
  siRNA target sequence for DDX47 (NM_016355.2,936-954).
ggatcccttaataagttta

SEQ ID NO: 59346 - DNA, 19 bp, Homo sapiens
  siRNA target sequence for DDX47 (NM_016355.2,956-974).
ggccaaggcccgttccatt

SEQ ID NO: 59347 - DNA, 19 bp, Homo sapiens
  siRNA target sequence for DDX47 (NM_016355.2,962-980).
ggcccgttccattcttcta

SEQ ID NO: 59348 - DNA, 19 bp, Homo sapiens
  siRNA target sequence for DDX47 (NM_016355.2,1007-1025).
ggacatacctcatgtagat

SEQ ID NO: 59349 - DNA, 19 bp, Homo sapiens
  siRNA target sequence for DDX47 (NM_016355.2,1028-1046).
ggttgtcaactttgacatt

SEQ ID NO: 59350 - DNA, 19 bp, Homo sapiens
  siRNA target sequence for DDX47 (NM_016355.2,1051-1069).
cccattccaaggattacat

SEQ ID NO: 59351 - DNA, 19 bp, Homo sapiens
  siRNA target sequence for DDX47 (NM_016355.2,1101-1119).
cgctccggaaaggctatta

SEQ ID NO: 59352 - DNA, 19 bp, Homo sapiens
  siRNA target sequence for DDX47 (NM_016355.2,1103-1121).
ctccggaaaggctattact

SEQ ID NO: 59353 - DNA, 19 bp, Homo sapiens
  siRNA target sequence for DDX47 (NM_016355.2,1105-1123).
ccggaaaggctattacttt

SEQ ID NO: 59354 - DNA, 19 bp, Homo sapiens
  siRNA target sequence for DDX47 (NM_016355.2,1120-1138).
cttttgtcacacagtatga

SEQ ID NO: 59355 - DNA, 19 bp, Homo sapiens
  siRNA target sequence for DDX47 (NM_016355.2,1151-1169).
ccagcgcatagaacactta

SEQ ID NO: 59356 - DNA, 19 bp, Homo sapiens
  siRNA target sequence for DDX47 (NM_016355.2,1152-1170).
cagcgcatagaacacttaa

SEQ ID NO: 59357 - DNA, 19 bp, Homo sapiens
  siRNA target sequence for DDX47 (NM_016355.2,1154-1172).
gcgcatagaacacttaatt

SEQ ID NO: 59358 - DNA, 19 bp, Homo sapiens
  siRNA target sequence for DDX47 (NM_016355.2,1200-1218).
caggatgatgaggttatga

SEQ ID NO: 59359 - DNA, 19 bp, Homo sapiens
  siRNA target sequence for DDX47 (NM_016355.2,1235-1253).
cgctgaagcccaaaggttt

SEQ ID NO: 59360 - DNA, 19 bp, Homo sapiens
  siRNA target sequence for DDX47 (NM_016355.2,1300-1318).
gagaggatgctggagataa

SEQ ID NO: 59361 - DNA, 19 bp, Homo sapiens
  siRNA target sequence for DDX47 (NM_016355.2,1325-1343).
cacagagggtgctattggt

SEQ ID NO: 59362 - DNA, 19 bp, Homo sapiens
  siRNA target sequence for DDX49 (NM_019070.3,90-108).
gtggctcgtggaacaatgt

SEQ ID NO: 59363 - DNA, 19 bp, Homo sapiens
  siRNA target sequence for DDX49 (NM_019070.3,183-201).
cttgggctgtgctaagaca

SEQ ID NO: 59364 - DNA, 19 bp, Homo sapiens
  siRNA target sequence for DDX49 (NM_019070.3,462-480).
gcgcagctccaacactttt

SEQ ID NO: 59365 - DNA, 19 bp, Homo sapiens
  siRNA target sequence for DDX49 (NM_019070.3,463-481).
cgcagctccaacactttta

SEQ ID NO: 59366 - DNA, 19 bp, Homo sapiens
  siRNA target sequence for DDX49 (NM_019070.3,468-486).
ctccaacacttttagtata

SEQ ID NO: 59367 - DNA, 19 bp, Homo sapiens
  siRNA target sequence for DDX49 (NM_019070.3,793-811).
cacgaggactggtccatta

SEQ ID NO: 59368 - DNA, 19 bp, Homo sapiens
  siRNA target sequence for DDX49 (NM_019070.3,925-943).
gccctagccaagttcaagt

SEQ ID NO: 59369 - DNA, 19 bp, Homo sapiens
  siRNA target sequence for DDX49 (NM_019070.3,1142-1160).
ccatcgaggagcagatcaa

SEQ ID NO: 59370 - DNA, 19 bp, Homo sapiens
  siRNA target sequence for DDX49 (NM_019070.3,1235-1253).
gagagtgtgagatcaaact

SEQ ID NO: 59371 - DNA, 19 bp, Homo sapiens
  siRNA target sequence for DDX49 (NM_019070.3,1261-1279).
gcccactttgacgaaaaga

SEQ ID NO: 59372 - DNA, 19 bp, Homo sapiens
  siRNA target sequence for DDX50 (NM_024045.1,205-223).
ggaagtcaaggcaccatta

SEQ ID NO: 59373 - DNA, 19 bp, Homo sapiens
  siRNA target sequence for DDX50 (NM_024045.1,227-245).
ctcggatgagaaatcagaa

SEQ ID NO: 59374 - DNA, 19 bp, Homo sapiens
  siRNA target sequence for DDX50 (NM_024045.1,282-300).
cccaaggccaaaaaatcta

SEQ ID NO: 59375 - DNA, 19 bp, Homo sapiens
  siRNA target sequence for DDX50 (NM_024045.1,283-301).
ccaaggccaaaaaatctaa

SEQ ID NO: 59376 - DNA, 19 bp, Homo sapiens
  siRNA target sequence for DDX50 (NM_024045.1,357-375).
gaattctccaaatctcata

SEQ ID NO: 59377 - DNA, 19 bp, Homo sapiens
  siRNA target sequence for DDX50 (NM_024045.1,362-380).
ctccaaatctcataagtca

SEQ ID NO: 59378 - DNA, 19 bp, Homo sapiens
  siRNA target sequence for DDX50 (NM_024045.1,430-448).
caaagcgagtatcatcttt

SEQ ID NO: 59379 - DNA, 19 bp, Homo sapiens
  siRNA target sequence for DDX50 (NM_024045.1,434-452).
gcgagtatcatctttagat

SEQ ID NO: 59380 - DNA, 19 bp, Homo sapiens
  siRNA target sequence for DDX50 (NM_024045.1,435-453).
cgagtatcatctttagata

SEQ ID NO: 59381 - DNA, 19 bp, Homo sapiens
  siRNA target sequence for DDX50 (NM_024045.1,450-468).
gatacttctactcataaat

SEQ ID NO: 59382 - DNA, 19 bp, Homo sapiens
  siRNA target sequence for DDX50 (NM_024045.1,469-487).
caagtgataataaactaga

SEQ ID NO: 59383 - DNA, 19 bp, Homo sapiens
  siRNA target sequence for DDX50 (NM_024045.1,513-531).
gaaggagccttctccaatt

SEQ ID NO: 59384 - DNA, 19 bp, Homo sapiens
  siRNA target sequence for DDX50 (NM_024045.1,568-586).
gtcgaggggtaacatatct

SEQ ID NO: 59385 - DNA, 19 bp, Homo sapiens
  siRNA target sequence for DDX50 (NM_024045.1,570-588).
cgaggggtaacatatctct

SEQ ID NO: 59386 - DNA, 19 bp, Homo sapiens
  siRNA target sequence for DDX50 (NM_024045.1,571-589).
gaggggtaacatatctctt

SEQ ID NO: 59387 - DNA, 19 bp, Homo sapiens
  siRNA target sequence for DDX50 (NM_024045.1,580-598).
catatctctttcctattca

SEQ ID NO: 59388 - DNA, 19 bp, Homo sapiens
  siRNA target sequence for DDX50 (NM_024045.1,683-701).
catccccttaattgaaaga

SEQ ID NO: 59389 - DNA, 19 bp, Homo sapiens
  siRNA target sequence for DDX50 (NM_024045.1,804-822).
gatataactaggaaactca

SEQ ID NO: 59390 - DNA, 19 bp, Homo sapiens
  siRNA target sequence for DDX50 (NM_024045.1,819-837).
ctcagcgtggcgtgttttt

SEQ ID NO: 59391 - DNA, 19 bp, Homo sapiens
  siRNA target sequence for DDX50 (NM_024045.1,821-839).
cagcgtggcgtgtttttat

SEQ ID NO: 59392 - DNA, 19 bp, Homo sapiens
  siRNA target sequence for DDX50 (NM_024045.1,840-858).
ggtggaacatcatatcaaa

SEQ ID NO: 59393 - DNA, 19 bp, Homo sapiens
  siRNA target sequence for DDX50 (NM_024045.1,860-878).
ccaaattaatcatattcga

SEQ ID NO: 59394 - DNA, 19 bp, Homo sapiens
  siRNA target sequence for DDX50 (NM_024045.1,877-895).
gaaatggtattgacatctt

SEQ ID NO: 59395 - DNA, 19 bp, Homo sapiens
  siRNA target sequence for DDX50 (NM_024045.1,929-947).
gcagagtggccgattggat

SEQ ID NO: 59396 - DNA, 19 bp, Homo sapiens
  siRNA target sequence for DDX50 (NM_024045.1,936-954).
ggccgattggatctttcta

SEQ ID NO: 59397 - DNA, 19 bp, Homo sapiens
  siRNA target sequence for DDX50 (NM_024045.1,937-955).
gccgattggatctttctaa

SEQ ID NO: 59398 - DNA, 19 bp, Homo sapiens
  siRNA target sequence for DDX50 (NM_024045.1,938-956).
ccgattggatctttctaaa

SEQ ID NO: 59399 - DNA, 19 bp, Homo sapiens
  siRNA target sequence for DDX50 (NM_024045.1,952-970).
ctaaactgcgacatgttgt

SEQ ID NO: 59400 - DNA, 19 bp, Homo sapiens
  siRNA target sequence for DDX50 (NM_024045.1,961-979).
gacatgttgtgcttgatga

SEQ ID NO: 59401 - DNA, 19 bp, Homo sapiens
  siRNA target sequence for DDX50 (NM_024045.1,981-999).
gtggatcagatgttagatt

SEQ ID NO: 59402 - DNA, 19 bp, Homo sapiens
  siRNA target sequence for DDX50 (NM_024045.1,1102-1120).
gggtatacaaagttgcaaa

SEQ ID NO: 59403 - DNA, 19 bp, Homo sapiens
  siRNA target sequence for DDX50 (NM_024045.1,1103-1121).
ggtatacaaagttgcaaaa

SEQ ID NO: 59404 - DNA, 19 bp, Homo sapiens
  siRNA target sequence for DDX50 (NM_024045.1,1183-1201).
caactactgtggaacattt

SEQ ID NO: 59405 - DNA, 19 bp, Homo sapiens
  siRNA target sequence for DDX50 (NM_024045.1,1270-1288).
ctgaagggagggctattat

SEQ ID NO: 59406 - DNA, 19 bp, Homo sapiens
  siRNA target sequence for DDX50 (NM_024045.1,1277-1295).
gagggctattattttctgt

SEQ ID NO: 59407 - DNA, 19 bp, Homo sapiens
  siRNA target sequence for DDX50 (NM_024045.1,1323-1341).
gccatgaatccacacataa

SEQ ID NO: 59408 - DNA, 19 bp, Homo sapiens
  siRNA target sequence for DDX50 (NM_024045.1,1324-1342).
ccatgaatccacacataaa

SEQ ID NO: 59409 - DNA, 19 bp, Homo sapiens
  siRNA target sequence for DDX50 (NM_024045.1,1325-1343).
catgaatccacacataaaa

SEQ ID NO: 59410 - DNA, 19 bp, Homo sapiens
  siRNA target sequence for DDX50 (NM_024045.1,1377-1395).
cagtcacaaagagaaatta

SEQ ID NO: 59411 - DNA, 19 bp, Homo sapiens
  siRNA target sequence for DDX50 (NM_024045.1,1379-1397).
gtcacaaagagaaattaca

SEQ ID NO: 59412 - DNA, 19 bp, Homo sapiens
  siRNA target sequence for DDX50 (NM_024045.1,1381-1399).
cacaaagagaaattacact

SEQ ID NO: 59413 - DNA, 19 bp, Homo sapiens
  siRNA target sequence for DDX50 (NM_024045.1,1479-1497).
gacctggtgattcaaagtt

SEQ ID NO: 59414 - DNA, 19 bp, Homo sapiens
  siRNA target sequence for DDX50 (NM_024045.1,1506-1524).
caggatgttgagtcctata

SEQ ID NO: 59415 - DNA, 19 bp, Homo sapiens
  siRNA target sequence for DDX50 (NM_024045.1,1554-1572).
ggacggacagggatttgta

SEQ ID NO: 59416 - DNA, 19 bp, Homo sapiens
  siRNA target sequence for DDX50 (NM_024045.1,1555-1573).
gacggacagggatttgtat

SEQ ID NO: 59417 - DNA, 19 bp, Homo sapiens
  siRNA target sequence for DDX50 (NM_024045.1,1653-1671).
gttccttctacaatggatt

SEQ ID NO: 59418 - DNA, 19 bp, Homo sapiens
  siRNA target sequence for DDX50 (NM_024045.1,1657-1675).
cttctacaatggatttagt

SEQ ID NO: 59419 - DNA, 19 bp, Homo sapiens
  siRNA target sequence for DDX50 (NM_024045.1,1705-1723).
ctctggcttccgtttctta

SEQ ID NO: 59420 - DNA, 19 bp, Homo sapiens
  siRNA target sequence for DDX50 (NM_024045.1,1753-1771).
ctcagagactgatagaaga

SEQ ID NO: 59421 - DNA, 19 bp, Homo sapiens
  siRNA target sequence for DDX50 (NM_024045.1,1833-1851).
gaaccacgatctttgatca

SEQ ID NO: 59422 - DNA, 19 bp, Homo sapiens
  siRNA target sequence for DDX50 (NM_024045.1,2016-2034).
cctacaactgagtcagaaa

SEQ ID NO: 59423 - DNA, 19 bp, Homo sapiens
  siRNA target sequence for DDX50 (NM_024045.1,2072-2090).
ctcagtgccagccaaatta

SEQ ID NO: 59424 - DNA, 19 bp, Homo sapiens
  siRNA target sequence for DDX50 (NM_024045.1,2299-2317).
gccacaaacggagttttga

SEQ ID NO: 59425 - DNA, 19 bp, Homo sapiens
  siRNA target sequence for DDX51 (NM_175066.2,660-678).
cggcatctcgtcctacttt

SEQ ID NO: 59426 - DNA, 19 bp, Homo sapiens
  siRNA target sequence for DDX51 (NM_175066.2,905-923).
gcaaagttttcaacatcta

SEQ ID NO: 59427 - DNA, 19 bp, Homo sapiens
  siRNA target sequence for DDX51 (NM_175066.2,988-1006).
gagagcctcgtccagaaaa

SEQ ID NO: 59428 - DNA, 19 bp, Homo sapiens
  siRNA target sequence for DDX51 (NM_175066.2,1413-1431).
cggggattcggggaagtat

SEQ ID NO: 59429 - DNA, 19 bp, Homo sapiens
  siRNA target sequence for DDX51 (NM_175066.2,1529-1547).
gggttctctgcttcactaa

SEQ ID NO: 59430 - DNA, 19 bp, Homo sapiens
  siRNA target sequence for DDX52 (NM_007010.2,41-59).
ggacgtccacgatctcttt

SEQ ID NO: 59431 - DNA, 19 bp, Homo sapiens
  siRNA target sequence for DDX52 (NM_007010.2,114-132).
gctcgattccagataggaa

SEQ ID NO: 59432 - DNA, 19 bp, Homo sapiens
  siRNA target sequence for DDX52 (NM_007010.2,311-329).
gacgatgacttcagaaatt

SEQ ID NO: 59433 - DNA, 19 bp, Homo sapiens
  siRNA target sequence for DDX52 (NM_007010.2,342-360).
gaaggtgctactatacagt

SEQ ID NO: 59434 - DNA, 19 bp, Homo sapiens
  siRNA target sequence for DDX52 (NM_007010.2,464-482).
cttgcggaataaacacaaa

SEQ ID NO: 59435 - DNA, 19 bp, Homo sapiens
  siRNA target sequence for DDX52 (NM_007010.2,531-549).
caacttgaccaggaatata

SEQ ID NO: 59436 - DNA, 19 bp, Homo sapiens
  siRNA target sequence for DDX52 (NM_007010.2,601-619).
ctacgccaatccaaatgca

SEQ ID NO: 59437 - DNA, 19 bp, Homo sapiens
  siRNA target sequence for DDX52 (NM_007010.2,676-694).
ctggaaaaacattagcttt

SEQ ID NO: 59438 - DNA, 19 bp, Homo sapiens
  siRNA target sequence for DDX52 (NM_007010.2,678-696).
ggaaaaacattagctttta

SEQ ID NO: 59439 - DNA, 19 bp, Homo sapiens
  siRNA target sequence for DDX52 (NM_007010.2,717-735).
ctgaaacaacccgcaaata

SEQ ID NO: 59440 - DNA, 19 bp, Homo sapiens
  siRNA target sequence for DDX52 (NM_007010.2,774-792).
cttgccagccagattcaca

SEQ ID NO: 59441 - DNA, 19 bp, Homo sapiens
  siRNA target sequence for DDX52 (NM_007010.2,785-803).
gattcacagagagttaata

SEQ ID NO: 59442 - DNA, 19 bp, Homo sapiens
  siRNA target sequence for DDX52 (NM_007010.2,877-895).
ctaaatcatctaaaaagtt

SEQ ID NO: 59443 - DNA, 19 bp, Homo sapiens
  siRNA target sequence for DDX52 (NM_007010.2,883-901).
catctaaaaagtttgatat

SEQ ID NO: 59444 - DNA, 19 bp, Homo sapiens
  siRNA target sequence for DDX52 (NM_007010.2,910-928).
ctactccaaatcgactaat

SEQ ID NO: 59445 - DNA, 19 bp, Homo sapiens
  siRNA target sequence for DDX52 (NM_007010.2,921-939).
cgactaatctatttattaa

SEQ ID NO: 59446 - DNA, 19 bp, Homo sapiens
  siRNA target sequence for DDX52 (NM_007010.2,984-1002).
gtagtagacgaatcagata

SEQ ID NO: 59447 - DNA, 19 bp, Homo sapiens
  siRNA target sequence for DDX52 (NM_007010.2,990-1008).
gacgaatcagataaactgt

SEQ ID NO: 59448 - DNA, 19 bp, Homo sapiens
  siRNA target sequence for DDX52 (NM_007010.2,1077-1095).
gtccgaagagctatgttca

SEQ ID NO: 59449 - DNA, 19 bp, Homo sapiens
  siRNA target sequence for DDX52 (NM_007010.2,1099-1117).
caacttttgcatatgatgt

SEQ ID NO: 59450 - DNA, 19 bp, Homo sapiens
  siRNA target sequence for DDX52 (NM_007010.2,1160-1178).
gtccattggagcaaggaat

SEQ ID NO: 59451 - DNA, 19 bp, Homo sapiens
  siRNA target sequence for DDX52 (NM_007010.2,1241-1259).
ggccatgagagaacttgtt

SEQ ID NO: 59452 - DNA, 19 bp, Homo sapiens
  siRNA target sequence for DDX52 (NM_007010.2,1243-1261).
ccatgagagaacttgttaa

SEQ ID NO: 59453 - DNA, 19 bp, Homo sapiens
  siRNA target sequence for DDX52 (NM_007010.2,1309-1327).
gggctaaagaactttttca

SEQ ID NO: 59454 - DNA, 19 bp, Homo sapiens
  siRNA target sequence for DDX52 (NM_007010.2,1310-1328).
ggctaaagaactttttcat

SEQ ID NO: 59455 - DNA, 19 bp, Homo sapiens
  siRNA target sequence for DDX52 (NM_007010.2,1320-1338).
ctttttcatgagctcatat

SEQ ID NO: 59456 - DNA, 19 bp, Homo sapiens
  siRNA target sequence for DDX52 (NM_007010.2,1331-1349).
gctcatatatgaaggtatt

SEQ ID NO: 59457 - DNA, 19 bp, Homo sapiens
  siRNA target sequence for DDX52 (NM_007010.2,1332-1350).
ctcatatatgaaggtatta

SEQ ID NO: 59458 - DNA, 19 bp, Homo sapiens
  siRNA target sequence for DDX52 (NM_007010.2,1451-1469).
gctagcaagagggattgat

SEQ ID NO: 59459 - DNA, 19 bp, Homo sapiens
  siRNA target sequence for DDX52 (NM_007010.2,1452-1470).
ctagcaagagggattgatt

SEQ ID NO: 59460 - DNA, 19 bp, Homo sapiens
  siRNA target sequence for DDX52 (NM_007010.2,1477-1495).
gtgtgaacttggtgatcaa

SEQ ID NO: 59461 - DNA, 19 bp, Homo sapiens
  siRNA target sequence for DDX52 (NM_007010.2,1513-1531).
gctcagtggaatatatcca

SEQ ID NO: 59462 - DNA, 19 bp, Homo sapiens
  siRNA target sequence for DDX52 (NM_007010.2,1615-1633).
gcgttgctaatgttataca

SEQ ID NO: 59463 - DNA, 19 bp, Homo sapiens
  siRNA target sequence for DDX52 (NM_007010.2,1642-1660).
ggtgtcctgtaccagaata

SEQ ID NO: 59464 - DNA, 19 bp, Homo sapiens
  siRNA target sequence for DDX52 (NM_007010.2,1647-1665).
cctgtaccagaatacataa

SEQ ID NO: 59465 - DNA, 19 bp, Homo sapiens
  siRNA target sequence for DDX52 (NM_007010.2,1738-1756).
gtacaactccaaaatgttt

SEQ ID NO: 59466 - DNA, 19 bp, Homo sapiens
  siRNA target sequence for DDX52 (NM_007010.2,1815-1833).
gtagctcttgaagacaaaa

SEQ ID NO: 59467 - DNA, 19 bp, Homo sapiens
  siRNA target sequence for DDX53 (NM_182699.1,129-147).
gagggcggaggctaatcca

SEQ ID NO: 59468 - DNA, 19 bp, Homo sapiens
  siRNA target sequence for DDX53 (NM_182699.1,244-262).
gaaccaccactctgcttta

SEQ ID NO: 59469 - DNA, 19 bp, Homo sapiens
  siRNA target sequence for DDX53 (NM_182699.1,280-298).
gttggtgtggtcattggtt

SEQ ID NO: 59470 - DNA, 19 bp, Homo sapiens
  siRNA target sequence for DDX53 (NM_182699.1,325-343).
caacattcgacaaacacta

SEQ ID NO: 59471 - DNA, 19 bp, Homo sapiens
  siRNA target sequence for DDX53 (NM_182699.1,328-346).
cattcgacaaacactaaaa

SEQ ID NO: 59472 - DNA, 19 bp, Homo sapiens
  siRNA target sequence for DDX53 (NM_182699.1,360-378).
cggggaatctgaagcaaaa

SEQ ID NO: 59473 - DNA, 19 bp, Homo sapiens
  siRNA target sequence for DDX53 (NM_182699.1,414-432).
ggccaaagcggctatagaa

SEQ ID NO: 59474 - DNA, 19 bp, Homo sapiens
  siRNA target sequence for DDX53 (NM_182699.1,415-433).
gccaaagcggctatagaaa

SEQ ID NO: 59475 - DNA, 19 bp, Homo sapiens
  siRNA target sequence for DDX53 (NM_182699.1,417-435).
caaagcggctatagaaaca

SEQ ID NO: 59476 - DNA, 19 bp, Homo sapiens
  siRNA target sequence for DDX53 (NM_182699.1,421-439).
gcggctatagaaacactta

SEQ ID NO: 59477 - DNA, 19 bp, Homo sapiens
  siRNA target sequence for DDX53 (NM_182699.1,422-440).
cggctatagaaacacttat

SEQ ID NO: 59478 - DNA, 19 bp, Homo sapiens
  siRNA target sequence for DDX53 (NM_182699.1,424-442).
gctatagaaacacttatta

SEQ ID NO: 59479 - DNA, 19 bp, Homo sapiens
  siRNA target sequence for DDX53 (NM_182699.1,497-515).
cccctattggaagaaatct

SEQ ID NO: 59480 - DNA, 19 bp, Homo sapiens
  siRNA target sequence for DDX53 (NM_182699.1,541-559).
gctgagccattgtcaaatt

SEQ ID NO: 59481 - DNA, 19 bp, Homo sapiens
  siRNA target sequence for DDX53 (NM_182699.1,580-598).
gtcgtggagtgcgaaaaga

SEQ ID NO: 59482 - DNA, 19 bp, Homo sapiens
  siRNA target sequence for DDX53 (NM_182699.1,582-600).
cgtggagtgcgaaaagaga

SEQ ID NO: 59483 - DNA, 19 bp, Homo sapiens
  siRNA target sequence for DDX53 (NM_182699.1,583-601).
gtggagtgcgaaaagagaa

SEQ ID NO: 59484 - DNA, 19 bp, Homo sapiens
  siRNA target sequence for DDX53 (NM_182699.1,681-699).
gattaactggagaaaggaa

SEQ ID NO: 59485 - DNA, 19 bp, Homo sapiens
  siRNA target sequence for DDX53 (NM_182699.1,736-754).
gaaaagcgtctcattccaa

SEQ ID NO: 59486 - DNA, 19 bp, Homo sapiens
  siRNA target sequence for DDX53 (NM_182699.1,742-760).
cgtctcattccaaaaccaa

SEQ ID NO: 59487 - DNA, 19 bp, Homo sapiens
  siRNA target sequence for DDX53 (NM_182699.1,758-776).
caacttgcaggtttaaaga

SEQ ID NO: 59488 - DNA, 19 bp, Homo sapiens
  siRNA target sequence for DDX53 (NM_182699.1,767-785).
ggtttaaagacgcttttca

SEQ ID NO: 59489 - DNA, 19 bp, Homo sapiens
  siRNA target sequence for DDX53 (NM_182699.1,855-873).
ggcatggccaattattcta

SEQ ID NO: 59490 - DNA, 19 bp, Homo sapiens
  siRNA target sequence for DDX53 (NM_182699.1,857-875).
catggccaattattctaca

SEQ ID NO: 59491 - DNA, 19 bp, Homo sapiens
  siRNA target sequence for DDX53 (NM_182699.1,863-881).
caattattctacaaggaat

SEQ ID NO: 59492 - DNA, 19 bp, Homo sapiens
  siRNA target sequence for DDX53 (NM_182699.1,1042-1060).
gctgaatgttcaaagtatt

SEQ ID NO: 59493 - DNA, 19 bp, Homo sapiens
  siRNA target sequence for DDX53 (NM_182699.1,1045-1063).
gaatgttcaaagtattcat

SEQ ID NO: 59494 - DNA, 19 bp, Homo sapiens
  siRNA target sequence for DDX53 (NM_182699.1,1085-1103).
gcatatatggtggtagaaa

SEQ ID NO: 59495 - DNA, 19 bp, Homo sapiens
  siRNA target sequence for DDX53 (NM_182699.1,1125-1143).
cattagcaaaggtgtagat

SEQ ID NO: 59496 - DNA, 19 bp, Homo sapiens
  siRNA target sequence for DDX53 (NM_182699.1,1174-1192).
gacctacaaatgaataact

SEQ ID NO: 59497 - DNA, 19 bp, Homo sapiens
  siRNA target sequence for DDX53 (NM_182699.1,1298-1316).
cagaccgacagactgttat

SEQ ID NO: 59498 - DNA, 19 bp, Homo sapiens
  siRNA target sequence for DDX53 (NM_182699.1,1300-1318).
gaccgacagactgttatga

SEQ ID NO: 59499 - DNA, 19 bp, Homo sapiens
  siRNA target sequence for DDX53 (NM_182699.1,1302-1320).
ccgacagactgttatgaca

SEQ ID NO: 59500 - DNA, 19 bp, Homo sapiens
  siRNA target sequence for DDX53 (NM_182699.1,1303-1321).
cgacagactgttatgacaa

SEQ ID NO: 59501 - DNA, 19 bp, Homo sapiens
  siRNA target sequence for DDX53 (NM_182699.1,1345-1363).
cgtcaactagcactttctt

SEQ ID NO: 59502 - DNA, 19 bp, Homo sapiens
  siRNA target sequence for DDX53 (NM_182699.1,1346-1364).
gtcaactagcactttctta

SEQ ID NO: 59503 - DNA, 19 bp, Homo sapiens
  siRNA target sequence for DDX53 (NM_182699.1,1368-1386).
gaaagatcctatgattgtt

SEQ ID NO: 59504 - DNA, 19 bp, Homo sapiens
  siRNA target sequence for DDX53 (NM_182699.1,1462-1480).
cgagctctcacccaagaat

SEQ ID NO: 59505 - DNA, 19 bp, Homo sapiens
  siRNA target sequence for DDX53 (NM_182699.1,1466-1484).
ctctcacccaagaattcgt

SEQ ID NO: 59506 - DNA, 19 bp, Homo sapiens
  siRNA target sequence for DDX53 (NM_182699.1,1472-1490).
cccaagaattcgtagagaa

SEQ ID NO: 59507 - DNA, 19 bp, Homo sapiens
  siRNA target sequence for DDX53 (NM_182699.1,1477-1495).
gaattcgtagagaacatgt

SEQ ID NO: 59508 - DNA, 19 bp, Homo sapiens
  siRNA target sequence for DDX53 (NM_182699.1,1503-1521).
cgacaaagtcatcatgttt

SEQ ID NO: 59509 - DNA, 19 bp, Homo sapiens
  siRNA target sequence for DDX53 (NM_182699.1,1524-1542).
cagccaaaaacatattgct

SEQ ID NO: 59510 - DNA, 19 bp, Homo sapiens
  siRNA target sequence for DDX53 (NM_182699.1,1553-1571).
caagcgacttcaatatcca

SEQ ID NO: 59511 - DNA, 19 bp, Homo sapiens
  siRNA target sequence for DDX53 (NM_182699.1,1563-1581).
caatatccaaggcatatct

SEQ ID NO: 59512 - DNA, 19 bp, Homo sapiens
  siRNA target sequence for DDX53 (NM_182699.1,1624-1642).
cgagcagtagaggacttta

SEQ ID NO: 59513 - DNA, 19 bp, Homo sapiens
  siRNA target sequence for DDX53 (NM_182699.1,1625-1643).
gagcagtagaggactttaa

SEQ ID NO: 59514 - DNA, 19 bp, Homo sapiens
  siRNA target sequence for DDX53 (NM_182699.1,1638-1656).
ctttaaaagcggaaacata

SEQ ID NO: 59515 - DNA, 19 bp, Homo sapiens
  siRNA target sequence for DDX53 (NM_182699.1,1646-1664).
gcggaaacataaagatact

SEQ ID NO: 59516 - DNA, 19 bp, Homo sapiens
  siRNA target sequence for DDX53 (NM_182699.1,1653-1671).
cataaagatactgattaca

SEQ ID NO: 59517 - DNA, 19 bp, Homo sapiens
  siRNA target sequence for DDX53 (NM_182699.1,1685-1703).
cccgaggtcttgatcttaa

SEQ ID NO: 59518 - DNA, 19 bp, Homo sapiens
  siRNA target sequence for DDX53 (NM_182699.1,1686-1704).
ccgaggtcttgatcttaat

SEQ ID NO: 59519 - DNA, 19 bp, Homo sapiens
  siRNA target sequence for DDX53 (NM_182699.1,1691-1709).
gtcttgatcttaatgatgt

SEQ ID NO: 59520 - DNA, 19 bp, Homo sapiens
  siRNA target sequence for DDX53 (NM_182699.1,1736-1754).
caaggaatattgacgtata

SEQ ID NO: 59521 - DNA, 19 bp, Homo sapiens
  siRNA target sequence for DDX53 (NM_182699.1,1740-1758).
gaatattgacgtatatgta

SEQ ID NO: 59522 - DNA, 19 bp, Homo sapiens
  siRNA target sequence for DDX53 (NM_182699.1,1807-1825).
ctcatcactcagagagatt

SEQ ID NO: 59523 - DNA, 19 bp, Homo sapiens
  siRNA target sequence for DDX53 (NM_182699.1,1826-1844).
cgaaaatggccggtgaatt

SEQ ID NO: 59524 - DNA, 19 bp, Homo sapiens
  siRNA target sequence for DDX53 (NM_182699.1,1833-1851).
ggccggtgaattgattaaa

SEQ ID NO: 59525 - DNA, 19 bp, Homo sapiens
  siRNA target sequence for DDX53 (NM_182699.1,1835-1853).
ccggtgaattgattaaaat

SEQ ID NO: 59526 - DNA, 19 bp, Homo sapiens
  siRNA target sequence for DDX53 (NM_182699.1,1874-1892).
gtgttccggaagatcttgt

SEQ ID NO: 59527 - DNA, 19 bp, Homo sapiens
  siRNA target sequence for DDX53 (NM_182699.1,1899-1917).
ggctgagcaatacaagtta

SEQ ID NO: 59528 - DNA, 19 bp, Homo sapiens
  siRNA target sequence for DDX53 (NM_182699.1,1900-1918).
gctgagcaatacaagttaa

SEQ ID NO: 59529 - DNA, 19 bp, Homo sapiens
  siRNA target sequence for DDX53 (NM_182699.1,1963-1981).
caaagacgcaaggagtttt

SEQ ID NO: 59530 - DNA, 19 bp, Homo sapiens
  siRNA target sequence for DDX53 (NM_182699.1,1967-1985).
gacgcaaggagttttattt

SEQ ID NO: 59531 - DNA, 19 bp, Homo sapiens
  siRNA target sequence for DDX54 (NM_024072.2,150-168).
cggaggacggcgagtttga

SEQ ID NO: 59532 - DNA, 19 bp, Homo sapiens
  siRNA target sequence for DDX54 (NM_024072.2,152-170).
gaggacggcgagtttgaga

SEQ ID NO: 59533 - DNA, 19 bp, Homo sapiens
  siRNA target sequence for DDX54 (NM_024072.2,281-299).
gtgcgtgcccagaacaaga

SEQ ID NO: 59534 - DNA, 19 bp, Homo sapiens
  siRNA target sequence for DDX54 (NM_024072.2,337-355).
gagctacccggtgttcaaa

SEQ ID NO: 59535 - DNA, 19 bp, Homo sapiens
  siRNA target sequence for DDX54 (NM_024072.2,668-686).
cacgaaaatcccgacataa

SEQ ID NO: 59536 - DNA, 19 bp, Homo sapiens
  siRNA target sequence for DDX54 (NM_024072.2,670-688).
cgaaaatcccgacataatt

SEQ ID NO: 59537 - DNA, 19 bp, Homo sapiens
  siRNA target sequence for DDX54 (NM_024072.2,671-689).
gaaaatcccgacataatta

SEQ ID NO: 59538 - DNA, 19 bp, Homo sapiens
  siRNA target sequence for DDX54 (NM_024072.2,773-791).
gctgaccggctttttgaaa

SEQ ID NO: 59539 - DNA, 19 bp, Homo sapiens
  siRNA target sequence for DDX54 (NM_024072.2,927-945).
ggcttgacgtggataccaa

SEQ ID NO: 59540 - DNA, 19 bp, Homo sapiens
  siRNA target sequence for DDX54 (NM_024072.2,1150-1168).
gacagcccgcaagatcaat

SEQ ID NO: 59541 - DNA, 19 bp, Homo sapiens
  siRNA target sequence for DDX54 (NM_024072.2,1152-1170).
cagcccgcaagatcaatct

SEQ ID NO: 59542 - DNA, 19 bp, Homo sapiens
  siRNA target sequence for DDX54 (NM_024072.2,1712-1730).
ctggtggacagcataaaga

SEQ ID NO: 59543 - DNA, 19 bp, Homo sapiens
  siRNA target sequence for DDX54 (NM_024072.2,1746-1764).
cgactatctttgagatcaa

SEQ ID NO: 59544 - DNA, 19 bp, Homo sapiens
  siRNA target sequence for DDX54 (NM_024072.2,2157-2175).
gcgctgtcctggacttgat

SEQ ID NO: 59545 - DNA, 19 bp, Homo sapiens
  siRNA target sequence for DHX15 (NM_001358.1,338-356).
ggagttgcgagcttcaaca

SEQ ID NO: 59546 - DNA, 19 bp, Homo sapiens
  siRNA target sequence for DHX15 (NM_001358.1,341-359).
gttgcgagcttcaacaaat

SEQ ID NO: 59547 - DNA, 19 bp, Homo sapiens
  siRNA target sequence for DHX15 (NM_001358.1,365-383).
gcttatcagtgctggatta

SEQ ID NO: 59548 - DNA, 19 bp, Homo sapiens
  siRNA target sequence for DHX15 (NM_001358.1,526-544).
cccatactcctcgatacta

SEQ ID NO: 59549 - DNA, 19 bp, Homo sapiens
  siRNA target sequence for DHX15 (NM_001358.1,527-545).
ccatactcctcgatactat

SEQ ID NO: 59550 - DNA, 19 bp, Homo sapiens
  siRNA target sequence for DHX15 (NM_001358.1,532-550).
ctcctcgatactatgatat

SEQ ID NO: 59551 - DNA, 19 bp, Homo sapiens
  siRNA target sequence for DHX15 (NM_001358.1,535-553).
ctcgatactatgatattct

SEQ ID NO: 59552 - DNA, 19 bp, Homo sapiens
  siRNA target sequence for DHX15 (NM_001358.1,537-555).
cgatactatgatattctaa

SEQ ID NO: 59553 - DNA, 19 bp, Homo sapiens
  siRNA target sequence for DHX15 (NM_001358.1,616-634).
gacatcagtcctttgtact

SEQ ID NO: 59554 - DNA, 19 bp, Homo sapiens
  siRNA target sequence for DHX15 (NM_001358.1,686-704).
ggagtacatgcgatcatta

SEQ ID NO: 59555 - DNA, 19 bp, Homo sapiens
  siRNA target sequence for DHX15 (NM_001358.1,689-707).
gtacatgcgatcattacca

SEQ ID NO: 59556 - DNA, 19 bp, Homo sapiens
  siRNA target sequence for DHX15 (NM_001358.1,810-828).
gttggttactccattcgat

SEQ ID NO: 59557 - DNA, 19 bp, Homo sapiens
  siRNA target sequence for DHX15 (NM_001358.1,908-926).
cctcctggagcgttatggt

SEQ ID NO: 59558 - DNA, 19 bp, Homo sapiens
  siRNA target sequence for DHX15 (NM_001358.1,914-932).
ggagcgttatggtgtaata

SEQ ID NO: 59559 - DNA, 19 bp, Homo sapiens
  siRNA target sequence for DHX15 (NM_001358.1,915-933).
gagcgttatggtgtaataa

SEQ ID NO: 59560 - DNA, 19 bp, Homo sapiens
  siRNA target sequence for DHX15 (NM_001358.1,917-935).
gcgttatggtgtaataatt

SEQ ID NO: 59561 - DNA, 19 bp, Homo sapiens
  siRNA target sequence for DHX15 (NM_001358.1,955-973).
ggacactggctacagatat

SEQ ID NO: 59562 - DNA, 19 bp, Homo sapiens
  siRNA target sequence for DHX15 (NM_001358.1,982-1000).
gtgttctgaaggaagttgt

SEQ ID NO: 59563 - DNA, 19 bp, Homo sapiens
  siRNA target sequence for DHX15 (NM_001358.1,1009-1027).
gatcagatttaaaggttat

SEQ ID NO: 59564 - DNA, 19 bp, Homo sapiens
  siRNA target sequence for DHX15 (NM_001358.1,1012-1030).
cagatttaaaggttatagt

SEQ ID NO: 59565 - DNA, 19 bp, Homo sapiens
  siRNA target sequence for DHX15 (NM_001358.1,1053-1071).
ggaaaattccagatttact

SEQ ID NO: 59566 - DNA, 19 bp, Homo sapiens
  siRNA target sequence for DHX15 (NM_001358.1,1064-1082).
gatttactttgataactgt

SEQ ID NO: 59567 - DNA, 19 bp, Homo sapiens
  siRNA target sequence for DHX15 (NM_001358.1,1105-1123).
gtacacatcctgttgagat

SEQ ID NO: 59568 - DNA, 19 bp, Homo sapiens
  siRNA target sequence for DHX15 (NM_001358.1,1108-1126).
cacatcctgttgagatctt

SEQ ID NO: 59569 - DNA, 19 bp, Homo sapiens
  siRNA target sequence for DHX15 (NM_001358.1,1113-1131).
cctgttgagatcttctata

SEQ ID NO: 59570 - DNA, 19 bp, Homo sapiens
  siRNA target sequence for DHX15 (NM_001358.1,1141-1159).
cagagagagattatcttga

SEQ ID NO: 59571 - DNA, 19 bp, Homo sapiens
  siRNA target sequence for DHX15 (NM_001358.1,1161-1179).
gcagcaattcgaacagtta

SEQ ID NO: 59572 - DNA, 19 bp, Homo sapiens
  siRNA target sequence for DHX15 (NM_001358.1,1162-1180).
cagcaattcgaacagttat

SEQ ID NO: 59573 - DNA, 19 bp, Homo sapiens
  siRNA target sequence for DHX15 (NM_001358.1,1165-1183).
caattcgaacagttatcca

SEQ ID NO: 59574 - DNA, 19 bp, Homo sapiens
  siRNA target sequence for DHX15 (NM_001358.1,1174-1192).
cagttatccagattcatat

SEQ ID NO: 59575 - DNA, 19 bp, Homo sapiens
  siRNA target sequence for DHX15 (NM_001358.1,1262-1280).
gagaataaagcgtgaagtt

SEQ ID NO: 59576 - DNA, 19 bp, Homo sapiens
  siRNA target sequence for DHX15 (NM_001358.1,1264-1282).
gaataaagcgtgaagttga

SEQ ID NO: 59577 - DNA, 19 bp, Homo sapiens
  siRNA target sequence for DHX15 (NM_001358.1,1299-1317).
gttggtgacattaaaatca

SEQ ID NO: 59578 - DNA, 19 bp, Homo sapiens
  siRNA target sequence for DHX15 (NM_001358.1,1316-1334).
cattccattgtattctaca

SEQ ID NO: 59579 - DNA, 19 bp, Homo sapiens
  siRNA target sequence for DHX15 (NM_001358.1,1410-1428).
gtagttgtgtcaactaaca

SEQ ID NO: 59580 - DNA, 19 bp, Homo sapiens
  siRNA target sequence for DHX15 (NM_001358.1,1477-1495).
ctggatttgcgaaacagaa

SEQ ID NO: 59581 - DNA, 19 bp, Homo sapiens
  siRNA target sequence for DHX15 (NM_001358.1,1486-1504).
cgaaacagaaggtctacaa

SEQ ID NO: 59582 - DNA, 19 bp, Homo sapiens
  siRNA target sequence for DHX15 (NM_001358.1,1499-1517).
ctacaatcctcgaatcaga

SEQ ID NO: 59583 - DNA, 19 bp, Homo sapiens
  siRNA target sequence for DHX15 (NM_001358.1,1516-1534).
gagttgagtcccttttggt

SEQ ID NO: 59584 - DNA, 19 bp, Homo sapiens
  siRNA target sequence for DHX15 (NM_001358.1,1532-1550).
ggtgacagctattagtaaa

SEQ ID NO: 59585 - DNA, 19 bp, Homo sapiens
  siRNA target sequence for DHX15 (NM_001358.1,1584-1602).
cgtaccagacctggaaaat

SEQ ID NO: 59586 - DNA, 19 bp, Homo sapiens
  siRNA target sequence for DHX15 (NM_001358.1,1660-1678).
ctgagattttgcgttctaa

SEQ ID NO: 59587 - DNA, 19 bp, Homo sapiens
  siRNA target sequence for DHX15 (NM_001358.1,1662-1680).
gagattttgcgttctaatt

SEQ ID NO: 59588 - DNA, 19 bp, Homo sapiens
  siRNA target sequence for DHX15 (NM_001358.1,1664-1682).
gattttgcgttctaattta

SEQ ID NO: 59589 - DNA, 19 bp, Homo sapiens
  siRNA target sequence for DHX15 (NM_001358.1,1689-1707).
gttgtgttacaattgaaga

SEQ ID NO: 59590 - DNA, 19 bp, Homo sapiens
  siRNA target sequence for DHX15 (NM_001358.1,1774-1792).
gagccctggaacttttgaa

SEQ ID NO: 59591 - DNA, 19 bp, Homo sapiens
  siRNA target sequence for DHX15 (NM_001358.1,1799-1817).
ggctgctttaaatgatgat

SEQ ID NO: 59592 - DNA, 19 bp, Homo sapiens
  siRNA target sequence for DHX15 (NM_001358.1,1863-1881).
gatccacagctcgcaaaaa

SEQ ID NO: 59593 - DNA, 19 bp, Homo sapiens
  siRNA target sequence for DHX15 (NM_001358.1,1871-1889).
gctcgcaaaaatggttatt

SEQ ID NO: 59594 - DNA, 19 bp, Homo sapiens
  siRNA target sequence for DHX15 (NM_001358.1,1874-1892).
cgcaaaaatggttattgca

SEQ ID NO: 59595 - DNA, 19 bp, Homo sapiens
  siRNA target sequence for DHX15 (NM_001358.1,1992-2010).
gatgaggccaagatgagat

SEQ ID NO: 59596 - DNA, 19 bp, Homo sapiens
  siRNA target sequence for DHX15 (NM_001358.1,2006-2024).
gagatttgcccacatagat

SEQ ID NO: 59597 - DNA, 19 bp, Homo sapiens
  siRNA target sequence for DHX15 (NM_001358.1,2045-2063).
gaacgtctaccatgctttt

SEQ ID NO: 59598 - DNA, 19 bp, Homo sapiens
  siRNA target sequence for DHX15 (NM_001358.1,2048-2066).
cgtctaccatgcttttaaa

SEQ ID NO: 59599 - DNA, 19 bp, Homo sapiens
  siRNA target sequence for DHX15 (NM_001358.1,2051-2069).
ctaccatgcttttaaacaa

SEQ ID NO: 59600 - DNA, 19 bp, Homo sapiens
  siRNA target sequence for DHX15 (NM_001358.1,2080-2098).
cggttcagtggtgttatga

SEQ ID NO: 59601 - DNA, 19 bp, Homo sapiens
  siRNA target sequence for DHX15 (NM_001358.1,2082-2100).
gttcagtggtgttatgaca

SEQ ID NO: 59602 - DNA, 19 bp, Homo sapiens
  siRNA target sequence for DHX15 (NM_001358.1,2144-2162).
ccagcagctatctcgaatt

SEQ ID NO: 59603 - DNA, 19 bp, Homo sapiens
  siRNA target sequence for DHX15 (NM_001358.1,2145-2163).
cagcagctatctcgaatta

SEQ ID NO: 59604 - DNA, 19 bp, Homo sapiens
  siRNA target sequence for DHX15 (NM_001358.1,2184-2202).
cgtcgaagtactgacttta

SEQ ID NO: 59605 - DNA, 19 bp, Homo sapiens
  siRNA target sequence for DHX15 (NM_001358.1,2203-2221).
caagcagggactattatat

SEQ ID NO: 59606 - DNA, 19 bp, Homo sapiens
  siRNA target sequence for DHX15 (NM_001358.1,2209-2227).
gggactattatattaatat

SEQ ID NO: 59607 - DNA, 19 bp, Homo sapiens
  siRNA target sequence for DHX15 (NM_001358.1,2277-2295).
cgaacagggcattacttaa

SEQ ID NO: 59608 - DNA, 19 bp, Homo sapiens
  siRNA target sequence for DHX15 (NM_001358.1,2281-2299).
cagggcattacttaactgt

SEQ ID NO: 59609 - DNA, 19 bp, Homo sapiens
  siRNA target sequence for DHX15 (NM_001358.1,2321-2339).
gttgcatccctctactgtt

SEQ ID NO: 59610 - DNA, 19 bp, Homo sapiens
  siRNA target sequence for DHX15 (NM_001358.1,2373-2391).
gagtttgttctaacaacaa

SEQ ID NO: 59611 - DNA, 19 bp, Homo sapiens
  siRNA target sequence for DHX15 (NM_001358.1,2379-2397).
gttctaacaacaaagaatt

SEQ ID NO: 59612 - DNA, 19 bp, Homo sapiens
  siRNA target sequence for DHX15 (NM_001358.1,2438-2456).
gaaaattgcccctcaatat

SEQ ID NO: 59613 - DNA, 19 bp, Homo sapiens
  siRNA target sequence for DHX15 (NM_001358.1,2445-2463).
gcccctcaatattatgaca

SEQ ID NO: 59614 - DNA, 19 bp, Homo sapiens
  siRNA target sequence for DHX15 (NM_001358.1,2446-2464).
cccctcaatattatgacat

SEQ ID NO: 59615 - DNA, 19 bp, Homo sapiens
  siRNA target sequence for DHX15 (NM_001358.1,2521-2539).
cttcaatccaaggaatatt

SEQ ID NO: 59616 - DNA, 19 bp, Homo sapiens
  siRNA target sequence for DHX16 (NM_003587.3,210-228).
ggcacgtcgcccagtttct

SEQ ID NO: 59617 - DNA, 19 bp, Homo sapiens
  siRNA target sequence for DHX16 (NM_003587.3,275-293).
cgcctacgagacactgata

SEQ ID NO: 59618 - DNA, 19 bp, Homo sapiens
  siRNA target sequence for DHX16 (NM_003587.3,412-430).
ggagaagaaccgatcttat

SEQ ID NO: 59619 - DNA, 19 bp, Homo sapiens
  siRNA target sequence for DHX16 (NM_003587.3,413-431).
gagaagaaccgatcttata

SEQ ID NO: 59620 - DNA, 19 bp, Homo sapiens
  siRNA target sequence for DHX16 (NM_003587.3,418-436).
gaaccgatcttataggtta

SEQ ID NO: 59621 - DNA, 19 bp, Homo sapiens
  siRNA target sequence for DHX16 (NM_003587.3,706-724).
caaggatcggactcgaaat

SEQ ID NO: 59622 - DNA, 19 bp, Homo sapiens
  siRNA target sequence for DHX16 (NM_003587.3,890-908).
gctgatgaggagttccttt

SEQ ID NO: 59623 - DNA, 19 bp, Homo sapiens
  siRNA target sequence for DHX16 (NM_003587.3,935-953).
gagcggcaggagctcaaat

SEQ ID NO: 59624 - DNA, 19 bp, Homo sapiens
  siRNA target sequence for DHX16 (NM_003587.3,1065-1083).
cccgagctgtggatctagt

SEQ ID NO: 59625 - DNA, 19 bp, Homo sapiens
  siRNA target sequence for DHX16 (NM_003587.3,1143-1161).
gggcagcgtccctgaagtt

SEQ ID NO: 59626 - DNA, 19 bp, Homo sapiens
  siRNA target sequence for DHX16 (NM_003587.3,1144-1162).
ggcagcgtccctgaagttt

SEQ ID NO: 59627 - DNA, 19 bp, Homo sapiens
  siRNA target sequence for DHX16 (NM_003587.3,1182-1200).
ctcaggagcccaagtatca

SEQ ID NO: 59628 - DNA, 19 bp, Homo sapiens
  siRNA target sequence for DHX16 (NM_003587.3,1336-1354).
cccggtgttcccatttcga

SEQ ID NO: 59629 - DNA, 19 bp, Homo sapiens
  siRNA target sequence for DHX16 (NM_003587.3,1360-1378).
gctcctggctgctattgca

SEQ ID NO: 59630 - DNA, 19 bp, Homo sapiens
  siRNA target sequence for DHX16 (NM_003587.3,1445-1463).
ctctttgaggagggttata

SEQ ID NO: 59631 - DNA, 19 bp, Homo sapiens
  siRNA target sequence for DHX16 (NM_003587.3,1447-1465).
ctttgaggagggttataca

SEQ ID NO: 59632 - DNA, 19 bp, Homo sapiens
  siRNA target sequence for DHX16 (NM_003587.3,1451-1469).
gaggagggttatacaaaca

SEQ ID NO: 59633 - DNA, 19 bp, Homo sapiens
  siRNA target sequence for DHX16 (NM_003587.3,1464-1482).
caaacaagggtatgaagat

SEQ ID NO: 59634 - DNA, 19 bp, Homo sapiens
  siRNA target sequence for DHX16 (NM_003587.3,1664-1682).
cctgacctggcgagttaca

SEQ ID NO: 59635 - DNA, 19 bp, Homo sapiens
  siRNA target sequence for DHX16 (NM_003587.3,1718-1736).
ctacacacagacattctct

SEQ ID NO: 59636 - DNA, 19 bp, Homo sapiens
  siRNA target sequence for DHX16 (NM_003587.3,2149-2167).
ggttgtggcaacgaacatt

SEQ ID NO: 59637 - DNA, 19 bp, Homo sapiens
  siRNA target sequence for DHX16 (NM_003587.3,2182-2200).
caccattgagggcatcatt

SEQ ID NO: 59638 - DNA, 19 bp, Homo sapiens
  siRNA target sequence for DHX16 (NM_003587.3,2184-2202).
ccattgagggcatcattta

SEQ ID NO: 59639 - DNA, 19 bp, Homo sapiens
  siRNA target sequence for DHX16 (NM_003587.3,2185-2203).
cattgagggcatcatttat

SEQ ID NO: 59640 - DNA, 19 bp, Homo sapiens
  siRNA target sequence for DHX16 (NM_003587.3,2451-2469).
ggatccatgacctaatgca

SEQ ID NO: 59641 - DNA, 19 bp, Homo sapiens
  siRNA target sequence for DHX16 (NM_003587.3,2459-2477).
gacctaatgcactttgatt

SEQ ID NO: 59642 - DNA, 19 bp, Homo sapiens
  siRNA target sequence for DHX16 (NM_003587.3,2565-2583).
ccacgtctggtcgaaagat

SEQ ID NO: 59643 - DNA, 19 bp, Homo sapiens
  siRNA target sequence for DHX16 (NM_003587.3,2773-2791).
cctggttctgctaaatgtt

SEQ ID NO: 59644 - DNA, 19 bp, Homo sapiens
  siRNA target sequence for DHX16 (NM_003587.3,2804-2822).
gctgagagtggttactctt

SEQ ID NO: 59645 - DNA, 19 bp, Homo sapiens
  siRNA target sequence for DHX16 (NM_003587.3,2931-2949).
cctgccagggggactatat

SEQ ID NO: 59646 - DNA, 19 bp, Homo sapiens
  siRNA target sequence for DHX16 (NM_003587.3,2965-2983).
catcactgctggttacttt

SEQ ID NO: 59647 - DNA, 19 bp, Homo sapiens
  siRNA target sequence for DHX16 (NM_003587.3,2970-2988).
ctgctggttacttttacca

SEQ ID NO: 59648 - DNA, 19 bp, Homo sapiens
  siRNA target sequence for DHX16 (NM_003587.3,3012-3030).
gctaccgcacagtgaaaca

SEQ ID NO: 59649 - DNA, 19 bp, Homo sapiens
  siRNA target sequence for DHX16 (NM_003587.3,3034-3052).
gcagacagtcttcattcat

SEQ ID NO: 59650 - DNA, 19 bp, Homo sapiens
  siRNA target sequence for DHX16 (NM_003587.3,3166-3184).
ggaggtggctccccattat

SEQ ID NO: 59651 - DNA, 19 bp, Homo sapiens
  siRNA target sequence for DHX16 (NM_003587.3,3167-3185).
gaggtggctccccattatt

SEQ ID NO: 59652 - DNA, 19 bp, Homo sapiens
  siRNA target sequence for DHX16 (NM_003587.3,3169-3187).
ggtggctccccattattat

SEQ ID NO: 59653 - DNA, 19 bp, Homo sapiens
  siRNA target sequence for DHX16 (NM_003587.3,3170-3188).
gtggctccccattattata

SEQ ID NO: 59654 - DNA, 19 bp, Homo sapiens
  siRNA target sequence for DHX29 (NM_019030.1,325-343).
ctagtggtcctgcaaatct

SEQ ID NO: 59655 - DNA, 19 bp, Homo sapiens
  siRNA target sequence for DHX29 (NM_019030.1,336-354).
gcaaatctggataaatcta

SEQ ID NO: 59656 - DNA, 19 bp, Homo sapiens
  siRNA target sequence for DHX29 (NM_019030.1,352-370).
ctattttgaaagtggtaat

SEQ ID NO: 59657 - DNA, 19 bp, Homo sapiens
  siRNA target sequence for DHX29 (NM_019030.1,391-409).
gaattattggagtgatcaa

SEQ ID NO: 59658 - DNA, 19 bp, Homo sapiens
  siRNA target sequence for DHX29 (NM_019030.1,400-418).
gagtgatcaatgagcataa

SEQ ID NO: 59659 - DNA, 19 bp, Homo sapiens
  siRNA target sequence for DHX29 (NM_019030.1,443-461).
gatttctggaagacttact

SEQ ID NO: 59660 - DNA, 19 bp, Homo sapiens
  siRNA target sequence for DHX29 (NM_019030.1,464-482).
caaaaaattgcaggattta

SEQ ID NO: 59661 - DNA, 19 bp, Homo sapiens
  siRNA target sequence for DHX29 (NM_019030.1,564-582).
cttcattctgccttggatt

SEQ ID NO: 59662 - DNA, 19 bp, Homo sapiens
  siRNA target sequence for DHX29 (NM_019030.1,651-669).
cctaaaagtaggcctaaat

SEQ ID NO: 59663 - DNA, 19 bp, Homo sapiens
  siRNA target sequence for DHX29 (NM_019030.1,652-670).
ctaaaagtaggcctaaatt

SEQ ID NO: 59664 - DNA, 19 bp, Homo sapiens
  siRNA target sequence for DHX29 (NM_019030.1,794-812).
gtggattttacgatatgct

SEQ ID NO: 59665 - DNA, 19 bp, Homo sapiens
  siRNA target sequence for DHX29 (NM_019030.1,880-898).
ctaatgaaaggtacttaca

SEQ ID NO: 59666 - DNA, 19 bp, Homo sapiens
  siRNA target sequence for DHX29 (NM_019030.1,936-954).
gctacctttaaactagaaa

SEQ ID NO: 59667 - DNA, 19 bp, Homo sapiens
  siRNA target sequence for DHX29 (NM_019030.1,1023-1041).
gaagaccatccagtattta

SEQ ID NO: 59668 - DNA, 19 bp, Homo sapiens
  siRNA target sequence for DHX29 (NM_019030.1,1045-1063).
cagccatgaagatttcaca

SEQ ID NO: 59669 - DNA, 19 bp, Homo sapiens
  siRNA target sequence for DHX29 (NM_019030.1,1104-1122).
ggagaaagtgcattgaatt

SEQ ID NO: 59670 - DNA, 19 bp, Homo sapiens
  siRNA target sequence for DHX29 (NM_019030.1,1215-1233).
cgaagttggactggaaaat

SEQ ID NO: 59671 - DNA, 19 bp, Homo sapiens
  siRNA target sequence for DHX29 (NM_019030.1,1237-1255).
ccaaacaatttctgattga

SEQ ID NO: 59672 - DNA, 19 bp, Homo sapiens
  siRNA target sequence for DHX29 (NM_019030.1,1305-1323).
gttccagtaggtagatact

SEQ ID NO: 59673 - DNA, 19 bp, Homo sapiens
  siRNA target sequence for DHX29 (NM_019030.1,1311-1329).
gtaggtagatactggaaat

SEQ ID NO: 59674 - DNA, 19 bp, Homo sapiens
  siRNA target sequence for DHX29 (NM_019030.1,1314-1332).
ggtagatactggaaatgta

SEQ ID NO: 59675 - DNA, 19 bp, Homo sapiens
  siRNA target sequence for DHX29 (NM_019030.1,1330-1348).
gtagggttagggtaatcaa

SEQ ID NO: 59676 - DNA, 19 bp, Homo sapiens
  siRNA target sequence for DHX29 (NM_019030.1,1356-1374).
gatgatgtcctggtagtat

SEQ ID NO: 59677 - DNA, 19 bp, Homo sapiens
  siRNA target sequence for DHX29 (NM_019030.1,1368-1386).
gtagtatgccctacaatct

SEQ ID NO: 59678 - DNA, 19 bp, Homo sapiens
  siRNA target sequence for DHX29 (NM_019030.1,1371-1389).
gtatgccctacaatcttaa

SEQ ID NO: 59679 - DNA, 19 bp, Homo sapiens
  siRNA target sequence for DHX29 (NM_019030.1,1375-1393).
gccctacaatcttaacaga

SEQ ID NO: 59680 - DNA, 19 bp, Homo sapiens
  siRNA target sequence for DHX29 (NM_019030.1,1412-1430).
gcacctgggagctacttta

SEQ ID NO: 59681 - DNA, 19 bp, Homo sapiens
  siRNA target sequence for DHX29 (NM_019030.1,1431-1449).
gccctttaccgtttagtta

SEQ ID NO: 59682 - DNA, 19 bp, Homo sapiens
  siRNA target sequence for DHX29 (NM_019030.1,1432-1450).
ccctttaccgtttagttaa

SEQ ID NO: 59683 - DNA, 19 bp, Homo sapiens
  siRNA target sequence for DHX29 (NM_019030.1,1433-1451).
cctttaccgtttagttaaa

SEQ ID NO: 59684 - DNA, 19 bp, Homo sapiens
  siRNA target sequence for DHX29 (NM_019030.1,1479-1497).
cccacttaccgagatgttt

SEQ ID NO: 59685 - DNA, 19 bp, Homo sapiens
  siRNA target sequence for DHX29 (NM_019030.1,1553-1571).
caataaaccacgtgatctt

SEQ ID NO: 59686 - DNA, 19 bp, Homo sapiens
  siRNA target sequence for DHX29 (NM_019030.1,1683-1701).
gtttcggatgaggattttt

SEQ ID NO: 59687 - DNA, 19 bp, Homo sapiens
  siRNA target sequence for DHX29 (NM_019030.1,1746-1764).
gttagaaacctctttagaa

SEQ ID NO: 59688 - DNA, 19 bp, Homo sapiens
  siRNA target sequence for DHX29 (NM_019030.1,1774-1792).
gcacacctaagtatcagaa

SEQ ID NO: 59689 - DNA, 19 bp, Homo sapiens
  siRNA target sequence for DHX29 (NM_019030.1,1775-1793).
cacacctaagtatcagaaa

SEQ ID NO: 59690 - DNA, 19 bp, Homo sapiens
  siRNA target sequence for DHX29 (NM_019030.1,1780-1798).
ctaagtatcagaaacttct

SEQ ID NO: 59691 - DNA, 19 bp, Homo sapiens
  siRNA target sequence for DHX29 (NM_019030.1,1835-1853).
ggactcaattgttgaaact

SEQ ID NO: 59692 - DNA, 19 bp, Homo sapiens
  siRNA target sequence for DHX29 (NM_019030.1,1960-1978).
caagtaaatgtaacattgt

SEQ ID NO: 59693 - DNA, 19 bp, Homo sapiens
  siRNA target sequence for DHX29 (NM_019030.1,2096-2114).
ggaatctcgagcttgtgaa

SEQ ID NO: 59694 - DNA, 19 bp, Homo sapiens
  siRNA target sequence for DHX29 (NM_019030.1,2097-2115).
gaatctcgagcttgtgaat

SEQ ID NO: 59695 - DNA, 19 bp, Homo sapiens
  siRNA target sequence for DHX29 (NM_019030.1,2112-2130).
gaatctaccaggttactct

SEQ ID NO: 59696 - DNA, 19 bp, Homo sapiens
  siRNA target sequence for DHX29 (NM_019030.1,2120-2138).
caggttactctattgtaca

SEQ ID NO: 59697 - DNA, 19 bp, Homo sapiens
  siRNA target sequence for DHX29 (NM_019030.1,2182-2200).
gtaatgtgtctcatgttat

SEQ ID NO: 59698 - DNA, 19 bp, Homo sapiens
  siRNA target sequence for DHX29 (NM_019030.1,2233-2251).
cagacttcctactaattat

SEQ ID NO: 59699 - DNA, 19 bp, Homo sapiens
  siRNA target sequence for DHX29 (NM_019030.1,2235-2253).
gacttcctactaattatct

SEQ ID NO: 59700 - DNA, 19 bp, Homo sapiens
  siRNA target sequence for DHX29 (NM_019030.1,2283-2301).
ctacacttgattctaatga

SEQ ID NO: 59701 - DNA, 19 bp, Homo sapiens
  siRNA target sequence for DHX29 (NM_019030.1,2317-2335).
gcgaaaaattttctacata

SEQ ID NO: 59702 - DNA, 19 bp, Homo sapiens
  siRNA target sequence for DHX29 (NM_019030.1,2387-2405).
ggtttttcatcttgaagat

SEQ ID NO: 59703 - DNA, 19 bp, Homo sapiens
  siRNA target sequence for DHX29 (NM_019030.1,2388-2406).
gtttttcatcttgaagata

SEQ ID NO: 59704 - DNA, 19 bp, Homo sapiens
  siRNA target sequence for DHX29 (NM_019030.1,2419-2437).
caggctttgtactggaaaa

SEQ ID NO: 59705 - DNA, 19 bp, Homo sapiens
  siRNA target sequence for DHX29 (NM_019030.1,2441-2459).
ctcagaatattgtcagaaa

SEQ ID NO: 59706 - DNA, 19 bp, Homo sapiens
  siRNA target sequence for DHX29 (NM_019030.1,2551-2569).
gagcacatgctgatttaaa

SEQ ID NO: 59707 - DNA, 19 bp, Homo sapiens
  siRNA target sequence for DHX29 (NM_019030.1,2571-2589).
ccattttaccaaaagtaca

SEQ ID NO: 59708 - DNA, 19 bp, Homo sapiens
  siRNA target sequence for DHX29 (NM_019030.1,2594-2612).
ccgcactcagcatgctatt

SEQ ID NO: 59709 - DNA, 19 bp, Homo sapiens
  siRNA target sequence for DHX29 (NM_019030.1,2596-2614).
gcactcagcatgctattct

SEQ ID NO: 59710 - DNA, 19 bp, Homo sapiens
  siRNA target sequence for DHX29 (NM_019030.1,2597-2615).
cactcagcatgctattcta

SEQ ID NO: 59711 - DNA, 19 bp, Homo sapiens
  siRNA target sequence for DHX29 (NM_019030.1,2604-2622).
catgctattctatacatga

SEQ ID NO: 59712 - DNA, 19 bp, Homo sapiens
  siRNA target sequence for DHX29 (NM_019030.1,2654-2672).
ggaacttcttgcatactta

SEQ ID NO: 59713 - DNA, 19 bp, Homo sapiens
  siRNA target sequence for DHX29 (NM_019030.1,2683-2701).
cccaattcagaaatattga

SEQ ID NO: 59714 - DNA, 19 bp, Homo sapiens
  siRNA target sequence for DHX29 (NM_019030.1,2700-2718).
gaaggagcagtattgatct

SEQ ID NO: 59715 - DNA, 19 bp, Homo sapiens
  siRNA target sequence for DHX29 (NM_019030.1,2703-2721).
ggagcagtattgatctttt

SEQ ID NO: 59716 - DNA, 19 bp, Homo sapiens
  siRNA target sequence for DHX29 (NM_019030.1,2744-2762).
gcagttgtatgatcttcta

SEQ ID NO: 59717 - DNA, 19 bp, Homo sapiens
  siRNA target sequence for DHX29 (NM_019030.1,2785-2803).
ctgaacgatataaagtgat

SEQ ID NO: 59718 - DNA, 19 bp, Homo sapiens
  siRNA target sequence for DHX29 (NM_019030.1,2876-2894).
gattgttttagcaaccaat

SEQ ID NO: 59719 - DNA, 19 bp, Homo sapiens
  siRNA target sequence for DHX29 (NM_019030.1,2903-2921).
gacgggtatcactattcct

SEQ ID NO: 59720 - DNA, 19 bp, Homo sapiens
  siRNA target sequence for DHX29 (NM_019030.1,2912-2930).
cactattcctgatgttgta

SEQ ID NO: 59721 - DNA, 19 bp, Homo sapiens
  siRNA target sequence for DHX29 (NM_019030.1,2914-2932).
ctattcctgatgttgtatt

SEQ ID NO: 59722 - DNA, 19 bp, Homo sapiens
  siRNA target sequence for DHX29 (NM_019030.1,2999-3017).
ggagacgtttgtcagtaaa

SEQ ID NO: 59723 - DNA, 19 bp, Homo sapiens
  siRNA target sequence for DHX29 (NM_019030.1,3054-3072).
gtcagagatggcttctgtt

SEQ ID NO: 59724 - DNA, 19 bp, Homo sapiens
  siRNA target sequence for DHX29 (NM_019030.1,3099-3117).
gaaggctttatggattatt

SEQ ID NO: 59725 - DNA, 19 bp, Homo sapiens
  siRNA target sequence for DHX29 (NM_019030.1,3103-3121).
gctttatggattattctgt

SEQ ID NO: 59726 - DNA, 19 bp, Homo sapiens
  siRNA target sequence for DHX29 (NM_019030.1,3138-3156).
gtacctttggaggaattat

SEQ ID NO: 59727 - DNA, 19 bp, Homo sapiens
  siRNA target sequence for DHX29 (NM_019030.1,3147-3165).
gaggaattatgccttcata

SEQ ID NO: 59728 - DNA, 19 bp, Homo sapiens
  siRNA target sequence for DHX29 (NM_019030.1,3236-3254).
gatcagcaatgcaatgaat

SEQ ID NO: 59729 - DNA, 19 bp, Homo sapiens
  siRNA target sequence for DHX29 (NM_019030.1,3311-3329).
ccaacaccttgcagcttta

SEQ ID NO: 59730 - DNA, 19 bp, Homo sapiens
  siRNA target sequence for DHX29 (NM_019030.1,3439-3457).
caccaattggtcgaaaaga

SEQ ID NO: 59731 - DNA, 19 bp, Homo sapiens
  siRNA target sequence for DHX29 (NM_019030.1,3442-3460).
caattggtcgaaaagatga

SEQ ID NO: 59732 - DNA, 19 bp, Homo sapiens
  siRNA target sequence for DHX29 (NM_019030.1,3459-3477).
gaagcagatcttgcaaaat

SEQ ID NO: 59733 - DNA, 19 bp, Homo sapiens
  siRNA target sequence for DHX29 (NM_019030.1,3503-3521).
ccacctgacgatctacaat

SEQ ID NO: 59734 - DNA, 19 bp, Homo sapiens
  siRNA target sequence for DHX29 (NM_019030.1,3507-3525).
ctgacgatctacaatgcat

SEQ ID NO: 59735 - DNA, 19 bp, Homo sapiens
  siRNA target sequence for DHX29 (NM_019030.1,3509-3527).
gacgatctacaatgcatat

SEQ ID NO: 59736 - DNA, 19 bp, Homo sapiens
  siRNA target sequence for DHX29 (NM_019030.1,3511-3529).
cgatctacaatgcatatct

SEQ ID NO: 59737 - DNA, 19 bp, Homo sapiens
  siRNA target sequence for DHX29 (NM_019030.1,3512-3530).
gatctacaatgcatatcta

SEQ ID NO: 59738 - DNA, 19 bp, Homo sapiens
  siRNA target sequence for DHX29 (NM_019030.1,3536-3554).
gaagaaagcacgacaagaa

SEQ ID NO: 59739 - DNA, 19 bp, Homo sapiens
  siRNA target sequence for DHX29 (NM_019030.1,3549-3567).
caagaaggaggttatcgtt

SEQ ID NO: 59740 - DNA, 19 bp, Homo sapiens
  siRNA target sequence for DHX29 (NM_019030.1,3558-3576).
ggttatcgttctgaaatca

SEQ ID NO: 59741 - DNA, 19 bp, Homo sapiens
  siRNA target sequence for DHX29 (NM_019030.1,3564-3582).
cgttctgaaatcacatact

SEQ ID NO: 59742 - DNA, 19 bp, Homo sapiens
  siRNA target sequence for DHX29 (NM_019030.1,3581-3599).
ctgccggaggaactttctt

SEQ ID NO: 59743 - DNA, 19 bp, Homo sapiens
  siRNA target sequence for DHX29 (NM_019030.1,3583-3601).
gccggaggaactttcttaa

SEQ ID NO: 59744 - DNA, 19 bp, Homo sapiens
  siRNA target sequence for DHX29 (NM_019030.1,3584-3602).
ccggaggaactttcttaat

SEQ ID NO: 59745 - DNA, 19 bp, Homo sapiens
  siRNA target sequence for DHX29 (NM_019030.1,3732-3750).
caagaaattgcccttctta

SEQ ID NO: 59746 - DNA, 19 bp, Homo sapiens
  siRNA target sequence for DHX29 (NM_019030.1,3764-3782).
ggctggactgtatgacaat

SEQ ID NO: 59747 - DNA, 19 bp, Homo sapiens
  siRNA target sequence for DHX29 (NM_019030.1,3783-3801).
gtggggaagataatctata

SEQ ID NO: 59748 - DNA, 19 bp, Homo sapiens
  siRNA target sequence for DHX29 (NM_019030.1,3785-3803).
ggggaagataatctataca

SEQ ID NO: 59749 - DNA, 19 bp, Homo sapiens
  siRNA target sequence for DHX29 (NM_019030.1,3786-3804).
gggaagataatctatacaa

SEQ ID NO: 59750 - DNA, 19 bp, Homo sapiens
  siRNA target sequence for DHX29 (NM_019030.1,3791-3809).
gataatctatacaaagtca

SEQ ID NO: 59751 - DNA, 19 bp, Homo sapiens
  siRNA target sequence for DHX29 (NM_019030.1,3867-3885).
gtacacccatcctcagtaa

SEQ ID NO: 59752 - DNA, 19 bp, Homo sapiens
  siRNA target sequence for DHX29 (NM_019030.1,3872-3890).
cccatcctcagtaaatcga

SEQ ID NO: 59753 - DNA, 19 bp, Homo sapiens
  siRNA target sequence for DHX29 (NM_019030.1,3877-3895).
cctcagtaaatcgagattt

SEQ ID NO: 59754 - DNA, 19 bp, Homo sapiens
  siRNA target sequence for DHX29 (NM_019030.1,3934-3952).
ggtatgccagagtgtattt

SEQ ID NO: 59755 - DNA, 19 bp, Homo sapiens
  siRNA target sequence for DHX29 (NM_019030.1,3965-3983).
cctaataaccccttttcca

SEQ ID NO: 59756 - DNA, 19 bp, Homo sapiens
  siRNA target sequence for DHX29 (NM_019030.1,3997-4015).
gtggtgatatagaagttca

SEQ ID NO: 59757 - DNA, 19 bp, Homo sapiens
  siRNA target sequence for DHX29 (NM_019030.1,4017-4035).
caccgagaacgtcttcttt

SEQ ID NO: 59758 - DNA, 19 bp, Homo sapiens
  siRNA target sequence for DHX29 (NM_019030.1,4021-4039).
gagaacgtcttctttctat

SEQ ID NO: 59759 - DNA, 19 bp, Homo sapiens
  siRNA target sequence for DHX29 (NM_019030.1,4173-4191).
cagatcattacggaattga

SEQ ID NO: 59760 - DNA, 19 bp, Homo sapiens
  siRNA target sequence for DHX29 (NM_019030.1,4175-4193).
gatcattacggaattgata

SEQ ID NO: 59761 - DNA, 19 bp, Homo sapiens
  siRNA target sequence for DHX33 (NM_020162.2,323-341).
ccctcagtacctgtatgaa

SEQ ID NO: 59762 - DNA, 19 bp, Homo sapiens
  siRNA target sequence for DHX33 (NM_020162.2,350-368).
cagccgccagggcatcatt

SEQ ID NO: 59763 - DNA, 19 bp, Homo sapiens
  siRNA target sequence for DHX33 (NM_020162.2,417-435).
gtctcagatgagaagagaa

SEQ ID NO: 59764 - DNA, 19 bp, Homo sapiens
  siRNA target sequence for DHX33 (NM_020162.2,458-476).
ctatacagtgcgctttgat

SEQ ID NO: 59765 - DNA, 19 bp, Homo sapiens
  siRNA target sequence for DHX33 (NM_020162.2,711-729).
gacctgttctctcagtatt

SEQ ID NO: 59766 - DNA, 19 bp, Homo sapiens
  siRNA target sequence for DHX33 (NM_020162.2,714-732).
ctgttctctcagtatttca

SEQ ID NO: 59767 - DNA, 19 bp, Homo sapiens
  siRNA target sequence for DHX33 (NM_020162.2,768-786).
catccgatccaggtgtttt

SEQ ID NO: 59768 - DNA, 19 bp, Homo sapiens
  siRNA target sequence for DHX33 (NM_020162.2,771-789).
ccgatccaggtgttttaca

SEQ ID NO: 59769 - DNA, 19 bp, Homo sapiens
  siRNA target sequence for DHX33 (NM_020162.2,917-935).
caagacgtgccgagacatt

SEQ ID NO: 59770 - DNA, 19 bp, Homo sapiens
  siRNA target sequence for DHX33 (NM_020162.2,922-940).
cgtgccgagacattgcaaa

SEQ ID NO: 59771 - DNA, 19 bp, Homo sapiens
  siRNA target sequence for DHX33 (NM_020162.2,1039-1057).
gctatcgcaaagtgatcat

SEQ ID NO: 59772 - DNA, 19 bp, Homo sapiens
  siRNA target sequence for DHX33 (NM_020162.2,1040-1058).
ctatcgcaaagtgatcatt

SEQ ID NO: 59773 - DNA, 19 bp, Homo sapiens
  siRNA target sequence for DHX33 (NM_020162.2,1044-1062).
cgcaaagtgatcatttcaa

SEQ ID NO: 59774 - DNA, 19 bp, Homo sapiens
  siRNA target sequence for DHX33 (NM_020162.2,1074-1092).
gaaacctccataaccatta

SEQ ID NO: 59775 - DNA, 19 bp, Homo sapiens
  siRNA target sequence for DHX33 (NM_020162.2,1124-1142).
ggttaaagcaaagaagtat

SEQ ID NO: 59776 - DNA, 19 bp, Homo sapiens
  siRNA target sequence for DHX33 (NM_020162.2,1171-1189).
cagtgcagcgggtatcgaa

SEQ ID NO: 59777 - DNA, 19 bp, Homo sapiens
  siRNA target sequence for DHX33 (NM_020162.2,1438-1456).
gtgctcttgaacataagga

SEQ ID NO: 59778 - DNA, 19 bp, Homo sapiens
  siRNA target sequence for DHX33 (NM_020162.2,1474-1492).
ctccaatgggaagaaagat

SEQ ID NO: 59779 - DNA, 19 bp, Homo sapiens
  siRNA target sequence for DHX33 (NM_020162.2,1490-1508).
gatggcagcatttccttta

SEQ ID NO: 59780 - DNA, 19 bp, Homo sapiens
  siRNA target sequence for DHX33 (NM_020162.2,1563-1581).
gagatcctgaccattgtct

SEQ ID NO: 59781 - DNA, 19 bp, Homo sapiens
  siRNA target sequence for DHX33 (NM_020162.2,1647-1665).
cgcaagaagttcatatcca

SEQ ID NO: 59782 - DNA, 19 bp, Homo sapiens
  siRNA target sequence for DHX33 (NM_020162.2,1715-1733).
cctaggcggaaataaggat

SEQ ID NO: 59783 - DNA, 19 bp, Homo sapiens
  siRNA target sequence for DHX33 (NM_020162.2,1730-1748).
ggattggtgcaaagagaat

SEQ ID NO: 59784 - DNA, 19 bp, Homo sapiens
  siRNA target sequence for DHX33 (NM_020162.2,1731-1749).
gattggtgcaaagagaatt

SEQ ID NO: 59785 - DNA, 19 bp, Homo sapiens
  siRNA target sequence for DHX33 (NM_020162.2,2041-2059).
gggacctctgcgtcataga

SEQ ID NO: 59786 - DNA, 19 bp, Homo sapiens
  siRNA target sequence for DHX33 (NM_020162.2,2042-2060).
ggacctctgcgtcatagat

SEQ ID NO: 59787 - DNA, 19 bp, Homo sapiens
  siRNA target sequence for DHX33 (NM_020162.2,2079-2097).
gctgcccctgagtacttta

SEQ ID NO: 59788 - DNA, 19 bp, Homo sapiens
  siRNA target sequence for DHX33 (NM_020162.2,2082-2100).
gcccctgagtactttagga

SEQ ID NO: 59789 - DNA, 19 bp, Homo sapiens
  siRNA target sequence for DHX33 (NM_020162.2,2106-2124).
ctgagaaccgccagaaact

SEQ ID NO: 59790 - DNA, 19 bp, Homo sapiens
  siRNA target sequence for DHX35 (NM_021931.2,109-127).
ctgggacaacggttgttta

SEQ ID NO: 59791 - DNA, 19 bp, Homo sapiens
  siRNA target sequence for DHX35 (NM_021931.2,111-129).
gggacaacggttgtttaca

SEQ ID NO: 59792 - DNA, 19 bp, Homo sapiens
  siRNA target sequence for DHX35 (NM_021931.2,112-130).
ggacaacggttgtttacaa

SEQ ID NO: 59793 - DNA, 19 bp, Homo sapiens
  siRNA target sequence for DHX35 (NM_021931.2,165-183).
cagaagctgccggtattca

SEQ ID NO: 59794 - DNA, 19 bp, Homo sapiens
  siRNA target sequence for DHX35 (NM_021931.2,171-189).
ctgccggtattcaagctta

SEQ ID NO: 59795 - DNA, 19 bp, Homo sapiens
  siRNA target sequence for DHX35 (NM_021931.2,175-193).
cggtattcaagcttaggaa

SEQ ID NO: 59796 - DNA, 19 bp, Homo sapiens
  siRNA target sequence for DHX35 (NM_021931.2,340-358).
gagtggctgctgttacagt

SEQ ID NO: 59797 - DNA, 19 bp, Homo sapiens
  siRNA target sequence for DHX35 (NM_021931.2,448-466).
ccacgagaattaagtttct

SEQ ID NO: 59798 - DNA, 19 bp, Homo sapiens
  siRNA target sequence for DHX35 (NM_021931.2,494-512).
gatggttgatccgttgtta

SEQ ID NO: 59799 - DNA, 19 bp, Homo sapiens
  siRNA target sequence for DHX35 (NM_021931.2,497-515).
ggttgatccgttgttaaca

SEQ ID NO: 59800 - DNA, 19 bp, Homo sapiens
  siRNA target sequence for DHX35 (NM_021931.2,498-516).
gttgatccgttgttaacaa

SEQ ID NO: 59801 - DNA, 19 bp, Homo sapiens
  siRNA target sequence for DHX35 (NM_021931.2,501-519).
gatccgttgttaacaaaat

SEQ ID NO: 59802 - DNA, 19 bp, Homo sapiens
  siRNA target sequence for DHX35 (NM_021931.2,573-591).
gccattggcttgctaaaaa

SEQ ID NO: 59803 - DNA, 19 bp, Homo sapiens
  siRNA target sequence for DHX35 (NM_021931.2,607-625).
gaggggatcttcgattgat

SEQ ID NO: 59804 - DNA, 19 bp, Homo sapiens
  siRNA target sequence for DHX35 (NM_021931.2,610-628).
gggatcttcgattgattgt

SEQ ID NO: 59805 - DNA, 19 bp, Homo sapiens
  siRNA target sequence for DHX35 (NM_021931.2,611-629).
ggatcttcgattgattgta

SEQ ID NO: 59806 - DNA, 19 bp, Homo sapiens
  siRNA target sequence for DHX35 (NM_021931.2,690-708).
gatccagcaagggatacat

SEQ ID NO: 59807 - DNA, 19 bp, Homo sapiens
  siRNA target sequence for DHX35 (NM_021931.2,706-724).
catgtgtgatccttacagt

SEQ ID NO: 59808 - DNA, 19 bp, Homo sapiens
  siRNA target sequence for DHX35 (NM_021931.2,721-739).
cagtggaagggagaacatt

SEQ ID NO: 59809 - DNA, 19 bp, Homo sapiens
  siRNA target sequence for DHX35 (NM_021931.2,736-754).
catttccggtggatatctt

SEQ ID NO: 59810 - DNA, 19 bp, Homo sapiens
  siRNA target sequence for DHX35 (NM_021931.2,771-789).
gttccagattatatcaaat

SEQ ID NO: 59811 - DNA, 19 bp, Homo sapiens
  siRNA target sequence for DHX35 (NM_021931.2,797-815).
cgaaactgtggtgaaaatt

SEQ ID NO: 59812 - DNA, 19 bp, Homo sapiens
  siRNA target sequence for DHX35 (NM_021931.2,827-845).
gggagacggagacgtttta

SEQ ID NO: 59813 - DNA, 19 bp, Homo sapiens
  siRNA target sequence for DHX35 (NM_021931.2,831-849).
gacggagacgttttagcat

SEQ ID NO: 59814 - DNA, 19 bp, Homo sapiens
  siRNA target sequence for DHX35 (NM_021931.2,833-851).
cggagacgttttagcattt

SEQ ID NO: 59815 - DNA, 19 bp, Homo sapiens
  siRNA target sequence for DHX35 (NM_021931.2,835-853).
gagacgttttagcatttct

SEQ ID NO: 59816 - DNA, 19 bp, Homo sapiens
  siRNA target sequence for DHX35 (NM_021931.2,839-857).
cgttttagcatttcttact

SEQ ID NO: 59817 - DNA, 19 bp, Homo sapiens
  siRNA target sequence for DHX35 (NM_021931.2,915-933).
gctcgcactgggatgaaga

SEQ ID NO: 59818 - DNA, 19 bp, Homo sapiens
  siRNA target sequence for DHX35 (NM_021931.2,941-959).
ccgagttctccccatgtat

SEQ ID NO: 59819 - DNA, 19 bp, Homo sapiens
  siRNA target sequence for DHX35 (NM_021931.2,969-987).
ccttcctttgagcaaatga

SEQ ID NO: 59820 - DNA, 19 bp, Homo sapiens
  siRNA target sequence for DHX35 (NM_021931.2,1012-1030).
gtgtcagaaaggtgatagt

SEQ ID NO: 59821 - DNA, 19 bp, Homo sapiens
  siRNA target sequence for DHX35 (NM_021931.2,1043-1061).
ggcagaaacctctatcaca

SEQ ID NO: 59822 - DNA, 19 bp, Homo sapiens
  siRNA target sequence for DHX35 (NM_021931.2,1044-1062).
gcagaaacctctatcacaa

SEQ ID NO: 59823 - DNA, 19 bp, Homo sapiens
  siRNA target sequence for DHX35 (NM_021931.2,1045-1063).
cagaaacctctatcacaat

SEQ ID NO: 59824 - DNA, 19 bp, Homo sapiens
  siRNA target sequence for DHX35 (NM_021931.2,1100-1118).
gaaactccgagcctacaat

SEQ ID NO: 59825 - DNA, 19 bp, Homo sapiens
  siRNA target sequence for DHX35 (NM_021931.2,1197-1215).
cgtagtcgctcgggaaaat

SEQ ID NO: 59826 - DNA, 19 bp, Homo sapiens
  siRNA target sequence for DHX35 (NM_021931.2,1201-1219).
gtcgctcgggaaaatgtta

SEQ ID NO: 59827 - DNA, 19 bp, Homo sapiens
  siRNA target sequence for DHX35 (NM_021931.2,1216-1234).
gttatcgcctttatacaga

SEQ ID NO: 59828 - DNA, 19 bp, Homo sapiens
  siRNA target sequence for DHX35 (NM_021931.2,1272-1290).
gagatgcagcgtagtaatt

SEQ ID NO: 59829 - DNA, 19 bp, Homo sapiens
  siRNA target sequence for DHX35 (NM_021931.2,1310-1328).
gctgaaagcactaggaatt

SEQ ID NO: 59830 - DNA, 19 bp, Homo sapiens
  siRNA target sequence for DHX35 (NM_021931.2,1338-1356).
ctcaggttccacttcatgt

SEQ ID NO: 59831 - DNA, 19 bp, Homo sapiens
  siRNA target sequence for DHX35 (NM_021931.2,1383-1401).
caagccttggagttactgt

SEQ ID NO: 59832 - DNA, 19 bp, Homo sapiens
  siRNA target sequence for DHX35 (NM_021931.2,1517-1535).
cggctgttctcaggaaatt

SEQ ID NO: 59833 - DNA, 19 bp, Homo sapiens
  siRNA target sequence for DHX35 (NM_021931.2,1525-1543).
ctcaggaaattctaagcat

SEQ ID NO: 59834 - DNA, 19 bp, Homo sapiens
  siRNA target sequence for DHX35 (NM_021931.2,1646-1664).
cctcactatgctcaatata

SEQ ID NO: 59835 - DNA, 19 bp, Homo sapiens
  siRNA target sequence for DHX35 (NM_021931.2,1647-1665).
ctcactatgctcaatatat

SEQ ID NO: 59836 - DNA, 19 bp, Homo sapiens
  siRNA target sequence for DHX35 (NM_021931.2,1737-1755).
gtcagagctgcgactgtaa

SEQ ID NO: 59837 - DNA, 19 bp, Homo sapiens
  siRNA target sequence for DHX35 (NM_021931.2,1739-1757).
cagagctgcgactgtaaga

SEQ ID NO: 59838 - DNA, 19 bp, Homo sapiens
  siRNA target sequence for DHX35 (NM_021931.2,1741-1759).
gagctgcgactgtaagaga

SEQ ID NO: 59839 - DNA, 19 bp, Homo sapiens
  siRNA target sequence for DHX35 (NM_021931.2,1746-1764).
gcgactgtaagagaacaat

SEQ ID NO: 59840 - DNA, 19 bp, Homo sapiens
  siRNA target sequence for DHX35 (NM_021931.2,1750-1768).
ctgtaagagaacaattgaa

SEQ ID NO: 59841 - DNA, 19 bp, Homo sapiens
  siRNA target sequence for DHX35 (NM_021931.2,1788-1806).
caagtgcccaggaagtcta

SEQ ID NO: 59842 - DNA, 19 bp, Homo sapiens
  siRNA target sequence for DHX35 (NM_021931.2,1793-1811).
gcccaggaagtctagtgaa

SEQ ID NO: 59843 - DNA, 19 bp, Homo sapiens
  siRNA target sequence for DHX35 (NM_021931.2,1859-1877).
caatgcagcgaggtttcat

SEQ ID NO: 59844 - DNA, 19 bp, Homo sapiens
  siRNA target sequence for DHX35 (NM_021931.2,1957-1975).
cgcctcgctgggtcatcta

SEQ ID NO: 59845 - DNA, 19 bp, Homo sapiens
  siRNA target sequence for DHX35 (NM_021931.2,1960-1978).
ctcgctgggtcatctataa

SEQ ID NO: 59846 - DNA, 19 bp, Homo sapiens
  siRNA target sequence for DHX35 (NM_021931.2,1963-1981).
gctgggtcatctataacga

SEQ ID NO: 59847 - DNA, 19 bp, Homo sapiens
  siRNA target sequence for DHX35 (NM_021931.2,1968-1986).
gtcatctataacgaagtta

SEQ ID NO: 59848 - DNA, 19 bp, Homo sapiens
  siRNA target sequence for DHX35 (NM_021931.2,1970-1988).
catctataacgaagttata

SEQ ID NO: 59849 - DNA, 19 bp, Homo sapiens
  siRNA target sequence for DHX35 (NM_021931.2,2045-2063).
ggagctggctccacacttt

SEQ ID NO: 59850 - DNA, 19 bp, Homo sapiens
  siRNA target sequence for DHX35 (NM_021931.2,2046-2064).
gagctggctccacactttt

SEQ ID NO: 59851 - DNA, 19 bp, Homo sapiens
  siRNA target sequence for DHX35 (NM_021931.2,2048-2066).
gctggctccacacttttat

SEQ ID NO: 59852 - DNA, 19 bp, Homo sapiens
  siRNA target sequence for DHX35 (NM_021931.2,2051-2069).
ggctccacacttttatcaa

SEQ ID NO: 59853 - DNA, 19 bp, Homo sapiens
  siRNA target sequence for DHX36 (NM_020865.1,78-96).
gttatgactaccatcagaa

SEQ ID NO: 59854 - DNA, 19 bp, Homo sapiens
  siRNA target sequence for DHX36 (NM_020865.1,261-279).
gcatgtggtacgcgaaaaa

SEQ ID NO: 59855 - DNA, 19 bp, Homo sapiens
  siRNA target sequence for DHX36 (NM_020865.1,262-280).
catgtggtacgcgaaaaaa

SEQ ID NO: 59856 - DNA, 19 bp, Homo sapiens
  siRNA target sequence for DHX36 (NM_020865.1,342-360).
gacgagaagaacaaattgt

SEQ ID NO: 59857 - DNA, 19 bp, Homo sapiens
  siRNA target sequence for DHX36 (NM_020865.1,353-371).
caaattgtacagttactga

SEQ ID NO: 59858 - DNA, 19 bp, Homo sapiens
  siRNA target sequence for DHX36 (NM_020865.1,375-393).
ctgttcaagcgaagaatga

SEQ ID NO: 59859 - DNA, 19 bp, Homo sapiens
  siRNA target sequence for DHX36 (NM_020865.1,377-395).
gttcaagcgaagaatgata

SEQ ID NO: 59860 - DNA, 19 bp, Homo sapiens
  siRNA target sequence for DHX36 (NM_020865.1,398-416).
gagtcagaagcacagatat

SEQ ID NO: 59861 - DNA, 19 bp, Homo sapiens
  siRNA target sequence for DHX36 (NM_020865.1,440-458).
ggatacggtactgaagttt

SEQ ID NO: 59862 - DNA, 19 bp, Homo sapiens
  siRNA target sequence for DHX36 (NM_020865.1,450-468).
ctgaagtttctactaagaa

SEQ ID NO: 59863 - DNA, 19 bp, Homo sapiens
  siRNA target sequence for DHX36 (NM_020865.1,566-584).
cgagattctgagtatctct

SEQ ID NO: 59864 - DNA, 19 bp, Homo sapiens
  siRNA target sequence for DHX36 (NM_020865.1,695-713).
ccttcgtatggaatgcaaa

SEQ ID NO: 59865 - DNA, 19 bp, Homo sapiens
  siRNA target sequence for DHX36 (NM_020865.1,696-714).
cttcgtatggaatgcaaaa

SEQ ID NO: 59866 - DNA, 19 bp, Homo sapiens
  siRNA target sequence for DHX36 (NM_020865.1,699-717).
cgtatggaatgcaaaagga

SEQ ID NO: 59867 - DNA, 19 bp, Homo sapiens
  siRNA target sequence for DHX36 (NM_020865.1,776-794).
ggcaaaaccactcaagtta

SEQ ID NO: 59868 - DNA, 19 bp, Homo sapiens
  siRNA target sequence for DHX36 (NM_020865.1,786-804).
ctcaagttactcagttcat

SEQ ID NO: 59869 - DNA, 19 bp, Homo sapiens
  siRNA target sequence for DHX36 (NM_020865.1,795-813).
ctcagttcattttggataa

SEQ ID NO: 59870 - DNA, 19 bp, Homo sapiens
  siRNA target sequence for DHX36 (NM_020865.1,870-888).
gaattagtgccatttcagt

SEQ ID NO: 59871 - DNA, 19 bp, Homo sapiens
  siRNA target sequence for DHX36 (NM_020865.1,933-951).
gtaatagtactggatatca

SEQ ID NO: 59872 - DNA, 19 bp, Homo sapiens
  siRNA target sequence for DHX36 (NM_020865.1,964-982).
gagtcggttgccaaggaaa

SEQ ID NO: 59873 - DNA, 19 bp, Homo sapiens
  siRNA target sequence for DHX36 (NM_020865.1,979-997).
gaaacagggttctatctta

SEQ ID NO: 59874 - DNA, 19 bp, Homo sapiens
  siRNA target sequence for DHX36 (NM_020865.1,983-1001).
cagggttctatcttatact

SEQ ID NO: 59875 - DNA, 19 bp, Homo sapiens
  siRNA target sequence for DHX36 (NM_020865.1,985-1003).
gggttctatcttatactgt

SEQ ID NO: 59876 - DNA, 19 bp, Homo sapiens
  siRNA target sequence for DHX36 (NM_020865.1,986-1004).
ggttctatcttatactgta

SEQ ID NO: 59877 - DNA, 19 bp, Homo sapiens
  siRNA target sequence for DHX36 (NM_020865.1,1031-1049).
cagtcagacccgtatttgt

SEQ ID NO: 59878 - DNA, 19 bp, Homo sapiens
  siRNA target sequence for DHX36 (NM_020865.1,1040-1058).
ccgtatttgtccagtgtta

SEQ ID NO: 59879 - DNA, 19 bp, Homo sapiens
  siRNA target sequence for DHX36 (NM_020865.1,1042-1060).
gtatttgtccagtgttagt

SEQ ID NO: 59880 - DNA, 19 bp, Homo sapiens
  siRNA target sequence for DHX36 (NM_020865.1,1050-1068).
ccagtgttagtcatatcgt

SEQ ID NO: 59881 - DNA, 19 bp, Homo sapiens
  siRNA target sequence for DHX36 (NM_020865.1,1051-1069).
cagtgttagtcatatcgta

SEQ ID NO: 59882 - DNA, 19 bp, Homo sapiens
  siRNA target sequence for DHX36 (NM_020865.1,1059-1077).
gtcatatcgtacttgatga

SEQ ID NO: 59883 - DNA, 19 bp, Homo sapiens
  siRNA target sequence for DHX36 (NM_020865.1,1066-1084).
cgtacttgatgaaatccat

SEQ ID NO: 59884 - DNA, 19 bp, Homo sapiens
  siRNA target sequence for DHX36 (NM_020865.1,1099-1117).
gtcagatgttttaatgact

SEQ ID NO: 59885 - DNA, 19 bp, Homo sapiens
  siRNA target sequence for DHX36 (NM_020865.1,1127-1145).
gaccttctcaattttcgat

SEQ ID NO: 59886 - DNA, 19 bp, Homo sapiens
  siRNA target sequence for DHX36 (NM_020865.1,1148-1166).
gacttgaaagtaatattga

SEQ ID NO: 59887 - DNA, 19 bp, Homo sapiens
  siRNA target sequence for DHX36 (NM_020865.1,1213-1231).
ctgtccaatgatacatata

SEQ ID NO: 59888 - DNA, 19 bp, Homo sapiens
  siRNA target sequence for DHX36 (NM_020865.1,1222-1240).
gatacatatacctggtttt

SEQ ID NO: 59889 - DNA, 19 bp, Homo sapiens
  siRNA target sequence for DHX36 (NM_020865.1,1242-1260).
cctttccggttgtggaata

SEQ ID NO: 59890 - DNA, 19 bp, Homo sapiens
  siRNA target sequence for DHX36 (NM_020865.1,1243-1261).
ctttccggttgtggaatat

SEQ ID NO: 59891 - DNA, 19 bp, Homo sapiens
  siRNA target sequence for DHX36 (NM_020865.1,1339-1357).
catgcaagggcatgtaaat

SEQ ID NO: 59892 - DNA, 19 bp, Homo sapiens
  siRNA target sequence for DHX36 (NM_020865.1,1342-1360).
gcaagggcatgtaaataga

SEQ ID NO: 59893 - DNA, 19 bp, Homo sapiens
  siRNA target sequence for DHX36 (NM_020865.1,1397-1415).
cgttggccagattatgtaa

SEQ ID NO: 59894 - DNA, 19 bp, Homo sapiens
  siRNA target sequence for DHX36 (NM_020865.1,1417-1435).
ggaactgcgaagaaggtat

SEQ ID NO: 59895 - DNA, 19 bp, Homo sapiens
  siRNA target sequence for DHX36 (NM_020865.1,1443-1461).
gtactgtagatgttataga

SEQ ID NO: 59896 - DNA, 19 bp, Homo sapiens
  siRNA target sequence for DHX36 (NM_020865.1,1446-1464).
ctgtagatgttatagaaat

SEQ ID NO: 59897 - DNA, 19 bp, Homo sapiens
  siRNA target sequence for DHX36 (NM_020865.1,1504-1522).
cctcatccgatacattgtt

SEQ ID NO: 59898 - DNA, 19 bp, Homo sapiens
  siRNA target sequence for DHX36 (NM_020865.1,1505-1523).
ctcatccgatacattgttt

SEQ ID NO: 59899 - DNA, 19 bp, Homo sapiens
  siRNA target sequence for DHX36 (NM_020865.1,1539-1557).
gtgcgatactggtctttct

SEQ ID NO: 59900 - DNA, 19 bp, Homo sapiens
  siRNA target sequence for DHX36 (NM_020865.1,1559-1577).
ccaggctgggacaatatca

SEQ ID NO: 59901 - DNA, 19 bp, Homo sapiens
  siRNA target sequence for DHX36 (NM_020865.1,1567-1585).
ggacaatatcagcacttta

SEQ ID NO: 59902 - DNA, 19 bp, Homo sapiens
  siRNA target sequence for DHX36 (NM_020865.1,1581-1599).
ctttacatgatctcttgat

SEQ ID NO: 59903 - DNA, 19 bp, Homo sapiens
  siRNA target sequence for DHX36 (NM_020865.1,1597-1615).
gatgtcacaagtaatgttt

SEQ ID NO: 59904 - DNA, 19 bp, Homo sapiens
  siRNA target sequence for DHX36 (NM_020865.1,1650-1668).
cactgatgcctacagttaa

SEQ ID NO: 59905 - DNA, 19 bp, Homo sapiens
  siRNA target sequence for DHX36 (NM_020865.1,1672-1690).
gacacaggtgtttaaaaga

SEQ ID NO: 59906 - DNA, 19 bp, Homo sapiens
  siRNA target sequence for DHX36 (NM_020865.1,1698-1716).
ctggtgttcggaaaatagt

SEQ ID NO: 59907 - DNA, 19 bp, Homo sapiens
  siRNA target sequence for DHX36 (NM_020865.1,1700-1718).
ggtgttcggaaaatagtaa

SEQ ID NO: 59908 - DNA, 19 bp, Homo sapiens
  siRNA target sequence for DHX36 (NM_020865.1,1701-1719).
gtgttcggaaaatagtaat

SEQ ID NO: 59909 - DNA, 19 bp, Homo sapiens
  siRNA target sequence for DHX36 (NM_020865.1,1706-1724).
cggaaaatagtaattgcta

SEQ ID NO: 59910 - DNA, 19 bp, Homo sapiens
  siRNA target sequence for DHX36 (NM_020865.1,1729-1747).
cattgcggagactagcatt

SEQ ID NO: 59911 - DNA, 19 bp, Homo sapiens
  siRNA target sequence for DHX36 (NM_020865.1,1734-1752).
cggagactagcattaccat

SEQ ID NO: 59912 - DNA, 19 bp, Homo sapiens
  siRNA target sequence for DHX36 (NM_020865.1,1738-1756).
gactagcattaccatagat

SEQ ID NO: 59913 - DNA, 19 bp, Homo sapiens
  siRNA target sequence for DHX36 (NM_020865.1,1754-1772).
gatgatgtcgtttatgtga

SEQ ID NO: 59914 - DNA, 19 bp, Homo sapiens
  siRNA target sequence for DHX36 (NM_020865.1,1838-1856).
gagtgggttagtaaagcta

SEQ ID NO: 59915 - DNA, 19 bp, Homo sapiens
  siRNA target sequence for DHX36 (NM_020865.1,1840-1858).
gtgggttagtaaagctaat

SEQ ID NO: 59916 - DNA, 19 bp, Homo sapiens
  siRNA target sequence for DHX36 (NM_020865.1,1854-1872).
ctaatgccaaacagagaaa

SEQ ID NO: 59917 - DNA, 19 bp, Homo sapiens
  siRNA target sequence for DHX36 (NM_020865.1,2013-2031).
ggctaggtggaattgctta

SEQ ID NO: 59918 - DNA, 19 bp, Homo sapiens
  siRNA target sequence for DHX36 (NM_020865.1,2014-2032).
gctaggtggaattgcttat

SEQ ID NO: 59919 - DNA, 19 bp, Homo sapiens
  siRNA target sequence for DHX36 (NM_020865.1,2015-2033).
ctaggtggaattgcttatt

SEQ ID NO: 59920 - DNA, 19 bp, Homo sapiens
  siRNA target sequence for DHX36 (NM_020865.1,2061-2079).
caaatgaggcagtgttact

SEQ ID NO: 59921 - DNA, 19 bp, Homo sapiens
  siRNA target sequence for DHX36 (NM_020865.1,2098-2116).
ggagctgaacgctttggat

SEQ ID NO: 59922 - DNA, 19 bp, Homo sapiens
  siRNA target sequence for DHX36 (NM_020865.1,2099-2117).
gagctgaacgctttggata

SEQ ID NO: 59923 - DNA, 19 bp, Homo sapiens
  siRNA target sequence for DHX36 (NM_020865.1,2101-2119).
gctgaacgctttggataaa

SEQ ID NO: 59924 - DNA, 19 bp, Homo sapiens
  siRNA target sequence for DHX36 (NM_020865.1,2164-2182).
cgttgagccacatattgga

SEQ ID NO: 59925 - DNA, 19 bp, Homo sapiens
  siRNA target sequence for DHX36 (NM_020865.1,2221-2239).
cccagtactcactattgct

SEQ ID NO: 59926 - DNA, 19 bp, Homo sapiens
  siRNA target sequence for DHX36 (NM_020865.1,2238-2256).
ctgctagtctcagtttcaa

SEQ ID NO: 59927 - DNA, 19 bp, Homo sapiens
  siRNA target sequence for DHX36 (NM_020865.1,2241-2259).
ctagtctcagtttcaaaga

SEQ ID NO: 59928 - DNA, 19 bp, Homo sapiens
  siRNA target sequence for DHX36 (NM_020865.1,2250-2268).
gtttcaaagatccatttgt

SEQ ID NO: 59929 - DNA, 19 bp, Homo sapiens
  siRNA target sequence for DHX36 (NM_020865.1,2317-2335).
ggcaaaggatactagaagt

SEQ ID NO: 59930 - DNA, 19 bp, Homo sapiens
  siRNA target sequence for DHX36 (NM_020865.1,2382-2400).
ggcgacgtggtttcagata

SEQ ID NO: 59931 - DNA, 19 bp, Homo sapiens
  siRNA target sequence for DHX36 (NM_020865.1,2387-2405).
cgtggtttcagatacgaaa

SEQ ID NO: 59932 - DNA, 19 bp, Homo sapiens
  siRNA target sequence for DHX36 (NM_020865.1,2388-2406).
gtggtttcagatacgaaaa

SEQ ID NO: 59933 - DNA, 19 bp, Homo sapiens
  siRNA target sequence for DHX36 (NM_020865.1,2391-2409).
gtttcagatacgaaaagga

SEQ ID NO: 59934 - DNA, 19 bp, Homo sapiens
  siRNA target sequence for DHX36 (NM_020865.1,2504-2522).
gtaagcagtagaaatccta

SEQ ID NO: 59935 - DNA, 19 bp, Homo sapiens
  siRNA target sequence for DHX36 (NM_020865.1,2509-2527).
cagtagaaatcctaaagat

SEQ ID NO: 59936 - DNA, 19 bp, Homo sapiens
  siRNA target sequence for DHX36 (NM_020865.1,2596-2614).
caaagttgctaaaattcga

SEQ ID NO: 59937 - DNA, 19 bp, Homo sapiens
  siRNA target sequence for DHX36 (NM_020865.1,2603-2621).
gctaaaattcgactaaatt

SEQ ID NO: 59938 - DNA, 19 bp, Homo sapiens
  siRNA target sequence for DHX36 (NM_020865.1,2604-2622).
ctaaaattcgactaaattt

SEQ ID NO: 59939 - DNA, 19 bp, Homo sapiens
  siRNA target sequence for DHX36 (NM_020865.1,2641-2659).
ggtaaaagtttacacaaaa

SEQ ID NO: 59940 - DNA, 19 bp, Homo sapiens
  siRNA target sequence for DHX36 (NM_020865.1,2717-2735).
cactacaactggcttatct

SEQ ID NO: 59941 - DNA, 19 bp, Homo sapiens
  siRNA target sequence for DHX36 (NM_020865.1,2719-2737).
ctacaactggcttatctat

SEQ ID NO: 59942 - DNA, 19 bp, Homo sapiens
  siRNA target sequence for DHX36 (NM_020865.1,2727-2745).
ggcttatctatcacctaaa

SEQ ID NO: 59943 - DNA, 19 bp, Homo sapiens
  siRNA target sequence for DHX36 (NM_020865.1,2729-2747).
cttatctatcacctaaaga

SEQ ID NO: 59944 - DNA, 19 bp, Homo sapiens
  siRNA target sequence for DHX36 (NM_020865.1,2751-2769).
gaacaagcagtatatactt

SEQ ID NO: 59945 - DNA, 19 bp, Homo sapiens
  siRNA target sequence for DHX36 (NM_020865.1,2827-2845).
catccagaaggataacgat

SEQ ID NO: 59946 - DNA, 19 bp, Homo sapiens
  siRNA target sequence for DHX36 (NM_020865.1,2837-2855).
gataacgatcaggaaacta

SEQ ID NO: 59947 - DNA, 19 bp, Homo sapiens
  siRNA target sequence for DHX36 (NM_020865.1,2842-2860).
cgatcaggaaactattgct

SEQ ID NO: 59948 - DNA, 19 bp, Homo sapiens
  siRNA target sequence for DHX36 (NM_020865.1,3005-3023).
gcagtactgtcagctatta

SEQ ID NO: 59949 - DNA, 19 bp, Homo sapiens
  siRNA target sequence for DHX36 (NM_020865.1,3006-3024).
cagtactgtcagctattat

SEQ ID NO: 59950 - DNA, 19 bp, Homo sapiens
  siRNA target sequence for DHX36 (NM_020865.1,3011-3029).
ctgtcagctattatagact

SEQ ID NO: 59951 - DNA, 19 bp, Homo sapiens
  siRNA target sequence for DHX36 (NM_020865.1,3017-3035).
gctattatagacttgatca

SEQ ID NO: 59952 - DNA, 19 bp, Homo sapiens
  siRNA target sequence for DHX36 (NM_020865.1,3018-3036).
ctattatagacttgatcaa

SEQ ID NO: 59953 - DNA, 19 bp, Homo sapiens
  siRNA target sequence for DHX36 (NM_020865.1,3049-3067).
ggcaactcccaggaacttt

SEQ ID NO: 59954 - DNA, 19 bp, Homo sapiens
  siRNA target sequence for DHX36 (NM_020865.1,3072-3090).
cacgattccaggatggata

SEQ ID NO: 59955 - DNA, 19 bp, Homo sapiens
  siRNA target sequence for DHX37 (NM_032656.2,213-231).
cacgttgaagggagttgat

SEQ ID NO: 59956 - DNA, 19 bp, Homo sapiens
  siRNA target sequence for DHX37 (NM_032656.2,421-439).
gctgagatgagactctttt

SEQ ID NO: 59957 - DNA, 19 bp, Homo sapiens
  siRNA target sequence for DHX37 (NM_032656.2,459-477).
cactgggaaccgcatgtat

SEQ ID NO: 59958 - DNA, 19 bp, Homo sapiens
  siRNA target sequence for DHX37 (NM_032656.2,463-481).
gggaaccgcatgtatcaca

SEQ ID NO: 59959 - DNA, 19 bp, Homo sapiens
  siRNA target sequence for DHX37 (NM_032656.2,857-875).
caattctctccgaagaaca

SEQ ID NO: 59960 - DNA, 19 bp, Homo sapiens
  siRNA target sequence for DHX37 (NM_032656.2,862-880).
ctctccgaagaacaagtaa

SEQ ID NO: 59961 - DNA, 19 bp, Homo sapiens
  siRNA target sequence for DHX37 (NM_032656.2,954-972).
gcctcagtttctctatgaa

SEQ ID NO: 59962 - DNA, 19 bp, Homo sapiens
  siRNA target sequence for DHX37 (NM_032656.2,1054-1072).
gccaaggagatgaatctgt

SEQ ID NO: 59963 - DNA, 19 bp, Homo sapiens
  siRNA target sequence for DHX37 (NM_032656.2,1089-1107).
ctaccagatccggtatgaa

SEQ ID NO: 59964 - DNA, 19 bp, Homo sapiens
  siRNA target sequence for DHX37 (NM_032656.2,1145-1163).
cggatggtgtgctgcttaa

SEQ ID NO: 59965 - DNA, 19 bp, Homo sapiens
  siRNA target sequence for DHX37 (NM_032656.2,1146-1164).
ggatggtgtgctgcttaaa

SEQ ID NO: 59966 - DNA, 19 bp, Homo sapiens
  siRNA target sequence for DHX37 (NM_032656.2,1258-1276).
ctcctgtcccgcattgtga

SEQ ID NO: 59967 - DNA, 19 bp, Homo sapiens
  siRNA target sequence for DHX37 (NM_032656.2,1303-1321).
ctcaagctgctcatcatgt

SEQ ID NO: 59968 - DNA, 19 bp, Homo sapiens
  siRNA target sequence for DHX37 (NM_032656.2,1436-1454).
ggacaccgctggaagacta

SEQ ID NO: 59969 - DNA, 19 bp, Homo sapiens
  siRNA target sequence for DHX37 (NM_032656.2,1609-1627).
gacgacgatcagaaagact

SEQ ID NO: 59970 - DNA, 19 bp, Homo sapiens
  siRNA target sequence for DHX37 (NM_032656.2,1967-1985).
ccgagacgtcgcttaccat

SEQ ID NO: 59971 - DNA, 19 bp, Homo sapiens
  siRNA target sequence for DHX37 (NM_032656.2,2139-2157).
ctacaggctgtattcatct

SEQ ID NO: 59972 - DNA, 19 bp, Homo sapiens
  siRNA target sequence for DHX37 (NM_032656.2,2201-2219).
cccggaggcctgttgaaga

SEQ ID NO: 59973 - DNA, 19 bp, Homo sapiens
  siRNA target sequence for DHX37 (NM_032656.2,2207-2225).
ggcctgttgaagacttaat

SEQ ID NO: 59974 - DNA, 19 bp, Homo sapiens
  siRNA target sequence for DHX37 (NM_032656.2,2240-2258).
cgctcaacgttgaaaaggt

SEQ ID NO: 59975 - DNA, 19 bp, Homo sapiens
  siRNA target sequence for DHX37 (NM_032656.2,2781-2799).
gctgaccaccgcagtcaat

SEQ ID NO: 59976 - DNA, 19 bp, Homo sapiens
  siRNA target sequence for DHX37 (NM_032656.2,3002-3020).
ccagctccgtccttttcaa

SEQ ID NO: 59977 - DNA, 19 bp, Homo sapiens
  siRNA target sequence for DHX37 (NM_032656.2,3063-3081).
cactaagatgtacatgaaa

SEQ ID NO: 59978 - DNA, 19 bp, Homo sapiens
  siRNA target sequence for DHX37 (NM_032656.2,3125-3143).
cctcttactgccagtttga

SEQ ID NO: 59979 - DNA, 19 bp, Homo sapiens
  siRNA target sequence for DHX37 (NM_032656.2,3157-3175).
gaaccagcccctacatact

SEQ ID NO: 59980 - DNA, 19 bp, Homo sapiens
  siRNA target sequence for DHX37 (NM_032656.2,3246-3264).
catcgaggtggattttcca

SEQ ID NO: 59981 - DNA, 19 bp, Homo sapiens
  siRNA target sequence for DHX37 (NM_032656.2,3524-3542).
ccatgcaccccgatatcga

SEQ ID NO: 59982 - DNA, 19 bp, Homo sapiens
  siRNA target sequence for DHX40 (NM_024612.3,296-314).
ctccaacttttcctattca

SEQ ID NO: 59983 - DNA, 19 bp, Homo sapiens
  siRNA target sequence for DHX40 (NM_024612.3,348-366).
ggacaattcattccttatt

SEQ ID NO: 59984 - DNA, 19 bp, Homo sapiens
  siRNA target sequence for DHX40 (NM_024612.3,395-413).
caactcaactcccaaaata

SEQ ID NO: 59985 - DNA, 19 bp, Homo sapiens
  siRNA target sequence for DHX40 (NM_024612.3,466-484).
cgaaaagtagctgctatat

SEQ ID NO: 59986 - DNA, 19 bp, Homo sapiens
  siRNA target sequence for DHX40 (NM_024612.3,539-557).
gataccaagttcgttttga

SEQ ID NO: 59987 - DNA, 19 bp, Homo sapiens
  siRNA target sequence for DHX40 (NM_024612.3,544-562).
caagttcgttttgatgatt

SEQ ID NO: 59988 - DNA, 19 bp, Homo sapiens
  siRNA target sequence for DHX40 (NM_024612.3,1944-1962).
gcttaaacagcaaagtgat

SEQ ID NO: 59989 - DNA, 19 bp, Homo sapiens
  siRNA target sequence for DHX40 (NM_024612.3,1976-1994).
cctttgaaggccctaaaca

SEQ ID NO: 59990 - DNA, 19 bp, Homo sapiens
  siRNA target sequence for DHX40 (NM_024612.3,1985-2003).
gccctaaacatgaagtact

SEQ ID NO: 59991 - DNA, 19 bp, Homo sapiens
  siRNA target sequence for DHX40 (NM_024612.3,1986-2004).
ccctaaacatgaagtacta

SEQ ID NO: 59992 - DNA, 19 bp, Homo sapiens
  siRNA target sequence for DHX40 (NM_024612.3,2012-2030).
gtctttgtgcgggctattt

SEQ ID NO: 59993 - DNA, 19 bp, Homo sapiens
  siRNA target sequence for DHX40 (NM_024612.3,2014-2032).
ctttgtgcgggctatttca

SEQ ID NO: 59994 - DNA, 19 bp, Homo sapiens
  siRNA target sequence for DHX40 (NM_024612.3,2053-2071).
gttgggagaacgttttgca

SEQ ID NO: 59995 - DNA, 19 bp, Homo sapiens
  siRNA target sequence for DHX40 (NM_024612.3,2111-2129).
cctcagcacttcatgaaca

SEQ ID NO: 59996 - DNA, 19 bp, Homo sapiens
  siRNA target sequence for DHX40 (NM_024612.3,2177-2195).
ccaaagtctacgcaagaat

SEQ ID NO: 59997 - DNA, 19 bp, Homo sapiens
  siRNA target sequence for DHX40 (NM_024612.3,2178-2196).
caaagtctacgcaagaatt

SEQ ID NO: 59998 - DNA, 19 bp, Homo sapiens
  siRNA target sequence for DHX40 (NM_024612.3,2182-2200).
gtctacgcaagaattgtat

SEQ ID NO: 59999 - DNA, 19 bp, Homo sapiens
  siRNA target sequence for DHX40 (NM_024612.3,2236-2254).
cccaagttgcatgaattta

SEQ ID NO: 60000 - DNA, 19 bp, Homo sapiens
  siRNA target sequence for DHX40 (NM_024612.3,2248-2266).
gaatttaatgcacatgatt

SEQ ID NO: 60001 - DNA, 19 bp, Homo sapiens
  siRNA target sequence for DHX40 (NM_024612.3,2310-2328).
gagatggacaaataaggaa

SEQ ID NO: 60002 - DNA, 19 bp, Homo sapiens
  siRNA target sequence for DHX40 (NM_024612.3,2341-2359).
ctaaaggatggaatatcga

SEQ ID NO: 60003 - DNA, 19 bp, Homo sapiens
  siRNA target sequence for DHX40 (NM_024612.3,2357-2375).
cgaaagacgtcttaaagaa

SEQ ID NO: 60004 - DNA, 19 bp, Homo sapiens
  siRNA target sequence for DHX40 (NM_024612.3,2420-2438).
ctcgtttccttgagagaaa

SEQ ID NO: 60005 - DNA, 19 bp, Homo sapiens
  siRNA target sequence for DIAPH3 (NM_030932.2,144-162).
ggagaggagcctttcctta

SEQ ID NO: 60006 - DNA, 19 bp, Homo sapiens
  siRNA target sequence for DIAPH3 (NM_030932.2,198-216).
gatgacagatgtggttaaa

SEQ ID NO: 60007 - DNA, 19 bp, Homo sapiens
  siRNA target sequence for DIAPH3 (NM_030932.2,201-219).
gacagatgtggttaaactt

SEQ ID NO: 60008 - DNA, 19 bp, Homo sapiens
  siRNA target sequence for DIAPH3 (NM_030932.2,222-240).
ctctgcggtatgcattgta

SEQ ID NO: 60009 - DNA, 19 bp, Homo sapiens
  siRNA target sequence for DIAPH3 (NM_030932.2,262-280).
gaagttttagaagctttaa

SEQ ID NO: 60010 - DNA, 19 bp, Homo sapiens
  siRNA target sequence for DIAPH3 (NM_030932.2,328-346).
gaaggcctccggcacaatt

SEQ ID NO: 60011 - DNA, 19 bp, Homo sapiens
  siRNA target sequence for DIAPH3 (NM_030932.2,333-351).
cctccggcacaattcagtt

SEQ ID NO: 60012 - DNA, 19 bp, Homo sapiens
  siRNA target sequence for DIAPH3 (NM_030932.2,336-354).
ccggcacaattcagttcaa

SEQ ID NO: 60013 - DNA, 19 bp, Homo sapiens
  siRNA target sequence for DIAPH3 (NM_030932.2,338-356).
ggcacaattcagttcaact

SEQ ID NO: 60014 - DNA, 19 bp, Homo sapiens
  siRNA target sequence for DIAPH3 (NM_030932.2,365-383).
cttgtatgcagctcatcaa

SEQ ID NO: 60015 - DNA, 19 bp, Homo sapiens
  siRNA target sequence for DIAPH3 (NM_030932.2,390-408).
ggttacatctcctgatgat

SEQ ID NO: 60016 - DNA, 19 bp, Homo sapiens
  siRNA target sequence for DIAPH3 (NM_030932.2,391-409).
gttacatctcctgatgatt

SEQ ID NO: 60017 - DNA, 19 bp, Homo sapiens
  siRNA target sequence for DIAPH3 (NM_030932.2,419-437).
ggcttcacatcagaaatga

SEQ ID NO: 60018 - DNA, 19 bp, Homo sapiens
  siRNA target sequence for DIAPH3 (NM_030932.2,424-442).
cacatcagaaatgaattta

SEQ ID NO: 60019 - DNA, 19 bp, Homo sapiens
  siRNA target sequence for DIAPH3 (NM_030932.2,449-467).
gtggattgaaagagatatt

SEQ ID NO: 60020 - DNA, 19 bp, Homo sapiens
  siRNA target sequence for DIAPH3 (NM_030932.2,496-514).
ggcctggatatccaactta

SEQ ID NO: 60021 - DNA, 19 bp, Homo sapiens
  siRNA target sequence for DIAPH3 (NM_030932.2,497-515).
gcctggatatccaacttaa

SEQ ID NO: 60022 - DNA, 19 bp, Homo sapiens
  siRNA target sequence for DIAPH3 (NM_030932.2,557-575).
cccatcgccttgaagatat

SEQ ID NO: 60023 - DNA, 19 bp, Homo sapiens
  siRNA target sequence for DIAPH3 (NM_030932.2,558-576).
ccatcgccttgaagatatt

SEQ ID NO: 60024 - DNA, 19 bp, Homo sapiens
  siRNA target sequence for DIAPH3 (NM_030932.2,559-577).
catcgccttgaagatatta

SEQ ID NO: 60025 - DNA, 19 bp, Homo sapiens
  siRNA target sequence for DIAPH3 (NM_030932.2,595-613).
gcatatgatgtttacaaca

SEQ ID NO: 60026 - DNA, 19 bp, Homo sapiens
  siRNA target sequence for DIAPH3 (NM_030932.2,615-633).
ggtgtggagcacagttaaa

SEQ ID NO: 60027 - DNA, 19 bp, Homo sapiens
  siRNA target sequence for DIAPH3 (NM_030932.2,641-659).
gagcagagggatattttat

SEQ ID NO: 60028 - DNA, 19 bp, Homo sapiens
  siRNA target sequence for DIAPH3 (NM_030932.2,681-699).
gctgattcgaaatgattat

SEQ ID NO: 60029 - DNA, 19 bp, Homo sapiens
  siRNA target sequence for DIAPH3 (NM_030932.2,684-702).
gattcgaaatgattatttt

SEQ ID NO: 60030 - DNA, 19 bp, Homo sapiens
  siRNA target sequence for DIAPH3 (NM_030932.2,709-727).
caacaatacttcaaattaa

SEQ ID NO: 60031 - DNA, 19 bp, Homo sapiens
  siRNA target sequence for DIAPH3 (NM_030932.2,737-755).
gtgtatcccagattgtatt

SEQ ID NO: 60032 - DNA, 19 bp, Homo sapiens
  siRNA target sequence for DIAPH3 (NM_030932.2,756-774).
gcatagagatggaatggat

SEQ ID NO: 60033 - DNA, 19 bp, Homo sapiens
  siRNA target sequence for DIAPH3 (NM_030932.2,775-793).
ccagacttcacatatcgaa

SEQ ID NO: 60034 - DNA, 19 bp, Homo sapiens
  siRNA target sequence for DIAPH3 (NM_030932.2,776-794).
cagacttcacatatcgaaa

SEQ ID NO: 60035 - DNA, 19 bp, Homo sapiens
  siRNA target sequence for DIAPH3 (NM_030932.2,833-851).
gcatagatcaagcaaaact

SEQ ID NO: 60036 - DNA, 19 bp, Homo sapiens
  siRNA target sequence for DIAPH3 (NM_030932.2,970-988).
gcagagctacaagctttta

SEQ ID NO: 60037 - DNA, 19 bp, Homo sapiens
  siRNA target sequence for DIAPH3 (NM_030932.2,971-989).
cagagctacaagcttttaa

SEQ ID NO: 60038 - DNA, 19 bp, Homo sapiens
  siRNA target sequence for DIAPH3 (NM_030932.2,1003-1021).
gccttgccagctgattgta

SEQ ID NO: 60039 - DNA, 19 bp, Homo sapiens
  siRNA target sequence for DIAPH3 (NM_030932.2,1008-1026).
gccagctgattgtaatatt

SEQ ID NO: 60040 - DNA, 19 bp, Homo sapiens
  siRNA target sequence for DIAPH3 (NM_030932.2,1028-1046).
ctttgcctccctctaaaga

SEQ ID NO: 60041 - DNA, 19 bp, Homo sapiens
  siRNA target sequence for DIAPH3 (NM_030932.2,1385-1403).
gtaaacttgagaatacatt

SEQ ID NO: 60042 - DNA, 19 bp, Homo sapiens
  siRNA target sequence for DIAPH3 (NM_030932.2,1532-1550).
cttttcgggtgccatatga

SEQ ID NO: 60043 - DNA, 19 bp, Homo sapiens
  siRNA target sequence for DIAPH3 (NM_030932.2,1586-1604).
cacggttggcagagtctat

SEQ ID NO: 60044 - DNA, 19 bp, Homo sapiens
  siRNA target sequence for DIAPH3 (NM_030932.2,1588-1606).
cggttggcagagtctatga

SEQ ID NO: 60045 - DNA, 19 bp, Homo sapiens
  siRNA target sequence for DIAPH3 (NM_030932.2,1589-1607).
ggttggcagagtctatgat

SEQ ID NO: 60046 - DNA, 19 bp, Homo sapiens
  siRNA target sequence for DIAPH3 (NM_030932.2,1590-1608).
gttggcagagtctatgatt

SEQ ID NO: 60047 - DNA, 19 bp, Homo sapiens
  siRNA target sequence for DIAPH3 (NM_030932.2,1599-1617).
gtctatgattcagaactta

SEQ ID NO: 60048 - DNA, 19 bp, Homo sapiens
  siRNA target sequence for DIAPH3 (NM_030932.2,1601-1619).
ctatgattcagaacttaat

SEQ ID NO: 60049 - DNA, 19 bp, Homo sapiens
  siRNA target sequence for DIAPH3 (NM_030932.2,1630-1648).
cctgatcaagagcaattaa

SEQ ID NO: 60050 - DNA, 19 bp, Homo sapiens
  siRNA target sequence for DIAPH3 (NM_030932.2,1737-1755).
gccacggctcagtgctatt

SEQ ID NO: 60051 - DNA, 19 bp, Homo sapiens
  siRNA target sequence for DIAPH3 (NM_030932.2,1748-1766).
gtgctattctctttaagct

SEQ ID NO: 60052 - DNA, 19 bp, Homo sapiens
  siRNA target sequence for DIAPH3 (NM_030932.2,1820-1838).
ctgcctgcgaagagataaa

SEQ ID NO: 60053 - DNA, 19 bp, Homo sapiens
  siRNA target sequence for DIAPH3 (NM_030932.2,1823-1841).
cctgcgaagagataaagaa

SEQ ID NO: 60054 - DNA, 19 bp, Homo sapiens
  siRNA target sequence for DIAPH3 (NM_030932.2,1856-1874).
gcaagttgctggaacttgt

SEQ ID NO: 60055 - DNA, 19 bp, Homo sapiens
  siRNA target sequence for DIAPH3 (NM_030932.2,1915-1933).
gctcaaaccttcggattta

SEQ ID NO: 60056 - DNA, 19 bp, Homo sapiens
  siRNA target sequence for DIAPH3 (NM_030932.2,1985-2003).
caacgctacttcatttcct

SEQ ID NO: 60057 - DNA, 19 bp, Homo sapiens
  siRNA target sequence for DIAPH3 (NM_030932.2,2068-2086).
gacaaagctagtaaagtct

SEQ ID NO: 60058 - DNA, 19 bp, Homo sapiens
  siRNA target sequence for DIAPH3 (NM_030932.2,2171-2189).
ctgaggacttgcatgacaa

SEQ ID NO: 60059 - DNA, 19 bp, Homo sapiens
  siRNA target sequence for DIAPH3 (NM_030932.2,2205-2223).
gtccagatttgttatcagt

SEQ ID NO: 60060 - DNA, 19 bp, Homo sapiens
  siRNA target sequence for DIAPH3 (NM_030932.2,2257-2275).
cacgaaaacatggaaaagt

SEQ ID NO: 60061 - DNA, 19 bp, Homo sapiens
  siRNA target sequence for DIAPH3 (NM_030932.2,2274-2292).
gttataccagagtataata

SEQ ID NO: 60062 - DNA, 19 bp, Homo sapiens
  siRNA target sequence for DIAPH3 (NM_030932.2,2283-2301).
gagtataataggatactat

SEQ ID NO: 60063 - DNA, 19 bp, Homo sapiens
  siRNA target sequence for DIAPH3 (NM_030932.2,2294-2312).
gatactatgccattgatgt

SEQ ID NO: 60064 - DNA, 19 bp, Homo sapiens
  siRNA target sequence for DIAPH3 (NM_030932.2,2344-2362).
gacctgaataacttcagaa

SEQ ID NO: 60065 - DNA, 19 bp, Homo sapiens
  siRNA target sequence for DIAPH3 (NM_030932.2,2364-2382).
cacattcatgcaagcaata

SEQ ID NO: 60066 - DNA, 19 bp, Homo sapiens
  siRNA target sequence for DIAPH3 (NM_030932.2,2462-2480).
gactcgaacgccaacaaaa

SEQ ID NO: 60067 - DNA, 19 bp, Homo sapiens
  siRNA target sequence for DIAPH3 (NM_030932.2,2464-2482).
ctcgaacgccaacaaaaga

SEQ ID NO: 60068 - DNA, 19 bp, Homo sapiens
  siRNA target sequence for DIAPH3 (NM_030932.2,2466-2484).
cgaacgccaacaaaagaaa

SEQ ID NO: 60069 - DNA, 19 bp, Homo sapiens
  siRNA target sequence for DIAPH3 (NM_030932.2,2488-2506).
cgtttattagaaatgaaga

SEQ ID NO: 60070 - DNA, 19 bp, Homo sapiens
  siRNA target sequence for DIAPH3 (NM_030932.2,2572-2590).
cgcgacagaagaaaaagga

SEQ ID NO: 60071 - DNA, 19 bp, Homo sapiens
  siRNA target sequence for DIAPH3 (NM_030932.2,2616-2634).
gagtctcagtccaatgtct

SEQ ID NO: 60072 - DNA, 19 bp, Homo sapiens
  siRNA target sequence for DIAPH3 (NM_030932.2,2665-2683).
ggtaataaaccgtatttat

SEQ ID NO: 60073 - DNA, 19 bp, Homo sapiens
  siRNA target sequence for DKFZP434B1727 (NM_032143.1,169-187).
cctcctgtgacgaatcaaa

SEQ ID NO: 60074 - DNA, 19 bp, Homo sapiens
  siRNA target sequence for DKFZP434B1727 (NM_032143.1,173-191).
ctgtgacgaatcaaagaga

SEQ ID NO: 60075 - DNA, 19 bp, Homo sapiens
  siRNA target sequence for DKFZP434B1727 (NM_032143.1,175-193).
gtgacgaatcaaagagatt

SEQ ID NO: 60076 - DNA, 19 bp, Homo sapiens
  siRNA target sequence for DKFZP434B1727 (NM_032143.1,235-253).
cagctgcaagagatatcat

SEQ ID NO: 60077 - DNA, 19 bp, Homo sapiens
  siRNA target sequence for DKFZP434B1727 (NM_032143.1,240-258).
gcaagagatatcatcgatt

SEQ ID NO: 60078 - DNA, 19 bp, Homo sapiens
  siRNA target sequence for DKFZP434B1727 (NM_032143.1,241-259).
caagagatatcatcgatta

SEQ ID NO: 60079 - DNA, 19 bp, Homo sapiens
  siRNA target sequence for DKFZP434B1727 (NM_032143.1,244-262).
gagatatcatcgattatga

SEQ ID NO: 60080 - DNA, 19 bp, Homo sapiens
  siRNA target sequence for DKFZP434B1727 (NM_032143.1,246-264).
gatatcatcgattatgaaa

SEQ ID NO: 60081 - DNA, 19 bp, Homo sapiens
  siRNA target sequence for DKFZP434B1727 (NM_032143.1,251-269).
catcgattatgaaagtgat

SEQ ID NO: 60082 - DNA, 19 bp, Homo sapiens
  siRNA target sequence for DKFZP434B1727 (NM_032143.1,273-291).
gaacctgaaacgaaaagat

SEQ ID NO: 60083 - DNA, 19 bp, Homo sapiens
  siRNA target sequence for DKFZP434B1727 (NM_032143.1,364-382).
ctccactcgtggaaagtgt

SEQ ID NO: 60084 - DNA, 19 bp, Homo sapiens
  siRNA target sequence for DKFZP434B1727 (NM_032143.1,444-462).
ctctgcacctatatcaata

SEQ ID NO: 60085 - DNA, 19 bp, Homo sapiens
  siRNA target sequence for DKFZP434B1727 (NM_032143.1,446-464).
ctgcacctatatcaataat

SEQ ID NO: 60086 - DNA, 19 bp, Homo sapiens
  siRNA target sequence for DKFZP434B1727 (NM_032143.1,449-467).
cacctatatcaataattca

SEQ ID NO: 60087 - DNA, 19 bp, Homo sapiens
  siRNA target sequence for DKFZP434B1727 (NM_032143.1,466-484).
cagagttaccttattgtga

SEQ ID NO: 60088 - DNA, 19 bp, Homo sapiens
  siRNA target sequence for DKFZP434B1727 (NM_032143.1,499-517).
ctcaaggcagtgctgttat

SEQ ID NO: 60089 - DNA, 19 bp, Homo sapiens
  siRNA target sequence for DKFZP434B1727 (NM_032143.1,504-522).
ggcagtgctgttatgcaaa

SEQ ID NO: 60090 - DNA, 19 bp, Homo sapiens
  siRNA target sequence for DKFZP434B1727 (NM_032143.1,508-526).
gtgctgttatgcaaataga

SEQ ID NO: 60091 - DNA, 19 bp, Homo sapiens
  siRNA target sequence for DKFZP434B1727 (NM_032143.1,581-599).
ctccaaaaaggttcaaact

SEQ ID NO: 60092 - DNA, 19 bp, Homo sapiens
  siRNA target sequence for DKFZP434B1727 (NM_032143.1,583-601).
ccaaaaaggttcaaactat

SEQ ID NO: 60093 - DNA, 19 bp, Homo sapiens
  siRNA target sequence for DKFZP434B1727 (NM_032143.1,738-756).
ccagtgtatgacaccttaa

SEQ ID NO: 60094 - DNA, 19 bp, Homo sapiens
  siRNA target sequence for DKFZP434B1727 (NM_032143.1,739-757).
cagtgtatgacaccttaat

SEQ ID NO: 60095 - DNA, 19 bp, Homo sapiens
  siRNA target sequence for DKFZP434B1727 (NM_032143.1,761-779).
ctgtgcaagtaggaatact

SEQ ID NO: 60096 - DNA, 19 bp, Homo sapiens
  siRNA target sequence for DKFZP434B1727 (NM_032143.1,763-781).
gtgcaagtaggaatactga

SEQ ID NO: 60097 - DNA, 19 bp, Homo sapiens
  siRNA target sequence for DKFZP434B1727 (NM_032143.1,778-796).
ctgaccggattcacatcta

SEQ ID NO: 60098 - DNA, 19 bp, Homo sapiens
  siRNA target sequence for DKFZP434B1727 (NM_032143.1,780-798).
gaccggattcacatctata

SEQ ID NO: 60099 - DNA, 19 bp, Homo sapiens
  siRNA target sequence for DKFZP434B1727 (NM_032143.1,782-800).
ccggattcacatctatact

SEQ ID NO: 60100 - DNA, 19 bp, Homo sapiens
  siRNA target sequence for DKFZP434B1727 (NM_032143.1,783-801).
cggattcacatctatacta

SEQ ID NO: 60101 - DNA, 19 bp, Homo sapiens
  siRNA target sequence for DKFZP434B1727 (NM_032143.1,784-802).
ggattcacatctatactaa

SEQ ID NO: 60102 - DNA, 19 bp, Homo sapiens
  siRNA target sequence for DKFZP434B1727 (NM_032143.1,874-892).
caagctttcagctgaaaca

SEQ ID NO: 60103 - DNA, 19 bp, Homo sapiens
  siRNA target sequence for DKFZP434B1727 (NM_032143.1,891-909).
caatatcgctcactgattt

SEQ ID NO: 60104 - DNA, 19 bp, Homo sapiens
  siRNA target sequence for DKFZP434B1727 (NM_032143.1,897-915).
cgctcactgattttgagat

SEQ ID NO: 60105 - DNA, 19 bp, Homo sapiens
  siRNA target sequence for DKFZP434B1727 (NM_032143.1,901-919).
cactgattttgagatttgt

SEQ ID NO: 60106 - DNA, 19 bp, Homo sapiens
  siRNA target sequence for DKFZP434B1727 (NM_032143.1,921-939).
cgagaatggagtagtctaa

SEQ ID NO: 60107 - DNA, 19 bp, Homo sapiens
  siRNA target sequence for DKFZP434B1727 (NM_032143.1,936-954).
ctaactgccatgaagcaaa

SEQ ID NO: 60108 - DNA, 19 bp, Homo sapiens
  siRNA target sequence for DKFZP434B1727 (NM_032143.1,1032-1050).
caaaattgcaccaaaagat

SEQ ID NO: 60109 - DNA, 19 bp, Homo sapiens
  siRNA target sequence for DKFZP434B1727 (NM_032143.1,1042-1060).
ccaaaagatacataaccaa

SEQ ID NO: 60110 - DNA, 19 bp, Homo sapiens
  siRNA target sequence for DKFZP434B1727 (NM_032143.1,1077-1095).
gcctcaatggacaaagtga

SEQ ID NO: 60111 - DNA, 19 bp, Homo sapiens
  siRNA target sequence for DKFZP434B1727 (NM_032143.1,1078-1096).
cctcaatggacaaagtgaa

SEQ ID NO: 60112 - DNA, 19 bp, Homo sapiens
  siRNA target sequence for DKFZP434B1727 (NM_032143.1,1110-1128).
catgtccgtctgatcacaa

SEQ ID NO: 60113 - DNA, 19 bp, Homo sapiens
  siRNA target sequence for DKFZP434B1727 (NM_032143.1,1139-1157).
gccacgggatcctttcaca

SEQ ID NO: 60114 - DNA, 19 bp, Homo sapiens
  siRNA target sequence for DKFZP434B1727 (NM_032143.1,1141-1159).
cacgggatcctttcacaaa

SEQ ID NO: 60115 - DNA, 19 bp, Homo sapiens
  siRNA target sequence for DKFZP434B1727 (NM_032143.1,1229-1247).
gaagccctctacatccaaa

SEQ ID NO: 60116 - DNA, 19 bp, Homo sapiens
  siRNA target sequence for DKFZP434B1727 (NM_032143.1,1237-1255).
ctacatccaaaggctattt

SEQ ID NO: 60117 - DNA, 19 bp, Homo sapiens
  siRNA target sequence for DKFZP434B1727 (NM_032143.1,1240-1258).
catccaaaggctatttgca

SEQ ID NO: 60118 - DNA, 19 bp, Homo sapiens
  siRNA target sequence for DKFZP434B1727 (NM_032143.1,1307-1325).
cacttgccagactaagcaa

SEQ ID NO: 60119 - DNA, 19 bp, Homo sapiens
  siRNA target sequence for DKFZP434B1727 (NM_032143.1,1326-1344).
gcatgtaaagcgaactctt

SEQ ID NO: 60120 - DNA, 19 bp, Homo sapiens
  siRNA target sequence for DKFZP434B1727 (NM_032143.1,1353-1371).
cggttttgctctctgaaat

SEQ ID NO: 60121 - DNA, 19 bp, Homo sapiens
  siRNA target sequence for DKFZP434B1727 (NM_032143.1,1382-1400).
gttttggattcgatctaat

SEQ ID NO: 60122 - DNA, 19 bp, Homo sapiens
  siRNA target sequence for DKFZP434B1727 (NM_032143.1,1388-1406).
gattcgatctaataacagt

SEQ ID NO: 60123 - DNA, 19 bp, Homo sapiens
  siRNA target sequence for DKFZP434B1727 (NM_032143.1,1409-1427).
cctgagagccaaagtattt

SEQ ID NO: 60124 - DNA, 19 bp, Homo sapiens
  siRNA target sequence for DKFZP434B1727 (NM_032143.1,1447-1465).
gtcagctctgtaatgtgaa

SEQ ID NO: 60125 - DNA, 19 bp, Homo sapiens
  siRNA target sequence for DKFZP434B1727 (NM_032143.1,1488-1506).
ctgagagatgcccctaaaa

SEQ ID NO: 60126 - DNA, 19 bp, Homo sapiens
  siRNA target sequence for DKFZP434B1727 (NM_032143.1,1560-1578).
cagctaaatgaaatgataa

SEQ ID NO: 60127 - DNA, 19 bp, Homo sapiens
  siRNA target sequence for DKFZP434B1727 (NM_032143.1,1562-1580).
gctaaatgaaatgataaga

SEQ ID NO: 60128 - DNA, 19 bp, Homo sapiens
  siRNA target sequence for DKFZP434B1727 (NM_032143.1,1696-1714).
gaactgccagacaagctaa

SEQ ID NO: 60129 - DNA, 19 bp, Homo sapiens
  siRNA target sequence for DKFZP434B1727 (NM_032143.1,1724-1742).
ccaggtgagaagacaatct

SEQ ID NO: 60130 - DNA, 19 bp, Homo sapiens
  siRNA target sequence for DKFZP434B1727 (NM_032143.1,1727-1745).
ggtgagaagacaatctcta

SEQ ID NO: 60131 - DNA, 19 bp, Homo sapiens
  siRNA target sequence for DKFZP434B1727 (NM_032143.1,1735-1753).
gacaatctctagcatcaaa

SEQ ID NO: 60132 - DNA, 19 bp, Homo sapiens
  siRNA target sequence for DKFZP434B1727 (NM_032143.1,1797-1815).
catgaatcacacaaggtaa

SEQ ID NO: 60133 - DNA, 19 bp, Homo sapiens
  siRNA target sequence for DKFZP434B1727 (NM_032143.1,1873-1891).
gaggtgcagcgcacacaaa

SEQ ID NO: 60134 - DNA, 19 bp, Homo sapiens
  siRNA target sequence for DKFZP434B1727 (NM_032143.1,1876-1894).
gtgcagcgcacacaaatga

SEQ ID NO: 60135 - DNA, 19 bp, Homo sapiens
  siRNA target sequence for DKFZP434B1727 (NM_032143.1,1879-1897).
cagcgcacacaaatgatca

SEQ ID NO: 60136 - DNA, 19 bp, Homo sapiens
  siRNA target sequence for DKFZP434B1727 (NM_032143.1,1893-1911).
gatcagcgcaggtgtcaaa

SEQ ID NO: 60137 - DNA, 19 bp, Homo sapiens
  siRNA target sequence for DKFZP434B1727 (NM_032143.1,1913-1931).
gatgaagcagccacttaca

SEQ ID NO: 60138 - DNA, 19 bp, Homo sapiens
  siRNA target sequence for DKFZP434B195 (NM_031284.3,208-226).
cctgggacgcgcttatcgt

SEQ ID NO: 60139 - DNA, 19 bp, Homo sapiens
  siRNA target sequence for DKFZP434B195 (NM_031284.3,251-269).
cgtggcagtgggagtcaat

SEQ ID NO: 60140 - DNA, 19 bp, Homo sapiens
  siRNA target sequence for DKFZP434B195 (NM_031284.3,417-435).
gagcgcttcttcagtgata

SEQ ID NO: 60141 - DNA, 19 bp, Homo sapiens
  siRNA target sequence for DKFZP434B195 (NM_031284.3,531-549).
gcagccaactcagatttaa

SEQ ID NO: 60142 - DNA, 19 bp, Homo sapiens
  siRNA target sequence for DKFZP434B195 (NM_031284.3,541-559).
cagatttaaaggttcttct

SEQ ID NO: 60143 - DNA, 19 bp, Homo sapiens
  siRNA target sequence for DKFZP434B195 (NM_031284.3,581-599).
gctacatgagcttcttgat

SEQ ID NO: 60144 - DNA, 19 bp, Homo sapiens
  siRNA target sequence for DKFZP434B195 (NM_031284.3,591-609).
cttcttgatgacaatgtct

SEQ ID NO: 60145 - DNA, 19 bp, Homo sapiens
  siRNA target sequence for DKFZP434B195 (NM_031284.3,639-657).
gatgagttccacctcattt

SEQ ID NO: 60146 - DNA, 19 bp, Homo sapiens
  siRNA target sequence for DKFZP434B195 (NM_031284.3,650-668).
cctcattttagagtatcaa

SEQ ID NO: 60147 - DNA, 19 bp, Homo sapiens
  siRNA target sequence for DKFZP434B195 (NM_031284.3,680-698).
gtggggccagttaaaagct

SEQ ID NO: 60148 - DNA, 19 bp, Homo sapiens
  siRNA target sequence for DKFZP434B195 (NM_031284.3,702-720).
catgccaaccgattcatct

SEQ ID NO: 60149 - DNA, 19 bp, Homo sapiens
  siRNA target sequence for DKFZP434B195 (NM_031284.3,867-885).
gaggttgtaacctccattt

SEQ ID NO: 60150 - DNA, 19 bp, Homo sapiens
  siRNA target sequence for DKFZP434B195 (NM_031284.3,869-887).
ggttgtaacctccatttct

SEQ ID NO: 60151 - DNA, 19 bp, Homo sapiens
  siRNA target sequence for DKFZP434B195 (NM_031284.3,915-933).
ctagagctggccagtatga

SEQ ID NO: 60152 - DNA, 19 bp, Homo sapiens
  siRNA target sequence for DKFZP434B195 (NM_031284.3,918-936).
gagctggccagtatgacta

SEQ ID NO: 60153 - DNA, 19 bp, Homo sapiens
  siRNA target sequence for DKFZP434B195 (NM_031284.3,921-939).
ctggccagtatgactaaca

SEQ ID NO: 60154 - DNA, 19 bp, Homo sapiens
  siRNA target sequence for DKFZP434B195 (NM_031284.3,988-1006).
cccttgggctgaatgaaca

SEQ ID NO: 60155 - DNA, 19 bp, Homo sapiens
  siRNA target sequence for DKFZP434B195 (NM_031284.3,1106-1124).
ctggatcttgaaagaacat

SEQ ID NO: 60156 - DNA, 19 bp, Homo sapiens
  siRNA target sequence for DKFZP434B195 (NM_031284.3,1343-1361).
ggcaggctccaggattgta

SEQ ID NO: 60157 - DNA, 19 bp, Homo sapiens
  siRNA target sequence for DKFZP434B195 (NM_031284.3,1347-1365).
ggctccaggattgtattaa

SEQ ID NO: 60158 - DNA, 19 bp, Homo sapiens
  siRNA target sequence for DKFZP434B195 (NM_031284.3,1348-1366).
gctccaggattgtattaaa

SEQ ID NO: 60159 - DNA, 19 bp, Homo sapiens
  siRNA target sequence for DKFZP434B195 (NM_031284.3,1367-1385).
cccaaacaagccagtagta

SEQ ID NO: 60160 - DNA, 19 bp, Homo sapiens
  siRNA target sequence for DKFZP434B195 (NM_031284.3,1369-1387).
caaacaagccagtagtaga

SEQ ID NO: 60161 - DNA, 19 bp, Homo sapiens
  siRNA target sequence for DKFZP434B195 (NM_031284.3,1499-1517).
ggaagtacaccctcactat

SEQ ID NO: 60162 - DNA, 19 bp, Homo sapiens
  siRNA target sequence for DKFZP434B195 (NM_031284.3,1500-1518).
gaagtacaccctcactatt

SEQ ID NO: 60163 - DNA, 19 bp, Homo sapiens
  siRNA target sequence for DKFZP434I116 (NM_015496.3,27-45).
cggcgatggagctgttatt

SEQ ID NO: 60164 - DNA, 19 bp, Homo sapiens
  siRNA target sequence for DKFZP434I116 (NM_015496.3,29-47).
gcgatggagctgttatttt

SEQ ID NO: 60165 - DNA, 19 bp, Homo sapiens
  siRNA target sequence for DKFZP434I116 (NM_015496.3,30-48).
cgatggagctgttattttt

SEQ ID NO: 60166 - DNA, 19 bp, Homo sapiens
  siRNA target sequence for DKFZP434I116 (NM_015496.3,65-83).
ccgagcgctgagcaaagtt

SEQ ID NO: 60167 - DNA, 19 bp, Homo sapiens
  siRNA target sequence for DKFZP434I116 (NM_015496.3,70-88).
cgctgagcaaagttctcat

SEQ ID NO: 60168 - DNA, 19 bp, Homo sapiens
  siRNA target sequence for DKFZP434I116 (NM_015496.3,71-89).
gctgagcaaagttctcata

SEQ ID NO: 60169 - DNA, 19 bp, Homo sapiens
  siRNA target sequence for DKFZP434I116 (NM_015496.3,72-90).
ctgagcaaagttctcatat

SEQ ID NO: 60170 - DNA, 19 bp, Homo sapiens
  siRNA target sequence for DKFZP434I116 (NM_015496.3,92-110).
gatgtggttcgttttccat

SEQ ID NO: 60171 - DNA, 19 bp, Homo sapiens
  siRNA target sequence for DKFZP434I116 (NM_015496.3,102-120).
gttttccatgtgtggttta

SEQ ID NO: 60172 - DNA, 19 bp, Homo sapiens
  siRNA target sequence for DKFZP434I116 (NM_015496.3,108-126).
catgtgtggtttatatcaa

SEQ ID NO: 60173 - DNA, 19 bp, Homo sapiens
  siRNA target sequence for DKFZP434I116 (NM_015496.3,111-129).
gtgtggtttatatcaatga

SEQ ID NO: 60174 - DNA, 19 bp, Homo sapiens
  siRNA target sequence for DKFZP434I116 (NM_015496.3,124-142).
caatgaagtccgagtcata

SEQ ID NO: 60175 - DNA, 19 bp, Homo sapiens
  siRNA target sequence for DKFZP434I116 (NM_015496.3,139-157).
catacccccaggagtaaga

SEQ ID NO: 60176 - DNA, 19 bp, Homo sapiens
  siRNA target sequence for DKFZP434I116 (NM_015496.3,166-184).
cagtctgccagacaataga

SEQ ID NO: 60177 - DNA, 19 bp, Homo sapiens
  siRNA target sequence for DKFZP434I116 (NM_015496.3,194-212).
gagacatctccccatacat

SEQ ID NO: 60178 - DNA, 19 bp, Homo sapiens
  siRNA target sequence for DKFZP434I116 (NM_015496.3,215-233).
caattagacttattcttca

SEQ ID NO: 60179 - DNA, 19 bp, Homo sapiens
  siRNA target sequence for DKFZP434I116 (NM_015496.3,249-267).
caagtgcccctgttttcga

SEQ ID NO: 60180 - DNA, 19 bp, Homo sapiens
  siRNA target sequence for DKFZP434I116 (NM_015496.3,255-273).
cccctgttttcgataggtt

SEQ ID NO: 60181 - DNA, 19 bp, Homo sapiens
  siRNA target sequence for DKFZP434I116 (NM_015496.3,307-325).
catctttagacctaactca

SEQ ID NO: 60182 - DNA, 19 bp, Homo sapiens
  siRNA target sequence for DKFZP434I116 (NM_015496.3,347-365).
gtgctaagaggctggtata

SEQ ID NO: 60183 - DNA, 19 bp, Homo sapiens
  siRNA target sequence for DKFZP434I116 (NM_015496.3,350-368).
ctaagaggctggtataact

SEQ ID NO: 60184 - DNA, 19 bp, Homo sapiens
  siRNA target sequence for DKFZP434I116 (NM_015496.3,369-387).
gtctgacactggcaatata

SEQ ID NO: 60185 - DNA, 19 bp, Homo sapiens
  siRNA target sequence for DKFZP434I116 (NM_015496.3,397-415).
ggatagagtgataagtcat

SEQ ID NO: 60186 - DNA, 19 bp, Homo sapiens
  siRNA target sequence for DKFZP434I116 (NM_015496.3,461-479).
cagccacaaccaagtttga

SEQ ID NO: 60187 - DNA, 19 bp, Homo sapiens
  siRNA target sequence for DKFZP434I116 (NM_015496.3,463-481).
gccacaaccaagtttgaaa

SEQ ID NO: 60188 - DNA, 19 bp, Homo sapiens
  siRNA target sequence for DKFZP434I116 (NM_015496.3,640-658).
ggatgctcctcatagagaa

SEQ ID NO: 60189 - DNA, 19 bp, Homo sapiens
  siRNA target sequence for DKFZP434I116 (NM_015496.3,644-662).
gctcctcatagagaagatt

SEQ ID NO: 60190 - DNA, 19 bp, Homo sapiens
  siRNA target sequence for DKFZP434I116 (NM_015496.3,645-663).
ctcctcatagagaagatta

SEQ ID NO: 60191 - DNA, 19 bp, Homo sapiens
  siRNA target sequence for DKFZP434I116 (NM_015496.3,698-716).
ccccaggaagggcaatatt

SEQ ID NO: 60192 - DNA, 19 bp, Homo sapiens
  siRNA target sequence for DKFZP434I116 (NM_015496.3,808-826).
ggatgatcgacgaacagta

SEQ ID NO: 60193 - DNA, 19 bp, Homo sapiens
  siRNA target sequence for DKFZP434I116 (NM_015496.3,816-834).
gacgaacagtagacagtat

SEQ ID NO: 60194 - DNA, 19 bp, Homo sapiens
  siRNA target sequence for DKFZP434I116 (NM_015496.3,888-906).
gtgaaggggatgatggtta

SEQ ID NO: 60195 - DNA, 19 bp, Homo sapiens
  siRNA target sequence for DKFZP434I116 (NM_015496.3,902-920).
ggttatgaacaaatttcca

SEQ ID NO: 60196 - DNA, 19 bp, Homo sapiens
  siRNA target sequence for DKFZP434I116 (NM_015496.3,1008-1026).
cagttcctcctatgacata

SEQ ID NO: 60197 - DNA, 19 bp, Homo sapiens
  siRNA target sequence for DKFZP434I116 (NM_015496.3,1017-1035).
ctatgacatatgatccata

SEQ ID NO: 60198 - DNA, 19 bp, Homo sapiens
  siRNA target sequence for DKFZP434I116 (NM_015496.3,1042-1060).
ggagcttgtaccactctta

SEQ ID NO: 60199 - DNA, 19 bp, Homo sapiens
  siRNA target sequence for DKFZP434I116 (NM_015496.3,1043-1061).
gagcttgtaccactcttat

SEQ ID NO: 60200 - DNA, 19 bp, Homo sapiens
  siRNA target sequence for DKFZP434I116 (NM_015496.3,1046-1064).
cttgtaccactcttatact

SEQ ID NO: 60201 - DNA, 19 bp, Homo sapiens
  siRNA target sequence for DKFZP434I116 (NM_015496.3,1049-1067).
gtaccactcttatacttca

SEQ ID NO: 60202 - DNA, 19 bp, Homo sapiens
  siRNA target sequence for DKFZP434I116 (NM_015496.3,1071-1089).
gtccatacaagactacttt

SEQ ID NO: 60203 - DNA, 19 bp, Homo sapiens
  siRNA target sequence for DKFZP434I116 (NM_015496.3,1083-1101).
ctacttttgaaattgaaat

SEQ ID NO: 60204 - DNA, 19 bp, Homo sapiens
  siRNA target sequence for DKFZP434I116 (NM_015496.3,1150-1168).
cgaagcctcagtgaagtta

SEQ ID NO: 60205 - DNA, 19 bp, Homo sapiens
  siRNA target sequence for DKFZP434I116 (NM_015496.3,1162-1180).
gaagttaacagaactctta

SEQ ID NO: 60206 - DNA, 19 bp, Homo sapiens
  siRNA target sequence for DKFZP434I116 (NM_015496.3,1165-1183).
gttaacagaactcttagat

SEQ ID NO: 60207 - DNA, 19 bp, Homo sapiens
  siRNA target sequence for DKFZP434I116 (NM_015496.3,1170-1188).
cagaactcttagatttgta

SEQ ID NO: 60208 - DNA, 19 bp, Homo sapiens
  siRNA target sequence for DKFZP434I116 (NM_015496.3,1193-1211).
gaagatagaggtgcaaaat

SEQ ID NO: 60209 - DNA, 19 bp, Homo sapiens
  siRNA target sequence for DKFZP434I116 (NM_015496.3,1253-1271).
gggttaagctatttgcaat

SEQ ID NO: 60210 - DNA, 19 bp, Homo sapiens
  siRNA target sequence for DKFZP434I116 (NM_015496.3,1260-1278).
gctatttgcaattgaaaaa

SEQ ID NO: 60211 - DNA, 19 bp, Homo sapiens
  siRNA target sequence for DKFZP434I116 (NM_015496.3,1317-1335).
ccatgcaagctttaaattt

SEQ ID NO: 60212 - DNA, 19 bp, Homo sapiens
  siRNA target sequence for DKFZP434I116 (NM_015496.3,1350-1368).
gccaacctatcgccttaaa

SEQ ID NO: 60213 - DNA, 19 bp, Homo sapiens
  siRNA target sequence for DKFZP434I116 (NM_015496.3,1351-1369).
ccaacctatcgccttaaat

SEQ ID NO: 60214 - DNA, 19 bp, Homo sapiens
  siRNA target sequence for DKFZP434I116 (NM_015496.3,1402-1420).
gtcctcactagcagaatgt

SEQ ID NO: 60215 - DNA, 19 bp, Homo sapiens
  siRNA target sequence for DKFZP434I116 (NM_015496.3,1454-1472).
ggagtgatcagtggattat

SEQ ID NO: 60216 - DNA, 19 bp, Homo sapiens
  siRNA target sequence for DKFZP434I116 (NM_015496.3,1455-1473).
gagtgatcagtggattatt

SEQ ID NO: 60217 - DNA, 19 bp, Homo sapiens
  siRNA target sequence for DKFZP434I116 (NM_015496.3,1459-1477).
gatcagtggattatttgaa

SEQ ID NO: 60218 - DNA, 19 bp, Homo sapiens
  siRNA target sequence for DKFZP434I116 (NM_015496.3,1487-1505).
gctgatcacgtatcatctt

SEQ ID NO: 60219 - DNA, 19 bp, Homo sapiens
  siRNA target sequence for DKFZP434I116 (NM_015496.3,1493-1511).
cacgtatcatcttctctta

SEQ ID NO: 60220 - DNA, 19 bp, Homo sapiens
  siRNA target sequence for DKFZP434I116 (NM_015496.3,1496-1514).
gtatcatcttctcttaagt

SEQ ID NO: 60221 - DNA, 19 bp, Homo sapiens
  siRNA target sequence for DKFZP434I116 (NM_015496.3,1612-1630).
gcttctggaactcatactt

SEQ ID NO: 60222 - DNA, 19 bp, Homo sapiens
  siRNA target sequence for DKFZP434I116 (NM_015496.3,1618-1636).
ggaactcatacttttagat

SEQ ID NO: 60223 - DNA, 19 bp, Homo sapiens
  siRNA target sequence for DKFZP434I116 (NM_015496.3,1639-1657).
gactgtgagggttgttact

SEQ ID NO: 60224 - DNA, 19 bp, Homo sapiens
  siRNA target sequence for DKFZP434I116 (NM_015496.3,1656-1674).
ctgctggttcagctattct

SEQ ID NO: 60225 - DNA, 19 bp, Homo sapiens
  siRNA target sequence for DKFZP434I116 (NM_015496.3,1662-1680).
gttcagctattctccaaaa

SEQ ID NO: 60226 - DNA, 19 bp, Homo sapiens
  siRNA target sequence for DKFZP434I116 (NM_015496.3,1683-1701).
gccatttctatgaagtctt

SEQ ID NO: 60227 - DNA, 19 bp, Homo sapiens
  siRNA target sequence for DKFZP434I116 (NM_015496.3,1825-1843).
ggtggaagcttctatggat

SEQ ID NO: 60228 - DNA, 19 bp, Homo sapiens
  siRNA target sequence for DKFZP434I116 (NM_015496.3,1826-1844).
gtggaagcttctatggata

SEQ ID NO: 60229 - DNA, 19 bp, Homo sapiens
  siRNA target sequence for DKFZP434I116 (NM_015496.3,1850-1868).
cttttggaatcctcaaata

SEQ ID NO: 60230 - DNA, 19 bp, Homo sapiens
  siRNA target sequence for DKFZP434I116 (NM_015496.3,1927-1945).
ggaaactgcccctcataca

SEQ ID NO: 60231 - DNA, 19 bp, Homo sapiens
  siRNA target sequence for DKFZP434I116 (NM_015496.3,1928-1946).
gaaactgcccctcatacaa

SEQ ID NO: 60232 - DNA, 19 bp, Homo sapiens
  siRNA target sequence for DKFZP434I116 (NM_015496.3,1952-1970).
caacaacctgttaagtctt

SEQ ID NO: 60233 - DNA, 19 bp, Homo sapiens
  siRNA target sequence for DKFZP434I116 (NM_015496.3,1972-1990).
cccaacgatggcacgaatt

SEQ ID NO: 60234 - DNA, 19 bp, Homo sapiens
  siRNA target sequence for DKFZP434I116 (NM_015496.3,2051-2069).
cacttcttggagttggtta

SEQ ID NO: 60235 - DNA, 19 bp, Homo sapiens
  siRNA target sequence for DKFZP434I116 (NM_015496.3,2080-2098).
gtcaattccagtaacaagt

SEQ ID NO: 60236 - DNA, 19 bp, Homo sapiens
  siRNA target sequence for DKFZP434I116 (NM_015496.3,2113-2131).
gctgcaagccacaaaagat

SEQ ID NO: 60237 - DNA, 19 bp, Homo sapiens
  siRNA target sequence for DKFZP434I116 (NM_015496.3,2116-2134).
gcaagccacaaaagatgtt

SEQ ID NO: 60238 - DNA, 19 bp, Homo sapiens
  siRNA target sequence for DKFZP434I116 (NM_015496.3,2181-2199).
cggaatatgaagcaacaaa

SEQ ID NO: 60239 - DNA, 19 bp, Homo sapiens
  siRNA target sequence for DKFZP434I116 (NM_015496.3,2214-2232).
ctctgtgtcacttttatga

SEQ ID NO: 60240 - DNA, 19 bp, Homo sapiens
  siRNA target sequence for DKFZP434I116 (NM_015496.3,2245-2263).
ggaaggtctccaatctgat

SEQ ID NO: 60241 - DNA, 19 bp, Homo sapiens
  siRNA target sequence for DKFZP434I116 (NM_015496.3,2302-2320).
ctcaacacagacattgcaa

SEQ ID NO: 60242 - DNA, 19 bp, Homo sapiens
  siRNA target sequence for DKFZP434I116 (NM_015496.3,2341-2359).
ccattttcagcgttgtaca

SEQ ID NO: 60243 - DNA, 19 bp, Homo sapiens
  siRNA target sequence for DKFZP434I116 (NM_015496.3,2392-2410).
gggaaccctgcacaatctt

SEQ ID NO: 60244 - DNA, 19 bp, Homo sapiens
  siRNA target sequence for DKFZP434I116 (NM_015496.3,2393-2411).
ggaaccctgcacaatcttt

SEQ ID NO: 60245 - DNA, 19 bp, Homo sapiens
  siRNA target sequence for DKFZP434I116 (NM_015496.3,2394-2412).
gaaccctgcacaatcttta

SEQ ID NO: 60246 - DNA, 19 bp, Homo sapiens
  siRNA target sequence for DKFZP434I116 (NM_015496.3,2456-2474).
gtttttagtctggagaaaa

SEQ ID NO: 60247 - DNA, 19 bp, Homo sapiens
  siRNA target sequence for DKFZP434I116 (NM_015496.3,2484-2502).
gtcttattactctaatgga

SEQ ID NO: 60248 - DNA, 19 bp, Homo sapiens
  siRNA target sequence for DKFZP434I116 (NM_015496.3,2538-2556).
ctaagaagtcagtagctta

SEQ ID NO: 60249 - DNA, 19 bp, Homo sapiens
  siRNA target sequence for DKFZP434I116 (NM_015496.3,2598-2616).
ccagtgatgttcaaatgct

SEQ ID NO: 60250 - DNA, 19 bp, Homo sapiens
  siRNA target sequence for DKFZP434I116 (NM_015496.3,2599-2617).
cagtgatgttcaaatgcta

SEQ ID NO: 60251 - DNA, 19 bp, Homo sapiens
  siRNA target sequence for DKFZP434I116 (NM_015496.3,2638-2656).
cttgaagctttgtaaagca

SEQ ID NO: 60252 - DNA, 19 bp, Homo sapiens
  siRNA target sequence for DKFZP434I116 (NM_015496.3,2733-2751).
gcatcccaaacttaattga

SEQ ID NO: 60253 - DNA, 19 bp, Homo sapiens
  siRNA target sequence for DKFZP434I116 (NM_015496.3,2737-2755).
cccaaacttaattgagtat

SEQ ID NO: 60254 - DNA, 19 bp, Homo sapiens
  siRNA target sequence for DKFZP434I116 (NM_015496.3,2811-2829).
ccttacgtgttctctgtaa

SEQ ID NO: 60255 - DNA, 19 bp, Homo sapiens
  siRNA target sequence for DKFZP434I116 (NM_015496.3,2880-2898).
ggaatcttgccgttattca

SEQ ID NO: 60256 - DNA, 19 bp, Homo sapiens
  siRNA target sequence for DKFZP434I116 (NM_015496.3,2890-2908).
cgttattcagcttttttct

SEQ ID NO: 60257 - DNA, 19 bp, Homo sapiens
  siRNA target sequence for DKFZP434I116 (NM_015496.3,2912-2930).
gaaggaatggacacgttta

SEQ ID NO: 60258 - DNA, 19 bp, Homo sapiens
  siRNA target sequence for DKFZP434I116 (NM_015496.3,2933-2951).
cgagttctgcaaaaattga

SEQ ID NO: 60259 - DNA, 19 bp, Homo sapiens
  siRNA target sequence for DKFZP434I116 (NM_015496.3,3009-3027).
gagttactactatttcaat

SEQ ID NO: 60260 - DNA, 19 bp, Homo sapiens
  siRNA target sequence for DKFZP434I116 (NM_015496.3,3073-3091).
cctgagaggtggatccttt

SEQ ID NO: 60261 - DNA, 19 bp, Homo sapiens
  siRNA target sequence for DKFZP434I116 (NM_015496.3,3110-3128).
gttccttcagcgcttgtta

SEQ ID NO: 60262 - DNA, 19 bp, Homo sapiens
  siRNA target sequence for DKFZP434I116 (NM_015496.3,3113-3131).
ccttcagcgcttgttactt

SEQ ID NO: 60263 - DNA, 19 bp, Homo sapiens
  siRNA target sequence for DKFZP434I116 (NM_015496.3,3117-3135).
cagcgcttgttactttaca

SEQ ID NO: 60264 - DNA, 19 bp, Homo sapiens
  siRNA target sequence for DKFZP434I116 (NM_015496.3,3120-3138).
cgcttgttactttacatat

SEQ ID NO: 60265 - DNA, 19 bp, Homo sapiens
  siRNA target sequence for DKFZP434I116 (NM_015496.3,3158-3176).
ctctcaggtcgtttggata

SEQ ID NO: 60266 - DNA, 19 bp, Homo sapiens
  siRNA target sequence for DKFZP434I116 (NM_015496.3,3168-3186).
gtttggatagtgatgaaca

SEQ ID NO: 60267 - DNA, 19 bp, Homo sapiens
  siRNA target sequence for DKFZP434I116 (NM_015496.3,3263-3281).
gagactctggccaataata

SEQ ID NO: 60268 - DNA, 19 bp, Homo sapiens
  siRNA target sequence for DKFZP434I116 (NM_015496.3,3265-3283).
gactctggccaataatact

SEQ ID NO: 60269 - DNA, 19 bp, Homo sapiens
  siRNA target sequence for DKFZP434I116 (NM_015496.3,3348-3366).
gactcatactcctttcaga

SEQ ID NO: 60270 - DNA, 19 bp, Homo sapiens
  siRNA target sequence for DKFZP434I116 (NM_015496.3,3380-3398).
ccattgcccatgcaaacaa

SEQ ID NO: 60271 - DNA, 19 bp, Homo sapiens
  siRNA target sequence for DKFZP434I116 (NM_015496.3,3403-3421).
ggttattgagccacatgat

SEQ ID NO: 60272 - DNA, 19 bp, Homo sapiens
  siRNA target sequence for DKFZP434I116 (NM_015496.3,3404-3422).
gttattgagccacatgata

SEQ ID NO: 60273 - DNA, 19 bp, Homo sapiens
  siRNA target sequence for DKFZP434I116 (NM_015496.3,3431-3449).
gcactcaacacccgaaaat

SEQ ID NO: 60274 - DNA, 19 bp, Homo sapiens
  siRNA target sequence for DKFZP434I116 (NM_015496.3,3434-3452).
ctcaacacccgaaaattgt

SEQ ID NO: 60275 - DNA, 19 bp, Homo sapiens
  siRNA target sequence for DKFZP434I116 (NM_015496.3,3457-3475).
catgcaccttcatgttcaa

SEQ ID NO: 60276 - DNA, 19 bp, Homo sapiens
  siRNA target sequence for DKFZP434I116 (NM_015496.3,3491-3509).
gaaatagttcgctctttct

SEQ ID NO: 60277 - DNA, 19 bp, Homo sapiens
  siRNA target sequence for DKFZP434I116 (NM_015496.3,3519-3537).
cctgccagcccattcaaca

SEQ ID NO: 60278 - DNA, 19 bp, Homo sapiens
  siRNA target sequence for DKFZP434I116 (NM_015496.3,3522-3540).
gccagcccattcaacatat

SEQ ID NO: 60279 - DNA, 19 bp, Homo sapiens
  siRNA target sequence for DKFZP434I116 (NM_015496.3,3536-3554).
catatgttacggcgtattt

SEQ ID NO: 60280 - DNA, 19 bp, Homo sapiens
  siRNA target sequence for DKFZP434I116 (NM_015496.3,3541-3559).
gttacggcgtatttgtgtt

SEQ ID NO: 60281 - DNA, 19 bp, Homo sapiens
  siRNA target sequence for DKFZP434I116 (NM_015496.3,3545-3563).
cggcgtatttgtgttcaat

SEQ ID NO: 60282 - DNA, 19 bp, Homo sapiens
  siRNA target sequence for DKFZP434I116 (NM_015496.3,3546-3564).
ggcgtatttgtgttcaatt

SEQ ID NO: 60283 - DNA, 19 bp, Homo sapiens
  siRNA target sequence for DKFZP434I116 (NM_015496.3,3548-3566).
cgtatttgtgttcaattgt

SEQ ID NO: 60284 - DNA, 19 bp, Homo sapiens
  siRNA target sequence for DKFZP434I116 (NM_015496.3,3579-3597).
caccaactgcacttctgat

SEQ ID NO: 60285 - DNA, 19 bp, Homo sapiens
  siRNA target sequence for DKFZP434I116 (NM_015496.3,3711-3729).
cttcacacaaagcttgtaa

SEQ ID NO: 60286 - DNA, 19 bp, Homo sapiens
  siRNA target sequence for DKFZP434I116 (NM_015496.3,3722-3740).
gcttgtaaattagctattt

SEQ ID NO: 60287 - DNA, 19 bp, Homo sapiens
  siRNA target sequence for DKFZP434I116 (NM_015496.3,3746-3764).
ctaattaatggaactatta

SEQ ID NO: 60288 - DNA, 19 bp, Homo sapiens
  siRNA target sequence for DKFZP434I116 (NM_015496.3,3839-3857).
cgccaacagtgtgttgaat

SEQ ID NO: 60289 - DNA, 19 bp, Homo sapiens
  siRNA target sequence for DKFZP434I116 (NM_015496.3,3840-3858).
gccaacagtgtgttgaata

SEQ ID NO: 60290 - DNA, 19 bp, Homo sapiens
  siRNA target sequence for DKFZP434I116 (NM_015496.3,3854-3872).
gaatatgtcacatccattt

SEQ ID NO: 60291 - DNA, 19 bp, Homo sapiens
  siRNA target sequence for DKFZP434I116 (NM_015496.3,3915-3933).
gctcttctgaaggttctat

SEQ ID NO: 60292 - DNA, 19 bp, Homo sapiens
  siRNA target sequence for DKFZP434I116 (NM_015496.3,3943-3961).
ggagcagctctccaattct

SEQ ID NO: 60293 - DNA, 19 bp, Homo sapiens
  siRNA target sequence for DKFZP434I116 (NM_015496.3,4006-4024).
ggctacgctagctaactct

SEQ ID NO: 60294 - DNA, 19 bp, Homo sapiens
  siRNA target sequence for DKFZP434I116 (NM_015496.3,4128-4146).
gtagtgctctgcatagttt

SEQ ID NO: 60295 - DNA, 19 bp, Homo sapiens
  siRNA target sequence for DKFZP434I116 (NM_015496.3,4157-4175).
gtggtcagcacatttagta

SEQ ID NO: 60296 - DNA, 19 bp, Homo sapiens
  siRNA target sequence for DKFZP434I116 (NM_015496.3,4296-4314).
cacggacgatgagtattaa

SEQ ID NO: 60297 - DNA, 19 bp, Homo sapiens
  siRNA target sequence for DKFZP434I116 (NM_015496.3,4300-4318).
gacgatgagtattaatgct

SEQ ID NO: 60298 - DNA, 19 bp, Homo sapiens
  siRNA target sequence for DKFZP434I116 (NM_015496.3,4324-4342).
gttaaaacagcttctacaa

SEQ ID NO: 60299 - DNA, 19 bp, Homo sapiens
  siRNA target sequence for DKFZP434I116 (NM_015496.3,4501-4519).
ggatgtagaaccagtactt

SEQ ID NO: 60300 - DNA, 19 bp, Homo sapiens
  siRNA target sequence for DKFZP434I116 (NM_015496.3,4502-4520).
gatgtagaaccagtacttt

SEQ ID NO: 60301 - DNA, 19 bp, Homo sapiens
  siRNA target sequence for DKFZP434I116 (NM_015496.3,4538-4556).
cagaatctgtttaacaata

SEQ ID NO: 60302 - DNA, 19 bp, Homo sapiens
  siRNA target sequence for DKFZP434I116 (NM_015496.3,4575-4593).
ctgatgtcatggatgatca

SEQ ID NO: 60303 - DNA, 19 bp, Homo sapiens
  siRNA target sequence for DKFZP434I116 (NM_015496.3,4582-4600).
catggatgatcagttgaaa

SEQ ID NO: 60304 - DNA, 19 bp, Homo sapiens
  siRNA target sequence for DKFZP434I116 (NM_015496.3,4689-4707).
gctgtagtgactttgattt

SEQ ID NO: 60305 - DNA, 19 bp, Homo sapiens
  siRNA target sequence for DKFZP434I116 (NM_015496.3,4715-4733).
gaattagagcgctcatttt

SEQ ID NO: 60306 - DNA, 19 bp, Homo sapiens
  siRNA target sequence for DKFZP434I116 (NM_015496.3,4755-4773).
gaagaaccaagactactaa

SEQ ID NO: 60307 - DNA, 19 bp, Homo sapiens
  siRNA target sequence for DKFZP434I116 (NM_015496.3,4767-4785).
ctactaaaggattcaaact

SEQ ID NO: 60308 - DNA, 19 bp, Homo sapiens
  siRNA target sequence for DKFZP434I116 (NM_015496.3,4799-4817).
catgagacctttataacgt

SEQ ID NO: 60309 - DNA, 19 bp, Homo sapiens
  siRNA target sequence for DKFZP434I116 (NM_015496.3,4848-4866).
ccaaaagagctcatgttgt

SEQ ID NO: 60310 - DNA, 19 bp, Homo sapiens
  siRNA target sequence for DKFZP434I116 (NM_015496.3,4906-4924).
gggtatacgacctcatgat

SEQ ID NO: 60311 - DNA, 19 bp, Homo sapiens
  siRNA target sequence for DKFZP434I116 (NM_015496.3,4907-4925).
ggtatacgacctcatgata

SEQ ID NO: 60312 - DNA, 19 bp, Homo sapiens
  siRNA target sequence for DKFZP434I116 (NM_015496.3,4908-4926).
gtatacgacctcatgatat

SEQ ID NO: 60313 - DNA, 19 bp, Homo sapiens
  siRNA target sequence for DKFZP434I116 (NM_015496.3,4950-4968).
caagtagaccaccatctat

SEQ ID NO: 60314 - DNA, 19 bp, Homo sapiens
  siRNA target sequence for DKFZP434I116 (NM_015496.3,5034-5052).
caaaacggccactcaaagt

SEQ ID NO: 60315 - DNA, 19 bp, Homo sapiens
  siRNA target sequence for DKFZP434I116 (NM_015496.3,5051-5069).
gtatcacagaagatttctt

SEQ ID NO: 60316 - DNA, 19 bp, Homo sapiens
  siRNA target sequence for DKFZP434I116 (NM_015496.3,5108-5126).
gctttccacagtcagaata

SEQ ID NO: 60317 - DNA, 19 bp, Homo sapiens
  siRNA target sequence for DKFZP434I116 (NM_015496.3,5211-5229).
ctcgaggaaattacaatga

SEQ ID NO: 60318 - DNA, 19 bp, Homo sapiens
  siRNA target sequence for DKFZP434I116 (NM_015496.3,5234-5252).
cgtggaggccagagcaatt

SEQ ID NO: 60319 - DNA, 19 bp, Homo sapiens
  siRNA target sequence for DKFZP434I116 (NM_015496.3,5273-5291).
ccattacgaccccttagtt

SEQ ID NO: 60320 - DNA, 19 bp, Homo sapiens
  siRNA target sequence for DKFZP434I116 (NM_015496.3,5426-5444).
cgtcatgtacgctccttta

SEQ ID NO: 60321 - DNA, 19 bp, Homo sapiens
  siRNA target sequence for DKFZP434I116 (NM_183009.1,3399-3417).
ctcaggtatcacttccata

SEQ ID NO: 60322 - DNA, 19 bp, Homo sapiens
  siRNA target sequence for DKFZP434I116 (NM_183009.1,3401-3419).
caggtatcacttccatata

SEQ ID NO: 60323 - DNA, 19 bp, Homo sapiens
  siRNA target sequence for DKFZP434I116 (NM_183009.1,3404-3422).
gtatcacttccatataaca

SEQ ID NO: 60324 - DNA, 19 bp, Homo sapiens
  siRNA target sequence for DKFZp547B0714 (NM_152606.2,478-496).
gctcaaagccagatgtgat

SEQ ID NO: 60325 - DNA, 19 bp, Homo sapiens
  siRNA target sequence for DKFZp547B0714 (NM_152606.2,577-595).
ggcataagaccaagaaatt

SEQ ID NO: 60326 - DNA, 19 bp, Homo sapiens
  siRNA target sequence for DKFZp547B0714 (NM_152606.2,579-597).
cataagaccaagaaattat

SEQ ID NO: 60327 - DNA, 19 bp, Homo sapiens
  siRNA target sequence for DKFZp547B0714 (NM_152606.2,669-687).
ctgaaaggatccattttta

SEQ ID NO: 60328 - DNA, 19 bp, Homo sapiens
  siRNA target sequence for DKFZp547B0714 (NM_152606.2,719-737).
gggtcaacagggacttaaa

SEQ ID NO: 60329 - DNA, 19 bp, Homo sapiens
  siRNA target sequence for DKFZp547B0714 (NM_152606.2,721-739).
gtcaacagggacttaaaga

SEQ ID NO: 60330 - DNA, 19 bp, Homo sapiens
  siRNA target sequence for DKFZp547B0714 (NM_152606.2,779-797).
gtcaactgatagaaaacgt

SEQ ID NO: 60331 - DNA, 19 bp, Homo sapiens
  siRNA target sequence for DKFZp547B0714 (NM_152606.2,825-843).
cacaatagtgagaaaagct

SEQ ID NO: 60332 - DNA, 19 bp, Homo sapiens
  siRNA target sequence for DKFZp547B0714 (NM_152606.2,907-925).
gtgggagtacttttaataa

SEQ ID NO: 60333 - DNA, 19 bp, Homo sapiens
  siRNA target sequence for DKFZp547B0714 (NM_152606.2,910-928).
ggagtacttttaataatgt

SEQ ID NO: 60334 - DNA, 19 bp, Homo sapiens
  siRNA target sequence for DKFZp547B0714 (NM_152606.2,1090-1108).
ctctttacccacaacttaa

SEQ ID NO: 60335 - DNA, 19 bp, Homo sapiens
  siRNA target sequence for DKFZp547B0714 (NM_152606.2,1161-1179).
gataagggtttttttagta

SEQ ID NO: 60336 - DNA, 19 bp, Homo sapiens
  siRNA target sequence for DKFZp547B0714 (NM_152606.2,1168-1186).
gtttttttagtagattaga

SEQ ID NO: 60337 - DNA, 19 bp, Homo sapiens
  siRNA target sequence for DKFZp547B0714 (NM_152606.2,1523-1541).
gcttaatcggcataaaaca

SEQ ID NO: 60338 - DNA, 19 bp, Homo sapiens
  siRNA target sequence for DKFZp547B0714 (NM_152606.2,1524-1542).
cttaatcggcataaaacaa

SEQ ID NO: 60339 - DNA, 19 bp, Homo sapiens
  siRNA target sequence for DKFZp547B0714 (NM_152606.2,1551-1569).
ggtataaaaccttttgcat

SEQ ID NO: 60340 - DNA, 19 bp, Homo sapiens
  siRNA target sequence for DKFZp547B0714 (NM_152606.2,1607-1625).
cctcagagtacattctaga

SEQ ID NO: 60341 - DNA, 19 bp, Homo sapiens
  siRNA target sequence for DKFZp547B0714 (NM_152606.2,1608-1626).
ctcagagtacattctagaa

SEQ ID NO: 60342 - DNA, 19 bp, Homo sapiens
  siRNA target sequence for DKFZp547B0714 (NM_152606.2,1610-1628).
cagagtacattctagaatt

SEQ ID NO: 60343 - DNA, 19 bp, Homo sapiens
  siRNA target sequence for DKFZp547B0714 (NM_152606.2,1663-1681).
gcgggaaagcctttatgct

SEQ ID NO: 60344 - DNA, 19 bp, Homo sapiens
  siRNA target sequence for DKFZp547B0714 (NM_152606.2,2023-2041).
ggcagttcactgaacatca

SEQ ID NO: 60345 - DNA, 19 bp, Homo sapiens
  siRNA target sequence for DKFZp547B0714 (NM_152606.2,2090-2108).
ggcctttagtcgtagtgta

SEQ ID NO: 60346 - DNA, 19 bp, Homo sapiens
  siRNA target sequence for DKFZp547B0714 (NM_152606.2,2100-2118).
cgtagtgtagaccttagaa

SEQ ID NO: 60347 - DNA, 19 bp, Homo sapiens
  siRNA target sequence for DKFZp547B0714 (NM_152606.2,2101-2119).
gtagtgtagaccttagaat

SEQ ID NO: 60348 - DNA, 19 bp, Homo sapiens
  siRNA target sequence for DKFZp547B0714 (NM_152606.2,2266-2284).
gacaatattcacatcttta

SEQ ID NO: 60349 - DNA, 19 bp, Homo sapiens
  siRNA target sequence for DKFZP564B1023 (NM_031306.1,212-230).
gttgtgtggctaagataat

SEQ ID NO: 60350 - DNA, 19 bp, Homo sapiens
  siRNA target sequence for DKFZP564B1023 (NM_031306.1,360-378).
gttggcagaggttcattca

SEQ ID NO: 60351 - DNA, 19 bp, Homo sapiens
  siRNA target sequence for DKFZP564B1023 (NM_031306.1,418-436).
gaagagcccgttaagtcat

SEQ ID NO: 60352 - DNA, 19 bp, Homo sapiens
  siRNA target sequence for DKFZP564B1023 (NM_031306.1,421-439).
gagcccgttaagtcatttt

SEQ ID NO: 60353 - DNA, 19 bp, Homo sapiens
  siRNA target sequence for DKFZP564B1023 (NM_031306.1,424-442).
cccgttaagtcattttcca

SEQ ID NO: 60354 - DNA, 19 bp, Homo sapiens
  siRNA target sequence for DKFZP564B1023 (NM_031306.1,425-443).
ccgttaagtcattttccaa

SEQ ID NO: 60355 - DNA, 19 bp, Homo sapiens
  siRNA target sequence for DKFZP564B1023 (NM_031306.1,490-508).
ggtcgttatggagagtata

SEQ ID NO: 60356 - DNA, 19 bp, Homo sapiens
  siRNA target sequence for DKFZP564B1023 (NM_031306.1,491-509).
gtcgttatggagagtatat

SEQ ID NO: 60357 - DNA, 19 bp, Homo sapiens
  siRNA target sequence for DKFZP564B1023 (NM_031306.1,502-520).
gagtatatctgtgataaga

SEQ ID NO: 60358 - DNA, 19 bp, Homo sapiens
  siRNA target sequence for DKFZP564B1023 (NM_031306.1,504-522).
gtatatctgtgataagaca

SEQ ID NO: 60359 - DNA, 19 bp, Homo sapiens
  siRNA target sequence for DKFZP564B1023 (NM_031306.1,543-561).
ggagtgtaaagcgaaacat

SEQ ID NO: 60360 - DNA, 19 bp, Homo sapiens
  siRNA target sequence for DKFZP564B1023 (NM_031306.1,546-564).
gtgtaaagcgaaacatctt

SEQ ID NO: 60361 - DNA, 19 bp, Homo sapiens
  siRNA target sequence for DKFZP564B1023 (NM_031306.1,548-566).
gtaaagcgaaacatcttct

SEQ ID NO: 60362 - DNA, 19 bp, Homo sapiens
  siRNA target sequence for DKFZP564B1023 (NM_031306.1,562-580).
cttctacaagttaaggaaa

SEQ ID NO: 60363 - DNA, 19 bp, Homo sapiens
  siRNA target sequence for DKFZP564B1023 (NM_031306.1,608-626).
cacagaaggctgattctga

SEQ ID NO: 60364 - DNA, 19 bp, Homo sapiens
  siRNA target sequence for DKFZP564B1023 (NM_031306.1,647-665).
cttcctatgtctacaaaga

SEQ ID NO: 60365 - DNA, 19 bp, Homo sapiens
  siRNA target sequence for DKFZP564B1023 (NM_031306.1,694-712).
gaccagattgaaaatctta

SEQ ID NO: 60366 - DNA, 19 bp, Homo sapiens
  siRNA target sequence for DKFZP564B1023 (NM_031306.1,752-770).
ccaggcccattattgactt

SEQ ID NO: 60367 - DNA, 19 bp, Homo sapiens
  siRNA target sequence for DKFZP564B1023 (NM_031306.1,753-771).
caggcccattattgacttt

SEQ ID NO: 60368 - DNA, 19 bp, Homo sapiens
  siRNA target sequence for DKFZP564B1023 (NM_031306.1,755-773).
ggcccattattgactttga

SEQ ID NO: 60369 - DNA, 19 bp, Homo sapiens
  siRNA target sequence for DKFZP564B1023 (NM_031306.1,782-800).
gtctccctgaggtcttaaa

SEQ ID NO: 60370 - DNA, 19 bp, Homo sapiens
  siRNA target sequence for DKFZP564B1023 (NM_031306.1,787-805).
cctgaggtcttaaatcaca

SEQ ID NO: 60371 - DNA, 19 bp, Homo sapiens
  siRNA target sequence for DKFZP564B1023 (NM_031306.1,937-955).
gttatcatgcgagctttat

SEQ ID NO: 60372 - DNA, 19 bp, Homo sapiens
  siRNA target sequence for DKFZP564B1023 (NM_031306.1,949-967).
gctttattcgagagcaaaa

SEQ ID NO: 60373 - DNA, 19 bp, Homo sapiens
  siRNA target sequence for DKFZP564B1023 (NM_031306.1,970-988).
ccatctgcgctcattctta

SEQ ID NO: 60374 - DNA, 19 bp, Homo sapiens
  siRNA target sequence for DKFZP564B1023 (NM_031306.1,998-1016).
gagagttagccattcagat

SEQ ID NO: 60375 - DNA, 19 bp, Homo sapiens
  siRNA target sequence for DKFZP564B1023 (NM_031306.1,1022-1040).
gacaagctaaagaattgat

SEQ ID NO: 60376 - DNA, 19 bp, Homo sapiens
  siRNA target sequence for DKFZP564B1023 (NM_031306.1,1089-1107).
cttacccccacagctttat

SEQ ID NO: 60377 - DNA, 19 bp, Homo sapiens
  siRNA target sequence for DKFZP564B1023 (NM_031306.1,1108-1126).
cgtctgcaacaacatgtta

SEQ ID NO: 60378 - DNA, 19 bp, Homo sapiens
  siRNA target sequence for DKFZP564B1023 (NM_031306.1,1109-1127).
gtctgcaacaacatgttaa

SEQ ID NO: 60379 - DNA, 19 bp, Homo sapiens
  siRNA target sequence for DKFZP564B1023 (NM_031306.1,1114-1132).
caacaacatgttaaggtta

SEQ ID NO: 60380 - DNA, 19 bp, Homo sapiens
  siRNA target sequence for DKFZP564B1023 (NM_031306.1,1117-1135).
caacatgttaaggttatca

SEQ ID NO: 60381 - DNA, 19 bp, Homo sapiens
  siRNA target sequence for DKFZP564B1023 (NM_031306.1,1123-1141).
gttaaggttatcatagcaa

SEQ ID NO: 60382 - DNA, 19 bp, Homo sapiens
  siRNA target sequence for DKFZP564B1023 (NM_031306.1,1147-1165).
gggcgacttctggatataa

SEQ ID NO: 60383 - DNA, 19 bp, Homo sapiens
  siRNA target sequence for DKFZP564B1023 (NM_031306.1,1148-1166).
ggcgacttctggatataat

SEQ ID NO: 60384 - DNA, 19 bp, Homo sapiens
  siRNA target sequence for DKFZP564B1023 (NM_031306.1,1216-1234).
gaagctgataccatgttaa

SEQ ID NO: 60385 - DNA, 19 bp, Homo sapiens
  siRNA target sequence for DKFZP564B1023 (NM_031306.1,1354-1372).
cataatcctgtgagaatta

SEQ ID NO: 60386 - DNA, 19 bp, Homo sapiens
  siRNA target sequence for DKFZP564B1023 (NM_031306.1,1399-1417).
gccaatgtacgtcagatta

SEQ ID NO: 60387 - DNA, 19 bp, Homo sapiens
  siRNA target sequence for DKFZP564B1023 (NM_031306.1,1400-1418).
ccaatgtacgtcagattat

SEQ ID NO: 60388 - DNA, 19 bp, Homo sapiens
  siRNA target sequence for DKFZP564B1023 (NM_031306.1,1401-1419).
caatgtacgtcagattatt

SEQ ID NO: 60389 - DNA, 19 bp, Homo sapiens
  siRNA target sequence for DKFZP564B1023 (NM_031306.1,1519-1537).
ctaggagcagatcttttga

SEQ ID NO: 60390 - DNA, 19 bp, Homo sapiens
  siRNA target sequence for DKFZP564B1023 (NM_031306.1,1557-1575).
cacagggctgaaaagcata

SEQ ID NO: 60391 - DNA, 19 bp, Homo sapiens
  siRNA target sequence for DKFZP564B1023 (NM_031306.1,1588-1606).
gagaagtcgcaaatagaaa

SEQ ID NO: 60392 - DNA, 19 bp, Homo sapiens
  siRNA target sequence for DKFZP564B1023 (NM_031306.1,1637-1655).
gagactatgaagttgtagt

SEQ ID NO: 60393 - DNA, 19 bp, Homo sapiens
  siRNA target sequence for DKFZP564B1023 (NM_031306.1,1698-1716).
caggctggttgtcaatttt

SEQ ID NO: 60394 - DNA, 19 bp, Homo sapiens
  siRNA target sequence for DKFZP564B1023 (NM_031306.1,1727-1745).
caagtatggatgagtatgt

SEQ ID NO: 60395 - DNA, 19 bp, Homo sapiens
  siRNA target sequence for DKFZP564B1023 (NM_031306.1,1775-1793).
ggaggaatccccagcattt

SEQ ID NO: 60396 - DNA, 19 bp, Homo sapiens
  siRNA target sequence for DKFZP564B1023 (NM_031306.1,1776-1794).
gaggaatccccagcatttt

SEQ ID NO: 60397 - DNA, 19 bp, Homo sapiens
  siRNA target sequence for DKFZP564B1023 (NM_031306.1,1778-1796).
ggaatccccagcattttca

SEQ ID NO: 60398 - DNA, 19 bp, Homo sapiens
  siRNA target sequence for DKFZP564B1023 (NM_031306.1,1795-1813).
caacaggatgtcagaatga

SEQ ID NO: 60399 - DNA, 19 bp, Homo sapiens
  siRNA target sequence for DKFZP564B1023 (NM_031306.1,1854-1872).
ccaattgaaggtcaaacta

SEQ ID NO: 60400 - DNA, 19 bp, Homo sapiens
  siRNA target sequence for DKFZp761J139 (NM_032280.1,3169-3187).
ccgagttagtaccacatat

SEQ ID NO: 60401 - DNA, 19 bp, Homo sapiens
  siRNA target sequence for DKFZp761J139 (NM_032280.1,3170-3188).
cgagttagtaccacatata

SEQ ID NO: 60402 - DNA, 19 bp, Homo sapiens
  siRNA target sequence for DKFZp761J139 (NM_032280.1,3171-3189).
gagttagtaccacatataa

SEQ ID NO: 60403 - DNA, 19 bp, Homo sapiens
  siRNA target sequence for DKFZp761J139 (NM_032280.1,3173-3191).
gttagtaccacatataaca

SEQ ID NO: 60404 - DNA, 19 bp, Homo sapiens
  siRNA target sequence for DKFZp761J139 (NM_032280.1,3259-3277).
cctaccaaagcgtaaacaa

SEQ ID NO: 60405 - DNA, 19 bp, Homo sapiens
  siRNA target sequence for DKFZp761J139 (NM_032280.1,3291-3309).
ggctatccctcaaaaatga

SEQ ID NO: 60406 - DNA, 19 bp, Homo sapiens
  siRNA target sequence for DKFZp761J139 (NM_032280.1,3292-3310).
gctatccctcaaaaatgat

SEQ ID NO: 60407 - DNA, 19 bp, Homo sapiens
  siRNA target sequence for DKFZp761J139 (NM_032280.1,3311-3329).
gcaccccaagcaaaacata

SEQ ID NO: 60408 - DNA, 19 bp, Homo sapiens
  siRNA target sequence for DKFZp761J139 (NM_032280.1,3312-3330).
caccccaagcaaaacataa

SEQ ID NO: 60409 - DNA, 19 bp, Homo sapiens
  siRNA target sequence for DKFZp761J139 (NM_032280.1,3374-3392).
ggattcatggaatacctaa

SEQ ID NO: 60410 - DNA, 19 bp, Homo sapiens
  siRNA target sequence for DKFZp761J139 (NM_032280.1,3382-3400).
ggaatacctaagacagaat

SEQ ID NO: 60411 - DNA, 19 bp, Homo sapiens
  siRNA target sequence for DKFZp761J139 (NM_032280.1,3383-3401).
gaatacctaagacagaatt

SEQ ID NO: 60412 - DNA, 19 bp, Homo sapiens
  siRNA target sequence for DKFZp761J139 (NM_032280.1,3458-3476).
gaaattgcagttgctttaa

SEQ ID NO: 60413 - DNA, 19 bp, Homo sapiens
  siRNA target sequence for DKFZp761J139 (NM_032280.1,3533-3551).
gcaatggtgtgtttccatt

SEQ ID NO: 60414 - DNA, 19 bp, Homo sapiens
  siRNA target sequence for DKFZp761J139 (NM_032280.1,3538-3556).
ggtgtgtttccattgtaga

SEQ ID NO: 60415 - DNA, 19 bp, Homo sapiens
  siRNA target sequence for DKFZp761J139 (NM_032280.1,3555-3573).
gaaaacctggtcatggaat

SEQ ID NO: 60416 - DNA, 19 bp, Homo sapiens
  siRNA target sequence for DKFZp761J139 (NM_032280.1,3607-3625).
catgggcactgggatatgt

SEQ ID NO: 60417 - DNA, 19 bp, Homo sapiens
  siRNA target sequence for DKFZp761J139 (NM_032280.1,3611-3629).
ggcactgggatatgttaca

SEQ ID NO: 60418 - DNA, 19 bp, Homo sapiens
  siRNA target sequence for DKFZp761J139 (NM_032280.1,3636-3654).
ggtccacagagcacgaaat

SEQ ID NO: 60419 - DNA, 19 bp, Homo sapiens
  siRNA target sequence for DKFZp761J139 (NM_032280.1,3637-3655).
gtccacagagcacgaaata

SEQ ID NO: 60420 - DNA, 19 bp, Homo sapiens
  siRNA target sequence for DKFZp761J139 (NM_032280.1,3642-3660).
cagagcacgaaataaccaa

SEQ ID NO: 60421 - DNA, 19 bp, Homo sapiens
  siRNA target sequence for DKFZp761J139 (NM_032280.1,3657-3675).
ccaagtgtaaggctaaagt

SEQ ID NO: 60422 - DNA, 19 bp, Homo sapiens
  siRNA target sequence for DKFZp761J139 (NM_032280.1,3682-3700).
ggctcttggcgaatttcct

SEQ ID NO: 60423 - DNA, 19 bp, Homo sapiens
  siRNA target sequence for DKFZp761J139 (NM_032280.1,3683-3701).
gctcttggcgaatttcctt

SEQ ID NO: 60424 - DNA, 19 bp, Homo sapiens
  siRNA target sequence for DKFZp761J139 (NM_032280.1,3689-3707).
ggcgaatttccttttgcaa

SEQ ID NO: 60425 - DNA, 19 bp, Homo sapiens
  siRNA target sequence for DKFZp761J139 (NM_032280.1,3690-3708).
gcgaatttccttttgcaaa

SEQ ID NO: 60426 - DNA, 19 bp, Homo sapiens
  siRNA target sequence for DKFZp761J139 (NM_032280.1,3730-3748).
ggggcacctgtctagatct

SEQ ID NO: 60427 - DNA, 19 bp, Homo sapiens
  siRNA target sequence for DKFZp761J139 (NM_032280.1,3731-3749).
gggcacctgtctagatctt

SEQ ID NO: 60428 - DNA, 19 bp, Homo sapiens
  siRNA target sequence for DKFZp761J139 (NM_032280.1,3741-3759).
ctagatcttgtcctgataa

SEQ ID NO: 60429 - DNA, 19 bp, Homo sapiens
  siRNA target sequence for DKFZp761J139 (NM_032280.1,3782-3800).
ggtggcggttgcaaacttt

SEQ ID NO: 60430 - DNA, 19 bp, Homo sapiens
  siRNA target sequence for DKFZp761J139 (NM_032280.1,3883-3901).
gggaatgagtgcagactat

SEQ ID NO: 60431 - DNA, 19 bp, Homo sapiens
  siRNA target sequence for DKFZp762I137 (NM_152411.1,72-90).
ggctacctctgacttttga

SEQ ID NO: 60432 - DNA, 19 bp, Homo sapiens
  siRNA target sequence for DKFZp762I137 (NM_152411.1,184-202).
gactctcgtctctctagat

SEQ ID NO: 60433 - DNA, 19 bp, Homo sapiens
  siRNA target sequence for DKFZp762I137 (NM_152411.1,186-204).
ctctcgtctctctagatga

SEQ ID NO: 60434 - DNA, 19 bp, Homo sapiens
  siRNA target sequence for DKFZp762I137 (NM_152411.1,212-230).
ccaaaaccagaactaatat

SEQ ID NO: 60435 - DNA, 19 bp, Homo sapiens
  siRNA target sequence for DKFZp762I137 (NM_152411.1,303-321).
cctctgttgatatgcattt

SEQ ID NO: 60436 - DNA, 19 bp, Homo sapiens
  siRNA target sequence for DKFZp762I137 (NM_152411.1,358-376).
ccagcaggctatgaattca

SEQ ID NO: 60437 - DNA, 19 bp, Homo sapiens
  siRNA target sequence for DKFZp762I137 (NM_152411.1,364-382).
ggctatgaattcaggaaaa

SEQ ID NO: 60438 - DNA, 19 bp, Homo sapiens
  siRNA target sequence for DKFZp762I137 (NM_152411.1,365-383).
gctatgaattcaggaaaaa

SEQ ID NO: 60439 - DNA, 19 bp, Homo sapiens
  siRNA target sequence for DKFZp762I137 (NM_152411.1,523-541).
cagtgaatctaccctaaaa

SEQ ID NO: 60440 - DNA, 19 bp, Homo sapiens
  siRNA target sequence for DKFZp762I137 (NM_152411.1,646-664).
ggagaacaaccatttagta

SEQ ID NO: 60441 - DNA, 19 bp, Homo sapiens
  siRNA target sequence for DKFZp762I137 (NM_152411.1,699-717).
gtagggcctgggagaaatt

SEQ ID NO: 60442 - DNA, 19 bp, Homo sapiens
  siRNA target sequence for DKFZp762I137 (NM_152411.1,861-879).
ggaacgctgacggtgaaat

SEQ ID NO: 60443 - DNA, 19 bp, Homo sapiens
  siRNA target sequence for DKFZp762I137 (NM_152411.1,1353-1371).
gcttcgccaagcagtgtaa

SEQ ID NO: 60444 - DNA, 19 bp, Homo sapiens
  siRNA target sequence for DKFZp762I137 (NM_152411.1,1354-1372).
cttcgccaagcagtgtaaa

SEQ ID NO: 60445 - DNA, 19 bp, Homo sapiens
  siRNA target sequence for DKFZp762I137 (NM_152411.1,1358-1376).
gccaagcagtgtaaactca

SEQ ID NO: 60446 - DNA, 19 bp, Homo sapiens
  siRNA target sequence for DKFZp762I137 (NM_152411.1,2090-2108).
cccaagtgtgacaagagtt

SEQ ID NO: 60447 - DNA, 19 bp, Homo sapiens
  siRNA target sequence for DKFZp762I137 (NM_152411.1,2278-2296).
catttacaagtctaagctt

SEQ ID NO: 60448 - DNA, 19 bp, Homo sapiens
  siRNA target sequence for DKFZp762I137 (NM_152411.1,2325-2343).
cctgtcctgctccaaatga

SEQ ID NO: 60449 - DNA, 19 bp, Homo sapiens
  siRNA target sequence for DKFZp762I137 (NM_152411.1,2336-2354).
ccaaatgaactggacatta

SEQ ID NO: 60450 - DNA, 19 bp, Homo sapiens
  siRNA target sequence for DND1 (NM_194249.1,211-229).
ctgggtcagaggtgttcat

SEQ ID NO: 60451 - DNA, 19 bp, Homo sapiens
  siRNA target sequence for DND1 (NM_194249.1,300-318).
gagttccgcctgatgatga

SEQ ID NO: 60452 - DNA, 19 bp, Homo sapiens
  siRNA target sequence for DND1 (NM_194249.1,1082-1100).
ggcaggtaccatggttaaa

SEQ ID NO: 60453 - DNA, 19 bp, Homo sapiens
  siRNA target sequence for DND1 (NM_194249.1,1084-1102).
caggtaccatggttaaaca

SEQ ID NO: 60454 - DNA, 19 bp, Homo sapiens
  siRNA target sequence for DND1 (NM_194249.1,1086-1104).
ggtaccatggttaaacagt

SEQ ID NO: 60455 - DNA, 19 bp, Homo sapiens
  siRNA target sequence for DRB1 (NM_152945.1,313-331).
gagtccaagggcattgctt

SEQ ID NO: 60456 - DNA, 19 bp, Homo sapiens
  siRNA target sequence for DRB1 (NM_152945.1,523-541).
gaagatctgcgggaaaaat

SEQ ID NO: 60457 - DNA, 19 bp, Homo sapiens
  siRNA target sequence for DRB1 (NM_152945.1,526-544).
gatctgcgggaaaaattta

SEQ ID NO: 60458 - DNA, 19 bp, Homo sapiens
  siRNA target sequence for DRB1 (NM_152945.1,553-571).
ggagatatcgagtattgca

SEQ ID NO: 60459 - DNA, 19 bp, Homo sapiens
  siRNA target sequence for DRB1 (NM_152945.1,561-579).
cgagtattgcagcattatt

SEQ ID NO: 60460 - DNA, 19 bp, Homo sapiens
  siRNA target sequence for DRB1 (NM_152945.1,608-626).
gtttgggctacgtacgata

SEQ ID NO: 60461 - DNA, 19 bp, Homo sapiens
  siRNA target sequence for DRB1 (NM_152945.1,612-630).
gggctacgtacgatactta

SEQ ID NO: 60462 - DNA, 19 bp, Homo sapiens
  siRNA target sequence for DRB1 (NM_152945.1,613-631).
ggctacgtacgatacttaa

SEQ ID NO: 60463 - DNA, 19 bp, Homo sapiens
  siRNA target sequence for DRB1 (NM_152945.1,614-632).
gctacgtacgatacttaaa

SEQ ID NO: 60464 - DNA, 19 bp, Homo sapiens
  siRNA target sequence for DRB1 (NM_152945.1,615-633).
ctacgtacgatacttaaaa

SEQ ID NO: 60465 - DNA, 19 bp, Homo sapiens
  siRNA target sequence for DRB1 (NM_152945.1,618-636).
cgtacgatacttaaaacca

SEQ ID NO: 60466 - DNA, 19 bp, Homo sapiens
  siRNA target sequence for DRB1 (NM_152945.1,638-656).
cacaagctgcccaagcaat

SEQ ID NO: 60467 - DNA, 19 bp, Homo sapiens
  siRNA target sequence for DRB1 (NM_152945.1,663-681).
ctgtgatcgaagttttaga

SEQ ID NO: 60468 - DNA, 19 bp, Homo sapiens
  siRNA target sequence for DRB1 (NM_152945.1,683-701).
caatcttggctgaacctaa

SEQ ID NO: 60469 - DNA, 19 bp, Homo sapiens
  siRNA target sequence for DRB1 (NM_152945.1,687-705).
cttggctgaacctaaaaat

SEQ ID NO: 60470 - DNA, 19 bp, Homo sapiens
  siRNA target sequence for DRB1 (NM_152945.1,713-731).
ctgaatcctctgaacaaga

SEQ ID NO: 60471 - DNA, 19 bp, Homo sapiens
  siRNA target sequence for DRB1 (NM_152945.1,719-737).
cctctgaacaagattatta

SEQ ID NO: 60472 - DNA, 19 bp, Homo sapiens
  siRNA target sequence for DRB1 (NM_152945.1,762-780).
gggacatgaacctagagta

SEQ ID NO: 60473 - DNA, 19 bp, Homo sapiens
  siRNA target sequence for DRB1 (NM_152945.1,766-784).
catgaacctagagtaaata

SEQ ID NO: 60474 - DNA, 19 bp, Homo sapiens
  siRNA target sequence for DRB1 (NM_152945.1,769-787).
gaacctagagtaaatatgt

SEQ ID NO: 60475 - DNA, 19 bp, Homo sapiens
  siRNA target sequence for DRB1 (NM_152945.1,808-826).
gaattttcaagttttgaca

SEQ ID NO: 60476 - DNA, 19 bp, Homo sapiens
  siRNA target sequence for DRB1 (NM_152945.1,858-876).
caaacgcttgtcagttgta

SEQ ID NO: 60477 - DNA, 19 bp, Homo sapiens
  siRNA target sequence for DRB1 (NM_152945.1,867-885).
gtcagttgtatcaagagtt

SEQ ID NO: 60478 - DNA, 19 bp, Homo sapiens
  siRNA target sequence for DRB1 (NM_152945.1,909-927).
cagcatttttgatatagta

SEQ ID NO: 60479 - DNA, 19 bp, Homo sapiens
  siRNA target sequence for DRB1 (NM_152945.1,979-997).
catggagtggttcagtatt

SEQ ID NO: 60480 - DNA, 19 bp, Homo sapiens
  siRNA target sequence for DRB1 (NM_152945.1,982-1000).
ggagtggttcagtatttta

SEQ ID NO: 60481 - DNA, 19 bp, Homo sapiens
  siRNA target sequence for DRB1 (NM_152945.1,983-1001).
gagtggttcagtattttaa

SEQ ID NO: 60482 - DNA, 19 bp, Homo sapiens
  siRNA target sequence for DRB1 (NM_152945.1,1006-1024).
gcatcagctatttatgcaa

SEQ ID NO: 60483 - DNA, 19 bp, Homo sapiens
  siRNA target sequence for ECGP (NM_018025.2,470-488).
ctttagtggaggtttctct

SEQ ID NO: 60484 - DNA, 19 bp, Homo sapiens
  siRNA target sequence for ECGP (NM_018025.2,490-508).
ctggatacttcaatactgt

SEQ ID NO: 60485 - DNA, 19 bp, Homo sapiens
  siRNA target sequence for ECGP (NM_018025.2,603-621).
gaagaggatcttagtgaat

SEQ ID NO: 60486 - DNA, 19 bp, Homo sapiens
  siRNA target sequence for ECGP (NM_018025.2,657-675).
gattttgcctccaaaacca

SEQ ID NO: 60487 - DNA, 19 bp, Homo sapiens
  siRNA target sequence for ECGP (NM_018025.2,752-770).
cctcataacgccagcaaaa

SEQ ID NO: 60488 - DNA, 19 bp, Homo sapiens
  siRNA target sequence for ECGP (NM_018025.2,753-771).
ctcataacgccagcaaaat

SEQ ID NO: 60489 - DNA, 19 bp, Homo sapiens
  siRNA target sequence for ECGP (NM_018025.2,755-773).
cataacgccagcaaaatta

SEQ ID NO: 60490 - DNA, 19 bp, Homo sapiens
  siRNA target sequence for ECGP (NM_018025.2,777-795).
gttggtttcgaattgctaa

SEQ ID NO: 60491 - DNA, 19 bp, Homo sapiens
  siRNA target sequence for ECGP (NM_018025.2,780-798).
ggtttcgaattgctaagaa

SEQ ID NO: 60492 - DNA, 19 bp, Homo sapiens
  siRNA target sequence for ECGP (NM_018025.2,781-799).
gtttcgaattgctaagaaa

SEQ ID NO: 60493 - DNA, 19 bp, Homo sapiens
  siRNA target sequence for ECGP (NM_018025.2,823-841).
gagttggtcctcgagtaaa

SEQ ID NO: 60494 - DNA, 19 bp, Homo sapiens
  siRNA target sequence for ECGP (NM_018025.2,825-843).
gttggtcctcgagtaaaga

SEQ ID NO: 60495 - DNA, 19 bp, Homo sapiens
  siRNA target sequence for ECGP (NM_018025.2,864-882).
cctgatcctggagtcaaaa

SEQ ID NO: 60496 - DNA, 19 bp, Homo sapiens
  siRNA target sequence for ECGP (NM_018025.2,865-883).
ctgatcctggagtcaaaat

SEQ ID NO: 60497 - DNA, 19 bp, Homo sapiens
  siRNA target sequence for ECGP (NM_018025.2,867-885).
gatcctggagtcaaaatct

SEQ ID NO: 60498 - DNA, 19 bp, Homo sapiens
  siRNA target sequence for ECGP (NM_018025.2,961-979).
cctttgcacccaaagatgt

SEQ ID NO: 60499 - DNA, 19 bp, Homo sapiens
  siRNA target sequence for ECGP (NM_018025.2,1063-1081).
cttcgggagaacattttaa

SEQ ID NO: 60500 - DNA, 19 bp, Homo sapiens
  siRNA target sequence for ECGP (NM_018025.2,1066-1084).
cgggagaacattttaatct

SEQ ID NO: 60501 - DNA, 19 bp, Homo sapiens
  siRNA target sequence for ECGP (NM_018025.2,1208-1226).
ctatgccacagaaactcta

SEQ ID NO: 60502 - DNA, 19 bp, Homo sapiens
  siRNA target sequence for ECGP (NM_018025.2,1332-1350).
cggtacgttggcaaaattt

SEQ ID NO: 60503 - DNA, 19 bp, Homo sapiens
  siRNA target sequence for ECGP (NM_018025.2,1333-1351).
ggtacgttggcaaaatttt

SEQ ID NO: 60504 - DNA, 19 bp, Homo sapiens
  siRNA target sequence for ECGP (NM_018025.2,1337-1355).
cgttggcaaaattttggat

SEQ ID NO: 60505 - DNA, 19 bp, Homo sapiens
  siRNA target sequence for ECGP (NM_018025.2,1424-1442).
ctatcgaccagtgcattat

SEQ ID NO: 60506 - DNA, 19 bp, Homo sapiens
  siRNA target sequence for ECGP (NM_018025.2,1428-1446).
cgaccagtgcattatttca

SEQ ID NO: 60507 - DNA, 19 bp, Homo sapiens
  siRNA target sequence for ECGP (NM_018025.2,1466-1484).
ctccgagaactcacactta

SEQ ID NO: 60508 - DNA, 19 bp, Homo sapiens
  siRNA target sequence for ECGP (NM_018025.2,1468-1486).
ccgagaactcacacttact

SEQ ID NO: 60509 - DNA, 19 bp, Homo sapiens
  siRNA target sequence for ECGP (NM_018025.2,1481-1499).
cttactgcaggtattatca

SEQ ID NO: 60510 - DNA, 19 bp, Homo sapiens
  siRNA target sequence for ECGP (NM_018025.2,1605-1623).
gctacttcagtgttagaat

SEQ ID NO: 60511 - DNA, 19 bp, Homo sapiens
  siRNA target sequence for ECGP (NM_018025.2,1606-1624).
ctacttcagtgttagaatt

SEQ ID NO: 60512 - DNA, 19 bp, Homo sapiens
  siRNA target sequence for ECGP (NM_018025.2,1791-1809).
ggtgggacggccaccttaa

SEQ ID NO: 60513 - DNA, 19 bp, Homo sapiens
  siRNA target sequence for ECGP (NM_018025.2,1792-1810).
gtgggacggccaccttaaa

SEQ ID NO: 60514 - DNA, 19 bp, Homo sapiens
  siRNA target sequence for ECGP (NM_018025.2,1856-1874).
gcgatacgacgagttctta

SEQ ID NO: 60515 - DNA, 19 bp, Homo sapiens
  siRNA target sequence for ECGP (NM_018025.2,1858-1876).
gatacgacgagttcttagt

SEQ ID NO: 60516 - DNA, 19 bp, Homo sapiens
  siRNA target sequence for ECGP (NM_018025.2,1948-1966).
gccgtgagcgggatgagtt

SEQ ID NO: 60517 - DNA, 19 bp, Homo sapiens
  siRNA target sequence for ECGP (NM_018025.2,1949-1967).
ccgtgagcgggatgagttt

SEQ ID NO: 60518 - DNA, 19 bp, Homo sapiens
  siRNA target sequence for ECGP (NM_018025.2,2154-2172).
caccctgacaagcttctat

SEQ ID NO: 60519 - DNA, 19 bp, Homo sapiens
  siRNA target sequence for ECGP (NM_018025.2,2193-2211).
gacccttatccagattcaa

SEQ ID NO: 60520 - DNA, 19 bp, Homo sapiens
  siRNA target sequence for ECGP (NM_018025.2,2246-2264).
gtactcagtcttcaacttt

SEQ ID NO: 60521 - DNA, 19 bp, Homo sapiens
  siRNA target sequence for ECGP (NM_018025.2,2328-2346).
caccgaggtcccgacaaat

SEQ ID NO: 60522 - DNA, 19 bp, Homo sapiens
  siRNA target sequence for ECGP (NM_018025.2,2330-2348).
ccgaggtcccgacaaatca

SEQ ID NO: 60523 - DNA, 19 bp, Homo sapiens
  siRNA target sequence for ECGP (NM_018025.2,2331-2349).
cgaggtcccgacaaatcaa

SEQ ID NO: 60524 - DNA, 19 bp, Homo sapiens
  siRNA target sequence for ECGP (NM_018025.2,2335-2353).
gtcccgacaaatcaagaaa

SEQ ID NO: 60525 - DNA, 19 bp, Homo sapiens
  siRNA target sequence for ECGP (NM_018025.2,2360-2378).
cagatgggatacctctaaa

SEQ ID NO: 60526 - DNA, 19 bp, Homo sapiens
  siRNA target sequence for ECGP (NM_018025.2,2391-2409).
gaagattccattagtgaat

SEQ ID NO: 60527 - DNA, 19 bp, Homo sapiens
  siRNA target sequence for ECGP (NM_018025.2,2434-2452).
ccgagccacctaaacaaca

SEQ ID NO: 60528 - DNA, 19 bp, Homo sapiens
  siRNA target sequence for ECGP (NM_018025.2,2456-2474).
cagccccttagtaaacaaa

SEQ ID NO: 60529 - DNA, 19 bp, Homo sapiens
  siRNA target sequence for ECGP (NM_018025.2,2458-2476).
gccccttagtaaacaaaga

SEQ ID NO: 60530 - DNA, 19 bp, Homo sapiens
  siRNA target sequence for ECGP (NM_018025.2,2481-2499).
gagcatgcaccagaattat

SEQ ID NO: 60531 - DNA, 19 bp, Homo sapiens
  siRNA target sequence for ECGP (NM_018025.2,2491-2509).
cagaattatccgcaaatca

SEQ ID NO: 60532 - DNA, 19 bp, Homo sapiens
  siRNA target sequence for ECGP (NM_018025.2,2503-2521).
caaatcagaccgtcaacaa

SEQ ID NO: 60533 - DNA, 19 bp, Homo sapiens
  siRNA target sequence for ECGP (NM_018025.2,2758-2776).
cttccttcccgatacaaaa

SEQ ID NO: 60534 - DNA, 19 bp, Homo sapiens
  siRNA target sequence for ECGP (NM_018025.2,3069-3087).
ctgctgagacggctgaaaa

SEQ ID NO: 60535 - DNA, 19 bp, Homo sapiens
  siRNA target sequence for ECGP (NM_018025.2,3071-3089).
gctgagacggctgaaaagt

SEQ ID NO: 60536 - DNA, 19 bp, Homo sapiens
  siRNA target sequence for EHD2 (NM_014601.2,574-592).
gtgcccagctccctaatca

SEQ ID NO: 60537 - DNA, 19 bp, Homo sapiens
  siRNA target sequence for EHD2 (NM_014601.2,1074-1092).
cgagttcacgcttacatca

SEQ ID NO: 60538 - DNA, 19 bp, Homo sapiens
  siRNA target sequence for EHD2 (NM_014601.2,1075-1093).
gagttcacgcttacatcat

SEQ ID NO: 60539 - DNA, 19 bp, Homo sapiens
  siRNA target sequence for EHD2 (NM_014601.2,1501-1519).
ccaaggacaagtccaaata

SEQ ID NO: 60540 - DNA, 19 bp, Homo sapiens
  siRNA target sequence for EHD3 (NM_014600.1,827-845).
gggttgaccgcatcattct

SEQ ID NO: 60541 - DNA, 19 bp, Homo sapiens
  siRNA target sequence for EHD3 (NM_014600.1,927-945).
gcgagtggtgctgaacaaa

SEQ ID NO: 60542 - DNA, 19 bp, Homo sapiens
  siRNA target sequence for EHD3 (NM_014600.1,1134-1152).
gagtctgccccgaaatgct

SEQ ID NO: 60543 - DNA, 19 bp, Homo sapiens
  siRNA target sequence for EHD3 (NM_014600.1,1284-1302).
caacctggccgagatctat

SEQ ID NO: 60544 - DNA, 19 bp, Homo sapiens
  siRNA target sequence for EHD3 (NM_014600.1,1572-1590).
ggctggagaaggtatcgat

SEQ ID NO: 60545 - DNA, 19 bp, Homo sapiens
  siRNA target sequence for ENDOGL1 (NM_005107.1,61-79).
ggttcccgtcgttttctga

SEQ ID NO: 60546 - DNA, 19 bp, Homo sapiens
  siRNA target sequence for ENDOGL1 (NM_005107.1,217-235).
caatttggattccctttaa

SEQ ID NO: 60547 - DNA, 19 bp, Homo sapiens
  siRNA target sequence for ENDOGL1 (NM_005107.1,244-262).
gaggcaaggtgttacacta

SEQ ID NO: 60548 - DNA, 19 bp, Homo sapiens
  siRNA target sequence for ENDOGL1 (NM_005107.1,248-266).
caaggtgttacactaatca

SEQ ID NO: 60549 - DNA, 19 bp, Homo sapiens
  siRNA target sequence for ENDOGL1 (NM_005107.1,260-278).
ctaatcacgctttgtctta

SEQ ID NO: 60550 - DNA, 19 bp, Homo sapiens
  siRNA target sequence for ENDOGL1 (NM_005107.1,297-315).
gcctagatgggttcttgaa

SEQ ID NO: 60551 - DNA, 19 bp, Homo sapiens
  siRNA target sequence for ENDOGL1 (NM_005107.1,299-317).
ctagatgggttcttgaaca

SEQ ID NO: 60552 - DNA, 19 bp, Homo sapiens
  siRNA target sequence for ENDOGL1 (NM_005107.1,401-419).
gtgccttcaatgaagatta

SEQ ID NO: 60553 - DNA, 19 bp, Homo sapiens
  siRNA target sequence for ENDOGL1 (NM_005107.1,490-508).
gctgaaaccttttaccttt

SEQ ID NO: 60554 - DNA, 19 bp, Homo sapiens
  siRNA target sequence for ENDOGL1 (NM_005107.1,497-515).
ccttttacctttctaacat

SEQ ID NO: 60555 - DNA, 19 bp, Homo sapiens
  siRNA target sequence for ENDOGL1 (NM_005107.1,513-531).
cattgtgcctcaggatttt

SEQ ID NO: 60556 - DNA, 19 bp, Homo sapiens
  siRNA target sequence for ENDOGL1 (NM_005107.1,519-537).
gcctcaggattttgataat

SEQ ID NO: 60557 - DNA, 19 bp, Homo sapiens
  siRNA target sequence for ENDOGL1 (NM_005107.1,520-538).
cctcaggattttgataata

SEQ ID NO: 60558 - DNA, 19 bp, Homo sapiens
  siRNA target sequence for ENDOGL1 (NM_005107.1,545-563).
gatattggaacagaataga

SEQ ID NO: 60559 - DNA, 19 bp, Homo sapiens
  siRNA target sequence for ENDOGL1 (NM_005107.1,551-569).
ggaacagaatagaaatgta

SEQ ID NO: 60560 - DNA, 19 bp, Homo sapiens
  siRNA target sequence for ENDOGL1 (NM_005107.1,701-719).
cctcacacctttataaggt

SEQ ID NO: 60561 - DNA, 19 bp, Homo sapiens
  siRNA target sequence for ENDOGL1 (NM_005107.1,704-722).
cacacctttataaggtaat

SEQ ID NO: 60562 - DNA, 19 bp, Homo sapiens
  siRNA target sequence for ENDOGL1 (NM_005107.1,807-825).
ccagttaactgaattccaa

SEQ ID NO: 60563 - DNA, 19 bp, Homo sapiens
  siRNA target sequence for ENDOGL1 (NM_005107.1,835-853).
caggacctagagaagttgt

SEQ ID NO: 60564 - DNA, 19 bp, Homo sapiens
  siRNA target sequence for ENDOGL1 (NM_005107.1,871-889).
cctcatttggatagaacta

SEQ ID NO: 60565 - DNA, 19 bp, Homo sapiens
  siRNA target sequence for ENDOGL1 (NM_005107.1,887-905).
ctagtgatatccggaatat

SEQ ID NO: 60566 - DNA, 19 bp, Homo sapiens
  siRNA target sequence for ENDOGL1 (NM_005107.1,951-969).
cttgtacttgagtacaaga

SEQ ID NO: 60567 - DNA, 19 bp, Homo sapiens
  siRNA target sequence for ENDOGL1 (NM_005107.1,991-1009).
gtgctcagactggaaaaga

SEQ ID NO: 60568 - DNA, 19 bp, Homo sapiens
  siRNA target sequence for ENDOGL1 (NM_005107.1,1042-1060).
ccagatgattactttatga

SEQ ID NO: 60569 - DNA, 19 bp, Homo sapiens
  siRNA target sequence for ENPP1 (NM_006208.1,231-249).
ccaacacctataaagtact

SEQ ID NO: 60570 - DNA, 19 bp, Homo sapiens
  siRNA target sequence for ENPP1 (NM_006208.1,245-263).
gtactctcgctggtattgt

SEQ ID NO: 60571 - DNA, 19 bp, Homo sapiens
  siRNA target sequence for ENPP1 (NM_006208.1,262-280).
gtcagtatgtgtgttaaca

SEQ ID NO: 60572 - DNA, 19 bp, Homo sapiens
  siRNA target sequence for ENPP1 (NM_006208.1,270-288).
gtgtgttaacaacaatact

SEQ ID NO: 60573 - DNA, 19 bp, Homo sapiens
  siRNA target sequence for ENPP1 (NM_006208.1,279-297).
caacaatacttggttgtat

SEQ ID NO: 60574 - DNA, 19 bp, Homo sapiens
  siRNA target sequence for ENPP1 (NM_006208.1,347-365).
cgctgtttcgagagaacat

SEQ ID NO: 60575 - DNA, 19 bp, Homo sapiens
  siRNA target sequence for ENPP1 (NM_006208.1,349-367).
ctgtttcgagagaacattt

SEQ ID NO: 60576 - DNA, 19 bp, Homo sapiens
  siRNA target sequence for ENPP1 (NM_006208.1,433-451).
gtgcatagaaccagaacat

SEQ ID NO: 60577 - DNA, 19 bp, Homo sapiens
  siRNA target sequence for ENPP1 (NM_006208.1,435-453).
gcatagaaccagaacatat

SEQ ID NO: 60578 - DNA, 19 bp, Homo sapiens
  siRNA target sequence for ENPP1 (NM_006208.1,436-454).
catagaaccagaacatata

SEQ ID NO: 60579 - DNA, 19 bp, Homo sapiens
  siRNA target sequence for ENPP1 (NM_006208.1,440-458).
gaaccagaacatatatgga

SEQ ID NO: 60580 - DNA, 19 bp, Homo sapiens
  siRNA target sequence for ENPP1 (NM_006208.1,671-689).
ggattcagggcagaatatt

SEQ ID NO: 60581 - DNA, 19 bp, Homo sapiens
  siRNA target sequence for ENPP1 (NM_006208.1,672-690).
gattcagggcagaatattt

SEQ ID NO: 60582 - DNA, 19 bp, Homo sapiens
  siRNA target sequence for ENPP1 (NM_006208.1,694-712).
cacttggggtggacttctt

SEQ ID NO: 60583 - DNA, 19 bp, Homo sapiens
  siRNA target sequence for ENPP1 (NM_006208.1,757-775).
catgagaccggtatatcca

SEQ ID NO: 60584 - DNA, 19 bp, Homo sapiens
  siRNA target sequence for ENPP1 (NM_006208.1,766-784).
ggtatatccaacaaaaact

SEQ ID NO: 60585 - DNA, 19 bp, Homo sapiens
  siRNA target sequence for ENPP1 (NM_006208.1,811-829).
cggattgtatccagaatct

SEQ ID NO: 60586 - DNA, 19 bp, Homo sapiens
  siRNA target sequence for ENPP1 (NM_006208.1,813-831).
gattgtatccagaatctca

SEQ ID NO: 60587 - DNA, 19 bp, Homo sapiens
  siRNA target sequence for ENPP1 (NM_006208.1,833-851).
ggcataatcgacaataaaa

SEQ ID NO: 60588 - DNA, 19 bp, Homo sapiens
  siRNA target sequence for ENPP1 (NM_006208.1,915-933).
ggtacaaaggagaaccaat

SEQ ID NO: 60589 - DNA, 19 bp, Homo sapiens
  siRNA target sequence for ENPP1 (NM_006208.1,936-954).
gggtcacagctaagtatca

SEQ ID NO: 60590 - DNA, 19 bp, Homo sapiens
  siRNA target sequence for ENPP1 (NM_006208.1,937-955).
ggtcacagctaagtatcaa

SEQ ID NO: 60591 - DNA, 19 bp, Homo sapiens
  siRNA target sequence for ENPP1 (NM_006208.1,987-1005).
gatcagatgtggaaattaa

SEQ ID NO: 60592 - DNA, 19 bp, Homo sapiens
  siRNA target sequence for ENPP1 (NM_006208.1,1024-1042).
ctataaaatgtataatggt

SEQ ID NO: 60593 - DNA, 19 bp, Homo sapiens
  siRNA target sequence for ENPP1 (NM_006208.1,1081-1099).
gtggctacagcttcctaaa

SEQ ID NO: 60594 - DNA, 19 bp, Homo sapiens
  siRNA target sequence for ENPP1 (NM_006208.1,1222-1240).
gctgatggatggtctgaaa

SEQ ID NO: 60595 - DNA, 19 bp, Homo sapiens
  siRNA target sequence for ENPP1 (NM_006208.1,1261-1279).
cctgaacctcatccttatt

SEQ ID NO: 60596 - DNA, 19 bp, Homo sapiens
  siRNA target sequence for ENPP1 (NM_006208.1,1267-1285).
cctcatccttatttcagat

SEQ ID NO: 60597 - DNA, 19 bp, Homo sapiens
  siRNA target sequence for ENPP1 (NM_006208.1,1295-1313).
gaacaaggcagttgtaaga

SEQ ID NO: 60598 - DNA, 19 bp, Homo sapiens
  siRNA target sequence for ENPP1 (NM_006208.1,1395-1413).
ctgatgtcccagataaata

SEQ ID NO: 60599 - DNA, 19 bp, Homo sapiens
  siRNA target sequence for ENPP1 (NM_006208.1,1400-1418).
gtcccagataaatactatt

SEQ ID NO: 60600 - DNA, 19 bp, Homo sapiens
  siRNA target sequence for ENPP1 (NM_006208.1,1402-1420).
cccagataaatactattca

SEQ ID NO: 60601 - DNA, 19 bp, Homo sapiens
  siRNA target sequence for ENPP1 (NM_006208.1,1403-1421).
ccagataaatactattcat

SEQ ID NO: 60602 - DNA, 19 bp, Homo sapiens
  siRNA target sequence for ENPP1 (NM_006208.1,1404-1422).
cagataaatactattcatt

SEQ ID NO: 60603 - DNA, 19 bp, Homo sapiens
  siRNA target sequence for ENPP1 (NM_006208.1,1414-1432).
ctattcatttaactatgaa

SEQ ID NO: 60604 - DNA, 19 bp, Homo sapiens
  siRNA target sequence for ENPP1 (NM_006208.1,1433-1451).
ggcattgcccgaaatcttt

SEQ ID NO: 60605 - DNA, 19 bp, Homo sapiens
  siRNA target sequence for ENPP1 (NM_006208.1,1435-1453).
cattgcccgaaatctttct

SEQ ID NO: 60606 - DNA, 19 bp, Homo sapiens
  siRNA target sequence for ENPP1 (NM_006208.1,1487-1505).
ctgaaacatttcttaccta

SEQ ID NO: 60607 - DNA, 19 bp, Homo sapiens
  siRNA target sequence for ENPP1 (NM_006208.1,1521-1539).
ctaagagtgatagaattga

SEQ ID NO: 60608 - DNA, 19 bp, Homo sapiens
  siRNA target sequence for ENPP1 (NM_006208.1,1563-1581).
ctcagtggcaacttgcatt

SEQ ID NO: 60609 - DNA, 19 bp, Homo sapiens
  siRNA target sequence for ENPP1 (NM_006208.1,1577-1595).
gcattgaatccctcagaaa

SEQ ID NO: 60610 - DNA, 19 bp, Homo sapiens
  siRNA target sequence for ENPP1 (NM_006208.1,1665-1683).
gctatggacctggattcaa

SEQ ID NO: 60611 - DNA, 19 bp, Homo sapiens
  siRNA target sequence for ENPP1 (NM_006208.1,1850-1868).
gtacagtgccccttcacaa

SEQ ID NO: 60612 - DNA, 19 bp, Homo sapiens
  siRNA target sequence for ENPP1 (NM_006208.1,1866-1884).
caagaaaccccagagataa

SEQ ID NO: 60613 - DNA, 19 bp, Homo sapiens
  siRNA target sequence for ENPP1 (NM_006208.1,1869-1887).
gaaaccccagagataacct

SEQ ID NO: 60614 - DNA, 19 bp, Homo sapiens
  siRNA target sequence for ENPP1 (NM_006208.1,1894-1912).
ctcatgtaacccttcgatt

SEQ ID NO: 60615 - DNA, 19 bp, Homo sapiens
  siRNA target sequence for ENPP1 (NM_006208.1,1915-1933).
gccgattgaggattttcaa

SEQ ID NO: 60616 - DNA, 19 bp, Homo sapiens
  siRNA target sequence for ENPP1 (NM_006208.1,1931-1949).
caaacacagttcaatctga

SEQ ID NO: 60617 - DNA, 19 bp, Homo sapiens
  siRNA target sequence for ENPP1 (NM_006208.1,1990-2008).
ctatggaagacctagagtt

SEQ ID NO: 60618 - DNA, 19 bp, Homo sapiens
  siRNA target sequence for ENPP1 (NM_006208.1,2061-2079).
gatacagccaagacatctt

SEQ ID NO: 60619 - DNA, 19 bp, Homo sapiens
  siRNA target sequence for ENPP1 (NM_006208.1,2084-2102).
cccctttggacatcctata

SEQ ID NO: 60620 - DNA, 19 bp, Homo sapiens
  siRNA target sequence for ENPP1 (NM_006208.1,2098-2116).
ctataccgtggacagaaat

SEQ ID NO: 60621 - DNA, 19 bp, Homo sapiens
  siRNA target sequence for ENPP1 (NM_006208.1,2108-2126).
gacagaaatgacagtttct

SEQ ID NO: 60622 - DNA, 19 bp, Homo sapiens
  siRNA target sequence for ENPP1 (NM_006208.1,2121-2139).
gtttctctacggaagactt

SEQ ID NO: 60623 - DNA, 19 bp, Homo sapiens
  siRNA target sequence for ENPP1 (NM_006208.1,2172-2190).
ctcttagtcctgtccataa

SEQ ID NO: 60624 - DNA, 19 bp, Homo sapiens
  siRNA target sequence for ENPP1 (NM_006208.1,2236-2254).
ctccccaccacaactaaat

SEQ ID NO: 60625 - DNA, 19 bp, Homo sapiens
  siRNA target sequence for ENPP1 (NM_006208.1,2238-2256).
ccccaccacaactaaataa

SEQ ID NO: 60626 - DNA, 19 bp, Homo sapiens
  siRNA target sequence for ENPP1 (NM_006208.1,2239-2257).
cccaccacaactaaataaa

SEQ ID NO: 60627 - DNA, 19 bp, Homo sapiens
  siRNA target sequence for ENPP1 (NM_006208.1,2240-2258).
ccaccacaactaaataaaa

SEQ ID NO: 60628 - DNA, 19 bp, Homo sapiens
  siRNA target sequence for ENPP1 (NM_006208.1,2279-2297).
gaagctttgcttactacaa

SEQ ID NO: 60629 - DNA, 19 bp, Homo sapiens
  siRNA target sequence for ENPP1 (NM_006208.1,2282-2300).
gctttgcttactacaaata

SEQ ID NO: 60630 - DNA, 19 bp, Homo sapiens
  siRNA target sequence for ENPP1 (NM_006208.1,2305-2323).
gccaatgtaccagagtttt

SEQ ID NO: 60631 - DNA, 19 bp, Homo sapiens
  siRNA target sequence for ENPP1 (NM_006208.1,2350-2368).
caccctactgcgaaagtat

SEQ ID NO: 60632 - DNA, 19 bp, Homo sapiens
  siRNA target sequence for ENPP1 (NM_006208.1,2359-2377).
gcgaaagtatgctgaagaa

SEQ ID NO: 60633 - DNA, 19 bp, Homo sapiens
  siRNA target sequence for ENPP1 (NM_006208.1,2360-2378).
cgaaagtatgctgaagaaa

SEQ ID NO: 60634 - DNA, 19 bp, Homo sapiens
  siRNA target sequence for ENPP1 (NM_006208.1,2432-2450).
cgttgtgattccttagaga

SEQ ID NO: 60635 - DNA, 19 bp, Homo sapiens
  siRNA target sequence for ENPP1 (NM_006208.1,2433-2451).
gttgtgattccttagagaa

SEQ ID NO: 60636 - DNA, 19 bp, Homo sapiens
  siRNA target sequence for ENPP1 (NM_006208.1,2473-2491).
catccgtaaccaagaaatt

SEQ ID NO: 60637 - DNA, 19 bp, Homo sapiens
  siRNA target sequence for ENPP1 (NM_006208.1,2477-2495).
cgtaaccaagaaattttga

SEQ ID NO: 60638 - DNA, 19 bp, Homo sapiens
  siRNA target sequence for ENPP1 (NM_006208.1,2547-2565).
cgcctttgcactgtgaaaa

SEQ ID NO: 60639 - DNA, 19 bp, Homo sapiens
  siRNA target sequence for ENPP1 (NM_006208.1,2643-2661).
catgggttgaagaattgtt

SEQ ID NO: 60640 - DNA, 19 bp, Homo sapiens
  siRNA target sequence for ENPP1 (NM_006208.1,2676-2694).
cacggatcacagatgttga

SEQ ID NO: 60641 - DNA, 19 bp, Homo sapiens
  siRNA target sequence for ENPP2 (NM_006209.2,67-85).
gttccagtcgtgtcagata

SEQ ID NO: 60642 - DNA, 19 bp, Homo sapiens
  siRNA target sequence for ENPP2 (NM_006209.2,70-88).
ccagtcgtgtcagataata

SEQ ID NO: 60643 - DNA, 19 bp, Homo sapiens
  siRNA target sequence for ENPP2 (NM_006209.2,71-89).
cagtcgtgtcagataatat

SEQ ID NO: 60644 - DNA, 19 bp, Homo sapiens
  siRNA target sequence for ENPP2 (NM_006209.2,129-147).
gattcactgcacatcgaat

SEQ ID NO: 60645 - DNA, 19 bp, Homo sapiens
  siRNA target sequence for ENPP2 (NM_006209.2,177-195).
ctcctacagtgctatcaga

SEQ ID NO: 60646 - DNA, 19 bp, Homo sapiens
  siRNA target sequence for ENPP2 (NM_006209.2,231-249).
gcaggtgctttgaacttca

SEQ ID NO: 60647 - DNA, 19 bp, Homo sapiens
  siRNA target sequence for ENPP2 (NM_006209.2,232-250).
caggtgctttgaacttcaa

SEQ ID NO: 60648 - DNA, 19 bp, Homo sapiens
  siRNA target sequence for ENPP2 (NM_006209.2,432-450).
gagactgctgtaccaatta

SEQ ID NO: 60649 - DNA, 19 bp, Homo sapiens
  siRNA target sequence for ENPP2 (NM_006209.2,436-454).
ctgctgtaccaattaccaa

SEQ ID NO: 60650 - DNA, 19 bp, Homo sapiens
  siRNA target sequence for ENPP2 (NM_006209.2,472-490).
gtcgcattgggttgatgat

SEQ ID NO: 60651 - DNA, 19 bp, Homo sapiens
  siRNA target sequence for ENPP2 (NM_006209.2,474-492).
cgcattgggttgatgatga

SEQ ID NO: 60652 - DNA, 19 bp, Homo sapiens
  siRNA target sequence for ENPP2 (NM_006209.2,529-547).
gtttgttcgccctccatta

SEQ ID NO: 60653 - DNA, 19 bp, Homo sapiens
  siRNA target sequence for ENPP2 (NM_006209.2,533-551).
gttcgccctccattaatca

SEQ ID NO: 60654 - DNA, 19 bp, Homo sapiens
  siRNA target sequence for ENPP2 (NM_006209.2,539-557).
cctccattaatcatcttct

SEQ ID NO: 60655 - DNA, 19 bp, Homo sapiens
  siRNA target sequence for ENPP2 (NM_006209.2,657-675).
ggccggtgtacccaactaa

SEQ ID NO: 60656 - DNA, 19 bp, Homo sapiens
  siRNA target sequence for ENPP2 (NM_006209.2,658-676).
gccggtgtacccaactaaa

SEQ ID NO: 60657 - DNA, 19 bp, Homo sapiens
  siRNA target sequence for ENPP2 (NM_006209.2,659-677).
ccggtgtacccaactaaaa

SEQ ID NO: 60658 - DNA, 19 bp, Homo sapiens
  siRNA target sequence for ENPP2 (NM_006209.2,662-680).
gtgtacccaactaaaacct

SEQ ID NO: 60659 - DNA, 19 bp, Homo sapiens
  siRNA target sequence for ENPP2 (NM_006209.2,664-682).
gtacccaactaaaaccttt

SEQ ID NO: 60660 - DNA, 19 bp, Homo sapiens
  siRNA target sequence for ENPP2 (NM_006209.2,708-726).
ggctatatccagaatcaca

SEQ ID NO: 60661 - DNA, 19 bp, Homo sapiens
  siRNA target sequence for ENPP2 (NM_006209.2,709-727).
gctatatccagaatcacat

SEQ ID NO: 60662 - DNA, 19 bp, Homo sapiens
  siRNA target sequence for ENPP2 (NM_006209.2,728-746).
ggaattgttggcaattcaa

SEQ ID NO: 60663 - DNA, 19 bp, Homo sapiens
  siRNA target sequence for ENPP2 (NM_006209.2,781-799).
gcgagggcgagagaaattt

SEQ ID NO: 60664 - DNA, 19 bp, Homo sapiens
  siRNA target sequence for ENPP2 (NM_006209.2,787-805).
gcgagagaaatttaatcat

SEQ ID NO: 60665 - DNA, 19 bp, Homo sapiens
  siRNA target sequence for ENPP2 (NM_006209.2,788-806).
cgagagaaatttaatcata

SEQ ID NO: 60666 - DNA, 19 bp, Homo sapiens
  siRNA target sequence for ENPP2 (NM_006209.2,816-834).
gaggtcaaccgctatggat

SEQ ID NO: 60667 - DNA, 19 bp, Homo sapiens
  siRNA target sequence for ENPP2 (NM_006209.2,818-836).
ggtcaaccgctatggatta

SEQ ID NO: 60668 - DNA, 19 bp, Homo sapiens
  siRNA target sequence for ENPP2 (NM_006209.2,889-907).
ccctcacgagcggagaata

SEQ ID NO: 60669 - DNA, 19 bp, Homo sapiens
  siRNA target sequence for ENPP2 (NM_006209.2,890-908).
cctcacgagcggagaatat

SEQ ID NO: 60670 - DNA, 19 bp, Homo sapiens
  siRNA target sequence for ENPP2 (NM_006209.2,893-911).
cacgagcggagaatattaa

SEQ ID NO: 60671 - DNA, 19 bp, Homo sapiens
  siRNA target sequence for ENPP2 (NM_006209.2,896-914).
gagcggagaatattaacca

SEQ ID NO: 60672 - DNA, 19 bp, Homo sapiens
  siRNA target sequence for ENPP2 (NM_006209.2,898-916).
gcggagaatattaaccata

SEQ ID NO: 60673 - DNA, 19 bp, Homo sapiens
  siRNA target sequence for ENPP2 (NM_006209.2,899-917).
cggagaatattaaccatat

SEQ ID NO: 60674 - DNA, 19 bp, Homo sapiens
  siRNA target sequence for ENPP2 (NM_006209.2,955-973).
ggtctatgccttctattct

SEQ ID NO: 60675 - DNA, 19 bp, Homo sapiens
  siRNA target sequence for ENPP2 (NM_006209.2,1013-1031).
ggccctgaggagagtagtt

SEQ ID NO: 60676 - DNA, 19 bp, Homo sapiens
  siRNA target sequence for ENPP2 (NM_006209.2,1015-1033).
ccctgaggagagtagttat

SEQ ID NO: 60677 - DNA, 19 bp, Homo sapiens
  siRNA target sequence for ENPP2 (NM_006209.2,1103-1121).
gttgctcctccaaagaaaa

SEQ ID NO: 60678 - DNA, 19 bp, Homo sapiens
  siRNA target sequence for ENPP2 (NM_006209.2,1166-1184).
cgtcaggacaaaatgacaa

SEQ ID NO: 60679 - DNA, 19 bp, Homo sapiens
  siRNA target sequence for ENPP2 (NM_006209.2,1192-1210).
gagggaaatcgacaaaatt

SEQ ID NO: 60680 - DNA, 19 bp, Homo sapiens
  siRNA target sequence for ENPP2 (NM_006209.2,1194-1212).
gggaaatcgacaaaattgt

SEQ ID NO: 60681 - DNA, 19 bp, Homo sapiens
  siRNA target sequence for ENPP2 (NM_006209.2,1226-1244).
gatggactgaaacaactaa

SEQ ID NO: 60682 - DNA, 19 bp, Homo sapiens
  siRNA target sequence for ENPP2 (NM_006209.2,1255-1273).
gtgtgtcaacgtcatcttt

SEQ ID NO: 60683 - DNA, 19 bp, Homo sapiens
  siRNA target sequence for ENPP2 (NM_006209.2,1276-1294).
cggagaccatggaatggaa

SEQ ID NO: 60684 - DNA, 19 bp, Homo sapiens
  siRNA target sequence for ENPP2 (NM_006209.2,1291-1309).
ggaagatgtcacatgtgat

SEQ ID NO: 60685 - DNA, 19 bp, Homo sapiens
  siRNA target sequence for ENPP2 (NM_006209.2,1292-1310).
gaagatgtcacatgtgata

SEQ ID NO: 60686 - DNA, 19 bp, Homo sapiens
  siRNA target sequence for ENPP2 (NM_006209.2,1305-1323).
gtgatagaactgagttctt

SEQ ID NO: 60687 - DNA, 19 bp, Homo sapiens
  siRNA target sequence for ENPP2 (NM_006209.2,1307-1325).
gatagaactgagttcttga

SEQ ID NO: 60688 - DNA, 19 bp, Homo sapiens
  siRNA target sequence for ENPP2 (NM_006209.2,1318-1336).
gttcttgagtaattaccta

SEQ ID NO: 60689 - DNA, 19 bp, Homo sapiens
  siRNA target sequence for ENPP2 (NM_006209.2,1324-1342).
gagtaattacctaactaat

SEQ ID NO: 60690 - DNA, 19 bp, Homo sapiens
  siRNA target sequence for ENPP2 (NM_006209.2,1326-1344).
gtaattacctaactaatgt

SEQ ID NO: 60691 - DNA, 19 bp, Homo sapiens
  siRNA target sequence for ENPP2 (NM_006209.2,1377-1395).
gaagaattcgatccaaatt

SEQ ID NO: 60692 - DNA, 19 bp, Homo sapiens
  siRNA target sequence for ENPP2 (NM_006209.2,1434-1452).
ccaatctcacgtgtaaaaa

SEQ ID NO: 60693 - DNA, 19 bp, Homo sapiens
  siRNA target sequence for ENPP2 (NM_006209.2,1435-1453).
caatctcacgtgtaaaaaa

SEQ ID NO: 60694 - DNA, 19 bp, Homo sapiens
  siRNA target sequence for ENPP2 (NM_006209.2,1463-1481).
cactttaagccttacttga

SEQ ID NO: 60695 - DNA, 19 bp, Homo sapiens
  siRNA target sequence for ENPP2 (NM_006209.2,1484-1502).
cagcaccttcccaaacgtt

SEQ ID NO: 60696 - DNA, 19 bp, Homo sapiens
  siRNA target sequence for ENPP2 (NM_006209.2,1524-1542).
gaattgaggatatccattt

SEQ ID NO: 60697 - DNA, 19 bp, Homo sapiens
  siRNA target sequence for ENPP2 (NM_006209.2,1572-1590).
ggaaacctttggatgttta

SEQ ID NO: 60698 - DNA, 19 bp, Homo sapiens
  siRNA target sequence for ENPP2 (NM_006209.2,1621-1639).
gggagaccacggatttgat

SEQ ID NO: 60699 - DNA, 19 bp, Homo sapiens
  siRNA target sequence for ENPP2 (NM_006209.2,1622-1640).
ggagaccacggatttgata

SEQ ID NO: 60700 - DNA, 19 bp, Homo sapiens
  siRNA target sequence for ENPP2 (NM_006209.2,1699-1717).
gactaaagtgcctccattt

SEQ ID NO: 60701 - DNA, 19 bp, Homo sapiens
  siRNA target sequence for ENPP2 (NM_006209.2,1701-1719).
ctaaagtgcctccatttga

SEQ ID NO: 60702 - DNA, 19 bp, Homo sapiens
  siRNA target sequence for ENPP2 (NM_006209.2,1762-1780).
gaagccagctcctaataat

SEQ ID NO: 60703 - DNA, 19 bp, Homo sapiens
  siRNA target sequence for ENPP2 (NM_006209.2,1783-1801).
gacccatggaagtttgaat

SEQ ID NO: 60704 - DNA, 19 bp, Homo sapiens
  siRNA target sequence for ENPP2 (NM_006209.2,1785-1803).
cccatggaagtttgaatca

SEQ ID NO: 60705 - DNA, 19 bp, Homo sapiens
  siRNA target sequence for ENPP2 (NM_006209.2,1802-1820).
catctcctgcgcactaata

SEQ ID NO: 60706 - DNA, 19 bp, Homo sapiens
  siRNA target sequence for ENPP2 (NM_006209.2,1805-1823).
ctcctgcgcactaatacct

SEQ ID NO: 60707 - DNA, 19 bp, Homo sapiens
  siRNA target sequence for ENPP2 (NM_006209.2,1900-1918).
gggctgcacttgtgatgat

SEQ ID NO: 60708 - DNA, 19 bp, Homo sapiens
  siRNA target sequence for ENPP2 (NM_006209.2,1901-1919).
ggctgcacttgtgatgata

SEQ ID NO: 60709 - DNA, 19 bp, Homo sapiens
  siRNA target sequence for ENPP2 (NM_006209.2,1902-1920).
gctgcacttgtgatgataa

SEQ ID NO: 60710 - DNA, 19 bp, Homo sapiens
  siRNA target sequence for ENPP2 (NM_006209.2,1905-1923).
gcacttgtgatgataaggt

SEQ ID NO: 60711 - DNA, 19 bp, Homo sapiens
  siRNA target sequence for ENPP2 (NM_006209.2,1906-1924).
cacttgtgatgataaggta

SEQ ID NO: 60712 - DNA, 19 bp, Homo sapiens
  siRNA target sequence for ENPP2 (NM_006209.2,1951-1969).
caacaaacggcttcataca

SEQ ID NO: 60713 - DNA, 19 bp, Homo sapiens
  siRNA target sequence for ENPP2 (NM_006209.2,2005-2023).
gcgacctgcagtgctttat

SEQ ID NO: 60714 - DNA, 19 bp, Homo sapiens
  siRNA target sequence for ENPP2 (NM_006209.2,2017-2035).
gctttatcggactagatat

SEQ ID NO: 60715 - DNA, 19 bp, Homo sapiens
  siRNA target sequence for ENPP2 (NM_006209.2,2024-2042).
cggactagatatgatatct

SEQ ID NO: 60716 - DNA, 19 bp, Homo sapiens
  siRNA target sequence for ENPP2 (NM_006209.2,2025-2043).
ggactagatatgatatctt

SEQ ID NO: 60717 - DNA, 19 bp, Homo sapiens
  siRNA target sequence for ENPP2 (NM_006209.2,2026-2044).
gactagatatgatatctta

SEQ ID NO: 60718 - DNA, 19 bp, Homo sapiens
  siRNA target sequence for ENPP2 (NM_006209.2,2031-2049).
gatatgatatcttatatca

SEQ ID NO: 60719 - DNA, 19 bp, Homo sapiens
  siRNA target sequence for ENPP2 (NM_006209.2,2041-2059).
cttatatcacactgacttt

SEQ ID NO: 60720 - DNA, 19 bp, Homo sapiens
  siRNA target sequence for ENPP2 (NM_006209.2,2054-2072).
gactttgaaagtggttata

SEQ ID NO: 60721 - DNA, 19 bp, Homo sapiens
  siRNA target sequence for ENPP2 (NM_006209.2,2060-2078).
gaaagtggttatagtgaaa

SEQ ID NO: 60722 - DNA, 19 bp, Homo sapiens
  siRNA target sequence for ENPP2 (NM_006209.2,2064-2082).
gtggttatagtgaaatatt

SEQ ID NO: 60723 - DNA, 19 bp, Homo sapiens
  siRNA target sequence for ENPP2 (NM_006209.2,2095-2113).
ctggacatcatatactgtt

SEQ ID NO: 60724 - DNA, 19 bp, Homo sapiens
  siRNA target sequence for ENPP2 (NM_006209.2,2167-2185).
gcctgatgtccgtgtttct

SEQ ID NO: 60725 - DNA, 19 bp, Homo sapiens
  siRNA target sequence for ENPP2 (NM_006209.2,2177-2195).
cgtgtttctccgagtttca

SEQ ID NO: 60726 - DNA, 19 bp, Homo sapiens
  siRNA target sequence for ENPP2 (NM_006209.2,2291-2309).
gcattccttgtaaccaata

SEQ ID NO: 60727 - DNA, 19 bp, Homo sapiens
  siRNA target sequence for ENPP2 (NM_006209.2,2296-2314).
ccttgtaaccaatatggtt

SEQ ID NO: 60728 - DNA, 19 bp, Homo sapiens
  siRNA target sequence for ENPP2 (NM_006209.2,2412-2430).
gaccaatcttcgactatga

SEQ ID NO: 60729 - DNA, 19 bp, Homo sapiens
  siRNA target sequence for ENPP2 (NM_006209.2,2414-2432).
ccaatcttcgactatgact

SEQ ID NO: 60730 - DNA, 19 bp, Homo sapiens
  siRNA target sequence for ENPP2 (NM_006209.2,2415-2433).
caatcttcgactatgacta

SEQ ID NO: 60731 - DNA, 19 bp, Homo sapiens
  siRNA target sequence for ENPP2 (NM_006209.2,2473-2491).
cgtggaaggcagttccatt

SEQ ID NO: 60732 - DNA, 19 bp, Homo sapiens
  siRNA target sequence for ENPP2 (NM_006209.2,2495-2513).
gttccaactcactactaca

SEQ ID NO: 60733 - DNA, 19 bp, Homo sapiens
  siRNA target sequence for ENPP2 (NM_006209.2,2629-2647).
ctcagaggacgaatcaaaa

SEQ ID NO: 60734 - DNA, 19 bp, Homo sapiens
  siRNA target sequence for ENPP2 (NM_006209.2,2679-2697).
ctagggtgcgtgacattga

SEQ ID NO: 60735 - DNA, 19 bp, Homo sapiens
  siRNA target sequence for ENPP2 (NM_006209.2,2682-2700).
gggtgcgtgacattgaaca

SEQ ID NO: 60736 - DNA, 19 bp, Homo sapiens
  siRNA target sequence for ENPP2 (NM_006209.2,2683-2701).
ggtgcgtgacattgaacat

SEQ ID NO: 60737 - DNA, 19 bp, Homo sapiens
  siRNA target sequence for ENPP3 (NM_005021.2,52-70).
ggaatctacgttgacttta

SEQ ID NO: 60738 - DNA, 19 bp, Homo sapiens
  siRNA target sequence for ENPP3 (NM_005021.2,75-93).
cggaacaacctgttaagaa

SEQ ID NO: 60739 - DNA, 19 bp, Homo sapiens
  siRNA target sequence for ENPP3 (NM_005021.2,86-104).
gttaagaagaacactctta

SEQ ID NO: 60740 - DNA, 19 bp, Homo sapiens
  siRNA target sequence for ENPP3 (NM_005021.2,220-238).
gtgctttgatgcatcattt

SEQ ID NO: 60741 - DNA, 19 bp, Homo sapiens
  siRNA target sequence for ENPP3 (NM_005021.2,223-241).
ctttgatgcatcatttaga

SEQ ID NO: 60742 - DNA, 19 bp, Homo sapiens
  siRNA target sequence for ENPP3 (NM_005021.2,258-276).
ggtgtgatgtggcatgtaa

SEQ ID NO: 60743 - DNA, 19 bp, Homo sapiens
  siRNA target sequence for ENPP3 (NM_005021.2,259-277).
gtgtgatgtggcatgtaaa

SEQ ID NO: 60744 - DNA, 19 bp, Homo sapiens
  siRNA target sequence for ENPP3 (NM_005021.2,317-335).
gtggaatcaactcgaatat

SEQ ID NO: 60745 - DNA, 19 bp, Homo sapiens
  siRNA target sequence for ENPP3 (NM_005021.2,320-338).
gaatcaactcgaatatgga

SEQ ID NO: 60746 - DNA, 19 bp, Homo sapiens
  siRNA target sequence for ENPP3 (NM_005021.2,428-446).
gctgactataagagtgttt

SEQ ID NO: 60747 - DNA, 19 bp, Homo sapiens
  siRNA target sequence for ENPP3 (NM_005021.2,521-539).
ctgccaccagttatcttgt

SEQ ID NO: 60748 - DNA, 19 bp, Homo sapiens
  siRNA target sequence for ENPP3 (NM_005021.2,523-541).
gccaccagttatcttgttt

SEQ ID NO: 60749 - DNA, 19 bp, Homo sapiens
  siRNA target sequence for ENPP3 (NM_005021.2,524-542).
ccaccagttatcttgtttt

SEQ ID NO: 60750 - DNA, 19 bp, Homo sapiens
  siRNA target sequence for ENPP3 (NM_005021.2,594-612).
caaatatcaataaactgaa

SEQ ID NO: 60751 - DNA, 19 bp, Homo sapiens
  siRNA target sequence for ENPP3 (NM_005021.2,644-662).
gctatgtatcctaccaaaa

SEQ ID NO: 60752 - DNA, 19 bp, Homo sapiens
  siRNA target sequence for ENPP3 (NM_005021.2,816-834).
ggctgacagcaatgtatca

SEQ ID NO: 60753 - DNA, 19 bp, Homo sapiens
  siRNA target sequence for ENPP3 (NM_005021.2,970-988).
cctgcccaaagctgaaaga

SEQ ID NO: 60754 - DNA, 19 bp, Homo sapiens
  siRNA target sequence for ENPP3 (NM_005021.2,981-999).
ctgaaagacccaggtttta

SEQ ID NO: 60755 - DNA, 19 bp, Homo sapiens
  siRNA target sequence for ENPP3 (NM_005021.2,983-1001).
gaaagacccaggttttata

SEQ ID NO: 60756 - DNA, 19 bp, Homo sapiens
  siRNA target sequence for ENPP3 (NM_005021.2,1046-1064).
ccagtcagtgccagagtaa

SEQ ID NO: 60757 - DNA, 19 bp, Homo sapiens
  siRNA target sequence for ENPP3 (NM_005021.2,1049-1067).
gtcagtgccagagtaatta

SEQ ID NO: 60758 - DNA, 19 bp, Homo sapiens
  siRNA target sequence for ENPP3 (NM_005021.2,1051-1069).
cagtgccagagtaattaaa

SEQ ID NO: 60759 - DNA, 19 bp, Homo sapiens
  siRNA target sequence for ENPP3 (NM_005021.2,1071-1089).
ccttacaggtagtagatca

SEQ ID NO: 60760 - DNA, 19 bp, Homo sapiens
  siRNA target sequence for ENPP3 (NM_005021.2,1072-1090).
cttacaggtagtagatcat

SEQ ID NO: 60761 - DNA, 19 bp, Homo sapiens
  siRNA target sequence for ENPP3 (NM_005021.2,1113-1131).
gcctgaagcagcggaattt

SEQ ID NO: 60762 - DNA, 19 bp, Homo sapiens
  siRNA target sequence for ENPP3 (NM_005021.2,1169-1187).
ggaatggaccagacttatt

SEQ ID NO: 60763 - DNA, 19 bp, Homo sapiens
  siRNA target sequence for ENPP3 (NM_005021.2,1175-1193).
gaccagacttattgtaaca

SEQ ID NO: 60764 - DNA, 19 bp, Homo sapiens
  siRNA target sequence for ENPP3 (NM_005021.2,1178-1196).
cagacttattgtaacaaga

SEQ ID NO: 60765 - DNA, 19 bp, Homo sapiens
  siRNA target sequence for ENPP3 (NM_005021.2,1188-1206).
gtaacaagatggaatacat

SEQ ID NO: 60766 - DNA, 19 bp, Homo sapiens
  siRNA target sequence for ENPP3 (NM_005021.2,1261-1279).
ccgcatccgagctcataat

SEQ ID NO: 60767 - DNA, 19 bp, Homo sapiens
  siRNA target sequence for ENPP3 (NM_005021.2,1262-1280).
cgcatccgagctcataata

SEQ ID NO: 60768 - DNA, 19 bp, Homo sapiens
  siRNA target sequence for ENPP3 (NM_005021.2,1263-1281).
gcatccgagctcataatat

SEQ ID NO: 60769 - DNA, 19 bp, Homo sapiens
  siRNA target sequence for ENPP3 (NM_005021.2,1264-1282).
catccgagctcataatata

SEQ ID NO: 60770 - DNA, 19 bp, Homo sapiens
  siRNA target sequence for ENPP3 (NM_005021.2,1267-1285).
ccgagctcataatatacct

SEQ ID NO: 60771 - DNA, 19 bp, Homo sapiens
  siRNA target sequence for ENPP3 (NM_005021.2,1327-1345).
cctcagttgccgaaaacct

SEQ ID NO: 60772 - DNA, 19 bp, Homo sapiens
  siRNA target sequence for ENPP3 (NM_005021.2,1408-1426).
cgtcagaatcgacaaagtt

SEQ ID NO: 60773 - DNA, 19 bp, Homo sapiens
  siRNA target sequence for ENPP3 (NM_005021.2,1411-1429).
cagaatcgacaaagttcat

SEQ ID NO: 60774 - DNA, 19 bp, Homo sapiens
  siRNA target sequence for ENPP3 (NM_005021.2,1413-1431).
gaatcgacaaagttcatct

SEQ ID NO: 60775 - DNA, 19 bp, Homo sapiens
  siRNA target sequence for ENPP3 (NM_005021.2,1417-1435).
cgacaaagttcatctcttt

SEQ ID NO: 60776 - DNA, 19 bp, Homo sapiens
  siRNA target sequence for ENPP3 (NM_005021.2,1450-1468).
gctggctgttaggagtaaa

SEQ ID NO: 60777 - DNA, 19 bp, Homo sapiens
  siRNA target sequence for ENPP3 (NM_005021.2,1451-1469).
ctggctgttaggagtaaat

SEQ ID NO: 60778 - DNA, 19 bp, Homo sapiens
  siRNA target sequence for ENPP3 (NM_005021.2,1453-1471).
ggctgttaggagtaaatca

SEQ ID NO: 60779 - DNA, 19 bp, Homo sapiens
  siRNA target sequence for ENPP3 (NM_005021.2,1485-1503).
gaggaggcaaccatggtta

SEQ ID NO: 60780 - DNA, 19 bp, Homo sapiens
  siRNA target sequence for ENPP3 (NM_005021.2,1488-1506).
gaggcaaccatggttataa

SEQ ID NO: 60781 - DNA, 19 bp, Homo sapiens
  siRNA target sequence for ENPP3 (NM_005021.2,1492-1510).
caaccatggttataacaat

SEQ ID NO: 60782 - DNA, 19 bp, Homo sapiens
  siRNA target sequence for ENPP3 (NM_005021.2,1499-1517).
ggttataacaatgagttta

SEQ ID NO: 60783 - DNA, 19 bp, Homo sapiens
  siRNA target sequence for ENPP3 (NM_005021.2,1518-1536).
ggagcatggaggctatctt

SEQ ID NO: 60784 - DNA, 19 bp, Homo sapiens
  siRNA target sequence for ENPP3 (NM_005021.2,1541-1559).
gcacatggacccagtttta

SEQ ID NO: 60785 - DNA, 19 bp, Homo sapiens
  siRNA target sequence for ENPP3 (NM_005021.2,1542-1560).
cacatggacccagttttaa

SEQ ID NO: 60786 - DNA, 19 bp, Homo sapiens
  siRNA target sequence for ENPP3 (NM_005021.2,1567-1585).
gactgaagttgaaccattt

SEQ ID NO: 60787 - DNA, 19 bp, Homo sapiens
  siRNA target sequence for ENPP3 (NM_005021.2,1606-1624).
cctaatgtgtgatcttcta

SEQ ID NO: 60788 - DNA, 19 bp, Homo sapiens
  siRNA target sequence for ENPP3 (NM_005021.2,1650-1668).
gaacccatggtagtttaaa

SEQ ID NO: 60789 - DNA, 19 bp, Homo sapiens
  siRNA target sequence for ENPP3 (NM_005021.2,1734-1752).
gtggctttgctaatccatt

SEQ ID NO: 60790 - DNA, 19 bp, Homo sapiens
  siRNA target sequence for ENPP3 (NM_005021.2,1758-1776).
cagagtctcttgactgttt

SEQ ID NO: 60791 - DNA, 19 bp, Homo sapiens
  siRNA target sequence for ENPP3 (NM_005021.2,1797-1815).
gtactcagctggaacaagt

SEQ ID NO: 60792 - DNA, 19 bp, Homo sapiens
  siRNA target sequence for ENPP3 (NM_005021.2,1887-1905).
ctagggtactgcagaagaa

SEQ ID NO: 60793 - DNA, 19 bp, Homo sapiens
  siRNA target sequence for ENPP3 (NM_005021.2,1970-1988).
cccatgtggagttcataca

SEQ ID NO: 60794 - DNA, 19 bp, Homo sapiens
  siRNA target sequence for ENPP3 (NM_005021.2,1972-1990).
catgtggagttcatacaca

SEQ ID NO: 60795 - DNA, 19 bp, Homo sapiens
  siRNA target sequence for ENPP3 (NM_005021.2,2092-2110).
ctatttagcagacaagaat

SEQ ID NO: 60796 - DNA, 19 bp, Homo sapiens
  siRNA target sequence for ENPP3 (NM_005021.2,2132-2150).
cctcctgccagcaatagaa

SEQ ID NO: 60797 - DNA, 19 bp, Homo sapiens
  siRNA target sequence for ENPP3 (NM_005021.2,2140-2158).
cagcaatagaacatcagat

SEQ ID NO: 60798 - DNA, 19 bp, Homo sapiens
  siRNA target sequence for ENPP3 (NM_005021.2,2151-2169).
catcagatagccaatatga

SEQ ID NO: 60799 - DNA, 19 bp, Homo sapiens
  siRNA target sequence for ENPP3 (NM_005021.2,2171-2189).
gctttaattactagcaatt

SEQ ID NO: 60800 - DNA, 19 bp, Homo sapiens
  siRNA target sequence for ENPP3 (NM_005021.2,2181-2199).
ctagcaatttggtacctat

SEQ ID NO: 60801 - DNA, 19 bp, Homo sapiens
  siRNA target sequence for ENPP3 (NM_005021.2,2233-2251).
ccacagtgttcttcttata

SEQ ID NO: 60802 - DNA, 19 bp, Homo sapiens
  siRNA target sequence for ENPP3 (NM_005021.2,2234-2252).
cacagtgttcttcttataa

SEQ ID NO: 60803 - DNA, 19 bp, Homo sapiens
  siRNA target sequence for ENPP3 (NM_005021.2,2238-2256).
gtgttcttcttataaaaca

SEQ ID NO: 60804 - DNA, 19 bp, Homo sapiens
  siRNA target sequence for ENPP3 (NM_005021.2,2393-2411).
gtggtgctgaccagttgta

SEQ ID NO: 60805 - DNA, 19 bp, Homo sapiens
  siRNA target sequence for ENPP3 (NM_005021.2,2396-2414).
gtgctgaccagttgtaaaa

SEQ ID NO: 60806 - DNA, 19 bp, Homo sapiens
  siRNA target sequence for ENPP3 (NM_005021.2,2453-2471).
gatgtcctaccctttatca

SEQ ID NO: 60807 - DNA, 19 bp, Homo sapiens
  siRNA target sequence for ENPP3 (NM_005021.2,2562-2580).
gggtccgtgatgtagaact

SEQ ID NO: 60808 - DNA, 19 bp, Homo sapiens
  siRNA target sequence for ENPP3 (NM_005021.2,2563-2581).
ggtccgtgatgtagaactt

SEQ ID NO: 60809 - DNA, 19 bp, Homo sapiens
  siRNA target sequence for ENPP3 (NM_005021.2,2584-2602).
cactgggcttgacttctat

SEQ ID NO: 60810 - DNA, 19 bp, Homo sapiens
  siRNA target sequence for FAM12A (NM_006683.3,138-156).
ggctgtgtgtatacagtaa

SEQ ID NO: 60811 - DNA, 19 bp, Homo sapiens
  siRNA target sequence for FAM12A (NM_006683.3,140-158).
ctgtgtgtatacagtaaca

SEQ ID NO: 60812 - DNA, 19 bp, Homo sapiens
  siRNA target sequence for FAM12A (NM_006683.3,171-189).
gagaattcataaaacttca

SEQ ID NO: 60813 - DNA, 19 bp, Homo sapiens
  siRNA target sequence for FAM12A (NM_006683.3,263-281).
ggcaagagctttcatatgt

SEQ ID NO: 60814 - DNA, 19 bp, Homo sapiens
  siRNA target sequence for FAM12A (NM_006683.3,270-288).
gctttcatatgttcatcta

SEQ ID NO: 60815 - DNA, 19 bp, Homo sapiens
  siRNA target sequence for FAM12A (NM_006683.3,291-309).
gcttatggttcaaaattca

SEQ ID NO: 60816 - DNA, 19 bp, Homo sapiens
  siRNA target sequence for FAM12A (NM_006683.3,311-329).
cgtgcatgcatcaatgaga

SEQ ID NO: 60817 - DNA, 19 bp, Homo sapiens
  siRNA target sequence for FAM12A (NM_006683.3,312-330).
gtgcatgcatcaatgagaa

SEQ ID NO: 60818 - DNA, 19 bp, Homo sapiens
  siRNA target sequence for FAM12A (NM_006683.3,331-349).
ggggagcgaccgatataga

SEQ ID NO: 60819 - DNA, 19 bp, Homo sapiens
  siRNA target sequence for FAM12A (NM_006683.3,332-350).
gggagcgaccgatatagaa

SEQ ID NO: 60820 - DNA, 19 bp, Homo sapiens
  siRNA target sequence for FAM12A (NM_006683.3,333-351).
ggagcgaccgatatagaaa

SEQ ID NO: 60821 - DNA, 19 bp, Homo sapiens
  siRNA target sequence for FAM12A (NM_006683.3,334-352).
gagcgaccgatatagaaat

SEQ ID NO: 60822 - DNA, 19 bp, Homo sapiens
  siRNA target sequence for FAM12A (NM_006683.3,337-355).
cgaccgatatagaaatgca

SEQ ID NO: 60823 - DNA, 19 bp, Homo sapiens
  siRNA target sequence for FAM12A (NM_006683.3,338-356).
gaccgatatagaaatgcat

SEQ ID NO: 60824 - DNA, 19 bp, Homo sapiens
  siRNA target sequence for FAM12A (NM_006683.3,393-411).
gtcactgggagaagtacaa

SEQ ID NO: 60825 - DNA, 19 bp, Homo sapiens
  siRNA target sequence for FAM12A (NM_006683.3,401-419).
gagaagtacaacaataggt

SEQ ID NO: 60826 - DNA, 19 bp, Homo sapiens
  siRNA target sequence for FAM12A (NM_006683.3,459-477).
gtggcgtagatggatatgt

SEQ ID NO: 60827 - DNA, 19 bp, Homo sapiens
  siRNA target sequence for FAM12A (NM_006683.3,462-480).
gcgtagatggatatgttga

SEQ ID NO: 60828 - DNA, 19 bp, Homo sapiens
  siRNA target sequence for FAM12A (NM_006683.3,463-481).
cgtagatggatatgttgat

SEQ ID NO: 60829 - DNA, 19 bp, Homo sapiens
  siRNA target sequence for FAM12A (NM_006683.3,464-482).
gtagatggatatgttgata

SEQ ID NO: 60830 - DNA, 19 bp, Homo sapiens
  siRNA target sequence for FAM12A (NM_006683.3,467-485).
gatggatatgttgataaca

SEQ ID NO: 60831 - DNA, 19 bp, Homo sapiens
  siRNA target sequence for FAM12B (NM_022360.2,23-41).
gcatcgtctctaaagatct

SEQ ID NO: 60832 - DNA, 19 bp, Homo sapiens
  siRNA target sequence for FAM12B (NM_022360.2,121-139).
gaaacagcactacttaagt

SEQ ID NO: 60833 - DNA, 19 bp, Homo sapiens
  siRNA target sequence for FAM12B (NM_022360.2,210-228).
gctctcacatgtttatcta

SEQ ID NO: 60834 - DNA, 19 bp, Homo sapiens
  siRNA target sequence for FAM12B (NM_022360.2,237-255).
ggtacaaaatcgagcatat

SEQ ID NO: 60835 - DNA, 19 bp, Homo sapiens
  siRNA target sequence for FAM12B (NM_022360.2,277-295).
ggatcgcttccgaaatgca

SEQ ID NO: 60836 - DNA, 19 bp, Homo sapiens
  siRNA target sequence for FAM12B (NM_022360.2,278-296).
gatcgcttccgaaatgcat

SEQ ID NO: 60837 - DNA, 19 bp, Homo sapiens
  siRNA target sequence for FAM12B (NM_022360.2,283-301).
cttccgaaatgcatatgta

SEQ ID NO: 60838 - DNA, 19 bp, Homo sapiens
  siRNA target sequence for FAM12B (NM_022360.2,304-322).
ggtccagaatcctctcaaa

SEQ ID NO: 60839 - DNA, 19 bp, Homo sapiens
  siRNA target sequence for FAM12B (NM_022360.2,402-420).
gcatggacgggtatgttga

SEQ ID NO: 60840 - DNA, 19 bp, Homo sapiens
  siRNA target sequence for FAM12B (NM_022360.2,409-427).
cgggtatgttgatagcata

SEQ ID NO: 60841 - DNA, 19 bp, Homo sapiens
  siRNA target sequence for FAM12B (NM_022360.2,423-441).
gcatagaagacctaaagat

SEQ ID NO: 60842 - DNA, 19 bp, Homo sapiens
  siRNA target sequence for FLJ10094 (NM_017993.1,355-373).
gggagtatagcgatagaca

SEQ ID NO: 60843 - DNA, 19 bp, Homo sapiens
  siRNA target sequence for FLJ10094 (NM_017993.1,469-487).
ctcgtgtctgactcaatct

SEQ ID NO: 60844 - DNA, 19 bp, Homo sapiens
  siRNA target sequence for FLJ10094 (NM_017993.1,471-489).
cgtgtctgactcaatctgt

SEQ ID NO: 60845 - DNA, 19 bp, Homo sapiens
  siRNA target sequence for FLJ10094 (NM_017993.1,486-504).
ctgtgtcccaggctttgat

SEQ ID NO: 60846 - DNA, 19 bp, Homo sapiens
  siRNA target sequence for FLJ10094 (NM_017993.1,505-523).
ccaagcctcaacatgatga

SEQ ID NO: 60847 - DNA, 19 bp, Homo sapiens
  siRNA target sequence for FLJ10094 (NM_017993.1,524-542).
ctggaatcacccccattaa

SEQ ID NO: 60848 - DNA, 19 bp, Homo sapiens
  siRNA target sequence for FLJ10094 (NM_017993.1,533-551).
cccccattaacccaatgat

SEQ ID NO: 60849 - DNA, 19 bp, Homo sapiens
  siRNA target sequence for FLJ10094 (NM_017993.1,534-552).
ccccattaacccaatgata

SEQ ID NO: 60850 - DNA, 19 bp, Homo sapiens
  siRNA target sequence for FLJ10094 (NM_017993.1,594-612).
ggctgttgtcaaagaaata

SEQ ID NO: 60851 - DNA, 19 bp, Homo sapiens
  siRNA target sequence for FLJ10094 (NM_017993.1,607-625).
gaaataatccactgcaaaa

SEQ ID NO: 60852 - DNA, 19 bp, Homo sapiens
  siRNA target sequence for FLJ10094 (NM_017993.1,618-636).
ctgcaaaagctgtactctt

SEQ ID NO: 60853 - DNA, 19 bp, Homo sapiens
  siRNA target sequence for FLJ10094 (NM_017993.1,699-717).
cgtgtttgtcggaggatta

SEQ ID NO: 60854 - DNA, 19 bp, Homo sapiens
  siRNA target sequence for FLJ10094 (NM_017993.1,702-720).
gtttgtcggaggattacca

SEQ ID NO: 60855 - DNA, 19 bp, Homo sapiens
  siRNA target sequence for FLJ10094 (NM_017993.1,757-775).
gaacagtgcggtgatatta

SEQ ID NO: 60856 - DNA, 19 bp, Homo sapiens
  siRNA target sequence for FLJ10094 (NM_017993.1,823-841).
gaggaattcatggttgata

SEQ ID NO: 60857 - DNA, 19 bp, Homo sapiens
  siRNA target sequence for FLJ10094 (NM_017993.1,825-843).
ggaattcatggttgataaa

SEQ ID NO: 60858 - DNA, 19 bp, Homo sapiens
  siRNA target sequence for FLJ10094 (NM_017993.1,877-895).
gggtctagcaccgacaaaa

SEQ ID NO: 60859 - DNA, 19 bp, Homo sapiens
  siRNA target sequence for FLJ10094 (NM_017993.1,878-896).
ggtctagcaccgacaaaaa

SEQ ID NO: 60860 - DNA, 19 bp, Homo sapiens
  siRNA target sequence for FLJ10094 (NM_017993.1,881-899).
ctagcaccgacaaaaagga

SEQ ID NO: 60861 - DNA, 19 bp, Homo sapiens
  siRNA target sequence for FLJ10094 (NM_017993.1,930-948).
ggccagggatgacttctat

SEQ ID NO: 60862 - DNA, 19 bp, Homo sapiens
  siRNA target sequence for FLJ10094 (NM_017993.1,1163-1181).
gctctgcaaaccagttcta

SEQ ID NO: 60863 - DNA, 19 bp, Homo sapiens
  siRNA target sequence for FLJ10094 (NM_017993.1,1169-1187).
caaaccagttctattccat

SEQ ID NO: 60864 - DNA, 19 bp, Homo sapiens
  siRNA target sequence for FLJ10094 (NM_017993.1,1282-1300).
gccttaactgggattctca

SEQ ID NO: 60865 - DNA, 19 bp, Homo sapiens
  siRNA target sequence for FLJ10094 (NM_017993.1,1332-1350).
cgcttctaccagacaaaaa

SEQ ID NO: 60866 - DNA, 19 bp, Homo sapiens
  siRNA target sequence for FLJ10094 (NM_017993.1,1377-1395).
gcgcaagaacatagacatt

SEQ ID NO: 60867 - DNA, 19 bp, Homo sapiens
  siRNA target sequence for FLJ10094 (NM_017993.1,1378-1396).
cgcaagaacatagacattt

SEQ ID NO: 60868 - DNA, 19 bp, Homo sapiens
  siRNA target sequence for FLJ10094 (NM_017993.1,1390-1408).
gacatttggcgaaagcatt

SEQ ID NO: 60869 - DNA, 19 bp, Homo sapiens
  siRNA target sequence for FLJ10094 (NM_017993.1,1416-1434).
gctccggaatgctcaaagt

SEQ ID NO: 60870 - DNA, 19 bp, Homo sapiens
  siRNA target sequence for FLJ10094 (NM_017993.1,1707-1725).
catgcagcagcaattgcta

SEQ ID NO: 60871 - DNA, 19 bp, Homo sapiens
  siRNA target sequence for FLJ10094 (NM_017993.1,1788-1806).
ccatacacaagcgttacta

SEQ ID NO: 60872 - DNA, 19 bp, Homo sapiens
  siRNA target sequence for FLJ10094 (NM_017993.1,1789-1807).
catacacaagcgttactaa

SEQ ID NO: 60873 - DNA, 19 bp, Homo sapiens
  siRNA target sequence for FLJ10094 (NM_017993.1,1793-1811).
cacaagcgttactaaaagt

SEQ ID NO: 60874 - DNA, 19 bp, Homo sapiens
  siRNA target sequence for FLJ10094 (NM_017993.1,1810-1828).
gtcctgcaggaacaattaa

SEQ ID NO: 60875 - DNA, 19 bp, Homo sapiens
  siRNA target sequence for FLJ10094 (NM_017993.1,1863-1881).
cagccatgaggattcaaat

SEQ ID NO: 60876 - DNA, 19 bp, Homo sapiens
  siRNA target sequence for FLJ10094 (NM_017993.1,1915-1933).
caagaccgagagaacaata

SEQ ID NO: 60877 - DNA, 19 bp, Homo sapiens
  siRNA target sequence for FLJ10094 (NM_017993.1,1921-1939).
cgagagaacaatattgaga

SEQ ID NO: 60878 - DNA, 19 bp, Homo sapiens
  siRNA target sequence for FLJ10094 (NM_017993.1,1946-1964).
gccaaggcttaaaatcaga

SEQ ID NO: 60879 - DNA, 19 bp, Homo sapiens
  siRNA target sequence for FLJ10094 (NM_017993.1,1965-1983).
gaaagaagctctgctaata

SEQ ID NO: 60880 - DNA, 19 bp, Homo sapiens
  siRNA target sequence for FLJ10094 (NM_017993.1,1969-1987).
gaagctctgctaataggta

SEQ ID NO: 60881 - DNA, 19 bp, Homo sapiens
  siRNA target sequence for FLJ10094 (NM_017993.1,1977-1995).
gctaataggtatcatatca

SEQ ID NO: 60882 - DNA, 19 bp, Homo sapiens
  siRNA target sequence for FLJ10094 (NM_017993.1,1978-1996).
ctaataggtatcatatcaa

SEQ ID NO: 60883 - DNA, 19 bp, Homo sapiens
  siRNA target sequence for FLJ10094 (NM_017993.1,2021-2039).
gagccaacatagaatatct

SEQ ID NO: 60884 - DNA, 19 bp, Homo sapiens
  siRNA target sequence for FLJ10094 (NM_017993.1,2023-2041).
gccaacatagaatatcttt

SEQ ID NO: 60885 - DNA, 19 bp, Homo sapiens
  siRNA target sequence for FLJ10094 (NM_017993.1,2056-2074).
cagctggactccaagatat

SEQ ID NO: 60886 - DNA, 19 bp, Homo sapiens
  siRNA target sequence for FLJ10252 (NM_018040.1,146-164).
gaacagctggcatttcagt

SEQ ID NO: 60887 - DNA, 19 bp, Homo sapiens
  siRNA target sequence for FLJ10252 (NM_018040.1,221-239).
gcaagctcgaggtggattt

SEQ ID NO: 60888 - DNA, 19 bp, Homo sapiens
  siRNA target sequence for FLJ10252 (NM_018040.1,250-268).
gagaccattctcgaagtat

SEQ ID NO: 60889 - DNA, 19 bp, Homo sapiens
  siRNA target sequence for FLJ10252 (NM_018040.1,252-270).
gaccattctcgaagtatat

SEQ ID NO: 60890 - DNA, 19 bp, Homo sapiens
  siRNA target sequence for FLJ10252 (NM_018040.1,255-273).
cattctcgaagtatatctt

SEQ ID NO: 60891 - DNA, 19 bp, Homo sapiens
  siRNA target sequence for FLJ10252 (NM_018040.1,310-328).
gaaaacggaggtcgtataa

SEQ ID NO: 60892 - DNA, 19 bp, Homo sapiens
  siRNA target sequence for FLJ10252 (NM_018040.1,394-412).
caagcaaggactatagaga

SEQ ID NO: 60893 - DNA, 19 bp, Homo sapiens
  siRNA target sequence for FLJ10252 (NM_018040.1,402-420).
gactatagagagaatcaca

SEQ ID NO: 60894 - DNA, 19 bp, Homo sapiens
  siRNA target sequence for FLJ10252 (NM_018040.1,444-462).
gactctgatgaccaaatgt

SEQ ID NO: 60895 - DNA, 19 bp, Homo sapiens
  siRNA target sequence for FLJ10252 (NM_018040.1,446-464).
ctctgatgaccaaatgtta

SEQ ID NO: 60896 - DNA, 19 bp, Homo sapiens
  siRNA target sequence for FLJ10252 (NM_018040.1,448-466).
ctgatgaccaaatgttagt

SEQ ID NO: 60897 - DNA, 19 bp, Homo sapiens
  siRNA target sequence for FLJ10252 (NM_018040.1,478-496).
ggccgtcatcaaacttaaa

SEQ ID NO: 60898 - DNA, 19 bp, Homo sapiens
  siRNA target sequence for FLJ10252 (NM_018040.1,479-497).
gccgtcatcaaacttaaat

SEQ ID NO: 60899 - DNA, 19 bp, Homo sapiens
  siRNA target sequence for FLJ10252 (NM_018040.1,480-498).
ccgtcatcaaacttaaata

SEQ ID NO: 60900 - DNA, 19 bp, Homo sapiens
  siRNA target sequence for FLJ10252 (NM_018040.1,481-499).
cgtcatcaaacttaaataa

SEQ ID NO: 60901 - DNA, 19 bp, Homo sapiens
  siRNA target sequence for FLJ10252 (NM_018040.1,482-500).
gtcatcaaacttaaataat

SEQ ID NO: 60902 - DNA, 19 bp, Homo sapiens
  siRNA target sequence for FLJ10252 (NM_018040.1,548-566).
ggacaatgttgggaataga

SEQ ID NO: 60903 - DNA, 19 bp, Homo sapiens
  siRNA target sequence for FLJ10252 (NM_018040.1,549-567).
gacaatgttgggaatagaa

SEQ ID NO: 60904 - DNA, 19 bp, Homo sapiens
  siRNA target sequence for FLJ10252 (NM_018040.1,551-569).
caatgttgggaatagaact

SEQ ID NO: 60905 - DNA, 19 bp, Homo sapiens
  siRNA target sequence for FLJ10252 (NM_018040.1,688-706).
gagcctaccagtatcaaga

SEQ ID NO: 60906 - DNA, 19 bp, Homo sapiens
  siRNA target sequence for FLJ10252 (NM_018040.1,690-708).
gcctaccagtatcaagaat

SEQ ID NO: 60907 - DNA, 19 bp, Homo sapiens
  siRNA target sequence for FLJ10252 (NM_018040.1,691-709).
cctaccagtatcaagaatt

SEQ ID NO: 60908 - DNA, 19 bp, Homo sapiens
  siRNA target sequence for FLJ10252 (NM_018040.1,778-796).
gagtagttttagaaagtga

SEQ ID NO: 60909 - DNA, 19 bp, Homo sapiens
  siRNA target sequence for FLJ10252 (NM_018040.1,798-816).
gaaacgaaccagaccaata

SEQ ID NO: 60910 - DNA, 19 bp, Homo sapiens
  siRNA target sequence for FLJ10252 (NM_018040.1,802-820).
cgaaccagaccaataagga

SEQ ID NO: 60911 - DNA, 19 bp, Homo sapiens
  siRNA target sequence for FLJ10252 (NM_018040.1,858-876).
ctcatgagtgaaagtgatt

SEQ ID NO: 60912 - DNA, 19 bp, Homo sapiens
  siRNA target sequence for FLJ10252 (NM_018040.1,897-915).
gatgctggattgtttacca

SEQ ID NO: 60913 - DNA, 19 bp, Homo sapiens
  siRNA target sequence for FLJ10252 (NM_018040.1,914-932).
caatgatgagggaagacaa

SEQ ID NO: 60914 - DNA, 19 bp, Homo sapiens
  siRNA target sequence for FLJ10252 (NM_018040.1,949-967).
gtgactggttctacgaaaa

SEQ ID NO: 60915 - DNA, 19 bp, Homo sapiens
  siRNA target sequence for FLJ10252 (NM_018040.1,1026-1044).
cctactgagctagacaaaa

SEQ ID NO: 60916 - DNA, 19 bp, Homo sapiens
  siRNA target sequence for FLJ10252 (NM_018040.1,1137-1155).
cgccttcatggaatgtctt

SEQ ID NO: 60917 - DNA, 19 bp, Homo sapiens
  siRNA target sequence for FLJ10252 (NM_018040.1,1140-1158).
cttcatggaatgtcttcaa

SEQ ID NO: 60918 - DNA, 19 bp, Homo sapiens
  siRNA target sequence for FLJ10252 (NM_018040.1,1143-1161).
catggaatgtcttcaaaga

SEQ ID NO: 60919 - DNA, 19 bp, Homo sapiens
  siRNA target sequence for FLJ10252 (NM_018040.1,1257-1275).
caccatgaccattggttta

SEQ ID NO: 60920 - DNA, 19 bp, Homo sapiens
  siRNA target sequence for FLJ10252 (NM_018040.1,1385-1403).
catgcatttaggatcctta

SEQ ID NO: 60921 - DNA, 19 bp, Homo sapiens
  siRNA target sequence for FLJ10252 (NM_018040.1,1399-1417).
ccttatgcacgggagatat

SEQ ID NO: 60922 - DNA, 19 bp, Homo sapiens
  siRNA target sequence for FLJ10252 (NM_018040.1,1413-1431).
gatatcaaacggagaagaa

SEQ ID NO: 60923 - DNA, 19 bp, Homo sapiens
  siRNA target sequence for FLJ10252 (NM_018040.1,1462-1480).
caggatttgtaggtgaaaa

SEQ ID NO: 60924 - DNA, 19 bp, Homo sapiens
  siRNA target sequence for FLJ10252 (NM_018040.1,1482-1500).
gcccagccaatcctagaaa

SEQ ID NO: 60925 - DNA, 19 bp, Homo sapiens
  siRNA target sequence for FLJ10252 (NM_018040.1,1487-1505).
gccaatcctagaaaataat

SEQ ID NO: 60926 - DNA, 19 bp, Homo sapiens
  siRNA target sequence for FLJ10252 (NM_018040.1,1488-1506).
ccaatcctagaaaataata

SEQ ID NO: 60927 - DNA, 19 bp, Homo sapiens
  siRNA target sequence for FLJ10252 (NM_018040.1,1493-1511).
cctagaaaataatattgga

SEQ ID NO: 60928 - DNA, 19 bp, Homo sapiens
  siRNA target sequence for FLJ10252 (NM_018040.1,1510-1528).
gaaaccgaatgcttcagaa

SEQ ID NO: 60929 - DNA, 19 bp, Homo sapiens
  siRNA target sequence for FLJ10252 (NM_018040.1,1629-1647).
cctctaccaaaaagtactt

SEQ ID NO: 60930 - DNA, 19 bp, Homo sapiens
  siRNA target sequence for FLJ10290 (NM_018047.1,180-198).
cgaatgaccaaagaaaagt

SEQ ID NO: 60931 - DNA, 19 bp, Homo sapiens
  siRNA target sequence for FLJ10290 (NM_018047.1,256-274).
gagtccgcatgcgtttcaa

SEQ ID NO: 60932 - DNA, 19 bp, Homo sapiens
  siRNA target sequence for FLJ10290 (NM_018047.1,258-276).
gtccgcatgcgtttcaaga

SEQ ID NO: 60933 - DNA, 19 bp, Homo sapiens
  siRNA target sequence for FLJ10290 (NM_018047.1,261-279).
cgcatgcgtttcaagaaga

SEQ ID NO: 60934 - DNA, 19 bp, Homo sapiens
  siRNA target sequence for FLJ10290 (NM_018047.1,289-307).
gccaaacctgcagtaaatt

SEQ ID NO: 60935 - DNA, 19 bp, Homo sapiens
  siRNA target sequence for FLJ10290 (NM_018047.1,291-309).
caaacctgcagtaaattga

SEQ ID NO: 60936 - DNA, 19 bp, Homo sapiens
  siRNA target sequence for FLJ10290 (NM_018047.1,295-313).
cctgcagtaaattgaagaa

SEQ ID NO: 60937 - DNA, 19 bp, Homo sapiens
  siRNA target sequence for FLJ10290 (NM_018047.1,367-385).
gtgacgcaggattgtcttt

SEQ ID NO: 60938 - DNA, 19 bp, Homo sapiens
  siRNA target sequence for FLJ10290 (NM_018047.1,369-387).
gacgcaggattgtctttta

SEQ ID NO: 60939 - DNA, 19 bp, Homo sapiens
  siRNA target sequence for FLJ10290 (NM_018047.1,371-389).
cgcaggattgtcttttaaa

SEQ ID NO: 60940 - DNA, 19 bp, Homo sapiens
  siRNA target sequence for FLJ10290 (NM_018047.1,413-431).
caacaaagagtactataca

SEQ ID NO: 60941 - DNA, 19 bp, Homo sapiens
  siRNA target sequence for FLJ10290 (NM_018047.1,420-438).
gagtactatacacagaata

SEQ ID NO: 60942 - DNA, 19 bp, Homo sapiens
  siRNA target sequence for FLJ10290 (NM_018047.1,508-526).
gtgacatgctgctcaaact

SEQ ID NO: 60943 - DNA, 19 bp, Homo sapiens
  siRNA target sequence for FLJ10290 (NM_018047.1,531-549).
cggaccacaccctactaca

SEQ ID NO: 60944 - DNA, 19 bp, Homo sapiens
  siRNA target sequence for FLJ10290 (NM_018047.1,580-598).
gggtgaaaggagagtgtaa

SEQ ID NO: 60945 - DNA, 19 bp, Homo sapiens
  siRNA target sequence for FLJ10290 (NM_018047.1,677-695).
ccgttattacggaatcaat

SEQ ID NO: 60946 - DNA, 19 bp, Homo sapiens
  siRNA target sequence for FLJ10290 (NM_018047.1,679-697).
gttattacggaatcaatga

SEQ ID NO: 60947 - DNA, 19 bp, Homo sapiens
  siRNA target sequence for FLJ10290 (NM_018047.1,702-720).
gtagctgacaagcttctaa

SEQ ID NO: 60948 - DNA, 19 bp, Homo sapiens
  siRNA target sequence for FLJ10290 (NM_018047.1,717-735).
ctaaagcgggcttcaacaa

SEQ ID NO: 60949 - DNA, 19 bp, Homo sapiens
  siRNA target sequence for FLJ10290 (NM_018047.1,746-764).
ggacccaccagaggataaa

SEQ ID NO: 60950 - DNA, 19 bp, Homo sapiens
  siRNA target sequence for FLJ10290 (NM_018047.1,747-765).
gacccaccagaggataaaa

SEQ ID NO: 60951 - DNA, 19 bp, Homo sapiens
  siRNA target sequence for FLJ10290 (NM_018047.1,749-767).
cccaccagaggataaaact

SEQ ID NO: 60952 - DNA, 19 bp, Homo sapiens
  siRNA target sequence for FLJ10290 (NM_018047.1,766-784).
ctatcaccacactatatgt

SEQ ID NO: 60953 - DNA, 19 bp, Homo sapiens
  siRNA target sequence for FLJ10290 (NM_018047.1,787-805).
gtggtctaggtgataccat

SEQ ID NO: 60954 - DNA, 19 bp, Homo sapiens
  siRNA target sequence for FLJ10290 (NM_018047.1,789-807).
ggtctaggtgataccatta

SEQ ID NO: 60955 - DNA, 19 bp, Homo sapiens
  siRNA target sequence for FLJ10290 (NM_018047.1,935-953).
gtcctttaataagttgatt

SEQ ID NO: 60956 - DNA, 19 bp, Homo sapiens
  siRNA target sequence for FLJ10290 (NM_018047.1,937-955).
cctttaataagttgattgt

SEQ ID NO: 60957 - DNA, 19 bp, Homo sapiens
  siRNA target sequence for FLJ10290 (NM_018047.1,961-979).
gccgcagactgaatgtgaa

SEQ ID NO: 60958 - DNA, 19 bp, Homo sapiens
  siRNA target sequence for FLJ10290 (NM_018047.1,962-980).
ccgcagactgaatgtgaaa

SEQ ID NO: 60959 - DNA, 19 bp, Homo sapiens
  siRNA target sequence for FLJ10290 (NM_018047.1,1114-1132).
ctgccaactacttcaactt

SEQ ID NO: 60960 - DNA, 19 bp, Homo sapiens
  siRNA target sequence for FLJ10290 (NM_018047.1,1269-1287).
ggaccaatccactatcctt

SEQ ID NO: 60961 - DNA, 19 bp, Homo sapiens
  siRNA target sequence for FLJ10377 (NM_018077.1,213-231).
gcttcgtggtgactgaaaa

SEQ ID NO: 60962 - DNA, 19 bp, Homo sapiens
  siRNA target sequence for FLJ10377 (NM_018077.1,214-232).
cttcgtggtgactgaaaaa

SEQ ID NO: 60963 - DNA, 19 bp, Homo sapiens
  siRNA target sequence for FLJ10377 (NM_018077.1,304-322).
ggagattaccacctttgaa

SEQ ID NO: 60964 - DNA, 19 bp, Homo sapiens
  siRNA target sequence for FLJ10377 (NM_018077.1,415-433).
ggagccgaaggctaaaaaa

SEQ ID NO: 60965 - DNA, 19 bp, Homo sapiens
  siRNA target sequence for FLJ10377 (NM_018077.1,470-488).
cggaacctgagctttaagt

SEQ ID NO: 60966 - DNA, 19 bp, Homo sapiens
  siRNA target sequence for FLJ10377 (NM_018077.1,472-490).
gaacctgagctttaagtgt

SEQ ID NO: 60967 - DNA, 19 bp, Homo sapiens
  siRNA target sequence for FLJ10377 (NM_018077.1,508-526).
gacagtatttgctcaattt

SEQ ID NO: 60968 - DNA, 19 bp, Homo sapiens
  siRNA target sequence for FLJ10377 (NM_018077.1,530-548).
gctgtcctggaagtaaata

SEQ ID NO: 60969 - DNA, 19 bp, Homo sapiens
  siRNA target sequence for FLJ10377 (NM_018077.1,568-586).
gaagatgcgcggttttggt

SEQ ID NO: 60970 - DNA, 19 bp, Homo sapiens
  siRNA target sequence for FLJ10377 (NM_018077.1,574-592).
gcgcggttttggttttgtt

SEQ ID NO: 60971 - DNA, 19 bp, Homo sapiens
  siRNA target sequence for FLJ10377 (NM_018077.1,607-625).
cctagaagcaggtaaagct

SEQ ID NO: 60972 - DNA, 19 bp, Homo sapiens
  siRNA target sequence for FLJ10377 (NM_018077.1,632-650).
ggcatgaacatgaaagaga

SEQ ID NO: 60973 - DNA, 19 bp, Homo sapiens
  siRNA target sequence for FLJ10377 (NM_018077.1,678-696).
gggccgtggcaaaggataa

SEQ ID NO: 60974 - DNA, 19 bp, Homo sapiens
  siRNA target sequence for FLJ10377 (NM_018077.1,679-697).
ggccgtggcaaaggataaa

SEQ ID NO: 60975 - DNA, 19 bp, Homo sapiens
  siRNA target sequence for FLJ10377 (NM_018077.1,680-698).
gccgtggcaaaggataaat

SEQ ID NO: 60976 - DNA, 19 bp, Homo sapiens
  siRNA target sequence for FLJ10377 (NM_018077.1,750-768).
ctaaacatcaggaatcagt

SEQ ID NO: 60977 - DNA, 19 bp, Homo sapiens
  siRNA target sequence for FLJ10377 (NM_018077.1,898-916).
gaccaagcctgtgcaaatt

SEQ ID NO: 60978 - DNA, 19 bp, Homo sapiens
  siRNA target sequence for FLJ10377 (NM_018077.1,983-1001).
ctagaggaaagcgatagta

SEQ ID NO: 60979 - DNA, 19 bp, Homo sapiens
  siRNA target sequence for FLJ10377 (NM_018077.1,988-1006).
ggaaagcgatagtattgat

SEQ ID NO: 60980 - DNA, 19 bp, Homo sapiens
  siRNA target sequence for FLJ10377 (NM_018077.1,1045-1063).
ggagcaagaggataaagct

SEQ ID NO: 60981 - DNA, 19 bp, Homo sapiens
  siRNA target sequence for FLJ10377 (NM_018077.1,1061-1079).
gctgtgcaagtctcaaaca

SEQ ID NO: 60982 - DNA, 19 bp, Homo sapiens
  siRNA target sequence for FLJ10377 (NM_018077.1,1062-1080).
ctgtgcaagtctcaaacaa

SEQ ID NO: 60983 - DNA, 19 bp, Homo sapiens
  siRNA target sequence for FLJ10377 (NM_018077.1,1064-1082).
gtgcaagtctcaaacaaaa

SEQ ID NO: 60984 - DNA, 19 bp, Homo sapiens
  siRNA target sequence for FLJ10377 (NM_018077.1,1170-1188).
gggagcttctccaacagtt

SEQ ID NO: 60985 - DNA, 19 bp, Homo sapiens
  siRNA target sequence for FLJ10377 (NM_018077.1,1248-1266).
gtgcatttgcccagttcat

SEQ ID NO: 60986 - DNA, 19 bp, Homo sapiens
  siRNA target sequence for FLJ10377 (NM_018077.1,1250-1268).
gcatttgcccagttcatga

SEQ ID NO: 60987 - DNA, 19 bp, Homo sapiens
  siRNA target sequence for FLJ10377 (NM_018077.1,1344-1362).
ggcagctcaaggttgactt

SEQ ID NO: 60988 - DNA, 19 bp, Homo sapiens
  siRNA target sequence for FLJ10377 (NM_018077.1,1422-1440).
gcacccggaatctctatct

SEQ ID NO: 60989 - DNA, 19 bp, Homo sapiens
  siRNA target sequence for FLJ10377 (NM_018077.1,1485-1503).
gtgtgagtgctgctgatat

SEQ ID NO: 60990 - DNA, 19 bp, Homo sapiens
  siRNA target sequence for FLJ10377 (NM_018077.1,1599-1617).
caaaggctgtagatgacaa

SEQ ID NO: 60991 - DNA, 19 bp, Homo sapiens
  siRNA target sequence for FLJ10377 (NM_018077.1,1633-1651).
gctgctgagtgctactagt

SEQ ID NO: 60992 - DNA, 19 bp, Homo sapiens
  siRNA target sequence for FLJ10377 (NM_018077.1,1819-1837).
gcctctgaagagaccaata

SEQ ID NO: 60993 - DNA, 19 bp, Homo sapiens
  siRNA target sequence for FLJ10377 (NM_018077.1,1832-1850).
ccaatagtggagttctctt

SEQ ID NO: 60994 - DNA, 19 bp, Homo sapiens
  siRNA target sequence for FLJ10377 (NM_018077.1,1833-1851).
caatagtggagttctcttt

SEQ ID NO: 60995 - DNA, 19 bp, Homo sapiens
  siRNA target sequence for FLJ10377 (NM_018077.1,1891-1909).
ccagcgcagcttgcaaaaa

SEQ ID NO: 60996 - DNA, 19 bp, Homo sapiens
  siRNA target sequence for FLJ10377 (NM_018077.1,2139-2157).
cacaccgaggccccaaaat

SEQ ID NO: 60997 - DNA, 19 bp, Homo sapiens
  siRNA target sequence for FLJ10377 (NM_018077.1,2141-2159).
caccgaggccccaaaatca

SEQ ID NO: 60998 - DNA, 19 bp, Homo sapiens
  siRNA target sequence for FLJ10377 (NM_018077.1,2231-2249).
caggagaagcagcaattat

SEQ ID NO: 60999 - DNA, 19 bp, Homo sapiens
  siRNA target sequence for FLJ10377 (NM_018077.1,2234-2252).
gagaagcagcaattatcgt

SEQ ID NO: 61000 - DNA, 19 bp, Homo sapiens
  siRNA target sequence for FLJ10377 (NM_018077.1,2255-2273).
gagcaggtatctaggaaaa

SEQ ID NO: 61001 - DNA, 19 bp, Homo sapiens
  siRNA target sequence for FLJ10377 (NM_018077.1,2308-2326).
ccagctggtcgaacaatat

SEQ ID NO: 61002 - DNA, 19 bp, Homo sapiens
  siRNA target sequence for FLJ10486 (NM_018109.2,63-81).
ggctcttgacccgtttgaa

SEQ ID NO: 61003 - DNA, 19 bp, Homo sapiens
  siRNA target sequence for FLJ10486 (NM_018109.2,262-280).
ggcacagcggactgtttta

SEQ ID NO: 61004 - DNA, 19 bp, Homo sapiens
  siRNA target sequence for FLJ10486 (NM_018109.2,268-286).
gcggactgttttaatacat

SEQ ID NO: 61005 - DNA, 19 bp, Homo sapiens
  siRNA target sequence for FLJ10486 (NM_018109.2,269-287).
cggactgttttaatacatt

SEQ ID NO: 61006 - DNA, 19 bp, Homo sapiens
  siRNA target sequence for FLJ10486 (NM_018109.2,330-348).
cccaatttggacctattaa

SEQ ID NO: 61007 - DNA, 19 bp, Homo sapiens
  siRNA target sequence for FLJ10486 (NM_018109.2,331-349).
ccaatttggacctattaat

SEQ ID NO: 61008 - DNA, 19 bp, Homo sapiens
  siRNA target sequence for FLJ10486 (NM_018109.2,332-350).
caatttggacctattaata

SEQ ID NO: 61009 - DNA, 19 bp, Homo sapiens
  siRNA target sequence for FLJ10486 (NM_018109.2,338-356).
ggacctattaataatcatt

SEQ ID NO: 61010 - DNA, 19 bp, Homo sapiens
  siRNA target sequence for FLJ10486 (NM_018109.2,377-395).
ctctatgctgtcgtagaat

SEQ ID NO: 61011 - DNA, 19 bp, Homo sapiens
  siRNA target sequence for FLJ10486 (NM_018109.2,454-472).
catggagactgcaattcca

SEQ ID NO: 61012 - DNA, 19 bp, Homo sapiens
  siRNA target sequence for FLJ10486 (NM_018109.2,471-489).
cattcagatcacgtttctt

SEQ ID NO: 61013 - DNA, 19 bp, Homo sapiens
  siRNA target sequence for FLJ10486 (NM_018109.2,525-543).
cacgcgtacggtcaagtaa

SEQ ID NO: 61014 - DNA, 19 bp, Homo sapiens
  siRNA target sequence for FLJ10486 (NM_018109.2,528-546).
gcgtacggtcaagtaatca

SEQ ID NO: 61015 - DNA, 19 bp, Homo sapiens
  siRNA target sequence for FLJ10486 (NM_018109.2,530-548).
gtacggtcaagtaatcagt

SEQ ID NO: 61016 - DNA, 19 bp, Homo sapiens
  siRNA target sequence for FLJ10486 (NM_018109.2,545-563).
cagttgccacgttcaaaca

SEQ ID NO: 61017 - DNA, 19 bp, Homo sapiens
  siRNA target sequence for FLJ10486 (NM_018109.2,555-573).
gttcaaacaagcagctttt

SEQ ID NO: 61018 - DNA, 19 bp, Homo sapiens
  siRNA target sequence for FLJ10486 (NM_018109.2,734-752).
ggctcctcagtcaacactt

SEQ ID NO: 61019 - DNA, 19 bp, Homo sapiens
  siRNA target sequence for FLJ10486 (NM_018109.2,809-827).
ctcagcgctcacaagatct

SEQ ID NO: 61020 - DNA, 19 bp, Homo sapiens
  siRNA target sequence for FLJ10486 (NM_018109.2,943-961).
gggtgtgcaaaaaatatta

SEQ ID NO: 61021 - DNA, 19 bp, Homo sapiens
  siRNA target sequence for FLJ10486 (NM_018109.2,1016-1034).
gatttgactacgaacaata

SEQ ID NO: 61022 - DNA, 19 bp, Homo sapiens
  siRNA target sequence for FLJ10486 (NM_018109.2,1021-1039).
gactacgaacaataggatt

SEQ ID NO: 61023 - DNA, 19 bp, Homo sapiens
  siRNA target sequence for FLJ10486 (NM_018109.2,1047-1065).
caagttccgaactccttta

SEQ ID NO: 61024 - DNA, 19 bp, Homo sapiens
  siRNA target sequence for FLJ10486 (NM_018109.2,1050-1068).
gttccgaactcctttatat

SEQ ID NO: 61025 - DNA, 19 bp, Homo sapiens
  siRNA target sequence for FLJ10486 (NM_018109.2,1053-1071).
ccgaactcctttatatata

SEQ ID NO: 61026 - DNA, 19 bp, Homo sapiens
  siRNA target sequence for FLJ10486 (NM_018109.2,1054-1072).
cgaactcctttatatatat

SEQ ID NO: 61027 - DNA, 19 bp, Homo sapiens
  siRNA target sequence for FLJ10486 (NM_018109.2,1120-1138).
ctgggctcgagcacattca

SEQ ID NO: 61028 - DNA, 19 bp, Homo sapiens
  siRNA target sequence for FLJ10486 (NM_018109.2,1122-1140).
gggctcgagcacattcact

SEQ ID NO: 61029 - DNA, 19 bp, Homo sapiens
  siRNA target sequence for FLJ10486 (NM_018109.2,1124-1142).
gctcgagcacattcactaa

SEQ ID NO: 61030 - DNA, 19 bp, Homo sapiens
  siRNA target sequence for FLJ10486 (NM_018109.2,1127-1145).
cgagcacattcactaacaa

SEQ ID NO: 61031 - DNA, 19 bp, Homo sapiens
  siRNA target sequence for FLJ10486 (NM_018109.2,1130-1148).
gcacattcactaacaagta

SEQ ID NO: 61032 - DNA, 19 bp, Homo sapiens
  siRNA target sequence for FLJ10486 (NM_018109.2,1133-1151).
cattcactaacaagtagta

SEQ ID NO: 61033 - DNA, 19 bp, Homo sapiens
  siRNA target sequence for FLJ10486 (NM_018109.2,1154-1172).
cctggtgcatggattacaa

SEQ ID NO: 61034 - DNA, 19 bp, Homo sapiens
  siRNA target sequence for FLJ10486 (NM_018109.2,1157-1175).
ggtgcatggattacaaatt

SEQ ID NO: 61035 - DNA, 19 bp, Homo sapiens
  siRNA target sequence for FLJ10486 (NM_018109.2,1158-1176).
gtgcatggattacaaattt

SEQ ID NO: 61036 - DNA, 19 bp, Homo sapiens
  siRNA target sequence for FLJ10486 (NM_018109.2,1307-1325).
gttcgtgacttgagtagaa

SEQ ID NO: 61037 - DNA, 19 bp, Homo sapiens
  siRNA target sequence for FLJ10486 (NM_018109.2,1310-1328).
cgtgacttgagtagaatta

SEQ ID NO: 61038 - DNA, 19 bp, Homo sapiens
  siRNA target sequence for FLJ10486 (NM_018109.2,1311-1329).
gtgacttgagtagaattaa

SEQ ID NO: 61039 - DNA, 19 bp, Homo sapiens
  siRNA target sequence for FLJ10486 (NM_018109.2,1315-1333).
cttgagtagaattaaacct

SEQ ID NO: 61040 - DNA, 19 bp, Homo sapiens
  siRNA target sequence for FLJ10486 (NM_018109.2,1344-1362).
cagaaacattagaattact

SEQ ID NO: 61041 - DNA, 19 bp, Homo sapiens
  siRNA target sequence for FLJ10486 (NM_018109.2,1355-1373).
gaattactactgaaggaat

SEQ ID NO: 61042 - DNA, 19 bp, Homo sapiens
  siRNA target sequence for FLJ10486 (NM_018109.2,1388-1406).
ggcaattttgctttcgata

SEQ ID NO: 61043 - DNA, 19 bp, Homo sapiens
  siRNA target sequence for FLJ10486 (NM_018109.2,1389-1407).
gcaattttgctttcgataa

SEQ ID NO: 61044 - DNA, 19 bp, Homo sapiens
  siRNA target sequence for FLJ10486 (NM_018109.2,1398-1416).
ctttcgataaaaattccat

SEQ ID NO: 61045 - DNA, 19 bp, Homo sapiens
  siRNA target sequence for FLJ10486 (NM_018109.2,1402-1420).
cgataaaaattccataaat

SEQ ID NO: 61046 - DNA, 19 bp, Homo sapiens
  siRNA target sequence for FLJ10486 (NM_018109.2,1488-1506).
cttctctcaacataagcaa

SEQ ID NO: 61047 - DNA, 19 bp, Homo sapiens
  siRNA target sequence for FLJ10486 (NM_018109.2,1491-1509).
ctctcaacataagcaaaaa

SEQ ID NO: 61048 - DNA, 19 bp, Homo sapiens
  siRNA target sequence for FLJ10486 (NM_018109.2,1589-1607).
cgaccttccatatcaagta

SEQ ID NO: 61049 - DNA, 19 bp, Homo sapiens
  siRNA target sequence for FLJ10486 (NM_018109.2,1620-1638).
ggctggtatccctattgct

SEQ ID NO: 61050 - DNA, 19 bp, Homo sapiens
  siRNA target sequence for FLJ10486 (NM_018109.2,1621-1639).
gctggtatccctattgcta

SEQ ID NO: 61051 - DNA, 19 bp, Homo sapiens
  siRNA target sequence for FLJ10486 (NM_018109.2,1680-1698).
gcaataagtttgcaattga

SEQ ID NO: 61052 - DNA, 19 bp, Homo sapiens
  siRNA target sequence for FLJ10486 (NM_018109.2,1705-1723).
caaaaacttgctagaatct

SEQ ID NO: 61053 - DNA, 19 bp, Homo sapiens
  siRNA target sequence for FLJ10486 (NM_018109.2,1711-1729).
cttgctagaatctttaaaa

SEQ ID NO: 61054 - DNA, 19 bp, Homo sapiens
  siRNA target sequence for FLJ10634 (NM_018163.1,76-94).
cagcggacaaagaggtaaa

SEQ ID NO: 61055 - DNA, 19 bp, Homo sapiens
  siRNA target sequence for FLJ10634 (NM_018163.1,214-232).
ccagggctgcatatgacaa

SEQ ID NO: 61056 - DNA, 19 bp, Homo sapiens
  siRNA target sequence for FLJ10634 (NM_018163.1,263-281).
gaggacccagaaacttgat

SEQ ID NO: 61057 - DNA, 19 bp, Homo sapiens
  siRNA target sequence for FLJ10634 (NM_018163.1,268-286).
cccagaaacttgatgagaa

SEQ ID NO: 61058 - DNA, 19 bp, Homo sapiens
  siRNA target sequence for FLJ10634 (NM_018163.1,376-394).
ggacactagagcaagagat

SEQ ID NO: 61059 - DNA, 19 bp, Homo sapiens
  siRNA target sequence for FLJ10634 (NM_018163.1,513-531).
caaggaacccccaaactaa

SEQ ID NO: 61060 - DNA, 19 bp, Homo sapiens
  siRNA target sequence for FLJ10634 (NM_018163.1,725-743).
ggataaccctctgaagatt

SEQ ID NO: 61061 - DNA, 19 bp, Homo sapiens
  siRNA target sequence for FLJ10891 (NM_018260.1,676-694).
gccaaaaactcgtatttct

SEQ ID NO: 61062 - DNA, 19 bp, Homo sapiens
  siRNA target sequence for FLJ10891 (NM_018260.1,898-916).
ccttgcatgccatagatgt

SEQ ID NO: 61063 - DNA, 19 bp, Homo sapiens
  siRNA target sequence for FLJ11016 (NM_018301.2,177-195).
gctttgctcctggtactat

SEQ ID NO: 61064 - DNA, 19 bp, Homo sapiens
  siRNA target sequence for FLJ11016 (NM_018301.2,182-200).
gctcctggtactatgtaca

SEQ ID NO: 61065 - DNA, 19 bp, Homo sapiens
  siRNA target sequence for FLJ11016 (NM_018301.2,183-201).
ctcctggtactatgtacaa

SEQ ID NO: 61066 - DNA, 19 bp, Homo sapiens
  siRNA target sequence for FLJ11016 (NM_018301.2,218-236).
gcagctgggactatgactt

SEQ ID NO: 61067 - DNA, 19 bp, Homo sapiens
  siRNA target sequence for FLJ11016 (NM_018301.2,219-237).
cagctgggactatgacttt

SEQ ID NO: 61068 - DNA, 19 bp, Homo sapiens
  siRNA target sequence for FLJ11016 (NM_018301.2,288-306).
gggaattagggcttaatga

SEQ ID NO: 61069 - DNA, 19 bp, Homo sapiens
  siRNA target sequence for FLJ11016 (NM_018301.2,290-308).
gaattagggcttaatgaaa

SEQ ID NO: 61070 - DNA, 19 bp, Homo sapiens
  siRNA target sequence for FLJ11016 (NM_018301.2,390-408).
gtcttcaagatattgaaga

SEQ ID NO: 61071 - DNA, 19 bp, Homo sapiens
  siRNA target sequence for FLJ11016 (NM_018301.2,418-436).
ggagcgtcagcgcattctt

SEQ ID NO: 61072 - DNA, 19 bp, Homo sapiens
  siRNA target sequence for FLJ11016 (NM_018301.2,419-437).
gagcgtcagcgcattcttt

SEQ ID NO: 61073 - DNA, 19 bp, Homo sapiens
  siRNA target sequence for FLJ11016 (NM_018301.2,478-496).
gcgagaaatggaaatagaa

SEQ ID NO: 61074 - DNA, 19 bp, Homo sapiens
  siRNA target sequence for FLJ11016 (NM_018301.2,479-497).
cgagaaatggaaatagaaa

SEQ ID NO: 61075 - DNA, 19 bp, Homo sapiens
  siRNA target sequence for FLJ11016 (NM_018301.2,518-536).
gatcgtcactccttcctta

SEQ ID NO: 61076 - DNA, 19 bp, Homo sapiens
  siRNA target sequence for FLJ11016 (NM_018301.2,603-621).
gtttttaccaagagatgat

SEQ ID NO: 61077 - DNA, 19 bp, Homo sapiens
  siRNA target sequence for FLJ11016 (NM_018301.2,635-653).
cttgaagagtttcaactta

SEQ ID NO: 61078 - DNA, 19 bp, Homo sapiens
  siRNA target sequence for FLJ11016 (NM_018301.2,780-798).
gtctccatgtggcaaatgt

SEQ ID NO: 61079 - DNA, 19 bp, Homo sapiens
  siRNA target sequence for FLJ11016 (NM_018301.2,790-808).
ggcaaatgttattgatttt

SEQ ID NO: 61080 - DNA, 19 bp, Homo sapiens
  siRNA target sequence for FLJ11016 (NM_018301.2,822-840).
gttggactgggcctaagaa

SEQ ID NO: 61081 - DNA, 19 bp, Homo sapiens
  siRNA target sequence for FLJ11016 (NM_018301.2,842-860).
ctgacgcagccaatagaat

SEQ ID NO: 61082 - DNA, 19 bp, Homo sapiens
  siRNA target sequence for FLJ11016 (NM_018301.2,844-862).
gacgcagccaatagaattt

SEQ ID NO: 61083 - DNA, 19 bp, Homo sapiens
  siRNA target sequence for FLJ11016 (NM_018301.2,846-864).
cgcagccaatagaatttgt

SEQ ID NO: 61084 - DNA, 19 bp, Homo sapiens
  siRNA target sequence for FLJ11016 (NM_018301.2,944-962).
ggggaaccaaacaaggtat

SEQ ID NO: 61085 - DNA, 19 bp, Homo sapiens
  siRNA target sequence for FLJ11016 (NM_018301.2,945-963).
gggaaccaaacaaggtatt

SEQ ID NO: 61086 - DNA, 19 bp, Homo sapiens
  siRNA target sequence for FLJ11016 (NM_018301.2,946-964).
ggaaccaaacaaggtatta

SEQ ID NO: 61087 - DNA, 19 bp, Homo sapiens
  siRNA target sequence for FLJ11016 (NM_018301.2,947-965).
gaaccaaacaaggtattat

SEQ ID NO: 61088 - DNA, 19 bp, Homo sapiens
  siRNA target sequence for FLJ11016 (NM_018301.2,982-1000).
ccctcgggtgactgaaaga

SEQ ID NO: 61089 - DNA, 19 bp, Homo sapiens
  siRNA target sequence for FLJ11016 (NM_018301.2,984-1002).
ctcgggtgactgaaagaga

SEQ ID NO: 61090 - DNA, 19 bp, Homo sapiens
  siRNA target sequence for FLJ11016 (NM_018301.2,1047-1065).
caattcaattccgaatgat

SEQ ID NO: 61091 - DNA, 19 bp, Homo sapiens
  siRNA target sequence for FLJ11016 (NM_018301.2,1161-1179).
ggaaaatattggtgataga

SEQ ID NO: 61092 - DNA, 19 bp, Homo sapiens
  siRNA target sequence for FLJ11016 (NM_018301.2,1213-1231).
ccaagcgacttctctcata

SEQ ID NO: 61093 - DNA, 19 bp, Homo sapiens
  siRNA target sequence for FLJ11016 (NM_018301.2,1214-1232).
caagcgacttctctcatat

SEQ ID NO: 61094 - DNA, 19 bp, Homo sapiens
  siRNA target sequence for FLJ11016 (NM_018301.2,1217-1235).
gcgacttctctcatatcat

SEQ ID NO: 61095 - DNA, 19 bp, Homo sapiens
  siRNA target sequence for FLJ11016 (NM_018301.2,1244-1262).
ggtagcactacagaaatta

SEQ ID NO: 61096 - DNA, 19 bp, Homo sapiens
  siRNA target sequence for FLJ11126 (NM_018332.3,120-138).
gtcaagtcgatgaccaatt

SEQ ID NO: 61097 - DNA, 19 bp, Homo sapiens
  siRNA target sequence for FLJ11126 (NM_018332.3,451-469).
ctgaacccccacagaatct

SEQ ID NO: 61098 - DNA, 19 bp, Homo sapiens
  siRNA target sequence for FLJ11142 (NM_018338.2,115-133).
gtctctgaggtcttctaaa

SEQ ID NO: 61099 - DNA, 19 bp, Homo sapiens
  siRNA target sequence for FLJ11142 (NM_018338.2,144-162).
gatctcctgttcaagaaga

SEQ ID NO: 61100 - DNA, 19 bp, Homo sapiens
  siRNA target sequence for FLJ11142 (NM_018338.2,147-165).
ctcctgttcaagaagataa

SEQ ID NO: 61101 - DNA, 19 bp, Homo sapiens
  siRNA target sequence for FLJ11142 (NM_018338.2,245-263).
cgtttggaaggaagtttga

SEQ ID NO: 61102 - DNA, 19 bp, Homo sapiens
  siRNA target sequence for FLJ11142 (NM_018338.2,267-285).
catttcagtatggtgattt

SEQ ID NO: 61103 - DNA, 19 bp, Homo sapiens
  siRNA target sequence for FLJ11142 (NM_018338.2,363-381).
cagagagcttcttctatga

SEQ ID NO: 61104 - DNA, 19 bp, Homo sapiens
  siRNA target sequence for FLJ11142 (NM_018338.2,395-413).
gcttcgatgccttttgtga

SEQ ID NO: 61105 - DNA, 19 bp, Homo sapiens
  siRNA target sequence for FLJ11142 (NM_018338.2,410-428).
gtgactctggattcaaaca

SEQ ID NO: 61106 - DNA, 19 bp, Homo sapiens
  siRNA target sequence for FLJ11142 (NM_018338.2,440-458).
cttctcacacttgtacatt

SEQ ID NO: 61107 - DNA, 19 bp, Homo sapiens
  siRNA target sequence for FLJ11142 (NM_018338.2,481-499).
gcgagccaacctacaactt

SEQ ID NO: 61108 - DNA, 19 bp, Homo sapiens
  siRNA target sequence for FLJ11142 (NM_018338.2,483-501).
gagccaacctacaacttct

SEQ ID NO: 61109 - DNA, 19 bp, Homo sapiens
  siRNA target sequence for FLJ11142 (NM_018338.2,506-524).
gacagtatcgccatataca

SEQ ID NO: 61110 - DNA, 19 bp, Homo sapiens
  siRNA target sequence for FLJ11142 (NM_018338.2,508-526).
cagtatcgccatatacata

SEQ ID NO: 61111 - DNA, 19 bp, Homo sapiens
  siRNA target sequence for FLJ11142 (NM_018338.2,616-634).
ggttcatccacataaaact

SEQ ID NO: 61112 - DNA, 19 bp, Homo sapiens
  siRNA target sequence for FLJ11142 (NM_018338.2,617-635).
gttcatccacataaaactt

SEQ ID NO: 61113 - DNA, 19 bp, Homo sapiens
  siRNA target sequence for FLJ11142 (NM_018338.2,656-674).
gggagttttccagatatta

SEQ ID NO: 61114 - DNA, 19 bp, Homo sapiens
  siRNA target sequence for FLJ11142 (NM_018338.2,657-675).
ggagttttccagatattat

SEQ ID NO: 61115 - DNA, 19 bp, Homo sapiens
  siRNA target sequence for FLJ11142 (NM_018338.2,726-744).
ctgagaagggatatgctta

SEQ ID NO: 61116 - DNA, 19 bp, Homo sapiens
  siRNA target sequence for FLJ11142 (NM_018338.2,827-845).
gaagaacaacccatactaa

SEQ ID NO: 61117 - DNA, 19 bp, Homo sapiens
  siRNA target sequence for FLJ11142 (NM_018338.2,838-856).
catactaaggacaaaagct

SEQ ID NO: 61118 - DNA, 19 bp, Homo sapiens
  siRNA target sequence for FLJ11142 (NM_018338.2,861-879).
ctcaggaagtttttaaggt

SEQ ID NO: 61119 - DNA, 19 bp, Homo sapiens
  siRNA target sequence for FLJ11142 (NM_018338.2,918-936).
cgggatcaggccacatcaa

SEQ ID NO: 61120 - DNA, 19 bp, Homo sapiens
  siRNA target sequence for FLJ11142 (NM_018338.2,920-938).
ggatcaggccacatcaagt

SEQ ID NO: 61121 - DNA, 19 bp, Homo sapiens
  siRNA target sequence for FLJ11142 (NM_018338.2,921-939).
gatcaggccacatcaagtt

SEQ ID NO: 61122 - DNA, 19 bp, Homo sapiens
  siRNA target sequence for FLJ11142 (NM_018338.2,979-997).
gggatcactaggtcgattt

SEQ ID NO: 61123 - DNA, 19 bp, Homo sapiens
  siRNA target sequence for FLJ11142 (NM_018338.2,1052-1070).
gtgctctcagggtcagaat

SEQ ID NO: 61124 - DNA, 19 bp, Homo sapiens
  siRNA target sequence for FLJ11142 (NM_018338.2,1089-1107).
gggaaggtggtctgatcaa

SEQ ID NO: 61125 - DNA, 19 bp, Homo sapiens
  siRNA target sequence for FLJ11142 (NM_018338.2,1121-1139).
cgagggacaagcaagtcat

SEQ ID NO: 61126 - DNA, 19 bp, Homo sapiens
  siRNA target sequence for FLJ11142 (NM_018338.2,1140-1158).
gtcacaatggtcccattaa

SEQ ID NO: 61127 - DNA, 19 bp, Homo sapiens
  siRNA target sequence for FLJ11142 (NM_018338.2,1148-1166).
ggtcccattaaccagataa

SEQ ID NO: 61128 - DNA, 19 bp, Homo sapiens
  siRNA target sequence for FLJ11142 (NM_018338.2,1149-1167).
gtcccattaaccagataat

SEQ ID NO: 61129 - DNA, 19 bp, Homo sapiens
  siRNA target sequence for FLJ11142 (NM_018338.2,1152-1170).
ccattaaccagataatgct

SEQ ID NO: 61130 - DNA, 19 bp, Homo sapiens
  siRNA target sequence for FLJ11142 (NM_018338.2,1196-1214).
gggtcagatggatatgtta

SEQ ID NO: 61131 - DNA, 19 bp, Homo sapiens
  siRNA target sequence for FLJ11142 (NM_018338.2,1202-1220).
gatggatatgttaggatat

SEQ ID NO: 61132 - DNA, 19 bp, Homo sapiens
  siRNA target sequence for FLJ11142 (NM_018338.2,1221-1239).
gggattttgagacaataga

SEQ ID NO: 61133 - DNA, 19 bp, Homo sapiens
  siRNA target sequence for FLJ11142 (NM_018338.2,1273-1291).
ggagattgagcctattaat

SEQ ID NO: 61134 - DNA, 19 bp, Homo sapiens
  siRNA target sequence for FLJ11142 (NM_018338.2,1284-1302).
ctattaatgaacttcaagt

SEQ ID NO: 61135 - DNA, 19 bp, Homo sapiens
  siRNA target sequence for FLJ11142 (NM_018338.2,1393-1411).
gaagcttgaccttagtttt

SEQ ID NO: 61136 - DNA, 19 bp, Homo sapiens
  siRNA target sequence for FLJ11142 (NM_018338.2,1447-1465).
cttccattctggagctatt

SEQ ID NO: 61137 - DNA, 19 bp, Homo sapiens
  siRNA target sequence for FLJ11142 (NM_018338.2,1450-1468).
ccattctggagctattgaa

SEQ ID NO: 61138 - DNA, 19 bp, Homo sapiens
  siRNA target sequence for FLJ11142 (NM_018338.2,1519-1537).
ctgctctgttcgaatctat

SEQ ID NO: 61139 - DNA, 19 bp, Homo sapiens
  siRNA target sequence for FLJ11142 (NM_018338.2,1522-1540).
ctctgttcgaatctatgat

SEQ ID NO: 61140 - DNA, 19 bp, Homo sapiens
  siRNA target sequence for FLJ11142 (NM_018338.2,1524-1542).
ctgttcgaatctatgattt

SEQ ID NO: 61141 - DNA, 19 bp, Homo sapiens
  siRNA target sequence for FLJ11142 (NM_018338.2,1529-1547).
cgaatctatgattttgcta

SEQ ID NO: 61142 - DNA, 19 bp, Homo sapiens
  siRNA target sequence for FLJ11142 (NM_018338.2,1534-1552).
ctatgattttgctagcaaa

SEQ ID NO: 61143 - DNA, 19 bp, Homo sapiens
  siRNA target sequence for FLJ11142 (NM_018338.2,1583-1601).
ggaggtactgcccttgttt

SEQ ID NO: 61144 - DNA, 19 bp, Homo sapiens
  siRNA target sequence for FLJ11142 (NM_018338.2,1604-1622).
gtaccccgaatggtaaact

SEQ ID NO: 61145 - DNA, 19 bp, Homo sapiens
  siRNA target sequence for FLJ11142 (NM_018338.2,1607-1625).
ccccgaatggtaaacttca

SEQ ID NO: 61146 - DNA, 19 bp, Homo sapiens
  siRNA target sequence for FLJ11142 (NM_018338.2,1626-1644).
ctggagcacaaattattgt

SEQ ID NO: 61147 - DNA, 19 bp, Homo sapiens
  siRNA target sequence for FLJ11142 (NM_018338.2,1632-1650).
cacaaattattgtaggatt

SEQ ID NO: 61148 - DNA, 19 bp, Homo sapiens
  siRNA target sequence for FLJ11142 (NM_018338.2,1688-1706).
ccaaaagggctcacgattt

SEQ ID NO: 61149 - DNA, 19 bp, Homo sapiens
  siRNA target sequence for FLJ11142 (NM_018338.2,1689-1707).
caaaagggctcacgatttt

SEQ ID NO: 61150 - DNA, 19 bp, Homo sapiens
  siRNA target sequence for FLJ11142 (NM_018338.2,1713-1731).
gacggaagaaaattttgga

SEQ ID NO: 61151 - DNA, 19 bp, Homo sapiens
  siRNA target sequence for FLJ11142 (NM_018338.2,1818-1836).
ccacagggagtaaagatca

SEQ ID NO: 61152 - DNA, 19 bp, Homo sapiens
  siRNA target sequence for FLJ11142 (NM_018338.2,1824-1842).
ggagtaaagatcaaactgt

SEQ ID NO: 61153 - DNA, 19 bp, Homo sapiens
  siRNA target sequence for FLJ11142 (NM_018338.2,1832-1850).
gatcaaactgttttcttct

SEQ ID NO: 61154 - DNA, 19 bp, Homo sapiens
  siRNA target sequence for FLJ11142 (NM_018338.2,1865-1883).
gattataagccgattggtt

SEQ ID NO: 61155 - DNA, 19 bp, Homo sapiens
  siRNA target sequence for FLJ11142 (NM_018338.2,1873-1891).
gccgattggttatattaat

SEQ ID NO: 61156 - DNA, 19 bp, Homo sapiens
  siRNA target sequence for FLJ11142 (NM_018338.2,1874-1892).
ccgattggttatattaata

SEQ ID NO: 61157 - DNA, 19 bp, Homo sapiens
  siRNA target sequence for FLJ11142 (NM_018338.2,1927-1945).
catgtctcatcctgaaagt

SEQ ID NO: 61158 - DNA, 19 bp, Homo sapiens
  siRNA target sequence for FLJ11142 (NM_018338.2,1985-2003).
gctccacttccaaccataa

SEQ ID NO: 61159 - DNA, 19 bp, Homo sapiens
  siRNA target sequence for FLJ11142 (NM_018338.2,1986-2004).
ctccacttccaaccataaa

SEQ ID NO: 61160 - DNA, 19 bp, Homo sapiens
  siRNA target sequence for FLJ11142 (NM_018338.2,2024-2042).
gatgtagtctcctatgaaa

SEQ ID NO: 61161 - DNA, 19 bp, Homo sapiens
  siRNA target sequence for FLJ11142 (NM_018338.2,2079-2097).
gtgtcaaatctaagattct

SEQ ID NO: 61162 - DNA, 19 bp, Homo sapiens
  siRNA target sequence for FLJ11142 (NM_018338.2,2098-2116).
gagattaatagaaattgaa

SEQ ID NO: 61163 - DNA, 19 bp, Homo sapiens
  siRNA target sequence for FLJ11142 (NM_018338.2,2248-2266).
ggaagaagagccattacct

SEQ ID NO: 61164 - DNA, 19 bp, Homo sapiens
  siRNA target sequence for FLJ11142 (NM_018338.2,2350-2368).
ctatgattctggttttcta

SEQ ID NO: 61165 - DNA, 19 bp, Homo sapiens
  siRNA target sequence for FLJ11142 (NM_018338.2,2380-2398).
gttccccccttgtgatgaa

SEQ ID NO: 61166 - DNA, 19 bp, Homo sapiens
  siRNA target sequence for FLJ11142 (NM_018338.2,2391-2409).
gtgatgaaagcagtgattt

SEQ ID NO: 61167 - DNA, 19 bp, Homo sapiens
  siRNA target sequence for FLJ11142 (NM_018338.2,2462-2480).
gacaatcccatccaaacta

SEQ ID NO: 61168 - DNA, 19 bp, Homo sapiens
  siRNA target sequence for FLJ11142 (NM_018338.2,2468-2486).
cccatccaaactatcactt

SEQ ID NO: 61169 - DNA, 19 bp, Homo sapiens
  siRNA target sequence for FLJ11142 (NM_018338.2,2529-2547).
gagcaattcgagtctatgt

SEQ ID NO: 61170 - DNA, 19 bp, Homo sapiens
  siRNA target sequence for FLJ11142 (NM_018338.2,2538-2556).
gagtctatgtcctaaatca

SEQ ID NO: 61171 - DNA, 19 bp, Homo sapiens
  siRNA target sequence for FLJ11142 (NM_018338.2,2590-2608).
ctggcacttcaatatgcat

SEQ ID NO: 61172 - DNA, 19 bp, Homo sapiens
  siRNA target sequence for FLJ11142 (NM_018338.2,2606-2624).
catgacaataattatggat

SEQ ID NO: 61173 - DNA, 19 bp, Homo sapiens
  siRNA target sequence for FLJ11142 (NM_018338.2,2646-2664).
gctttgatgatcgtttctt

SEQ ID NO: 61174 - DNA, 19 bp, Homo sapiens
  siRNA target sequence for FLJ11142 (NM_018338.2,2679-2697).
cagatggcaatatctttgt

SEQ ID NO: 61175 - DNA, 19 bp, Homo sapiens
  siRNA target sequence for FLJ11142 (NM_018338.2,2841-2859).
gagaacatgacaagttaat

SEQ ID NO: 61176 - DNA, 19 bp, Homo sapiens
  siRNA target sequence for FLJ11142 (NM_018338.2,2916-2934).
gtgaattttgtaatctatt

SEQ ID NO: 61177 - DNA, 19 bp, Homo sapiens
  siRNA target sequence for FLJ11142 (NM_018338.2,2959-2977).
gcatatgcagtttaaacga

SEQ ID NO: 61178 - DNA, 19 bp, Homo sapiens
  siRNA target sequence for FLJ11142 (NM_018338.2,2960-2978).
catatgcagtttaaacgaa

SEQ ID NO: 61179 - DNA, 19 bp, Homo sapiens
  siRNA target sequence for FLJ11142 (NM_018338.2,2966-2984).
cagtttaaacgaacagtaa

SEQ ID NO: 61180 - DNA, 19 bp, Homo sapiens
  siRNA target sequence for FLJ11175 (NM_018349.1,138-156).
gcacgtgtaaagtggatat

SEQ ID NO: 61181 - DNA, 19 bp, Homo sapiens
  siRNA target sequence for FLJ11175 (NM_018349.1,224-242).
cttatgttggtcacactta

SEQ ID NO: 61182 - DNA, 19 bp, Homo sapiens
  siRNA target sequence for FLJ11175 (NM_018349.1,311-329).
cagattacccagcgatatt

SEQ ID NO: 61183 - DNA, 19 bp, Homo sapiens
  siRNA target sequence for FLJ11175 (NM_018349.1,355-373).
gaaagacgtcggcattcta

SEQ ID NO: 61184 - DNA, 19 bp, Homo sapiens
  siRNA target sequence for FLJ11175 (NM_018349.1,371-389).
ctacaagtgaaggttttaa

SEQ ID NO: 61185 - DNA, 19 bp, Homo sapiens
  siRNA target sequence for FLJ11175 (NM_018349.1,401-419).
ctcttagcggcagatttct

SEQ ID NO: 61186 - DNA, 19 bp, Homo sapiens
  siRNA target sequence for FLJ11175 (NM_018349.1,403-421).
cttagcggcagatttctca

SEQ ID NO: 61187 - DNA, 19 bp, Homo sapiens
  siRNA target sequence for FLJ11175 (NM_018349.1,472-490).
gacgcataccgtctacaaa

SEQ ID NO: 61188 - DNA, 19 bp, Homo sapiens
  siRNA target sequence for FLJ11175 (NM_018349.1,619-637).
cttgctgtccattagagat

SEQ ID NO: 61189 - DNA, 19 bp, Homo sapiens
  siRNA target sequence for FLJ11175 (NM_018349.1,639-657).
gacaaccgaattgttatgt

SEQ ID NO: 61190 - DNA, 19 bp, Homo sapiens
  siRNA target sequence for FLJ11175 (NM_018349.1,644-662).
ccgaattgttatgtactaa

SEQ ID NO: 61191 - DNA, 19 bp, Homo sapiens
  siRNA target sequence for FLJ11175 (NM_018349.1,645-663).
cgaattgttatgtactaaa

SEQ ID NO: 61192 - DNA, 19 bp, Homo sapiens
  siRNA target sequence for FLJ11175 (NM_018349.1,692-710).
ggagttatttacttagaga

SEQ ID NO: 61193 - DNA, 19 bp, Homo sapiens
  siRNA target sequence for FLJ11175 (NM_018349.1,728-746).
ccggtgaaagcaagtatta

SEQ ID NO: 61194 - DNA, 19 bp, Homo sapiens
  siRNA target sequence for FLJ11175 (NM_018349.1,731-749).
gtgaaagcaagtattagga

SEQ ID NO: 61195 - DNA, 19 bp, Homo sapiens
  siRNA target sequence for FLJ11175 (NM_018349.1,762-780).
gggaaaagcgctttgttga

SEQ ID NO: 61196 - DNA, 19 bp, Homo sapiens
  siRNA target sequence for FLJ11175 (NM_018349.1,821-839).
gtggaccgtgtgaaaagaa

SEQ ID NO: 61197 - DNA, 19 bp, Homo sapiens
  siRNA target sequence for FLJ11175 (NM_018349.1,824-842).
gaccgtgtgaaaagaatca

SEQ ID NO: 61198 - DNA, 19 bp, Homo sapiens
  siRNA target sequence for FLJ11175 (NM_018349.1,826-844).
ccgtgtgaaaagaatcact

SEQ ID NO: 61199 - DNA, 19 bp, Homo sapiens
  siRNA target sequence for FLJ11175 (NM_018349.1,827-845).
cgtgtgaaaagaatcacta

SEQ ID NO: 61200 - DNA, 19 bp, Homo sapiens
  siRNA target sequence for FLJ11175 (NM_018349.1,828-846).
gtgtgaaaagaatcactat

SEQ ID NO: 61201 - DNA, 19 bp, Homo sapiens
  siRNA target sequence for FLJ11175 (NM_018349.1,841-859).
cactatggcaatatggaat

SEQ ID NO: 61202 - DNA, 19 bp, Homo sapiens
  siRNA target sequence for FLJ11175 (NM_018349.1,886-904).
ccagtgggaatccacatta

SEQ ID NO: 61203 - DNA, 19 bp, Homo sapiens
  siRNA target sequence for FLJ11175 (NM_018349.1,917-935).
gcattcgcggtatttttga

SEQ ID NO: 61204 - DNA, 19 bp, Homo sapiens
  siRNA target sequence for FLJ11175 (NM_018349.1,918-936).
cattcgcggtatttttgat

SEQ ID NO: 61205 - DNA, 19 bp, Homo sapiens
  siRNA target sequence for FLJ11175 (NM_018349.1,1045-1063).
ccaggagagcacagacata

SEQ ID NO: 61206 - DNA, 19 bp, Homo sapiens
  siRNA target sequence for FLJ11175 (NM_018349.1,1106-1124).
gggttgattgaaagaatct

SEQ ID NO: 61207 - DNA, 19 bp, Homo sapiens
  siRNA target sequence for FLJ11175 (NM_018349.1,1129-1147).
ggtacaggatattgtttca

SEQ ID NO: 61208 - DNA, 19 bp, Homo sapiens
  siRNA target sequence for FLJ11175 (NM_018349.1,1130-1148).
gtacaggatattgtttcaa

SEQ ID NO: 61209 - DNA, 19 bp, Homo sapiens
  siRNA target sequence for FLJ11175 (NM_018349.1,1135-1153).
ggatattgtttcaactgtt

SEQ ID NO: 61210 - DNA, 19 bp, Homo sapiens
  siRNA target sequence for FLJ11175 (NM_018349.1,1168-1186).
ggaaatagcttcttttgga

SEQ ID NO: 61211 - DNA, 19 bp, Homo sapiens
  siRNA target sequence for FLJ11175 (NM_018349.1,1256-1274).
gcagccaccatcattttgt

SEQ ID NO: 61212 - DNA, 19 bp, Homo sapiens
  siRNA target sequence for FLJ11175 (NM_018349.1,1283-1301).
ccactgcggtacatcattt

SEQ ID NO: 61213 - DNA, 19 bp, Homo sapiens
  siRNA target sequence for FLJ11175 (NM_018349.1,1334-1352).
cttcgaaatccctattcca

SEQ ID NO: 61214 - DNA, 19 bp, Homo sapiens
  siRNA target sequence for FLJ11175 (NM_018349.1,1392-1410).
cgtctgatgttcaaaaggt

SEQ ID NO: 61215 - DNA, 19 bp, Homo sapiens
  siRNA target sequence for FLJ11637 (NM_024967.1,351-369).
ggaagaacatagcgttaaa

SEQ ID NO: 61216 - DNA, 19 bp, Homo sapiens
  siRNA target sequence for FLJ11637 (NM_024967.1,451-469).
cgtggaagaaccttcagaa

SEQ ID NO: 61217 - DNA, 19 bp, Homo sapiens
  siRNA target sequence for FLJ11637 (NM_024967.1,471-489).
gactcgaaattgtaatcgt

SEQ ID NO: 61218 - DNA, 19 bp, Homo sapiens
  siRNA target sequence for FLJ11637 (NM_024967.1,487-505).
cgtcatctgcgcaagaatt

SEQ ID NO: 61219 - DNA, 19 bp, Homo sapiens
  siRNA target sequence for FLJ11637 (NM_024967.1,493-511).
ctgcgcaagaattgttgta

SEQ ID NO: 61220 - DNA, 19 bp, Homo sapiens
  siRNA target sequence for FLJ11637 (NM_024967.1,495-513).
gcgcaagaattgttgtact

SEQ ID NO: 61221 - DNA, 19 bp, Homo sapiens
  siRNA target sequence for FLJ11637 (NM_024967.1,496-514).
cgcaagaattgttgtacta

SEQ ID NO: 61222 - DNA, 19 bp, Homo sapiens
  siRNA target sequence for FLJ11637 (NM_024967.1,498-516).
caagaattgttgtactagt

SEQ ID NO: 61223 - DNA, 19 bp, Homo sapiens
  siRNA target sequence for FLJ11637 (NM_024967.1,501-519).
gaattgttgtactagtgta

SEQ ID NO: 61224 - DNA, 19 bp, Homo sapiens
  siRNA target sequence for FLJ11637 (NM_024967.1,559-577).
cattcctcatccctgataa

SEQ ID NO: 61225 - DNA, 19 bp, Homo sapiens
  siRNA target sequence for FLJ11637 (NM_024967.1,654-672).
cctacagacgcatgagaaa

SEQ ID NO: 61226 - DNA, 19 bp, Homo sapiens
  siRNA target sequence for FLJ11637 (NM_024967.1,732-750).
ccactctctcactgaacat

SEQ ID NO: 61227 - DNA, 19 bp, Homo sapiens
  siRNA target sequence for FLJ11637 (NM_024967.1,821-839).
cctttcgcgcacatgtgat

SEQ ID NO: 61228 - DNA, 19 bp, Homo sapiens
  siRNA target sequence for FLJ11637 (NM_024967.1,905-923).
cctttcgagtccatatgat

SEQ ID NO: 61229 - DNA, 19 bp, Homo sapiens
  siRNA target sequence for FLJ11637 (NM_024967.1,978-996).
ctgggcaacatcctttcaa

SEQ ID NO: 61230 - DNA, 19 bp, Homo sapiens
  siRNA target sequence for FLJ11637 (NM_024967.1,998-1016).
gacacgtgagaattcacaa

SEQ ID NO: 61231 - DNA, 19 bp, Homo sapiens
  siRNA target sequence for FLJ11637 (NM_024967.1,1039-1057).
ggaaaatgcgggaaagcat

SEQ ID NO: 61232 - DNA, 19 bp, Homo sapiens
  siRNA target sequence for FLJ11637 (NM_024967.1,1059-1077).
cggttggccctcatcctta

SEQ ID NO: 61233 - DNA, 19 bp, Homo sapiens
  siRNA target sequence for FLJ11637 (NM_024967.1,1086-1104).
cgcgagaacgcatgctaaa

SEQ ID NO: 61234 - DNA, 19 bp, Homo sapiens
  siRNA target sequence for FLJ11637 (NM_024967.1,1087-1105).
gcgagaacgcatgctaaaa

SEQ ID NO: 61235 - DNA, 19 bp, Homo sapiens
  siRNA target sequence for FLJ11637 (NM_024967.1,1088-1106).
cgagaacgcatgctaaaaa

SEQ ID NO: 61236 - DNA, 19 bp, Homo sapiens
  siRNA target sequence for FLJ11637 (NM_024967.1,1156-1174).
ccctccacagatgtcaaat

SEQ ID NO: 61237 - DNA, 19 bp, Homo sapiens
  siRNA target sequence for FLJ11637 (NM_024967.1,1204-1222).
gaaacgtgtgggaaaacgt

SEQ ID NO: 61238 - DNA, 19 bp, Homo sapiens
  siRNA target sequence for FLJ11637 (NM_024967.1,1356-1374).
gcccagtaaatgcgaaaaa

SEQ ID NO: 61239 - DNA, 19 bp, Homo sapiens
  siRNA target sequence for FLJ11637 (NM_024967.1,1357-1375).
cccagtaaatgcgaaaaat

SEQ ID NO: 61240 - DNA, 19 bp, Homo sapiens
  siRNA target sequence for FLJ11806 (NM_024824.2,142-160).
gtgccattaaggggaaatt

SEQ ID NO: 61241 - DNA, 19 bp, Homo sapiens
  siRNA target sequence for FLJ11806 (NM_024824.2,270-288).
gggaacaacacaattcgat

SEQ ID NO: 61242 - DNA, 19 bp, Homo sapiens
  siRNA target sequence for FLJ11806 (NM_024824.2,298-316).
ggcttcatggtgtattaga

SEQ ID NO: 61243 - DNA, 19 bp, Homo sapiens
  siRNA target sequence for FLJ11806 (NM_024824.2,300-318).
cttcatggtgtattagata

SEQ ID NO: 61244 - DNA, 19 bp, Homo sapiens
  siRNA target sequence for FLJ11806 (NM_024824.2,342-360).
ccctctagtctgaagtctt

SEQ ID NO: 61245 - DNA, 19 bp, Homo sapiens
  siRNA target sequence for FLJ11806 (NM_024824.2,361-379).
ctgataccaacatctttga

SEQ ID NO: 61246 - DNA, 19 bp, Homo sapiens
  siRNA target sequence for FLJ11806 (NM_024824.2,367-385).
ccaacatctttgatagtaa

SEQ ID NO: 61247 - DNA, 19 bp, Homo sapiens
  siRNA target sequence for FLJ11806 (NM_024824.2,382-400).
gtaacgtgccttcaaacaa

SEQ ID NO: 61248 - DNA, 19 bp, Homo sapiens
  siRNA target sequence for FLJ11806 (NM_024824.2,447-465).
ccaccacttgccattccta

SEQ ID NO: 61249 - DNA, 19 bp, Homo sapiens
  siRNA target sequence for FLJ11806 (NM_024824.2,463-481).
ctagcgcgagacctgaaaa

SEQ ID NO: 61250 - DNA, 19 bp, Homo sapiens
  siRNA target sequence for FLJ11806 (NM_024824.2,467-485).
cgcgagacctgaaaaaaga

SEQ ID NO: 61251 - DNA, 19 bp, Homo sapiens
  siRNA target sequence for FLJ11806 (NM_024824.2,502-520).
caagttcgcaggagtcaaa

SEQ ID NO: 61252 - DNA, 19 bp, Homo sapiens
  siRNA target sequence for FLJ11806 (NM_024824.2,553-571).
gagctgcaacccgactaat

SEQ ID NO: 61253 - DNA, 19 bp, Homo sapiens
  siRNA target sequence for FLJ11806 (NM_024824.2,555-573).
gctgcaacccgactaatgt

SEQ ID NO: 61254 - DNA, 19 bp, Homo sapiens
  siRNA target sequence for FLJ11806 (NM_024824.2,558-576).
gcaacccgactaatgtcaa

SEQ ID NO: 61255 - DNA, 19 bp, Homo sapiens
  siRNA target sequence for FLJ11806 (NM_024824.2,598-616).
cagcaccctctgaagatgt

SEQ ID NO: 61256 - DNA, 19 bp, Homo sapiens
  siRNA target sequence for FLJ11806 (NM_024824.2,727-745).
ctcgcccttctattgaaat

SEQ ID NO: 61257 - DNA, 19 bp, Homo sapiens
  siRNA target sequence for FLJ11806 (NM_024824.2,729-747).
cgcccttctattgaaattt

SEQ ID NO: 61258 - DNA, 19 bp, Homo sapiens
  siRNA target sequence for FLJ11806 (NM_024824.2,730-748).
gcccttctattgaaattta

SEQ ID NO: 61259 - DNA, 19 bp, Homo sapiens
  siRNA target sequence for FLJ11806 (NM_024824.2,750-768).
cgaccacctgcaagtagaa

SEQ ID NO: 61260 - DNA, 19 bp, Homo sapiens
  siRNA target sequence for FLJ11806 (NM_024824.2,772-790).
cagatagtggtgttcattt

SEQ ID NO: 61261 - DNA, 19 bp, Homo sapiens
  siRNA target sequence for FLJ11806 (NM_024824.2,843-861).
cttgatatgcagagtagtt

SEQ ID NO: 61262 - DNA, 19 bp, Homo sapiens
  siRNA target sequence for FLJ11806 (NM_024824.2,888-906).
gaaccagaggtgcttaaca

SEQ ID NO: 61263 - DNA, 19 bp, Homo sapiens
  siRNA target sequence for FLJ11806 (NM_024824.2,896-914).
ggtgcttaacagcttagaa

SEQ ID NO: 61264 - DNA, 19 bp, Homo sapiens
  siRNA target sequence for FLJ11806 (NM_024824.2,899-917).
gcttaacagcttagaagaa

SEQ ID NO: 61265 - DNA, 19 bp, Homo sapiens
  siRNA target sequence for FLJ11806 (NM_024824.2,908-926).
cttagaagaaacgtatagt

SEQ ID NO: 61266 - DNA, 19 bp, Homo sapiens
  siRNA target sequence for FLJ11806 (NM_024824.2,920-938).
gtatagtccgttctttaga

SEQ ID NO: 61267 - DNA, 19 bp, Homo sapiens
  siRNA target sequence for FLJ11806 (NM_024824.2,927-945).
ccgttctttagaaacaact

SEQ ID NO: 61268 - DNA, 19 bp, Homo sapiens
  siRNA target sequence for FLJ11806 (NM_024824.2,941-959).
caactcggagaaaatgagt

SEQ ID NO: 61269 - DNA, 19 bp, Homo sapiens
  siRNA target sequence for FLJ11806 (NM_024824.2,992-1010).
gcctgtggtaagttcagtt

SEQ ID NO: 61270 - DNA, 19 bp, Homo sapiens
  siRNA target sequence for FLJ11806 (NM_024824.2,996-1014).
gtggtaagttcagttgtta

SEQ ID NO: 61271 - DNA, 19 bp, Homo sapiens
  siRNA target sequence for FLJ11806 (NM_024824.2,998-1016).
ggtaagttcagttgttaaa

SEQ ID NO: 61272 - DNA, 19 bp, Homo sapiens
  siRNA target sequence for FLJ11806 (NM_024824.2,1003-1021).
gttcagttgttaaagtaaa

SEQ ID NO: 61273 - DNA, 19 bp, Homo sapiens
  siRNA target sequence for FLJ11806 (NM_024824.2,1138-1156).
caccttctaaacaagctaa

SEQ ID NO: 61274 - DNA, 19 bp, Homo sapiens
  siRNA target sequence for FLJ11806 (NM_024824.2,1141-1159).
cttctaaacaagctaacaa

SEQ ID NO: 61275 - DNA, 19 bp, Homo sapiens
  siRNA target sequence for FLJ11806 (NM_024824.2,1149-1167).
caagctaacaagaatctga

SEQ ID NO: 61276 - DNA, 19 bp, Homo sapiens
  siRNA target sequence for FLJ11806 (NM_024824.2,1188-1206).
gctcaagaatccgtaacaa

SEQ ID NO: 61277 - DNA, 19 bp, Homo sapiens
  siRNA target sequence for FLJ11806 (NM_024824.2,1189-1207).
ctcaagaatccgtaacaaa

SEQ ID NO: 61278 - DNA, 19 bp, Homo sapiens
  siRNA target sequence for FLJ11806 (NM_024824.2,1198-1216).
ccgtaacaaaaacaactaa

SEQ ID NO: 61279 - DNA, 19 bp, Homo sapiens
  siRNA target sequence for FLJ11806 (NM_024824.2,1264-1282).
ctcgaacttctcaagaaga

SEQ ID NO: 61280 - DNA, 19 bp, Homo sapiens
  siRNA target sequence for FLJ11806 (NM_024824.2,1266-1284).
cgaacttctcaagaagaat

SEQ ID NO: 61281 - DNA, 19 bp, Homo sapiens
  siRNA target sequence for FLJ11806 (NM_024824.2,1324-1342).
gaataagtccccccattaa

SEQ ID NO: 61282 - DNA, 19 bp, Homo sapiens
  siRNA target sequence for FLJ11806 (NM_024824.2,1426-1444).
cagtaatggcagaaactct

SEQ ID NO: 61283 - DNA, 19 bp, Homo sapiens
  siRNA target sequence for FLJ11806 (NM_024824.2,1443-1461).
ctgcagatgagtcaagatt

SEQ ID NO: 61284 - DNA, 19 bp, Homo sapiens
  siRNA target sequence for FLJ11806 (NM_024824.2,1448-1466).
gatgagtcaagattactat

SEQ ID NO: 61285 - DNA, 19 bp, Homo sapiens
  siRNA target sequence for FLJ11806 (NM_024824.2,1458-1476).
gattactatgacatggaat

SEQ ID NO: 61286 - DNA, 19 bp, Homo sapiens
  siRNA target sequence for FLJ11806 (NM_024824.2,1482-1500).
gtccatgcagacacaagat

SEQ ID NO: 61287 - DNA, 19 bp, Homo sapiens
  siRNA target sequence for FLJ11806 (NM_024824.2,1484-1502).
ccatgcagacacaagatca

SEQ ID NO: 61288 - DNA, 19 bp, Homo sapiens
  siRNA target sequence for FLJ11806 (NM_024824.2,1485-1503).
catgcagacacaagatcat

SEQ ID NO: 61289 - DNA, 19 bp, Homo sapiens
  siRNA target sequence for FLJ11806 (NM_024824.2,1578-1596).
gattcccttcgggtacttt

SEQ ID NO: 61290 - DNA, 19 bp, Homo sapiens
  siRNA target sequence for FLJ11806 (NM_024824.2,1613-1631).
gacacgagatcttgtacaa

SEQ ID NO: 61291 - DNA, 19 bp, Homo sapiens
  siRNA target sequence for FLJ11806 (NM_024824.2,1693-1711).
gatacatgtcagatcaaga

SEQ ID NO: 61292 - DNA, 19 bp, Homo sapiens
  siRNA target sequence for FLJ11806 (NM_024824.2,1732-1750).
gaatgaaacccgtaaacca

SEQ ID NO: 61293 - DNA, 19 bp, Homo sapiens
  siRNA target sequence for FLJ11806 (NM_024824.2,1821-1839).
cttgaggacccaaatggta

SEQ ID NO: 61294 - DNA, 19 bp, Homo sapiens
  siRNA target sequence for FLJ11806 (NM_024824.2,1830-1848).
ccaaatggtagcttttcta

SEQ ID NO: 61295 - DNA, 19 bp, Homo sapiens
  siRNA target sequence for FLJ11806 (NM_024824.2,1910-1928).
gtactggcctgcttgtaaa

SEQ ID NO: 61296 - DNA, 19 bp, Homo sapiens
  siRNA target sequence for FLJ11806 (NM_024824.2,1913-1931).
ctggcctgcttgtaaaaat

SEQ ID NO: 61297 - DNA, 19 bp, Homo sapiens
  siRNA target sequence for FLJ11806 (NM_024824.2,1975-1993).
ccttccccaattgtaaatt

SEQ ID NO: 61298 - DNA, 19 bp, Homo sapiens
  siRNA target sequence for FLJ11806 (NM_024824.2,1976-1994).
cttccccaattgtaaattt

SEQ ID NO: 61299 - DNA, 19 bp, Homo sapiens
  siRNA target sequence for FLJ11806 (NM_024824.2,1979-1997).
ccccaattgtaaatttgct

SEQ ID NO: 61300 - DNA, 19 bp, Homo sapiens
  siRNA target sequence for FLJ11806 (NM_024824.2,2013-2031).
gttcacccaaattgtaaat

SEQ ID NO: 61301 - DNA, 19 bp, Homo sapiens
  siRNA target sequence for FLJ11806 (NM_024824.2,2066-2084).
cactcatgtgagtagaaga

SEQ ID NO: 61302 - DNA, 19 bp, Homo sapiens
  siRNA target sequence for FLJ11806 (NM_024824.2,2068-2086).
ctcatgtgagtagaagaat

SEQ ID NO: 61303 - DNA, 19 bp, Homo sapiens
  siRNA target sequence for FLJ11806 (NM_024824.2,2174-2192).
gatggaatgtcccttctat

SEQ ID NO: 61304 - DNA, 19 bp, Homo sapiens
  siRNA target sequence for FLJ11806 (NM_024824.2,2177-2195).
ggaatgtcccttctatcat

SEQ ID NO: 61305 - DNA, 19 bp, Homo sapiens
  siRNA target sequence for FLJ11806 (NM_024824.2,2182-2200).
gtcccttctatcatccaaa

SEQ ID NO: 61306 - DNA, 19 bp, Homo sapiens
  siRNA target sequence for FLJ11806 (NM_024824.2,2185-2203).
ccttctatcatccaaaaca

SEQ ID NO: 61307 - DNA, 19 bp, Homo sapiens
  siRNA target sequence for FLJ11806 (NM_024824.2,2186-2204).
cttctatcatccaaaacat

SEQ ID NO: 61308 - DNA, 19 bp, Homo sapiens
  siRNA target sequence for FLJ11806 (NM_024824.2,2189-2207).
ctatcatccaaaacattgt

SEQ ID NO: 61309 - DNA, 19 bp, Homo sapiens
  siRNA target sequence for FLJ11806 (NM_024824.2,2196-2214).
ccaaaacattgtaggttta

SEQ ID NO: 61310 - DNA, 19 bp, Homo sapiens
  siRNA target sequence for FLJ11806 (NM_024824.2,2210-2228).
gtttaacactcaatgtaca

SEQ ID NO: 61311 - DNA, 19 bp, Homo sapiens
  siRNA target sequence for FLJ11806 (NM_024824.2,2230-2248).
gaccggactgcacattcta

SEQ ID NO: 61312 - DNA, 19 bp, Homo sapiens
  siRNA target sequence for FLJ11806 (NM_024824.2,2246-2264).
ctaccatcccaccattaat

SEQ ID NO: 61313 - DNA, 19 bp, Homo sapiens
  siRNA target sequence for FLJ11806 (NM_024824.2,2271-2289).
ccacgacatgccttgaaat

SEQ ID NO: 61314 - DNA, 19 bp, Homo sapiens
  siRNA target sequence for FLJ12455 (NM_022078.1,93-111).
gttgcgctcggcccattta

SEQ ID NO: 61315 - DNA, 19 bp, Homo sapiens
  siRNA target sequence for FLJ12455 (NM_022078.1,103-121).
gcccatttacggagctatt

SEQ ID NO: 61316 - DNA, 19 bp, Homo sapiens
  siRNA target sequence for FLJ12455 (NM_022078.1,104-122).
cccatttacggagctattt

SEQ ID NO: 61317 - DNA, 19 bp, Homo sapiens
  siRNA target sequence for FLJ12455 (NM_022078.1,105-123).
ccatttacggagctatttt

SEQ ID NO: 61318 - DNA, 19 bp, Homo sapiens
  siRNA target sequence for FLJ12455 (NM_022078.1,106-124).
catttacggagctatttta

SEQ ID NO: 61319 - DNA, 19 bp, Homo sapiens
  siRNA target sequence for FLJ12455 (NM_022078.1,146-164).
gcggtggcttcctctgttt

SEQ ID NO: 61320 - DNA, 19 bp, Homo sapiens
  siRNA target sequence for FLJ12455 (NM_022078.1,198-216).
gcaggccgctcctaactct

SEQ ID NO: 61321 - DNA, 19 bp, Homo sapiens
  siRNA target sequence for FLJ12455 (NM_022078.1,617-635).
ccctgcgggtctttttgga

SEQ ID NO: 61322 - DNA, 19 bp, Homo sapiens
  siRNA target sequence for FLJ12455 (NM_022078.1,655-673).
ctaccccctcggatcatca

SEQ ID NO: 61323 - DNA, 19 bp, Homo sapiens
  siRNA target sequence for FLJ12455 (NM_022078.1,809-827).
gaacctacctggcagatat

SEQ ID NO: 61324 - DNA, 19 bp, Homo sapiens
  siRNA target sequence for FLJ12455 (NM_022078.1,813-831).
ctacctggcagatatacca

SEQ ID NO: 61325 - DNA, 19 bp, Homo sapiens
  siRNA target sequence for FLJ12455 (NM_022078.1,1029-1047).
cctggtgttttatactgat

SEQ ID NO: 61326 - DNA, 19 bp, Homo sapiens
  siRNA target sequence for FLJ12455 (NM_022078.1,1110-1128).
ggacatgagtgtgtactat

SEQ ID NO: 61327 - DNA, 19 bp, Homo sapiens
  siRNA target sequence for FLJ12455 (NM_022078.1,1154-1172).
cccgagactctgtccaaat

SEQ ID NO: 61328 - DNA, 19 bp, Homo sapiens
  siRNA target sequence for FLJ12455 (NM_022078.1,1517-1535).
cacccaccagcatgaagtt

SEQ ID NO: 61329 - DNA, 19 bp, Homo sapiens
  siRNA target sequence for FLJ12529 (NM_024811.2,105-123).
cagaaggagtggacttgat

SEQ ID NO: 61330 - DNA, 19 bp, Homo sapiens
  siRNA target sequence for FLJ12529 (NM_024811.2,110-128).
ggagtggacttgattgata

SEQ ID NO: 61331 - DNA, 19 bp, Homo sapiens
  siRNA target sequence for FLJ12529 (NM_024811.2,111-129).
gagtggacttgattgatat

SEQ ID NO: 61332 - DNA, 19 bp, Homo sapiens
  siRNA target sequence for FLJ12529 (NM_024811.2,115-133).
ggacttgattgatatatat

SEQ ID NO: 61333 - DNA, 19 bp, Homo sapiens
  siRNA target sequence for FLJ12529 (NM_024811.2,118-136).
cttgattgatatatatgct

SEQ ID NO: 61334 - DNA, 19 bp, Homo sapiens
  siRNA target sequence for FLJ12529 (NM_024811.2,166-184).
caacaatacagatcagatt

SEQ ID NO: 61335 - DNA, 19 bp, Homo sapiens
  siRNA target sequence for FLJ12529 (NM_024811.2,292-310).
caacaagacccctgcaatt

SEQ ID NO: 61336 - DNA, 19 bp, Homo sapiens
  siRNA target sequence for FLJ12529 (NM_024811.2,298-316).
gacccctgcaattctgtat

SEQ ID NO: 61337 - DNA, 19 bp, Homo sapiens
  siRNA target sequence for FLJ12529 (NM_024811.2,322-340).
cagtggcctgcgtaataga

SEQ ID NO: 61338 - DNA, 19 bp, Homo sapiens
  siRNA target sequence for FLJ12529 (NM_024811.2,397-415).
ccaggttattcgctctata

SEQ ID NO: 61339 - DNA, 19 bp, Homo sapiens
  siRNA target sequence for FLJ12529 (NM_024811.2,400-418).
ggttattcgctctatagga

SEQ ID NO: 61340 - DNA, 19 bp, Homo sapiens
  siRNA target sequence for FLJ12529 (NM_024811.2,491-509).
gtggtagcctctgaaaact

SEQ ID NO: 61341 - DNA, 19 bp, Homo sapiens
  siRNA target sequence for FLJ12529 (NM_024811.2,533-551).
ctaccagggaaagttctta

SEQ ID NO: 61342 - DNA, 19 bp, Homo sapiens
  siRNA target sequence for FLJ12529 (NM_024811.2,640-658).
cccaagagggggaatacct

SEQ ID NO: 61343 - DNA, 19 bp, Homo sapiens
  siRNA target sequence for FLJ12529 (NM_024811.2,667-685).
ccattcccgagattctagt

SEQ ID NO: 61344 - DNA, 19 bp, Homo sapiens
  siRNA target sequence for FLJ12529 (NM_024811.2,732-750).
catctgctcgtgtggataa

SEQ ID NO: 61345 - DNA, 19 bp, Homo sapiens
  siRNA target sequence for FLJ12529 (NM_024811.2,901-919).
gcccccacctcctcgatta

SEQ ID NO: 61346 - DNA, 19 bp, Homo sapiens
  siRNA target sequence for FLJ12529 (NM_024811.2,1009-1027).
ggggcctccaccagatact

SEQ ID NO: 61347 - DNA, 19 bp, Homo sapiens
  siRNA target sequence for FLJ12529 (NM_024811.2,1010-1028).
gggcctccaccagatactt

SEQ ID NO: 61348 - DNA, 19 bp, Homo sapiens
  siRNA target sequence for FLJ12529 (NM_024811.2,1013-1031).
cctccaccagatacttaca

SEQ ID NO: 61349 - DNA, 19 bp, Homo sapiens
  siRNA target sequence for FLJ12529 (NM_024811.2,1014-1032).
ctccaccagatacttacat

SEQ ID NO: 61350 - DNA, 19 bp, Homo sapiens
  siRNA target sequence for FLJ12529 (NM_024811.2,1127-1145).
cgaaacagagcaatttcca

SEQ ID NO: 61351 - DNA, 19 bp, Homo sapiens
  siRNA target sequence for FLJ12529 (NM_024811.2,1221-1239).
ccattgcggttatcaaaca

SEQ ID NO: 61352 - DNA, 19 bp, Homo sapiens
  siRNA target sequence for FLJ12529 (NM_024811.2,1240-1258).
gtcccgggttgccaatgat

SEQ ID NO: 61353 - DNA, 19 bp, Homo sapiens
  siRNA target sequence for FLJ12529 (NM_024811.2,1242-1260).
cccgggttgccaatgatga

SEQ ID NO: 61354 - DNA, 19 bp, Homo sapiens
  siRNA target sequence for FLJ12529 (NM_024811.2,1414-1432).
ccgggatctgcttcataat

SEQ ID NO: 61355 - DNA, 19 bp, Homo sapiens
  siRNA target sequence for FLJ12529 (NM_024811.2,1416-1434).
gggatctgcttcataatga

SEQ ID NO: 61356 - DNA, 19 bp, Homo sapiens
  siRNA target sequence for FLJ12529 (NM_024811.2,1417-1435).
ggatctgcttcataatgaa

SEQ ID NO: 61357 - DNA, 19 bp, Homo sapiens
  siRNA target sequence for FLJ12529 (NM_024811.2,1433-1451).
gaagatcggcatgatgatt

SEQ ID NO: 61358 - DNA, 19 bp, Homo sapiens
  siRNA target sequence for FLJ12529 (NM_024811.2,1436-1454).
gatcggcatgatgattatt

SEQ ID NO: 61359 - DNA, 19 bp, Homo sapiens
  siRNA target sequence for FLJ12606 (NM_024804.1,656-674).
gatctgaacgagaacattt

SEQ ID NO: 61360 - DNA, 19 bp, Homo sapiens
  siRNA target sequence for FLJ12606 (NM_024804.1,773-791).
ccatatggagagaagcaat

SEQ ID NO: 61361 - DNA, 19 bp, Homo sapiens
  siRNA target sequence for FLJ12606 (NM_024804.1,1244-1262).
cgtttgagttccctttgta

SEQ ID NO: 61362 - DNA, 19 bp, Homo sapiens
  siRNA target sequence for FLJ12606 (NM_024804.1,1464-1482).
gtagtgactcagcctataa

SEQ ID NO: 61363 - DNA, 19 bp, Homo sapiens
  siRNA target sequence for FLJ12644 (NM_023074.2,462-480).
cactatggacactagaaga

SEQ ID NO: 61364 - DNA, 19 bp, Homo sapiens
  siRNA target sequence for FLJ12644 (NM_023074.2,492-510).
gtccagcccacccagaaat

SEQ ID NO: 61365 - DNA, 19 bp, Homo sapiens
  siRNA target sequence for FLJ12644 (NM_023074.2,570-588).
cgggacaacgctatgaaca

SEQ ID NO: 61366 - DNA, 19 bp, Homo sapiens
  siRNA target sequence for FLJ12644 (NM_023074.2,580-598).
ctatgaacacggaagaact

SEQ ID NO: 61367 - DNA, 19 bp, Homo sapiens
  siRNA target sequence for FLJ12644 (NM_023074.2,584-602).
gaacacggaagaactttga

SEQ ID NO: 61368 - DNA, 19 bp, Homo sapiens
  siRNA target sequence for FLJ12644 (NM_023074.2,621-639).
ccaaccagagcagaagata

SEQ ID NO: 61369 - DNA, 19 bp, Homo sapiens
  siRNA target sequence for FLJ12644 (NM_023074.2,674-692).
ggagcttttctccatgata

SEQ ID NO: 61370 - DNA, 19 bp, Homo sapiens
  siRNA target sequence for FLJ12644 (NM_023074.2,675-693).
gagcttttctccatgataa

SEQ ID NO: 61371 - DNA, 19 bp, Homo sapiens
  siRNA target sequence for FLJ12644 (NM_023074.2,678-696).
cttttctccatgataatca

SEQ ID NO: 61372 - DNA, 19 bp, Homo sapiens
  siRNA target sequence for FLJ12644 (NM_023074.2,751-769).
caagtcacaattccttaaa

SEQ ID NO: 61373 - DNA, 19 bp, Homo sapiens
  siRNA target sequence for FLJ12644 (NM_023074.2,1086-1104).
ggaaatctgagcttactga

SEQ ID NO: 61374 - DNA, 19 bp, Homo sapiens
  siRNA target sequence for FLJ12644 (NM_023074.2,1113-1131).
ggattcacacgggaattaa

SEQ ID NO: 61375 - DNA, 19 bp, Homo sapiens
  siRNA target sequence for FLJ12644 (NM_023074.2,1255-1273).
gaagggcaatctcaacata

SEQ ID NO: 61376 - DNA, 19 bp, Homo sapiens
  siRNA target sequence for FLJ12644 (NM_023074.2,1258-1276).
gggcaatctcaacatacat

SEQ ID NO: 61377 - DNA, 19 bp, Homo sapiens
  siRNA target sequence for FLJ12644 (NM_023074.2,1260-1278).
gcaatctcaacatacatca

SEQ ID NO: 61378 - DNA, 19 bp, Homo sapiens
  siRNA target sequence for FLJ12644 (NM_023074.2,1496-1514).
gccttccttacaaagacaa

SEQ ID NO: 61379 - DNA, 19 bp, Homo sapiens
  siRNA target sequence for FLJ12644 (NM_023074.2,1510-1528).
gacaatgctcattgtacat

SEQ ID NO: 61380 - DNA, 19 bp, Homo sapiens
  siRNA target sequence for FLJ12644 (NM_023074.2,1572-1590).
gtgagaaagcttacttcta

SEQ ID NO: 61381 - DNA, 19 bp, Homo sapiens
  siRNA target sequence for FLJ12644 (NM_023074.2,1594-1612).
gtcttgccttgttaaacat

SEQ ID NO: 61382 - DNA, 19 bp, Homo sapiens
  siRNA target sequence for FLJ12644 (NM_023074.2,1684-1702).
cttaagtcctagtgaacat

SEQ ID NO: 61383 - DNA, 19 bp, Homo sapiens
  siRNA target sequence for FLJ12644 (NM_023074.2,1719-1737).
ctgttaatatggtaactgt

SEQ ID NO: 61384 - DNA, 19 bp, Homo sapiens
  siRNA target sequence for FLJ12998 (NM_022764.1,57-75).
caggacatacgtgaacaaa

SEQ ID NO: 61385 - DNA, 19 bp, Homo sapiens
  siRNA target sequence for FLJ12998 (NM_022764.1,59-77).
ggacatacgtgaacaaatt

SEQ ID NO: 61386 - DNA, 19 bp, Homo sapiens
  siRNA target sequence for FLJ12998 (NM_022764.1,79-97).
ggggctacatggaatcaca

SEQ ID NO: 61387 - DNA, 19 bp, Homo sapiens
  siRNA target sequence for FLJ12998 (NM_022764.1,80-98).
gggctacatggaatcacaa

SEQ ID NO: 61388 - DNA, 19 bp, Homo sapiens
  siRNA target sequence for FLJ12998 (NM_022764.1,81-99).
ggctacatggaatcacaaa

SEQ ID NO: 61389 - DNA, 19 bp, Homo sapiens
  siRNA target sequence for FLJ12998 (NM_022764.1,83-101).
ctacatggaatcacaaaat

SEQ ID NO: 61390 - DNA, 19 bp, Homo sapiens
  siRNA target sequence for FLJ12998 (NM_022764.1,86-104).
catggaatcacaaaattta

SEQ ID NO: 61391 - DNA, 19 bp, Homo sapiens
  siRNA target sequence for FLJ12998 (NM_022764.1,110-128).
ctttccccgacctgttcat

SEQ ID NO: 61392 - DNA, 19 bp, Homo sapiens
  siRNA target sequence for FLJ12998 (NM_022764.1,129-147).
cacaggatacccaacttta

SEQ ID NO: 61393 - DNA, 19 bp, Homo sapiens
  siRNA target sequence for FLJ12998 (NM_022764.1,140-158).
caactttaaggggtcttat

SEQ ID NO: 61394 - DNA, 19 bp, Homo sapiens
  siRNA target sequence for FLJ12998 (NM_022764.1,159-177).
ctggcttgccaaaacatca

SEQ ID NO: 61395 - DNA, 19 bp, Homo sapiens
  siRNA target sequence for FLJ12998 (NM_022764.1,176-194).
caaagacctagacgttttt

SEQ ID NO: 61396 - DNA, 19 bp, Homo sapiens
  siRNA target sequence for FLJ12998 (NM_022764.1,295-313).
gactgagaacgggattgtt

SEQ ID NO: 61397 - DNA, 19 bp, Homo sapiens
  siRNA target sequence for FLJ12998 (NM_022764.1,297-315).
ctgagaacgggattgttta

SEQ ID NO: 61398 - DNA, 19 bp, Homo sapiens
  siRNA target sequence for FLJ12998 (NM_022764.1,301-319).
gaacgggattgtttaataa

SEQ ID NO: 61399 - DNA, 19 bp, Homo sapiens
  siRNA target sequence for FLJ12998 (NM_022764.1,306-324).
ggattgtttaataagatca

SEQ ID NO: 61400 - DNA, 19 bp, Homo sapiens
  siRNA target sequence for FLJ12998 (NM_022764.1,328-346).
caccccctggggcaactaa

SEQ ID NO: 61401 - DNA, 19 bp, Homo sapiens
  siRNA target sequence for FLJ12998 (NM_022764.1,331-349).
cccctggggcaactaaaga

SEQ ID NO: 61402 - DNA, 19 bp, Homo sapiens
  siRNA target sequence for FLJ12998 (NM_022764.1,333-351).
cctggggcaactaaagaca

SEQ ID NO: 61403 - DNA, 19 bp, Homo sapiens
  siRNA target sequence for FLJ12998 (NM_022764.1,334-352).
ctggggcaactaaagacat

SEQ ID NO: 61404 - DNA, 19 bp, Homo sapiens
  siRNA target sequence for FLJ12998 (NM_022764.1,337-355).
gggcaactaaagacatctt

SEQ ID NO: 61405 - DNA, 19 bp, Homo sapiens
  siRNA target sequence for FLJ12998 (NM_022764.1,415-433).
ccagagtcctcgtggattt

SEQ ID NO: 61406 - DNA, 19 bp, Homo sapiens
  siRNA target sequence for FLJ12998 (NM_022764.1,416-434).
cagagtcctcgtggattta

SEQ ID NO: 61407 - DNA, 19 bp, Homo sapiens
  siRNA target sequence for FLJ12998 (NM_022764.1,418-436).
gagtcctcgtggatttagt

SEQ ID NO: 61408 - DNA, 19 bp, Homo sapiens
  siRNA target sequence for FLJ12998 (NM_022764.1,493-511).
gctacgccgatctggaata

SEQ ID NO: 61409 - DNA, 19 bp, Homo sapiens
  siRNA target sequence for FLJ12998 (NM_022764.1,494-512).
ctacgccgatctggaatat

SEQ ID NO: 61410 - DNA, 19 bp, Homo sapiens
  siRNA target sequence for FLJ12998 (NM_022764.1,507-525).
gaatatgccatgatggtat

SEQ ID NO: 61411 - DNA, 19 bp, Homo sapiens
  siRNA target sequence for FLJ12998 (NM_022764.1,871-889).
cacccggaccagaaaccaa

SEQ ID NO: 61412 - DNA, 19 bp, Homo sapiens
  siRNA target sequence for FLJ12998 (NM_022764.1,876-894).
ggaccagaaaccaattcca

SEQ ID NO: 61413 - DNA, 19 bp, Homo sapiens
  siRNA target sequence for FLJ12998 (NM_022764.1,877-895).
gaccagaaaccaattccat

SEQ ID NO: 61414 - DNA, 19 bp, Homo sapiens
  siRNA target sequence for FLJ12998 (NM_022764.1,933-951).
ccgcttgcagccgatgttt

SEQ ID NO: 61415 - DNA, 19 bp, Homo sapiens
  siRNA target sequence for FLJ12998 (NM_022764.1,934-952).
cgcttgcagccgatgttta

SEQ ID NO: 61416 - DNA, 19 bp, Homo sapiens
  siRNA target sequence for FLJ12998 (NM_022764.1,1054-1072).
gcagagccttcctccatta

SEQ ID NO: 61417 - DNA, 19 bp, Homo sapiens
  siRNA target sequence for FLJ13590 (NM_024840.2,852-870).
catgccaagcatgaacaat

SEQ ID NO: 61418 - DNA, 19 bp, Homo sapiens
  siRNA target sequence for FLJ13590 (NM_024840.2,856-874).
ccaagcatgaacaatttca

SEQ ID NO: 61419 - DNA, 19 bp, Homo sapiens
  siRNA target sequence for FLJ13590 (NM_024840.2,887-905).
cttccccgaaggtggaaat

SEQ ID NO: 61420 - DNA, 19 bp, Homo sapiens
  siRNA target sequence for FLJ13590 (NM_024840.2,890-908).
ccccgaaggtggaaattct

SEQ ID NO: 61421 - DNA, 19 bp, Homo sapiens
  siRNA target sequence for FLJ13590 (NM_024840.2,892-910).
ccgaaggtggaaattctgt

SEQ ID NO: 61422 - DNA, 19 bp, Homo sapiens
  siRNA target sequence for FLJ13590 (NM_024840.2,936-954).
catcagcgaactcaaaaca

SEQ ID NO: 61423 - DNA, 19 bp, Homo sapiens
  siRNA target sequence for FLJ13590 (NM_024840.2,1001-1019).
gaagtctcgcctcatctat

SEQ ID NO: 61424 - DNA, 19 bp, Homo sapiens
  siRNA target sequence for FLJ13590 (NM_024840.2,1004-1022).
gtctcgcctcatctatcat

SEQ ID NO: 61425 - DNA, 19 bp, Homo sapiens
  siRNA target sequence for FLJ13590 (NM_024840.2,1006-1024).
ctcgcctcatctatcatca

SEQ ID NO: 61426 - DNA, 19 bp, Homo sapiens
  siRNA target sequence for FLJ13590 (NM_024840.2,1253-1271).
gaagtctcggctcattaat

SEQ ID NO: 61427 - DNA, 19 bp, Homo sapiens
  siRNA target sequence for FLJ13590 (NM_024840.2,1592-1610).
gggcaacctccttattcat

SEQ ID NO: 61428 - DNA, 19 bp, Homo sapiens
  siRNA target sequence for FLJ13590 (NM_024840.2,1925-1943).
cttgtcatgccttgtttat

SEQ ID NO: 61429 - DNA, 19 bp, Homo sapiens
  siRNA target sequence for FLJ13590 (NM_024840.2,1930-1948).
catgccttgtttatcataa

SEQ ID NO: 61430 - DNA, 19 bp, Homo sapiens
  siRNA target sequence for FLJ13590 (NM_024840.2,1975-1993).
gtgtaggttcagtcaaatt

SEQ ID NO: 61431 - DNA, 19 bp, Homo sapiens
  siRNA target sequence for FLJ13590 (NM_024840.2,2001-2019).
ccttgctcagagagtcata

SEQ ID NO: 61432 - DNA, 19 bp, Homo sapiens
  siRNA target sequence for FLJ13590 (NM_024840.2,2005-2023).
gctcagagagtcatagctt

SEQ ID NO: 61433 - DNA, 19 bp, Homo sapiens
  siRNA target sequence for FLJ13590 (NM_024840.2,2006-2024).
ctcagagagtcatagctta

SEQ ID NO: 61434 - DNA, 19 bp, Homo sapiens
  siRNA target sequence for FLJ13590 (NM_024840.2,2026-2044).
cacatacacgtgatctcat

SEQ ID NO: 61435 - DNA, 19 bp, Homo sapiens
  siRNA target sequence for FLJ13590 (NM_024840.2,2035-2053).
gtgatctcatacaggataa

SEQ ID NO: 61436 - DNA, 19 bp, Homo sapiens
  siRNA target sequence for FLJ13590 (NM_024840.2,2097-2115).
gctcagacctcattaacta

SEQ ID NO: 61437 - DNA, 19 bp, Homo sapiens
  siRNA target sequence for FLJ13590 (NM_024840.2,2098-2116).
ctcagacctcattaactaa

SEQ ID NO: 61438 - DNA, 19 bp, Homo sapiens
  siRNA target sequence for FLJ13590 (NM_024840.2,2100-2118).
cagacctcattaactaaca

SEQ ID NO: 61439 - DNA, 19 bp, Homo sapiens
  siRNA target sequence for FLJ13590 (NM_024840.2,2102-2120).
gacctcattaactaacagt

SEQ ID NO: 61440 - DNA, 19 bp, Homo sapiens
  siRNA target sequence for FLJ13590 (NM_024840.2,2178-2196).
gtctcagcagatagtagaa

SEQ ID NO: 61441 - DNA, 19 bp, Homo sapiens
  siRNA target sequence for FLJ14451 (NM_032786.1,425-443).
gccatgacttccagaacaa

SEQ ID NO: 61442 - DNA, 19 bp, Homo sapiens
  siRNA target sequence for FLJ14451 (NM_032786.1,664-682).
ctgcaacgggattttgagt

SEQ ID NO: 61443 - DNA, 19 bp, Homo sapiens
  siRNA target sequence for FLJ14451 (NM_032786.1,735-753).
cccaggacgacgtcatgat

SEQ ID NO: 61444 - DNA, 19 bp, Homo sapiens
  siRNA target sequence for FLJ14451 (NM_032786.1,740-758).
gacgacgtcatgatctcta

SEQ ID NO: 61445 - DNA, 19 bp, Homo sapiens
  siRNA target sequence for FLJ14451 (NM_032786.1,743-761).
gacgtcatgatctctatga

SEQ ID NO: 61446 - DNA, 19 bp, Homo sapiens
  siRNA target sequence for FLJ14451 (NM_032786.1,745-763).
cgtcatgatctctatgata

SEQ ID NO: 61447 - DNA, 19 bp, Homo sapiens
  siRNA target sequence for FLJ14451 (NM_032786.1,836-854).
cccctgatggccctcattt

SEQ ID NO: 61448 - DNA, 19 bp, Homo sapiens
  siRNA target sequence for FLJ14451 (NM_032786.1,839-857).
ctgatggccctcattttga

SEQ ID NO: 61449 - DNA, 19 bp, Homo sapiens
  siRNA target sequence for FLJ14451 (NM_032786.1,841-859).
gatggccctcattttgagt

SEQ ID NO: 61450 - DNA, 19 bp, Homo sapiens
  siRNA target sequence for FLJ14451 (NM_032786.1,845-863).
gccctcattttgagtcata

SEQ ID NO: 61451 - DNA, 19 bp, Homo sapiens
  siRNA target sequence for FLJ14451 (NM_032786.1,937-955).
cgggtagaggagttaaaga

SEQ ID NO: 61452 - DNA, 19 bp, Homo sapiens
  siRNA target sequence for FLJ14451 (NM_032786.1,977-995).
ccaccaatgaggtactact

SEQ ID NO: 61453 - DNA, 19 bp, Homo sapiens
  siRNA target sequence for FLJ14451 (NM_032786.1,1086-1104).
gggcactgttgccactttt

SEQ ID NO: 61454 - DNA, 19 bp, Homo sapiens
  siRNA target sequence for FLJ14451 (NM_032786.1,1202-1220).
cagctgctcccccaactaa

SEQ ID NO: 61455 - DNA, 19 bp, Homo sapiens
  siRNA target sequence for FLJ14451 (NM_032786.1,1373-1391).
cccctgtggctgtatcgat

SEQ ID NO: 61456 - DNA, 19 bp, Homo sapiens
  siRNA target sequence for FLJ14451 (NM_032786.1,1430-1448).
ccactcccatggtgactta

SEQ ID NO: 61457 - DNA, 19 bp, Homo sapiens
  siRNA target sequence for FLJ14779 (NM_032838.2,209-227).
gtttcaatggggcattcta

SEQ ID NO: 61458 - DNA, 19 bp, Homo sapiens
  siRNA target sequence for FLJ14779 (NM_032838.2,217-235).
ggggcattctatttctaaa

SEQ ID NO: 61459 - DNA, 19 bp, Homo sapiens
  siRNA target sequence for FLJ14779 (NM_032838.2,281-299).
gctgacagagagctaacaa

SEQ ID NO: 61460 - DNA, 19 bp, Homo sapiens
  siRNA target sequence for FLJ14779 (NM_032838.2,487-505).
ggggggacatttcaatcaa

SEQ ID NO: 61461 - DNA, 19 bp, Homo sapiens
  siRNA target sequence for FLJ14779 (NM_032838.2,488-506).
gggggacatttcaatcaat

SEQ ID NO: 61462 - DNA, 19 bp, Homo sapiens
  siRNA target sequence for FLJ14779 (NM_032838.2,499-517).
caatcaattggtattcact

SEQ ID NO: 61463 - DNA, 19 bp, Homo sapiens
  siRNA target sequence for FLJ14779 (NM_032838.2,720-738).
gactcactcatcatcagaa

SEQ ID NO: 61464 - DNA, 19 bp, Homo sapiens
  siRNA target sequence for FLJ14779 (NM_032838.2,1216-1234).
gagttcacagcttattagt

SEQ ID NO: 61465 - DNA, 19 bp, Homo sapiens
  siRNA target sequence for FLJ14779 (NM_032838.2,1218-1236).
gttcacagcttattagtca

SEQ ID NO: 61466 - DNA, 19 bp, Homo sapiens
  siRNA target sequence for FLJ14779 (NM_032838.2,1223-1241).
cagcttattagtcatcata

SEQ ID NO: 61467 - DNA, 19 bp, Homo sapiens
  siRNA target sequence for FLJ14779 (NM_032838.2,1316-1334).
cagcatcaaaatttgtact

SEQ ID NO: 61468 - DNA, 19 bp, Homo sapiens
  siRNA target sequence for FLJ20035 (NM_017631.3,240-258).
ggaaagaaatgttcttaca

SEQ ID NO: 61469 - DNA, 19 bp, Homo sapiens
  siRNA target sequence for FLJ20035 (NM_017631.3,268-286).
caggaaatgtcccagttaa

SEQ ID NO: 61470 - DNA, 19 bp, Homo sapiens
  siRNA target sequence for FLJ20035 (NM_017631.3,364-382).
ggggattcattacttatca

SEQ ID NO: 61471 - DNA, 19 bp, Homo sapiens
  siRNA target sequence for FLJ20035 (NM_017631.3,386-404).
gtatctgtgagatatcatt

SEQ ID NO: 61472 - DNA, 19 bp, Homo sapiens
  siRNA target sequence for FLJ20035 (NM_017631.3,451-469).
cttgtggatcttattagca

SEQ ID NO: 61473 - DNA, 19 bp, Homo sapiens
  siRNA target sequence for FLJ20035 (NM_017631.3,505-523).
gccgagtatgcgtatttca

SEQ ID NO: 61474 - DNA, 19 bp, Homo sapiens
  siRNA target sequence for FLJ20035 (NM_017631.3,506-524).
ccgagtatgcgtatttcaa

SEQ ID NO: 61475 - DNA, 19 bp, Homo sapiens
  siRNA target sequence for FLJ20035 (NM_017631.3,508-526).
gagtatgcgtatttcaact

SEQ ID NO: 61476 - DNA, 19 bp, Homo sapiens
  siRNA target sequence for FLJ20035 (NM_017631.3,522-540).
caacttccctgaacttctt

SEQ ID NO: 61477 - DNA, 19 bp, Homo sapiens
  siRNA target sequence for FLJ20035 (NM_017631.3,551-569).
ctgctttaattcttcatct

SEQ ID NO: 61478 - DNA, 19 bp, Homo sapiens
  siRNA target sequence for FLJ20035 (NM_017631.3,576-594).
gaataccaccattgatgtt

SEQ ID NO: 61479 - DNA, 19 bp, Homo sapiens
  siRNA target sequence for FLJ20035 (NM_017631.3,654-672).
cccatatttcctgatagtt

SEQ ID NO: 61480 - DNA, 19 bp, Homo sapiens
  siRNA target sequence for FLJ20035 (NM_017631.3,684-702).
cctgaacgatctacaaaca

SEQ ID NO: 61481 - DNA, 19 bp, Homo sapiens
  siRNA target sequence for FLJ20035 (NM_017631.3,694-712).
ctacaaacacagcttttca

SEQ ID NO: 61482 - DNA, 19 bp, Homo sapiens
  siRNA target sequence for FLJ20035 (NM_017631.3,741-759).
gaaggtcaacgttgtactt

SEQ ID NO: 61483 - DNA, 19 bp, Homo sapiens
  siRNA target sequence for FLJ20035 (NM_017631.3,767-785).
ggcaagaatctgatgttct

SEQ ID NO: 61484 - DNA, 19 bp, Homo sapiens
  siRNA target sequence for FLJ20035 (NM_017631.3,802-820).
cttcttccaagcatgtaca

SEQ ID NO: 61485 - DNA, 19 bp, Homo sapiens
  siRNA target sequence for FLJ20035 (NM_017631.3,877-895).
ctgcttaaccagttggaaa

SEQ ID NO: 61486 - DNA, 19 bp, Homo sapiens
  siRNA target sequence for FLJ20035 (NM_017631.3,880-898).
cttaaccagttggaaagat

SEQ ID NO: 61487 - DNA, 19 bp, Homo sapiens
  siRNA target sequence for FLJ20035 (NM_017631.3,960-978).
ggcacacaagactgtatct

SEQ ID NO: 61488 - DNA, 19 bp, Homo sapiens
  siRNA target sequence for FLJ20035 (NM_017631.3,1113-1131).
ccaacaggtgaacagtaat

SEQ ID NO: 61489 - DNA, 19 bp, Homo sapiens
  siRNA target sequence for FLJ20035 (NM_017631.3,1114-1132).
caacaggtgaacagtaatt

SEQ ID NO: 61490 - DNA, 19 bp, Homo sapiens
  siRNA target sequence for FLJ20035 (NM_017631.3,1252-1270).
gaggacatgaagcctttat

SEQ ID NO: 61491 - DNA, 19 bp, Homo sapiens
  siRNA target sequence for FLJ20035 (NM_017631.3,1257-1275).
catgaagcctttattacaa

SEQ ID NO: 61492 - DNA, 19 bp, Homo sapiens
  siRNA target sequence for FLJ20035 (NM_017631.3,1437-1455).
gggagataccattatgaaa

SEQ ID NO: 61493 - DNA, 19 bp, Homo sapiens
  siRNA target sequence for FLJ20035 (NM_017631.3,1561-1579).
ccatcaccaatcaaagaca

SEQ ID NO: 61494 - DNA, 19 bp, Homo sapiens
  siRNA target sequence for FLJ20035 (NM_017631.3,1684-1702).
gatgatcctattgttactt

SEQ ID NO: 61495 - DNA, 19 bp, Homo sapiens
  siRNA target sequence for FLJ20035 (NM_017631.3,1779-1797).
gtccaggtgtcagtttgat

SEQ ID NO: 61496 - DNA, 19 bp, Homo sapiens
  siRNA target sequence for FLJ20035 (NM_017631.3,1781-1799).
ccaggtgtcagtttgatga

SEQ ID NO: 61497 - DNA, 19 bp, Homo sapiens
  siRNA target sequence for FLJ20035 (NM_017631.3,1810-1828).
gaccctcgtgttcttagat

SEQ ID NO: 61498 - DNA, 19 bp, Homo sapiens
  siRNA target sequence for FLJ20035 (NM_017631.3,1812-1830).
ccctcgtgttcttagatct

SEQ ID NO: 61499 - DNA, 19 bp, Homo sapiens
  siRNA target sequence for FLJ20035 (NM_017631.3,1822-1840).
cttagatctgtgcaaaagt

SEQ ID NO: 61500 - DNA, 19 bp, Homo sapiens
  siRNA target sequence for FLJ20035 (NM_017631.3,1826-1844).
gatctgtgcaaaagtatca

SEQ ID NO: 61501 - DNA, 19 bp, Homo sapiens
  siRNA target sequence for FLJ20035 (NM_017631.3,1855-1873).
cggttttatgggaattcat

SEQ ID NO: 61502 - DNA, 19 bp, Homo sapiens
  siRNA target sequence for FLJ20035 (NM_017631.3,1880-1898).
cagtctcttcgaaaatcat

SEQ ID NO: 61503 - DNA, 19 bp, Homo sapiens
  siRNA target sequence for FLJ20035 (NM_017631.3,1959-1977).
cgagaccaaggctgaaata

SEQ ID NO: 61504 - DNA, 19 bp, Homo sapiens
  siRNA target sequence for FLJ20035 (NM_017631.3,1960-1978).
gagaccaaggctgaaataa

SEQ ID NO: 61505 - DNA, 19 bp, Homo sapiens
  siRNA target sequence for FLJ20035 (NM_017631.3,2166-2184).
gttaactgcttgcttgaaa

SEQ ID NO: 61506 - DNA, 19 bp, Homo sapiens
  siRNA target sequence for FLJ20035 (NM_017631.3,2201-2219).
gccgaagtgaagaaggtaa

SEQ ID NO: 61507 - DNA, 19 bp, Homo sapiens
  siRNA target sequence for FLJ20035 (NM_017631.3,2215-2233).
ggtaaaaccacgaaagatt

SEQ ID NO: 61508 - DNA, 19 bp, Homo sapiens
  siRNA target sequence for FLJ20035 (NM_017631.3,2541-2559).
gcgagagctccttgatgtt

SEQ ID NO: 61509 - DNA, 19 bp, Homo sapiens
  siRNA target sequence for FLJ20035 (NM_017631.3,2687-2705).
caaaggcccttgttaatca

SEQ ID NO: 61510 - DNA, 19 bp, Homo sapiens
  siRNA target sequence for FLJ20035 (NM_017631.3,2724-2742).
gaatcgttttacgaaaaat

SEQ ID NO: 61511 - DNA, 19 bp, Homo sapiens
  siRNA target sequence for FLJ20035 (NM_017631.3,2778-2796).
cagggagtatcgtcatgat

SEQ ID NO: 61512 - DNA, 19 bp, Homo sapiens
  siRNA target sequence for FLJ20035 (NM_017631.3,2788-2806).
cgtcatgatgccttaaact

SEQ ID NO: 61513 - DNA, 19 bp, Homo sapiens
  siRNA target sequence for FLJ20035 (NM_017631.3,2828-2846).
ctgcctgctttgaaattct

SEQ ID NO: 61514 - DNA, 19 bp, Homo sapiens
  siRNA target sequence for FLJ20035 (NM_017631.3,3028-3046).
ctacaatcggtaaaatggt

SEQ ID NO: 61515 - DNA, 19 bp, Homo sapiens
  siRNA target sequence for FLJ20035 (NM_017631.3,3176-3194).
gagagaggtataatgatct

SEQ ID NO: 61516 - DNA, 19 bp, Homo sapiens
  siRNA target sequence for FLJ20035 (NM_017631.3,3259-3277).
gcactaacaacagatcata

SEQ ID NO: 61517 - DNA, 19 bp, Homo sapiens
  siRNA target sequence for FLJ20035 (NM_017631.3,3260-3278).
cactaacaacagatcatat

SEQ ID NO: 61518 - DNA, 19 bp, Homo sapiens
  siRNA target sequence for FLJ20035 (NM_017631.3,3269-3287).
cagatcatattgaaaggta

SEQ ID NO: 61519 - DNA, 19 bp, Homo sapiens
  siRNA target sequence for FLJ20035 (NM_017631.3,3274-3292).
catattgaaaggtatggat

SEQ ID NO: 61520 - DNA, 19 bp, Homo sapiens
  siRNA target sequence for FLJ20035 (NM_017631.3,3336-3354).
gtatgatgccatgtttcaa

SEQ ID NO: 61521 - DNA, 19 bp, Homo sapiens
  siRNA target sequence for FLJ20035 (NM_017631.3,3513-3531).
cagaatggtacttcagaat

SEQ ID NO: 61522 - DNA, 19 bp, Homo sapiens
  siRNA target sequence for FLJ20035 (NM_017631.3,3519-3537).
ggtacttcagaatcttagt

SEQ ID NO: 61523 - DNA, 19 bp, Homo sapiens
  siRNA target sequence for FLJ20035 (NM_017631.3,3671-3689).
gtgtgagcactttcctaaa

SEQ ID NO: 61524 - DNA, 19 bp, Homo sapiens
  siRNA target sequence for FLJ20035 (NM_017631.3,3711-3729).
gcctcccaaagctgataaa

SEQ ID NO: 61525 - DNA, 19 bp, Homo sapiens
  siRNA target sequence for FLJ20035 (NM_017631.3,3734-3752).
cccatgtcatggctaacaa

SEQ ID NO: 61526 - DNA, 19 bp, Homo sapiens
  siRNA target sequence for FLJ20035 (NM_017631.3,3744-3762).
ggctaacaaacttcgaaaa

SEQ ID NO: 61527 - DNA, 19 bp, Homo sapiens
  siRNA target sequence for FLJ20035 (NM_017631.3,3746-3764).
ctaacaaacttcgaaaagt

SEQ ID NO: 61528 - DNA, 19 bp, Homo sapiens
  siRNA target sequence for FLJ20035 (NM_017631.3,3763-3781).
gttaaaaaatccatagaga

SEQ ID NO: 61529 - DNA, 19 bp, Homo sapiens
  siRNA target sequence for FLJ20035 (NM_017631.3,3851-3869).
ctgaacatgataatctagt

SEQ ID NO: 61530 - DNA, 19 bp, Homo sapiens
  siRNA target sequence for FLJ20035 (NM_017631.3,3929-3947).
cagtggacactgagacttt

SEQ ID NO: 61531 - DNA, 19 bp, Homo sapiens
  siRNA target sequence for FLJ20035 (NM_017631.3,3954-3972).
ggtatttggtcgagtaaaa

SEQ ID NO: 61532 - DNA, 19 bp, Homo sapiens
  siRNA target sequence for FLJ20035 (NM_017631.3,3961-3979).
ggtcgagtaaaatttgaaa

SEQ ID NO: 61533 - DNA, 19 bp, Homo sapiens
  siRNA target sequence for FLJ20035 (NM_017631.3,4005-4023).
ggcagaaaggggtattgga

SEQ ID NO: 61534 - DNA, 19 bp, Homo sapiens
  siRNA target sequence for FLJ20035 (NM_017631.3,4027-4045).
catcacagtgctatgagtt

SEQ ID NO: 61535 - DNA, 19 bp, Homo sapiens
  siRNA target sequence for FLJ20035 (NM_017631.3,4032-4050).
cagtgctatgagtttcaaa

SEQ ID NO: 61536 - DNA, 19 bp, Homo sapiens
  siRNA target sequence for FLJ20035 (NM_017631.3,4034-4052).
gtgctatgagtttcaaaga

SEQ ID NO: 61537 - DNA, 19 bp, Homo sapiens
  siRNA target sequence for FLJ20035 (NM_017631.3,4036-4054).
gctatgagtttcaaagaaa

SEQ ID NO: 61538 - DNA, 19 bp, Homo sapiens
  siRNA target sequence for FLJ20035 (NM_017631.3,4150-4168).
gtggtttttgctcaaaact

SEQ ID NO: 61539 - DNA, 19 bp, Homo sapiens
  siRNA target sequence for FLJ20035 (NM_017631.3,4177-4195).
ctggatgcgttgaattata

SEQ ID NO: 61540 - DNA, 19 bp, Homo sapiens
  siRNA target sequence for FLJ20035 (NM_017631.3,4179-4197).
ggatgcgttgaattataga

SEQ ID NO: 61541 - DNA, 19 bp, Homo sapiens
  siRNA target sequence for FLJ20035 (NM_017631.3,4233-4251).
cctgatgggagatgtatat

SEQ ID NO: 61542 - DNA, 19 bp, Homo sapiens
  siRNA target sequence for FLJ20035 (NM_017631.3,4270-4288).
cccaaaataggaaaactca

SEQ ID NO: 61543 - DNA, 19 bp, Homo sapiens
  siRNA target sequence for FLJ20035 (NM_017631.3,4448-4466).
gagtcatggacatgttaaa

SEQ ID NO: 61544 - DNA, 19 bp, Homo sapiens
  siRNA target sequence for FLJ20035 (NM_017631.3,4537-4555).
gggtttgctggacttgtat

SEQ ID NO: 61545 - DNA, 19 bp, Homo sapiens
  siRNA target sequence for FLJ20035 (NM_017631.3,4539-4557).
gtttgctggacttgtatca

SEQ ID NO: 61546 - DNA, 19 bp, Homo sapiens
  siRNA target sequence for FLJ20035 (NM_017631.3,4556-4574).
cacatttgcattatcatga

SEQ ID NO: 61547 - DNA, 19 bp, Homo sapiens
  siRNA target sequence for FLJ20035 (NM_017631.3,4745-4763).
cacacttcgagttttatca

SEQ ID NO: 61548 - DNA, 19 bp, Homo sapiens
  siRNA target sequence for FLJ20035 (NM_017631.3,4747-4765).
cacttcgagttttatcaat

SEQ ID NO: 61549 - DNA, 19 bp, Homo sapiens
  siRNA target sequence for FLJ20035 (NM_017631.3,4749-4767).
cttcgagttttatcaatca

SEQ ID NO: 61550 - DNA, 19 bp, Homo sapiens
  siRNA target sequence for FLJ20035 (NM_017631.3,4766-4784).
caaaggtgttccttgatga

SEQ ID NO: 61551 - DNA, 19 bp, Homo sapiens
  siRNA target sequence for FLJ20035 (NM_017631.3,4788-4806).
ccctgaggattttagtgat

SEQ ID NO: 61552 - DNA, 19 bp, Homo sapiens
  siRNA target sequence for FLJ20035 (NM_017631.3,4848-4866).
cactttcctacgaattgtt

SEQ ID NO: 61553 - DNA, 19 bp, Homo sapiens
  siRNA target sequence for FLJ20035 (NM_017631.3,4868-4886).
ccaaactggctgatatgaa

SEQ ID NO: 61554 - DNA, 19 bp, Homo sapiens
  siRNA target sequence for FLJ20035 (NM_017631.3,4944-4962).
ctctcaactcgtatctcat

SEQ ID NO: 61555 - DNA, 19 bp, Homo sapiens
  siRNA target sequence for FLJ20035 (NM_017631.3,5047-5065).
gaaactccaaaccatgtta

SEQ ID NO: 61556 - DNA, 19 bp, Homo sapiens
  siRNA target sequence for FLJ20035 (NM_017631.3,5051-5069).
ctccaaaccatgttactct

SEQ ID NO: 61557 - DNA, 19 bp, Homo sapiens
  siRNA target sequence for FLJ20035 (NM_017631.3,5106-5124).
gctgttgtcacagaaattt

SEQ ID NO: 61558 - DNA, 19 bp, Homo sapiens
  siRNA target sequence for FLJ20035 (NM_017631.3,5156-5174).
cctatgcactggatttcta

SEQ ID NO: 61559 - DNA, 19 bp, Homo sapiens
  siRNA target sequence for FLJ20035 (NM_017631.3,5175-5193).
caaacatggttccttgata

SEQ ID NO: 61560 - DNA, 19 bp, Homo sapiens
  siRNA target sequence for FLJ20035 (NM_017631.3,5179-5197).
catggttccttgataggat

SEQ ID NO: 61561 - DNA, 19 bp, Homo sapiens
  siRNA target sequence for FLJ20035 (NM_017631.3,5194-5212).
ggattagtccaggataaca

SEQ ID NO: 61562 - DNA, 19 bp, Homo sapiens
  siRNA target sequence for FLJ20035 (NM_017631.3,5202-5220).
ccaggataacaggatgaat

SEQ ID NO: 61563 - DNA, 19 bp, Homo sapiens
  siRNA target sequence for FLJ20035 (NM_017631.3,5221-5239).
gaaggagatgcttattatt

SEQ ID NO: 61564 - DNA, 19 bp, Homo sapiens
  siRNA target sequence for FLJ20035 (NM_017631.3,5224-5242).
ggagatgcttattatttgt

SEQ ID NO: 61565 - DNA, 19 bp, Homo sapiens
  siRNA target sequence for FLJ20035 (NM_017631.3,5254-5272).
gcactcaccattaaatcta

SEQ ID NO: 61566 - DNA, 19 bp, Homo sapiens
  siRNA target sequence for FLJ20035 (NM_017631.3,5257-5275).
ctcaccattaaatctatca

SEQ ID NO: 61567 - DNA, 19 bp, Homo sapiens
  siRNA target sequence for FLJ20035 (NM_017631.3,5316-5334).
cgttgtcttagcctttgaa

SEQ ID NO: 61568 - DNA, 19 bp, Homo sapiens
  siRNA target sequence for FLJ20070 (NM_017652.1,377-395).
gcagagcacgtgtatacat

SEQ ID NO: 61569 - DNA, 19 bp, Homo sapiens
  siRNA target sequence for FLJ20070 (NM_017652.1,378-396).
cagagcacgtgtatacata

SEQ ID NO: 61570 - DNA, 19 bp, Homo sapiens
  siRNA target sequence for FLJ20070 (NM_017652.1,808-826).
gaagtcctttgcttataca

SEQ ID NO: 61571 - DNA, 19 bp, Homo sapiens
  siRNA target sequence for FLJ20070 (NM_017652.1,811-829).
gtcctttgcttatacatct

SEQ ID NO: 61572 - DNA, 19 bp, Homo sapiens
  siRNA target sequence for FLJ20094 (NM_017665.1,151-169).
caaggacagcagaactaaa

SEQ ID NO: 61573 - DNA, 19 bp, Homo sapiens
  siRNA target sequence for FLJ20171 (NM_017697.1,107-125).
gagcctctcaagttgaaga

SEQ ID NO: 61574 - DNA, 19 bp, Homo sapiens
  siRNA target sequence for FLJ20171 (NM_017697.1,150-168).
gatttcagagccttataat

SEQ ID NO: 61575 - DNA, 19 bp, Homo sapiens
  siRNA target sequence for FLJ20171 (NM_017697.1,160-178).
ccttataatcacaggtttt

SEQ ID NO: 61576 - DNA, 19 bp, Homo sapiens
  siRNA target sequence for FLJ20171 (NM_017697.1,181-199).
gatccagagagagtgaatt

SEQ ID NO: 61577 - DNA, 19 bp, Homo sapiens
  siRNA target sequence for FLJ20171 (NM_017697.1,184-202).
ccagagagagtgaattaca

SEQ ID NO: 61578 - DNA, 19 bp, Homo sapiens
  siRNA target sequence for FLJ20171 (NM_017697.1,189-207).
gagagtgaattacaagttt

SEQ ID NO: 61579 - DNA, 19 bp, Homo sapiens
  siRNA target sequence for FLJ20171 (NM_017697.1,279-297).
gcagtcttcagatcaagat

SEQ ID NO: 61580 - DNA, 19 bp, Homo sapiens
  siRNA target sequence for FLJ20171 (NM_017697.1,282-300).
gtcttcagatcaagatatt

SEQ ID NO: 61581 - DNA, 19 bp, Homo sapiens
  siRNA target sequence for FLJ20171 (NM_017697.1,377-395).
gagaagctctggttaggtt

SEQ ID NO: 61582 - DNA, 19 bp, Homo sapiens
  siRNA target sequence for FLJ20171 (NM_017697.1,382-400).
gctctggttaggtttgtaa

SEQ ID NO: 61583 - DNA, 19 bp, Homo sapiens
  siRNA target sequence for FLJ20171 (NM_017697.1,444-462).
catggggacccggtatatt

SEQ ID NO: 61584 - DNA, 19 bp, Homo sapiens
  siRNA target sequence for FLJ20171 (NM_017697.1,452-470).
cccggtatattgaggttta

SEQ ID NO: 61585 - DNA, 19 bp, Homo sapiens
  siRNA target sequence for FLJ20171 (NM_017697.1,454-472).
cggtatattgaggtttaca

SEQ ID NO: 61586 - DNA, 19 bp, Homo sapiens
  siRNA target sequence for FLJ20171 (NM_017697.1,455-473).
ggtatattgaggtttacaa

SEQ ID NO: 61587 - DNA, 19 bp, Homo sapiens
  siRNA target sequence for FLJ20171 (NM_017697.1,456-474).
gtatattgaggtttacaaa

SEQ ID NO: 61588 - DNA, 19 bp, Homo sapiens
  siRNA target sequence for FLJ20171 (NM_017697.1,479-497).
caggtgaagatttccttaa

SEQ ID NO: 61589 - DNA, 19 bp, Homo sapiens
  siRNA target sequence for FLJ20171 (NM_017697.1,481-499).
ggtgaagatttccttaaaa

SEQ ID NO: 61590 - DNA, 19 bp, Homo sapiens
  siRNA target sequence for FLJ20171 (NM_017697.1,520-538).
gaggtagcccagtttctct

SEQ ID NO: 61591 - DNA, 19 bp, Homo sapiens
  siRNA target sequence for FLJ20171 (NM_017697.1,584-602).
cggccacagctgaagaagt

SEQ ID NO: 61592 - DNA, 19 bp, Homo sapiens
  siRNA target sequence for FLJ20171 (NM_017697.1,646-664).
gaaggcatcctctttgtca

SEQ ID NO: 61593 - DNA, 19 bp, Homo sapiens
  siRNA target sequence for FLJ20171 (NM_017697.1,683-701).
caacaggggacgcttttgt

SEQ ID NO: 61594 - DNA, 19 bp, Homo sapiens
  siRNA target sequence for FLJ20171 (NM_017697.1,889-907).
gtgccccctacaaatgtta

SEQ ID NO: 61595 - DNA, 19 bp, Homo sapiens
  siRNA target sequence for FLJ20171 (NM_017697.1,891-909).
gccccctacaaatgttaga

SEQ ID NO: 61596 - DNA, 19 bp, Homo sapiens
  siRNA target sequence for FLJ20171 (NM_017697.1,935-953).
cctatgcagccacaattga

SEQ ID NO: 61597 - DNA, 19 bp, Homo sapiens
  siRNA target sequence for FLJ20171 (NM_017697.1,975-993).
ggagttcgccacagatatt

SEQ ID NO: 61598 - DNA, 19 bp, Homo sapiens
  siRNA target sequence for FLJ20171 (NM_017697.1,978-996).
gttcgccacagatattcgt

SEQ ID NO: 61599 - DNA, 19 bp, Homo sapiens
  siRNA target sequence for FLJ20171 (NM_017697.1,984-1002).
cacagatattcgtactcat

SEQ ID NO: 61600 - DNA, 19 bp, Homo sapiens
  siRNA target sequence for FLJ20171 (NM_017697.1,995-1013).
gtactcatggggttcacat

SEQ ID NO: 61601 - DNA, 19 bp, Homo sapiens
  siRNA target sequence for FLJ20171 (NM_017697.1,1067-1085).
ctgcggacagagcatttat

SEQ ID NO: 61602 - DNA, 19 bp, Homo sapiens
  siRNA target sequence for FLJ20171 (NM_017697.1,1090-1108).
gcacagaagtgtcataaaa

SEQ ID NO: 61603 - DNA, 19 bp, Homo sapiens
  siRNA target sequence for FLJ20249 (NM_015590.2,150-168).
gaaggagaatggtatcact

SEQ ID NO: 61604 - DNA, 19 bp, Homo sapiens
  siRNA target sequence for FLJ20249 (NM_015590.2,297-315).
gcaggatggagtacagata

SEQ ID NO: 61605 - DNA, 19 bp, Homo sapiens
  siRNA target sequence for FLJ20249 (NM_015590.2,310-328).
cagataaggagcctttcta

SEQ ID NO: 61606 - DNA, 19 bp, Homo sapiens
  siRNA target sequence for FLJ20249 (NM_015590.2,359-377).
ccaacttgctgtatcagaa

SEQ ID NO: 61607 - DNA, 19 bp, Homo sapiens
  siRNA target sequence for FLJ20249 (NM_015590.2,464-482).
ccaagtccccaaagattct

SEQ ID NO: 61608 - DNA, 19 bp, Homo sapiens
  siRNA target sequence for FLJ20249 (NM_015590.2,536-554).
cccgtcttgggatcacaat

SEQ ID NO: 61609 - DNA, 19 bp, Homo sapiens
  siRNA target sequence for FLJ20249 (NM_015590.2,539-557).
gtcttgggatcacaatgaa

SEQ ID NO: 61610 - DNA, 19 bp, Homo sapiens
  siRNA target sequence for FLJ20249 (NM_015590.2,704-722).
ctacagcatctgaaaggaa

SEQ ID NO: 61611 - DNA, 19 bp, Homo sapiens
  siRNA target sequence for FLJ20249 (NM_015590.2,871-889).
gggcttggggaattgaata

SEQ ID NO: 61612 - DNA, 19 bp, Homo sapiens
  siRNA target sequence for FLJ20249 (NM_015590.2,874-892).
cttggggaattgaatagca

SEQ ID NO: 61613 - DNA, 19 bp, Homo sapiens
  siRNA target sequence for FLJ20249 (NM_017725.1,478-496).
gccttgctgttgcttactt

SEQ ID NO: 61614 - DNA, 19 bp, Homo sapiens
  siRNA target sequence for FLJ20273 (NM_019027.1,574-592).
gctacgccttcgtcatgta

SEQ ID NO: 61615 - DNA, 19 bp, Homo sapiens
  siRNA target sequence for FLJ20273 (NM_019027.1,619-637).
cagtgcgtgagctcaacaa

SEQ ID NO: 61616 - DNA, 19 bp, Homo sapiens
  siRNA target sequence for FLJ20273 (NM_019027.1,621-639).
gtgcgtgagctcaacaact

SEQ ID NO: 61617 - DNA, 19 bp, Homo sapiens
  siRNA target sequence for FLJ20273 (NM_019027.1,1336-1354).
ggcccaacagggactactt

SEQ ID NO: 61618 - DNA, 19 bp, Homo sapiens
  siRNA target sequence for FLJ20273 (NM_019027.1,1339-1357).
ccaacagggactactttgt

SEQ ID NO: 61619 - DNA, 19 bp, Homo sapiens
  siRNA target sequence for FLJ20273 (NM_019027.1,1374-1392).
gccattggggctcagtatt

SEQ ID NO: 61620 - DNA, 19 bp, Homo sapiens
  siRNA target sequence for FLJ20273 (NM_019027.1,1579-1597).
gcccaataactccagtata

SEQ ID NO: 61621 - DNA, 19 bp, Homo sapiens
  siRNA target sequence for FLJ20273 (NM_019027.1,1606-1624).
ctccaaacgttcagagaat

SEQ ID NO: 61622 - DNA, 19 bp, Homo sapiens
  siRNA target sequence for FLJ20273 (NM_019027.1,1649-1667).
cagttacgtgccatttgct

SEQ ID NO: 61623 - DNA, 19 bp, Homo sapiens
  siRNA target sequence for FLJ20273 (NM_019027.1,1794-1812).
gacgtctaccagacatact

SEQ ID NO: 61624 - DNA, 19 bp, Homo sapiens
  siRNA target sequence for FLJ20344 (NM_017776.1,296-314).
ggtgtccgtggggtatcta

SEQ ID NO: 61625 - DNA, 19 bp, Homo sapiens
  siRNA target sequence for FLJ20344 (NM_017776.1,299-317).
gtccgtggggtatctagtt

SEQ ID NO: 61626 - DNA, 19 bp, Homo sapiens
  siRNA target sequence for FLJ20344 (NM_017776.1,568-586).
ggcaaagactccctaaata

SEQ ID NO: 61627 - DNA, 19 bp, Homo sapiens
  siRNA target sequence for FLJ20433 (NM_017820.2,1453-1471).
ctctcggacccctctatca

SEQ ID NO: 61628 - DNA, 19 bp, Homo sapiens
  siRNA target sequence for FLJ20433 (NM_017820.2,1953-1971).
gggcgctgcccctcagatt

SEQ ID NO: 61629 - DNA, 19 bp, Homo sapiens
  siRNA target sequence for FLJ20433 (NM_017820.2,1988-2006).
gtgtggtgtgtgacaacat

SEQ ID NO: 61630 - DNA, 19 bp, Homo sapiens
  siRNA target sequence for FLJ20433 (NM_017820.2,2221-2239).
gctgtgctcaagcatttca

SEQ ID NO: 61631 - DNA, 19 bp, Homo sapiens
  siRNA target sequence for FLJ20433 (NM_017820.2,2222-2240).
ctgtgctcaagcatttcaa

SEQ ID NO: 61632 - DNA, 19 bp, Homo sapiens
  siRNA target sequence for FLJ20433 (NM_017820.2,2272-2290).
cgctgccaggcctgtaact

SEQ ID NO: 61633 - DNA, 19 bp, Homo sapiens
  siRNA target sequence for FLJ20557 (NM_017879.1,209-227).
ccgtgactgcagaagctaa

SEQ ID NO: 61634 - DNA, 19 bp, Homo sapiens
  siRNA target sequence for FLJ20557 (NM_017879.1,210-228).
cgtgactgcagaagctaaa

SEQ ID NO: 61635 - DNA, 19 bp, Homo sapiens
  siRNA target sequence for FLJ20557 (NM_017879.1,502-520).
ccattcctgaccgacattt

SEQ ID NO: 61636 - DNA, 19 bp, Homo sapiens
  siRNA target sequence for FLJ20557 (NM_017879.1,503-521).
cattcctgaccgacatttt

SEQ ID NO: 61637 - DNA, 19 bp, Homo sapiens
  siRNA target sequence for FLJ20557 (NM_017879.1,541-559).
gggcaggaactatacttga

SEQ ID NO: 61638 - DNA, 19 bp, Homo sapiens
  siRNA target sequence for FLJ20557 (NM_017879.1,563-581).
gggcatgtgcggtctttca

SEQ ID NO: 61639 - DNA, 19 bp, Homo sapiens
  siRNA target sequence for FLJ20557 (NM_017879.1,733-751).
cagccgcaagctattgcta

SEQ ID NO: 61640 - DNA, 19 bp, Homo sapiens
  siRNA target sequence for FLJ20557 (NM_017879.1,737-755).
cgcaagctattgctaacta

SEQ ID NO: 61641 - DNA, 19 bp, Homo sapiens
  siRNA target sequence for FLJ20557 (NM_017879.1,738-756).
gcaagctattgctaactat

SEQ ID NO: 61642 - DNA, 19 bp, Homo sapiens
  siRNA target sequence for FLJ20557 (NM_017879.1,742-760).
gctattgctaactatgaga

SEQ ID NO: 61643 - DNA, 19 bp, Homo sapiens
  siRNA target sequence for FLJ20557 (NM_017879.1,782-800).
gtgaggaggcctttcatgt

SEQ ID NO: 61644 - DNA, 19 bp, Homo sapiens
  siRNA target sequence for FLJ20557 (NM_017879.1,792-810).
ctttcatgttggaataagt

SEQ ID NO: 61645 - DNA, 19 bp, Homo sapiens
  siRNA target sequence for FLJ20557 (NM_017879.1,796-814).
catgttggaataagtcatt

SEQ ID NO: 61646 - DNA, 19 bp, Homo sapiens
  siRNA target sequence for FLJ20557 (NM_017879.1,1352-1370).
gcttcagccttgttgtaca

SEQ ID NO: 61647 - DNA, 19 bp, Homo sapiens
  siRNA target sequence for FLJ20557 (NM_017879.1,1864-1882).
ctcattctccaccgaaaat

SEQ ID NO: 61648 - DNA, 19 bp, Homo sapiens
  siRNA target sequence for FLJ21839 (NM_021831.3,557-575).
cgcagtttgtgttatcctt

SEQ ID NO: 61649 - DNA, 19 bp, Homo sapiens
  siRNA target sequence for FLJ21839 (NM_021831.3,650-668).
gccaggaactgctaaacca

SEQ ID NO: 61650 - DNA, 19 bp, Homo sapiens
  siRNA target sequence for FLJ21839 (NM_021831.3,711-729).
ccccctggataccatctat

SEQ ID NO: 61651 - DNA, 19 bp, Homo sapiens
  siRNA target sequence for FLJ21839 (NM_021831.3,712-730).
cccctggataccatctatt

SEQ ID NO: 61652 - DNA, 19 bp, Homo sapiens
  siRNA target sequence for FLJ21839 (NM_021831.3,713-731).
ccctggataccatctatta

SEQ ID NO: 61653 - DNA, 19 bp, Homo sapiens
  siRNA target sequence for FLJ21839 (NM_021831.3,717-735).
ggataccatctattaccat

SEQ ID NO: 61654 - DNA, 19 bp, Homo sapiens
  siRNA target sequence for FLJ21839 (NM_021831.3,759-777).
ggatggacttcgtgtagat

SEQ ID NO: 61655 - DNA, 19 bp, Homo sapiens
  siRNA target sequence for FLJ21839 (NM_021831.3,775-793).
gatctgctgacgatcactt

SEQ ID NO: 61656 - DNA, 19 bp, Homo sapiens
  siRNA target sequence for FLJ21839 (NM_021831.3,798-816).
ccatgggcttcgagaagat

SEQ ID NO: 61657 - DNA, 19 bp, Homo sapiens
  siRNA target sequence for FLJ21839 (NM_021831.3,824-842).
cccgtctagagcagctatt

SEQ ID NO: 61658 - DNA, 19 bp, Homo sapiens
  siRNA target sequence for FLJ21839 (NM_021831.3,825-843).
ccgtctagagcagctattt

SEQ ID NO: 61659 - DNA, 19 bp, Homo sapiens
  siRNA target sequence for FLJ21839 (NM_021831.3,1000-1018).
cgtcgcctcttcgtcttta

SEQ ID NO: 61660 - DNA, 19 bp, Homo sapiens
  siRNA target sequence for FLJ21839 (NM_021831.3,1001-1019).
gtcgcctcttcgtctttaa

SEQ ID NO: 61661 - DNA, 19 bp, Homo sapiens
  siRNA target sequence for FLJ21839 (NM_021831.3,1004-1022).
gcctcttcgtctttaagct

SEQ ID NO: 61662 - DNA, 19 bp, Homo sapiens
  siRNA target sequence for FLJ21839 (NM_021831.3,1076-1094).
cacgtggagtgaatctgaa

SEQ ID NO: 61663 - DNA, 19 bp, Homo sapiens
  siRNA target sequence for FLJ21839 (NM_021831.3,1431-1449).
gagtggcgttgcttactat

SEQ ID NO: 61664 - DNA, 19 bp, Homo sapiens
  siRNA target sequence for FLJ21839 (NM_021831.3,1458-1476).
gcatggacatgcttccaaa

SEQ ID NO: 61665 - DNA, 19 bp, Homo sapiens
  siRNA target sequence for FLJ21839 (NM_021831.3,1491-1509).
gtacggaaacagctttagt

SEQ ID NO: 61666 - DNA, 19 bp, Homo sapiens
  siRNA target sequence for FLJ21839 (NM_021831.3,1527-1545).
ggaaaacatgctatatcca

SEQ ID NO: 61667 - DNA, 19 bp, Homo sapiens
  siRNA target sequence for FLJ21839 (NM_021831.3,1576-1594).
gacttccagggctgcaatt

SEQ ID NO: 61668 - DNA, 19 bp, Homo sapiens
  siRNA target sequence for FLJ21839 (NM_021831.3,1625-1643).
gtagagatggccagtctaa

SEQ ID NO: 61669 - DNA, 19 bp, Homo sapiens
  siRNA target sequence for FLJ21839 (NM_021831.3,1655-1673).
gccgtgttgcaatctacaa

SEQ ID NO: 61670 - DNA, 19 bp, Homo sapiens
  siRNA target sequence for FLJ21839 (NM_021831.3,1656-1674).
ccgtgttgcaatctacaaa

SEQ ID NO: 61671 - DNA, 19 bp, Homo sapiens
  siRNA target sequence for FLJ21839 (NM_021831.3,1694-1712).
gctacacacttgaatgcaa

SEQ ID NO: 61672 - DNA, 19 bp, Homo sapiens
  siRNA target sequence for FLJ21839 (NM_021831.3,1702-1720).
cttgaatgcaactacaaca

SEQ ID NO: 61673 - DNA, 19 bp, Homo sapiens
  siRNA target sequence for FLJ21839 (NM_021831.3,1860-1878).
ggacatggcggaatgtaat

SEQ ID NO: 61674 - DNA, 19 bp, Homo sapiens
  siRNA target sequence for FLJ21839 (NM_021831.3,1908-1926).
cagcagccttactaatcta

SEQ ID NO: 61675 - DNA, 19 bp, Homo sapiens
  siRNA target sequence for FLJ21839 (NM_021831.3,2067-2085).
gagtcgggcacgaagtttt

SEQ ID NO: 61676 - DNA, 19 bp, Homo sapiens
  siRNA target sequence for FLJ21839 (NM_021831.3,2071-2089).
cgggcacgaagttttagca

SEQ ID NO: 61677 - DNA, 19 bp, Homo sapiens
  siRNA target sequence for FLJ21839 (NM_021831.3,2191-2209).
ccaggcctgggctctagta

SEQ ID NO: 61678 - DNA, 19 bp, Homo sapiens
  siRNA target sequence for FLJ21839 (NM_021831.3,2201-2219).
gctctagtacccaaaaggt

SEQ ID NO: 61679 - DNA, 19 bp, Homo sapiens
  siRNA target sequence for FLJ21839 (NM_021831.3,2372-2390).
gtctactgcctgattcatt

SEQ ID NO: 61680 - DNA, 19 bp, Homo sapiens
  siRNA target sequence for FLJ21839 (NM_021831.3,2377-2395).
ctgcctgattcattcaaca

SEQ ID NO: 61681 - DNA, 19 bp, Homo sapiens
  siRNA target sequence for FLJ21918 (NM_024939.1,227-245).
cggacgagaccgacttaat

SEQ ID NO: 61682 - DNA, 19 bp, Homo sapiens
  siRNA target sequence for FLJ21918 (NM_024939.1,286-304).
gtggggacgctgcacaaat

SEQ ID NO: 61683 - DNA, 19 bp, Homo sapiens
  siRNA target sequence for FLJ21918 (NM_024939.1,535-553).
gtgctccccgacatgttct

SEQ ID NO: 61684 - DNA, 19 bp, Homo sapiens
  siRNA target sequence for FLJ21918 (NM_024939.1,538-556).
ctccccgacatgttcttct

SEQ ID NO: 61685 - DNA, 19 bp, Homo sapiens
  siRNA target sequence for FLJ21918 (NM_024939.1,561-579).
ctatgacctccgaagagaa

SEQ ID NO: 61686 - DNA, 19 bp, Homo sapiens
  siRNA target sequence for FLJ21918 (NM_024939.1,567-585).
cctccgaagagaattccat

SEQ ID NO: 61687 - DNA, 19 bp, Homo sapiens
  siRNA target sequence for FLJ21918 (NM_024939.1,701-719).
caatggtagctgttatcct

SEQ ID NO: 61688 - DNA, 19 bp, Homo sapiens
  siRNA target sequence for FLJ21918 (NM_024939.1,733-751).
gagcccagcagtcaattgt

SEQ ID NO: 61689 - DNA, 19 bp, Homo sapiens
  siRNA target sequence for FLJ21918 (NM_024939.1,735-753).
gcccagcagtcaattgttt

SEQ ID NO: 61690 - DNA, 19 bp, Homo sapiens
  siRNA target sequence for FLJ21918 (NM_024939.1,740-758).
gcagtcaattgttttcgaa

SEQ ID NO: 61691 - DNA, 19 bp, Homo sapiens
  siRNA target sequence for FLJ21918 (NM_024939.1,755-773).
cgaagcccgaggtgataaa

SEQ ID NO: 61692 - DNA, 19 bp, Homo sapiens
  siRNA target sequence for FLJ21918 (NM_024939.1,903-921).
cgtggctcgcttcttcaaa

SEQ ID NO: 61693 - DNA, 19 bp, Homo sapiens
  siRNA target sequence for FLJ21918 (NM_024939.1,1050-1068).
catgggcgtccgctatatt

SEQ ID NO: 61694 - DNA, 19 bp, Homo sapiens
  siRNA target sequence for FLJ21918 (NM_024939.1,1060-1078).
cgctatattgaggtgtata

SEQ ID NO: 61695 - DNA, 19 bp, Homo sapiens
  siRNA target sequence for FLJ21918 (NM_024939.1,1126-1144).
gaggtggctcgtttcttgt

SEQ ID NO: 61696 - DNA, 19 bp, Homo sapiens
  siRNA target sequence for FLJ21918 (NM_024939.1,1145-1163).
cacgggaagaccaagtgat

SEQ ID NO: 61697 - DNA, 19 bp, Homo sapiens
  siRNA target sequence for FLJ21918 (NM_024939.1,1300-1318).
gccttcgccctctttgctt

SEQ ID NO: 61698 - DNA, 19 bp, Homo sapiens
  siRNA target sequence for FLJ21918 (NM_024939.1,1362-1380).
gctgggtaagcgatacatt

SEQ ID NO: 61699 - DNA, 19 bp, Homo sapiens
  siRNA target sequence for FLJ21918 (NM_024939.1,1417-1435).
gtcttgaaccgctatgcat

SEQ ID NO: 61700 - DNA, 19 bp, Homo sapiens
  siRNA target sequence for FLJ21918 (NM_024939.1,1640-1658).
cgggcgatgccttcattca

SEQ ID NO: 61701 - DNA, 19 bp, Homo sapiens
  siRNA target sequence for FLJ21918 (NM_024939.1,1643-1661).
gcgatgccttcattcagat

SEQ ID NO: 61702 - DNA, 19 bp, Homo sapiens
  siRNA target sequence for FLJ21918 (NM_024939.1,1690-1708).
gctcagcgttgccataaga

SEQ ID NO: 61703 - DNA, 19 bp, Homo sapiens
  siRNA target sequence for FLJ21918 (NM_024939.1,1691-1709).
ctcagcgttgccataagaa

SEQ ID NO: 61704 - DNA, 19 bp, Homo sapiens
  siRNA target sequence for FLJ21918 (NM_024939.1,1883-1901).
cggagacggcagctctata

SEQ ID NO: 61705 - DNA, 19 bp, Homo sapiens
  siRNA target sequence for FLJ21918 (NM_024939.1,1979-1997).
ctcaactctacctgaacta

SEQ ID NO: 61706 - DNA, 19 bp, Homo sapiens
  siRNA target sequence for FLJ21918 (NM_024939.1,1981-1999).
caactctacctgaactaca

SEQ ID NO: 61707 - DNA, 19 bp, Homo sapiens
  siRNA target sequence for FLJ21918 (NM_024939.1,2132-2150).
catacacggctggtatgaa

SEQ ID NO: 61708 - DNA, 19 bp, Homo sapiens
  siRNA target sequence for FLJ21918 (NM_024939.1,2225-2243).
cacctcgcactgtgttaca

SEQ ID NO: 61709 - DNA, 19 bp, Homo sapiens
  siRNA target sequence for FLJ21977 (NM_032213.3,273-291).
cttgctctttccatagtaa

SEQ ID NO: 61710 - DNA, 19 bp, Homo sapiens
  siRNA target sequence for FLJ21977 (NM_032213.3,308-326).
ggacagggtgaaagattgt

SEQ ID NO: 61711 - DNA, 19 bp, Homo sapiens
  siRNA target sequence for FLJ21977 (NM_032213.3,330-348).
ctggatattctccatcata

SEQ ID NO: 61712 - DNA, 19 bp, Homo sapiens
  siRNA target sequence for FLJ21977 (NM_032213.3,333-351).
gatattctccatcatatga

SEQ ID NO: 61713 - DNA, 19 bp, Homo sapiens
  siRNA target sequence for FLJ21977 (NM_032213.3,427-445).
gaccacagaagcttatgaa

SEQ ID NO: 61714 - DNA, 19 bp, Homo sapiens
  siRNA target sequence for FLJ21977 (NM_032213.3,698-716).
cagcgccttcgggaagaaa

SEQ ID NO: 61715 - DNA, 19 bp, Homo sapiens
  siRNA target sequence for FLJ21977 (NM_032213.3,779-797).
gtcctccagaccatctata

SEQ ID NO: 61716 - DNA, 19 bp, Homo sapiens
  siRNA target sequence for FLJ21977 (NM_032213.3,782-800).
ctccagaccatctataaga

SEQ ID NO: 61717 - DNA, 19 bp, Homo sapiens
  siRNA target sequence for FLJ21977 (NM_032213.3,802-820).
gctgaccggctccaagttt

SEQ ID NO: 61718 - DNA, 19 bp, Homo sapiens
  siRNA target sequence for FLJ21977 (NM_032213.3,953-971).
ccgatggcgcaggagattt

SEQ ID NO: 61719 - DNA, 19 bp, Homo sapiens
  siRNA target sequence for FLJ21977 (NM_032213.3,954-972).
cgatggcgcaggagatttt

SEQ ID NO: 61720 - DNA, 19 bp, Homo sapiens
  siRNA target sequence for FLJ21977 (NM_032213.3,998-1016).
caattccctttctgtttga

SEQ ID NO: 61721 - DNA, 19 bp, Homo sapiens
  siRNA target sequence for FLJ21977 (NM_032213.3,1304-1322).
catccacactttctcaaat

SEQ ID NO: 61722 - DNA, 19 bp, Homo sapiens
  siRNA target sequence for FLJ21977 (NM_032213.3,1318-1336).
caaattccagcttaccaaa

SEQ ID NO: 61723 - DNA, 19 bp, Homo sapiens
  siRNA target sequence for FLJ22347 (NM_022830.1,116-134).
cctctgccacgttactaca

SEQ ID NO: 61724 - DNA, 19 bp, Homo sapiens
  siRNA target sequence for FLJ22347 (NM_022830.1,268-286).
ctcagctctctgagtactt

SEQ ID NO: 61725 - DNA, 19 bp, Homo sapiens
  siRNA target sequence for FLJ22347 (NM_022830.1,323-341).
caaggacaagggagtgttt

SEQ ID NO: 61726 - DNA, 19 bp, Homo sapiens
  siRNA target sequence for FLJ22347 (NM_022830.1,529-547).
cagacgtgggggcacaaat

SEQ ID NO: 61727 - DNA, 19 bp, Homo sapiens
  siRNA target sequence for FLJ22347 (NM_022830.1,531-549).
gacgtgggggcacaaatga

SEQ ID NO: 61728 - DNA, 19 bp, Homo sapiens
  siRNA target sequence for FLJ22347 (NM_022830.1,539-557).
ggcacaaatgataaagctt

SEQ ID NO: 61729 - DNA, 19 bp, Homo sapiens
  siRNA target sequence for FLJ22347 (NM_022830.1,1198-1216).
gtgatgtctccctcagtaa

SEQ ID NO: 61730 - DNA, 19 bp, Homo sapiens
  siRNA target sequence for FLJ22347 (NM_022830.1,1218-1236).
cggctggccctgcataact

SEQ ID NO: 61731 - DNA, 19 bp, Homo sapiens
  siRNA target sequence for FLJ22347 (NM_022830.1,1361-1379).
gaccttgctggtgatctat

SEQ ID NO: 61732 - DNA, 19 bp, Homo sapiens
  siRNA target sequence for FLJ22347 (NM_022830.1,1363-1381).
ccttgctggtgatctattt

SEQ ID NO: 61733 - DNA, 19 bp, Homo sapiens
  siRNA target sequence for FLJ22347 (NM_022830.1,1364-1382).
cttgctggtgatctatttt

SEQ ID NO: 61734 - DNA, 19 bp, Homo sapiens
  siRNA target sequence for FLJ22347 (NM_022830.1,1759-1777).
gccgagcagcagccaatta

SEQ ID NO: 61735 - DNA, 19 bp, Homo sapiens
  siRNA target sequence for FLJ22347 (NM_022830.1,1948-1966).
cactggggtgccatataga

SEQ ID NO: 61736 - DNA, 19 bp, Homo sapiens
  siRNA target sequence for FLJ22347 (NM_022830.1,2123-2141).
ggtagaagagatggttata

SEQ ID NO: 61737 - DNA, 19 bp, Homo sapiens
  siRNA target sequence for FLJ22347 (NM_022830.1,2519-2537).
cgaagagaggccagaaact

SEQ ID NO: 61738 - DNA, 19 bp, Homo sapiens
  siRNA target sequence for FLJ22559 (NM_024928.3,241-259).
ctagcctttgcaaaactct

SEQ ID NO: 61739 - DNA, 19 bp, Homo sapiens
  siRNA target sequence for FLJ22559 (NM_024928.3,266-284).
gggatatcctggacatgaa

SEQ ID NO: 61740 - DNA, 19 bp, Homo sapiens
  siRNA target sequence for FLJ22559 (NM_024928.3,294-312).
ccaggtgccaggtgtattt

SEQ ID NO: 61741 - DNA, 19 bp, Homo sapiens
  siRNA target sequence for FLJ22559 (NM_024928.3,298-316).
gtgccaggtgtatttttgt

SEQ ID NO: 61742 - DNA, 19 bp, Homo sapiens
  siRNA target sequence for FLJ22559 (NM_024928.3,406-424).
gacagcactggagttataa

SEQ ID NO: 61743 - DNA, 19 bp, Homo sapiens
  siRNA target sequence for FLJ22559 (NM_024928.3,432-450).
ctgctggaaaaagttgaat

SEQ ID NO: 61744 - DNA, 19 bp, Homo sapiens
  siRNA target sequence for FLJ22559 (NM_024928.3,435-453).
ctggaaaaagttgaatact

SEQ ID NO: 61745 - DNA, 19 bp, Homo sapiens
  siRNA target sequence for FLJ22559 (NM_024928.3,447-465).
gaatactgagtctgtatca

SEQ ID NO: 61746 - DNA, 19 bp, Homo sapiens
  siRNA target sequence for FLJ22559 (NM_024928.3,492-510).
cagcttaacctcacaactt

SEQ ID NO: 61747 - DNA, 19 bp, Homo sapiens
  siRNA target sequence for FLJ22559 (NM_024928.3,577-595).
ggcagtatccgcacataca

SEQ ID NO: 61748 - DNA, 19 bp, Homo sapiens
  siRNA target sequence for FLJ22559 (NM_024928.3,579-597).
cagtatccgcacatacaga

SEQ ID NO: 61749 - DNA, 19 bp, Homo sapiens
  siRNA target sequence for FLJ22559 (NM_024928.3,639-657).
cgacccagtgtggaacatt

SEQ ID NO: 61750 - DNA, 19 bp, Homo sapiens
  siRNA target sequence for FLJ22559 (NM_024928.3,686-704).
ctatctacaggaaagttta

SEQ ID NO: 61751 - DNA, 19 bp, Homo sapiens
  siRNA target sequence for FLJ22559 (NM_024928.3,785-803).
cgagtttgctgagtgaaaa

SEQ ID NO: 61752 - DNA, 19 bp, Homo sapiens
  siRNA target sequence for FLJ22559 (NM_024928.3,915-933).
ctccgaccaagtgaatttt

SEQ ID NO: 61753 - DNA, 19 bp, Homo sapiens
  siRNA target sequence for FLJ22559 (NM_024928.3,917-935).
ccgaccaagtgaattttaa

SEQ ID NO: 61754 - DNA, 19 bp, Homo sapiens
  siRNA target sequence for FLJ22559 (NM_024928.3,944-962).
ccacttccaaggcaattca

SEQ ID NO: 61755 - DNA, 19 bp, Homo sapiens
  siRNA target sequence for FLJ22559 (NM_024928.3,950-968).
ccaaggcaattcatagtat

SEQ ID NO: 61756 - DNA, 19 bp, Homo sapiens
  siRNA target sequence for FLJ22559 (NM_024928.3,951-969).
caaggcaattcatagtata

SEQ ID NO: 61757 - DNA, 19 bp, Homo sapiens
  siRNA target sequence for FLJ22559 (NM_024928.3,1027-1045).
ggttttgataacctatact

SEQ ID NO: 61758 - DNA, 19 bp, Homo sapiens
  siRNA target sequence for FLJ22559 (NM_024928.3,1028-1046).
gttttgataacctatacta

SEQ ID NO: 61759 - DNA, 19 bp, Homo sapiens
  siRNA target sequence for FLJ22559 (NM_024928.3,1033-1051).
gataacctatactatgtaa

SEQ ID NO: 61760 - DNA, 19 bp, Homo sapiens
  siRNA target sequence for FLJ22559 (NM_024928.3,1224-1242).
ggaggaccagagtgacatt

SEQ ID NO: 61761 - DNA, 19 bp, Homo sapiens
  siRNA target sequence for FLJ22559 (NM_024928.3,1228-1246).
gaccagagtgacattgtca

SEQ ID NO: 61762 - DNA, 19 bp, Homo sapiens
  siRNA target sequence for FLJ22559 (NM_024928.3,1247-1265).
gcacaatggagcactacta

SEQ ID NO: 61763 - DNA, 19 bp, Homo sapiens
  siRNA target sequence for FLJ22611 (NM_032226.1,302-320).
gtggctatgagactataga

SEQ ID NO: 61764 - DNA, 19 bp, Homo sapiens
  siRNA target sequence for FLJ22611 (NM_032226.1,312-330).
gactatagaagcatacgaa

SEQ ID NO: 61765 - DNA, 19 bp, Homo sapiens
  siRNA target sequence for FLJ22611 (NM_032226.1,377-395).
gtgaggtggaatttcaact

SEQ ID NO: 61766 - DNA, 19 bp, Homo sapiens
  siRNA target sequence for FLJ22611 (NM_032226.1,416-434).
cccaagatcttgatgatgt

SEQ ID NO: 61767 - DNA, 19 bp, Homo sapiens
  siRNA target sequence for FLJ22611 (NM_032226.1,476-494).
cggaatcttcgagtagtaa

SEQ ID NO: 61768 - DNA, 19 bp, Homo sapiens
  siRNA target sequence for FLJ22611 (NM_032226.1,485-503).
cgagtagtaaaccaaatca

SEQ ID NO: 61769 - DNA, 19 bp, Homo sapiens
  siRNA target sequence for FLJ22611 (NM_032226.1,488-506).
gtagtaaaccaaatcagaa

SEQ ID NO: 61770 - DNA, 19 bp, Homo sapiens
  siRNA target sequence for FLJ22611 (NM_032226.1,496-514).
ccaaatcagaagaagctaa

SEQ ID NO: 61771 - DNA, 19 bp, Homo sapiens
  siRNA target sequence for FLJ22611 (NM_032226.1,511-529).
ctaatcgtcctttcagata

SEQ ID NO: 61772 - DNA, 19 bp, Homo sapiens
  siRNA target sequence for FLJ22611 (NM_032226.1,554-572).
ggtcagaggtcatcacttt

SEQ ID NO: 61773 - DNA, 19 bp, Homo sapiens
  siRNA target sequence for FLJ22611 (NM_032226.1,637-655).
gcccatggtctttcttctt

SEQ ID NO: 61774 - DNA, 19 bp, Homo sapiens
  siRNA target sequence for FLJ22611 (NM_032226.1,650-668).
cttcttctcttcaatctaa

SEQ ID NO: 61775 - DNA, 19 bp, Homo sapiens
  siRNA target sequence for FLJ22611 (NM_032226.1,738-756).
ccgagaggtcatgattata

SEQ ID NO: 61776 - DNA, 19 bp, Homo sapiens
  siRNA target sequence for FLJ22611 (NM_032226.1,740-758).
gagaggtcatgattataga

SEQ ID NO: 61777 - DNA, 19 bp, Homo sapiens
  siRNA target sequence for FLJ22611 (NM_032226.1,819-837).
gatgctactgggatgtgaa

SEQ ID NO: 61778 - DNA, 19 bp, Homo sapiens
  siRNA target sequence for FLJ22611 (NM_032226.1,981-999).
gacccagcggtactattca

SEQ ID NO: 61779 - DNA, 19 bp, Homo sapiens
  siRNA target sequence for FLJ22611 (NM_032226.1,1238-1256).
cagatgcttgcacagaaat

SEQ ID NO: 61780 - DNA, 19 bp, Homo sapiens
  siRNA target sequence for FLJ22611 (NM_032226.1,1406-1424).
ctccagtatctccattcat

SEQ ID NO: 61781 - DNA, 19 bp, Homo sapiens
  siRNA target sequence for FLJ22611 (NM_032226.1,1523-1541).
ccaagctaccttatataaa

SEQ ID NO: 61782 - DNA, 19 bp, Homo sapiens
  siRNA target sequence for FLJ22611 (NM_032226.1,1552-1570).
gagaacccccaccatgata

SEQ ID NO: 61783 - DNA, 19 bp, Homo sapiens
  siRNA target sequence for FLJ22611 (NM_032226.1,1554-1572).
gaacccccaccatgatata

SEQ ID NO: 61784 - DNA, 19 bp, Homo sapiens
  siRNA target sequence for FLJ22611 (NM_032226.1,1583-1601).
gtgcctcatggaaaagcaa

SEQ ID NO: 61785 - DNA, 19 bp, Homo sapiens
  siRNA target sequence for FLJ22611 (NM_032226.1,1599-1617).
caacaggtggcctcaagaa

SEQ ID NO: 61786 - DNA, 19 bp, Homo sapiens
  siRNA target sequence for FLJ22611 (NM_032226.1,1602-1620).
caggtggcctcaagaaaat

SEQ ID NO: 61787 - DNA, 19 bp, Homo sapiens
  siRNA target sequence for FLJ22611 (NM_032226.1,1604-1622).
ggtggcctcaagaaaataa

SEQ ID NO: 61788 - DNA, 19 bp, Homo sapiens
  siRNA target sequence for FLJ22611 (NM_032226.1,1770-1788).
gccctttcaccgttcatca

SEQ ID NO: 61789 - DNA, 19 bp, Homo sapiens
  siRNA target sequence for FLJ22611 (NM_032226.1,1773-1791).
ctttcaccgttcatcacat

SEQ ID NO: 61790 - DNA, 19 bp, Homo sapiens
  siRNA target sequence for FLJ22611 (NM_032226.1,1857-1875).
gaggtgctgggaagatgat

SEQ ID NO: 61791 - DNA, 19 bp, Homo sapiens
  siRNA target sequence for FLJ23233 (NM_024691.2,226-244).
gtggctgcagacttgctta

SEQ ID NO: 61792 - DNA, 19 bp, Homo sapiens
  siRNA target sequence for FLJ23233 (NM_024691.2,538-556).
ggactgctcagttcaaaca

SEQ ID NO: 61793 - DNA, 19 bp, Homo sapiens
  siRNA target sequence for FLJ23233 (NM_024691.2,539-557).
gactgctcagttcaaacat

SEQ ID NO: 61794 - DNA, 19 bp, Homo sapiens
  siRNA target sequence for FLJ23233 (NM_024691.2,854-872).
gactacatgctgggaaaaa

SEQ ID NO: 61795 - DNA, 19 bp, Homo sapiens
  siRNA target sequence for FLJ23506 (NM_024833.1,368-386).
gatcacgtgcagtcatgaa

SEQ ID NO: 61796 - DNA, 19 bp, Homo sapiens
  siRNA target sequence for FLJ23506 (NM_024833.1,374-392).
gtgcagtcatgaaactaga

SEQ ID NO: 61797 - DNA, 19 bp, Homo sapiens
  siRNA target sequence for FLJ23506 (NM_024833.1,453-471).
ggcccagaggggacttaga

SEQ ID NO: 61798 - DNA, 19 bp, Homo sapiens
  siRNA target sequence for FLJ23506 (NM_024833.1,573-591).
gtctcacccatgtgacata

SEQ ID NO: 61799 - DNA, 19 bp, Homo sapiens
  siRNA target sequence for FLJ23506 (NM_024833.1,614-632).
ccttacacctggctaaata

SEQ ID NO: 61800 - DNA, 19 bp, Homo sapiens
  siRNA target sequence for FLJ23506 (NM_024833.1,819-837).
gaaaggtaggagagacttt

SEQ ID NO: 61801 - DNA, 19 bp, Homo sapiens
  siRNA target sequence for FLJ23506 (NM_024833.1,1178-1196).
cgggtgaaagactctatca

SEQ ID NO: 61802 - DNA, 19 bp, Homo sapiens
  siRNA target sequence for FLJ23506 (NM_024833.1,1223-1241).
gcagtaagtctaatctcat

SEQ ID NO: 61803 - DNA, 19 bp, Homo sapiens
  siRNA target sequence for FLJ23506 (NM_024833.1,1300-1318).
gagttcagtcggaaacaca

SEQ ID NO: 61804 - DNA, 19 bp, Homo sapiens
  siRNA target sequence for FLJ23506 (NM_024833.1,1426-1444).
cacagcagtgattatgagt

SEQ ID NO: 61805 - DNA, 19 bp, Homo sapiens
  siRNA target sequence for FLJ23506 (NM_024833.1,1448-1466).
gcagatgtggtaaagcttt

SEQ ID NO: 61806 - DNA, 19 bp, Homo sapiens
  siRNA target sequence for FLJ25078 (NM_152485.2,511-529).
gaaaacagcctgattgtca

SEQ ID NO: 61807 - DNA, 19 bp, Homo sapiens
  siRNA target sequence for FLJ25078 (NM_152485.2,530-548).
gtcctgagcatgtatgtca

SEQ ID NO: 61808 - DNA, 19 bp, Homo sapiens
  siRNA target sequence for FLJ25078 (NM_152485.2,662-680).
ctgagatcatcacacattt

SEQ ID NO: 61809 - DNA, 19 bp, Homo sapiens
  siRNA target sequence for FLJ25078 (NM_152485.2,690-708).
gcagagggacttatctcta

SEQ ID NO: 61810 - DNA, 19 bp, Homo sapiens
  siRNA target sequence for FLJ25078 (NM_152485.2,741-759).
ctggaatctgtgtactgta

SEQ ID NO: 61811 - DNA, 19 bp, Homo sapiens
  siRNA target sequence for FLJ25078 (NM_152485.2,743-761).
ggaatctgtgtactgtatt

SEQ ID NO: 61812 - DNA, 19 bp, Homo sapiens
  siRNA target sequence for FLJ25078 (NM_152485.2,886-904).
ccaatcctgctctattctt

SEQ ID NO: 61813 - DNA, 19 bp, Homo sapiens
  siRNA target sequence for FLJ25078 (NM_152485.2,908-926).
gtgtcccagagagtttgtt

SEQ ID NO: 61814 - DNA, 19 bp, Homo sapiens
  siRNA target sequence for FLJ25078 (NM_152485.2,931-949).
ggcctgagggacattctaa

SEQ ID NO: 61815 - DNA, 19 bp, Homo sapiens
  siRNA target sequence for FLJ25078 (NM_152485.2,975-993).
ccgatttaggactcagaat

SEQ ID NO: 61816 - DNA, 19 bp, Homo sapiens
  siRNA target sequence for FLJ25344 (NM_182512.1,132-150).
cttactcaggggcaattgt

SEQ ID NO: 61817 - DNA, 19 bp, Homo sapiens
  siRNA target sequence for FLJ30594 (NM_153011.1,391-409).
gctggtggctgcggttata

SEQ ID NO: 61818 - DNA, 19 bp, Homo sapiens
  siRNA target sequence for FLJ30594 (NM_153011.1,566-584).
gtgggggttacctcctaaa

SEQ ID NO: 61819 - DNA, 19 bp, Homo sapiens
  siRNA target sequence for FLJ30594 (NM_153011.1,569-587).
ggggttacctcctaaatct

SEQ ID NO: 61820 - DNA, 19 bp, Homo sapiens
  siRNA target sequence for FLJ30594 (NM_153011.1,570-588).
gggttacctcctaaatcta

SEQ ID NO: 61821 - DNA, 19 bp, Homo sapiens
  siRNA target sequence for FLJ30594 (NM_153011.1,601-619).
ccaccgcaggcctttcttt

SEQ ID NO: 61822 - DNA, 19 bp, Homo sapiens
  siRNA target sequence for FLJ30594 (NM_153011.1,691-709).
gtgtttcatgttgtttcat

SEQ ID NO: 61823 - DNA, 19 bp, Homo sapiens
  siRNA target sequence for FLJ30594 (NM_153011.1,693-711).
gtttcatgttgtttcatat

SEQ ID NO: 61824 - DNA, 19 bp, Homo sapiens
  siRNA target sequence for FLJ30594 (NM_153011.1,707-725).
catatccactagtgttaca

SEQ ID NO: 61825 - DNA, 19 bp, Homo sapiens
  siRNA target sequence for FLJ30594 (NM_153011.1,745-763).
gaccaaaagtccataggtt

SEQ ID NO: 61826 - DNA, 19 bp, Homo sapiens
  siRNA target sequence for FLJ30791 (NM_144694.1,636-654).
gacatctgtacagtaatgt

SEQ ID NO: 61827 - DNA, 19 bp, Homo sapiens
  siRNA target sequence for FLJ30791 (NM_144694.1,638-656).
catctgtacagtaatgtga

SEQ ID NO: 61828 - DNA, 19 bp, Homo sapiens
  siRNA target sequence for FLJ30791 (NM_144694.1,692-710).
ctttgcttttccaaaccaa

SEQ ID NO: 61829 - DNA, 19 bp, Homo sapiens
  siRNA target sequence for FLJ30791 (NM_144694.1,786-804).
gctgggagcctatatgtga

SEQ ID NO: 61830 - DNA, 19 bp, Homo sapiens
  siRNA target sequence for FLJ30791 (NM_144694.1,853-871).
ccagaagataatagaaaca

SEQ ID NO: 61831 - DNA, 19 bp, Homo sapiens
  siRNA target sequence for FLJ30791 (NM_144694.1,1048-1066).
gaacccactgctttgtaca

SEQ ID NO: 61832 - DNA, 19 bp, Homo sapiens
  siRNA target sequence for FLJ30791 (NM_144694.1,1052-1070).
ccactgctttgtacacaaa

SEQ ID NO: 61833 - DNA, 19 bp, Homo sapiens
  siRNA target sequence for FLJ30791 (NM_144694.1,1057-1075).
gctttgtacacaaaagata

SEQ ID NO: 61834 - DNA, 19 bp, Homo sapiens
  siRNA target sequence for FLJ30791 (NM_144694.1,1087-1105).
ggagaaagtacataaacat

SEQ ID NO: 61835 - DNA, 19 bp, Homo sapiens
  siRNA target sequence for FLJ30791 (NM_144694.1,1384-1402).
gaatgcacacctagttcaa

SEQ ID NO: 61836 - DNA, 19 bp, Homo sapiens
  siRNA target sequence for FLJ30921 (NM_152360.2,598-616).
ggatttacagtgtgagata

SEQ ID NO: 61837 - DNA, 19 bp, Homo sapiens
  siRNA target sequence for FLJ30921 (NM_152360.2,625-643).
catagaagtacccacttat

SEQ ID NO: 61838 - DNA, 19 bp, Homo sapiens
  siRNA target sequence for FLJ30921 (NM_152360.2,636-654).
ccacttatgaaacagatat

SEQ ID NO: 61839 - DNA, 19 bp, Homo sapiens
  siRNA target sequence for FLJ30921 (NM_152360.2,1169-1187).
gaacatgggcagtttcata

SEQ ID NO: 61840 - DNA, 19 bp, Homo sapiens
  siRNA target sequence for FLJ30921 (NM_152360.2,1485-1503).
ctactggttcaaaactctt

SEQ ID NO: 61841 - DNA, 19 bp, Homo sapiens
  siRNA target sequence for FLJ30921 (NM_152360.2,1816-1834).
ctttagcttgcatggatat

SEQ ID NO: 61842 - DNA, 19 bp, Homo sapiens
  siRNA target sequence for FLJ30921 (NM_152360.2,1821-1839).
gcttgcatggatatcttaa

SEQ ID NO: 61843 - DNA, 19 bp, Homo sapiens
  siRNA target sequence for FLJ30921 (NM_152360.2,1822-1840).
cttgcatggatatcttaat

SEQ ID NO: 61844 - DNA, 19 bp, Homo sapiens
  siRNA target sequence for FLJ30921 (NM_152360.2,2020-2038).
cattcatgctgataaaaaa

SEQ ID NO: 61845 - DNA, 19 bp, Homo sapiens
  siRNA target sequence for FLJ30927 (NM_144690.1,164-182).
cccttgggtcagaattgtt

SEQ ID NO: 61846 - DNA, 19 bp, Homo sapiens
  siRNA target sequence for FLJ30927 (NM_144690.1,294-312).
gggtcttgccgtttccaaa

SEQ ID NO: 61847 - DNA, 19 bp, Homo sapiens
  siRNA target sequence for FLJ30927 (NM_144690.1,377-395).
gaggcctgtgtccagtatt

SEQ ID NO: 61848 - DNA, 19 bp, Homo sapiens
  siRNA target sequence for FLJ30927 (NM_144690.1,455-473).
caccccaatgggagataat

SEQ ID NO: 61849 - DNA, 19 bp, Homo sapiens
  siRNA target sequence for FLJ30927 (NM_144690.1,556-574).
ggaaatccagacagacatt

SEQ ID NO: 61850 - DNA, 19 bp, Homo sapiens
  siRNA target sequence for FLJ30927 (NM_144690.1,621-639).
gcatgcatcccttactttt

SEQ ID NO: 61851 - DNA, 19 bp, Homo sapiens
  siRNA target sequence for FLJ30927 (NM_144690.1,622-640).
catgcatcccttacttttt

SEQ ID NO: 61852 - DNA, 19 bp, Homo sapiens
  siRNA target sequence for FLJ30927 (NM_144690.1,708-726).
ggaactccttattaatcat

SEQ ID NO: 61853 - DNA, 19 bp, Homo sapiens
  siRNA target sequence for FLJ30927 (NM_144690.1,953-971).
gtcgaagctcacagttgat

SEQ ID NO: 61854 - DNA, 19 bp, Homo sapiens
  siRNA target sequence for FLJ30927 (NM_144690.1,956-974).
gaagctcacagttgattga

SEQ ID NO: 61855 - DNA, 19 bp, Homo sapiens
  siRNA target sequence for FLJ30927 (NM_144690.1,959-977).
gctcacagttgattgaaca

SEQ ID NO: 61856 - DNA, 19 bp, Homo sapiens
  siRNA target sequence for FLJ30927 (NM_144690.1,1040-1058).
ggatctcacatcttaaagt

SEQ ID NO: 61857 - DNA, 19 bp, Homo sapiens
  siRNA target sequence for FLJ30927 (NM_144690.1,1041-1059).
gatctcacatcttaaagta

SEQ ID NO: 61858 - DNA, 19 bp, Homo sapiens
  siRNA target sequence for FLJ30927 (NM_144690.1,1121-1139).
gtcatcgttctcagttgat

SEQ ID NO: 61859 - DNA, 19 bp, Homo sapiens
  siRNA target sequence for FLJ30927 (NM_144690.1,1463-1481).
gctcacaattgattcatca

SEQ ID NO: 61860 - DNA, 19 bp, Homo sapiens
  siRNA target sequence for FLJ30927 (NM_144690.1,1485-1503).
ggttattcacactgagaaa

SEQ ID NO: 61861 - DNA, 19 bp, Homo sapiens
  siRNA target sequence for FLJ30927 (NM_144690.1,1530-1548).
gaagaccttgagtcatgat

SEQ ID NO: 61862 - DNA, 19 bp, Homo sapiens
  siRNA target sequence for FLJ30927 (NM_144690.1,1536-1554).
cttgagtcatgattcaact

SEQ ID NO: 61863 - DNA, 19 bp, Homo sapiens
  siRNA target sequence for FLJ30927 (NM_144690.1,1556-1574).
ccgttcaacctcagagaat

SEQ ID NO: 61864 - DNA, 19 bp, Homo sapiens
  siRNA target sequence for FLJ30927 (NM_144690.1,1575-1593).
gcataatagagaaacacat

SEQ ID NO: 61865 - DNA, 19 bp, Homo sapiens
  siRNA target sequence for FLJ30927 (NM_144690.1,1626-1644).
cagcagttaccccttacta

SEQ ID NO: 61866 - DNA, 19 bp, Homo sapiens
  siRNA target sequence for FLJ30927 (NM_144690.1,1628-1646).
gcagttaccccttactaat

SEQ ID NO: 61867 - DNA, 19 bp, Homo sapiens
  siRNA target sequence for FLJ30932 (NM_144693.1,472-490).
cactagggtgtcgtgttaa

SEQ ID NO: 61868 - DNA, 19 bp, Homo sapiens
  siRNA target sequence for FLJ30932 (NM_144693.1,474-492).
ctagggtgtcgtgttaata

SEQ ID NO: 61869 - DNA, 19 bp, Homo sapiens
  siRNA target sequence for FLJ30932 (NM_144693.1,601-619).
ggttaactcctaagaagaa

SEQ ID NO: 61870 - DNA, 19 bp, Homo sapiens
  siRNA target sequence for FLJ30932 (NM_144693.1,645-663).
ggtgtaaaaacggaaagaa

SEQ ID NO: 61871 - DNA, 19 bp, Homo sapiens
  siRNA target sequence for FLJ30932 (NM_144693.1,664-682).
gtcatcgtggagtgaaact

SEQ ID NO: 61872 - DNA, 19 bp, Homo sapiens
  siRNA target sequence for FLJ30932 (NM_144693.1,666-684).
catcgtggagtgaaactca

SEQ ID NO: 61873 - DNA, 19 bp, Homo sapiens
  siRNA target sequence for FLJ30932 (NM_144693.1,713-731).
cagcacgaaatctaaccta

SEQ ID NO: 61874 - DNA, 19 bp, Homo sapiens
  siRNA target sequence for FLJ30932 (NM_144693.1,718-736).
cgaaatctaacctaactca

SEQ ID NO: 61875 - DNA, 19 bp, Homo sapiens
  siRNA target sequence for FLJ30932 (NM_144693.1,896-914).
ccttagactgcatttgaga

SEQ ID NO: 61876 - DNA, 19 bp, Homo sapiens
  siRNA target sequence for FLJ30932 (NM_144693.1,960-978).
gttttccgcaccagttgta

SEQ ID NO: 61877 - DNA, 19 bp, Homo sapiens
  siRNA target sequence for FLJ30932 (NM_144693.1,1065-1083).
ctcactgggcacaatagca

SEQ ID NO: 61878 - DNA, 19 bp, Homo sapiens
  siRNA target sequence for FLJ30932 (NM_144693.1,1071-1089).
gggcacaatagcattcata

SEQ ID NO: 61879 - DNA, 19 bp, Homo sapiens
  siRNA target sequence for FLJ30932 (NM_144693.1,1385-1403).
cacaagtaactcctatctt

SEQ ID NO: 61880 - DNA, 19 bp, Homo sapiens
  siRNA target sequence for FLJ31030 (NM_152478.1,319-337).
ggtatcattgggagtttct

SEQ ID NO: 61881 - DNA, 19 bp, Homo sapiens
  siRNA target sequence for FLJ31030 (NM_152478.1,420-438).
gccctgattgggagtatgt

SEQ ID NO: 61882 - DNA, 19 bp, Homo sapiens
  siRNA target sequence for FLJ31030 (NM_152478.1,421-439).
ccctgattgggagtatgta

SEQ ID NO: 61883 - DNA, 19 bp, Homo sapiens
  siRNA target sequence for FLJ31030 (NM_152478.1,422-440).
cctgattgggagtatgtat

SEQ ID NO: 61884 - DNA, 19 bp, Homo sapiens
  siRNA target sequence for FLJ31030 (NM_152478.1,425-443).
gattgggagtatgtattta

SEQ ID NO: 61885 - DNA, 19 bp, Homo sapiens
  siRNA target sequence for FLJ31030 (NM_152478.1,429-447).
gggagtatgtatttaaaaa

SEQ ID NO: 61886 - DNA, 19 bp, Homo sapiens
  siRNA target sequence for FLJ31030 (NM_152478.1,505-523).
gggagcaagacatcttagt

SEQ ID NO: 61887 - DNA, 19 bp, Homo sapiens
  siRNA target sequence for FLJ31030 (NM_152478.1,506-524).
ggagcaagacatcttagtt

SEQ ID NO: 61888 - DNA, 19 bp, Homo sapiens
  siRNA target sequence for FLJ31030 (NM_152478.1,507-525).
gagcaagacatcttagtta

SEQ ID NO: 61889 - DNA, 19 bp, Homo sapiens
  siRNA target sequence for FLJ31030 (NM_152478.1,509-527).
gcaagacatcttagttata

SEQ ID NO: 61890 - DNA, 19 bp, Homo sapiens
  siRNA target sequence for FLJ31030 (NM_152478.1,530-548).
cttgactatcccagtttga

SEQ ID NO: 61891 - DNA, 19 bp, Homo sapiens
  siRNA target sequence for FLJ31030 (NM_152478.1,591-609).
gaagtcaagaggtacatct

SEQ ID NO: 61892 - DNA, 19 bp, Homo sapiens
  siRNA target sequence for FLJ31030 (NM_152478.1,599-617).
gaggtacatcttagtcaat

SEQ ID NO: 61893 - DNA, 19 bp, Homo sapiens
  siRNA target sequence for FLJ31030 (NM_152478.1,601-619).
ggtacatcttagtcaatta

SEQ ID NO: 61894 - DNA, 19 bp, Homo sapiens
  siRNA target sequence for FLJ31030 (NM_152478.1,614-632).
caattaatcatcactcata

SEQ ID NO: 61895 - DNA, 19 bp, Homo sapiens
  siRNA target sequence for FLJ31030 (NM_152478.1,688-706).
ccaccaggatacaatcttt

SEQ ID NO: 61896 - DNA, 19 bp, Homo sapiens
  siRNA target sequence for FLJ31030 (NM_152478.1,694-712).
ggatacaatctttgatata

SEQ ID NO: 61897 - DNA, 19 bp, Homo sapiens
  siRNA target sequence for FLJ31030 (NM_152478.1,699-717).
caatctttgatatacaaca

SEQ ID NO: 61898 - DNA, 19 bp, Homo sapiens
  siRNA target sequence for FLJ31030 (NM_152478.1,752-770).
gaaccacaaaagaaaagtt

SEQ ID NO: 61899 - DNA, 19 bp, Homo sapiens
  siRNA target sequence for FLJ31030 (NM_152478.1,768-786).
gttaccgaaaaaaatctgt

SEQ ID NO: 61900 - DNA, 19 bp, Homo sapiens
  siRNA target sequence for FLJ31030 (NM_152478.1,950-968).
gcaaacttggcgcaacata

SEQ ID NO: 61901 - DNA, 19 bp, Homo sapiens
  siRNA target sequence for FLJ31030 (NM_152478.1,951-969).
caaacttggcgcaacataa

SEQ ID NO: 61902 - DNA, 19 bp, Homo sapiens
  siRNA target sequence for FLJ31030 (NM_152478.1,955-973).
cttggcgcaacataagaga

SEQ ID NO: 61903 - DNA, 19 bp, Homo sapiens
  siRNA target sequence for FLJ31030 (NM_152478.1,1278-1296).
gccatcgtggatacctaat

SEQ ID NO: 61904 - DNA, 19 bp, Homo sapiens
  siRNA target sequence for FLJ31030 (NM_152478.1,1279-1297).
ccatcgtggatacctaatt

SEQ ID NO: 61905 - DNA, 19 bp, Homo sapiens
  siRNA target sequence for FLJ31030 (NM_152478.1,1817-1835).
catactatggagtcattct

SEQ ID NO: 61906 - DNA, 19 bp, Homo sapiens
  siRNA target sequence for FLJ31100 (NM_173631.2,217-235).
gggtcatgtggtttttgaa

SEQ ID NO: 61907 - DNA, 19 bp, Homo sapiens
  siRNA target sequence for FLJ31100 (NM_173631.2,606-624).
gaggaagaccgacatttgt

SEQ ID NO: 61908 - DNA, 19 bp, Homo sapiens
  siRNA target sequence for FLJ31100 (NM_173631.2,608-626).
ggaagaccgacatttgtga

SEQ ID NO: 61909 - DNA, 19 bp, Homo sapiens
  siRNA target sequence for FLJ31100 (NM_173631.2,609-627).
gaagaccgacatttgtgaa

SEQ ID NO: 61910 - DNA, 19 bp, Homo sapiens
  siRNA target sequence for FLJ31100 (NM_173631.2,612-630).
gaccgacatttgtgaagaa

SEQ ID NO: 61911 - DNA, 19 bp, Homo sapiens
  siRNA target sequence for FLJ31100 (NM_173631.2,647-665).
gcagggaagaccttcttgt

SEQ ID NO: 61912 - DNA, 19 bp, Homo sapiens
  siRNA target sequence for FLJ31100 (NM_173631.2,691-709).
ccacaaacataaactttct

SEQ ID NO: 61913 - DNA, 19 bp, Homo sapiens
  siRNA target sequence for FLJ31100 (NM_173631.2,1039-1057).
cctctttaggcattacaga

SEQ ID NO: 61914 - DNA, 19 bp, Homo sapiens
  siRNA target sequence for FLJ31100 (NM_173631.2,1040-1058).
ctctttaggcattacagaa

SEQ ID NO: 61915 - DNA, 19 bp, Homo sapiens
  siRNA target sequence for FLJ31100 (NM_173631.2,1042-1060).
ctttaggcattacagaatt

SEQ ID NO: 61916 - DNA, 19 bp, Homo sapiens
  siRNA target sequence for FLJ31139 (NM_173657.1,275-293).
ccatagctggaataatgtt

SEQ ID NO: 61917 - DNA, 19 bp, Homo sapiens
  siRNA target sequence for FLJ31139 (NM_173657.1,280-298).
gctggaataatgttacttt

SEQ ID NO: 61918 - DNA, 19 bp, Homo sapiens
  siRNA target sequence for FLJ31139 (NM_173657.1,305-323).
gcattcgactgacatcaaa

SEQ ID NO: 61919 - DNA, 19 bp, Homo sapiens
  siRNA target sequence for FLJ31139 (NM_173657.1,306-324).
cattcgactgacatcaaaa

SEQ ID NO: 61920 - DNA, 19 bp, Homo sapiens
  siRNA target sequence for FLJ31139 (NM_173657.1,338-356).
cggatattccagtagaatt

SEQ ID NO: 61921 - DNA, 19 bp, Homo sapiens
  siRNA target sequence for FLJ31139 (NM_173657.1,339-357).
ggatattccagtagaattt

SEQ ID NO: 61922 - DNA, 19 bp, Homo sapiens
  siRNA target sequence for FLJ31139 (NM_173657.1,382-400).
ggacgattacgccgaataa

SEQ ID NO: 61923 - DNA, 19 bp, Homo sapiens
  siRNA target sequence for FLJ31139 (NM_173657.1,386-404).
gattacgccgaataactga

SEQ ID NO: 61924 - DNA, 19 bp, Homo sapiens
  siRNA target sequence for FLJ31139 (NM_173657.1,543-561).
gctaaaaccttcccaatta

SEQ ID NO: 61925 - DNA, 19 bp, Homo sapiens
  siRNA target sequence for FLJ31139 (NM_173657.1,615-633).
ggtgagtaagggtggatat

SEQ ID NO: 61926 - DNA, 19 bp, Homo sapiens
  siRNA target sequence for FLJ31139 (NM_173657.1,728-746).
cagttcacagaaacttact

SEQ ID NO: 61927 - DNA, 19 bp, Homo sapiens
  siRNA target sequence for FLJ31139 (NM_173657.1,730-748).
gttcacagaaacttactta

SEQ ID NO: 61928 - DNA, 19 bp, Homo sapiens
  siRNA target sequence for FLJ31139 (NM_173657.1,965-983).
gctccttaatactgaagtt

SEQ ID NO: 61929 - DNA, 19 bp, Homo sapiens
  siRNA target sequence for FLJ31139 (NM_173657.1,978-996).
gaagttcagagaacttata

SEQ ID NO: 61930 - DNA, 19 bp, Homo sapiens
  siRNA target sequence for FLJ31139 (NM_173657.1,991-1009).
cttataagtcgcataaact

SEQ ID NO: 61931 - DNA, 19 bp, Homo sapiens
  siRNA target sequence for FLJ31139 (NM_173657.1,1001-1019).
gcataaactttcgtagaaa

SEQ ID NO: 61932 - DNA, 19 bp, Homo sapiens
  siRNA target sequence for FLJ31139 (NM_173657.1,1002-1020).
cataaactttcgtagaaaa

SEQ ID NO: 61933 - DNA, 19 bp, Homo sapiens
  siRNA target sequence for FLJ31295 (NM_152320.1,172-190).
gctgaggacaggtcacaat

SEQ ID NO: 61934 - DNA, 19 bp, Homo sapiens
  siRNA target sequence for FLJ31295 (NM_152320.1,173-191).
ctgaggacaggtcacaatt

SEQ ID NO: 61935 - DNA, 19 bp, Homo sapiens
  siRNA target sequence for FLJ31295 (NM_152320.1,194-212).
ggtctgcagcagaaatgct

SEQ ID NO: 61936 - DNA, 19 bp, Homo sapiens
  siRNA target sequence for FLJ31295 (NM_152320.1,195-213).
gtctgcagcagaaatgctt

SEQ ID NO: 61937 - DNA, 19 bp, Homo sapiens
  siRNA target sequence for FLJ31295 (NM_152320.1,236-254).
ggacaggatgggaatcaat

SEQ ID NO: 61938 - DNA, 19 bp, Homo sapiens
  siRNA target sequence for FLJ31295 (NM_152320.1,242-260).
gatgggaatcaatgaatgt

SEQ ID NO: 61939 - DNA, 19 bp, Homo sapiens
  siRNA target sequence for FLJ31295 (NM_152320.1,479-497).
cacagggcctggtaaccat

SEQ ID NO: 61940 - DNA, 19 bp, Homo sapiens
  siRNA target sequence for FLJ31295 (NM_152320.1,547-565).
ccctctcagacagactttt

SEQ ID NO: 61941 - DNA, 19 bp, Homo sapiens
  siRNA target sequence for FLJ31295 (NM_152320.1,548-566).
cctctcagacagactttta

SEQ ID NO: 61942 - DNA, 19 bp, Homo sapiens
  siRNA target sequence for FLJ31295 (NM_152320.1,549-567).
ctctcagacagacttttat

SEQ ID NO: 61943 - DNA, 19 bp, Homo sapiens
  siRNA target sequence for FLJ31295 (NM_152320.1,625-643).
cccaaactggacatgcttt

SEQ ID NO: 61944 - DNA, 19 bp, Homo sapiens
  siRNA target sequence for FLJ31295 (NM_152320.1,705-723).
cattctgagggtcacatat

SEQ ID NO: 61945 - DNA, 19 bp, Homo sapiens
  siRNA target sequence for FLJ31295 (NM_152320.1,747-765).
gggggatacccctgaacta

SEQ ID NO: 61946 - DNA, 19 bp, Homo sapiens
  siRNA target sequence for FLJ31295 (NM_152320.1,770-788).
cagaacctcccagaatgtt

SEQ ID NO: 61947 - DNA, 19 bp, Homo sapiens
  siRNA target sequence for FLJ31295 (NM_152320.1,772-790).
gaacctcccagaatgttat

SEQ ID NO: 61948 - DNA, 19 bp, Homo sapiens
  siRNA target sequence for FLJ31295 (NM_152320.1,775-793).
cctcccagaatgttatcca

SEQ ID NO: 61949 - DNA, 19 bp, Homo sapiens
  siRNA target sequence for FLJ31295 (NM_152320.1,792-810).
cagcgtgtctgaagatact

SEQ ID NO: 61950 - DNA, 19 bp, Homo sapiens
  siRNA target sequence for FLJ31295 (NM_152320.1,794-812).
gcgtgtctgaagatactgt

SEQ ID NO: 61951 - DNA, 19 bp, Homo sapiens
  siRNA target sequence for FLJ31295 (NM_152320.1,818-836).
ggaacccggagcatgatga

SEQ ID NO: 61952 - DNA, 19 bp, Homo sapiens
  siRNA target sequence for FLJ31295 (NM_152320.1,999-1017).
ccttgccaggcatcaacaa

SEQ ID NO: 61953 - DNA, 19 bp, Homo sapiens
  siRNA target sequence for FLJ31295 (NM_152320.1,1000-1018).
cttgccaggcatcaacaaa

SEQ ID NO: 61954 - DNA, 19 bp, Homo sapiens
  siRNA target sequence for FLJ31295 (NM_152320.1,1062-1080).
gacctttgggcgaagacat

SEQ ID NO: 61955 - DNA, 19 bp, Homo sapiens
  siRNA target sequence for FLJ31295 (NM_152320.1,1260-1278).
cccaccagtgccaaagtgt

SEQ ID NO: 61956 - DNA, 19 bp, Homo sapiens
  siRNA target sequence for FLJ31295 (NM_152320.1,1386-1404).
gagctttggccgaaaacat

SEQ ID NO: 61957 - DNA, 19 bp, Homo sapiens
  siRNA target sequence for FLJ31295 (NM_152320.1,1388-1406).
gctttggccgaaaacatca

SEQ ID NO: 61958 - DNA, 19 bp, Homo sapiens
  siRNA target sequence for FLJ31875 (NM_182531.1,351-369).
gcccacggaggtcatgttt

SEQ ID NO: 61959 - DNA, 19 bp, Homo sapiens
  siRNA target sequence for FLJ31875 (NM_182531.1,353-371).
ccacggaggtcatgtttct

SEQ ID NO: 61960 - DNA, 19 bp, Homo sapiens
  siRNA target sequence for FLJ31875 (NM_182531.1,354-372).
cacggaggtcatgtttcta

SEQ ID NO: 61961 - DNA, 19 bp, Homo sapiens
  siRNA target sequence for FLJ31875 (NM_182531.1,427-445).
gctggctgataaattgtta

SEQ ID NO: 61962 - DNA, 19 bp, Homo sapiens
  siRNA target sequence for FLJ31875 (NM_182531.1,571-589).
cagtagaatggcgacttaa

SEQ ID NO: 61963 - DNA, 19 bp, Homo sapiens
  siRNA target sequence for FLJ31875 (NM_182531.1,573-591).
gtagaatggcgacttaaaa

SEQ ID NO: 61964 - DNA, 19 bp, Homo sapiens
  siRNA target sequence for FLJ31875 (NM_182531.1,576-594).
gaatggcgacttaaaacca

SEQ ID NO: 61965 - DNA, 19 bp, Homo sapiens
  siRNA target sequence for FLJ31875 (NM_182531.1,603-621).
gcacttcggcaggatagat

SEQ ID NO: 61966 - DNA, 19 bp, Homo sapiens
  siRNA target sequence for FLJ31875 (NM_182531.1,606-624).
cttcggcaggatagatctt

SEQ ID NO: 61967 - DNA, 19 bp, Homo sapiens
  siRNA target sequence for FLJ31875 (NM_182531.1,691-709).
cgcagtgtggagaagcttt

SEQ ID NO: 61968 - DNA, 19 bp, Homo sapiens
  siRNA target sequence for FLJ31875 (NM_182531.1,757-775).
gagacagttgtgtgtctaa

SEQ ID NO: 61969 - DNA, 19 bp, Homo sapiens
  siRNA target sequence for FLJ31875 (NM_182531.1,763-781).
gttgtgtgtctaatcatta

SEQ ID NO: 61970 - DNA, 19 bp, Homo sapiens
  siRNA target sequence for FLJ31875 (NM_182531.1,869-887).
cagctctactccaaatgtt

SEQ ID NO: 61971 - DNA, 19 bp, Homo sapiens
  siRNA target sequence for FLJ31875 (NM_182531.1,871-889).
gctctactccaaatgttgt

SEQ ID NO: 61972 - DNA, 19 bp, Homo sapiens
  siRNA target sequence for FLJ31875 (NM_182531.1,872-890).
ctctactccaaatgttgtt

SEQ ID NO: 61973 - DNA, 19 bp, Homo sapiens
  siRNA target sequence for FLJ31875 (NM_182531.1,905-923).
cactcgggacagatctctt

SEQ ID NO: 61974 - DNA, 19 bp, Homo sapiens
  siRNA target sequence for FLJ31875 (NM_182531.1,910-928).
gggacagatctcttgacta

SEQ ID NO: 61975 - DNA, 19 bp, Homo sapiens
  siRNA target sequence for FLJ31875 (NM_182531.1,1021-1039).
gtgggaaagctctaactca

SEQ ID NO: 61976 - DNA, 19 bp, Homo sapiens
  siRNA target sequence for FLJ31875 (NM_182531.1,1049-1067).
ctgcgccacacctgttgaa

SEQ ID NO: 61977 - DNA, 19 bp, Homo sapiens
  siRNA target sequence for FLJ31875 (NM_182531.1,1051-1069).
gcgccacacctgttgaaat

SEQ ID NO: 61978 - DNA, 19 bp, Homo sapiens
  siRNA target sequence for FLJ31875 (NM_182531.1,1306-1324).
ctaaacacgtccaaacaga

SEQ ID NO: 61979 - DNA, 19 bp, Homo sapiens
  siRNA target sequence for FLJ31875 (NM_182531.1,1367-1385).
ctgcggtgggttttatcta

SEQ ID NO: 61980 - DNA, 19 bp, Homo sapiens
  siRNA target sequence for FLJ31875 (NM_182531.1,1369-1387).
gcggtgggttttatctact

SEQ ID NO: 61981 - DNA, 19 bp, Homo sapiens
  siRNA target sequence for FLJ31875 (NM_182531.1,1372-1390).
gtgggttttatctactgaa

SEQ ID NO: 61982 - DNA, 19 bp, Homo sapiens
  siRNA target sequence for FLJ31875 (NM_182531.1,1434-1452).
gtggtttgcggaaaatatt

SEQ ID NO: 61983 - DNA, 19 bp, Homo sapiens
  siRNA target sequence for FLJ31875 (NM_182531.1,1436-1454).
ggtttgcggaaaatatttt

SEQ ID NO: 61984 - DNA, 19 bp, Homo sapiens
  siRNA target sequence for FLJ31875 (NM_182531.1,1541-1559).
gtgcgctgtggccttacta

SEQ ID NO: 61985 - DNA, 19 bp, Homo sapiens
  siRNA target sequence for FLJ31986 (NM_152476.1,354-372).
cgtggccaaagtaggattt

SEQ ID NO: 61986 - DNA, 19 bp, Homo sapiens
  siRNA target sequence for FLJ31986 (NM_152476.1,501-519).
gaaaatacaaacttctaat

SEQ ID NO: 61987 - DNA, 19 bp, Homo sapiens
  siRNA target sequence for FLJ31986 (NM_152476.1,532-550).
gacctggtaacctttgaca

SEQ ID NO: 61988 - DNA, 19 bp, Homo sapiens
  siRNA target sequence for FLJ31986 (NM_152476.1,769-787).
ccagccctttggcaagata

SEQ ID NO: 61989 - DNA, 19 bp, Homo sapiens
  siRNA target sequence for FLJ31986 (NM_152476.1,770-788).
cagccctttggcaagataa

SEQ ID NO: 61990 - DNA, 19 bp, Homo sapiens
  siRNA target sequence for FLJ31986 (NM_152476.1,772-790).
gccctttggcaagataatt

SEQ ID NO: 61991 - DNA, 19 bp, Homo sapiens
  siRNA target sequence for FLJ31986 (NM_152476.1,773-791).
ccctttggcaagataattt

SEQ ID NO: 61992 - DNA, 19 bp, Homo sapiens
  siRNA target sequence for FLJ31986 (NM_152476.1,803-821).
cattaaatgggatacagtt

SEQ ID NO: 61993 - DNA, 19 bp, Homo sapiens
  siRNA target sequence for FLJ31986 (NM_152476.1,812-830).
ggatacagttggcaagaaa

SEQ ID NO: 61994 - DNA, 19 bp, Homo sapiens
  siRNA target sequence for FLJ31986 (NM_152476.1,817-835).
cagttggcaagaaaccaaa

SEQ ID NO: 61995 - DNA, 19 bp, Homo sapiens
  siRNA target sequence for FLJ31986 (NM_152476.1,895-913).
cttaagaccaacatgagta

SEQ ID NO: 61996 - DNA, 19 bp, Homo sapiens
  siRNA target sequence for FLJ31986 (NM_152476.1,900-918).
gaccaacatgagtactcaa

SEQ ID NO: 61997 - DNA, 19 bp, Homo sapiens
  siRNA target sequence for FLJ31986 (NM_152476.1,902-920).
ccaacatgagtactcaaaa

SEQ ID NO: 61998 - DNA, 19 bp, Homo sapiens
  siRNA target sequence for FLJ31986 (NM_152476.1,903-921).
caacatgagtactcaaaat

SEQ ID NO: 61999 - DNA, 19 bp, Homo sapiens
  siRNA target sequence for FLJ31986 (NM_152476.1,925-943).
ggcaacacgtctgaatgta

SEQ ID NO: 62000 - DNA, 19 bp, Homo sapiens
  siRNA target sequence for FLJ31986 (NM_152476.1,926-944).
gcaacacgtctgaatgtat

SEQ ID NO: 62001 - DNA, 19 bp, Homo sapiens
  siRNA target sequence for FLJ31986 (NM_152476.1,932-950).
cgtctgaatgtattcagta

SEQ ID NO: 62002 - DNA, 19 bp, Homo sapiens
  siRNA target sequence for FLJ31986 (NM_152476.1,960-978).
cctcctttctctatacaat

SEQ ID NO: 62003 - DNA, 19 bp, Homo sapiens
  siRNA target sequence for FLJ31986 (NM_152476.1,1028-1046).
ctttccgcctgattttaaa

SEQ ID NO: 62004 - DNA, 19 bp, Homo sapiens
  siRNA target sequence for FLJ31986 (NM_152476.1,1059-1077).
gagaaagtgtacacaagat

SEQ ID NO: 62005 - DNA, 19 bp, Homo sapiens
  siRNA target sequence for FLJ31986 (NM_152476.1,1206-1224).
cacaagccatgctgtaaat

SEQ ID NO: 62006 - DNA, 19 bp, Homo sapiens
  siRNA target sequence for FLJ31986 (NM_152476.1,1211-1229).
gccatgctgtaaatgttga

SEQ ID NO: 62007 - DNA, 19 bp, Homo sapiens
  siRNA target sequence for FLJ31986 (NM_152476.1,1217-1235).
ctgtaaatgttgaaacaca

SEQ ID NO: 62008 - DNA, 19 bp, Homo sapiens
  siRNA target sequence for FLJ31986 (NM_152476.1,1283-1301).
gataccctacccaccttaa

SEQ ID NO: 62009 - DNA, 19 bp, Homo sapiens
  siRNA target sequence for FLJ31986 (NM_152476.1,1287-1305).
ccctacccaccttaataat

SEQ ID NO: 62010 - DNA, 19 bp, Homo sapiens
  siRNA target sequence for FLJ31986 (NM_152476.1,1289-1307).
ctacccaccttaataatca

SEQ ID NO: 62011 - DNA, 19 bp, Homo sapiens
  siRNA target sequence for FLJ31986 (NM_152476.1,1317-1335).
ccacattgggataaaacct

SEQ ID NO: 62012 - DNA, 19 bp, Homo sapiens
  siRNA target sequence for FLJ31986 (NM_152476.1,1371-1389).
gccgtcaggctttcttgaa

SEQ ID NO: 62013 - DNA, 19 bp, Homo sapiens
  siRNA target sequence for FLJ31986 (NM_152476.1,1556-1574).
gacatttgagagttcataa

SEQ ID NO: 62014 - DNA, 19 bp, Homo sapiens
  siRNA target sequence for FLJ31986 (NM_152476.1,1869-1887).
cactaagtgctcatatctt

SEQ ID NO: 62015 - DNA, 19 bp, Homo sapiens
  siRNA target sequence for FLJ31986 (NM_152476.1,1953-1971).
cactgagcgctcatacctt

SEQ ID NO: 62016 - DNA, 19 bp, Homo sapiens
  siRNA target sequence for FLJ31986 (NM_152476.1,1957-1975).
gagcgctcataccttacta

SEQ ID NO: 62017 - DNA, 19 bp, Homo sapiens
  siRNA target sequence for FLJ31986 (NM_152476.1,2037-2055).
cacagaacgctcagatctt

SEQ ID NO: 62018 - DNA, 19 bp, Homo sapiens
  siRNA target sequence for FLJ31986 (NM_152476.1,2127-2145).
ctcctccagtctagttgat

SEQ ID NO: 62019 - DNA, 19 bp, Homo sapiens
  siRNA target sequence for FLJ31986 (NM_152476.1,2129-2147).
cctccagtctagttgatca

SEQ ID NO: 62020 - DNA, 19 bp, Homo sapiens
  siRNA target sequence for FLJ31986 (NM_152476.1,2130-2148).
ctccagtctagttgatcat

SEQ ID NO: 62021 - DNA, 19 bp, Homo sapiens
  siRNA target sequence for FLJ31986 (NM_152476.1,2133-2151).
cagtctagttgatcattta

SEQ ID NO: 62022 - DNA, 19 bp, Homo sapiens
  siRNA target sequence for FLJ31986 (NM_152476.1,2210-2228).
ggtcttgtgtactaactca

SEQ ID NO: 62023 - DNA, 19 bp, Homo sapiens
  siRNA target sequence for FLJ31986 (NM_152476.1,2211-2229).
gtcttgtgtactaactcaa

SEQ ID NO: 62024 - DNA, 19 bp, Homo sapiens
  siRNA target sequence for FLJ31986 (NM_152476.1,2303-2321).
gctttcatgatcgcttaaa

SEQ ID NO: 62025 - DNA, 19 bp, Homo sapiens
  siRNA target sequence for FLJ31986 (NM_152476.1,2304-2322).
ctttcatgatcgcttaaaa

SEQ ID NO: 62026 - DNA, 19 bp, Homo sapiens
  siRNA target sequence for FLJ31986 (NM_152476.1,2378-2396).
gtcattcagatcttactaa

SEQ ID NO: 62027 - DNA, 19 bp, Homo sapiens
  siRNA target sequence for FLJ31986 (NM_152476.1,2462-2480).
catcctcaggacgtattca

SEQ ID NO: 62028 - DNA, 19 bp, Homo sapiens
  siRNA target sequence for FLJ31986 (NM_152476.1,2465-2483).
cctcaggacgtattcaaca

SEQ ID NO: 62029 - DNA, 19 bp, Homo sapiens
  siRNA target sequence for FLJ31986 (NM_152476.1,2552-2570).
cagctcgtattgcacattt

SEQ ID NO: 62030 - DNA, 19 bp, Homo sapiens
  siRNA target sequence for FLJ31986 (NM_152476.1,2554-2572).
gctcgtattgcacatttga

SEQ ID NO: 62031 - DNA, 19 bp, Homo sapiens
  siRNA target sequence for FLJ31986 (NM_152476.1,2555-2573).
ctcgtattgcacatttgaa

SEQ ID NO: 62032 - DNA, 19 bp, Homo sapiens
  siRNA target sequence for FLJ32130 (NM_152458.4,860-878).
gcaagagtcgcttcactta

SEQ ID NO: 62033 - DNA, 19 bp, Homo sapiens
  siRNA target sequence for FLJ32130 (NM_152458.4,1260-1278).
ccggcactttccagatata

SEQ ID NO: 62034 - DNA, 19 bp, Homo sapiens
  siRNA target sequence for FLJ32130 (NM_152458.4,1261-1279).
cggcactttccagatatat

SEQ ID NO: 62035 - DNA, 19 bp, Homo sapiens
  siRNA target sequence for FLJ32130 (NM_152458.4,1262-1280).
ggcactttccagatatatt

SEQ ID NO: 62036 - DNA, 19 bp, Homo sapiens
  siRNA target sequence for FLJ32191 (NM_144689.3,222-240).
cggaaattagtgatgttca

SEQ ID NO: 62037 - DNA, 19 bp, Homo sapiens
  siRNA target sequence for FLJ32191 (NM_144689.3,358-376).
cttcaaggtgtgcaagtaa

SEQ ID NO: 62038 - DNA, 19 bp, Homo sapiens
  siRNA target sequence for FLJ32191 (NM_144689.3,456-474).
cttgaagagtccaattcca

SEQ ID NO: 62039 - DNA, 19 bp, Homo sapiens
  siRNA target sequence for FLJ32191 (NM_144689.3,464-482).
gtccaattccagggattat

SEQ ID NO: 62040 - DNA, 19 bp, Homo sapiens
  siRNA target sequence for FLJ32191 (NM_144689.3,466-484).
ccaattccagggattattt

SEQ ID NO: 62041 - DNA, 19 bp, Homo sapiens
  siRNA target sequence for FLJ32191 (NM_144689.3,536-554).
caggcaagggatgatcata

SEQ ID NO: 62042 - DNA, 19 bp, Homo sapiens
  siRNA target sequence for FLJ32191 (NM_144689.3,538-556).
ggcaagggatgatcatata

SEQ ID NO: 62043 - DNA, 19 bp, Homo sapiens
  siRNA target sequence for FLJ32191 (NM_144689.3,539-557).
gcaagggatgatcatatat

SEQ ID NO: 62044 - DNA, 19 bp, Homo sapiens
  siRNA target sequence for FLJ32191 (NM_144689.3,544-562).
ggatgatcatatatgacaa

SEQ ID NO: 62045 - DNA, 19 bp, Homo sapiens
  siRNA target sequence for FLJ32191 (NM_144689.3,575-593).
caaccagcatacttactta

SEQ ID NO: 62046 - DNA, 19 bp, Homo sapiens
  siRNA target sequence for FLJ32191 (NM_144689.3,581-599).
gcatacttacttatctcaa

SEQ ID NO: 62047 - DNA, 19 bp, Homo sapiens
  siRNA target sequence for FLJ32191 (NM_144689.3,600-618).
cattcaagatgtcattcta

SEQ ID NO: 62048 - DNA, 19 bp, Homo sapiens
  siRNA target sequence for FLJ32191 (NM_144689.3,664-682).
gagcctcacacctaacaca

SEQ ID NO: 62049 - DNA, 19 bp, Homo sapiens
  siRNA target sequence for FLJ32191 (NM_144689.3,674-692).
cctaacacaacatcaaagt

SEQ ID NO: 62050 - DNA, 19 bp, Homo sapiens
  siRNA target sequence for FLJ32191 (NM_144689.3,1081-1099).
ctcagctctcacaacttat

SEQ ID NO: 62051 - DNA, 19 bp, Homo sapiens
  siRNA target sequence for FLJ32191 (NM_144689.3,1832-1850).
ctttgcgcgtggcttacta

SEQ ID NO: 62052 - DNA, 19 bp, Homo sapiens
  siRNA target sequence for FLJ32191 (NM_144689.3,1837-1855).
cgcgtggcttactacttat

SEQ ID NO: 62053 - DNA, 19 bp, Homo sapiens
  siRNA target sequence for FLJ32191 (NM_144689.3,1843-1861).
gcttactacttatacaaca

SEQ ID NO: 62054 - DNA, 19 bp, Homo sapiens
  siRNA target sequence for FLJ32191 (NM_144689.3,1844-1862).
cttactacttatacaacat

SEQ ID NO: 62055 - DNA, 19 bp, Homo sapiens
  siRNA target sequence for FLJ32191 (NM_144689.3,2242-2260).
gtgggattgactttagtca

SEQ ID NO: 62056 - DNA, 19 bp, Homo sapiens
  siRNA target sequence for FLJ32932 (NM_152909.2,425-443).
ccttcacagcaaggttttt

SEQ ID NO: 62057 - DNA, 19 bp, Homo sapiens
  siRNA target sequence for FLJ32932 (NM_152909.2,610-628).
gcacccaaagcagcaaatt

SEQ ID NO: 62058 - DNA, 19 bp, Homo sapiens
  siRNA target sequence for FLJ32932 (NM_152909.2,642-660).
ccagaggggatgattggat

SEQ ID NO: 62059 - DNA, 19 bp, Homo sapiens
  siRNA target sequence for FLJ32932 (NM_152909.2,643-661).
cagaggggatgattggata

SEQ ID NO: 62060 - DNA, 19 bp, Homo sapiens
  siRNA target sequence for FLJ32932 (NM_152909.2,647-665).
ggggatgattggatacctt

SEQ ID NO: 62061 - DNA, 19 bp, Homo sapiens
  siRNA target sequence for FLJ32932 (NM_152909.2,1123-1141).
gtacagctccacatttgtt

SEQ ID NO: 62062 - DNA, 19 bp, Homo sapiens
  siRNA target sequence for FLJ32932 (NM_152909.2,1128-1146).
gctccacatttgttagaca

SEQ ID NO: 62063 - DNA, 19 bp, Homo sapiens
  siRNA target sequence for FLJ32932 (NM_152909.2,1696-1714).
ccagaaggcctttattaga

SEQ ID NO: 62064 - DNA, 19 bp, Homo sapiens
  siRNA target sequence for FLJ32932 (NM_152909.2,1830-1848).
caatggagaaagtttacca

SEQ ID NO: 62065 - DNA, 19 bp, Homo sapiens
  siRNA target sequence for FLJ33071 (NM_152457.1,362-380).
gagattaatcagcagttaa

SEQ ID NO: 62066 - DNA, 19 bp, Homo sapiens
  siRNA target sequence for FLJ33071 (NM_152457.1,484-502).
ccctgaagcgaaaatatta

SEQ ID NO: 62067 - DNA, 19 bp, Homo sapiens
  siRNA target sequence for FLJ33071 (NM_152457.1,504-522).
gtggaactcccacttacaa

SEQ ID NO: 62068 - DNA, 19 bp, Homo sapiens
  siRNA target sequence for FLJ33071 (NM_152457.1,506-524).
ggaactcccacttacaaga

SEQ ID NO: 62069 - DNA, 19 bp, Homo sapiens
  siRNA target sequence for FLJ33071 (NM_152457.1,535-553).
cagccttttagttaccatt

SEQ ID NO: 62070 - DNA, 19 bp, Homo sapiens
  siRNA target sequence for FLJ33071 (NM_152457.1,559-577).
ccacaccccattagtagaa

SEQ ID NO: 62071 - DNA, 19 bp, Homo sapiens
  siRNA target sequence for FLJ33071 (NM_152457.1,597-615).
ccaacacactttctgaaat

SEQ ID NO: 62072 - DNA, 19 bp, Homo sapiens
  siRNA target sequence for FLJ33071 (NM_152457.1,598-616).
caacacactttctgaaatt

SEQ ID NO: 62073 - DNA, 19 bp, Homo sapiens
  siRNA target sequence for FLJ33071 (NM_152457.1,679-697).
cagcgatcattcataccta

SEQ ID NO: 62074 - DNA, 19 bp, Homo sapiens
  siRNA target sequence for FLJ33071 (NM_152457.1,695-713).
ctagttttgcatcagaaaa

SEQ ID NO: 62075 - DNA, 19 bp, Homo sapiens
  siRNA target sequence for FLJ33071 (NM_152457.1,848-866).
cgccagcactctcatctat

SEQ ID NO: 62076 - DNA, 19 bp, Homo sapiens
  siRNA target sequence for FLJ33071 (NM_152457.1,863-881).
ctatcccgacacatgaata

SEQ ID NO: 62077 - DNA, 19 bp, Homo sapiens
  siRNA target sequence for FLJ33071 (NM_152457.1,977-995).
gaaaacacctacgaatcta

SEQ ID NO: 62078 - DNA, 19 bp, Homo sapiens
  siRNA target sequence for FLJ33071 (NM_152457.1,985-1003).
ctacgaatctactaactgt

SEQ ID NO: 62079 - DNA, 19 bp, Homo sapiens
  siRNA target sequence for FLJ33071 (NM_152457.1,989-1007).
gaatctactaactgtgata

SEQ ID NO: 62080 - DNA, 19 bp, Homo sapiens
  siRNA target sequence for FLJ33071 (NM_152457.1,1065-1083).
cccagtaccagcacactaa

SEQ ID NO: 62081 - DNA, 19 bp, Homo sapiens
  siRNA target sequence for FLJ33071 (NM_152457.1,1067-1085).
cagtaccagcacactaagt

SEQ ID NO: 62082 - DNA, 19 bp, Homo sapiens
  siRNA target sequence for FLJ33071 (NM_152457.1,1095-1113).
gcttcaggcagtccttata

SEQ ID NO: 62083 - DNA, 19 bp, Homo sapiens
  siRNA target sequence for FLJ33071 (NM_152457.1,1096-1114).
cttcaggcagtccttatat

SEQ ID NO: 62084 - DNA, 19 bp, Homo sapiens
  siRNA target sequence for FLJ33071 (NM_152457.1,1099-1117).
caggcagtccttatatcct

SEQ ID NO: 62085 - DNA, 19 bp, Homo sapiens
  siRNA target sequence for FLJ33071 (NM_152457.1,1161-1179).
gcgatgatggggacaattt

SEQ ID NO: 62086 - DNA, 19 bp, Homo sapiens
  siRNA target sequence for FLJ33071 (NM_152457.1,1285-1303).
gccccataagtgcaaaaca

SEQ ID NO: 62087 - DNA, 19 bp, Homo sapiens
  siRNA target sequence for FLJ33071 (NM_152457.1,1398-1416).
ctttcaagtcgaatttgca

SEQ ID NO: 62088 - DNA, 19 bp, Homo sapiens
  siRNA target sequence for FLJ33071 (NM_152457.1,1427-1445).
cataagcgaactcacataa

SEQ ID NO: 62089 - DNA, 19 bp, Homo sapiens
  siRNA target sequence for FLJ33979 (NM_152636.1,758-776).
ggcacttgcatctatccta

SEQ ID NO: 62090 - DNA, 19 bp, Homo sapiens
  siRNA target sequence for FLJ33979 (NM_152636.1,871-889).
ccagcatcgttgcagaata

SEQ ID NO: 62091 - DNA, 19 bp, Homo sapiens
  siRNA target sequence for FLJ33979 (NM_152636.1,882-900).
gcagaatactctgaaacat

SEQ ID NO: 62092 - DNA, 19 bp, Homo sapiens
  siRNA target sequence for FLJ33979 (NM_152636.1,883-901).
cagaatactctgaaacata

SEQ ID NO: 62093 - DNA, 19 bp, Homo sapiens
  siRNA target sequence for FLJ33979 (NM_152636.1,905-923).
cccagtggcccaaactctt

SEQ ID NO: 62094 - DNA, 19 bp, Homo sapiens
  siRNA target sequence for FLJ33979 (NM_152636.1,907-925).
cagtggcccaaactcttta

SEQ ID NO: 62095 - DNA, 19 bp, Homo sapiens
  siRNA target sequence for FLJ34817 (NM_152303.1,506-524).
gccttgaagaaccaatgta

SEQ ID NO: 62096 - DNA, 19 bp, Homo sapiens
  siRNA target sequence for FLJ34817 (NM_152303.1,511-529).
gaagaaccaatgtactgat

SEQ ID NO: 62097 - DNA, 19 bp, Homo sapiens
  siRNA target sequence for FLJ34817 (NM_152303.1,588-606).
cctcatggacggggtattt

SEQ ID NO: 62098 - DNA, 19 bp, Homo sapiens
  siRNA target sequence for FLJ34817 (NM_152303.1,589-607).
ctcatggacggggtattta

SEQ ID NO: 62099 - DNA, 19 bp, Homo sapiens
  siRNA target sequence for FLJ34817 (NM_152303.1,591-609).
catggacggggtatttact

SEQ ID NO: 62100 - DNA, 19 bp, Homo sapiens
  siRNA target sequence for FLJ34817 (NM_152303.1,594-612).
ggacggggtatttactttt

SEQ ID NO: 62101 - DNA, 19 bp, Homo sapiens
  siRNA target sequence for FLJ34817 (NM_152303.1,595-613).
gacggggtatttacttttt

SEQ ID NO: 62102 - DNA, 19 bp, Homo sapiens
  siRNA target sequence for FLJ34817 (NM_152303.1,597-615).
cggggtatttactttttca

SEQ ID NO: 62103 - DNA, 19 bp, Homo sapiens
  siRNA target sequence for FLJ34817 (NM_152303.1,684-702).
cctcctgttcagattggat

SEQ ID NO: 62104 - DNA, 19 bp, Homo sapiens
  siRNA target sequence for FLJ34817 (NM_152303.1,719-737).
caagactcaacttacaaga

SEQ ID NO: 62105 - DNA, 19 bp, Homo sapiens
  siRNA target sequence for FLJ34817 (NM_152303.1,754-772).
ggaaccagccagtggtata

SEQ ID NO: 62106 - DNA, 19 bp, Homo sapiens
  siRNA target sequence for FLJ34817 (NM_152303.1,755-773).
gaaccagccagtggtataa

SEQ ID NO: 62107 - DNA, 19 bp, Homo sapiens
  siRNA target sequence for FLJ34817 (NM_152303.1,758-776).
ccagccagtggtataaata

SEQ ID NO: 62108 - DNA, 19 bp, Homo sapiens
  siRNA target sequence for FLJ34817 (NM_152303.1,759-777).
cagccagtggtataaatat

SEQ ID NO: 62109 - DNA, 19 bp, Homo sapiens
  siRNA target sequence for FLJ34817 (NM_152303.1,801-819).
ggggatggaagcagttaga

SEQ ID NO: 62110 - DNA, 19 bp, Homo sapiens
  siRNA target sequence for FLJ34817 (NM_152303.1,917-935).
ggggaaaatggtaatctga

SEQ ID NO: 62111 - DNA, 19 bp, Homo sapiens
  siRNA target sequence for FLJ34817 (NM_152303.1,982-1000).
gtgtggcagcgagttagat

SEQ ID NO: 62112 - DNA, 19 bp, Homo sapiens
  siRNA target sequence for FLJ34817 (NM_152303.1,984-1002).
gtggcagcgagttagatat

SEQ ID NO: 62113 - DNA, 19 bp, Homo sapiens
  siRNA target sequence for FLJ34817 (NM_152303.1,988-1006).
cagcgagttagatattaca

SEQ ID NO: 62114 - DNA, 19 bp, Homo sapiens
  siRNA target sequence for FLJ34817 (NM_152303.1,1012-1030).
ggcatccgattcagtctta

SEQ ID NO: 62115 - DNA, 19 bp, Homo sapiens
  siRNA target sequence for FLJ34817 (NM_152303.1,1014-1032).
catccgattcagtcttaaa

SEQ ID NO: 62116 - DNA, 19 bp, Homo sapiens
  siRNA target sequence for FLJ34817 (NM_152303.1,1017-1035).
ccgattcagtcttaaacca

SEQ ID NO: 62117 - DNA, 19 bp, Homo sapiens
  siRNA target sequence for FLJ34817 (NM_152303.1,1036-1054).
ccatcagctgggatatgca

SEQ ID NO: 62118 - DNA, 19 bp, Homo sapiens
  siRNA target sequence for FLJ34817 (NM_152303.1,1058-1076).
cggagaccttgtgaaagta

SEQ ID NO: 62119 - DNA, 19 bp, Homo sapiens
  siRNA target sequence for FLJ34817 (NM_152303.1,1097-1115).
cgccagaacagtcacttta

SEQ ID NO: 62120 - DNA, 19 bp, Homo sapiens
  siRNA target sequence for FLJ34817 (NM_152303.1,1098-1116).
gccagaacagtcactttat

SEQ ID NO: 62121 - DNA, 19 bp, Homo sapiens
  siRNA target sequence for FLJ34817 (NM_152303.1,1099-1117).
ccagaacagtcactttatt

SEQ ID NO: 62122 - DNA, 19 bp, Homo sapiens
  siRNA target sequence for FLJ34817 (NM_152303.1,1102-1120).
gaacagtcactttattcaa

SEQ ID NO: 62123 - DNA, 19 bp, Homo sapiens
  siRNA target sequence for FLJ34817 (NM_152303.1,1412-1430).
gccttcaacaggatctcat

SEQ ID NO: 62124 - DNA, 19 bp, Homo sapiens
  siRNA target sequence for FLJ34817 (NM_152303.1,1797-1815).
gccagaaaacctataaaat

SEQ ID NO: 62125 - DNA, 19 bp, Homo sapiens
  siRNA target sequence for FLJ34917 (NM_153263.1,330-348).
gtggggcctccttgatgaa

SEQ ID NO: 62126 - DNA, 19 bp, Homo sapiens
  siRNA target sequence for FLJ34917 (NM_153263.1,480-498).
ggccaggactccaaagcta

SEQ ID NO: 62127 - DNA, 19 bp, Homo sapiens
  siRNA target sequence for FLJ34917 (NM_153263.1,534-552).
gtgtatcctggtcatgaaa

SEQ ID NO: 62128 - DNA, 19 bp, Homo sapiens
  siRNA target sequence for FLJ34917 (NM_153263.1,589-607).
ccctggcagaaaccttata

SEQ ID NO: 62129 - DNA, 19 bp, Homo sapiens
  siRNA target sequence for FLJ34917 (NM_153263.1,848-866).
gcagggagacctttcaaca

SEQ ID NO: 62130 - DNA, 19 bp, Homo sapiens
  siRNA target sequence for FLJ34917 (NM_153263.1,849-867).
cagggagacctttcaacaa

SEQ ID NO: 62131 - DNA, 19 bp, Homo sapiens
  siRNA target sequence for FLJ34917 (NM_153263.1,881-899).
gtgagcaagttttcaatga

SEQ ID NO: 62132 - DNA, 19 bp, Homo sapiens
  siRNA target sequence for FLJ34917 (NM_153263.1,1656-1674).
catctccaaacaaacactt

SEQ ID NO: 62133 - DNA, 19 bp, Homo sapiens
  siRNA target sequence for FLJ34917 (NM_153263.1,1659-1677).
ctccaaacaaacacttctt

SEQ ID NO: 62134 - DNA, 19 bp, Homo sapiens
  siRNA target sequence for FLJ34917 (NM_153263.1,1661-1679).
ccaaacaaacacttcttaa

SEQ ID NO: 62135 - DNA, 19 bp, Homo sapiens
  siRNA target sequence for FLJ34917 (NM_153263.1,1736-1754).
gcttctaccttgaggttaa

SEQ ID NO: 62136 - DNA, 19 bp, Homo sapiens
  siRNA target sequence for FLJ34917 (NM_153263.1,1737-1755).
cttctaccttgaggttaaa

SEQ ID NO: 62137 - DNA, 19 bp, Homo sapiens
  siRNA target sequence for FLJ34917 (NM_153263.1,1740-1758).
ctaccttgaggttaaactt

SEQ ID NO: 62138 - DNA, 19 bp, Homo sapiens
  siRNA target sequence for FLJ34917 (NM_153263.1,1743-1761).
ccttgaggttaaacttctt

SEQ ID NO: 62139 - DNA, 19 bp, Homo sapiens
  siRNA target sequence for FLJ34917 (NM_153263.1,1914-1932).
ccgcaccagcctcattcaa

SEQ ID NO: 62140 - DNA, 19 bp, Homo sapiens
  siRNA target sequence for FLJ34917 (NM_153263.1,2099-2117).
ggcaccagaaggtacatat

SEQ ID NO: 62141 - DNA, 19 bp, Homo sapiens
  siRNA target sequence for FLJ34917 (NM_153263.1,2101-2119).
caccagaaggtacatataa

SEQ ID NO: 62142 - DNA, 19 bp, Homo sapiens
  siRNA target sequence for FLJ34917 (NM_153263.1,2103-2121).
ccagaaggtacatataaca

SEQ ID NO: 62143 - DNA, 19 bp, Homo sapiens
  siRNA target sequence for FLJ35863 (NM_152604.1,263-281).
ctgagggatcagtgatgtt

SEQ ID NO: 62144 - DNA, 19 bp, Homo sapiens
  siRNA target sequence for FLJ35863 (NM_152604.1,265-283).
gagggatcagtgatgttca

SEQ ID NO: 62145 - DNA, 19 bp, Homo sapiens
  siRNA target sequence for FLJ35863 (NM_152604.1,504-522).
gtgtgaaaccaagttatta

SEQ ID NO: 62146 - DNA, 19 bp, Homo sapiens
  siRNA target sequence for FLJ35863 (NM_152604.1,564-582).
ggagataatgggacttaca

SEQ ID NO: 62147 - DNA, 19 bp, Homo sapiens
  siRNA target sequence for FLJ35863 (NM_152604.1,665-683).
ggcattttagtcaagaaat

SEQ ID NO: 62148 - DNA, 19 bp, Homo sapiens
  siRNA target sequence for FLJ35863 (NM_152604.1,895-913).
gttactcggcatctgaaaa

SEQ ID NO: 62149 - DNA, 19 bp, Homo sapiens
  siRNA target sequence for FLJ35863 (NM_152604.1,1155-1173).
gcatgcacgaattcataca

SEQ ID NO: 62150 - DNA, 19 bp, Homo sapiens
  siRNA target sequence for FLJ35863 (NM_152604.1,1637-1655).
gtagtggctcggatctcat

SEQ ID NO: 62151 - DNA, 19 bp, Homo sapiens
  siRNA target sequence for FLJ36040 (NM_173530.1,796-814).
gccggaaggaaaatttaca

SEQ ID NO: 62152 - DNA, 19 bp, Homo sapiens
  siRNA target sequence for FLJ36040 (NM_173530.1,823-841).
caagttgaaaagtttacaa

SEQ ID NO: 62153 - DNA, 19 bp, Homo sapiens
  siRNA target sequence for FLJ36040 (NM_173530.1,1177-1195).
gtgtttaatcgcaattcaa

SEQ ID NO: 62154 - DNA, 19 bp, Homo sapiens
  siRNA target sequence for FLJ36040 (NM_173530.1,1532-1550).
gccttatggcccatcttct

SEQ ID NO: 62155 - DNA, 19 bp, Homo sapiens
  siRNA target sequence for FLJ36040 (NM_173530.1,1533-1551).
ccttatggcccatcttcta

SEQ ID NO: 62156 - DNA, 19 bp, Homo sapiens
  siRNA target sequence for FLJ36040 (NM_173530.1,1603-1621).
gggcgcaaattatacctaa

SEQ ID NO: 62157 - DNA, 19 bp, Homo sapiens
  siRNA target sequence for FLJ36040 (NM_173530.1,1607-1625).
gcaaattatacctaaccaa

SEQ ID NO: 62158 - DNA, 19 bp, Homo sapiens
  siRNA target sequence for FLJ36040 (NM_173530.1,1734-1752).
gaattcactgcgtacctta

SEQ ID NO: 62159 - DNA, 19 bp, Homo sapiens
  siRNA target sequence for FLJ36040 (NM_173530.1,1739-1757).
cactgcgtaccttacagat

SEQ ID NO: 62160 - DNA, 19 bp, Homo sapiens
  siRNA target sequence for FLJ36040 (NM_173530.1,1744-1762).
cgtaccttacagatggaat

SEQ ID NO: 62161 - DNA, 19 bp, Homo sapiens
  siRNA target sequence for FLJ36754 (NM_173829.2,246-264).
ctccgagtagaccctaaaa

SEQ ID NO: 62162 - DNA, 19 bp, Homo sapiens
  siRNA target sequence for FLJ36754 (NM_173829.2,578-596).
gcattcttctacacctaat

SEQ ID NO: 62163 - DNA, 19 bp, Homo sapiens
  siRNA target sequence for FLJ36754 (NM_173829.2,579-597).
cattcttctacacctaata

SEQ ID NO: 62164 - DNA, 19 bp, Homo sapiens
  siRNA target sequence for FLJ36991 (NM_152477.1,413-431).
cctgatgtcgtctccttat

SEQ ID NO: 62165 - DNA, 19 bp, Homo sapiens
  siRNA target sequence for FLJ36991 (NM_152477.1,453-471).
ggatgattgcaaatgatgt

SEQ ID NO: 62166 - DNA, 19 bp, Homo sapiens
  siRNA target sequence for FLJ36991 (NM_152477.1,501-519).
ccaggtgtgagaaatttct

SEQ ID NO: 62167 - DNA, 19 bp, Homo sapiens
  siRNA target sequence for FLJ36991 (NM_152477.1,502-520).
caggtgtgagaaatttcta

SEQ ID NO: 62168 - DNA, 19 bp, Homo sapiens
  siRNA target sequence for FLJ36991 (NM_152477.1,504-522).
ggtgtgagaaatttctaca

SEQ ID NO: 62169 - DNA, 19 bp, Homo sapiens
  siRNA target sequence for FLJ36991 (NM_152477.1,536-554).
gaaatcggggcattcaact

SEQ ID NO: 62170 - DNA, 19 bp, Homo sapiens
  siRNA target sequence for FLJ36991 (NM_152477.1,545-563).
gcattcaactgggagataa

SEQ ID NO: 62171 - DNA, 19 bp, Homo sapiens
  siRNA target sequence for FLJ36991 (NM_152477.1,587-605).
ctggagggctccgatttta

SEQ ID NO: 62172 - DNA, 19 bp, Homo sapiens
  siRNA target sequence for FLJ36991 (NM_152477.1,589-607).
ggagggctccgattttaga

SEQ ID NO: 62173 - DNA, 19 bp, Homo sapiens
  siRNA target sequence for FLJ36991 (NM_152477.1,644-662).
gtcaatgaagagtgctatt

SEQ ID NO: 62174 - DNA, 19 bp, Homo sapiens
  siRNA target sequence for FLJ36991 (NM_152477.1,751-769).
gaaactgatggaatgtcat

SEQ ID NO: 62175 - DNA, 19 bp, Homo sapiens
  siRNA target sequence for FLJ36991 (NM_152477.1,956-974).
ggtcgtacatcagaactta

SEQ ID NO: 62176 - DNA, 19 bp, Homo sapiens
  siRNA target sequence for FLJ36991 (NM_152477.1,957-975).
gtcgtacatcagaacttat

SEQ ID NO: 62177 - DNA, 19 bp, Homo sapiens
  siRNA target sequence for FLJ38499 (NM_173797.2,351-369).
caacataataacttcttta

SEQ ID NO: 62178 - DNA, 19 bp, Homo sapiens
  siRNA target sequence for FLJ38499 (NM_173797.2,374-392).
gtcacctactgtttattca

SEQ ID NO: 62179 - DNA, 19 bp, Homo sapiens
  siRNA target sequence for FLJ38499 (NM_173797.2,402-420).
cttatagatgcacaattca

SEQ ID NO: 62180 - DNA, 19 bp, Homo sapiens
  siRNA target sequence for FLJ38499 (NM_173797.2,412-430).
cacaattcaactttcagaa

SEQ ID NO: 62181 - DNA, 19 bp, Homo sapiens
  siRNA target sequence for FLJ38499 (NM_173797.2,440-458).
gtctagagctgtgtcatta

SEQ ID NO: 62182 - DNA, 19 bp, Homo sapiens
  siRNA target sequence for FLJ38499 (NM_173797.2,442-460).
ctagagctgtgtcattaca

SEQ ID NO: 62183 - DNA, 19 bp, Homo sapiens
  siRNA target sequence for FLJ38499 (NM_173797.2,590-608).
ccaagagccaactgtagtt

SEQ ID NO: 62184 - DNA, 19 bp, Homo sapiens
  siRNA target sequence for FLJ38499 (NM_173797.2,591-609).
caagagccaactgtagtta

SEQ ID NO: 62185 - DNA, 19 bp, Homo sapiens
  siRNA target sequence for FLJ38499 (NM_173797.2,601-619).
ctgtagttaaccagatagt

SEQ ID NO: 62186 - DNA, 19 bp, Homo sapiens
  siRNA target sequence for FLJ38499 (NM_173797.2,630-648).
ggtgaacgaagatactcaa

SEQ ID NO: 62187 - DNA, 19 bp, Homo sapiens
  siRNA target sequence for FLJ38499 (NM_173797.2,654-672).
ccattgtttcatacacatt

SEQ ID NO: 62188 - DNA, 19 bp, Homo sapiens
  siRNA target sequence for FLJ38499 (NM_173797.2,702-720).
ccttttcgagaaattgcat

SEQ ID NO: 62189 - DNA, 19 bp, Homo sapiens
  siRNA target sequence for FLJ38499 (NM_173797.2,703-721).
cttttcgagaaattgcatt

SEQ ID NO: 62190 - DNA, 19 bp, Homo sapiens
  siRNA target sequence for FLJ38499 (NM_173797.2,750-768).
gaggccaaagataagttga

SEQ ID NO: 62191 - DNA, 19 bp, Homo sapiens
  siRNA target sequence for FLJ38499 (NM_173797.2,803-821).
gcagcaaataagtgattta

SEQ ID NO: 62192 - DNA, 19 bp, Homo sapiens
  siRNA target sequence for FLJ38499 (NM_173797.2,896-914).
ggttgggtcctctttaaat

SEQ ID NO: 62193 - DNA, 19 bp, Homo sapiens
  siRNA target sequence for FLJ38499 (NM_173797.2,900-918).
gggtcctctttaaatggat

SEQ ID NO: 62194 - DNA, 19 bp, Homo sapiens
  siRNA target sequence for FLJ38499 (NM_173797.2,929-947).
gagcagtgatggtgattta

SEQ ID NO: 62195 - DNA, 19 bp, Homo sapiens
  siRNA target sequence for FLJ38499 (NM_173797.2,973-991).
gtttttttcaggtaaatca

SEQ ID NO: 62196 - DNA, 19 bp, Homo sapiens
  siRNA target sequence for FLJ38499 (NM_173797.2,995-1013).
gactgaagcacggcatata

SEQ ID NO: 62197 - DNA, 19 bp, Homo sapiens
  siRNA target sequence for FLJ38499 (NM_173797.2,997-1015).
ctgaagcacggcatatact

SEQ ID NO: 62198 - DNA, 19 bp, Homo sapiens
  siRNA target sequence for FLJ38499 (NM_173797.2,999-1017).
gaagcacggcatatactca

SEQ ID NO: 62199 - DNA, 19 bp, Homo sapiens
  siRNA target sequence for FLJ38499 (NM_173797.2,1023-1041).
gtccataaacacttctgta

SEQ ID NO: 62200 - DNA, 19 bp, Homo sapiens
  siRNA target sequence for FLJ38499 (NM_173797.2,1026-1044).
cataaacacttctgtacta

SEQ ID NO: 62201 - DNA, 19 bp, Homo sapiens
  siRNA target sequence for FLJ38499 (NM_173797.2,1045-1063).
gactttcgggctacattga

SEQ ID NO: 62202 - DNA, 19 bp, Homo sapiens
  siRNA target sequence for FLJ38499 (NM_173797.2,1047-1065).
ctttcgggctacattgaga

SEQ ID NO: 62203 - DNA, 19 bp, Homo sapiens
  siRNA target sequence for FLJ38499 (NM_173797.2,1127-1145).
ggagtttgacttgaatgta

SEQ ID NO: 62204 - DNA, 19 bp, Homo sapiens
  siRNA target sequence for FLJ38499 (NM_173797.2,1216-1234).
cgttagtgctggtgattaa

SEQ ID NO: 62205 - DNA, 19 bp, Homo sapiens
  siRNA target sequence for FLJ38499 (NM_173797.2,1221-1239).
gtgctggtgattaagaagt

SEQ ID NO: 62206 - DNA, 19 bp, Homo sapiens
  siRNA target sequence for FLJ38499 (NM_173797.2,1240-1258).
gggcaagtcaccatcagat

SEQ ID NO: 62207 - DNA, 19 bp, Homo sapiens
  siRNA target sequence for FLJ38499 (NM_173797.2,1241-1259).
ggcaagtcaccatcagata

SEQ ID NO: 62208 - DNA, 19 bp, Homo sapiens
  siRNA target sequence for FLJ38499 (NM_173797.2,1242-1260).
gcaagtcaccatcagataa

SEQ ID NO: 62209 - DNA, 19 bp, Homo sapiens
  siRNA target sequence for FLJ38499 (NM_173797.2,1266-1284).
gccagtcgtggtactttaa

SEQ ID NO: 62210 - DNA, 19 bp, Homo sapiens
  siRNA target sequence for FLJ38499 (NM_173797.2,1279-1297).
ctttaagcagctatagtct

SEQ ID NO: 62211 - DNA, 19 bp, Homo sapiens
  siRNA target sequence for FLJ38499 (NM_173797.2,1288-1306).
gctatagtcttgtattgat

SEQ ID NO: 62212 - DNA, 19 bp, Homo sapiens
  siRNA target sequence for FLJ38499 (NM_173797.2,1375-1393).
cttttagtcctgctataca

SEQ ID NO: 62213 - DNA, 19 bp, Homo sapiens
  siRNA target sequence for FLJ38499 (NM_173797.2,1469-1487).
cttactgggctttcttaaa

SEQ ID NO: 62214 - DNA, 19 bp, Homo sapiens
  siRNA target sequence for FLJ38499 (NM_173797.2,1508-1526).
ctggaatagtcaaatgatt

SEQ ID NO: 62215 - DNA, 19 bp, Homo sapiens
  siRNA target sequence for FLJ38499 (NM_173797.2,1564-1582).
gtattgaatggagaaataa

SEQ ID NO: 62216 - DNA, 19 bp, Homo sapiens
  siRNA target sequence for FLJ38499 (NM_173797.2,1624-1642).
ccagagcagtgcacgaaaa

SEQ ID NO: 62217 - DNA, 19 bp, Homo sapiens
  siRNA target sequence for FLJ38499 (NM_173797.2,1627-1645).
gagcagtgcacgaaaagca

SEQ ID NO: 62218 - DNA, 19 bp, Homo sapiens
  siRNA target sequence for FLJ38499 (NM_173797.2,1653-1671).
gatatgatcaaggatcaat

SEQ ID NO: 62219 - DNA, 19 bp, Homo sapiens
  siRNA target sequence for FLJ38499 (NM_173797.2,1715-1733).
cagtatactacctgtaaga

SEQ ID NO: 62220 - DNA, 19 bp, Homo sapiens
  siRNA target sequence for FLJ90396 (NM_153358.1,281-299).
gggaagacccgaatgttga

SEQ ID NO: 62221 - DNA, 19 bp, Homo sapiens
  siRNA target sequence for FLJ90396 (NM_153358.1,282-300).
ggaagacccgaatgttgaa

SEQ ID NO: 62222 - DNA, 19 bp, Homo sapiens
  siRNA target sequence for FLJ90396 (NM_153358.1,288-306).
cccgaatgttgaagatcaa

SEQ ID NO: 62223 - DNA, 19 bp, Homo sapiens
  siRNA target sequence for FLJ90396 (NM_153358.1,309-327).
caaaaaccaaggacgaaat

SEQ ID NO: 62224 - DNA, 19 bp, Homo sapiens
  siRNA target sequence for FLJ90396 (NM_153358.1,315-333).
ccaaggacgaaatctaaga

SEQ ID NO: 62225 - DNA, 19 bp, Homo sapiens
  siRNA target sequence for FLJ90396 (NM_153358.1,316-334).
caaggacgaaatctaagaa

SEQ ID NO: 62226 - DNA, 19 bp, Homo sapiens
  siRNA target sequence for FLJ90396 (NM_153358.1,376-394).
caatgtgcagaaaacttca

SEQ ID NO: 62227 - DNA, 19 bp, Homo sapiens
  siRNA target sequence for FLJ90396 (NM_153358.1,420-438).
gactgccggagtaaaacca

SEQ ID NO: 62228 - DNA, 19 bp, Homo sapiens
  siRNA target sequence for FLJ90396 (NM_153358.1,507-525).
cactggatacgagctattt

SEQ ID NO: 62229 - DNA, 19 bp, Homo sapiens
  siRNA target sequence for FLJ90396 (NM_153358.1,511-529).
ggatacgagctatttgaga

SEQ ID NO: 62230 - DNA, 19 bp, Homo sapiens
  siRNA target sequence for FLJ90396 (NM_153358.1,512-530).
gatacgagctatttgagaa

SEQ ID NO: 62231 - DNA, 19 bp, Homo sapiens
  siRNA target sequence for FLJ90396 (NM_153358.1,900-918).
catttcccacacaagtgtt

SEQ ID NO: 62232 - DNA, 19 bp, Homo sapiens
  siRNA target sequence for FLJ90396 (NM_153358.1,906-924).
ccacacaagtgttctaaca

SEQ ID NO: 62233 - DNA, 19 bp, Homo sapiens
  siRNA target sequence for FLJ90396 (NM_153358.1,993-1011).
cagttttttacgagtacat

SEQ ID NO: 62234 - DNA, 19 bp, Homo sapiens
  siRNA target sequence for FLJ90396 (NM_153358.1,995-1013).
gttttttacgagtacatga

SEQ ID NO: 62235 - DNA, 19 bp, Homo sapiens
  siRNA target sequence for FLJ90396 (NM_153358.1,1079-1097).
cctccattcaaattcatga

SEQ ID NO: 62236 - DNA, 19 bp, Homo sapiens
  siRNA target sequence for FLJ90396 (NM_153358.1,1232-1250).
cctttagtagaatcagtta

SEQ ID NO: 62237 - DNA, 19 bp, Homo sapiens
  siRNA target sequence for FLJ90396 (NM_153358.1,1241-1259).
gaatcagttactttcgaat

SEQ ID NO: 62238 - DNA, 19 bp, Homo sapiens
  siRNA target sequence for FLJ90396 (NM_153358.1,1501-1519).
gcgttacgaacacatgaaa

SEQ ID NO: 62239 - DNA, 19 bp, Homo sapiens
  siRNA target sequence for FLJ90396 (NM_153358.1,1765-1783).
catacaagaattcacaatt

SEQ ID NO: 62240 - DNA, 19 bp, Homo sapiens
  siRNA target sequence for FLJ90396 (NM_153358.1,1826-1844).
gtgtgtccacatccttaaa

SEQ ID NO: 62241 - DNA, 19 bp, Homo sapiens
  siRNA target sequence for FLJ90430 (NM_178558.2,817-835).
ctggttctcagagcttatt

SEQ ID NO: 62242 - DNA, 19 bp, Homo sapiens
  siRNA target sequence for FLJ90430 (NM_178558.2,1575-1593).
ggcctgcaactcttgctaa

SEQ ID NO: 62243 - DNA, 19 bp, Homo sapiens
  siRNA target sequence for FLJ90430 (NM_178558.2,1576-1594).
gcctgcaactcttgctaat

SEQ ID NO: 62244 - DNA, 19 bp, Homo sapiens
  siRNA target sequence for FLJ90430 (NM_178558.2,1716-1734).
ctgaaaaatgcgacgataa

SEQ ID NO: 62245 - DNA, 19 bp, Homo sapiens
  siRNA target sequence for FLJ90430 (NM_178558.2,1718-1736).
gaaaaatgcgacgataatt

SEQ ID NO: 62246 - DNA, 19 bp, Homo sapiens
  siRNA target sequence for FLJ90430 (NM_178558.2,1725-1743).
gcgacgataattttgataa

SEQ ID NO: 62247 - DNA, 19 bp, Homo sapiens
  siRNA target sequence for FLJ90798 (NM_153367.1,662-680).
ctccataccagggcaaaaa

SEQ ID NO: 62248 - DNA, 19 bp, Homo sapiens
  siRNA target sequence for FLJ90798 (NM_153367.1,683-701).
gctgcttcggcgagtacaa

SEQ ID NO: 62249 - DNA, 19 bp, Homo sapiens
  siRNA target sequence for FLJ90798 (NM_153367.1,754-772).
gggcaggagtgcatcaagt

SEQ ID NO: 62250 - DNA, 19 bp, Homo sapiens
  siRNA target sequence for GPR65 (NM_003608.2,533-551).
gaacagcacatgtattgaa

SEQ ID NO: 62251 - DNA, 19 bp, Homo sapiens
  siRNA target sequence for GPR65 (NM_003608.2,536-554).
cagcacatgtattgaagaa

SEQ ID NO: 62252 - DNA, 19 bp, Homo sapiens
  siRNA target sequence for GPR65 (NM_003608.2,558-576).
catgacctggatcactatt

SEQ ID NO: 62253 - DNA, 19 bp, Homo sapiens
  siRNA target sequence for GPR65 (NM_003608.2,561-579).
gacctggatcactatttgt

SEQ ID NO: 62254 - DNA, 19 bp, Homo sapiens
  siRNA target sequence for GPR65 (NM_003608.2,678-696).
ggaatttacctcttcagtt

SEQ ID NO: 62255 - DNA, 19 bp, Homo sapiens
  siRNA target sequence for GPR65 (NM_003608.2,692-710).
cagtttgtcactatcagat

SEQ ID NO: 62256 - DNA, 19 bp, Homo sapiens
  siRNA target sequence for GPR65 (NM_003608.2,720-738).
gcattaactctccctttat

SEQ ID NO: 62257 - DNA, 19 bp, Homo sapiens
  siRNA target sequence for GPR65 (NM_003608.2,788-806).
gtgcaaagggagtgctttt

SEQ ID NO: 62258 - DNA, 19 bp, Homo sapiens
  siRNA target sequence for GPR65 (NM_003608.2,865-883).
ggtatttggctgttgtcta

SEQ ID NO: 62259 - DNA, 19 bp, Homo sapiens
  siRNA target sequence for GPR65 (NM_003608.2,902-920).
cctaaggacaagaagattt

SEQ ID NO: 62260 - DNA, 19 bp, Homo sapiens
  siRNA target sequence for GPR65 (NM_003608.2,1009-1027).
gcgatgccgaaaagtctaa

SEQ ID NO: 62261 - DNA, 19 bp, Homo sapiens
  siRNA target sequence for GPR65 (NM_003608.2,1010-1028).
cgatgccgaaaagtctaat

SEQ ID NO: 62262 - DNA, 19 bp, Homo sapiens
  siRNA target sequence for GPR65 (NM_003608.2,1011-1029).
gatgccgaaaagtctaatt

SEQ ID NO: 62263 - DNA, 19 bp, Homo sapiens
  siRNA target sequence for GPR65 (NM_003608.2,1093-1111).
cgtgtacaggctatgcaat

SEQ ID NO: 62264 - DNA, 19 bp, Homo sapiens
  siRNA target sequence for GPR65 (NM_003608.2,1094-1112).
gtgtacaggctatgcaata

SEQ ID NO: 62265 - DNA, 19 bp, Homo sapiens
  siRNA target sequence for GPR65 (NM_003608.2,1099-1117).
caggctatgcaataccttt

SEQ ID NO: 62266 - DNA, 19 bp, Homo sapiens
  siRNA target sequence for GPR65 (NM_003608.2,1152-1170).
caagctgtgcggcacaata

SEQ ID NO: 62267 - DNA, 19 bp, Homo sapiens
  siRNA target sequence for GPR65 (NM_003608.2,1304-1322).
cgaagaccacagcaattct

SEQ ID NO: 62268 - DNA, 19 bp, Homo sapiens
  siRNA target sequence for GPR65 (NM_003608.2,1323-1341).
gggaagcgaacttacacaa

SEQ ID NO: 62269 - DNA, 19 bp, Homo sapiens
  siRNA target sequence for GPR65 (NM_003608.2,1324-1342).
ggaagcgaacttacacaat

SEQ ID NO: 62270 - DNA, 19 bp, Homo sapiens
  siRNA target sequence for GPR65 (NM_003608.2,1328-1346).
gcgaacttacacaatgtat

SEQ ID NO: 62271 - DNA, 19 bp, Homo sapiens
  siRNA target sequence for GPR65 (NM_003608.2,1352-1370).
cacggttgcattaacaagt

SEQ ID NO: 62272 - DNA, 19 bp, Homo sapiens
  siRNA target sequence for GPR65 (NM_003608.2,1354-1372).
cggttgcattaacaagttt

SEQ ID NO: 62273 - DNA, 19 bp, Homo sapiens
  siRNA target sequence for GPR65 (NM_003608.2,1355-1373).
ggttgcattaacaagttta

SEQ ID NO: 62274 - DNA, 19 bp, Homo sapiens
  siRNA target sequence for GPR65 (NM_003608.2,1356-1374).
gttgcattaacaagtttaa

SEQ ID NO: 62275 - DNA, 19 bp, Homo sapiens
  siRNA target sequence for GPR65 (NM_003608.2,1359-1377).
gcattaacaagtttaaatt

SEQ ID NO: 62276 - DNA, 19 bp, Homo sapiens
  siRNA target sequence for GPR65 (NM_003608.2,1423-1441).
gatatgatatgtggaatat

SEQ ID NO: 62277 - DNA, 19 bp, Homo sapiens
  siRNA target sequence for GPR65 (NM_003608.2,1451-1469).
ctgcactgggaggtgtaat

SEQ ID NO: 62278 - DNA, 19 bp, Homo sapiens
  siRNA target sequence for GPR65 (NM_003608.2,1460-1478).
gaggtgtaatacatcacaa

SEQ ID NO: 62279 - DNA, 19 bp, Homo sapiens
  siRNA target sequence for GPR65 (NM_003608.2,1482-1500).
caaagaaaacgcatacttt

SEQ ID NO: 62280 - DNA, 19 bp, Homo sapiens
  siRNA target sequence for HEL308 (NM_133636.1,357-375).
cagattccccggaatgtct

SEQ ID NO: 62281 - DNA, 19 bp, Homo sapiens
  siRNA target sequence for HEL308 (NM_133636.1,440-458).
ggagaccagcctaatgaca

SEQ ID NO: 62282 - DNA, 19 bp, Homo sapiens
  siRNA target sequence for HEL308 (NM_133636.1,476-494).
ggtgactatgatagcttta

SEQ ID NO: 62283 - DNA, 19 bp, Homo sapiens
  siRNA target sequence for HEL308 (NM_133636.1,504-522).
cctttatagctcaagttga

SEQ ID NO: 62284 - DNA, 19 bp, Homo sapiens
  siRNA target sequence for HEL308 (NM_133636.1,521-539).
gacgacctggaacaaaaat

SEQ ID NO: 62285 - DNA, 19 bp, Homo sapiens
  siRNA target sequence for HEL308 (NM_133636.1,523-541).
cgacctggaacaaaaatat

SEQ ID NO: 62286 - DNA, 19 bp, Homo sapiens
  siRNA target sequence for HEL308 (NM_133636.1,524-542).
gacctggaacaaaaatata

SEQ ID NO: 62287 - DNA, 19 bp, Homo sapiens
  siRNA target sequence for HEL308 (NM_133636.1,633-651).
ccataggcaaccttactga

SEQ ID NO: 62288 - DNA, 19 bp, Homo sapiens
  siRNA target sequence for HEL308 (NM_133636.1,639-657).
gcaaccttactgaattaca

SEQ ID NO: 62289 - DNA, 19 bp, Homo sapiens
  siRNA target sequence for HEL308 (NM_133636.1,687-705).
gatatgaaggtgtcactat

SEQ ID NO: 62290 - DNA, 19 bp, Homo sapiens
  siRNA target sequence for HEL308 (NM_133636.1,738-756).
cttcctcacaggctatata

SEQ ID NO: 62291 - DNA, 19 bp, Homo sapiens
  siRNA target sequence for HEL308 (NM_133636.1,769-787).
gcagaactcttcaaatgat

SEQ ID NO: 62292 - DNA, 19 bp, Homo sapiens
  siRNA target sequence for HEL308 (NM_133636.1,809-827).
gaaagggattggaagtcat

SEQ ID NO: 62293 - DNA, 19 bp, Homo sapiens
  siRNA target sequence for HEL308 (NM_133636.1,848-866).
gaggaactgccccataatt

SEQ ID NO: 62294 - DNA, 19 bp, Homo sapiens
  siRNA target sequence for HEL308 (NM_133636.1,908-926).
gtcagaactagttcagata

SEQ ID NO: 62295 - DNA, 19 bp, Homo sapiens
  siRNA target sequence for HEL308 (NM_133636.1,1031-1049).
ctcctatctgaggaaatta

SEQ ID NO: 62296 - DNA, 19 bp, Homo sapiens
  siRNA target sequence for HEL308 (NM_133636.1,1033-1051).
cctatctgaggaaattaat

SEQ ID NO: 62297 - DNA, 19 bp, Homo sapiens
  siRNA target sequence for HEL308 (NM_133636.1,1087-1105).
ccttggtcctttttattca

SEQ ID NO: 62298 - DNA, 19 bp, Homo sapiens
  siRNA target sequence for HEL308 (NM_133636.1,1113-1131).
gcaaagtgagagaccttta

SEQ ID NO: 62299 - DNA, 19 bp, Homo sapiens
  siRNA target sequence for HEL308 (NM_133636.1,1141-1159).
caagggaattgaaaaatta

SEQ ID NO: 62300 - DNA, 19 bp, Homo sapiens
  siRNA target sequence for HEL308 (NM_133636.1,1228-1246).
gccaacaagtggtggaaaa

SEQ ID NO: 62301 - DNA, 19 bp, Homo sapiens
  siRNA target sequence for HEL308 (NM_133636.1,1249-1267).
cctcgtggctgagatttta

SEQ ID NO: 62302 - DNA, 19 bp, Homo sapiens
  siRNA target sequence for HEL308 (NM_133636.1,1250-1268).
ctcgtggctgagattttaa

SEQ ID NO: 62303 - DNA, 19 bp, Homo sapiens
  siRNA target sequence for HEL308 (NM_133636.1,1282-1300).
gctttgctgtcggaaagat

SEQ ID NO: 62304 - DNA, 19 bp, Homo sapiens
  siRNA target sequence for HEL308 (NM_133636.1,1287-1305).
gctgtcggaaagatgtttt

SEQ ID NO: 62305 - DNA, 19 bp, Homo sapiens
  siRNA target sequence for HEL308 (NM_133636.1,1290-1308).
gtcggaaagatgttttaat

SEQ ID NO: 62306 - DNA, 19 bp, Homo sapiens
  siRNA target sequence for HEL308 (NM_133636.1,1292-1310).
cggaaagatgttttaatga

SEQ ID NO: 62307 - DNA, 19 bp, Homo sapiens
  siRNA target sequence for HEL308 (NM_133636.1,1354-1372).
gtcaagttttggtatagaa

SEQ ID NO: 62308 - DNA, 19 bp, Homo sapiens
  siRNA target sequence for HEL308 (NM_133636.1,1381-1399).
ctttgttgaagaatatgct

SEQ ID NO: 62309 - DNA, 19 bp, Homo sapiens
  siRNA target sequence for HEL308 (NM_133636.1,1450-1468).
ctatattgccactattgaa

SEQ ID NO: 62310 - DNA, 19 bp, Homo sapiens
  siRNA target sequence for HEL308 (NM_133636.1,1483-1501).
ggtgaactccttgattgaa

SEQ ID NO: 62311 - DNA, 19 bp, Homo sapiens
  siRNA target sequence for HEL308 (NM_133636.1,1484-1502).
gtgaactccttgattgaaa

SEQ ID NO: 62312 - DNA, 19 bp, Homo sapiens
  siRNA target sequence for HEL308 (NM_133636.1,1486-1504).
gaactccttgattgaaact

SEQ ID NO: 62313 - DNA, 19 bp, Homo sapiens
  siRNA target sequence for HEL308 (NM_133636.1,1583-1601).
gaaatgaccctagcaaaaa

SEQ ID NO: 62314 - DNA, 19 bp, Homo sapiens
  siRNA target sequence for HEL308 (NM_133636.1,1644-1662).
caacattaaacaatgttga

SEQ ID NO: 62315 - DNA, 19 bp, Homo sapiens
  siRNA target sequence for HEL308 (NM_133636.1,1658-1676).
gttgaagacctacaaaagt

SEQ ID NO: 62316 - DNA, 19 bp, Homo sapiens
  siRNA target sequence for HEL308 (NM_133636.1,1688-1706).
gaatattataccagtcaat

SEQ ID NO: 62317 - DNA, 19 bp, Homo sapiens
  siRNA target sequence for HEL308 (NM_133636.1,1710-1728).
gaccagttgagttaaaaga

SEQ ID NO: 62318 - DNA, 19 bp, Homo sapiens
  siRNA target sequence for HEL308 (NM_133636.1,1718-1736).
gagttaaaagaatatctga

SEQ ID NO: 62319 - DNA, 19 bp, Homo sapiens
  siRNA target sequence for HEL308 (NM_133636.1,1786-1804).
gactttttcacgtcttctt

SEQ ID NO: 62320 - DNA, 19 bp, Homo sapiens
  siRNA target sequence for HEL308 (NM_133636.1,1818-1836).
ctgataccctaaaaaagat

SEQ ID NO: 62321 - DNA, 19 bp, Homo sapiens
  siRNA target sequence for HEL308 (NM_133636.1,1856-1874).
gcattggtgacagaagtta

SEQ ID NO: 62322 - DNA, 19 bp, Homo sapiens
  siRNA target sequence for HEL308 (NM_133636.1,2050-2068).
gcgcactatcccatttgga

SEQ ID NO: 62323 - DNA, 19 bp, Homo sapiens
  siRNA target sequence for HEL308 (NM_133636.1,2138-2156).
gtgctctgtctttttacct

SEQ ID NO: 62324 - DNA, 19 bp, Homo sapiens
  siRNA target sequence for HEL308 (NM_133636.1,2186-2204).
ctaccagctcgaagagtta

SEQ ID NO: 62325 - DNA, 19 bp, Homo sapiens
  siRNA target sequence for HEL308 (NM_133636.1,2190-2208).
cagctcgaagagttatttt

SEQ ID NO: 62326 - DNA, 19 bp, Homo sapiens
  siRNA target sequence for HEL308 (NM_133636.1,2211-2229).
gagctccctatgttgctaa

SEQ ID NO: 62327 - DNA, 19 bp, Homo sapiens
  siRNA target sequence for HEL308 (NM_133636.1,2222-2240).
gttgctaaggaatttttaa

SEQ ID NO: 62328 - DNA, 19 bp, Homo sapiens
  siRNA target sequence for HEL308 (NM_133636.1,2276-2294).
ggtcgtgctggaatagata

SEQ ID NO: 62329 - DNA, 19 bp, Homo sapiens
  siRNA target sequence for HEL308 (NM_133636.1,2279-2297).
cgtgctggaatagatacta

SEQ ID NO: 62330 - DNA, 19 bp, Homo sapiens
  siRNA target sequence for HEL308 (NM_133636.1,2280-2298).
gtgctggaatagatactat

SEQ ID NO: 62331 - DNA, 19 bp, Homo sapiens
  siRNA target sequence for HEL308 (NM_133636.1,2300-2318).
ggggagagtatcctcatat

SEQ ID NO: 62332 - DNA, 19 bp, Homo sapiens
  siRNA target sequence for HEL308 (NM_133636.1,2301-2319).
gggagagtatcctcatatt

SEQ ID NO: 62333 - DNA, 19 bp, Homo sapiens
  siRNA target sequence for HEL308 (NM_133636.1,2339-2357).
caggtattggagttaataa

SEQ ID NO: 62334 - DNA, 19 bp, Homo sapiens
  siRNA target sequence for HEL308 (NM_133636.1,2341-2359).
ggtattggagttaataact

SEQ ID NO: 62335 - DNA, 19 bp, Homo sapiens
  siRNA target sequence for HEL308 (NM_133636.1,2342-2360).
gtattggagttaataacta

SEQ ID NO: 62336 - DNA, 19 bp, Homo sapiens
  siRNA target sequence for HEL308 (NM_133636.1,2363-2381).
ccattggaaaactgttaca

SEQ ID NO: 62337 - DNA, 19 bp, Homo sapiens
  siRNA target sequence for HEL308 (NM_133636.1,2376-2394).
gttacagccatcttgttca

SEQ ID NO: 62338 - DNA, 19 bp, Homo sapiens
  siRNA target sequence for HEL308 (NM_133636.1,2404-2422).
caagggaatccaaacatta

SEQ ID NO: 62339 - DNA, 19 bp, Homo sapiens
  siRNA target sequence for HEL308 (NM_133636.1,2443-2461).
gaagattgcaacgaatctt

SEQ ID NO: 62340 - DNA, 19 bp, Homo sapiens
  siRNA target sequence for HEL308 (NM_133636.1,2451-2469).
caacgaatcttgatgacat

SEQ ID NO: 62341 - DNA, 19 bp, Homo sapiens
  siRNA target sequence for HEL308 (NM_133636.1,2459-2477).
cttgatgacatctatcatt

SEQ ID NO: 62342 - DNA, 19 bp, Homo sapiens
  siRNA target sequence for HEL308 (NM_133636.1,2465-2483).
gacatctatcatttcatga

SEQ ID NO: 62343 - DNA, 19 bp, Homo sapiens
  siRNA target sequence for HEL308 (NM_133636.1,2482-2500).
gaatggtacattttttggt

SEQ ID NO: 62344 - DNA, 19 bp, Homo sapiens
  siRNA target sequence for HEL308 (NM_133636.1,2498-2516).
ggtgttcagcaaaaggttt

SEQ ID NO: 62345 - DNA, 19 bp, Homo sapiens
  siRNA target sequence for HEL308 (NM_133636.1,2585-2603).
ctacaaaaagacactattt

SEQ ID NO: 62346 - DNA, 19 bp, Homo sapiens
  siRNA target sequence for HEL308 (NM_133636.1,2610-2628).
ctgaagaagaggtccaata

SEQ ID NO: 62347 - DNA, 19 bp, Homo sapiens
  siRNA target sequence for HEL308 (NM_133636.1,2620-2638).
ggtccaatataattttcat

SEQ ID NO: 62348 - DNA, 19 bp, Homo sapiens
  siRNA target sequence for HEL308 (NM_133636.1,2750-2768).
cttcatctaatctacctaa

SEQ ID NO: 62349 - DNA, 19 bp, Homo sapiens
  siRNA target sequence for HEL308 (NM_133636.1,2753-2771).
catctaatctacctaacaa

SEQ ID NO: 62350 - DNA, 19 bp, Homo sapiens
  siRNA target sequence for HEL308 (NM_133636.1,2764-2782).
cctaacaaccccctatgat

SEQ ID NO: 62351 - DNA, 19 bp, Homo sapiens
  siRNA target sequence for HEL308 (NM_133636.1,2801-2819).
cctgattggatgatatact

SEQ ID NO: 62352 - DNA, 19 bp, Homo sapiens
  siRNA target sequence for HEL308 (NM_133636.1,2802-2820).
ctgattggatgatatactt

SEQ ID NO: 62353 - DNA, 19 bp, Homo sapiens
  siRNA target sequence for HEL308 (NM_133636.1,2804-2822).
gattggatgatatacttca

SEQ ID NO: 62354 - DNA, 19 bp, Homo sapiens
  siRNA target sequence for HEL308 (NM_133636.1,2941-2959).
cgttgtcaacaggctatat

SEQ ID NO: 62355 - DNA, 19 bp, Homo sapiens
  siRNA target sequence for HEL308 (NM_133636.1,2945-2963).
gtcaacaggctatatctgt

SEQ ID NO: 62356 - DNA, 19 bp, Homo sapiens
  siRNA target sequence for HEL308 (NM_133636.1,2952-2970).
ggctatatctgtcttttgt

SEQ ID NO: 62357 - DNA, 19 bp, Homo sapiens
  siRNA target sequence for HEL308 (NM_133636.1,2984-3002).
ctcaaagagaccaacattt

SEQ ID NO: 62358 - DNA, 19 bp, Homo sapiens
  siRNA target sequence for HEL308 (NM_133636.1,3028-3046).
gcctcgaggatatatacaa

SEQ ID NO: 62359 - DNA, 19 bp, Homo sapiens
  siRNA target sequence for HEL308 (NM_133636.1,3029-3047).
cctcgaggatatatacaaa

SEQ ID NO: 62360 - DNA, 19 bp, Homo sapiens
  siRNA target sequence for HEL308 (NM_133636.1,3033-3051).
gaggatatatacaaaatct

SEQ ID NO: 62361 - DNA, 19 bp, Homo sapiens
  siRNA target sequence for HEL308 (NM_133636.1,3059-3077).
ggaactgcctcattctcat

SEQ ID NO: 62362 - DNA, 19 bp, Homo sapiens
  siRNA target sequence for HEL308 (NM_133636.1,3075-3093).
catcttgtgtgttacattt

SEQ ID NO: 62363 - DNA, 19 bp, Homo sapiens
  siRNA target sequence for HEL308 (NM_133636.1,3148-3166).
caagaagctgacttactgt

SEQ ID NO: 62364 - DNA, 19 bp, Homo sapiens
  siRNA target sequence for HEL308 (NM_133636.1,3214-3232).
gggtcgagcaaaacagtta

SEQ ID NO: 62365 - DNA, 19 bp, Homo sapiens
  siRNA target sequence for HEL308 (NM_133636.1,3215-3233).
ggtcgagcaaaacagttat

SEQ ID NO: 62366 - DNA, 19 bp, Homo sapiens
  siRNA target sequence for HEL308 (NM_133636.1,3216-3234).
gtcgagcaaaacagttata

SEQ ID NO: 62367 - DNA, 19 bp, Homo sapiens
  siRNA target sequence for HEL308 (NM_133636.1,3218-3236).
cgagcaaaacagttataca

SEQ ID NO: 62368 - DNA, 19 bp, Homo sapiens
  siRNA target sequence for HEL308 (NM_133636.1,3240-3258).
caggttacaaaagtctaat

SEQ ID NO: 62369 - DNA, 19 bp, Homo sapiens
  siRNA target sequence for HEL308 (NM_133636.1,3252-3270).
gtctaatgcacttagctaa

SEQ ID NO: 62370 - DNA, 19 bp, Homo sapiens
  siRNA target sequence for HEL308 (NM_133636.1,3259-3277).
gcacttagctaatgcaaat

SEQ ID NO: 62371 - DNA, 19 bp, Homo sapiens
  siRNA target sequence for HEL308 (NM_133636.1,3262-3280).
cttagctaatgcaaatcct

SEQ ID NO: 62372 - DNA, 19 bp, Homo sapiens
  siRNA target sequence for HEL308 (NM_133636.1,3289-3307).
cgtaaggacaattgatcat

SEQ ID NO: 62373 - DNA, 19 bp, Homo sapiens
  siRNA target sequence for HEL308 (NM_133636.1,3295-3313).
gacaattgatcatttatca

SEQ ID NO: 62374 - DNA, 19 bp, Homo sapiens
  siRNA target sequence for HEL308 (NM_133636.1,3349-3367).
gatgctgttgcatgaaaaa

SEQ ID NO: 62375 - DNA, 19 bp, Homo sapiens
  siRNA target sequence for HEL308 (NM_133636.1,3388-3406).
ggtagaagagttactaaga

SEQ ID NO: 62376 - DNA, 19 bp, Homo sapiens
  siRNA target sequence for HEL308 (NM_133636.1,3389-3407).
gtagaagagttactaagat

SEQ ID NO: 62377 - DNA, 19 bp, Homo sapiens
  siRNA target sequence for HELIC1 (NM_006828.1,60-78).
ggagccttgcgttcctttt

SEQ ID NO: 62378 - DNA, 19 bp, Homo sapiens
  siRNA target sequence for HELIC1 (NM_006828.1,69-87).
cgttccttttcaaatgtca

SEQ ID NO: 62379 - DNA, 19 bp, Homo sapiens
  siRNA target sequence for HELIC1 (NM_006828.1,84-102).
gtcaccaagcaagataatt

SEQ ID NO: 62380 - DNA, 19 bp, Homo sapiens
  siRNA target sequence for HELIC1 (NM_006828.1,89-107).
caagcaagataattataat

SEQ ID NO: 62381 - DNA, 19 bp, Homo sapiens
  siRNA target sequence for HELIC1 (NM_006828.1,128-146).
gataaagcgatctaaactt

SEQ ID NO: 62382 - DNA, 19 bp, Homo sapiens
  siRNA target sequence for HELIC1 (NM_006828.1,134-152).
gcgatctaaacttcatgaa

SEQ ID NO: 62383 - DNA, 19 bp, Homo sapiens
  siRNA target sequence for HELIC1 (NM_006828.1,147-165).
catgaacaagttttagatt

SEQ ID NO: 62384 - DNA, 19 bp, Homo sapiens
  siRNA target sequence for HELIC1 (NM_006828.1,272-290).
gcagatagttggaactgat

SEQ ID NO: 62385 - DNA, 19 bp, Homo sapiens
  siRNA target sequence for HELIC1 (NM_006828.1,273-291).
cagatagttggaactgata

SEQ ID NO: 62386 - DNA, 19 bp, Homo sapiens
  siRNA target sequence for HELIC1 (NM_006828.1,357-375).
gttggtcacaaggaaacaa

SEQ ID NO: 62387 - DNA, 19 bp, Homo sapiens
  siRNA target sequence for HELIC1 (NM_006828.1,373-391).
caaaggctatcaaacagat

SEQ ID NO: 62388 - DNA, 19 bp, Homo sapiens
  siRNA target sequence for HELIC1 (NM_006828.1,430-448).
gtaatgctactaatcgaat

SEQ ID NO: 62389 - DNA, 19 bp, Homo sapiens
  siRNA target sequence for HELIC1 (NM_006828.1,435-453).
gctactaatcgaattattt

SEQ ID NO: 62390 - DNA, 19 bp, Homo sapiens
  siRNA target sequence for HELIC1 (NM_006828.1,439-457).
ctaatcgaattatttctca

SEQ ID NO: 62391 - DNA, 19 bp, Homo sapiens
  siRNA target sequence for HELIC1 (NM_006828.1,507-525).
catggcgatagggtttttt

SEQ ID NO: 62392 - DNA, 19 bp, Homo sapiens
  siRNA target sequence for HELIC1 (NM_006828.1,512-530).
cgatagggttttttttggt

SEQ ID NO: 62393 - DNA, 19 bp, Homo sapiens
  siRNA target sequence for HELIC1 (NM_006828.1,584-602).
gccaataaatggtgaaact

SEQ ID NO: 62394 - DNA, 19 bp, Homo sapiens
  siRNA target sequence for HELIC1 (NM_006828.1,586-604).
caataaatggtgaaactca

SEQ ID NO: 62395 - DNA, 19 bp, Homo sapiens
  siRNA target sequence for HELIC1 (NM_006828.1,610-628).
ctataagcctagattataa

SEQ ID NO: 62396 - DNA, 19 bp, Homo sapiens
  siRNA target sequence for HELIC1 (NM_006828.1,616-634).
gcctagattataagaagtt

SEQ ID NO: 62397 - DNA, 19 bp, Homo sapiens
  siRNA target sequence for HELIC1 (NM_006828.1,617-635).
cctagattataagaagttt

SEQ ID NO: 62398 - DNA, 19 bp, Homo sapiens
  siRNA target sequence for HELIC1 (NM_006828.1,674-692).
caagcctgtggaaaaaaca

SEQ ID NO: 62399 - DNA, 19 bp, Homo sapiens
  siRNA target sequence for HELIC1 (NM_006828.1,709-727).
ggtgtgaagttgaaaagta

SEQ ID NO: 62400 - DNA, 19 bp, Homo sapiens
  siRNA target sequence for HELIC1 (NM_006828.1,752-770).
gactgaagtgccaagagta

SEQ ID NO: 62401 - DNA, 19 bp, Homo sapiens
  siRNA target sequence for HELIC1 (NM_006828.1,761-779).
gccaagagtagaagatctt

SEQ ID NO: 62402 - DNA, 19 bp, Homo sapiens
  siRNA target sequence for HELIC1 (NM_006828.1,774-792).
gatctttgctgtactttat

SEQ ID NO: 62403 - DNA, 19 bp, Homo sapiens
  siRNA target sequence for HELIC1 (NM_006828.1,781-799).
gctgtactttatatgatat

SEQ ID NO: 62404 - DNA, 19 bp, Homo sapiens
  siRNA target sequence for HELIC1 (NM_006828.1,784-802).
gtactttatatgatatgct

SEQ ID NO: 62405 - DNA, 19 bp, Homo sapiens
  siRNA target sequence for HELIC1 (NM_006828.1,854-872).
gggacctgaaggacttgaa

SEQ ID NO: 62406 - DNA, 19 bp, Homo sapiens
  siRNA target sequence for HELIC1 (NM_006828.1,864-882).
ggacttgaacttattgaga

SEQ ID NO: 62407 - DNA, 19 bp, Homo sapiens
  siRNA target sequence for HELIC1 (NM_006828.1,865-883).
gacttgaacttattgagaa

SEQ ID NO: 62408 - DNA, 19 bp, Homo sapiens
  siRNA target sequence for HELIC1 (NM_006828.1,885-903).
ctcctccagaacagaatta

SEQ ID NO: 62409 - DNA, 19 bp, Homo sapiens
  siRNA target sequence for HELIC1 (NM_006828.1,948-966).
caggctcttcaagacaatt

SEQ ID NO: 62410 - DNA, 19 bp, Homo sapiens
  siRNA target sequence for HELIC1 (NM_006828.1,950-968).
ggctcttcaagacaattgt

SEQ ID NO: 62411 - DNA, 19 bp, Homo sapiens
  siRNA target sequence for HELIC1 (NM_006828.1,1006-1024).
gttgtcaagtcactattca

SEQ ID NO: 62412 - DNA, 19 bp, Homo sapiens
  siRNA target sequence for HELIC1 (NM_006828.1,1016-1034).
cactattcagtctgaacaa

SEQ ID NO: 62413 - DNA, 19 bp, Homo sapiens
  siRNA target sequence for HELIC1 (NM_006828.1,1133-1151).
gtgctttgatcctaaggaa

SEQ ID NO: 62414 - DNA, 19 bp, Homo sapiens
  siRNA target sequence for HELIC1 (NM_006828.1,1216-1234).
gagatgcagacgttgaaaa

SEQ ID NO: 62415 - DNA, 19 bp, Homo sapiens
  siRNA target sequence for HELIC1 (NM_006828.1,1474-1492).
gaatccagtcaatagtgtt

SEQ ID NO: 62416 - DNA, 19 bp, Homo sapiens
  siRNA target sequence for HELIC1 (NM_006828.1,1500-1518).
gcctacaacaccaatgaga

SEQ ID NO: 62417 - DNA, 19 bp, Homo sapiens
  siRNA target sequence for HELIC1 (NM_006828.1,1581-1599).
catgaaattcgccaacatt

SEQ ID NO: 62418 - DNA, 19 bp, Homo sapiens
  siRNA target sequence for HELIC1 (NM_006828.1,1609-1627).
gtgttatcaaaaagaatga

SEQ ID NO: 62419 - DNA, 19 bp, Homo sapiens
  siRNA target sequence for HELIC1 (NM_006828.1,1742-1760).
gcagttgtccaaaagtgaa

SEQ ID NO: 62420 - DNA, 19 bp, Homo sapiens
  siRNA target sequence for HELIC1 (NM_006828.1,1792-1810).
cagaaaaatgggatgtagt

SEQ ID NO: 62421 - DNA, 19 bp, Homo sapiens
  siRNA target sequence for HELIC1 (NM_006828.1,1847-1865).
gattgtaaggctccttatt

SEQ ID NO: 62422 - DNA, 19 bp, Homo sapiens
  siRNA target sequence for HELIC1 (NM_006828.1,1859-1877).
ccttattcttgatgaagtt

SEQ ID NO: 62423 - DNA, 19 bp, Homo sapiens
  siRNA target sequence for HELIC1 (NM_006828.1,1916-1934).
catagttgcccgtacttta

SEQ ID NO: 62424 - DNA, 19 bp, Homo sapiens
  siRNA target sequence for HELIC1 (NM_006828.1,1951-1969).
cacagagtatgataaggat

SEQ ID NO: 62425 - DNA, 19 bp, Homo sapiens
  siRNA target sequence for HELIC1 (NM_006828.1,2001-2019).
ctcgatgttgccacatttt

SEQ ID NO: 62426 - DNA, 19 bp, Homo sapiens
  siRNA target sequence for HELIC1 (NM_006828.1,2003-2021).
cgatgttgccacattttta

SEQ ID NO: 62427 - DNA, 19 bp, Homo sapiens
  siRNA target sequence for HELIC1 (NM_006828.1,2138-2156).
ggatgaagtatgttatgaa

SEQ ID NO: 62428 - DNA, 19 bp, Homo sapiens
  siRNA target sequence for HELIC1 (NM_006828.1,2186-2204).
ccaggtgatggtgtttgta

SEQ ID NO: 62429 - DNA, 19 bp, Homo sapiens
  siRNA target sequence for HELIC1 (NM_006828.1,2208-2226).
gctcgaaatgccactgtaa

SEQ ID NO: 62430 - DNA, 19 bp, Homo sapiens
  siRNA target sequence for HELIC1 (NM_006828.1,2211-2229).
cgaaatgccactgtaagaa

SEQ ID NO: 62431 - DNA, 19 bp, Homo sapiens
  siRNA target sequence for HELIC1 (NM_006828.1,2324-2342).
ggtacaaaggtcgagaaat

SEQ ID NO: 62432 - DNA, 19 bp, Homo sapiens
  siRNA target sequence for HELIC1 (NM_006828.1,2396-2414).
gcttcggcaggacagaaat

SEQ ID NO: 62433 - DNA, 19 bp, Homo sapiens
  siRNA target sequence for HELIC1 (NM_006828.1,2397-2415).
cttcggcaggacagaaatt

SEQ ID NO: 62434 - DNA, 19 bp, Homo sapiens
  siRNA target sequence for HELIC1 (NM_006828.1,2434-2452).
ctaatgggcatatcaaagt

SEQ ID NO: 62435 - DNA, 19 bp, Homo sapiens
  siRNA target sequence for HELIC1 (NM_006828.1,2596-2614).
ctggacgaccacaatttga

SEQ ID NO: 62436 - DNA, 19 bp, Homo sapiens
  siRNA target sequence for HELIC1 (NM_006828.1,2598-2616).
ggacgaccacaatttgaca

SEQ ID NO: 62437 - DNA, 19 bp, Homo sapiens
  siRNA target sequence for HELIC1 (NM_006828.1,2601-2619).
cgaccacaatttgacaaat

SEQ ID NO: 62438 - DNA, 19 bp, Homo sapiens
  siRNA target sequence for HELIC1 (NM_006828.1,2602-2620).
gaccacaatttgacaaatt

SEQ ID NO: 62439 - DNA, 19 bp, Homo sapiens
  siRNA target sequence for HELIC1 (NM_006828.1,2682-2700).
caacgaaacccaattgaga

SEQ ID NO: 62440 - DNA, 19 bp, Homo sapiens
  siRNA target sequence for HELIC1 (NM_006828.1,2717-2735).
ccttgcagataacctaaat

SEQ ID NO: 62441 - DNA, 19 bp, Homo sapiens
  siRNA target sequence for HELIC1 (NM_006828.1,2776-2794).
cagtgaagtggataagtta

SEQ ID NO: 62442 - DNA, 19 bp, Homo sapiens
  siRNA target sequence for HELIC1 (NM_006828.1,2783-2801).
gtggataagttacacttat

SEQ ID NO: 62443 - DNA, 19 bp, Homo sapiens
  siRNA target sequence for HELIC1 (NM_006828.1,2785-2803).
ggataagttacacttatct

SEQ ID NO: 62444 - DNA, 19 bp, Homo sapiens
  siRNA target sequence for HELIC1 (NM_006828.1,2786-2804).
gataagttacacttatctt

SEQ ID NO: 62445 - DNA, 19 bp, Homo sapiens
  siRNA target sequence for HELIC1 (NM_006828.1,2816-2834).
gagagcaaatccattagca

SEQ ID NO: 62446 - DNA, 19 bp, Homo sapiens
  siRNA target sequence for HELIC1 (NM_006828.1,2818-2836).
gagcaaatccattagcata

SEQ ID NO: 62447 - DNA, 19 bp, Homo sapiens
  siRNA target sequence for HELIC1 (NM_006828.1,2859-2877).
cagattgacccaacattaa

SEQ ID NO: 62448 - DNA, 19 bp, Homo sapiens
  siRNA target sequence for HELIC1 (NM_006828.1,2878-2896).
gaaagcatcgagaacagtt

SEQ ID NO: 62449 - DNA, 19 bp, Homo sapiens
  siRNA target sequence for HELIC1 (NM_006828.1,2946-2964).
gaggagcgaactggatatt

SEQ ID NO: 62450 - DNA, 19 bp, Homo sapiens
  siRNA target sequence for HELIC1 (NM_006828.1,2948-2966).
ggagcgaactggatatttt

SEQ ID NO: 62451 - DNA, 19 bp, Homo sapiens
  siRNA target sequence for HELIC1 (NM_006828.1,2949-2967).
gagcgaactggatattttt

SEQ ID NO: 62452 - DNA, 19 bp, Homo sapiens
  siRNA target sequence for HELIC1 (NM_006828.1,2986-3004).
gaactgccagccattacta

SEQ ID NO: 62453 - DNA, 19 bp, Homo sapiens
  siRNA target sequence for HELIC1 (NM_006828.1,2989-3007).
ctgccagccattactatat

SEQ ID NO: 62454 - DNA, 19 bp, Homo sapiens
  siRNA target sequence for HELIC1 (NM_006828.1,2991-3009).
gccagccattactatatta

SEQ ID NO: 62455 - DNA, 19 bp, Homo sapiens
  siRNA target sequence for HELIC1 (NM_006828.1,2992-3010).
ccagccattactatattaa

SEQ ID NO: 62456 - DNA, 19 bp, Homo sapiens
  siRNA target sequence for HELIC1 (NM_006828.1,2997-3015).
cattactatattaaataca

SEQ ID NO: 62457 - DNA, 19 bp, Homo sapiens
  siRNA target sequence for HELIC1 (NM_006828.1,3017-3035).
caccattgagacctttaat

SEQ ID NO: 62458 - DNA, 19 bp, Homo sapiens
  siRNA target sequence for HELIC1 (NM_006828.1,3041-3059).
ctttgatgctcacaaaaca

SEQ ID NO: 62459 - DNA, 19 bp, Homo sapiens
  siRNA target sequence for HELIC1 (NM_006828.1,3125-3143).
ggaaatagaggagttagat

SEQ ID NO: 62460 - DNA, 19 bp, Homo sapiens
  siRNA target sequence for HELIC1 (NM_006828.1,3134-3152).
ggagttagataccttatta

SEQ ID NO: 62461 - DNA, 19 bp, Homo sapiens
  siRNA target sequence for HELIC1 (NM_006828.1,3141-3159).
gataccttattaagcaatt

SEQ ID NO: 62462 - DNA, 19 bp, Homo sapiens
  siRNA target sequence for HELIC1 (NM_006828.1,3177-3195).
cctggaggtgtagagaata

SEQ ID NO: 62463 - DNA, 19 bp, Homo sapiens
  siRNA target sequence for HELIC1 (NM_006828.1,3180-3198).
ggaggtgtagagaatagtt

SEQ ID NO: 62464 - DNA, 19 bp, Homo sapiens
  siRNA target sequence for HELIC1 (NM_006828.1,3301-3319).
gaattgtccgtgctctttt

SEQ ID NO: 62465 - DNA, 19 bp, Homo sapiens
  siRNA target sequence for HELIC1 (NM_006828.1,3306-3324).
gtccgtgctctttttgaaa

SEQ ID NO: 62466 - DNA, 19 bp, Homo sapiens
  siRNA target sequence for HELIC1 (NM_006828.1,3308-3326).
ccgtgctctttttgaaatt

SEQ ID NO: 62467 - DNA, 19 bp, Homo sapiens
  siRNA target sequence for HELIC1 (NM_006828.1,3355-3373).
cctacaggctcctgaatct

SEQ ID NO: 62468 - DNA, 19 bp, Homo sapiens
  siRNA target sequence for HELIC1 (NM_006828.1,3356-3374).
ctacaggctcctgaatctt

SEQ ID NO: 62469 - DNA, 19 bp, Homo sapiens
  siRNA target sequence for HELIC1 (NM_006828.1,3359-3377).
caggctcctgaatcttagt

SEQ ID NO: 62470 - DNA, 19 bp, Homo sapiens
  siRNA target sequence for HELIC1 (NM_006828.1,3361-3379).
ggctcctgaatcttagtaa

SEQ ID NO: 62471 - DNA, 19 bp, Homo sapiens
  siRNA target sequence for HELIC1 (NM_006828.1,3362-3380).
gctcctgaatcttagtaaa

SEQ ID NO: 62472 - DNA, 19 bp, Homo sapiens
  siRNA target sequence for HELIC1 (NM_006828.1,3435-3453).
ctaccaccacacatcctaa

SEQ ID NO: 62473 - DNA, 19 bp, Homo sapiens
  siRNA target sequence for HELIC1 (NM_006828.1,3438-3456).
ccaccacacatcctaacaa

SEQ ID NO: 62474 - DNA, 19 bp, Homo sapiens
  siRNA target sequence for HELIC1 (NM_006828.1,3551-3569).
ggtcaaacaatgtgttcat

SEQ ID NO: 62475 - DNA, 19 bp, Homo sapiens
  siRNA target sequence for HELIC1 (NM_006828.1,3567-3585).
catcagattccttctgtta

SEQ ID NO: 62476 - DNA, 19 bp, Homo sapiens
  siRNA target sequence for HELIC1 (NM_006828.1,3641-3659).
catctatgctgatttcact

SEQ ID NO: 62477 - DNA, 19 bp, Homo sapiens
  siRNA target sequence for HELIC1 (NM_006828.1,3687-3705).
ggagaaccttggtggattt

SEQ ID NO: 62478 - DNA, 19 bp, Homo sapiens
  siRNA target sequence for HELIC1 (NM_006828.1,3706-3724).
gggtagaagatcctacaaa

SEQ ID NO: 62479 - DNA, 19 bp, Homo sapiens
  siRNA target sequence for HELIC1 (NM_006828.1,3707-3725).
ggtagaagatcctacaaat

SEQ ID NO: 62480 - DNA, 19 bp, Homo sapiens
  siRNA target sequence for HELIC1 (NM_006828.1,3718-3736).
ctacaaatgatcatattta

SEQ ID NO: 62481 - DNA, 19 bp, Homo sapiens
  siRNA target sequence for HELIC1 (NM_006828.1,3786-3804).
gcccaactactggtattta

SEQ ID NO: 62482 - DNA, 19 bp, Homo sapiens
  siRNA target sequence for HELIC1 (NM_006828.1,3788-3806).
ccaactactggtatttaca

SEQ ID NO: 62483 - DNA, 19 bp, Homo sapiens
  siRNA target sequence for HELIC1 (NM_006828.1,3822-3840).
cctttgccttcccaatact

SEQ ID NO: 62484 - DNA, 19 bp, Homo sapiens
  siRNA target sequence for HELIC1 (NM_006828.1,3823-3841).
ctttgccttcccaatacta

SEQ ID NO: 62485 - DNA, 19 bp, Homo sapiens
  siRNA target sequence for HELIC1 (NM_006828.1,3845-3863).
ccgagcagtgtctgataga

SEQ ID NO: 62486 - DNA, 19 bp, Homo sapiens
  siRNA target sequence for HELIC1 (NM_006828.1,3846-3864).
cgagcagtgtctgatagat

SEQ ID NO: 62487 - DNA, 19 bp, Homo sapiens
  siRNA target sequence for HELIC1 (NM_006828.1,3873-3891).
gctgaggcagtatgtatta

SEQ ID NO: 62488 - DNA, 19 bp, Homo sapiens
  siRNA target sequence for HELIC1 (NM_006828.1,3893-3911).
caactttcaacatctaatt

SEQ ID NO: 62489 - DNA, 19 bp, Homo sapiens
  siRNA target sequence for HELIC1 (NM_006828.1,3896-3914).
ctttcaacatctaattcta

SEQ ID NO: 62490 - DNA, 19 bp, Homo sapiens
  siRNA target sequence for HELIC1 (NM_006828.1,3924-3942).
catcctcctcatacagaat

SEQ ID NO: 62491 - DNA, 19 bp, Homo sapiens
  siRNA target sequence for HELIC1 (NM_006828.1,3937-3955).
cagaattactggatcttca

SEQ ID NO: 62492 - DNA, 19 bp, Homo sapiens
  siRNA target sequence for HELIC1 (NM_006828.1,3973-3991).
ctttgggatgtaaagcata

SEQ ID NO: 62493 - DNA, 19 bp, Homo sapiens
  siRNA target sequence for HELIC1 (NM_006828.1,4052-4070).
gtatcacacggattgtaat

SEQ ID NO: 62494 - DNA, 19 bp, Homo sapiens
  siRNA target sequence for HELIC1 (NM_006828.1,4103-4121).
gactgttgcagctgaatta

SEQ ID NO: 62495 - DNA, 19 bp, Homo sapiens
  siRNA target sequence for HELIC1 (NM_006828.1,4185-4203).
gccctagtacgtgaaagaa

SEQ ID NO: 62496 - DNA, 19 bp, Homo sapiens
  siRNA target sequence for HELIC1 (NM_006828.1,4194-4212).
cgtgaaagaatggatgatt

SEQ ID NO: 62497 - DNA, 19 bp, Homo sapiens
  siRNA target sequence for HELIC1 (NM_006828.1,4206-4224).
gatgattggaaagttagaa

SEQ ID NO: 62498 - DNA, 19 bp, Homo sapiens
  siRNA target sequence for HELIC1 (NM_006828.1,4294-4312).
ccaaggctgaccttatcgt

SEQ ID NO: 62499 - DNA, 19 bp, Homo sapiens
  siRNA target sequence for HELIC1 (NM_006828.1,4381-4399).
ctattctcatcatagatga

SEQ ID NO: 62500 - DNA, 19 bp, Homo sapiens
  siRNA target sequence for HELIC1 (NM_006828.1,4442-4460).
cattgtatctcgaacaaat

SEQ ID NO: 62501 - DNA, 19 bp, Homo sapiens
  siRNA target sequence for HELIC1 (NM_006828.1,4446-4464).
gtatctcgaacaaatttta

SEQ ID NO: 62502 - DNA, 19 bp, Homo sapiens
  siRNA target sequence for HELIC1 (NM_006828.1,4452-4470).
cgaacaaattttatctcat

SEQ ID NO: 62503 - DNA, 19 bp, Homo sapiens
  siRNA target sequence for HELIC1 (NM_006828.1,4536-4554).
gctgattggctcaatatta

SEQ ID NO: 62504 - DNA, 19 bp, Homo sapiens
  siRNA target sequence for HELIC1 (NM_006828.1,4600-4618).
cactggaagttcacattca

SEQ ID NO: 62505 - DNA, 19 bp, Homo sapiens
  siRNA target sequence for HELIC1 (NM_006828.1,4642-4660).
gtcctcgtatggctagtat

SEQ ID NO: 62506 - DNA, 19 bp, Homo sapiens
  siRNA target sequence for HELIC1 (NM_006828.1,4644-4662).
cctcgtatggctagtatga

SEQ ID NO: 62507 - DNA, 19 bp, Homo sapiens
  siRNA target sequence for HELIC1 (NM_006828.1,4645-4663).
ctcgtatggctagtatgaa

SEQ ID NO: 62508 - DNA, 19 bp, Homo sapiens
  siRNA target sequence for HELIC1 (NM_006828.1,4647-4665).
cgtatggctagtatgaaca

SEQ ID NO: 62509 - DNA, 19 bp, Homo sapiens
  siRNA target sequence for HELIC1 (NM_006828.1,4698-4716).
ccagccaaacctgttttga

SEQ ID NO: 62510 - DNA, 19 bp, Homo sapiens
  siRNA target sequence for HELIC1 (NM_006828.1,4699-4717).
cagccaaacctgttttgat

SEQ ID NO: 62511 - DNA, 19 bp, Homo sapiens
  siRNA target sequence for HELIC1 (NM_006828.1,4701-4719).
gccaaacctgttttgatat

SEQ ID NO: 62512 - DNA, 19 bp, Homo sapiens
  siRNA target sequence for HELIC1 (NM_006828.1,4715-4733).
gatatttgtctcatcaaga

SEQ ID NO: 62513 - DNA, 19 bp, Homo sapiens
  siRNA target sequence for HELIC1 (NM_006828.1,4743-4761).
cgtcttactgctttggaat

SEQ ID NO: 62514 - DNA, 19 bp, Homo sapiens
  siRNA target sequence for HELIC1 (NM_006828.1,4788-4806).
gatccaaagcagtggttaa

SEQ ID NO: 62515 - DNA, 19 bp, Homo sapiens
  siRNA target sequence for HELIC1 (NM_006828.1,4829-4847).
gaacatcattgcaacagta

SEQ ID NO: 62516 - DNA, 19 bp, Homo sapiens
  siRNA target sequence for HELIC1 (NM_006828.1,4872-4890).
cttgctttcgggataggaa

SEQ ID NO: 62517 - DNA, 19 bp, Homo sapiens
  siRNA target sequence for HELIC1 (NM_006828.1,4913-4931).
gagggaccgaaaaacagta

SEQ ID NO: 62518 - DNA, 19 bp, Homo sapiens
  siRNA target sequence for HELIC1 (NM_006828.1,5004-5022).
ccagctcatttagtaatta

SEQ ID NO: 62519 - DNA, 19 bp, Homo sapiens
  siRNA target sequence for HELIC1 (NM_006828.1,5047-5065).
gaaaaacaagacgttatgt

SEQ ID NO: 62520 - DNA, 19 bp, Homo sapiens
  siRNA target sequence for HELIC1 (NM_006828.1,5053-5071).
caagacgttatgtggattt

SEQ ID NO: 62521 - DNA, 19 bp, Homo sapiens
  siRNA target sequence for HELIC1 (NM_006828.1,5129-5147).
ccaaggcaaagctgtaatt

SEQ ID NO: 62522 - DNA, 19 bp, Homo sapiens
  siRNA target sequence for HELIC1 (NM_006828.1,5140-5158).
ctgtaattctagttcatga

SEQ ID NO: 62523 - DNA, 19 bp, Homo sapiens
  siRNA target sequence for HELIC1 (NM_006828.1,5203-5221).
cagtagaatcaagtttatt

SEQ ID NO: 62524 - DNA, 19 bp, Homo sapiens
  siRNA target sequence for HELIC1 (NM_006828.1,5252-5270).
gattgctggtggtacaatt

SEQ ID NO: 62525 - DNA, 19 bp, Homo sapiens
  siRNA target sequence for HELIC1 (NM_006828.1,5256-5274).
gctggtggtacaattacat

SEQ ID NO: 62526 - DNA, 19 bp, Homo sapiens
  siRNA target sequence for HELIC1 (NM_006828.1,5259-5277).
ggtggtacaattacatcta

SEQ ID NO: 62527 - DNA, 19 bp, Homo sapiens
  siRNA target sequence for HELIC1 (NM_006828.1,5279-5297).
gcaagatgcattggattat

SEQ ID NO: 62528 - DNA, 19 bp, Homo sapiens
  siRNA target sequence for HELIC1 (NM_006828.1,5280-5298).
caagatgcattggattata

SEQ ID NO: 62529 - DNA, 19 bp, Homo sapiens
  siRNA target sequence for HELIC1 (NM_006828.1,5283-5301).
gatgcattggattatatca

SEQ ID NO: 62530 - DNA, 19 bp, Homo sapiens
  siRNA target sequence for HELIC1 (NM_006828.1,5318-5336).
ccgacgtcttatcatgaat

SEQ ID NO: 62531 - DNA, 19 bp, Homo sapiens
  siRNA target sequence for HELIC1 (NM_006828.1,5388-5406).
ctgtcccatctgattgaga

SEQ ID NO: 62532 - DNA, 19 bp, Homo sapiens
  siRNA target sequence for HELIC1 (NM_006828.1,5432-5450).
ctactgtattgaaattgga

SEQ ID NO: 62533 - DNA, 19 bp, Homo sapiens
  siRNA target sequence for HELIC1 (NM_006828.1,5453-5471).
ggataatcgcagcattgaa

SEQ ID NO: 62534 - DNA, 19 bp, Homo sapiens
  siRNA target sequence for HELIC1 (NM_006828.1,5462-5480).
cagcattgaacctctaact

SEQ ID NO: 62535 - DNA, 19 bp, Homo sapiens
  siRNA target sequence for HELIC1 (NM_006828.1,5464-5482).
gcattgaacctctaactta

SEQ ID NO: 62536 - DNA, 19 bp, Homo sapiens
  siRNA target sequence for HELIC1 (NM_006828.1,5484-5502).
ggccgaattgcctcctatt

SEQ ID NO: 62537 - DNA, 19 bp, Homo sapiens
  siRNA target sequence for HELIC1 (NM_006828.1,5485-5503).
gccgaattgcctcctatta

SEQ ID NO: 62538 - DNA, 19 bp, Homo sapiens
  siRNA target sequence for HELIC1 (NM_006828.1,5493-5511).
gcctcctattactatttga

SEQ ID NO: 62539 - DNA, 19 bp, Homo sapiens
  siRNA target sequence for HELIC1 (NM_006828.1,5510-5528).
gaagcatcaaacagttaaa

SEQ ID NO: 62540 - DNA, 19 bp, Homo sapiens
  siRNA target sequence for HELIC1 (NM_006828.1,5573-5591).
gctttcaattctaagtgat

SEQ ID NO: 62541 - DNA, 19 bp, Homo sapiens
  siRNA target sequence for HELIC1 (NM_006828.1,5618-5636).
gagacacaatgaagatcat

SEQ ID NO: 62542 - DNA, 19 bp, Homo sapiens
  siRNA target sequence for HELIC1 (NM_006828.1,5622-5640).
cacaatgaagatcatatga

SEQ ID NO: 62543 - DNA, 19 bp, Homo sapiens
  siRNA target sequence for HELIC1 (NM_006828.1,5644-5662).
gtgaactggcaaaatgtct

SEQ ID NO: 62544 - DNA, 19 bp, Homo sapiens
  siRNA target sequence for HELIC1 (NM_006828.1,5659-5677).
gtcttcccattgaatcaaa

SEQ ID NO: 62545 - DNA, 19 bp, Homo sapiens
  siRNA target sequence for HELIC1 (NM_006828.1,5670-5688).
gaatcaaatcctcattcat

SEQ ID NO: 62546 - DNA, 19 bp, Homo sapiens
  siRNA target sequence for HELIC1 (NM_006828.1,5909-5927).
ggactcttctcttcttaca

SEQ ID NO: 62547 - DNA, 19 bp, Homo sapiens
  siRNA target sequence for HELIC1 (NM_006828.1,5917-5935).
ctcttcttacactaccaaa

SEQ ID NO: 62548 - DNA, 19 bp, Homo sapiens
  siRNA target sequence for HELIC1 (NM_006828.1,6113-6131).
ggcatggaatttcttatct

SEQ ID NO: 62549 - DNA, 19 bp, Homo sapiens
  siRNA target sequence for HELIC1 (NM_006828.1,6134-6152).
cttgccagtgataaatgtt

SEQ ID NO: 62550 - DNA, 19 bp, Homo sapiens
  siRNA target sequence for HELIC1 (NM_006828.1,6169-6187).
gctcgtgggatgacttagt

SEQ ID NO: 62551 - DNA, 19 bp, Homo sapiens
  siRNA target sequence for HELIC1 (NM_006828.1,6170-6188).
ctcgtgggatgacttagtt

SEQ ID NO: 62552 - DNA, 19 bp, Homo sapiens
  siRNA target sequence for HELIC1 (NM_006828.1,6172-6190).
cgtgggatgacttagttga

SEQ ID NO: 62553 - DNA, 19 bp, Homo sapiens
  siRNA target sequence for HELIC1 (NM_006828.1,6173-6191).
gtgggatgacttagttgaa

SEQ ID NO: 62554 - DNA, 19 bp, Homo sapiens
  siRNA target sequence for HELIC1 (NM_006828.1,6226-6244).
cagacaaacgagatgacaa

SEQ ID NO: 62555 - DNA, 19 bp, Homo sapiens
  siRNA target sequence for HELIC1 (NM_006828.1,6260-6278).
gcatgctgaccaagagtat

SEQ ID NO: 62556 - DNA, 19 bp, Homo sapiens
  siRNA target sequence for HELIC1 (NM_006828.1,6372-6390).
gacgaaggatggtttttga

SEQ ID NO: 62557 - DNA, 19 bp, Homo sapiens
  siRNA target sequence for HELIC1 (NM_006828.1,6374-6392).
cgaaggatggtttttgata

SEQ ID NO: 62558 - DNA, 19 bp, Homo sapiens
  siRNA target sequence for HELIC1 (NM_006828.1,6433-6451).
gagtaggatatattcgaaa

SEQ ID NO: 62559 - DNA, 19 bp, Homo sapiens
  siRNA target sequence for HELIC1 (NM_006828.1,6439-6457).
gatatattcgaaatcatca

SEQ ID NO: 62560 - DNA, 19 bp, Homo sapiens
  siRNA target sequence for HELIC1 (NM_006828.1,6496-6514).
gaaggtatatctacacatt

SEQ ID NO: 62561 - DNA, 19 bp, Homo sapiens
  siRNA target sequence for HELIC1 (NM_006828.1,6552-6570).
cagtatgacatctatctca

SEQ ID NO: 62562 - DNA, 19 bp, Homo sapiens
  siRNA target sequence for HELIC1 (NM_006828.1,6558-6576).
gacatctatctcaacgtta

SEQ ID NO: 62563 - DNA, 19 bp, Homo sapiens
  siRNA target sequence for HELIC1 (NM_006828.1,6563-6581).
ctatctcaacgttacacaa

SEQ ID NO: 62564 - DNA, 19 bp, Homo sapiens
  siRNA target sequence for HELZ (NM_014877.1,179-197).
caagcatgtgaatcactta

SEQ ID NO: 62565 - DNA, 19 bp, Homo sapiens
  siRNA target sequence for HELZ (NM_014877.1,283-301).
gccttgtccattggaaata

SEQ ID NO: 62566 - DNA, 19 bp, Homo sapiens
  siRNA target sequence for HELZ (NM_014877.1,285-303).
cttgtccattggaaataga

SEQ ID NO: 62567 - DNA, 19 bp, Homo sapiens
  siRNA target sequence for HELZ (NM_014877.1,317-335).
gagagtcttctctacagaa

SEQ ID NO: 62568 - DNA, 19 bp, Homo sapiens
  siRNA target sequence for HELZ (NM_014877.1,319-337).
gagtcttctctacagaatt

SEQ ID NO: 62569 - DNA, 19 bp, Homo sapiens
  siRNA target sequence for HELZ (NM_014877.1,328-346).
ctacagaattgcctcattt

SEQ ID NO: 62570 - DNA, 19 bp, Homo sapiens
  siRNA target sequence for HELZ (NM_014877.1,522-540).
ggatggtaacaaaggattt

SEQ ID NO: 62571 - DNA, 19 bp, Homo sapiens
  siRNA target sequence for HELZ (NM_014877.1,526-544).
ggtaacaaaggatttgaca

SEQ ID NO: 62572 - DNA, 19 bp, Homo sapiens
  siRNA target sequence for HELZ (NM_014877.1,600-618).
gatatcacgtggaagactt

SEQ ID NO: 62573 - DNA, 19 bp, Homo sapiens
  siRNA target sequence for HELZ (NM_014877.1,623-641).
gaggggtcttgtaatggtt

SEQ ID NO: 62574 - DNA, 19 bp, Homo sapiens
  siRNA target sequence for HELZ (NM_014877.1,656-674).
ccacctaggggaatcacaa

SEQ ID NO: 62575 - DNA, 19 bp, Homo sapiens
  siRNA target sequence for HELZ (NM_014877.1,675-693).
gcagcgaggaatatacttt

SEQ ID NO: 62576 - DNA, 19 bp, Homo sapiens
  siRNA target sequence for HELZ (NM_014877.1,679-697).
cgaggaatatactttgtgt

SEQ ID NO: 62577 - DNA, 19 bp, Homo sapiens
  siRNA target sequence for HELZ (NM_014877.1,791-809).
gcttcacggctgataaaat

SEQ ID NO: 62578 - DNA, 19 bp, Homo sapiens
  siRNA target sequence for HELZ (NM_014877.1,882-900).
cattgtctcctgagaaagt

SEQ ID NO: 62579 - DNA, 19 bp, Homo sapiens
  siRNA target sequence for HELZ (NM_014877.1,942-960).
ctgacctgtcagttactgt

SEQ ID NO: 62580 - DNA, 19 bp, Homo sapiens
  siRNA target sequence for HELZ (NM_014877.1,953-971).
gttactgtcagcaccaaaa

SEQ ID NO: 62581 - DNA, 19 bp, Homo sapiens
  siRNA target sequence for HELZ (NM_014877.1,1024-1042).
gtatcgtgtagcattgctt

SEQ ID NO: 62582 - DNA, 19 bp, Homo sapiens
  siRNA target sequence for HELZ (NM_014877.1,1055-1073).
cgtcctcattttagtatca

SEQ ID NO: 62583 - DNA, 19 bp, Homo sapiens
  siRNA target sequence for HELZ (NM_014877.1,1056-1074).
gtcctcattttagtatcat

SEQ ID NO: 62584 - DNA, 19 bp, Homo sapiens
  siRNA target sequence for HELZ (NM_014877.1,1095-1113).
gtactacccaggtatcaca

SEQ ID NO: 62585 - DNA, 19 bp, Homo sapiens
  siRNA target sequence for HELZ (NM_014877.1,1159-1177).
ccaaaatggattagatcat

SEQ ID NO: 62586 - DNA, 19 bp, Homo sapiens
  siRNA target sequence for HELZ (NM_014877.1,1160-1178).
caaaatggattagatcatt

SEQ ID NO: 62587 - DNA, 19 bp, Homo sapiens
  siRNA target sequence for HELZ (NM_014877.1,1190-1208).
gtcgggatagcatttaaca

SEQ ID NO: 62588 - DNA, 19 bp, Homo sapiens
  siRNA target sequence for HELZ (NM_014877.1,1192-1210).
cgggatagcatttaacaca

SEQ ID NO: 62589 - DNA, 19 bp, Homo sapiens
  siRNA target sequence for HELZ (NM_014877.1,1221-1239).
gaacttttcgccaaaccat

SEQ ID NO: 62590 - DNA, 19 bp, Homo sapiens
  siRNA target sequence for HELZ (NM_014877.1,1230-1248).
gccaaaccatagttttcga

SEQ ID NO: 62591 - DNA, 19 bp, Homo sapiens
  siRNA target sequence for HELZ (NM_014877.1,1254-1272).
gattggaaccagtactcat

SEQ ID NO: 62592 - DNA, 19 bp, Homo sapiens
  siRNA target sequence for HELZ (NM_014877.1,1263-1281).
cagtactcatgcaaagagt

SEQ ID NO: 62593 - DNA, 19 bp, Homo sapiens
  siRNA target sequence for HELZ (NM_014877.1,1265-1283).
gtactcatgcaaagagtaa

SEQ ID NO: 62594 - DNA, 19 bp, Homo sapiens
  siRNA target sequence for HELZ (NM_014877.1,1268-1286).
ctcatgcaaagagtaatga

SEQ ID NO: 62595 - DNA, 19 bp, Homo sapiens
  siRNA target sequence for HELZ (NM_014877.1,1285-1303).
gattgatgcagcttctaca

SEQ ID NO: 62596 - DNA, 19 bp, Homo sapiens
  siRNA target sequence for HELZ (NM_014877.1,1299-1317).
ctacagaagatctcgaata

SEQ ID NO: 62597 - DNA, 19 bp, Homo sapiens
  siRNA target sequence for HELZ (NM_014877.1,1302-1320).
cagaagatctcgaatacct

SEQ ID NO: 62598 - DNA, 19 bp, Homo sapiens
  siRNA target sequence for HELZ (NM_014877.1,1339-1357).
gctagtaaccacagctaaa

SEQ ID NO: 62599 - DNA, 19 bp, Homo sapiens
  siRNA target sequence for HELZ (NM_014877.1,1343-1361).
gtaaccacagctaaacgtt

SEQ ID NO: 62600 - DNA, 19 bp, Homo sapiens
  siRNA target sequence for HELZ (NM_014877.1,1364-1382).
gattcttcctctaagacta

SEQ ID NO: 62601 - DNA, 19 bp, Homo sapiens
  siRNA target sequence for HELZ (NM_014877.1,1371-1389).
cctctaagactattataga

SEQ ID NO: 62602 - DNA, 19 bp, Homo sapiens
  siRNA target sequence for HELZ (NM_014877.1,1372-1390).
ctctaagactattatagat

SEQ ID NO: 62603 - DNA, 19 bp, Homo sapiens
  siRNA target sequence for HELZ (NM_014877.1,1397-1415).
cctaatgaaactactgatt

SEQ ID NO: 62604 - DNA, 19 bp, Homo sapiens
  siRNA target sequence for HELZ (NM_014877.1,1426-1444).
ccttcttatcagataccaa

SEQ ID NO: 62605 - DNA, 19 bp, Homo sapiens
  siRNA target sequence for HELZ (NM_014877.1,1458-1476).
ctgaccagctatttactca

SEQ ID NO: 62606 - DNA, 19 bp, Homo sapiens
  siRNA target sequence for HELZ (NM_014877.1,1473-1491).
ctcagtccgttttagacaa

SEQ ID NO: 62607 - DNA, 19 bp, Homo sapiens
  siRNA target sequence for HELZ (NM_014877.1,1475-1493).
cagtccgttttagacaaat

SEQ ID NO: 62608 - DNA, 19 bp, Homo sapiens
  siRNA target sequence for HELZ (NM_014877.1,1477-1495).
gtccgttttagacaaatca

SEQ ID NO: 62609 - DNA, 19 bp, Homo sapiens
  siRNA target sequence for HELZ (NM_014877.1,1479-1497).
ccgttttagacaaatcatt

SEQ ID NO: 62610 - DNA, 19 bp, Homo sapiens
  siRNA target sequence for HELZ (NM_014877.1,1510-1528).
ctatcagtcacggttacat

SEQ ID NO: 62611 - DNA, 19 bp, Homo sapiens
  siRNA target sequence for HELZ (NM_014877.1,1520-1538).
cggttacatgaccttcttt

SEQ ID NO: 62612 - DNA, 19 bp, Homo sapiens
  siRNA target sequence for HELZ (NM_014877.1,1521-1539).
ggttacatgaccttcttta

SEQ ID NO: 62613 - DNA, 19 bp, Homo sapiens
  siRNA target sequence for HELZ (NM_014877.1,1546-1564).
ggagatagcccagtataaa

SEQ ID NO: 62614 - DNA, 19 bp, Homo sapiens
  siRNA target sequence for HELZ (NM_014877.1,1671-1689).
gtcgctttaagcttactga

SEQ ID NO: 62615 - DNA, 19 bp, Homo sapiens
  siRNA target sequence for HELZ (NM_014877.1,1673-1691).
cgctttaagcttactgaaa

SEQ ID NO: 62616 - DNA, 19 bp, Homo sapiens
  siRNA target sequence for HELZ (NM_014877.1,1736-1754).
gtcaatgctgtttatttat

SEQ ID NO: 62617 - DNA, 19 bp, Homo sapiens
  siRNA target sequence for HELZ (NM_014877.1,1758-1776).
cagtccctaaacagaagtt

SEQ ID NO: 62618 - DNA, 19 bp, Homo sapiens
  siRNA target sequence for HELZ (NM_014877.1,1764-1782).
ctaaacagaagttagtaca

SEQ ID NO: 62619 - DNA, 19 bp, Homo sapiens
  siRNA target sequence for HELZ (NM_014877.1,1899-1917).
gtgacacacaggttgaact

SEQ ID NO: 62620 - DNA, 19 bp, Homo sapiens
  siRNA target sequence for HELZ (NM_014877.1,1919-1937).
cagtttcaattaaatcgat

SEQ ID NO: 62621 - DNA, 19 bp, Homo sapiens
  siRNA target sequence for HELZ (NM_014877.1,1921-1939).
gtttcaattaaatcgatta

SEQ ID NO: 62622 - DNA, 19 bp, Homo sapiens
  siRNA target sequence for HELZ (NM_014877.1,2056-2074).
gttggatcctcgactaaat

SEQ ID NO: 62623 - DNA, 19 bp, Homo sapiens
  siRNA target sequence for HELZ (NM_014877.1,2059-2077).
ggatcctcgactaaatgca

SEQ ID NO: 62624 - DNA, 19 bp, Homo sapiens
  siRNA target sequence for HELZ (NM_014877.1,2060-2078).
gatcctcgactaaatgcaa

SEQ ID NO: 62625 - DNA, 19 bp, Homo sapiens
  siRNA target sequence for HELZ (NM_014877.1,2090-2108).
gctgttctggccattacca

SEQ ID NO: 62626 - DNA, 19 bp, Homo sapiens
  siRNA target sequence for HELZ (NM_014877.1,2126-2144).
ctgccgcctgtgcttatca

SEQ ID NO: 62627 - DNA, 19 bp, Homo sapiens
  siRNA target sequence for HELZ (NM_014877.1,2206-2224).
gcaacaggagactaggatt

SEQ ID NO: 62628 - DNA, 19 bp, Homo sapiens
  siRNA target sequence for HELZ (NM_014877.1,2212-2230).
ggagactaggattctcatt

SEQ ID NO: 62629 - DNA, 19 bp, Homo sapiens
  siRNA target sequence for HELZ (NM_014877.1,2247-2265).
gtgctgctgatctctacat

SEQ ID NO: 62630 - DNA, 19 bp, Homo sapiens
  siRNA target sequence for HELZ (NM_014877.1,2249-2267).
gctgctgatctctacataa

SEQ ID NO: 62631 - DNA, 19 bp, Homo sapiens
  siRNA target sequence for HELZ (NM_014877.1,2250-2268).
ctgctgatctctacataaa

SEQ ID NO: 62632 - DNA, 19 bp, Homo sapiens
  siRNA target sequence for HELZ (NM_014877.1,2313-2331).
gacctctcagggtatattt

SEQ ID NO: 62633 - DNA, 19 bp, Homo sapiens
  siRNA target sequence for HELZ (NM_014877.1,2315-2333).
cctctcagggtatatttca

SEQ ID NO: 62634 - DNA, 19 bp, Homo sapiens
  siRNA target sequence for HELZ (NM_014877.1,2363-2381).
gttgtgcatcagtactgtt

SEQ ID NO: 62635 - DNA, 19 bp, Homo sapiens
  siRNA target sequence for HELZ (NM_014877.1,2366-2384).
gtgcatcagtactgtttga

SEQ ID NO: 62636 - DNA, 19 bp, Homo sapiens
  siRNA target sequence for HELZ (NM_014877.1,2369-2387).
catcagtactgtttgatct

SEQ ID NO: 62637 - DNA, 19 bp, Homo sapiens
  siRNA target sequence for HELZ (NM_014877.1,2372-2390).
cagtactgtttgatctcaa

SEQ ID NO: 62638 - DNA, 19 bp, Homo sapiens
  siRNA target sequence for HELZ (NM_014877.1,2442-2460).
gagtggtggttgttacctt

SEQ ID NO: 62639 - DNA, 19 bp, Homo sapiens
  siRNA target sequence for HELZ (NM_014877.1,2449-2467).
ggttgttaccttgaatact

SEQ ID NO: 62640 - DNA, 19 bp, Homo sapiens
  siRNA target sequence for HELZ (NM_014877.1,2450-2468).
gttgttaccttgaatactt

SEQ ID NO: 62641 - DNA, 19 bp, Homo sapiens
  siRNA target sequence for HELZ (NM_014877.1,2542-2560).
catggagtgtgaaaccatt

SEQ ID NO: 62642 - DNA, 19 bp, Homo sapiens
  siRNA target sequence for HELZ (NM_014877.1,2556-2574).
ccattatgcctctagcatt

SEQ ID NO: 62643 - DNA, 19 bp, Homo sapiens
  siRNA target sequence for HELZ (NM_014877.1,2557-2575).
cattatgcctctagcatta

SEQ ID NO: 62644 - DNA, 19 bp, Homo sapiens
  siRNA target sequence for HELZ (NM_014877.1,2570-2588).
gcattagcaactcaaaaca

SEQ ID NO: 62645 - DNA, 19 bp, Homo sapiens
  siRNA target sequence for HELZ (NM_014877.1,2582-2600).
caaaacactcggattgtct

SEQ ID NO: 62646 - DNA, 19 bp, Homo sapiens
  siRNA target sequence for HELZ (NM_014877.1,2749-2767).
ccatgaagctatcatcaat

SEQ ID NO: 62647 - DNA, 19 bp, Homo sapiens
  siRNA target sequence for HELZ (NM_014877.1,2750-2768).
catgaagctatcatcaatt

SEQ ID NO: 62648 - DNA, 19 bp, Homo sapiens
  siRNA target sequence for HELZ (NM_014877.1,2933-2951).
cgtgtagaagagttaagaa

SEQ ID NO: 62649 - DNA, 19 bp, Homo sapiens
  siRNA target sequence for HELZ (NM_014877.1,2967-2985).
cgtgggggaagttagatga

SEQ ID NO: 62650 - DNA, 19 bp, Homo sapiens
  siRNA target sequence for HELZ (NM_014877.1,3006-3024).
ctccatatgctgatcaagt

SEQ ID NO: 62651 - DNA, 19 bp, Homo sapiens
  siRNA target sequence for HELZ (NM_014877.1,3009-3027).
catatgctgatcaagtgtt

SEQ ID NO: 62652 - DNA, 19 bp, Homo sapiens
  siRNA target sequence for HELZ (NM_014877.1,3015-3033).
ctgatcaagtgtttagaat

SEQ ID NO: 62653 - DNA, 19 bp, Homo sapiens
  siRNA target sequence for HELZ (NM_014877.1,3035-3053).
cgtgctgaacttcgaaaaa

SEQ ID NO: 62654 - DNA, 19 bp, Homo sapiens
  siRNA target sequence for HELZ (NM_014877.1,3044-3062).
cttcgaaaaaagagattat

SEQ ID NO: 62655 - DNA, 19 bp, Homo sapiens
  siRNA target sequence for HELZ (NM_014877.1,3099-3117).
gaaagcaattcagagtttt

SEQ ID NO: 62656 - DNA, 19 bp, Homo sapiens
  siRNA target sequence for HELZ (NM_014877.1,3127-3145).
cacagtacgtacaagacat

SEQ ID NO: 62657 - DNA, 19 bp, Homo sapiens
  siRNA target sequence for HELZ (NM_014877.1,3131-3149).
gtacgtacaagacatactt

SEQ ID NO: 62658 - DNA, 19 bp, Homo sapiens
  siRNA target sequence for HELZ (NM_014877.1,3134-3152).
cgtacaagacatacttgta

SEQ ID NO: 62659 - DNA, 19 bp, Homo sapiens
  siRNA target sequence for HELZ (NM_014877.1,3135-3153).
gtacaagacatacttgtaa

SEQ ID NO: 62660 - DNA, 19 bp, Homo sapiens
  siRNA target sequence for HELZ (NM_014877.1,3206-3224).
gaggacttagattatggtt

SEQ ID NO: 62661 - DNA, 19 bp, Homo sapiens
  siRNA target sequence for HELZ (NM_014877.1,3215-3233).
gattatggttttttatcta

SEQ ID NO: 62662 - DNA, 19 bp, Homo sapiens
  siRNA target sequence for HELZ (NM_014877.1,3221-3239).
ggttttttatctaactaca

SEQ ID NO: 62663 - DNA, 19 bp, Homo sapiens
  siRNA target sequence for HELZ (NM_014877.1,3231-3249).
ctaactacaagcttctcaa

SEQ ID NO: 62664 - DNA, 19 bp, Homo sapiens
  siRNA target sequence for HELZ (NM_014877.1,3405-3423).
cccagttagaggctttaga

SEQ ID NO: 62665 - DNA, 19 bp, Homo sapiens
  siRNA target sequence for HELZ (NM_014877.1,3409-3427).
gttagaggctttagaacta

SEQ ID NO: 62666 - DNA, 19 bp, Homo sapiens
  siRNA target sequence for HELZ (NM_014877.1,3413-3431).
gaggctttagaactaaaga

SEQ ID NO: 62667 - DNA, 19 bp, Homo sapiens
  siRNA target sequence for HELZ (NM_014877.1,3450-3468).
cgctggcacctgaatttat

SEQ ID NO: 62668 - DNA, 19 bp, Homo sapiens
  siRNA target sequence for HELZ (NM_014877.1,3589-3607).
gcccaatccttctgtactt

SEQ ID NO: 62669 - DNA, 19 bp, Homo sapiens
  siRNA target sequence for HELZ (NM_014877.1,3590-3608).
cccaatccttctgtactta

SEQ ID NO: 62670 - DNA, 19 bp, Homo sapiens
  siRNA target sequence for HELZ (NM_014877.1,3602-3620).
gtacttattggcaatccta

SEQ ID NO: 62671 - DNA, 19 bp, Homo sapiens
  siRNA target sequence for HELZ (NM_014877.1,3647-3665).
cttggacctcacccaaatt

SEQ ID NO: 62672 - DNA, 19 bp, Homo sapiens
  siRNA target sequence for HELZ (NM_014877.1,3678-3696).
caagccctgttcaaagaat

SEQ ID NO: 62673 - DNA, 19 bp, Homo sapiens
  siRNA target sequence for HELZ (NM_014877.1,3706-3724).
cactgggacaagtattctt

SEQ ID NO: 62674 - DNA, 19 bp, Homo sapiens
  siRNA target sequence for HELZ (NM_014877.1,3739-3757).
ctatggagggaatgtagtt

SEQ ID NO: 62675 - DNA, 19 bp, Homo sapiens
  siRNA target sequence for HELZ (NM_014877.1,3806-3824).
gcagttgatcctcgaatta

SEQ ID NO: 62676 - DNA, 19 bp, Homo sapiens
  siRNA target sequence for HELZ (NM_014877.1,3807-3825).
cagttgatcctcgaattat

SEQ ID NO: 62677 - DNA, 19 bp, Homo sapiens
  siRNA target sequence for HELZ (NM_014877.1,3809-3827).
gttgatcctcgaattatta

SEQ ID NO: 62678 - DNA, 19 bp, Homo sapiens
  siRNA target sequence for HELZ (NM_014877.1,3837-3855).
cagcaatggcctataacat

SEQ ID NO: 62679 - DNA, 19 bp, Homo sapiens
  siRNA target sequence for HELZ (NM_014877.1,3840-3858).
caatggcctataacatgaa

SEQ ID NO: 62680 - DNA, 19 bp, Homo sapiens
  siRNA target sequence for HELZ (NM_014877.1,3845-3863).
gcctataacatgaacctat

SEQ ID NO: 62681 - DNA, 19 bp, Homo sapiens
  siRNA target sequence for HELZ (NM_014877.1,3846-3864).
cctataacatgaacctatt

SEQ ID NO: 62682 - DNA, 19 bp, Homo sapiens
  siRNA target sequence for HELZ (NM_014877.1,3878-3896).
cgaggatctcctattcctt

SEQ ID NO: 62683 - DNA, 19 bp, Homo sapiens
  siRNA target sequence for HELZ (NM_014877.1,3879-3897).
gaggatctcctattcctta

SEQ ID NO: 62684 - DNA, 19 bp, Homo sapiens
  siRNA target sequence for HELZ (NM_014877.1,3924-3942).
ccataggccagccacaaaa

SEQ ID NO: 62685 - DNA, 19 bp, Homo sapiens
  siRNA target sequence for HELZ (NM_014877.1,3968-3986).
gagcaaaatcgaaatggta

SEQ ID NO: 62686 - DNA, 19 bp, Homo sapiens
  siRNA target sequence for HELZ (NM_014877.1,4024-4042).
gattcgaacaccagagaaa

SEQ ID NO: 62687 - DNA, 19 bp, Homo sapiens
  siRNA target sequence for HELZ (NM_014877.1,4104-4122).
cacgtcctagtgttgttta

SEQ ID NO: 62688 - DNA, 19 bp, Homo sapiens
  siRNA target sequence for HELZ (NM_014877.1,4132-4150).
caaatttcctcgcaaagat

SEQ ID NO: 62689 - DNA, 19 bp, Homo sapiens
  siRNA target sequence for HELZ (NM_014877.1,4139-4157).
cctcgcaaagataatctca

SEQ ID NO: 62690 - DNA, 19 bp, Homo sapiens
  siRNA target sequence for HELZ (NM_014877.1,4154-4172).
ctcaacccaagacacataa

SEQ ID NO: 62691 - DNA, 19 bp, Homo sapiens
  siRNA target sequence for HELZ (NM_014877.1,4191-4209).
cccacgcacagtatgcaat

SEQ ID NO: 62692 - DNA, 19 bp, Homo sapiens
  siRNA target sequence for HELZ (NM_014877.1,4268-4286).
cagcagcacaccttgttaa

SEQ ID NO: 62693 - DNA, 19 bp, Homo sapiens
  siRNA target sequence for HELZ (NM_014877.1,4270-4288).
gcagcacaccttgttaaat

SEQ ID NO: 62694 - DNA, 19 bp, Homo sapiens
  siRNA target sequence for HELZ (NM_014877.1,4297-4315).
gaataatttgcctgaacaa

SEQ ID NO: 62695 - DNA, 19 bp, Homo sapiens
  siRNA target sequence for HELZ (NM_014877.1,4425-4443).
ccaacaatgctttttttaa

SEQ ID NO: 62696 - DNA, 19 bp, Homo sapiens
  siRNA target sequence for HELZ (NM_014877.1,4572-4590).
cttcacatctgaatagctt

SEQ ID NO: 62697 - DNA, 19 bp, Homo sapiens
  siRNA target sequence for HELZ (NM_014877.1,4600-4618).
gaacccctcgggattacct

SEQ ID NO: 62698 - DNA, 19 bp, Homo sapiens
  siRNA target sequence for HELZ (NM_014877.1,4617-4635).
ctataggggaggctttaga

SEQ ID NO: 62699 - DNA, 19 bp, Homo sapiens
  siRNA target sequence for HELZ (NM_014877.1,4623-4641).
gggaggctttagatcgtat

SEQ ID NO: 62700 - DNA, 19 bp, Homo sapiens
  siRNA target sequence for HELZ (NM_014877.1,4624-4642).
ggaggctttagatcgtata

SEQ ID NO: 62701 - DNA, 19 bp, Homo sapiens
  siRNA target sequence for HELZ (NM_014877.1,4627-4645).
ggctttagatcgtatacat

SEQ ID NO: 62702 - DNA, 19 bp, Homo sapiens
  siRNA target sequence for HELZ (NM_014877.1,4833-4851).
gcagtgccgaagatgaagt

SEQ ID NO: 62703 - DNA, 19 bp, Homo sapiens
  siRNA target sequence for HELZ (NM_014877.1,4855-4873).
gaccacatactcaaggttt

SEQ ID NO: 62704 - DNA, 19 bp, Homo sapiens
  siRNA target sequence for HELZ (NM_014877.1,4858-4876).
cacatactcaaggtttcaa

SEQ ID NO: 62705 - DNA, 19 bp, Homo sapiens
  siRNA target sequence for HELZ (NM_014877.1,4892-4910).
ctgtctcatcgtgatcaaa

SEQ ID NO: 62706 - DNA, 19 bp, Homo sapiens
  siRNA target sequence for HELZ (NM_014877.1,4894-4912).
gtctcatcgtgatcaaagt

SEQ ID NO: 62707 - DNA, 19 bp, Homo sapiens
  siRNA target sequence for HELZ (NM_014877.1,4941-4959).
cacctcaatcaagactttt

SEQ ID NO: 62708 - DNA, 19 bp, Homo sapiens
  siRNA target sequence for HELZ (NM_014877.1,5035-5053).
cttttctaactttaatgat

SEQ ID NO: 62709 - DNA, 19 bp, Homo sapiens
  siRNA target sequence for HELZ (NM_014877.1,5056-5074).
cagcagagacattgaagta

SEQ ID NO: 62710 - DNA, 19 bp, Homo sapiens
  siRNA target sequence for HELZ (NM_014877.1,5187-5205).
gagcatggacttttgctaa

SEQ ID NO: 62711 - DNA, 19 bp, Homo sapiens
  siRNA target sequence for HELZ (NM_014877.1,5190-5208).
catggacttttgctaactt

SEQ ID NO: 62712 - DNA, 19 bp, Homo sapiens
  siRNA target sequence for HELZ (NM_014877.1,5274-5292).
cgcagaacccttttgtaca

SEQ ID NO: 62713 - DNA, 19 bp, Homo sapiens
  siRNA target sequence for HELZ (NM_014877.1,5326-5344).
gccatttcacccattgtca

SEQ ID NO: 62714 - DNA, 19 bp, Homo sapiens
  siRNA target sequence for HELZ (NM_014877.1,5327-5345).
ccatttcacccattgtcat

SEQ ID NO: 62715 - DNA, 19 bp, Homo sapiens
  siRNA target sequence for HELZ (NM_014877.1,5341-5359).
gtcatctcgaacagtatct

SEQ ID NO: 62716 - DNA, 19 bp, Homo sapiens
  siRNA target sequence for HELZ (NM_014877.1,5367-5385).
cgctccctagcttagaaga

SEQ ID NO: 62717 - DNA, 19 bp, Homo sapiens
  siRNA target sequence for HELZ (NM_014877.1,5405-5423).
ggtcggcccttgtaccaaa

SEQ ID NO: 62718 - DNA, 19 bp, Homo sapiens
  siRNA target sequence for HELZ (NM_014877.1,5482-5500).
cagtctggctcagtgtaaa

SEQ ID NO: 62719 - DNA, 19 bp, Homo sapiens
  siRNA target sequence for HELZ (NM_014877.1,5484-5502).
gtctggctcagtgtaaaga

SEQ ID NO: 62720 - DNA, 19 bp, Homo sapiens
  siRNA target sequence for HELZ (NM_014877.1,5512-5530).
ccacagtaaccaatcttct

SEQ ID NO: 62721 - DNA, 19 bp, Homo sapiens
  siRNA target sequence for HELZ (NM_014877.1,5546-5564).
ccggagtcctgggtaaaca

SEQ ID NO: 62722 - DNA, 19 bp, Homo sapiens
  siRNA target sequence for HELZ (NM_014877.1,5745-5763).
caccccttatgcctaacaa

SEQ ID NO: 62723 - DNA, 19 bp, Homo sapiens
  siRNA target sequence for HELZ (NM_014877.1,5771-5789).
gcggagtcggccaatagca

SEQ ID NO: 62724 - DNA, 19 bp, Homo sapiens
  siRNA target sequence for HELZ (NM_014877.1,5876-5894).
gagcaggccaagaagagta

SEQ ID NO: 62725 - DNA, 19 bp, Homo sapiens
  siRNA target sequence for HELZ (NM_014877.1,5946-5964).
gcaatggcttttactcata

SEQ ID NO: 62726 - DNA, 19 bp, Homo sapiens
  siRNA target sequence for HNRNPG-T (NM_014469.2,305-323).
gcaagtccctggatggtaa

SEQ ID NO: 62727 - DNA, 19 bp, Homo sapiens
  siRNA target sequence for HNRNPG-T (NM_014469.2,896-914).
gtgactacggggatcatct

SEQ ID NO: 62728 - DNA, 19 bp, Homo sapiens
  siRNA target sequence for HNRNPG-T (NM_014469.2,1065-1083).
cagttacagcagcagttat

SEQ ID NO: 62729 - DNA, 19 bp, Homo sapiens
  siRNA target sequence for HRB2 (NM_007043.5,50-68).
gcgctggaaaaagtgaatt

SEQ ID NO: 62730 - DNA, 19 bp, Homo sapiens
  siRNA target sequence for HRB2 (NM_007043.5,51-69).
cgctggaaaaagtgaattt

SEQ ID NO: 62731 - DNA, 19 bp, Homo sapiens
  siRNA target sequence for HRB2 (NM_007043.5,188-206).
gcagtttcgcaactttgtt

SEQ ID NO: 62732 - DNA, 19 bp, Homo sapiens
  siRNA target sequence for HRB2 (NM_007043.5,196-214).
gcaactttgttcccaaaat

SEQ ID NO: 62733 - DNA, 19 bp, Homo sapiens
  siRNA target sequence for HRB2 (NM_007043.5,260-278).
ccttaaatgaacatcatgt

SEQ ID NO: 62734 - DNA, 19 bp, Homo sapiens
  siRNA target sequence for HRB2 (NM_007043.5,301-319).
gaaggcagcatgactgttt

SEQ ID NO: 62735 - DNA, 19 bp, Homo sapiens
  siRNA target sequence for HRB2 (NM_007043.5,306-324).
cagcatgactgtttgtact

SEQ ID NO: 62736 - DNA, 19 bp, Homo sapiens
  siRNA target sequence for HRB2 (NM_007043.5,309-327).
catgactgtttgtactaca

SEQ ID NO: 62737 - DNA, 19 bp, Homo sapiens
  siRNA target sequence for HRB2 (NM_007043.5,314-332).
ctgtttgtactacaaagaa

SEQ ID NO: 62738 - DNA, 19 bp, Homo sapiens
  siRNA target sequence for HRB2 (NM_007043.5,316-334).
gtttgtactacaaagaaga

SEQ ID NO: 62739 - DNA, 19 bp, Homo sapiens
  siRNA target sequence for HRB2 (NM_007043.5,330-348).
gaagacttttgatccatat

SEQ ID NO: 62740 - DNA, 19 bp, Homo sapiens
  siRNA target sequence for HRB2 (NM_007043.5,457-475).
ggttctttagtaaggaata

SEQ ID NO: 62741 - DNA, 19 bp, Homo sapiens
  siRNA target sequence for HRB2 (NM_007043.5,515-533).
ccaaaggatctacattgaa

SEQ ID NO: 62742 - DNA, 19 bp, Homo sapiens
  siRNA target sequence for HRB2 (NM_007043.5,551-569).
ctaattgttacattatggt

SEQ ID NO: 62743 - DNA, 19 bp, Homo sapiens
  siRNA target sequence for HRB2 (NM_007043.5,596-614).
gaccttttagtggcttaaa

SEQ ID NO: 62744 - DNA, 19 bp, Homo sapiens
  siRNA target sequence for HRB2 (NM_007043.5,628-646).
gtagtccttgatactatga

SEQ ID NO: 62745 - DNA, 19 bp, Homo sapiens
  siRNA target sequence for HRB2 (NM_007043.5,631-649).
gtccttgatactatgaaga

SEQ ID NO: 62746 - DNA, 19 bp, Homo sapiens
  siRNA target sequence for HRB2 (NM_007043.5,633-651).
ccttgatactatgaagaat

SEQ ID NO: 62747 - DNA, 19 bp, Homo sapiens
  siRNA target sequence for HRB2 (NM_007043.5,690-708).
gagagagttggcaaaagat

SEQ ID NO: 62748 - DNA, 19 bp, Homo sapiens
  siRNA target sequence for HRB2 (NM_007043.5,712-730).
gaattacgatcacaaagtt

SEQ ID NO: 62749 - DNA, 19 bp, Homo sapiens
  siRNA target sequence for HRB2 (NM_007043.5,842-860).
gtcagatcgataaagaatt

SEQ ID NO: 62750 - DNA, 19 bp, Homo sapiens
  siRNA target sequence for HSA9947 (NM_022089.1,89-107).
ctgacgatagggacatcaa

SEQ ID NO: 62751 - DNA, 19 bp, Homo sapiens
  siRNA target sequence for HSA9947 (NM_022089.1,93-111).
cgatagggacatcaataga

SEQ ID NO: 62752 - DNA, 19 bp, Homo sapiens
  siRNA target sequence for HSA9947 (NM_022089.1,94-112).
gatagggacatcaatagat

SEQ ID NO: 62753 - DNA, 19 bp, Homo sapiens
  siRNA target sequence for HSA9947 (NM_022089.1,113-131).
cccctcagctcctcagttt

SEQ ID NO: 62754 - DNA, 19 bp, Homo sapiens
  siRNA target sequence for HSA9947 (NM_022089.1,288-306).
ccgaaacactcgttatcga

SEQ ID NO: 62755 - DNA, 19 bp, Homo sapiens
  siRNA target sequence for HSA9947 (NM_022089.1,289-307).
cgaaacactcgttatcgaa

SEQ ID NO: 62756 - DNA, 19 bp, Homo sapiens
  siRNA target sequence for HSA9947 (NM_022089.1,290-308).
gaaacactcgttatcgaaa

SEQ ID NO: 62757 - DNA, 19 bp, Homo sapiens
  siRNA target sequence for HSA9947 (NM_022089.1,449-467).
gagggtgcctggaaggata

SEQ ID NO: 62758 - DNA, 19 bp, Homo sapiens
  siRNA target sequence for HSA9947 (NM_022089.1,516-534).
gggtgctgcggtattacct

SEQ ID NO: 62759 - DNA, 19 bp, Homo sapiens
  siRNA target sequence for HSA9947 (NM_022089.1,739-757).
ggcactgaacccctactat

SEQ ID NO: 62760 - DNA, 19 bp, Homo sapiens
  siRNA target sequence for HSA9947 (NM_022089.1,786-804).
ggctggctgaccactacta

SEQ ID NO: 62761 - DNA, 19 bp, Homo sapiens
  siRNA target sequence for HSA9947 (NM_022089.1,788-806).
ctggctgaccactactact

SEQ ID NO: 62762 - DNA, 19 bp, Homo sapiens
  siRNA target sequence for HSA9947 (NM_022089.1,1041-1059).
gcgagtgcatggtgaatga

SEQ ID NO: 62763 - DNA, 19 bp, Homo sapiens
  siRNA target sequence for HSA9947 (NM_022089.1,1386-1404).
gggtgcctctgaatgagat

SEQ ID NO: 62764 - DNA, 19 bp, Homo sapiens
  siRNA target sequence for HSA9947 (NM_022089.1,1387-1405).
ggtgcctctgaatgagatt

SEQ ID NO: 62765 - DNA, 19 bp, Homo sapiens
  siRNA target sequence for HSA9947 (NM_022089.1,1743-1761).
gcgaccccatggacttgaa

SEQ ID NO: 62766 - DNA, 19 bp, Homo sapiens
  siRNA target sequence for HSA9947 (NM_022089.1,2059-2077).
gatgctgcagagctataca

SEQ ID NO: 62767 - DNA, 19 bp, Homo sapiens
  siRNA target sequence for HSA9947 (NM_022089.1,2223-2241).
cgcagacaacgccagttat

SEQ ID NO: 62768 - DNA, 19 bp, Homo sapiens
  siRNA target sequence for HSA9947 (NM_022089.1,2340-2358).
cccaggagcatctgatcat

SEQ ID NO: 62769 - DNA, 19 bp, Homo sapiens
  siRNA target sequence for HSA9947 (NM_022089.1,2430-2448).
ccgtgaatggcgttaagga

SEQ ID NO: 62770 - DNA, 19 bp, Homo sapiens
  siRNA target sequence for HSA9947 (NM_022089.1,2431-2449).
cgtgaatggcgttaaggat

SEQ ID NO: 62771 - DNA, 19 bp, Homo sapiens
  siRNA target sequence for HSA9947 (NM_022089.1,2755-2773).
ctcgagcatggccagtatt

SEQ ID NO: 62772 - DNA, 19 bp, Homo sapiens
  siRNA target sequence for HSA9947 (NM_022089.1,2820-2838).
cttcgttcagcgtcttcaa

SEQ ID NO: 62773 - DNA, 19 bp, Homo sapiens
  siRNA target sequence for HSA9947 (NM_022089.1,2823-2841).
cgttcagcgtcttcaagta

SEQ ID NO: 62774 - DNA, 19 bp, Homo sapiens
  siRNA target sequence for HSA9947 (NM_022089.1,3350-3368).
ctggcgctgaggaacatca

SEQ ID NO: 62775 - DNA, 19 bp, Homo sapiens
  siRNA target sequence for HSA9947 (NM_022089.1,3399-3417).
gtctggtcaccctcaactt

SEQ ID NO: 62776 - DNA, 19 bp, Homo sapiens
  siRNA target sequence for HSPC055 (NM_014153.2,231-249).
gcagcagaacattaaggaa

SEQ ID NO: 62777 - DNA, 19 bp, Homo sapiens
  siRNA target sequence for HSPC055 (NM_014153.2,246-264).
ggaaggactgcagtttata

SEQ ID NO: 62778 - DNA, 19 bp, Homo sapiens
  siRNA target sequence for HSPC055 (NM_014153.2,250-268).
ggactgcagtttatacagt

SEQ ID NO: 62779 - DNA, 19 bp, Homo sapiens
  siRNA target sequence for HSPC055 (NM_014153.2,284-302).
caggaacacaggagcaata

SEQ ID NO: 62780 - DNA, 19 bp, Homo sapiens
  siRNA target sequence for HSPC055 (NM_014153.2,294-312).
ggagcaatatgcggtatat

SEQ ID NO: 62781 - DNA, 19 bp, Homo sapiens
  siRNA target sequence for HSPC055 (NM_014153.2,295-313).
gagcaatatgcggtatatt

SEQ ID NO: 62782 - DNA, 19 bp, Homo sapiens
  siRNA target sequence for HSPC055 (NM_014153.2,315-333).
gcgtgctctcgtgagaaat

SEQ ID NO: 62783 - DNA, 19 bp, Homo sapiens
  siRNA target sequence for HSPC055 (NM_014153.2,317-335).
gtgctctcgtgagaaatct

SEQ ID NO: 62784 - DNA, 19 bp, Homo sapiens
  siRNA target sequence for HSPC055 (NM_014153.2,319-337).
gctctcgtgagaaatcttt

SEQ ID NO: 62785 - DNA, 19 bp, Homo sapiens
  siRNA target sequence for HSPC055 (NM_014153.2,320-338).
ctctcgtgagaaatctttt

SEQ ID NO: 62786 - DNA, 19 bp, Homo sapiens
  siRNA target sequence for HSPC055 (NM_014153.2,322-340).
ctcgtgagaaatcttttta

SEQ ID NO: 62787 - DNA, 19 bp, Homo sapiens
  siRNA target sequence for HSPC055 (NM_014153.2,354-372).
cgtttatcgggaacatgat

SEQ ID NO: 62788 - DNA, 19 bp, Homo sapiens
  siRNA target sequence for HSPC055 (NM_014153.2,355-373).
gtttatcgggaacatgatt

SEQ ID NO: 62789 - DNA, 19 bp, Homo sapiens
  siRNA target sequence for HSPC055 (NM_014153.2,370-388).
gattggaacaactcgataa

SEQ ID NO: 62790 - DNA, 19 bp, Homo sapiens
  siRNA target sequence for HSPC055 (NM_014153.2,393-411).
gtacacggaagccttgaat

SEQ ID NO: 62791 - DNA, 19 bp, Homo sapiens
  siRNA target sequence for HSPC055 (NM_014153.2,404-422).
ccttgaatatagctgatta

SEQ ID NO: 62792 - DNA, 19 bp, Homo sapiens
  siRNA target sequence for HSPC055 (NM_014153.2,405-423).
cttgaatatagctgattat

SEQ ID NO: 62793 - DNA, 19 bp, Homo sapiens
  siRNA target sequence for HSPC055 (NM_014153.2,408-426).
gaatatagctgattatgca

SEQ ID NO: 62794 - DNA, 19 bp, Homo sapiens
  siRNA target sequence for HSPC055 (NM_014153.2,447-465).
ccccaaagaaataattgaa

SEQ ID NO: 62795 - DNA, 19 bp, Homo sapiens
  siRNA target sequence for HSPC055 (NM_014153.2,481-499).
cgtattgcctgctattcta

SEQ ID NO: 62796 - DNA, 19 bp, Homo sapiens
  siRNA target sequence for HSPC055 (NM_014153.2,505-523).
ggtttccatgataaagttt

SEQ ID NO: 62797 - DNA, 19 bp, Homo sapiens
  siRNA target sequence for HSPC055 (NM_014153.2,571-589).
gctctgtatcggaaatcta

SEQ ID NO: 62798 - DNA, 19 bp, Homo sapiens
  siRNA target sequence for HSPC055 (NM_014153.2,580-598).
cggaaatctaaggctttaa

SEQ ID NO: 62799 - DNA, 19 bp, Homo sapiens
  siRNA target sequence for HSPC055 (NM_014153.2,599-617).
gtgatttaggaagatacaa

SEQ ID NO: 62800 - DNA, 19 bp, Homo sapiens
  siRNA target sequence for HSPC055 (NM_014153.2,623-641).
cttacgatgctgtagcaaa

SEQ ID NO: 62801 - DNA, 19 bp, Homo sapiens
  siRNA target sequence for HSPC055 (NM_014153.2,659-677).
ctcaggatgagcatgtaat

SEQ ID NO: 62802 - DNA, 19 bp, Homo sapiens
  siRNA target sequence for HSPC055 (NM_014153.2,805-823).
gatattgagccagatttat

SEQ ID NO: 62803 - DNA, 19 bp, Homo sapiens
  siRNA target sequence for HSPC055 (NM_014153.2,910-928).
cctgttatgcccttaactt

SEQ ID NO: 62804 - DNA, 19 bp, Homo sapiens
  siRNA target sequence for HSPC055 (NM_014153.2,913-931).
gttatgcccttaacttcta

SEQ ID NO: 62805 - DNA, 19 bp, Homo sapiens
  siRNA target sequence for HSPC055 (NM_014153.2,1002-1020).
cactatgccagaagctttt

SEQ ID NO: 62806 - DNA, 19 bp, Homo sapiens
  siRNA target sequence for HSPC055 (NM_014153.2,1004-1022).
ctatgccagaagcttttct

SEQ ID NO: 62807 - DNA, 19 bp, Homo sapiens
  siRNA target sequence for HSPC055 (NM_014153.2,1008-1026).
gccagaagcttttctagat

SEQ ID NO: 62808 - DNA, 19 bp, Homo sapiens
  siRNA target sequence for HSPC055 (NM_014153.2,1054-1072).
ctagatgacctgcttgatt

SEQ ID NO: 62809 - DNA, 19 bp, Homo sapiens
  siRNA target sequence for HSPC055 (NM_014153.2,1073-1091).
ctgcacctgaaactaatga

SEQ ID NO: 62810 - DNA, 19 bp, Homo sapiens
  siRNA target sequence for HSPC055 (NM_014153.2,1210-1228).
ccaccctccttctcagaat

SEQ ID NO: 62811 - DNA, 19 bp, Homo sapiens
  siRNA target sequence for HSPC055 (NM_014153.2,1211-1229).
caccctccttctcagaatt

SEQ ID NO: 62812 - DNA, 19 bp, Homo sapiens
  siRNA target sequence for HSPC055 (NM_014153.2,1330-1348).
gagggaacaccgcttaaca

SEQ ID NO: 62813 - DNA, 19 bp, Homo sapiens
  siRNA target sequence for HSPC055 (NM_014153.2,1333-1351).
ggaacaccgcttaacaaca

SEQ ID NO: 62814 - DNA, 19 bp, Homo sapiens
  siRNA target sequence for HSPC055 (NM_014153.2,1339-1357).
ccgcttaacaacagtaatt

SEQ ID NO: 62815 - DNA, 19 bp, Homo sapiens
  siRNA target sequence for HSPC055 (NM_014153.2,1342-1360).
cttaacaacagtaattctt

SEQ ID NO: 62816 - DNA, 19 bp, Homo sapiens
  siRNA target sequence for HSPC055 (NM_014153.2,1421-1439).
caagtcagcctagaaatga

SEQ ID NO: 62817 - DNA, 19 bp, Homo sapiens
  siRNA target sequence for HSPC055 (NM_014153.2,1465-1483).
gttaccaaaccatcttcat

SEQ ID NO: 62818 - DNA, 19 bp, Homo sapiens
  siRNA target sequence for HSPC055 (NM_014153.2,1504-1522).
ctcgaaggaacccatgaat

SEQ ID NO: 62819 - DNA, 19 bp, Homo sapiens
  siRNA target sequence for HSPC055 (NM_014153.2,1507-1525).
gaaggaacccatgaattga

SEQ ID NO: 62820 - DNA, 19 bp, Homo sapiens
  siRNA target sequence for HSPC055 (NM_014153.2,1528-1546).
caagcttgccagatctgtt

SEQ ID NO: 62821 - DNA, 19 bp, Homo sapiens
  siRNA target sequence for HSPC055 (NM_014153.2,1558-1576).
ggccctaagttaatggatt

SEQ ID NO: 62822 - DNA, 19 bp, Homo sapiens
  siRNA target sequence for HSPC055 (NM_014153.2,1561-1579).
cctaagttaatggatttca

SEQ ID NO: 62823 - DNA, 19 bp, Homo sapiens
  siRNA target sequence for HSPC055 (NM_014153.2,1699-1717).
ggaccatattatatatgta

SEQ ID NO: 62824 - DNA, 19 bp, Homo sapiens
  siRNA target sequence for HSPC055 (NM_014153.2,1753-1771).
ggccactgcacgtttgctt

SEQ ID NO: 62825 - DNA, 19 bp, Homo sapiens
  siRNA target sequence for HSPC055 (NM_014153.2,1754-1772).
gccactgcacgtttgctta

SEQ ID NO: 62826 - DNA, 19 bp, Homo sapiens
  siRNA target sequence for HSPC055 (NM_014153.2,1755-1773).
ccactgcacgtttgcttat

SEQ ID NO: 62827 - DNA, 19 bp, Homo sapiens
  siRNA target sequence for HSPC055 (NM_014153.2,1756-1774).
cactgcacgtttgcttatt

SEQ ID NO: 62828 - DNA, 19 bp, Homo sapiens
  siRNA target sequence for HSPC055 (NM_014153.2,1841-1859).
gcggcaatggaaagattaa

SEQ ID NO: 62829 - DNA, 19 bp, Homo sapiens
  siRNA target sequence for HSPC055 (NM_014153.2,1844-1862).
gcaatggaaagattaacct

SEQ ID NO: 62830 - DNA, 19 bp, Homo sapiens
  siRNA target sequence for HSPC055 (NM_014153.2,1845-1863).
caatggaaagattaacctt

SEQ ID NO: 62831 - DNA, 19 bp, Homo sapiens
  siRNA target sequence for HSPC055 (NM_014153.2,1850-1868).
gaaagattaaccttactgt

SEQ ID NO: 62832 - DNA, 19 bp, Homo sapiens
  siRNA target sequence for HSPC055 (NM_014153.2,1884-1902).
ggagcatcttggggaattt

SEQ ID NO: 62833 - DNA, 19 bp, Homo sapiens
  siRNA target sequence for HSPC055 (NM_014153.2,1927-1945).
gatcataagcctagaatga

SEQ ID NO: 62834 - DNA, 19 bp, Homo sapiens
  siRNA target sequence for HSPC055 (NM_014153.2,1930-1948).
cataagcctagaatgataa

SEQ ID NO: 62835 - DNA, 19 bp, Homo sapiens
  siRNA target sequence for HSPC055 (NM_014153.2,1979-1997).
gttctcacccggttacaaa

SEQ ID NO: 62836 - DNA, 19 bp, Homo sapiens
  siRNA target sequence for HSPC055 (NM_014153.2,1988-2006).
cggttacaaagcatgagtt

SEQ ID NO: 62837 - DNA, 19 bp, Homo sapiens
  siRNA target sequence for HSPC055 (NM_014153.2,2038-2056).
cgagagacaacagtaaaat

SEQ ID NO: 62838 - DNA, 19 bp, Homo sapiens
  siRNA target sequence for HSPC055 (NM_014153.2,2080-2098).
ggtcagtgtcagcttgatt

SEQ ID NO: 62839 - DNA, 19 bp, Homo sapiens
  siRNA target sequence for HSPC055 (NM_014153.2,2085-2103).
gtgtcagcttgatttatgt

SEQ ID NO: 62840 - DNA, 19 bp, Homo sapiens
  siRNA target sequence for HSPC055 (NM_014153.2,2113-2131).
gttcggtatggctgtttaa

SEQ ID NO: 62841 - DNA, 19 bp, Homo sapiens
  siRNA target sequence for HSPC055 (NM_014153.2,2172-2190).
gaaagtctggataatgcaa

SEQ ID NO: 62842 - DNA, 19 bp, Homo sapiens
  siRNA target sequence for HSPC055 (NM_014153.2,2201-2219).
gtatctcacatgatgctat

SEQ ID NO: 62843 - DNA, 19 bp, Homo sapiens
  siRNA target sequence for HSPC055 (NM_014153.2,2224-2242).
caagagtctaaacgatatt

SEQ ID NO: 62844 - DNA, 19 bp, Homo sapiens
  siRNA target sequence for HSPC055 (NM_014153.2,2243-2261).
ggcagaatttggaagcaaa

SEQ ID NO: 62845 - DNA, 19 bp, Homo sapiens
  siRNA target sequence for HSPC055 (NM_014153.2,2270-2288).
gagcgcaggtacttggtaa

SEQ ID NO: 62846 - DNA, 19 bp, Homo sapiens
  siRNA target sequence for HSPC055 (NM_014153.2,2278-2296).
gtacttggtaatcaaataa

SEQ ID NO: 62847 - DNA, 19 bp, Homo sapiens
  siRNA target sequence for HSPC055 (NM_014153.2,2308-2326).
cttaatatgaagataaagt

SEQ ID NO: 62848 - DNA, 19 bp, Homo sapiens
  siRNA target sequence for HSPC055 (NM_014153.2,2346-2364).
gagaaacggtcaagtcatt

SEQ ID NO: 62849 - DNA, 19 bp, Homo sapiens
  siRNA target sequence for HSPC055 (NM_014153.2,2431-2449).
gcgatgagagtgatgtcta

SEQ ID NO: 62850 - DNA, 19 bp, Homo sapiens
  siRNA target sequence for HSPC055 (NM_014153.2,2455-2473).
cgtaagaagtggatgaaca

SEQ ID NO: 62851 - DNA, 19 bp, Homo sapiens
  siRNA target sequence for HSPC055 (NM_014153.2,2456-2474).
gtaagaagtggatgaacat

SEQ ID NO: 62852 - DNA, 19 bp, Homo sapiens
  siRNA target sequence for HSPC055 (NM_014153.2,2565-2583).
ctgttcctttgctcatagt

SEQ ID NO: 62853 - DNA, 19 bp, Homo sapiens
  siRNA target sequence for HSPC055 (NM_014153.2,2613-2631).
gaaggagaatgggatacaa

SEQ ID NO: 62854 - DNA, 19 bp, Homo sapiens
  siRNA target sequence for HSPC055 (NM_014153.2,2638-2656).
gagcaattttacgaactat

SEQ ID NO: 62855 - DNA, 19 bp, Homo sapiens
  siRNA target sequence for HSPC055 (NM_014153.2,2891-2909).
gcttcccaacaggctattt

SEQ ID NO: 62856 - DNA, 19 bp, Homo sapiens
  siRNA target sequence for HSPC055 (NM_014153.2,2895-2913).
cccaacaggctatttcagt

SEQ ID NO: 62857 - DNA, 19 bp, Homo sapiens
  siRNA target sequence for HSPC055 (NM_014153.2,2910-2928).
cagtatttgtgataggtat

SEQ ID NO: 62858 - DNA, 19 bp, Homo sapiens
  siRNA target sequence for HSPC055 (NM_014153.2,2975-2993).
gaaatgccgaacttcatga

SEQ ID NO: 62859 - DNA, 19 bp, Homo sapiens
  siRNA target sequence for HSPC055 (NM_014153.2,3005-3023).
gaagagatgccctaaagat

SEQ ID NO: 62860 - DNA, 19 bp, Homo sapiens
  siRNA target sequence for HSPC055 (NM_014153.2,3037-3055).
gcacgaaaagatcacttaa

SEQ ID NO: 62861 - DNA, 19 bp, Homo sapiens
  siRNA target sequence for HSPC055 (NM_014153.2,3058-3076).
ggcccaaatgataatgact

SEQ ID NO: 62862 - DNA, 19 bp, Homo sapiens
  siRNA target sequence for HSPC055 (NM_014153.2,3059-3077).
gcccaaatgataatgactt

SEQ ID NO: 62863 - DNA, 19 bp, Homo sapiens
  siRNA target sequence for HTF9C (NM_022727.3,711-729).
ggccctgcgcgttttgcat

SEQ ID NO: 62864 - DNA, 19 bp, Homo sapiens
  siRNA target sequence for HTF9C (NM_022727.3,1042-1060).
cagcagactgagtatcgta

SEQ ID NO: 62865 - DNA, 19 bp, Homo sapiens
  siRNA target sequence for HTF9C (NM_022727.3,1044-1062).
gcagactgagtatcgtaat

SEQ ID NO: 62866 - DNA, 19 bp, Homo sapiens
  siRNA target sequence for HTF9C (NM_022727.3,1058-1076).
gtaataagtgtgagtttct

SEQ ID NO: 62867 - DNA, 19 bp, Homo sapiens
  siRNA target sequence for HTF9C (NM_022727.3,1118-1136).
gtcggctcggcaagtacaa

SEQ ID NO: 62868 - DNA, 19 bp, Homo sapiens
  siRNA target sequence for HTF9C (NM_022727.3,1424-1442).
gagtgacctgcctctactt

SEQ ID NO: 62869 - DNA, 19 bp, Homo sapiens
  siRNA target sequence for HTF9C (NM_022727.3,1449-1467).
ggagggacagcgaaagact

SEQ ID NO: 62870 - DNA, 19 bp, Homo sapiens
  siRNA target sequence for HTF9C (NM_022727.3,1614-1632).
ggactgggcccaattggat

SEQ ID NO: 62871 - DNA, 19 bp, Homo sapiens
  siRNA target sequence for HTF9C (NM_022727.3,1762-1780).
caggacaatgagttgagta

SEQ ID NO: 62872 - DNA, 19 bp, Homo sapiens
  siRNA target sequence for HTF9C (NM_022727.3,1764-1782).
ggacaatgagttgagtaat

SEQ ID NO: 62873 - DNA, 19 bp, Homo sapiens
  siRNA target sequence for HTF9C (NM_022727.3,1873-1891).
ccccgtgctggcttgcatt

SEQ ID NO: 62874 - DNA, 19 bp, Homo sapiens
  siRNA target sequence for HTF9C (NM_022727.3,1877-1895).
gtgctggcttgcattccaa

SEQ ID NO: 62875 - DNA, 19 bp, Homo sapiens
  siRNA target sequence for HTF9C (NM_022727.3,1962-1980).
ggcagccatgggcaacttt

SEQ ID NO: 62876 - DNA, 19 bp, Homo sapiens
  siRNA target sequence for HZF12 (NM_033204.2,230-248).
ggcctcggtcggaatccaa

SEQ ID NO: 62877 - DNA, 19 bp, Homo sapiens
  siRNA target sequence for HZF12 (NM_033204.2,231-249).
gcctcggtcggaatccaat

SEQ ID NO: 62878 - DNA, 19 bp, Homo sapiens
  siRNA target sequence for HZF12 (NM_033204.2,235-253).
cggtcggaatccaatggaa

SEQ ID NO: 62879 - DNA, 19 bp, Homo sapiens
  siRNA target sequence for HZF12 (NM_033204.2,285-303).
ctggggattaagctaagaa

SEQ ID NO: 62880 - DNA, 19 bp, Homo sapiens
  siRNA target sequence for HZF12 (NM_033204.2,370-388).
ctgattgtcacctgaacaa

SEQ ID NO: 62881 - DNA, 19 bp, Homo sapiens
  siRNA target sequence for HZF12 (NM_033204.2,480-498).
catgctggacacaaacgat

SEQ ID NO: 62882 - DNA, 19 bp, Homo sapiens
  siRNA target sequence for HZF12 (NM_033204.2,530-548).
ccgtaaacagaaacaacat

SEQ ID NO: 62883 - DNA, 19 bp, Homo sapiens
  siRNA target sequence for HZF12 (NM_033204.2,576-594).
ggtgcacggcgcacagtaa

SEQ ID NO: 62884 - DNA, 19 bp, Homo sapiens
  siRNA target sequence for HZF12 (NM_033204.2,797-815).
ctgtggaaaacctatcgat

SEQ ID NO: 62885 - DNA, 19 bp, Homo sapiens
  siRNA target sequence for HZF12 (NM_033204.2,799-817).
gtggaaaacctatcgatta

SEQ ID NO: 62886 - DNA, 19 bp, Homo sapiens
  siRNA target sequence for HZF12 (NM_033204.2,896-914).
catttccgcaggttacctt

SEQ ID NO: 62887 - DNA, 19 bp, Homo sapiens
  siRNA target sequence for HZF12 (NM_033204.2,912-930).
cttcggacacatgaaatca

SEQ ID NO: 62888 - DNA, 19 bp, Homo sapiens
  siRNA target sequence for HZF12 (NM_033204.2,972-990).
gggaaaaaactcagttgtt

SEQ ID NO: 62889 - DNA, 19 bp, Homo sapiens
  siRNA target sequence for HZF12 (NM_033204.2,1251-1269).
ctccgaagacatgaaatga

SEQ ID NO: 62890 - DNA, 19 bp, Homo sapiens
  siRNA target sequence for HZF12 (NM_033204.2,1341-1359).
cttcatgaaagaactcatt

SEQ ID NO: 62891 - DNA, 19 bp, Homo sapiens
  siRNA target sequence for IMP-1 (NM_006546.2,396-414).
ggccagttcttggtcaaat

SEQ ID NO: 62892 - DNA, 19 bp, Homo sapiens
  siRNA target sequence for IMP-1 (NM_006546.2,476-494).
ctccgggaaagtagaatta

SEQ ID NO: 62893 - DNA, 19 bp, Homo sapiens
  siRNA target sequence for IMP-1 (NM_006546.2,479-497).
cgggaaagtagaattacaa

SEQ ID NO: 62894 - DNA, 19 bp, Homo sapiens
  siRNA target sequence for IMP-1 (NM_006546.2,495-513).
caaggaaaacgcttagaga

SEQ ID NO: 62895 - DNA, 19 bp, Homo sapiens
  siRNA target sequence for IMP-1 (NM_006546.2,504-522).
cgcttagagattgaacatt

SEQ ID NO: 62896 - DNA, 19 bp, Homo sapiens
  siRNA target sequence for IMP-1 (NM_006546.2,603-621).
ctgctggctcagtatggta

SEQ ID NO: 62897 - DNA, 19 bp, Homo sapiens
  siRNA target sequence for IMP-1 (NM_006546.2,700-718).
ccaggcaagccatcatgaa

SEQ ID NO: 62898 - DNA, 19 bp, Homo sapiens
  siRNA target sequence for IMP-1 (NM_006546.2,955-973).
ccatccgcaacatcacaaa

SEQ ID NO: 62899 - DNA, 19 bp, Homo sapiens
  siRNA target sequence for IMP-1 (NM_006546.2,956-974).
catccgcaacatcacaaaa

SEQ ID NO: 62900 - DNA, 19 bp, Homo sapiens
  siRNA target sequence for IMP-1 (NM_006546.2,1013-1031).
cgcaggtgcagctgaaaaa

SEQ ID NO: 62901 - DNA, 19 bp, Homo sapiens
  siRNA target sequence for IMP-1 (NM_006546.2,1060-1078).
gctgctcctccgcttgtaa

SEQ ID NO: 62902 - DNA, 19 bp, Homo sapiens
  siRNA target sequence for IMP-1 (NM_006546.2,1063-1081).
gctcctccgcttgtaagat

SEQ ID NO: 62903 - DNA, 19 bp, Homo sapiens
  siRNA target sequence for IMP-1 (NM_006546.2,1066-1084).
cctccgcttgtaagatgat

SEQ ID NO: 62904 - DNA, 19 bp, Homo sapiens
  siRNA target sequence for IMP-1 (NM_006546.2,1082-1100).
gatcttggagattatgcat

SEQ ID NO: 62905 - DNA, 19 bp, Homo sapiens
  siRNA target sequence for IMP-1 (NM_006546.2,1085-1103).
cttggagattatgcataaa

SEQ ID NO: 62906 - DNA, 19 bp, Homo sapiens
  siRNA target sequence for IMP-1 (NM_006546.2,1163-1181).
ctttgtagggcgtctcatt

SEQ ID NO: 62907 - DNA, 19 bp, Homo sapiens
  siRNA target sequence for IMP-1 (NM_006546.2,1214-1232).
gcaagataccgagacaaaa

SEQ ID NO: 62908 - DNA, 19 bp, Homo sapiens
  siRNA target sequence for IMP-1 (NM_006546.2,1218-1236).
gataccgagacaaaaatca

SEQ ID NO: 62909 - DNA, 19 bp, Homo sapiens
  siRNA target sequence for IMP-1 (NM_006546.2,1251-1269).
caagaccttaccctttaca

SEQ ID NO: 62910 - DNA, 19 bp, Homo sapiens
  siRNA target sequence for IMP-1 (NM_006546.2,1318-1336).
gggccgagcaggaaataat

SEQ ID NO: 62911 - DNA, 19 bp, Homo sapiens
  siRNA target sequence for IMP-1 (NM_006546.2,1344-1362).
gttcgggaggcctatgaga

SEQ ID NO: 62912 - DNA, 19 bp, Homo sapiens
  siRNA target sequence for IMP-1 (NM_006546.2,1656-1674).
gttcgtatggttatcatca

SEQ ID NO: 62913 - DNA, 19 bp, Homo sapiens
  siRNA target sequence for IMP-1 (NM_006546.2,1680-1698).
ccgccagaggcccaattca

SEQ ID NO: 62914 - DNA, 19 bp, Homo sapiens
  siRNA target sequence for IMP-1 (NM_006546.2,1681-1699).
cgccagaggcccaattcaa

SEQ ID NO: 62915 - DNA, 19 bp, Homo sapiens
  siRNA target sequence for KARS (NM_005548.1,249-267).
gcgtggacccaaatcaata

SEQ ID NO: 62916 - DNA, 19 bp, Homo sapiens
  siRNA target sequence for KARS (NM_005548.1,251-269).
gtggacccaaatcaatact

SEQ ID NO: 62917 - DNA, 19 bp, Homo sapiens
  siRNA target sequence for KARS (NM_005548.1,254-272).
gacccaaatcaatactaca

SEQ ID NO: 62918 - DNA, 19 bp, Homo sapiens
  siRNA target sequence for KARS (NM_005548.1,256-274).
cccaaatcaatactacaaa

SEQ ID NO: 62919 - DNA, 19 bp, Homo sapiens
  siRNA target sequence for KARS (NM_005548.1,257-275).
ccaaatcaatactacaaaa

SEQ ID NO: 62920 - DNA, 19 bp, Homo sapiens
  siRNA target sequence for KARS (NM_005548.1,277-295).
ccgcagtcaagcaattcat

SEQ ID NO: 62921 - DNA, 19 bp, Homo sapiens
  siRNA target sequence for KARS (NM_005548.1,327-345).
cacacaagttccatgtaga

SEQ ID NO: 62922 - DNA, 19 bp, Homo sapiens
  siRNA target sequence for KARS (NM_005548.1,401-419).
ctgactgacatcaccttaa

SEQ ID NO: 62923 - DNA, 19 bp, Homo sapiens
  siRNA target sequence for KARS (NM_005548.1,456-474).
ggggaaagctcatcttcta

SEQ ID NO: 62924 - DNA, 19 bp, Homo sapiens
  siRNA target sequence for KARS (NM_005548.1,457-475).
gggaaagctcatcttctat

SEQ ID NO: 62925 - DNA, 19 bp, Homo sapiens
  siRNA target sequence for KARS (NM_005548.1,459-477).
gaaagctcatcttctatga

SEQ ID NO: 62926 - DNA, 19 bp, Homo sapiens
  siRNA target sequence for KARS (NM_005548.1,463-481).
gctcatcttctatgatctt

SEQ ID NO: 62927 - DNA, 19 bp, Homo sapiens
  siRNA target sequence for KARS (NM_005548.1,503-521).
caagtcatggccaattcca

SEQ ID NO: 62928 - DNA, 19 bp, Homo sapiens
  siRNA target sequence for KARS (NM_005548.1,566-584).
ctgcgtcggggagacataa

SEQ ID NO: 62929 - DNA, 19 bp, Homo sapiens
  siRNA target sequence for KARS (NM_005548.1,568-586).
gcgtcggggagacataatt

SEQ ID NO: 62930 - DNA, 19 bp, Homo sapiens
  siRNA target sequence for KARS (NM_005548.1,596-614).
gggaatcctggtaaaacca

SEQ ID NO: 62931 - DNA, 19 bp, Homo sapiens
  siRNA target sequence for KARS (NM_005548.1,630-648).
gcatcattccgtatgagat

SEQ ID NO: 62932 - DNA, 19 bp, Homo sapiens
  siRNA target sequence for KARS (NM_005548.1,655-673).
gctgtctccctgtttgcat

SEQ ID NO: 62933 - DNA, 19 bp, Homo sapiens
  siRNA target sequence for KARS (NM_005548.1,714-732).
caaggtatcgccagagata

SEQ ID NO: 62934 - DNA, 19 bp, Homo sapiens
  siRNA target sequence for KARS (NM_005548.1,717-735).
ggtatcgccagagatactt

SEQ ID NO: 62935 - DNA, 19 bp, Homo sapiens
  siRNA target sequence for KARS (NM_005548.1,780-798).
gctctaagatcatcacata

SEQ ID NO: 62936 - DNA, 19 bp, Homo sapiens
  siRNA target sequence for KARS (NM_005548.1,787-805).
gatcatcacatatataaga

SEQ ID NO: 62937 - DNA, 19 bp, Homo sapiens
  siRNA target sequence for KARS (NM_005548.1,823-841).
gggattcctagagattgaa

SEQ ID NO: 62938 - DNA, 19 bp, Homo sapiens
  siRNA target sequence for KARS (NM_005548.1,839-857).
gaaactcccatgatgaaca

SEQ ID NO: 62939 - DNA, 19 bp, Homo sapiens
  siRNA target sequence for KARS (NM_005548.1,878-896).
gccaagcctttcatcactt

SEQ ID NO: 62940 - DNA, 19 bp, Homo sapiens
  siRNA target sequence for KARS (NM_005548.1,879-897).
ccaagcctttcatcactta

SEQ ID NO: 62941 - DNA, 19 bp, Homo sapiens
  siRNA target sequence for KARS (NM_005548.1,880-898).
caagcctttcatcacttat

SEQ ID NO: 62942 - DNA, 19 bp, Homo sapiens
  siRNA target sequence for KARS (NM_005548.1,904-922).
cgagctggacatgaactta

SEQ ID NO: 62943 - DNA, 19 bp, Homo sapiens
  siRNA target sequence for KARS (NM_005548.1,905-923).
gagctggacatgaacttat

SEQ ID NO: 62944 - DNA, 19 bp, Homo sapiens
  siRNA target sequence for KARS (NM_005548.1,907-925).
gctggacatgaacttatat

SEQ ID NO: 62945 - DNA, 19 bp, Homo sapiens
  siRNA target sequence for KARS (NM_005548.1,908-926).
ctggacatgaacttatata

SEQ ID NO: 62946 - DNA, 19 bp, Homo sapiens
  siRNA target sequence for KARS (NM_005548.1,939-957).
cagaactctatcataagat

SEQ ID NO: 62947 - DNA, 19 bp, Homo sapiens
  siRNA target sequence for KARS (NM_005548.1,972-990).
gcatcgaccgggtttatga

SEQ ID NO: 62948 - DNA, 19 bp, Homo sapiens
  siRNA target sequence for KARS (NM_005548.1,973-991).
catcgaccgggtttatgaa

SEQ ID NO: 62949 - DNA, 19 bp, Homo sapiens
  siRNA target sequence for KARS (NM_005548.1,976-994).
cgaccgggtttatgaaatt

SEQ ID NO: 62950 - DNA, 19 bp, Homo sapiens
  siRNA target sequence for KARS (NM_005548.1,979-997).
ccgggtttatgaaattgga

SEQ ID NO: 62951 - DNA, 19 bp, Homo sapiens
  siRNA target sequence for KARS (NM_005548.1,1006-1024).
ccggaatgaggggattgat

SEQ ID NO: 62952 - DNA, 19 bp, Homo sapiens
  siRNA target sequence for KARS (NM_005548.1,1007-1025).
cggaatgaggggattgatt

SEQ ID NO: 62953 - DNA, 19 bp, Homo sapiens
  siRNA target sequence for KARS (NM_005548.1,1063-1081).
catggcctatgcagactat

SEQ ID NO: 62954 - DNA, 19 bp, Homo sapiens
  siRNA target sequence for KARS (NM_005548.1,1074-1092).
cagactatcacgatctcat

SEQ ID NO: 62955 - DNA, 19 bp, Homo sapiens
  siRNA target sequence for KARS (NM_005548.1,1120-1138).
gatggtgaagcatattaca

SEQ ID NO: 62956 - DNA, 19 bp, Homo sapiens
  siRNA target sequence for KARS (NM_005548.1,1130-1148).
catattacaggcagttaca

SEQ ID NO: 62957 - DNA, 19 bp, Homo sapiens
  siRNA target sequence for KARS (NM_005548.1,1206-1224).
cacccttccggcgaatcaa

SEQ ID NO: 62958 - DNA, 19 bp, Homo sapiens
  siRNA target sequence for KARS (NM_005548.1,1208-1226).
cccttccggcgaatcaaca

SEQ ID NO: 62959 - DNA, 19 bp, Homo sapiens
  siRNA target sequence for KARS (NM_005548.1,1209-1227).
ccttccggcgaatcaacat

SEQ ID NO: 62960 - DNA, 19 bp, Homo sapiens
  siRNA target sequence for KARS (NM_005548.1,1218-1236).
gaatcaacatggtagaaga

SEQ ID NO: 62961 - DNA, 19 bp, Homo sapiens
  siRNA target sequence for KARS (NM_005548.1,1268-1286).
gaaacgaacctctttgaaa

SEQ ID NO: 62962 - DNA, 19 bp, Homo sapiens
  siRNA target sequence for KARS (NM_005548.1,1272-1290).
cgaacctctttgaaactga

SEQ ID NO: 62963 - DNA, 19 bp, Homo sapiens
  siRNA target sequence for KARS (NM_005548.1,1296-1314).
ctcgcaaaattcttgatga

SEQ ID NO: 62964 - DNA, 19 bp, Homo sapiens
  siRNA target sequence for KARS (NM_005548.1,1400-1418).
gtgacttgcatcaatccta

SEQ ID NO: 62965 - DNA, 19 bp, Homo sapiens
  siRNA target sequence for KARS (NM_005548.1,1404-1422).
cttgcatcaatcctacatt

SEQ ID NO: 62966 - DNA, 19 bp, Homo sapiens
  siRNA target sequence for KARS (NM_005548.1,1407-1425).
gcatcaatcctacattcat

SEQ ID NO: 62967 - DNA, 19 bp, Homo sapiens
  siRNA target sequence for KARS (NM_005548.1,1426-1444).
ctgtgatcacccacagata

SEQ ID NO: 62968 - DNA, 19 bp, Homo sapiens
  siRNA target sequence for KARS (NM_005548.1,1428-1446).
gtgatcacccacagataat

SEQ ID NO: 62969 - DNA, 19 bp, Homo sapiens
  siRNA target sequence for KARS (NM_005548.1,1430-1448).
gatcacccacagataatga

SEQ ID NO: 62970 - DNA, 19 bp, Homo sapiens
  siRNA target sequence for KARS (NM_005548.1,1522-1540).
gatatgcaatgcgtatact

SEQ ID NO: 62971 - DNA, 19 bp, Homo sapiens
  siRNA target sequence for KARS (NM_005548.1,1534-1552).
gtatactgagctgaatgat

SEQ ID NO: 62972 - DNA, 19 bp, Homo sapiens
  siRNA target sequence for KARS (NM_005548.1,1560-1578).
ggcagcggcagctttttga

SEQ ID NO: 62973 - DNA, 19 bp, Homo sapiens
  siRNA target sequence for KARS (NM_005548.1,1615-1633).
ggccatgttcatagatgaa

SEQ ID NO: 62974 - DNA, 19 bp, Homo sapiens
  siRNA target sequence for KARS (NM_005548.1,1755-1773).
ccatgaaacccgaagacaa

SEQ ID NO: 62975 - DNA, 19 bp, Homo sapiens
  siRNA target sequence for KIAA0052 (NM_015360.2,288-306).
cgggaaccaaaaaagacaa

SEQ ID NO: 62976 - DNA, 19 bp, Homo sapiens
  siRNA target sequence for KIAA0052 (NM_015360.2,352-370).
caaggcagggaaacgtttt

SEQ ID NO: 62977 - DNA, 19 bp, Homo sapiens
  siRNA target sequence for KIAA0052 (NM_015360.2,374-392).
ggtaaattacaatcagaat

SEQ ID NO: 62978 - DNA, 19 bp, Homo sapiens
  siRNA target sequence for KIAA0052 (NM_015360.2,415-433).
gagagatgtagatttcgaa

SEQ ID NO: 62979 - DNA, 19 bp, Homo sapiens
  siRNA target sequence for KIAA0052 (NM_015360.2,465-483).
ccaggatagaagagtcaat

SEQ ID NO: 62980 - DNA, 19 bp, Homo sapiens
  siRNA target sequence for KIAA0052 (NM_015360.2,515-533).
cccagagtcaaggtacaat

SEQ ID NO: 62981 - DNA, 19 bp, Homo sapiens
  siRNA target sequence for KIAA0052 (NM_015360.2,517-535).
cagagtcaaggtacaatca

SEQ ID NO: 62982 - DNA, 19 bp, Homo sapiens
  siRNA target sequence for KIAA0052 (NM_015360.2,519-537).
gagtcaaggtacaatcagt

SEQ ID NO: 62983 - DNA, 19 bp, Homo sapiens
  siRNA target sequence for KIAA0052 (NM_015360.2,523-541).
caaggtacaatcagttgaa

SEQ ID NO: 62984 - DNA, 19 bp, Homo sapiens
  siRNA target sequence for KIAA0052 (NM_015360.2,586-604).
ggattatttaccacttaaa

SEQ ID NO: 62985 - DNA, 19 bp, Homo sapiens
  siRNA target sequence for KIAA0052 (NM_015360.2,656-674).
caaagagaggccattcagt

SEQ ID NO: 62986 - DNA, 19 bp, Homo sapiens
  siRNA target sequence for KIAA0052 (NM_015360.2,682-700).
caataatcagtctgttcta

SEQ ID NO: 62987 - DNA, 19 bp, Homo sapiens
  siRNA target sequence for KIAA0052 (NM_015360.2,715-733).
ctcagcgggaaaaacagta

SEQ ID NO: 62988 - DNA, 19 bp, Homo sapiens
  siRNA target sequence for KIAA0052 (NM_015360.2,737-755).
gccgagtatgccattgcat

SEQ ID NO: 62989 - DNA, 19 bp, Homo sapiens
  siRNA target sequence for KIAA0052 (NM_015360.2,738-756).
ccgagtatgccattgcatt

SEQ ID NO: 62990 - DNA, 19 bp, Homo sapiens
  siRNA target sequence for KIAA0052 (NM_015360.2,795-813).
caattaaggctctgagtaa

SEQ ID NO: 62991 - DNA, 19 bp, Homo sapiens
  siRNA target sequence for KIAA0052 (NM_015360.2,804-822).
ctctgagtaaccaaaaata

SEQ ID NO: 62992 - DNA, 19 bp, Homo sapiens
  siRNA target sequence for KIAA0052 (NM_015360.2,815-833).
caaaaataccgtgaaatgt

SEQ ID NO: 62993 - DNA, 19 bp, Homo sapiens
  siRNA target sequence for KIAA0052 (NM_015360.2,823-841).
ccgtgaaatgtatgaagaa

SEQ ID NO: 62994 - DNA, 19 bp, Homo sapiens
  siRNA target sequence for KIAA0052 (NM_015360.2,824-842).
cgtgaaatgtatgaagaat

SEQ ID NO: 62995 - DNA, 19 bp, Homo sapiens
  siRNA target sequence for KIAA0052 (NM_015360.2,888-906).
cggcatcttgtcttgttat

SEQ ID NO: 62996 - DNA, 19 bp, Homo sapiens
  siRNA target sequence for KIAA0052 (NM_015360.2,890-908).
gcatcttgtcttgttatga

SEQ ID NO: 62997 - DNA, 19 bp, Homo sapiens
  siRNA target sequence for KIAA0052 (NM_015360.2,1013-1031).
ggtgtagtatgggaagaaa

SEQ ID NO: 62998 - DNA, 19 bp, Homo sapiens
  siRNA target sequence for KIAA0052 (NM_015360.2,1016-1034).
gtagtatgggaagaaacta

SEQ ID NO: 62999 - DNA, 19 bp, Homo sapiens
  siRNA target sequence for KIAA0052 (NM_015360.2,1047-1065).
ctgataacgtccactatgt

SEQ ID NO: 63000 - DNA, 19 bp, Homo sapiens
  siRNA target sequence for KIAA0052 (NM_015360.2,1049-1067).
gataacgtccactatgtct

SEQ ID NO: 63001 - DNA, 19 bp, Homo sapiens
  siRNA target sequence for KIAA0052 (NM_015360.2,1055-1073).
gtccactatgtctttcttt

SEQ ID NO: 63002 - DNA, 19 bp, Homo sapiens
  siRNA target sequence for KIAA0052 (NM_015360.2,1066-1084).
ctttctttcggctactatt

SEQ ID NO: 63003 - DNA, 19 bp, Homo sapiens
  siRNA target sequence for KIAA0052 (NM_015360.2,1070-1088).
ctttcggctactattccaa

SEQ ID NO: 63004 - DNA, 19 bp, Homo sapiens
  siRNA target sequence for KIAA0052 (NM_015360.2,1133-1151).
ccttgtcatgttatttaca

SEQ ID NO: 63005 - DNA, 19 bp, Homo sapiens
  siRNA target sequence for KIAA0052 (NM_015360.2,1164-1182).
ccactccattgcaacacta

SEQ ID NO: 63006 - DNA, 19 bp, Homo sapiens
  siRNA target sequence for KIAA0052 (NM_015360.2,1169-1187).
ccattgcaacactacattt

SEQ ID NO: 63007 - DNA, 19 bp, Homo sapiens
  siRNA target sequence for KIAA0052 (NM_015360.2,1385-1403).
caacctgtgattattttca

SEQ ID NO: 63008 - DNA, 19 bp, Homo sapiens
  siRNA target sequence for KIAA0052 (NM_015360.2,1433-1451).
gcacttcaaatgaccaaat

SEQ ID NO: 63009 - DNA, 19 bp, Homo sapiens
  siRNA target sequence for KIAA0052 (NM_015360.2,1515-1533).
gcttatccgatgaagataa

SEQ ID NO: 63010 - DNA, 19 bp, Homo sapiens
  siRNA target sequence for KIAA0052 (NM_015360.2,1516-1534).
cttatccgatgaagataaa

SEQ ID NO: 63011 - DNA, 19 bp, Homo sapiens
  siRNA target sequence for KIAA0052 (NM_015360.2,1521-1539).
ccgatgaagataaaaaact

SEQ ID NO: 63012 - DNA, 19 bp, Homo sapiens
  siRNA target sequence for KIAA0052 (NM_015360.2,1540-1558).
ccctcaggtagaacatgta

SEQ ID NO: 63013 - DNA, 19 bp, Homo sapiens
  siRNA target sequence for KIAA0052 (NM_015360.2,1542-1560).
ctcaggtagaacatgtact

SEQ ID NO: 63014 - DNA, 19 bp, Homo sapiens
  siRNA target sequence for KIAA0052 (NM_015360.2,1599-1617).
gtttacttcctattttgaa

SEQ ID NO: 63015 - DNA, 19 bp, Homo sapiens
  siRNA target sequence for KIAA0052 (NM_015360.2,1636-1654).
cttttctgaaggattgata

SEQ ID NO: 63016 - DNA, 19 bp, Homo sapiens
  siRNA target sequence for KIAA0052 (NM_015360.2,1677-1695).
cctttgctatgggaattaa

SEQ ID NO: 63017 - DNA, 19 bp, Homo sapiens
  siRNA target sequence for KIAA0052 (NM_015360.2,1696-1714).
catgccagctagaactgtt

SEQ ID NO: 63018 - DNA, 19 bp, Homo sapiens
  siRNA target sequence for KIAA0052 (NM_015360.2,1722-1740).
caaatgcccgcaaatttga

SEQ ID NO: 63019 - DNA, 19 bp, Homo sapiens
  siRNA target sequence for KIAA0052 (NM_015360.2,1813-1831).
ggatgatagaggaattgta

SEQ ID NO: 63020 - DNA, 19 bp, Homo sapiens
  siRNA target sequence for KIAA0052 (NM_015360.2,1857-1875).
gcccaacaattggaaaaca

SEQ ID NO: 63021 - DNA, 19 bp, Homo sapiens
  siRNA target sequence for KIAA0052 (NM_015360.2,1887-1905).
gctccgctgatcctctaaa

SEQ ID NO: 63022 - DNA, 19 bp, Homo sapiens
  siRNA target sequence for KIAA0052 (NM_015360.2,1888-1906).
ctccgctgatcctctaaat

SEQ ID NO: 63023 - DNA, 19 bp, Homo sapiens
  siRNA target sequence for KIAA0052 (NM_015360.2,1891-1909).
cgctgatcctctaaatagt

SEQ ID NO: 63024 - DNA, 19 bp, Homo sapiens
  siRNA target sequence for KIAA0052 (NM_015360.2,1968-1986).
ctgagtacatgttggaaaa

SEQ ID NO: 63025 - DNA, 19 bp, Homo sapiens
  siRNA target sequence for KIAA0052 (NM_015360.2,2005-2023).
gcattatagagcaattcca

SEQ ID NO: 63026 - DNA, 19 bp, Homo sapiens
  siRNA target sequence for KIAA0052 (NM_015360.2,2016-2034).
caattccaggagtagtaga

SEQ ID NO: 63027 - DNA, 19 bp, Homo sapiens
  siRNA target sequence for KIAA0052 (NM_015360.2,2084-2102).
gaagaaagtgtggttatct

SEQ ID NO: 63028 - DNA, 19 bp, Homo sapiens
  siRNA target sequence for KIAA0052 (NM_015360.2,2087-2105).
gaaagtgtggttatctatt

SEQ ID NO: 63029 - DNA, 19 bp, Homo sapiens
  siRNA target sequence for KIAA0052 (NM_015360.2,2093-2111).
gtggttatctattataaga

SEQ ID NO: 63030 - DNA, 19 bp, Homo sapiens
  siRNA target sequence for KIAA0052 (NM_015360.2,2127-2145).
ccaaattgggtaaagaaat

SEQ ID NO: 63031 - DNA, 19 bp, Homo sapiens
  siRNA target sequence for KIAA0052 (NM_015360.2,2165-2183).
ccaaaatactgcttacctt

SEQ ID NO: 63032 - DNA, 19 bp, Homo sapiens
  siRNA target sequence for KIAA0052 (NM_015360.2,2189-2207).
caaccaggtcgtttggtaa

SEQ ID NO: 63033 - DNA, 19 bp, Homo sapiens
  siRNA target sequence for KIAA0052 (NM_015360.2,2193-2211).
caggtcgtttggtaaaggt

SEQ ID NO: 63034 - DNA, 19 bp, Homo sapiens
  siRNA target sequence for KIAA0052 (NM_015360.2,2198-2216).
cgtttggtaaaggtaaaga

SEQ ID NO: 63035 - DNA, 19 bp, Homo sapiens
  siRNA target sequence for KIAA0052 (NM_015360.2,2240-2258).
ggagtagtggtgaatttct

SEQ ID NO: 63036 - DNA, 19 bp, Homo sapiens
  siRNA target sequence for KIAA0052 (NM_015360.2,2243-2261).
gtagtggtgaatttctcaa

SEQ ID NO: 63037 - DNA, 19 bp, Homo sapiens
  siRNA target sequence for KIAA0052 (NM_015360.2,2286-2304).
ctggtgaactggatccttt

SEQ ID NO: 63038 - DNA, 19 bp, Homo sapiens
  siRNA target sequence for KIAA0052 (NM_015360.2,2289-2307).
gtgaactggatcctttgta

SEQ ID NO: 63039 - DNA, 19 bp, Homo sapiens
  siRNA target sequence for KIAA0052 (NM_015360.2,2296-2314).
ggatcctttgtatgtagta

SEQ ID NO: 63040 - DNA, 19 bp, Homo sapiens
  siRNA target sequence for KIAA0052 (NM_015360.2,2445-2463).
gcagtgttaggctttacat

SEQ ID NO: 63041 - DNA, 19 bp, Homo sapiens
  siRNA target sequence for KIAA0052 (NM_015360.2,2450-2468).
gttaggctttacattccta

SEQ ID NO: 63042 - DNA, 19 bp, Homo sapiens
  siRNA target sequence for KIAA0052 (NM_015360.2,2454-2472).
ggctttacattcctaaaga

SEQ ID NO: 63043 - DNA, 19 bp, Homo sapiens
  siRNA target sequence for KIAA0052 (NM_015360.2,2486-2504).
gacaatagacagagtgttt

SEQ ID NO: 63044 - DNA, 19 bp, Homo sapiens
  siRNA target sequence for KIAA0052 (NM_015360.2,2538-2556).
ctgacggcatccccttatt

SEQ ID NO: 63045 - DNA, 19 bp, Homo sapiens
  siRNA target sequence for KIAA0052 (NM_015360.2,2550-2568).
ccttattagaccctattga

SEQ ID NO: 63046 - DNA, 19 bp, Homo sapiens
  siRNA target sequence for KIAA0052 (NM_015360.2,2551-2569).
cttattagaccctattgat

SEQ ID NO: 63047 - DNA, 19 bp, Homo sapiens
  siRNA target sequence for KIAA0052 (NM_015360.2,2588-2606).
caagggctgaaaaaagtca

SEQ ID NO: 63048 - DNA, 19 bp, Homo sapiens
  siRNA target sequence for KIAA0052 (NM_015360.2,2622-2640).
cttttgagcatcgaatgta

SEQ ID NO: 63049 - DNA, 19 bp, Homo sapiens
  siRNA target sequence for KIAA0052 (NM_015360.2,2727-2745).
ctgcaaagcgagaactgaa

SEQ ID NO: 63050 - DNA, 19 bp, Homo sapiens
  siRNA target sequence for KIAA0052 (NM_015360.2,2806-2824).
gttgggatttgctacttct

SEQ ID NO: 63051 - DNA, 19 bp, Homo sapiens
  siRNA target sequence for KIAA0052 (NM_015360.2,2809-2827).
gggatttgctacttcttct

SEQ ID NO: 63052 - DNA, 19 bp, Homo sapiens
  siRNA target sequence for KIAA0052 (NM_015360.2,2816-2834).
gctacttcttctgatgtaa

SEQ ID NO: 63053 - DNA, 19 bp, Homo sapiens
  siRNA target sequence for KIAA0052 (NM_015360.2,2817-2835).
ctacttcttctgatgtaat

SEQ ID NO: 63054 - DNA, 19 bp, Homo sapiens
  siRNA target sequence for KIAA0052 (NM_015360.2,2849-2867).
cgagtggcttgtgagataa

SEQ ID NO: 63055 - DNA, 19 bp, Homo sapiens
  siRNA target sequence for KIAA0052 (NM_015360.2,2885-2903).
cttctaactgagatgatgt

SEQ ID NO: 63056 - DNA, 19 bp, Homo sapiens
  siRNA target sequence for KIAA0052 (NM_015360.2,2888-2906).
ctaactgagatgatgttta

SEQ ID NO: 63057 - DNA, 19 bp, Homo sapiens
  siRNA target sequence for KIAA0052 (NM_015360.2,2902-2920).
gtttaatggccttttcaat

SEQ ID NO: 63058 - DNA, 19 bp, Homo sapiens
  siRNA target sequence for KIAA0052 (NM_015360.2,2955-2973).
gctgctttgtgtttcaaga

SEQ ID NO: 63059 - DNA, 19 bp, Homo sapiens
  siRNA target sequence for KIAA0052 (NM_015360.2,2979-2997).
ctagtgagatgcccaaatt

SEQ ID NO: 63060 - DNA, 19 bp, Homo sapiens
  siRNA target sequence for KIAA0052 (NM_015360.2,3012-3030).
caggaccacttcgtcaaat

SEQ ID NO: 63061 - DNA, 19 bp, Homo sapiens
  siRNA target sequence for KIAA0052 (NM_015360.2,3015-3033).
gaccacttcgtcaaatgca

SEQ ID NO: 63062 - DNA, 19 bp, Homo sapiens
  siRNA target sequence for KIAA0052 (NM_015360.2,3117-3135).
ctcacttaatggatgtagt

SEQ ID NO: 63063 - DNA, 19 bp, Homo sapiens
  siRNA target sequence for KIAA0052 (NM_015360.2,3145-3163).
ggcaactggagctacattt

SEQ ID NO: 63064 - DNA, 19 bp, Homo sapiens
  siRNA target sequence for KIAA0052 (NM_015360.2,3155-3173).
gctacatttgcccatatct

SEQ ID NO: 63065 - DNA, 19 bp, Homo sapiens
  siRNA target sequence for KIAA0052 (NM_015360.2,3198-3216).
gcagcataattcgttgtat

SEQ ID NO: 63066 - DNA, 19 bp, Homo sapiens
  siRNA target sequence for KIAA0052 (NM_015360.2,3230-3248).
gaattgcttcgacaaatgt

SEQ ID NO: 63067 - DNA, 19 bp, Homo sapiens
  siRNA target sequence for KIAA0052 (NM_015360.2,3335-3353).
gctgccagcctctacttgt

SEQ ID NO: 63068 - DNA, 19 bp, Homo sapiens
  siRNA target sequence for KIAA0082 (NM_015050.1,174-192).
cactgcccccatcaagaaa

SEQ ID NO: 63069 - DNA, 19 bp, Homo sapiens
  siRNA target sequence for KIAA0082 (NM_015050.1,264-282).
cagtcatggagcaaaagca

SEQ ID NO: 63070 - DNA, 19 bp, Homo sapiens
  siRNA target sequence for KIAA0082 (NM_015050.1,294-312).
ccttagtgggtctgatagt

SEQ ID NO: 63071 - DNA, 19 bp, Homo sapiens
  siRNA target sequence for KIAA0082 (NM_015050.1,373-391).
cttgtggaaggaacttctt

SEQ ID NO: 63072 - DNA, 19 bp, Homo sapiens
  siRNA target sequence for KIAA0082 (NM_015050.1,392-410).
ctcgctattccatgtataa

SEQ ID NO: 63073 - DNA, 19 bp, Homo sapiens
  siRNA target sequence for KIAA0082 (NM_015050.1,413-431).
gcgtctcccagaagcttat

SEQ ID NO: 63074 - DNA, 19 bp, Homo sapiens
  siRNA target sequence for KIAA0082 (NM_015050.1,612-630).
gtcatggtttccagaatgt

SEQ ID NO: 63075 - DNA, 19 bp, Homo sapiens
  siRNA target sequence for KIAA0082 (NM_015050.1,622-640).
ccagaatgtaccactgaaa

SEQ ID NO: 63076 - DNA, 19 bp, Homo sapiens
  siRNA target sequence for KIAA0082 (NM_015050.1,684-702).
gagaaagatgattattgaa

SEQ ID NO: 63077 - DNA, 19 bp, Homo sapiens
  siRNA target sequence for KIAA0082 (NM_015050.1,750-768).
gtgtaagagcgtgtttgat

SEQ ID NO: 63078 - DNA, 19 bp, Homo sapiens
  siRNA target sequence for KIAA0082 (NM_015050.1,805-823).
cgggccaatccctatgaga

SEQ ID NO: 63079 - DNA, 19 bp, Homo sapiens
  siRNA target sequence for KIAA0082 (NM_015050.1,806-824).
gggccaatccctatgagat

SEQ ID NO: 63080 - DNA, 19 bp, Homo sapiens
  siRNA target sequence for KIAA0082 (NM_015050.1,857-875).
caatgaagatggctaacat

SEQ ID NO: 63081 - DNA, 19 bp, Homo sapiens
  siRNA target sequence for KIAA0082 (NM_015050.1,1091-1109).
ctgcttccagtgaactctt

SEQ ID NO: 63082 - DNA, 19 bp, Homo sapiens
  siRNA target sequence for KIAA0082 (NM_015050.1,1334-1352).
ggacaggaggccacttcat

SEQ ID NO: 63083 - DNA, 19 bp, Homo sapiens
  siRNA target sequence for KIAA0082 (NM_015050.1,1368-1386).
cctgttcacaccgtttagt

SEQ ID NO: 63084 - DNA, 19 bp, Homo sapiens
  siRNA target sequence for KIAA0082 (NM_015050.1,1432-1450).
ctcttcaagcctattacca

SEQ ID NO: 63085 - DNA, 19 bp, Homo sapiens
  siRNA target sequence for KIAA0082 (NM_015050.1,1491-1509).
cctgaaggtgggcatagat

SEQ ID NO: 63086 - DNA, 19 bp, Homo sapiens
  siRNA target sequence for KIAA0082 (NM_015050.1,1494-1512).
gaaggtgggcatagatgat

SEQ ID NO: 63087 - DNA, 19 bp, Homo sapiens
  siRNA target sequence for KIAA0082 (NM_015050.1,1497-1515).
ggtgggcatagatgatgtt

SEQ ID NO: 63088 - DNA, 19 bp, Homo sapiens
  siRNA target sequence for KIAA0082 (NM_015050.1,1524-1542).
cctcttcgcagtgaatatt

SEQ ID NO: 63089 - DNA, 19 bp, Homo sapiens
  siRNA target sequence for KIAA0082 (NM_015050.1,1527-1545).
cttcgcagtgaatattaaa

SEQ ID NO: 63090 - DNA, 19 bp, Homo sapiens
  siRNA target sequence for KIAA0082 (NM_015050.1,1531-1549).
gcagtgaatattaaactca

SEQ ID NO: 63091 - DNA, 19 bp, Homo sapiens
  siRNA target sequence for KIAA0082 (NM_015050.1,1565-1583).
cggattccgacgtcaactt

SEQ ID NO: 63092 - DNA, 19 bp, Homo sapiens
  siRNA target sequence for KIAA0082 (NM_015050.1,1722-1740).
gcctcgacaggcagagata

SEQ ID NO: 63093 - DNA, 19 bp, Homo sapiens
  siRNA target sequence for KIAA0082 (NM_015050.1,1799-1817).
cctccgaccctaaatcgaa

SEQ ID NO: 63094 - DNA, 19 bp, Homo sapiens
  siRNA target sequence for KIAA0082 (NM_015050.1,1806-1824).
ccctaaatcgaagttcttt

SEQ ID NO: 63095 - DNA, 19 bp, Homo sapiens
  siRNA target sequence for KIAA0082 (NM_015050.1,1814-1832).
cgaagttctttgagctaat

SEQ ID NO: 63096 - DNA, 19 bp, Homo sapiens
  siRNA target sequence for KIAA0082 (NM_015050.1,1834-1852).
cagggcactgagattgaca

SEQ ID NO: 63097 - DNA, 19 bp, Homo sapiens
  siRNA target sequence for KIAA0082 (NM_015050.1,1896-1914).
gaagatccgccctgtgttt

SEQ ID NO: 63098 - DNA, 19 bp, Homo sapiens
  siRNA target sequence for KIAA0082 (NM_015050.1,1915-1933).
gactaccgctgcatggtat

SEQ ID NO: 63099 - DNA, 19 bp, Homo sapiens
  siRNA target sequence for KIAA0150 (NM_015117.1,1314-1332).
cccgctctcggcttacaaa

SEQ ID NO: 63100 - DNA, 19 bp, Homo sapiens
  siRNA target sequence for KIAA0150 (NM_015117.1,1316-1334).
cgctctcggcttacaaagt

SEQ ID NO: 63101 - DNA, 19 bp, Homo sapiens
  siRNA target sequence for KIAA0150 (NM_015117.1,1318-1336).
ctctcggcttacaaagtga

SEQ ID NO: 63102 - DNA, 19 bp, Homo sapiens
  siRNA target sequence for KIAA0150 (NM_015117.1,1515-1533).
caccacgcaccgactatgt

SEQ ID NO: 63103 - DNA, 19 bp, Homo sapiens
  siRNA target sequence for KIAA0150 (NM_015117.1,1625-1643).
cccgctaccgcattgtcaa

SEQ ID NO: 63104 - DNA, 19 bp, Homo sapiens
  siRNA target sequence for KIAA0150 (NM_015117.1,1628-1646).
gctaccgcattgtcaagaa

SEQ ID NO: 63105 - DNA, 19 bp, Homo sapiens
  siRNA target sequence for KIAA0150 (NM_015117.1,1824-1842).
cggaggggtcctctacaaa

SEQ ID NO: 63106 - DNA, 19 bp, Homo sapiens
  siRNA target sequence for KIAA0150 (NM_015117.1,1826-1844).
gaggggtcctctacaaagt

SEQ ID NO: 63107 - DNA, 19 bp, Homo sapiens
  siRNA target sequence for KIAA0150 (NM_015117.1,1828-1846).
ggggtcctctacaaagtat

SEQ ID NO: 63108 - DNA, 19 bp, Homo sapiens
  siRNA target sequence for KIAA0663 (NM_014827.1,1330-1348).
cgtggagaattgcaaacta

SEQ ID NO: 63109 - DNA, 19 bp, Homo sapiens
  siRNA target sequence for KIAA0663 (NM_014827.1,1814-1832).
gtattagaacagaagctaa

SEQ ID NO: 63110 - DNA, 19 bp, Homo sapiens
  siRNA target sequence for KIAA1055 (NM_015079.2,354-372).
gtcttgtagccagagataa

SEQ ID NO: 63111 - DNA, 19 bp, Homo sapiens
  siRNA target sequence for KIAA1055 (NM_015079.2,368-386).
gataacactgatttaattt

SEQ ID NO: 63112 - DNA, 19 bp, Homo sapiens
  siRNA target sequence for KIAA1055 (NM_015079.2,488-506).
ccagggcatccaaattcca

SEQ ID NO: 63113 - DNA, 19 bp, Homo sapiens
  siRNA target sequence for KIAA1055 (NM_015079.2,489-507).
cagggcatccaaattccat

SEQ ID NO: 63114 - DNA, 19 bp, Homo sapiens
  siRNA target sequence for KIAA1055 (NM_015079.2,766-784).
gcgccctttgaaagacata

SEQ ID NO: 63115 - DNA, 19 bp, Homo sapiens
  siRNA target sequence for KIAA1055 (NM_015079.2,769-787).
ccctttgaaagacataatt

SEQ ID NO: 63116 - DNA, 19 bp, Homo sapiens
  siRNA target sequence for KIAA1055 (NM_015079.2,781-799).
cataattgggtcgtacaaa

SEQ ID NO: 63117 - DNA, 19 bp, Homo sapiens
  siRNA target sequence for KIAA1055 (NM_015079.2,811-829).
cagtggtgacccttcaagt

SEQ ID NO: 63118 - DNA, 19 bp, Homo sapiens
  siRNA target sequence for KIAA1055 (NM_015079.2,980-998).
cggtcatcccagtatgaca

SEQ ID NO: 63119 - DNA, 19 bp, Homo sapiens
  siRNA target sequence for KIAA1055 (NM_015079.2,1051-1069).
gcttctgcaccaaaaggat

SEQ ID NO: 63120 - DNA, 19 bp, Homo sapiens
  siRNA target sequence for KIAA1055 (NM_015079.2,1326-1344).
ggctgaaagataatctaca

SEQ ID NO: 63121 - DNA, 19 bp, Homo sapiens
  siRNA target sequence for KIAA1055 (NM_015079.2,1393-1411).
ctcagctctacgaagaaat

SEQ ID NO: 63122 - DNA, 19 bp, Homo sapiens
  siRNA target sequence for KIAA1055 (NM_015079.2,1428-1446).
gggatctgatggcaaagta

SEQ ID NO: 63123 - DNA, 19 bp, Homo sapiens
  siRNA target sequence for KIAA1055 (NM_015079.2,1603-1621).
gccggagcaagcatttgtt

SEQ ID NO: 63124 - DNA, 19 bp, Homo sapiens
  siRNA target sequence for KIAA1055 (NM_015079.2,1604-1622).
ccggagcaagcatttgtta

SEQ ID NO: 63125 - DNA, 19 bp, Homo sapiens
  siRNA target sequence for KIAA1055 (NM_015079.2,1766-1784).
gtcaagtgggaaaactatt

SEQ ID NO: 63126 - DNA, 19 bp, Homo sapiens
  siRNA target sequence for KIAA1055 (NM_015079.2,1796-1814).
gtgaacagggagatgatgt

SEQ ID NO: 63127 - DNA, 19 bp, Homo sapiens
  siRNA target sequence for KIAA1055 (NM_015079.2,1810-1828).
gatgtgctctccagagtta

SEQ ID NO: 63128 - DNA, 19 bp, Homo sapiens
  siRNA target sequence for KIAA1055 (NM_015079.2,1818-1836).
ctccagagttaaaaaacct

SEQ ID NO: 63129 - DNA, 19 bp, Homo sapiens
  siRNA target sequence for KIAA1055 (NM_015079.2,2091-2109).
cctggcggaatccagatat

SEQ ID NO: 63130 - DNA, 19 bp, Homo sapiens
  siRNA target sequence for KIAA1055 (NM_015079.2,2179-2197).
ctggtgtctcgttaccata

SEQ ID NO: 63131 - DNA, 19 bp, Homo sapiens
  siRNA target sequence for KIAA1055 (NM_015079.2,2209-2227).
catgcctcgagactattat

SEQ ID NO: 63132 - DNA, 19 bp, Homo sapiens
  siRNA target sequence for KIAA1055 (NM_015079.2,2212-2230).
gcctcgagactattataca

SEQ ID NO: 63133 - DNA, 19 bp, Homo sapiens
  siRNA target sequence for KIAA1055 (NM_015079.2,2214-2232).
ctcgagactattatacaaa

SEQ ID NO: 63134 - DNA, 19 bp, Homo sapiens
  siRNA target sequence for KIAA1055 (NM_015079.2,2262-2280).
gggtgttcagagaccttat

SEQ ID NO: 63135 - DNA, 19 bp, Homo sapiens
  siRNA target sequence for KIAA1055 (NM_015079.2,2298-2316).
ggttgcatggccactttga

SEQ ID NO: 63136 - DNA, 19 bp, Homo sapiens
  siRNA target sequence for KIAA1055 (NM_015079.2,2299-2317).
gttgcatggccactttgaa

SEQ ID NO: 63137 - DNA, 19 bp, Homo sapiens
  siRNA target sequence for KIAA1055 (NM_015079.2,2307-2325).
gccactttgaacagtacaa

SEQ ID NO: 63138 - DNA, 19 bp, Homo sapiens
  siRNA target sequence for KIAA1055 (NM_015079.2,2330-2348).
gactacactctcatcactt

SEQ ID NO: 63139 - DNA, 19 bp, Homo sapiens
  siRNA target sequence for KIAA1055 (NM_015079.2,2384-2402).
gttagtgacatcctcttta

SEQ ID NO: 63140 - DNA, 19 bp, Homo sapiens
  siRNA target sequence for KIAA1055 (NM_015079.2,2448-2466).
gttttgctctggcactttt

SEQ ID NO: 63141 - DNA, 19 bp, Homo sapiens
  siRNA target sequence for KIAA1055 (NM_015079.2,2497-2515).
gcaagattcgatgtctata

SEQ ID NO: 63142 - DNA, 19 bp, Homo sapiens
  siRNA target sequence for KIAA1055 (NM_015079.2,2498-2516).
caagattcgatgtctatat

SEQ ID NO: 63143 - DNA, 19 bp, Homo sapiens
  siRNA target sequence for KIAA1055 (NM_015079.2,2501-2519).
gattcgatgtctatattta

SEQ ID NO: 63144 - DNA, 19 bp, Homo sapiens
  siRNA target sequence for KIAA1055 (NM_015079.2,2505-2523).
cgatgtctatatttaagta

SEQ ID NO: 63145 - DNA, 19 bp, Homo sapiens
  siRNA target sequence for KIAA1055 (NM_015079.2,2506-2524).
gatgtctatatttaagtat

SEQ ID NO: 63146 - DNA, 19 bp, Homo sapiens
  siRNA target sequence for KIAA1055 (NM_015079.2,2533-2551).
cttcactcgcactatcctt

SEQ ID NO: 63147 - DNA, 19 bp, Homo sapiens
  siRNA target sequence for KIAA1285 (NM_015694.1,350-368).
cacgatgggatcgtgatta

SEQ ID NO: 63148 - DNA, 19 bp, Homo sapiens
  siRNA target sequence for KIAA1285 (NM_015694.1,549-567).
gcgagttcagcgaactgaa

SEQ ID NO: 63149 - DNA, 19 bp, Homo sapiens
  siRNA target sequence for KIAA1285 (NM_015694.1,597-615).
cggaggggatcgtgatcaa

SEQ ID NO: 63150 - DNA, 19 bp, Homo sapiens
  siRNA target sequence for KIAA1285 (NM_015694.1,1490-1508).
gttaatttccttgacaata

SEQ ID NO: 63151 - DNA, 19 bp, Homo sapiens
  siRNA target sequence for KIAA1285 (NM_015694.1,1570-1588).
gtgtagggcccatctagtt

SEQ ID NO: 63152 - DNA, 19 bp, Homo sapiens
  siRNA target sequence for KIAA1285 (NM_015694.1,1580-1598).
catctagttggggatagaa

SEQ ID NO: 63153 - DNA, 19 bp, Homo sapiens
  siRNA target sequence for KIAA1285 (NM_015694.1,1586-1604).
gttggggatagaactttat

SEQ ID NO: 63154 - DNA, 19 bp, Homo sapiens
  siRNA target sequence for KIAA1582 (NM_018996.2,185-203).
gacataccaagaagacaaa

SEQ ID NO: 63155 - DNA, 19 bp, Homo sapiens
  siRNA target sequence for KIAA1582 (NM_018996.2,231-249).
cgtccaaagcccttctaat

SEQ ID NO: 63156 - DNA, 19 bp, Homo sapiens
  siRNA target sequence for KIAA1582 (NM_018996.2,265-283).
gcagggggagcgaacagta

SEQ ID NO: 63157 - DNA, 19 bp, Homo sapiens
  siRNA target sequence for KIAA1582 (NM_018996.2,266-284).
cagggggagcgaacagtaa

SEQ ID NO: 63158 - DNA, 19 bp, Homo sapiens
  siRNA target sequence for KIAA1582 (NM_018996.2,270-288).
gggagcgaacagtaatgga

SEQ ID NO: 63159 - DNA, 19 bp, Homo sapiens
  siRNA target sequence for KIAA1582 (NM_018996.2,425-443).
ccaatgctggcattaatct

SEQ ID NO: 63160 - DNA, 19 bp, Homo sapiens
  siRNA target sequence for KIAA1582 (NM_018996.2,431-449).
ctggcattaatcttaacct

SEQ ID NO: 63161 - DNA, 19 bp, Homo sapiens
  siRNA target sequence for KIAA1582 (NM_018996.2,511-529).
ggcaacccttccagtattt

SEQ ID NO: 63162 - DNA, 19 bp, Homo sapiens
  siRNA target sequence for KIAA1582 (NM_018996.2,579-597).
cccaacaggcactttaggt

SEQ ID NO: 63163 - DNA, 19 bp, Homo sapiens
  siRNA target sequence for KIAA1582 (NM_018996.2,641-659).
cgtccacttctcagaatgt

SEQ ID NO: 63164 - DNA, 19 bp, Homo sapiens
  siRNA target sequence for KIAA1582 (NM_018996.2,730-748).
cccaaccctatcaatgcaa

SEQ ID NO: 63165 - DNA, 19 bp, Homo sapiens
  siRNA target sequence for KIAA1582 (NM_018996.2,731-749).
ccaaccctatcaatgcaat

SEQ ID NO: 63166 - DNA, 19 bp, Homo sapiens
  siRNA target sequence for KIAA1582 (NM_018996.2,741-759).
caatgcaatgcagacaaat

SEQ ID NO: 63167 - DNA, 19 bp, Homo sapiens
  siRNA target sequence for KIAA1582 (NM_018996.2,832-850).
gctaatggatcatcagttt

SEQ ID NO: 63168 - DNA, 19 bp, Homo sapiens
  siRNA target sequence for KIAA1582 (NM_018996.2,869-887).
gtgctgaaggaataagcaa

SEQ ID NO: 63169 - DNA, 19 bp, Homo sapiens
  siRNA target sequence for KIAA1582 (NM_018996.2,871-889).
gctgaaggaataagcaatt

SEQ ID NO: 63170 - DNA, 19 bp, Homo sapiens
  siRNA target sequence for KIAA1582 (NM_018996.2,921-939).
cacaggaaatagcaattct

SEQ ID NO: 63171 - DNA, 19 bp, Homo sapiens
  siRNA target sequence for KIAA1582 (NM_018996.2,977-995).
cattaagtgctaaacaaaa

SEQ ID NO: 63172 - DNA, 19 bp, Homo sapiens
  siRNA target sequence for KIAA1582 (NM_018996.2,1004-1022).
gcagtgctgtgcaaaagga

SEQ ID NO: 63173 - DNA, 19 bp, Homo sapiens
  siRNA target sequence for KIAA1582 (NM_018996.2,1097-1115).
gcaacaatggcgttggtaa

SEQ ID NO: 63174 - DNA, 19 bp, Homo sapiens
  siRNA target sequence for KIAA1582 (NM_018996.2,1098-1116).
caacaatggcgttggtaat

SEQ ID NO: 63175 - DNA, 19 bp, Homo sapiens
  siRNA target sequence for KIAA1582 (NM_018996.2,1105-1123).
ggcgttggtaatatccatt

SEQ ID NO: 63176 - DNA, 19 bp, Homo sapiens
  siRNA target sequence for KIAA1582 (NM_018996.2,1152-1170).
cacctctaacggtgtgaat

SEQ ID NO: 63177 - DNA, 19 bp, Homo sapiens
  siRNA target sequence for KIAA1582 (NM_018996.2,1215-1233).
caatgggaaaggatcaaca

SEQ ID NO: 63178 - DNA, 19 bp, Homo sapiens
  siRNA target sequence for KIAA1582 (NM_018996.2,1355-1373).
gttctggcaaccacaatga

SEQ ID NO: 63179 - DNA, 19 bp, Homo sapiens
  siRNA target sequence for KIAA1582 (NM_018996.2,1413-1431).
gcgagataaagggattata

SEQ ID NO: 63180 - DNA, 19 bp, Homo sapiens
  siRNA target sequence for KIAA1582 (NM_018996.2,1443-1461).
catccagttgccaaggaat

SEQ ID NO: 63181 - DNA, 19 bp, Homo sapiens
  siRNA target sequence for KIAA1582 (NM_018996.2,1446-1464).
ccagttgccaaggaatgat

SEQ ID NO: 63182 - DNA, 19 bp, Homo sapiens
  siRNA target sequence for KIAA1582 (NM_018996.2,1470-1488).
cccaagagttctgtctaat

SEQ ID NO: 63183 - DNA, 19 bp, Homo sapiens
  siRNA target sequence for KIAA1582 (NM_018996.2,1540-1558).
gaatcccctaggtctgaaa

SEQ ID NO: 63184 - DNA, 19 bp, Homo sapiens
  siRNA target sequence for KIAA1582 (NM_018996.2,1545-1563).
ccctaggtctgaaaggaaa

SEQ ID NO: 63185 - DNA, 19 bp, Homo sapiens
  siRNA target sequence for KIAA1582 (NM_018996.2,1597-1615).
gctactcaggcttcaaact

SEQ ID NO: 63186 - DNA, 19 bp, Homo sapiens
  siRNA target sequence for KIAA1582 (NM_018996.2,1630-1648).
gatgggtccatcatgaaca

SEQ ID NO: 63187 - DNA, 19 bp, Homo sapiens
  siRNA target sequence for KIAA1582 (NM_018996.2,1638-1656).
catcatgaacagtacaaat

SEQ ID NO: 63188 - DNA, 19 bp, Homo sapiens
  siRNA target sequence for KIAA1582 (NM_018996.2,2003-2021).
gatgggatgctgacagtaa

SEQ ID NO: 63189 - DNA, 19 bp, Homo sapiens
  siRNA target sequence for KIAA1582 (NM_018996.2,2025-2043).
gtcagggtctggttggaat

SEQ ID NO: 63190 - DNA, 19 bp, Homo sapiens
  siRNA target sequence for KIAA1582 (NM_018996.2,2029-2047).
gggtctggttggaatgaca

SEQ ID NO: 63191 - DNA, 19 bp, Homo sapiens
  siRNA target sequence for KIAA1582 (NM_018996.2,2073-2091).
gggcaacagcacaaataca

SEQ ID NO: 63192 - DNA, 19 bp, Homo sapiens
  siRNA target sequence for KIAA1582 (NM_018996.2,2095-2113).
gccaatccaggtacaaact

SEQ ID NO: 63193 - DNA, 19 bp, Homo sapiens
  siRNA target sequence for KIAA1582 (NM_018996.2,2115-2133).
gggggagactttaaaacct

SEQ ID NO: 63194 - DNA, 19 bp, Homo sapiens
  siRNA target sequence for KIAA1582 (NM_018996.2,2161-2179).
ccccaagacaacaatgtga

SEQ ID NO: 63195 - DNA, 19 bp, Homo sapiens
  siRNA target sequence for KIAA1582 (NM_018996.2,2167-2185).
gacaacaatgtgagtaact

SEQ ID NO: 63196 - DNA, 19 bp, Homo sapiens
  siRNA target sequence for KIAA1582 (NM_018996.2,2236-2254).
ccggtaccggtcaaacaga

SEQ ID NO: 63197 - DNA, 19 bp, Homo sapiens
  siRNA target sequence for KIAA1582 (NM_018996.2,2237-2255).
cggtaccggtcaaacagaa

SEQ ID NO: 63198 - DNA, 19 bp, Homo sapiens
  siRNA target sequence for KIAA1582 (NM_018996.2,2297-2315).
cgtccattcgccgcaaaat

SEQ ID NO: 63199 - DNA, 19 bp, Homo sapiens
  siRNA target sequence for KIAA1582 (NM_018996.2,2300-2318).
ccattcgccgcaaaatgga

SEQ ID NO: 63200 - DNA, 19 bp, Homo sapiens
  siRNA target sequence for KIAA1582 (NM_018996.2,2347-2365).
gacccaagcaactataaca

SEQ ID NO: 63201 - DNA, 19 bp, Homo sapiens
  siRNA target sequence for KIAA1582 (NM_018996.2,2350-2368).
ccaagcaactataacaata

SEQ ID NO: 63202 - DNA, 19 bp, Homo sapiens
  siRNA target sequence for KIAA1582 (NM_018996.2,2500-2518).
ggtactcagctgaatcgat

SEQ ID NO: 63203 - DNA, 19 bp, Homo sapiens
  siRNA target sequence for KIAA1582 (NM_018996.2,2575-2593).
gttcactcaaagactgaaa

SEQ ID NO: 63204 - DNA, 19 bp, Homo sapiens
  siRNA target sequence for KIAA1582 (NM_018996.2,2839-2857).
gaaggggacgtgtggaata

SEQ ID NO: 63205 - DNA, 19 bp, Homo sapiens
  siRNA target sequence for KIAA1582 (NM_018996.2,2844-2862).
ggacgtgtggaataatgct

SEQ ID NO: 63206 - DNA, 19 bp, Homo sapiens
  siRNA target sequence for KIAA1582 (NM_018996.2,2972-2990).
gccggctgatcaaacaact

SEQ ID NO: 63207 - DNA, 19 bp, Homo sapiens
  siRNA target sequence for KIAA1582 (NM_018996.2,3025-3043).
gaggccttgaagagtaaca

SEQ ID NO: 63208 - DNA, 19 bp, Homo sapiens
  siRNA target sequence for KIAA1582 (NM_018996.2,3027-3045).
ggccttgaagagtaacaat

SEQ ID NO: 63209 - DNA, 19 bp, Homo sapiens
  siRNA target sequence for KIAA1582 (NM_018996.2,3028-3046).
gccttgaagagtaacaata

SEQ ID NO: 63210 - DNA, 19 bp, Homo sapiens
  siRNA target sequence for KIAA1582 (NM_018996.2,3029-3047).
ccttgaagagtaacaatat

SEQ ID NO: 63211 - DNA, 19 bp, Homo sapiens
  siRNA target sequence for KIAA1582 (NM_018996.2,3036-3054).
gagtaacaatatgaatctt

SEQ ID NO: 63212 - DNA, 19 bp, Homo sapiens
  siRNA target sequence for KIAA1582 (NM_018996.2,3038-3056).
gtaacaatatgaatcttga

SEQ ID NO: 63213 - DNA, 19 bp, Homo sapiens
  siRNA target sequence for KIAA1582 (NM_018996.2,3115-3133).
gtgaccgaccataatggaa

SEQ ID NO: 63214 - DNA, 19 bp, Homo sapiens
  siRNA target sequence for KIAA1582 (NM_018996.2,3368-3386).
gtggcaatctgggtatgtt

SEQ ID NO: 63215 - DNA, 19 bp, Homo sapiens
  siRNA target sequence for KIAA1582 (NM_018996.2,3437-3455).
caccagtgcagcctcttaa

SEQ ID NO: 63216 - DNA, 19 bp, Homo sapiens
  siRNA target sequence for KIAA1582 (NM_018996.2,3548-3566).
gtctcaaccctgcactatt

SEQ ID NO: 63217 - DNA, 19 bp, Homo sapiens
  siRNA target sequence for KIAA1582 (NM_018996.2,3550-3568).
ctcaaccctgcactattaa

SEQ ID NO: 63218 - DNA, 19 bp, Homo sapiens
  siRNA target sequence for KIAA1582 (NM_018996.2,3562-3580).
ctattaacctcgccaatta

SEQ ID NO: 63219 - DNA, 19 bp, Homo sapiens
  siRNA target sequence for KIAA1582 (NM_018996.2,3586-3604).
caacatatgacgatgttga

SEQ ID NO: 63220 - DNA, 19 bp, Homo sapiens
  siRNA target sequence for KIAA1582 (NM_018996.2,3618-3636).
gctgcagctggcataccaa

SEQ ID NO: 63221 - DNA, 19 bp, Homo sapiens
  siRNA target sequence for KIAA1582 (NM_018996.2,3624-3642).
gctggcataccaacgttta

SEQ ID NO: 63222 - DNA, 19 bp, Homo sapiens
  siRNA target sequence for KIAA1582 (NM_018996.2,3627-3645).
ggcataccaacgtttacaa

SEQ ID NO: 63223 - DNA, 19 bp, Homo sapiens
  siRNA target sequence for KIAA1582 (NM_018996.2,3709-3727).
caagttgcgcgcacaatca

SEQ ID NO: 63224 - DNA, 19 bp, Homo sapiens
  siRNA target sequence for KIAA1582 (NM_018996.2,3712-3730).
gttgcgcgcacaatcacta

SEQ ID NO: 63225 - DNA, 19 bp, Homo sapiens
  siRNA target sequence for KIAA1582 (NM_018996.2,3716-3734).
cgcgcacaatcactaatct

SEQ ID NO: 63226 - DNA, 19 bp, Homo sapiens
  siRNA target sequence for KIAA1582 (NM_018996.2,4128-4146).
ccctggaggtctaagcatt

SEQ ID NO: 63227 - DNA, 19 bp, Homo sapiens
  siRNA target sequence for KIAA1582 (NM_018996.2,4178-4196).
cctatggccggtacgattt

SEQ ID NO: 63228 - DNA, 19 bp, Homo sapiens
  siRNA target sequence for KIAA1582 (NM_018996.2,4179-4197).
ctatggccggtacgattta

SEQ ID NO: 63229 - DNA, 19 bp, Homo sapiens
  siRNA target sequence for KIAA1582 (NM_018996.2,4184-4202).
gccggtacgatttaatcca

SEQ ID NO: 63230 - DNA, 19 bp, Homo sapiens
  siRNA target sequence for KIAA1582 (NM_018996.2,4250-4268).
ggtcacgtgccaaatctga

SEQ ID NO: 63231 - DNA, 19 bp, Homo sapiens
  siRNA target sequence for KIAA1582 (NM_018996.2,4334-4352).
ggaaaggactgcagaatat

SEQ ID NO: 63232 - DNA, 19 bp, Homo sapiens
  siRNA target sequence for KIAA1582 (NM_018996.2,4515-4533).
ctctctgtctcatgaacta

SEQ ID NO: 63233 - DNA, 19 bp, Homo sapiens
  siRNA target sequence for KIAA1582 (NM_018996.2,4571-4589).
cacctccagggttaaccaa

SEQ ID NO: 63234 - DNA, 19 bp, Homo sapiens
  siRNA target sequence for KIAA1582 (NM_018996.2,4691-4709).
gctggctcgttcttcgaaa

SEQ ID NO: 63235 - DNA, 19 bp, Homo sapiens
  siRNA target sequence for KIAA1582 (NM_018996.2,4710-4728).
cctcactccccagattgat

SEQ ID NO: 63236 - DNA, 19 bp, Homo sapiens
  siRNA target sequence for KIAA1582 (NM_018996.2,4756-4774).
caacatgggcctcttatca

SEQ ID NO: 63237 - DNA, 19 bp, Homo sapiens
  siRNA target sequence for KIAA1582 (NM_018996.2,4759-4777).
catgggcctcttatcacat

SEQ ID NO: 63238 - DNA, 19 bp, Homo sapiens
  siRNA target sequence for KIAA1582 (NM_018996.2,4863-4881).
gtgcgtcctgggaaacact

SEQ ID NO: 63239 - DNA, 19 bp, Homo sapiens
  siRNA target sequence for KIAA1847 (NM_032527.2,603-621).
ggggcactctggagtatca

SEQ ID NO: 63240 - DNA, 19 bp, Homo sapiens
  siRNA target sequence for KIAA1847 (NM_032527.2,605-623).
ggcactctggagtatcaca

SEQ ID NO: 63241 - DNA, 19 bp, Homo sapiens
  siRNA target sequence for KIAA1847 (NM_032527.2,606-624).
gcactctggagtatcacaa

SEQ ID NO: 63242 - DNA, 19 bp, Homo sapiens
  siRNA target sequence for KIAA1847 (NM_032527.2,735-753).
gaaagtgccgctttaagga

SEQ ID NO: 63243 - DNA, 19 bp, Homo sapiens
  siRNA target sequence for KIAA1847 (NM_032527.2,899-917).
gtggacaacggctactaca

SEQ ID NO: 63244 - DNA, 19 bp, Homo sapiens
  siRNA target sequence for KIAA1847 (NM_032527.2,909-927).
gctactacacagtcaagtt

SEQ ID NO: 63245 - DNA, 19 bp, Homo sapiens
  siRNA target sequence for KIAA1847 (NM_032527.2,1168-1186).
ggtgcacacgcgaggtata

SEQ ID NO: 63246 - DNA, 19 bp, Homo sapiens
  siRNA target sequence for KIAA1847 (NM_032527.2,1407-1425).
ctcctcggaatgtgtttga

SEQ ID NO: 63247 - DNA, 19 bp, Homo sapiens
  siRNA target sequence for KIAA1847 (NM_032527.2,1420-1438).
gtttgacttcctcaatgaa

SEQ ID NO: 63248 - DNA, 19 bp, Homo sapiens
  siRNA target sequence for LEREPO4 (NM_018471.1,283-301).
gaaggagaagattatcgaa

SEQ ID NO: 63249 - DNA, 19 bp, Homo sapiens
  siRNA target sequence for LEREPO4 (NM_018471.1,333-351).
gagcaaagcaacagaagtt

SEQ ID NO: 63250 - DNA, 19 bp, Homo sapiens
  siRNA target sequence for LEREPO4 (NM_018471.1,362-380).
gtcacacatcaagttaaat

SEQ ID NO: 63251 - DNA, 19 bp, Homo sapiens
  siRNA target sequence for LEREPO4 (NM_018471.1,364-382).
cacacatcaagttaaattt

SEQ ID NO: 63252 - DNA, 19 bp, Homo sapiens
  siRNA target sequence for LEREPO4 (NM_018471.1,466-484).
gctaaatgagctgttcaaa

SEQ ID NO: 63253 - DNA, 19 bp, Homo sapiens
  siRNA target sequence for LEREPO4 (NM_018471.1,533-551).
gtagtatgtgcattcttca

SEQ ID NO: 63254 - DNA, 19 bp, Homo sapiens
  siRNA target sequence for LEREPO4 (NM_018471.1,582-600).
gtaagttctcccatgactt

SEQ ID NO: 63255 - DNA, 19 bp, Homo sapiens
  siRNA target sequence for LEREPO4 (NM_018471.1,618-636).
gtgaaaagcgaagtgttta

SEQ ID NO: 63256 - DNA, 19 bp, Homo sapiens
  siRNA target sequence for LEREPO4 (NM_018471.1,625-643).
gcgaagtgtttacattgat

SEQ ID NO: 63257 - DNA, 19 bp, Homo sapiens
  siRNA target sequence for LEREPO4 (NM_018471.1,677-695).
gataattgggatgagaaaa

SEQ ID NO: 63258 - DNA, 19 bp, Homo sapiens
  siRNA target sequence for LEREPO4 (NM_018471.1,746-764).
ccaaaaactcaaatagtgt

SEQ ID NO: 63259 - DNA, 19 bp, Homo sapiens
  siRNA target sequence for LEREPO4 (NM_018471.1,779-797).
gaagctattgaaaacaaca

SEQ ID NO: 63260 - DNA, 19 bp, Homo sapiens
  siRNA target sequence for LEREPO4 (NM_018471.1,782-800).
gctattgaaaacaacaagt

SEQ ID NO: 63261 - DNA, 19 bp, Homo sapiens
  siRNA target sequence for LEREPO4 (NM_018471.1,819-837).
gccctggagggggtgatat

SEQ ID NO: 63262 - DNA, 19 bp, Homo sapiens
  siRNA target sequence for LEREPO4 (NM_018471.1,948-966).
ctgccctaggtccaaatgt

SEQ ID NO: 63263 - DNA, 19 bp, Homo sapiens
  siRNA target sequence for LEREPO4 (NM_018471.1,1093-1111).
cagtggtcgtgaagtgttt

SEQ ID NO: 63264 - DNA, 19 bp, Homo sapiens
  siRNA target sequence for LEREPO4 (NM_018471.1,1095-1113).
gtggtcgtgaagtgtttga

SEQ ID NO: 63265 - DNA, 19 bp, Homo sapiens
  siRNA target sequence for LEREPO4 (NM_018471.1,1097-1115).
ggtcgtgaagtgtttgaat

SEQ ID NO: 63266 - DNA, 19 bp, Homo sapiens
  siRNA target sequence for LEREPO4 (NM_018471.1,1098-1116).
gtcgtgaagtgtttgaatt

SEQ ID NO: 63267 - DNA, 19 bp, Homo sapiens
  siRNA target sequence for LEREPO4 (NM_018471.1,1196-1214).
gatgattcagtgagtgtaa

SEQ ID NO: 63268 - DNA, 19 bp, Homo sapiens
  siRNA target sequence for LEREPO4 (NM_018471.1,1207-1225).
gagtgtaaatgacatagat

SEQ ID NO: 63269 - DNA, 19 bp, Homo sapiens
  siRNA target sequence for LEREPO4 (NM_018471.1,1231-1249).
cctgtacatcccaagagat

SEQ ID NO: 63270 - DNA, 19 bp, Homo sapiens
  siRNA target sequence for LEREPO4 (NM_018471.1,1234-1252).
gtacatcccaagagatgta

SEQ ID NO: 63271 - DNA, 19 bp, Homo sapiens
  siRNA target sequence for LEREPO4 (NM_018471.1,1271-1289).
gtagccagtcttgaaagat

SEQ ID NO: 63272 - DNA, 19 bp, Homo sapiens
  siRNA target sequence for LEREPO4 (NM_018471.1,1296-1314).
catatacttcagataaaga

SEQ ID NO: 63273 - DNA, 19 bp, Homo sapiens
  siRNA target sequence for LGALS12 (NM_033101.2,338-356).
cctggaacgaggatctaca

SEQ ID NO: 63274 - DNA, 19 bp, Homo sapiens
  siRNA target sequence for LGALS12 (NM_033101.2,341-359).
ggaacgaggatctacagtt

SEQ ID NO: 63275 - DNA, 19 bp, Homo sapiens
  siRNA target sequence for LGALS12 (NM_033101.2,452-470).
ccttatgtcacgacgattt

SEQ ID NO: 63276 - DNA, 19 bp, Homo sapiens
  siRNA target sequence for LGALS12 (NM_033101.2,453-471).
cttatgtcacgacgatttt

SEQ ID NO: 63277 - DNA, 19 bp, Homo sapiens
  siRNA target sequence for LGALS12 (NM_033101.2,806-824).
gtggacacgctgggtatat

SEQ ID NO: 63278 - DNA, 19 bp, Homo sapiens
  siRNA target sequence for LGALS12 (NM_033101.2,808-826).
ggacacgctgggtatattt

SEQ ID NO: 63279 - DNA, 19 bp, Homo sapiens
  siRNA target sequence for LGALS12 (NM_033101.2,848-866).
gttggattcctgaacatca

SEQ ID NO: 63280 - DNA, 19 bp, Homo sapiens
  siRNA target sequence for LGALS12 (NM_033101.2,856-874).
cctgaacatcaatccattt

SEQ ID NO: 63281 - DNA, 19 bp, Homo sapiens
  siRNA target sequence for LGALS12 (NM_033101.2,975-993).
ctgggcaggtcatcatagt

SEQ ID NO: 63282 - DNA, 19 bp, Homo sapiens
  siRNA target sequence for LGALS12 (NM_033101.2,1009-1027).
gcaagagccgaagcatttt

SEQ ID NO: 63283 - DNA, 19 bp, Homo sapiens
  siRNA target sequence for LGALS12 (NM_033101.2,1010-1028).
caagagccgaagcatttta

SEQ ID NO: 63284 - DNA, 19 bp, Homo sapiens
  siRNA target sequence for LGP2 (NM_024119.1,227-245).
gagcttcggtcctaccaat

SEQ ID NO: 63285 - DNA, 19 bp, Homo sapiens
  siRNA target sequence for LGP2 (NM_024119.1,644-662).
gtctacaacgtcatcatga

SEQ ID NO: 63286 - DNA, 19 bp, Homo sapiens
  siRNA target sequence for LGP2 (NM_024119.1,663-681).
gccagtacctagaacttaa

SEQ ID NO: 63287 - DNA, 19 bp, Homo sapiens
  siRNA target sequence for LGP2 (NM_024119.1,664-682).
ccagtacctagaacttaaa

SEQ ID NO: 63288 - DNA, 19 bp, Homo sapiens
  siRNA target sequence for LGP2 (NM_024119.1,800-818).
gacacgtggtgcatcatgt

SEQ ID NO: 63289 - DNA, 19 bp, Homo sapiens
  siRNA target sequence for LGP2 (NM_024119.1,853-871).
cagccaacagccttgcaaa

SEQ ID NO: 63290 - DNA, 19 bp, Homo sapiens
  siRNA target sequence for LGP2 (NM_024119.1,1137-1155).
cgctgcaggatttctatca

SEQ ID NO: 63291 - DNA, 19 bp, Homo sapiens
  siRNA target sequence for LGP2 (NM_024119.1,1213-1231).
gttcgatgaccgcaagaat

SEQ ID NO: 63292 - DNA, 19 bp, Homo sapiens
  siRNA target sequence for LGP2 (NM_024119.1,1237-1255).
ggcccacttggcaactcat

SEQ ID NO: 63293 - DNA, 19 bp, Homo sapiens
  siRNA target sequence for LGP2 (NM_024119.1,1257-1275).
gcccagagaatccaaaact

SEQ ID NO: 63294 - DNA, 19 bp, Homo sapiens
  siRNA target sequence for LGP2 (NM_024119.1,1295-1313).
ctgcaaaggcagttcagta

SEQ ID NO: 63295 - DNA, 19 bp, Homo sapiens
  siRNA target sequence for LGP2 (NM_024119.1,1304-1322).
cagttcagtagctctaaca

SEQ ID NO: 63296 - DNA, 19 bp, Homo sapiens
  siRNA target sequence for LGP2 (NM_024119.1,1323-1341).
gccctcggggtatcatctt

SEQ ID NO: 63297 - DNA, 19 bp, Homo sapiens
  siRNA target sequence for LGP2 (NM_024119.1,1325-1343).
cctcggggtatcatcttca

SEQ ID NO: 63298 - DNA, 19 bp, Homo sapiens
  siRNA target sequence for LGP2 (NM_024119.1,1593-1611).
ggctcttgaccaatgaaat

SEQ ID NO: 63299 - DNA, 19 bp, Homo sapiens
  siRNA target sequence for LGP2 (NM_024119.1,1651-1669).
gagtgtatacgcgtttgta

SEQ ID NO: 63300 - DNA, 19 bp, Homo sapiens
  siRNA target sequence for LGP2 (NM_024119.1,1660-1678).
cgcgtttgtagcaactgaa

SEQ ID NO: 63301 - DNA, 19 bp, Homo sapiens
  siRNA target sequence for LGP2 (NM_024119.1,1967-1985).
cccaacttctcgaactact

SEQ ID NO: 63302 - DNA, 19 bp, Homo sapiens
  siRNA target sequence for LGP2 (NM_024119.1,1968-1986).
ccaacttctcgaactacta

SEQ ID NO: 63303 - DNA, 19 bp, Homo sapiens
  siRNA target sequence for LGP2 (NM_024119.1,1969-1987).
caacttctcgaactactat

SEQ ID NO: 63304 - DNA, 19 bp, Homo sapiens
  siRNA target sequence for LGP2 (NM_024119.1,2222-2240).
cattgtgccgagaacttgt

SEQ ID NO: 63305 - DNA, 19 bp, Homo sapiens
  siRNA target sequence for LKAP (NM_014647.1,239-257).
ggatggcttcaacaagata

SEQ ID NO: 63306 - DNA, 19 bp, Homo sapiens
  siRNA target sequence for LKAP (NM_014647.1,240-258).
gatggcttcaacaagataa

SEQ ID NO: 63307 - DNA, 19 bp, Homo sapiens
  siRNA target sequence for LKAP (NM_014647.1,269-287).
ccatggctttggaaattct

SEQ ID NO: 63308 - DNA, 19 bp, Homo sapiens
  siRNA target sequence for LKAP (NM_014647.1,321-339).
cacatagtccccaaacgaa

SEQ ID NO: 63309 - DNA, 19 bp, Homo sapiens
  siRNA target sequence for LKAP (NM_014647.1,423-441).
cagtcccacttcctgatat

SEQ ID NO: 63310 - DNA, 19 bp, Homo sapiens
  siRNA target sequence for LKAP (NM_014647.1,427-445).
cccacttcctgatattcgt

SEQ ID NO: 63311 - DNA, 19 bp, Homo sapiens
  siRNA target sequence for LKAP (NM_014647.1,428-446).
ccacttcctgatattcgtt

SEQ ID NO: 63312 - DNA, 19 bp, Homo sapiens
  siRNA target sequence for LKAP (NM_014647.1,567-585).
gtaccagtagcttgattca

SEQ ID NO: 63313 - DNA, 19 bp, Homo sapiens
  siRNA target sequence for LKAP (NM_014647.1,635-653).
gtagggtcagggtttgctt

SEQ ID NO: 63314 - DNA, 19 bp, Homo sapiens
  siRNA target sequence for LKAP (NM_014647.1,680-698).
gcctcagctaggaacaatt

SEQ ID NO: 63315 - DNA, 19 bp, Homo sapiens
  siRNA target sequence for LKAP (NM_014647.1,681-699).
cctcagctaggaacaattt

SEQ ID NO: 63316 - DNA, 19 bp, Homo sapiens
  siRNA target sequence for LKAP (NM_014647.1,726-744).
gcatgtgtctagagagtaa

SEQ ID NO: 63317 - DNA, 19 bp, Homo sapiens
  siRNA target sequence for LKAP (NM_014647.1,763-781).
cctgccctgttgtggaaaa

SEQ ID NO: 63318 - DNA, 19 bp, Homo sapiens
  siRNA target sequence for LKAP (NM_014647.1,846-864).
gcacctccgctggctattt

SEQ ID NO: 63319 - DNA, 19 bp, Homo sapiens
  siRNA target sequence for LKAP (NM_014647.1,889-907).
ggctccagggcatttggaa

SEQ ID NO: 63320 - DNA, 19 bp, Homo sapiens
  siRNA target sequence for LKAP (NM_014647.1,938-956).
cacttgtgcaccaactctt

SEQ ID NO: 63321 - DNA, 19 bp, Homo sapiens
  siRNA target sequence for LKAP (NM_014647.1,968-986).
gtggtacctccggtttgtt

SEQ ID NO: 63322 - DNA, 19 bp, Homo sapiens
  siRNA target sequence for LKAP (NM_014647.1,970-988).
ggtacctccggtttgttta

SEQ ID NO: 63323 - DNA, 19 bp, Homo sapiens
  siRNA target sequence for LKAP (NM_014647.1,971-989).
gtacctccggtttgtttaa

SEQ ID NO: 63324 - DNA, 19 bp, Homo sapiens
  siRNA target sequence for LKAP (NM_014647.1,1024-1042).
gccagcaagaaatagcata

SEQ ID NO: 63325 - DNA, 19 bp, Homo sapiens
  siRNA target sequence for LKAP (NM_014647.1,1025-1043).
ccagcaagaaatagcataa

SEQ ID NO: 63326 - DNA, 19 bp, Homo sapiens
  siRNA target sequence for LKAP (NM_014647.1,1029-1047).
caagaaatagcataatcga

SEQ ID NO: 63327 - DNA, 19 bp, Homo sapiens
  siRNA target sequence for LKAP (NM_014647.1,1144-1162).
gaaggagaccacgttgtta

SEQ ID NO: 63328 - DNA, 19 bp, Homo sapiens
  siRNA target sequence for LKAP (NM_014647.1,1221-1239).
ctggacaggtgctagaaaa

SEQ ID NO: 63329 - DNA, 19 bp, Homo sapiens
  siRNA target sequence for LKAP (NM_014647.1,1355-1373).
gcagaattcatctgtgtat

SEQ ID NO: 63330 - DNA, 19 bp, Homo sapiens
  siRNA target sequence for LKAP (NM_014647.1,1368-1386).
gtgtatgtgacatcagtaa

SEQ ID NO: 63331 - DNA, 19 bp, Homo sapiens
  siRNA target sequence for LKAP (NM_014647.1,1400-1418).
gttattcaagagctgaata

SEQ ID NO: 63332 - DNA, 19 bp, Homo sapiens
  siRNA target sequence for LKAP (NM_014647.1,1459-1477).
gaatgccgctgatgataaa

SEQ ID NO: 63333 - DNA, 19 bp, Homo sapiens
  siRNA target sequence for LKAP (NM_014647.1,1486-1504).
gagtctccgcagatttgca

SEQ ID NO: 63334 - DNA, 19 bp, Homo sapiens
  siRNA target sequence for LKAP (NM_014647.1,1488-1506).
gtctccgcagatttgcaaa

SEQ ID NO: 63335 - DNA, 19 bp, Homo sapiens
  siRNA target sequence for LKAP (NM_014647.1,1490-1508).
ctccgcagatttgcaaata

SEQ ID NO: 63336 - DNA, 19 bp, Homo sapiens
  siRNA target sequence for LKAP (NM_014647.1,1538-1556).
gtgtcaactgatgtcaatt

SEQ ID NO: 63337 - DNA, 19 bp, Homo sapiens
  siRNA target sequence for LKAP (NM_014647.1,1635-1653).
cactgctgcatcatgctaa

SEQ ID NO: 63338 - DNA, 19 bp, Homo sapiens
  siRNA target sequence for LKAP (NM_014647.1,1649-1667).
gctaacgagctgatcagat

SEQ ID NO: 63339 - DNA, 19 bp, Homo sapiens
  siRNA target sequence for LKAP (NM_014647.1,1650-1668).
ctaacgagctgatcagatt

SEQ ID NO: 63340 - DNA, 19 bp, Homo sapiens
  siRNA target sequence for LKAP (NM_014647.1,1654-1672).
cgagctgatcagatttgaa

SEQ ID NO: 63341 - DNA, 19 bp, Homo sapiens
  siRNA target sequence for LKAP (NM_014647.1,1663-1681).
cagatttgaagagttcatt

SEQ ID NO: 63342 - DNA, 19 bp, Homo sapiens
  siRNA target sequence for LKAP (NM_014647.1,1695-1713).
ccaggttaccactaaaaat

SEQ ID NO: 63343 - DNA, 19 bp, Homo sapiens
  siRNA target sequence for LKAP (NM_014647.1,1722-1740).
gccacactctgctctatgt

SEQ ID NO: 63344 - DNA, 19 bp, Homo sapiens
  siRNA target sequence for LKAP (NM_014647.1,1789-1807).
cagacgcctgtccgataat

SEQ ID NO: 63345 - DNA, 19 bp, Homo sapiens
  siRNA target sequence for LKAP (NM_014647.1,1844-1862).
gcaattctccgcttcataa

SEQ ID NO: 63346 - DNA, 19 bp, Homo sapiens
  siRNA target sequence for LKAP (NM_014647.1,1845-1863).
caattctccgcttcataaa

SEQ ID NO: 63347 - DNA, 19 bp, Homo sapiens
  siRNA target sequence for LKAP (NM_014647.1,1853-1871).
cgcttcataaaccaagata

SEQ ID NO: 63348 - DNA, 19 bp, Homo sapiens
  siRNA target sequence for LKAP (NM_014647.1,1855-1873).
cttcataaaccaagatagt

SEQ ID NO: 63349 - DNA, 19 bp, Homo sapiens
  siRNA target sequence for LKAP (NM_014647.1,1882-1900).
cgctcagaagcgaatggaa

SEQ ID NO: 63350 - DNA, 19 bp, Homo sapiens
  siRNA target sequence for LKAP (NM_014647.1,1883-1901).
gctcagaagcgaatggaaa

SEQ ID NO: 63351 - DNA, 19 bp, Homo sapiens
  siRNA target sequence for LKAP (NM_014647.1,1903-1921).
cgaagatgtctttggtaat

SEQ ID NO: 63352 - DNA, 19 bp, Homo sapiens
  siRNA target sequence for LKAP (NM_014647.1,1904-1922).
gaagatgtctttggtaata

SEQ ID NO: 63353 - DNA, 19 bp, Homo sapiens
  siRNA target sequence for LKAP (NM_014647.1,1916-1934).
ggtaataggatcattgtgt

SEQ ID NO: 63354 - DNA, 19 bp, Homo sapiens
  siRNA target sequence for LKAP (NM_014647.1,1972-1990).
gagttcaaatgcaattgct

SEQ ID NO: 63355 - DNA, 19 bp, Homo sapiens
  siRNA target sequence for LKAP (NM_014647.1,2152-2170).
gtgccgcatggagtcaaaa

SEQ ID NO: 63356 - DNA, 19 bp, Homo sapiens
  siRNA target sequence for LKAP (NM_014647.1,2155-2173).
ccgcatggagtcaaaaact

SEQ ID NO: 63357 - DNA, 19 bp, Homo sapiens
  siRNA target sequence for LKAP (NM_014647.1,2222-2240).
cccactcacggtaactcaa

SEQ ID NO: 63358 - DNA, 19 bp, Homo sapiens
  siRNA target sequence for LKAP (NM_014647.1,2249-2267).
gtgtcgacgccgaaaaact

SEQ ID NO: 63359 - DNA, 19 bp, Homo sapiens
  siRNA target sequence for LKAP (NM_014647.1,2273-2291).
gtggcagaacccgtttaca

SEQ ID NO: 63360 - DNA, 19 bp, Homo sapiens
  siRNA target sequence for LKAP (NM_014647.1,2275-2293).
ggcagaacccgtttacaaa

SEQ ID NO: 63361 - DNA, 19 bp, Homo sapiens
  siRNA target sequence for LKAP (NM_014647.1,2276-2294).
gcagaacccgtttacaaaa

SEQ ID NO: 63362 - DNA, 19 bp, Homo sapiens
  siRNA target sequence for LKAP (NM_014647.1,2279-2297).
gaacccgtttacaaaacca

SEQ ID NO: 63363 - DNA, 19 bp, Homo sapiens
  siRNA target sequence for LKAP (NM_014647.1,2314-2332).
cctcagtgcccgaagtgtt

SEQ ID NO: 63364 - DNA, 19 bp, Homo sapiens
  siRNA target sequence for LKAP (NM_014647.1,2315-2333).
ctcagtgcccgaagtgtta

SEQ ID NO: 63365 - DNA, 19 bp, Homo sapiens
  siRNA target sequence for LKAP (NM_014647.1,2337-2355).
gttctcctgtagagaaaaa

SEQ ID NO: 63366 - DNA, 19 bp, Homo sapiens
  siRNA target sequence for LKAP (NM_014647.1,2357-2375).
gataaagaggagactgtat

SEQ ID NO: 63367 - DNA, 19 bp, Homo sapiens
  siRNA target sequence for LKAP (NM_014647.1,2383-2401).
gagttacccgtctgctttt

SEQ ID NO: 63368 - DNA, 19 bp, Homo sapiens
  siRNA target sequence for LKAP (NM_014647.1,2463-2481).
gagcatccccgcttgcttt

SEQ ID NO: 63369 - DNA, 19 bp, Homo sapiens
  siRNA target sequence for LKAP (NM_014647.1,2466-2484).
catccccgcttgctttcaa

SEQ ID NO: 63370 - DNA, 19 bp, Homo sapiens
  siRNA target sequence for LKAP (NM_014647.1,2546-2564).
caagtcagcaacatagact

SEQ ID NO: 63371 - DNA, 19 bp, Homo sapiens
  siRNA target sequence for LKAP (NM_014647.1,2641-2659).
gctcagcccccatacagat

SEQ ID NO: 63372 - DNA, 19 bp, Homo sapiens
  siRNA target sequence for LKAP (NM_014647.1,2642-2660).
ctcagcccccatacagatt

SEQ ID NO: 63373 - DNA, 19 bp, Homo sapiens
  siRNA target sequence for LKAP (NM_014647.1,2644-2662).
cagcccccatacagattat

SEQ ID NO: 63374 - DNA, 19 bp, Homo sapiens
  siRNA target sequence for LKAP (NM_014647.1,2647-2665).
cccccatacagattatcaa

SEQ ID NO: 63375 - DNA, 19 bp, Homo sapiens
  siRNA target sequence for LKAP (NM_014647.1,2649-2667).
cccatacagattatcaact

SEQ ID NO: 63376 - DNA, 19 bp, Homo sapiens
  siRNA target sequence for LKAP (NM_014647.1,2672-2690).
gctgttgtgcaaatggaaa

SEQ ID NO: 63377 - DNA, 19 bp, Homo sapiens
  siRNA target sequence for LKAP (NM_014647.1,2702-2720).
gcgatcggtgcagtgaata

SEQ ID NO: 63378 - DNA, 19 bp, Homo sapiens
  siRNA target sequence for LKAP (NM_014647.1,2781-2799).
ccagcaaatcactctcttt

SEQ ID NO: 63379 - DNA, 19 bp, Homo sapiens
  siRNA target sequence for LKAP (NM_014647.1,2782-2800).
cagcaaatcactctcttta

SEQ ID NO: 63380 - DNA, 19 bp, Homo sapiens
  siRNA target sequence for LKAP (NM_014647.1,2844-2862).
gttgcctgcctctgtttaa

SEQ ID NO: 63381 - DNA, 19 bp, Homo sapiens
  siRNA target sequence for LKAP (NM_014647.1,2847-2865).
gcctgcctctgtttaaatt

SEQ ID NO: 63382 - DNA, 19 bp, Homo sapiens
  siRNA target sequence for LKAP (NM_014647.1,2906-2924).
gtgtcagatctatataaat

SEQ ID NO: 63383 - DNA, 19 bp, Homo sapiens
  siRNA target sequence for LKAP (NM_014647.1,2935-2953).
ggtcgcaatccgtgaacaa

SEQ ID NO: 63384 - DNA, 19 bp, Homo sapiens
  siRNA target sequence for LKAP (NM_014647.1,3029-3047).
gacggctcctccacgaatt

SEQ ID NO: 63385 - DNA, 19 bp, Homo sapiens
  siRNA target sequence for LKAP (NM_014647.1,3051-3069).
gcccaattatatttgaaga

SEQ ID NO: 63386 - DNA, 19 bp, Homo sapiens
  siRNA target sequence for LKAP (NM_014647.1,3100-3118).
gcattgttccaataaggat

SEQ ID NO: 63387 - DNA, 19 bp, Homo sapiens
  siRNA target sequence for LKAP (NM_014647.1,3115-3133).
ggatttcagcgaacatgaa

SEQ ID NO: 63388 - DNA, 19 bp, Homo sapiens
  siRNA target sequence for LKAP (NM_014647.1,3121-3139).
cagcgaacatgaatttgat

SEQ ID NO: 63389 - DNA, 19 bp, Homo sapiens
  siRNA target sequence for LKAP (NM_014647.1,3137-3155).
gatccagactcttacaaga

SEQ ID NO: 63390 - DNA, 19 bp, Homo sapiens
  siRNA target sequence for LKAP (NM_014647.1,3143-3161).
gactcttacaagattcctt

SEQ ID NO: 63391 - DNA, 19 bp, Homo sapiens
  siRNA target sequence for LKAP (NM_014647.1,3224-3242).
ggcaccgtgcctttattga

SEQ ID NO: 63392 - DNA, 19 bp, Homo sapiens
  siRNA target sequence for LKAP (NM_014647.1,3264-3282).
cagagtttggcgatctaga

SEQ ID NO: 63393 - DNA, 19 bp, Homo sapiens
  siRNA target sequence for LKAP (NM_014647.1,3268-3286).
gtttggcgatctagaagta

SEQ ID NO: 63394 - DNA, 19 bp, Homo sapiens
  siRNA target sequence for LKAP (NM_014647.1,3306-3324).
gtgttcccttagaacactt

SEQ ID NO: 63395 - DNA, 19 bp, Homo sapiens
  siRNA target sequence for LKAP (NM_014647.1,3333-3351).
gtgttccaggtgtaaacat

SEQ ID NO: 63396 - DNA, 19 bp, Homo sapiens
  siRNA target sequence for LKAP (NM_014647.1,3360-3378).
ctcagaatggcatcaaagt

SEQ ID NO: 63397 - DNA, 19 bp, Homo sapiens
  siRNA target sequence for LKAP (NM_014647.1,3377-3395).
gtggttaaatggattcaca

SEQ ID NO: 63398 - DNA, 19 bp, Homo sapiens
  siRNA target sequence for LKAP (NM_014647.1,3466-3484).
gatccagttcagtagagaa

SEQ ID NO: 63399 - DNA, 19 bp, Homo sapiens
  siRNA target sequence for LKAP (NM_014647.1,3543-3561).
catcctatcaccatcattt

SEQ ID NO: 63400 - DNA, 19 bp, Homo sapiens
  siRNA target sequence for LKAP (NM_014647.1,3591-3609).
gatactccaagctgattga

SEQ ID NO: 63401 - DNA, 19 bp, Homo sapiens
  siRNA target sequence for LKAP (NM_014647.1,3597-3615).
ccaagctgattgagttatt

SEQ ID NO: 63402 - DNA, 19 bp, Homo sapiens
  siRNA target sequence for LKAP (NM_014647.1,3598-3616).
caagctgattgagttatta

SEQ ID NO: 63403 - DNA, 19 bp, Homo sapiens
  siRNA target sequence for LKAP (NM_014647.1,3697-3715).
gcgctttactcaggattta

SEQ ID NO: 63404 - DNA, 19 bp, Homo sapiens
  siRNA target sequence for LKAP (NM_014647.1,3738-3756).
ccagcaaacaggtcattgt

SEQ ID NO: 63405 - DNA, 19 bp, Homo sapiens
  siRNA target sequence for LKAP (NM_014647.1,3746-3764).
caggtcattgtgagagaat

SEQ ID NO: 63406 - DNA, 19 bp, Homo sapiens
  siRNA target sequence for LKAP (NM_014647.1,3773-3791).
gcttatcactggtgtttct

SEQ ID NO: 63407 - DNA, 19 bp, Homo sapiens
  siRNA target sequence for LKAP (NM_014647.1,3802-3820).
ggatgtcactgaatatggt

SEQ ID NO: 63408 - DNA, 19 bp, Homo sapiens
  siRNA target sequence for LKAP (NM_014647.1,3827-3845).
gagttgattgacatcgtat

SEQ ID NO: 63409 - DNA, 19 bp, Homo sapiens
  siRNA target sequence for LKAP (NM_014647.1,3870-3888).
gcttgtcccaacaagataa

SEQ ID NO: 63410 - DNA, 19 bp, Homo sapiens
  siRNA target sequence for LKAP (NM_014647.1,3871-3889).
cttgtcccaacaagataat

SEQ ID NO: 63411 - DNA, 19 bp, Homo sapiens
  siRNA target sequence for LKAP (NM_014647.1,3874-3892).
gtcccaacaagataatgaa

SEQ ID NO: 63412 - DNA, 19 bp, Homo sapiens
  siRNA target sequence for LKAP (NM_014647.1,3921-3939).
gcactcaggatgaaataga

SEQ ID NO: 63413 - DNA, 19 bp, Homo sapiens
  siRNA target sequence for LKAP (NM_014647.1,3957-3975).
ccaaggatgtcgttgattt

SEQ ID NO: 63414 - DNA, 19 bp, Homo sapiens
  siRNA target sequence for LKAP (NM_014647.1,4051-4069).
gtgcaaacttgcgtactat

SEQ ID NO: 63415 - DNA, 19 bp, Homo sapiens
  siRNA target sequence for LKAP (NM_014647.1,4061-4079).
gcgtactatgggtttacca

SEQ ID NO: 63416 - DNA, 19 bp, Homo sapiens
  siRNA target sequence for LKAP (NM_014647.1,4062-4080).
cgtactatgggtttaccaa

SEQ ID NO: 63417 - DNA, 19 bp, Homo sapiens
  siRNA target sequence for LKAP (NM_014647.1,4066-4084).
ctatgggtttaccaaacta

SEQ ID NO: 63418 - DNA, 19 bp, Homo sapiens
  siRNA target sequence for LKAP (NM_014647.1,4106-4124).
cctgatactttacaagtat

SEQ ID NO: 63419 - DNA, 19 bp, Homo sapiens
  siRNA target sequence for LKAP (NM_014647.1,4181-4199).
ctagctgcccagtttgtta

SEQ ID NO: 63420 - DNA, 19 bp, Homo sapiens
  siRNA target sequence for LKAP (NM_014647.1,4204-4222).
ccttcggtcccaaaaagat

SEQ ID NO: 63421 - DNA, 19 bp, Homo sapiens
  siRNA target sequence for LKAP (NM_014647.1,4205-4223).
cttcggtcccaaaaagata

SEQ ID NO: 63422 - DNA, 19 bp, Homo sapiens
  siRNA target sequence for LKAP (NM_014647.1,4220-4238).
gataactgccttatgatga

SEQ ID NO: 63423 - DNA, 19 bp, Homo sapiens
  siRNA target sequence for LKAP (NM_014647.1,4284-4302).
gtctccaagactatgatgt

SEQ ID NO: 63424 - DNA, 19 bp, Homo sapiens
  siRNA target sequence for LKAP (NM_014647.1,4345-4363).
gaaggttgccgatatagaa

SEQ ID NO: 63425 - DNA, 19 bp, Homo sapiens
  siRNA target sequence for LKAP (NM_014647.1,4348-4366).
ggttgccgatatagaatct

SEQ ID NO: 63426 - DNA, 19 bp, Homo sapiens
  siRNA target sequence for LKAP (NM_014647.1,4381-4399).
gctgatcaaccgaaagtct

SEQ ID NO: 63427 - DNA, 19 bp, Homo sapiens
  siRNA target sequence for LKAP (NM_014647.1,4449-4467).
gaaccacccatctttctgt

SEQ ID NO: 63428 - DNA, 19 bp, Homo sapiens
  siRNA target sequence for LKAP (NM_014647.1,4474-4492).
gctcaagagacattacgaa

SEQ ID NO: 63429 - DNA, 19 bp, Homo sapiens
  siRNA target sequence for LKAP (NM_014647.1,4475-4493).
ctcaagagacattacgaaa

SEQ ID NO: 63430 - DNA, 19 bp, Homo sapiens
  siRNA target sequence for LKAP (NM_014647.1,4508-4526).
ccccttaacccctgtgaat

SEQ ID NO: 63431 - DNA, 19 bp, Homo sapiens
  siRNA target sequence for LKAP (NM_014647.1,4509-4527).
cccttaacccctgtgaata

SEQ ID NO: 63432 - DNA, 19 bp, Homo sapiens
  siRNA target sequence for LKAP (NM_014647.1,4518-4536).
cctgtgaatatggattcat

SEQ ID NO: 63433 - DNA, 19 bp, Homo sapiens
  siRNA target sequence for LKAP (NM_014647.1,4566-4584).
catacttggttgaggtttt

SEQ ID NO: 63434 - DNA, 19 bp, Homo sapiens
  siRNA target sequence for LKAP (NM_014647.1,4570-4588).
cttggttgaggttttcact

SEQ ID NO: 63435 - DNA, 19 bp, Homo sapiens
  siRNA target sequence for LKAP (NM_014647.1,4573-4591).
ggttgaggttttcactaat

SEQ ID NO: 63436 - DNA, 19 bp, Homo sapiens
  siRNA target sequence for LKAP (NM_014647.1,4612-4630).
gaagctcacaagtctgtat

SEQ ID NO: 63437 - DNA, 19 bp, Homo sapiens
  siRNA target sequence for LKAP (NM_014647.1,4642-4660).
gaatgtgcggtctttactt

SEQ ID NO: 63438 - DNA, 19 bp, Homo sapiens
  siRNA target sequence for LKAP (NM_014647.1,4646-4664).
gtgcggtctttacttcata

SEQ ID NO: 63439 - DNA, 19 bp, Homo sapiens
  siRNA target sequence for LKAP (NM_014647.1,4648-4666).
gcggtctttacttcatact

SEQ ID NO: 63440 - DNA, 19 bp, Homo sapiens
  siRNA target sequence for LKAP (NM_014647.1,4649-4667).
cggtctttacttcatactt

SEQ ID NO: 63441 - DNA, 19 bp, Homo sapiens
  siRNA target sequence for LKAP (NM_014647.1,4672-4690).
ctaccagcagattttcctt

SEQ ID NO: 63442 - DNA, 19 bp, Homo sapiens
  siRNA target sequence for LKAP (NM_014647.1,4702-4720).
catggcctataccaagtat

SEQ ID NO: 63443 - DNA, 19 bp, Homo sapiens
  siRNA target sequence for LKAP (NM_014647.1,4714-4732).
caagtatgtcggagaaact

SEQ ID NO: 63444 - DNA, 19 bp, Homo sapiens
  siRNA target sequence for LKAP (NM_014647.1,4771-4789).
gctcttgggagcaattcca

SEQ ID NO: 63445 - DNA, 19 bp, Homo sapiens
  siRNA target sequence for LKAP (NM_014647.1,4808-4826).
ggacatggtcataagagaa

SEQ ID NO: 63446 - DNA, 19 bp, Homo sapiens
  siRNA target sequence for LKAP (NM_014647.1,4815-4833).
gtcataagagaattgtagt

SEQ ID NO: 63447 - DNA, 19 bp, Homo sapiens
  siRNA target sequence for LKAP (NM_014647.1,4822-4840).
gagaattgtagtgttaaaa

SEQ ID NO: 63448 - DNA, 19 bp, Homo sapiens
  siRNA target sequence for LKAP (NM_014647.1,4846-4864).
catgaaaagtcgtttgagt

SEQ ID NO: 63449 - DNA, 19 bp, Homo sapiens
  siRNA target sequence for LKAP (NM_014647.1,4881-4899).
ctgccaatcatgaaaacca

SEQ ID NO: 63450 - DNA, 19 bp, Homo sapiens
  siRNA target sequence for LKAP (NM_014647.1,5082-5100).
gaccagaccccgttatcct

SEQ ID NO: 63451 - DNA, 19 bp, Homo sapiens
  siRNA target sequence for LKAP (NM_014647.1,5106-5124).
ctgctgatctcattcagtt

SEQ ID NO: 63452 - DNA, 19 bp, Homo sapiens
  siRNA target sequence for LKAP (NM_014647.1,5336-5354).
cccaaaaatagagtcaaat

SEQ ID NO: 63453 - DNA, 19 bp, Homo sapiens
  siRNA target sequence for LKAP (NM_014647.1,5337-5355).
ccaaaaatagagtcaaatt

SEQ ID NO: 63454 - DNA, 19 bp, Homo sapiens
  siRNA target sequence for LKAP (NM_014647.1,5370-5388).
ccttagcacctataaccaa

SEQ ID NO: 63455 - DNA, 19 bp, Homo sapiens
  siRNA target sequence for LKAP (NM_014647.1,5375-5393).
gcacctataaccaagcttt

SEQ ID NO: 63456 - DNA, 19 bp, Homo sapiens
  siRNA target sequence for LOC113251 (NM_052879.3,162-180).
gcaggtagcatctaaagga

SEQ ID NO: 63457 - DNA, 19 bp, Homo sapiens
  siRNA target sequence for LOC113251 (NM_052879.3,178-196).
ggaactggtttaaatccta

SEQ ID NO: 63458 - DNA, 19 bp, Homo sapiens
  siRNA target sequence for LOC113251 (NM_052879.3,214-232).
gaaattgctcctggaaata

SEQ ID NO: 63459 - DNA, 19 bp, Homo sapiens
  siRNA target sequence for LOC113251 (NM_052879.3,262-280).
gaaagctcttggcatgaaa

SEQ ID NO: 63460 - DNA, 19 bp, Homo sapiens
  siRNA target sequence for LOC113251 (NM_052879.3,267-285).
ctcttggcatgaaatagca

SEQ ID NO: 63461 - DNA, 19 bp, Homo sapiens
  siRNA target sequence for LOC113251 (NM_052879.3,321-339).
gctctcagaagatatatgt

SEQ ID NO: 63462 - DNA, 19 bp, Homo sapiens
  siRNA target sequence for LOC113251 (NM_052879.3,322-340).
ctctcagaagatatatgta

SEQ ID NO: 63463 - DNA, 19 bp, Homo sapiens
  siRNA target sequence for LOC113251 (NM_052879.3,373-391).
gaaaccacaagaaatacta

SEQ ID NO: 63464 - DNA, 19 bp, Homo sapiens
  siRNA target sequence for LOC113251 (NM_052879.3,428-446).
gaccagaagatctgagtta

SEQ ID NO: 63465 - DNA, 19 bp, Homo sapiens
  siRNA target sequence for LOC113251 (NM_052879.3,539-557).
cacgagaaaatttgtcaaa

SEQ ID NO: 63466 - DNA, 19 bp, Homo sapiens
  siRNA target sequence for LOC113251 (NM_052879.3,558-576).
ggatctttacttgatatct

SEQ ID NO: 63467 - DNA, 19 bp, Homo sapiens
  siRNA target sequence for LOC113251 (NM_052879.3,567-585).
cttgatatctcaaatggat

SEQ ID NO: 63468 - DNA, 19 bp, Homo sapiens
  siRNA target sequence for LOC113251 (NM_052879.3,592-610).
cagttcatcccaatttgga

SEQ ID NO: 63469 - DNA, 19 bp, Homo sapiens
  siRNA target sequence for LOC113251 (NM_052879.3,651-669).
ccctgatctaattcttgaa

SEQ ID NO: 63470 - DNA, 19 bp, Homo sapiens
  siRNA target sequence for LOC113251 (NM_052879.3,686-704).
ccatggtacaagttgatga

SEQ ID NO: 63471 - DNA, 19 bp, Homo sapiens
  siRNA target sequence for LOC113251 (NM_052879.3,728-746).
gtcataagcgttgtattgt

SEQ ID NO: 63472 - DNA, 19 bp, Homo sapiens
  siRNA target sequence for LOC113251 (NM_052879.3,730-748).
cataagcgttgtattgtaa

SEQ ID NO: 63473 - DNA, 19 bp, Homo sapiens
  siRNA target sequence for LOC113251 (NM_052879.3,979-997).
gctaagaatggttatcgat

SEQ ID NO: 63474 - DNA, 19 bp, Homo sapiens
  siRNA target sequence for LOC113251 (NM_052879.3,980-998).
ctaagaatggttatcgatt

SEQ ID NO: 63475 - DNA, 19 bp, Homo sapiens
  siRNA target sequence for LOC113251 (NM_052879.3,988-1006).
ggttatcgattaatggatt

SEQ ID NO: 63476 - DNA, 19 bp, Homo sapiens
  siRNA target sequence for LOC113251 (NM_052879.3,1002-1020).
ggattctagtatctatagt

SEQ ID NO: 63477 - DNA, 19 bp, Homo sapiens
  siRNA target sequence for LOC113251 (NM_052879.3,1014-1032).
ctatagtcaccccattcaa

SEQ ID NO: 63478 - DNA, 19 bp, Homo sapiens
  siRNA target sequence for LOC113251 (NM_052879.3,1065-1083).
gcagcctgtatataatcct

SEQ ID NO: 63479 - DNA, 19 bp, Homo sapiens
  siRNA target sequence for LOC113251 (NM_052879.3,1087-1105).
caacagtactcggtctata

SEQ ID NO: 63480 - DNA, 19 bp, Homo sapiens
  siRNA target sequence for LOC113251 (NM_052879.3,1090-1108).
cagtactcggtctatagta

SEQ ID NO: 63481 - DNA, 19 bp, Homo sapiens
  siRNA target sequence for LOC113251 (NM_052879.3,1092-1110).
gtactcggtctatagtatt

SEQ ID NO: 63482 - DNA, 19 bp, Homo sapiens
  siRNA target sequence for LOC113251 (NM_052879.3,1130-1148).
caaatcctacaccttactt

SEQ ID NO: 63483 - DNA, 19 bp, Homo sapiens
  siRNA target sequence for LOC113251 (NM_052879.3,1135-1153).
cctacaccttactttgaaa

SEQ ID NO: 63484 - DNA, 19 bp, Homo sapiens
  siRNA target sequence for LOC113251 (NM_052879.3,1162-1180).
gctccctttcccaatggta

SEQ ID NO: 63485 - DNA, 19 bp, Homo sapiens
  siRNA target sequence for LOC113251 (NM_052879.3,1171-1189).
cccaatggtagttttgtga

SEQ ID NO: 63486 - DNA, 19 bp, Homo sapiens
  siRNA target sequence for LOC113251 (NM_052879.3,1203-1221).
gccaggatcttataaaaca

SEQ ID NO: 63487 - DNA, 19 bp, Homo sapiens
  siRNA target sequence for LOC113251 (NM_052879.3,1204-1222).
ccaggatcttataaaacaa

SEQ ID NO: 63488 - DNA, 19 bp, Homo sapiens
  siRNA target sequence for LOC113251 (NM_052879.3,1242-1260).
gggtcgaccattccaaaaa

SEQ ID NO: 63489 - DNA, 19 bp, Homo sapiens
  siRNA target sequence for LOC113251 (NM_052879.3,1264-1282).
cgtgtgaagcctcagttta

SEQ ID NO: 63490 - DNA, 19 bp, Homo sapiens
  siRNA target sequence for LOC113251 (NM_052879.3,1267-1285).
gtgaagcctcagtttaggt

SEQ ID NO: 63491 - DNA, 19 bp, Homo sapiens
  siRNA target sequence for LOC113251 (NM_052879.3,1336-1354).
ggacagttgaacagatata

SEQ ID NO: 63492 - DNA, 19 bp, Homo sapiens
  siRNA target sequence for LOC113251 (NM_052879.3,1341-1359).
gttgaacagatatagttca

SEQ ID NO: 63493 - DNA, 19 bp, Homo sapiens
  siRNA target sequence for LOC113251 (NM_052879.3,1344-1362).
gaacagatatagttcaaga

SEQ ID NO: 63494 - DNA, 19 bp, Homo sapiens
  siRNA target sequence for LOC113251 (NM_052879.3,1380-1398).
gcataaccccacagtaact

SEQ ID NO: 63495 - DNA, 19 bp, Homo sapiens
  siRNA target sequence for LOC113251 (NM_052879.3,1538-1556).
cttcaacagctgaatcaaa

SEQ ID NO: 63496 - DNA, 19 bp, Homo sapiens
  siRNA target sequence for LOC113251 (NM_052879.3,1557-1575).
ggctccaacaccaaagttt

SEQ ID NO: 63497 - DNA, 19 bp, Homo sapiens
  siRNA target sequence for LOC113251 (NM_052879.3,1561-1579).
ccaacaccaaagtttgact

SEQ ID NO: 63498 - DNA, 19 bp, Homo sapiens
  siRNA target sequence for LOC113251 (NM_052879.3,1562-1580).
caacaccaaagtttgactt

SEQ ID NO: 63499 - DNA, 19 bp, Homo sapiens
  siRNA target sequence for LOC113251 (NM_052879.3,1576-1594).
gacttattagcctcaaatt

SEQ ID NO: 63500 - DNA, 19 bp, Homo sapiens
  siRNA target sequence for LOC113251 (NM_052879.3,1647-1665).
gaataggatgtctgatgtt

SEQ ID NO: 63501 - DNA, 19 bp, Homo sapiens
  siRNA target sequence for LOC113251 (NM_052879.3,1755-1773).
ccagcaactcaatatgagt

SEQ ID NO: 63502 - DNA, 19 bp, Homo sapiens
  siRNA target sequence for LOC113251 (NM_052879.3,1756-1774).
cagcaactcaatatgagta

SEQ ID NO: 63503 - DNA, 19 bp, Homo sapiens
  siRNA target sequence for LOC113251 (NM_052879.3,2077-2095).
gtggtgtctcccaccaaaa

SEQ ID NO: 63504 - DNA, 19 bp, Homo sapiens
  siRNA target sequence for LOC113251 (NM_052879.3,2079-2097).
ggtgtctcccaccaaaaat

SEQ ID NO: 63505 - DNA, 19 bp, Homo sapiens
  siRNA target sequence for LOC113251 (NM_052879.3,2082-2100).
gtctcccaccaaaaatgaa

SEQ ID NO: 63506 - DNA, 19 bp, Homo sapiens
  siRNA target sequence for LOC113251 (NM_052879.3,2147-2165).
cagaagcaagggctagtaa

SEQ ID NO: 63507 - DNA, 19 bp, Homo sapiens
  siRNA target sequence for LOC113251 (NM_052879.3,2152-2170).
gcaagggctagtaaggatt

SEQ ID NO: 63508 - DNA, 19 bp, Homo sapiens
  siRNA target sequence for LOC113251 (NM_052879.3,2153-2171).
caagggctagtaaggatta

SEQ ID NO: 63509 - DNA, 19 bp, Homo sapiens
  siRNA target sequence for LOC113251 (NM_052879.3,2157-2175).
ggctagtaaggattattct

SEQ ID NO: 63510 - DNA, 19 bp, Homo sapiens
  siRNA target sequence for LOC113251 (NM_052879.3,2174-2192).
ctggcttccgaggcaatat

SEQ ID NO: 63511 - DNA, 19 bp, Homo sapiens
  siRNA target sequence for LOC113251 (NM_052879.3,2176-2194).
ggcttccgaggcaatataa

SEQ ID NO: 63512 - DNA, 19 bp, Homo sapiens
  siRNA target sequence for LOC113251 (NM_052879.3,2177-2195).
gcttccgaggcaatataat

SEQ ID NO: 63513 - DNA, 19 bp, Homo sapiens
  siRNA target sequence for LOC113251 (NM_052879.3,2262-2280).
gggagtgactcgacgtaat

SEQ ID NO: 63514 - DNA, 19 bp, Homo sapiens
  siRNA target sequence for LOC113251 (NM_052879.3,2276-2294).
gtaatggcaaagagcaata

SEQ ID NO: 63515 - DNA, 19 bp, Homo sapiens
  siRNA target sequence for LOC115509 (NM_138447.1,584-602).
ggaaccggctgctctagat

SEQ ID NO: 63516 - DNA, 19 bp, Homo sapiens
  siRNA target sequence for LOC115509 (NM_138447.1,623-641).
gctaacagtccagagaaaa

SEQ ID NO: 63517 - DNA, 19 bp, Homo sapiens
  siRNA target sequence for LOC115509 (NM_138447.1,624-642).
ctaacagtccagagaaaaa

SEQ ID NO: 63518 - DNA, 19 bp, Homo sapiens
  siRNA target sequence for LOC115509 (NM_138447.1,725-743).
cagcaaaccccgactgatt

SEQ ID NO: 63519 - DNA, 19 bp, Homo sapiens
  siRNA target sequence for LOC115509 (NM_138447.1,785-803).
ctgtaccttccctgatcat

SEQ ID NO: 63520 - DNA, 19 bp, Homo sapiens
  siRNA target sequence for LOC115509 (NM_138447.1,787-805).
gtaccttccctgatcatca

SEQ ID NO: 63521 - DNA, 19 bp, Homo sapiens
  siRNA target sequence for LOC115509 (NM_138447.1,821-839).
caagtgcgcccagaatcta

SEQ ID NO: 63522 - DNA, 19 bp, Homo sapiens
  siRNA target sequence for LOC115509 (NM_138447.1,824-842).
gtgcgcccagaatctaaaa

SEQ ID NO: 63523 - DNA, 19 bp, Homo sapiens
  siRNA target sequence for LOC115509 (NM_138447.1,923-941).
cgagtgcccctatgtttgt

SEQ ID NO: 63524 - DNA, 19 bp, Homo sapiens
  siRNA target sequence for LOC115648 (NM_145326.1,312-330).
gacacagtacggtagtcaa

SEQ ID NO: 63525 - DNA, 19 bp, Homo sapiens
  siRNA target sequence for LOC124245 (NM_144604.2,242-260).
gcgggtccgatcaggattt

SEQ ID NO: 63526 - DNA, 19 bp, Homo sapiens
  siRNA target sequence for LOC124245 (NM_144604.2,245-263).
ggtccgatcaggatttgga

SEQ ID NO: 63527 - DNA, 19 bp, Homo sapiens
  siRNA target sequence for LOC124245 (NM_144604.2,717-735).
cgatgatggagaaatcgat

SEQ ID NO: 63528 - DNA, 19 bp, Homo sapiens
  siRNA target sequence for LOC124245 (NM_144604.2,740-758).
gggaaatagacgatgatga

SEQ ID NO: 63529 - DNA, 19 bp, Homo sapiens
  siRNA target sequence for LOC124245 (NM_144604.2,811-829).
cccacctgccggttcttca

SEQ ID NO: 63530 - DNA, 19 bp, Homo sapiens
  siRNA target sequence for LOC124245 (NM_144604.2,815-833).
cctgccggttcttcatgaa

SEQ ID NO: 63531 - DNA, 19 bp, Homo sapiens
  siRNA target sequence for LOC124245 (NM_144604.2,816-834).
ctgccggttcttcatgaaa

SEQ ID NO: 63532 - DNA, 19 bp, Homo sapiens
  siRNA target sequence for LOC124245 (NM_144604.2,849-867).
gggaatgaattgtaggttt

SEQ ID NO: 63533 - DNA, 19 bp, Homo sapiens
  siRNA target sequence for LOC124245 (NM_144604.2,850-868).
ggaatgaattgtaggttta

SEQ ID NO: 63534 - DNA, 19 bp, Homo sapiens
  siRNA target sequence for LOC124245 (NM_144604.2,892-910).
gggaactactccctaatca

SEQ ID NO: 63535 - DNA, 19 bp, Homo sapiens
  siRNA target sequence for LOC124245 (NM_144604.2,921-939).
ccccttcccgcctaatggt

SEQ ID NO: 63536 - DNA, 19 bp, Homo sapiens
  siRNA target sequence for LOC124245 (NM_144604.2,992-1010).
cggtagttgatgaaatttt

SEQ ID NO: 63537 - DNA, 19 bp, Homo sapiens
  siRNA target sequence for LOC124245 (NM_144604.2,1091-1109).
caactattcgaaaagaaca

SEQ ID NO: 63538 - DNA, 19 bp, Homo sapiens
  siRNA target sequence for LOC124245 (NM_144604.2,1152-1170).
cgaagacgaacgggaattt

SEQ ID NO: 63539 - DNA, 19 bp, Homo sapiens
  siRNA target sequence for LOC124245 (NM_144604.2,1156-1174).
gacgaacgggaatttgaca

SEQ ID NO: 63540 - DNA, 19 bp, Homo sapiens
  siRNA target sequence for LOC124245 (NM_144604.2,1158-1176).
cgaacgggaatttgacaaa

SEQ ID NO: 63541 - DNA, 19 bp, Homo sapiens
  siRNA target sequence for LOC124245 (NM_144604.2,1186-1204).
gtttttcgagattggaatt

SEQ ID NO: 63542 - DNA, 19 bp, Homo sapiens
  siRNA target sequence for LOC124245 (NM_144604.2,1244-1262).
cttacgcagacccttatta

SEQ ID NO: 63543 - DNA, 19 bp, Homo sapiens
  siRNA target sequence for LOC124245 (NM_144604.2,1250-1268).
cagacccttattatgacta

SEQ ID NO: 63544 - DNA, 19 bp, Homo sapiens
  siRNA target sequence for LOC124245 (NM_144604.2,1254-1272).
cccttattatgactatgaa

SEQ ID NO: 63545 - DNA, 19 bp, Homo sapiens
  siRNA target sequence for LOC124245 (NM_144604.2,1255-1273).
ccttattatgactatgaaa

SEQ ID NO: 63546 - DNA, 19 bp, Homo sapiens
  siRNA target sequence for LOC124245 (NM_144604.2,1286-1304).
ggcgtggcggacagtatga

SEQ ID NO: 63547 - DNA, 19 bp, Homo sapiens
  siRNA target sequence for LOC124245 (NM_144604.2,1288-1306).
cgtggcggacagtatgaga

SEQ ID NO: 63548 - DNA, 19 bp, Homo sapiens
  siRNA target sequence for LOC124245 (NM_144604.2,1291-1309).
ggcggacagtatgagaatt

SEQ ID NO: 63549 - DNA, 19 bp, Homo sapiens
  siRNA target sequence for LOC124245 (NM_144604.2,1292-1310).
gcggacagtatgagaattt

SEQ ID NO: 63550 - DNA, 19 bp, Homo sapiens
  siRNA target sequence for LOC124245 (NM_144604.2,1314-1332).
ggtgcagtatacagaaaca

SEQ ID NO: 63551 - DNA, 19 bp, Homo sapiens
  siRNA target sequence for LOC124245 (NM_144604.2,1327-1345).
gaaacagagccgtatcata

SEQ ID NO: 63552 - DNA, 19 bp, Homo sapiens
  siRNA target sequence for LOC124245 (NM_144604.2,1331-1349).
cagagccgtatcataatta

SEQ ID NO: 63553 - DNA, 19 bp, Homo sapiens
  siRNA target sequence for LOC124245 (NM_144604.2,1762-1780).
cgaaggcgtcggaaaacat

SEQ ID NO: 63554 - DNA, 19 bp, Homo sapiens
  siRNA target sequence for LOC124245 (NM_144604.2,2217-2235).
cagtggtagcagctatagt

SEQ ID NO: 63555 - DNA, 19 bp, Homo sapiens
  siRNA target sequence for LOC124245 (NM_144604.2,2581-2599).
gcccacaaggagatcaagt

SEQ ID NO: 63556 - DNA, 19 bp, Homo sapiens
  siRNA target sequence for LOC124245 (NM_144604.2,2595-2613).
caagttgacactgttgaat

SEQ ID NO: 63557 - DNA, 19 bp, Homo sapiens
  siRNA target sequence for LOC124245 (NM_144604.2,2958-2976).
cgtggaggatgctattgca

SEQ ID NO: 63558 - DNA, 19 bp, Homo sapiens
  siRNA target sequence for LOC126295 (NM_173480.1,260-278).
gtacgggcaagaaaaatct

SEQ ID NO: 63559 - DNA, 19 bp, Homo sapiens
  siRNA target sequence for LOC126295 (NM_173480.1,387-405).
catatggtggacagattct

SEQ ID NO: 63560 - DNA, 19 bp, Homo sapiens
  siRNA target sequence for LOC126295 (NM_173480.1,395-413).
ggacagattctgtacacat

SEQ ID NO: 63561 - DNA, 19 bp, Homo sapiens
  siRNA target sequence for LOC126295 (NM_173480.1,396-414).
gacagattctgtacacata

SEQ ID NO: 63562 - DNA, 19 bp, Homo sapiens
  siRNA target sequence for LOC126295 (NM_173480.1,398-416).
cagattctgtacacataat

SEQ ID NO: 63563 - DNA, 19 bp, Homo sapiens
  siRNA target sequence for LOC126295 (NM_173480.1,406-424).
gtacacataatgaaggtaa

SEQ ID NO: 63564 - DNA, 19 bp, Homo sapiens
  siRNA target sequence for LOC126295 (NM_173480.1,433-451).
gagaagccatccatcaaat

SEQ ID NO: 63565 - DNA, 19 bp, Homo sapiens
  siRNA target sequence for LOC126295 (NM_173480.1,675-693).
caagcatgtgggcaaactt

SEQ ID NO: 63566 - DNA, 19 bp, Homo sapiens
  siRNA target sequence for LOC126295 (NM_173480.1,711-729).
ctctcccaccacgtaaaga

SEQ ID NO: 63567 - DNA, 19 bp, Homo sapiens
  siRNA target sequence for LOC126295 (NM_173480.1,713-731).
ctcccaccacgtaaagact

SEQ ID NO: 63568 - DNA, 19 bp, Homo sapiens
  siRNA target sequence for LOC126295 (NM_173480.1,764-782).
gtgtcggatggcgtttaat

SEQ ID NO: 63569 - DNA, 19 bp, Homo sapiens
  siRNA target sequence for LOC126295 (NM_173480.1,783-801).
gggttcgcaagcttcacta

SEQ ID NO: 63570 - DNA, 19 bp, Homo sapiens
  siRNA target sequence for LOC126295 (NM_173480.1,788-806).
cgcaagcttcactagacat

SEQ ID NO: 63571 - DNA, 19 bp, Homo sapiens
  siRNA target sequence for LOC126295 (NM_173480.1,820-838).
caaaagacaggccatataa

SEQ ID NO: 63572 - DNA, 19 bp, Homo sapiens
  siRNA target sequence for LOC126295 (NM_173480.1,1540-1558).
ggtcctcaaccttacataa

SEQ ID NO: 63573 - DNA, 19 bp, Homo sapiens
  siRNA target sequence for LOC126295 (NM_173480.1,1541-1559).
gtcctcaaccttacataat

SEQ ID NO: 63574 - DNA, 19 bp, Homo sapiens
  siRNA target sequence for LOC126295 (NM_173480.1,1546-1564).
caaccttacataatcatgt

SEQ ID NO: 63575 - DNA, 19 bp, Homo sapiens
  siRNA target sequence for LOC126295 (NM_173480.1,1672-1690).
cccacgaatgtcagtcata

SEQ ID NO: 63576 - DNA, 19 bp, Homo sapiens
  siRNA target sequence for LOC126295 (NM_173480.1,1674-1692).
cacgaatgtcagtcatact

SEQ ID NO: 63577 - DNA, 19 bp, Homo sapiens
  siRNA target sequence for LOC126295 (NM_173480.1,1676-1694).
cgaatgtcagtcatactca

SEQ ID NO: 63578 - DNA, 19 bp, Homo sapiens
  siRNA target sequence for LOC126295 (NM_173480.1,1677-1695).
gaatgtcagtcatactcaa

SEQ ID NO: 63579 - DNA, 19 bp, Homo sapiens
  siRNA target sequence for LOC126295 (NM_173480.1,1703-1721).
cagttgccaagtcattctt

SEQ ID NO: 63580 - DNA, 19 bp, Homo sapiens
  siRNA target sequence for LOC146542 (NM_145271.2,413-431).
gagccaaagggcctagaaa

SEQ ID NO: 63581 - DNA, 19 bp, Homo sapiens
  siRNA target sequence for LOC146542 (NM_145271.2,506-524).
gggcacagccacccaaaaa

SEQ ID NO: 63582 - DNA, 19 bp, Homo sapiens
  siRNA target sequence for LOC147837 (NM_145276.1,460-478).
gcctcattcgagatagtat

SEQ ID NO: 63583 - DNA, 19 bp, Homo sapiens
  siRNA target sequence for LOC147837 (NM_145276.1,461-479).
cctcattcgagatagtatt

SEQ ID NO: 63584 - DNA, 19 bp, Homo sapiens
  siRNA target sequence for LOC147837 (NM_145276.1,770-788).
ggtagtgcaaggtggaaat

SEQ ID NO: 63585 - DNA, 19 bp, Homo sapiens
  siRNA target sequence for LOC147837 (NM_145276.1,1249-1267).
gtcccagtttagttcgata

SEQ ID NO: 63586 - DNA, 19 bp, Homo sapiens
  siRNA target sequence for LOC147837 (NM_145276.1,1537-1555).
cgggagatgggccgaataa

SEQ ID NO: 63587 - DNA, 19 bp, Homo sapiens
  siRNA target sequence for LOC147837 (NM_145276.1,1538-1556).
gggagatgggccgaataaa

SEQ ID NO: 63588 - DNA, 19 bp, Homo sapiens
  siRNA target sequence for LOC147837 (NM_145276.1,1542-1560).
gatgggccgaataaatgca

SEQ ID NO: 63589 - DNA, 19 bp, Homo sapiens
  siRNA target sequence for LOC162655 (NM_145287.1,277-295).
cgtctccctggctgtgtat

SEQ ID NO: 63590 - DNA, 19 bp, Homo sapiens
  siRNA target sequence for LOC162655 (NM_145287.1,304-322).
caaccaaggcattttacca

SEQ ID NO: 63591 - DNA, 19 bp, Homo sapiens
  siRNA target sequence for LOC162655 (NM_145287.1,477-495).
ctagtcataacaaacattt

SEQ ID NO: 63592 - DNA, 19 bp, Homo sapiens
  siRNA target sequence for LOC162655 (NM_145287.1,564-582).
cagaaccatgtattcctat

SEQ ID NO: 63593 - DNA, 19 bp, Homo sapiens
  siRNA target sequence for LOC162655 (NM_145287.1,569-587).
ccatgtattcctatgaata

SEQ ID NO: 63594 - DNA, 19 bp, Homo sapiens
  siRNA target sequence for LOC162655 (NM_145287.1,812-830).
gacccattctcaaagctta

SEQ ID NO: 63595 - DNA, 19 bp, Homo sapiens
  siRNA target sequence for LOC162655 (NM_145287.1,857-875).
gagagctcacaaagatgta

SEQ ID NO: 63596 - DNA, 19 bp, Homo sapiens
  siRNA target sequence for LOC162655 (NM_145287.1,862-880).
ctcacaaagatgtaataaa

SEQ ID NO: 63597 - DNA, 19 bp, Homo sapiens
  siRNA target sequence for LOC162655 (NM_145287.1,885-903).
gtataatagtctttagtca

SEQ ID NO: 63598 - DNA, 19 bp, Homo sapiens
  siRNA target sequence for LOC162655 (NM_145287.1,895-913).
ctttagtcaatcacatcta

SEQ ID NO: 63599 - DNA, 19 bp, Homo sapiens
  siRNA target sequence for LOC162655 (NM_145287.1,906-924).
cacatctaaagggacataa

SEQ ID NO: 63600 - DNA, 19 bp, Homo sapiens
  siRNA target sequence for LOC163227 (NM_173531.1,1667-1685).
cctaagccttattaaacaa

SEQ ID NO: 63601 - DNA, 19 bp, Homo sapiens
  siRNA target sequence for LOC169270 (NM_173539.1,298-316).
gagaaactttcaacacaaa

SEQ ID NO: 63602 - DNA, 19 bp, Homo sapiens
  siRNA target sequence for LOC169270 (NM_173539.1,338-356).
gagaagttggcattaaaca

SEQ ID NO: 63603 - DNA, 19 bp, Homo sapiens
  siRNA target sequence for LOC169270 (NM_173539.1,430-448).
caagaggatccttttctat

SEQ ID NO: 63604 - DNA, 19 bp, Homo sapiens
  siRNA target sequence for LOC169270 (NM_173539.1,456-474).
cttaggagaagatttcact

SEQ ID NO: 63605 - DNA, 19 bp, Homo sapiens
  siRNA target sequence for LOC169270 (NM_173539.1,478-496).
catatagcattgactcaaa

SEQ ID NO: 63606 - DNA, 19 bp, Homo sapiens
  siRNA target sequence for LOC169270 (NM_173539.1,491-509).
ctcaaaatgtgattaccta

SEQ ID NO: 63607 - DNA, 19 bp, Homo sapiens
  siRNA target sequence for LOC169270 (NM_173539.1,510-528).
catgagaacgaaacacttt

SEQ ID NO: 63608 - DNA, 19 bp, Homo sapiens
  siRNA target sequence for LOC169270 (NM_173539.1,513-531).
gagaacgaaacactttgta

SEQ ID NO: 63609 - DNA, 19 bp, Homo sapiens
  siRNA target sequence for LOC169270 (NM_173539.1,555-573).
cagtgactggttatccttt

SEQ ID NO: 63610 - DNA, 19 bp, Homo sapiens
  siRNA target sequence for LOC169270 (NM_173539.1,557-575).
gtgactggttatcctttaa

SEQ ID NO: 63611 - DNA, 19 bp, Homo sapiens
  siRNA target sequence for LOC169270 (NM_173539.1,563-581).
ggttatcctttaatcaaca

SEQ ID NO: 63612 - DNA, 19 bp, Homo sapiens
  siRNA target sequence for LOC169270 (NM_173539.1,586-604).
gaaattcacaccaaatgta

SEQ ID NO: 63613 - DNA, 19 bp, Homo sapiens
  siRNA target sequence for LOC169270 (NM_173539.1,592-610).
cacaccaaatgtaaatcat

SEQ ID NO: 63614 - DNA, 19 bp, Homo sapiens
  siRNA target sequence for LOC169270 (NM_173539.1,613-631).
ggaagtcatctatttgatt

SEQ ID NO: 63615 - DNA, 19 bp, Homo sapiens
  siRNA target sequence for LOC169270 (NM_173539.1,676-694).
cacactagagagataacat

SEQ ID NO: 63616 - DNA, 19 bp, Homo sapiens
  siRNA target sequence for LOC169270 (NM_173539.1,719-737).
cctttagcaaaaattctaa

SEQ ID NO: 63617 - DNA, 19 bp, Homo sapiens
  siRNA target sequence for LOC169270 (NM_173539.1,720-738).
ctttagcaaaaattctaat

SEQ ID NO: 63618 - DNA, 19 bp, Homo sapiens
  siRNA target sequence for LOC169270 (NM_173539.1,886-904).
gccttcagtaaaagttcta

SEQ ID NO: 63619 - DNA, 19 bp, Homo sapiens
  siRNA target sequence for LOC169270 (NM_173539.1,887-905).
ccttcagtaaaagttctaa

SEQ ID NO: 63620 - DNA, 19 bp, Homo sapiens
  siRNA target sequence for LOC169270 (NM_173539.1,943-961).
gcacagatatgccatctat

SEQ ID NO: 63621 - DNA, 19 bp, Homo sapiens
  siRNA target sequence for LOC169270 (NM_173539.1,1484-1502).
gaagttacaactttagact

SEQ ID NO: 63622 - DNA, 19 bp, Homo sapiens
  siRNA target sequence for LOC170261 (NM_173798.2,563-581).
gagaagtctcggtcctata

SEQ ID NO: 63623 - DNA, 19 bp, Homo sapiens
  siRNA target sequence for LOC170261 (NM_173798.2,682-700).
gcgtcctgccagattggaa

SEQ ID NO: 63624 - DNA, 19 bp, Homo sapiens
  siRNA target sequence for LOC170261 (NM_173798.2,683-701).
cgtcctgccagattggaat

SEQ ID NO: 63625 - DNA, 19 bp, Homo sapiens
  siRNA target sequence for LOC170261 (NM_173798.2,684-702).
gtcctgccagattggaata

SEQ ID NO: 63626 - DNA, 19 bp, Homo sapiens
  siRNA target sequence for LOC170261 (NM_173798.2,689-707).
gccagattggaatatgtct

SEQ ID NO: 63627 - DNA, 19 bp, Homo sapiens
  siRNA target sequence for LOC170261 (NM_173798.2,719-737).
gctcaagcgcttgatgaaa

SEQ ID NO: 63628 - DNA, 19 bp, Homo sapiens
  siRNA target sequence for LOC170261 (NM_173798.2,720-738).
ctcaagcgcttgatgaaaa

SEQ ID NO: 63629 - DNA, 19 bp, Homo sapiens
  siRNA target sequence for LOC170261 (NM_173798.2,779-797).
ggcgaccaaccctaaccta

SEQ ID NO: 63630 - DNA, 19 bp, Homo sapiens
  siRNA target sequence for LOC170261 (NM_173798.2,780-798).
gcgaccaaccctaacctaa

SEQ ID NO: 63631 - DNA, 19 bp, Homo sapiens
  siRNA target sequence for LOC170261 (NM_173798.2,857-875).
gactgcccatggtaaattt

SEQ ID NO: 63632 - DNA, 19 bp, Homo sapiens
  siRNA target sequence for LOC170261 (NM_173798.2,864-882).
catggtaaattttttaaca

SEQ ID NO: 63633 - DNA, 19 bp, Homo sapiens
  siRNA target sequence for LOC170261 (NM_173798.2,1032-1050).
gacctccgactcagactta

SEQ ID NO: 63634 - DNA, 19 bp, Homo sapiens
  siRNA target sequence for LOC170261 (NM_173798.2,1082-1100).
ggagcggcttcccaacttt

SEQ ID NO: 63635 - DNA, 19 bp, Homo sapiens
  siRNA target sequence for LOC170261 (NM_173798.2,1221-1239).
ggctccccaccgatagtga

SEQ ID NO: 63636 - DNA, 19 bp, Homo sapiens
  siRNA target sequence for LOC170261 (NM_173798.2,1222-1240).
gctccccaccgatagtgat

SEQ ID NO: 63637 - DNA, 19 bp, Homo sapiens
  siRNA target sequence for LOC170261 (NM_173798.2,1251-1269).
gactgcaatgtgatagaga

SEQ ID NO: 63638 - DNA, 19 bp, Homo sapiens
  siRNA target sequence for LOC170261 (NM_173798.2,1253-1271).
ctgcaatgtgatagagata

SEQ ID NO: 63639 - DNA, 19 bp, Homo sapiens
  siRNA target sequence for LOC170261 (NM_173798.2,1255-1273).
gcaatgtgatagagataga

SEQ ID NO: 63640 - DNA, 19 bp, Homo sapiens
  siRNA target sequence for LOC170261 (NM_173798.2,1256-1274).
caatgtgatagagatagat

SEQ ID NO: 63641 - DNA, 19 bp, Homo sapiens
  siRNA target sequence for LOC170261 (NM_173798.2,1438-1456).
gtggtggttctggctataa

SEQ ID NO: 63642 - DNA, 19 bp, Homo sapiens
  siRNA target sequence for LOC170261 (NM_173798.2,1485-1503).
gccaggaagcgaaaacaca

SEQ ID NO: 63643 - DNA, 19 bp, Homo sapiens
  siRNA target sequence for LOC170261 (NM_173798.2,1502-1520).
cacaatccgctgttcgtat

SEQ ID NO: 63644 - DNA, 19 bp, Homo sapiens
  siRNA target sequence for LOC170261 (NM_173798.2,1643-1661).
ggcccctggcgaatacaat

SEQ ID NO: 63645 - DNA, 19 bp, Homo sapiens
  siRNA target sequence for LOC170261 (NM_173798.2,1647-1665).
cctggcgaatacaatgact

SEQ ID NO: 63646 - DNA, 19 bp, Homo sapiens
  siRNA target sequence for LOC170261 (NM_173798.2,1648-1666).
ctggcgaatacaatgactt

SEQ ID NO: 63647 - DNA, 19 bp, Homo sapiens
  siRNA target sequence for LOC201514 (NM_173548.1,510-528).
gaggatgtgacggtatatt

SEQ ID NO: 63648 - DNA, 19 bp, Homo sapiens
  siRNA target sequence for LOC201514 (NM_173548.1,513-531).
gatgtgacggtatatttct

SEQ ID NO: 63649 - DNA, 19 bp, Homo sapiens
  siRNA target sequence for LOC201514 (NM_173548.1,733-751).
gttttggtcttgatggttt

SEQ ID NO: 63650 - DNA, 19 bp, Homo sapiens
  siRNA target sequence for LOC201514 (NM_173548.1,777-795).
catcctgagcatctaaaga

SEQ ID NO: 63651 - DNA, 19 bp, Homo sapiens
  siRNA target sequence for LOC201514 (NM_173548.1,972-990).
ctccttgaccatctgataa

SEQ ID NO: 63652 - DNA, 19 bp, Homo sapiens
  siRNA target sequence for LOC201514 (NM_173548.1,1379-1397).
caataatagcttcattctt

SEQ ID NO: 63653 - DNA, 19 bp, Homo sapiens
  siRNA target sequence for LOC201514 (NM_173548.1,1462-1480).
cccgttcaggcctctatca

SEQ ID NO: 63654 - DNA, 19 bp, Homo sapiens
  siRNA target sequence for LOC220992 (NM_145312.2,431-449).
cacatgcagtcgaggatta

SEQ ID NO: 63655 - DNA, 19 bp, Homo sapiens
  siRNA target sequence for LOC220992 (NM_145312.2,433-451).
catgcagtcgaggattact

SEQ ID NO: 63656 - DNA, 19 bp, Homo sapiens
  siRNA target sequence for LOC220992 (NM_145312.2,441-459).
cgaggattactggtttgaa

SEQ ID NO: 63657 - DNA, 19 bp, Homo sapiens
  siRNA target sequence for LOC220992 (NM_145312.2,515-533).
gaacgaaaagtgtcatgat

SEQ ID NO: 63658 - DNA, 19 bp, Homo sapiens
  siRNA target sequence for LOC220992 (NM_145312.2,680-698).
gtgggatcgcctttatgaa

SEQ ID NO: 63659 - DNA, 19 bp, Homo sapiens
  siRNA target sequence for LOC220992 (NM_145312.2,682-700).
gggatcgcctttatgaaca

SEQ ID NO: 63660 - DNA, 19 bp, Homo sapiens
  siRNA target sequence for LOC220992 (NM_145312.2,733-751).
gcaggcaaacagccttata

SEQ ID NO: 63661 - DNA, 19 bp, Homo sapiens
  siRNA target sequence for LOC220992 (NM_145312.2,736-754).
ggcaaacagccttatagat

SEQ ID NO: 63662 - DNA, 19 bp, Homo sapiens
  siRNA target sequence for LOC220992 (NM_145312.2,870-888).
ctcaatccttttaagtcat

SEQ ID NO: 63663 - DNA, 19 bp, Homo sapiens
  siRNA target sequence for LOC220992 (NM_145312.2,958-976).
gctcttactcgtcatgaaa

SEQ ID NO: 63664 - DNA, 19 bp, Homo sapiens
  siRNA target sequence for LOC220992 (NM_145312.2,1116-1134).
gaagagctcaactcttatt

SEQ ID NO: 63665 - DNA, 19 bp, Homo sapiens
  siRNA target sequence for LOC220992 (NM_145312.2,1495-1513).
gaaagagccatgaaatgta

SEQ ID NO: 63666 - DNA, 19 bp, Homo sapiens
  siRNA target sequence for LOC286075 (NM_173831.2,408-426).
gctgctctgggattttgca

SEQ ID NO: 63667 - DNA, 19 bp, Homo sapiens
  siRNA target sequence for LOC286075 (NM_173831.2,596-614).
ccacgtgcggcgagaaaga

SEQ ID NO: 63668 - DNA, 19 bp, Homo sapiens
  siRNA target sequence for LOC286075 (NM_173831.2,621-639).
gaaggaagcagctttagga

SEQ ID NO: 63669 - DNA, 19 bp, Homo sapiens
  siRNA target sequence for LOC286075 (NM_173831.2,910-928).
ccttccggtgggcttcaaa

SEQ ID NO: 63670 - DNA, 19 bp, Homo sapiens
  siRNA target sequence for LOC55954 (NM_019103.1,419-437).
ccagggagtggctactaga

SEQ ID NO: 63671 - DNA, 19 bp, Homo sapiens
  siRNA target sequence for LOC56902 (NM_020143.2,302-320).
cccagctaacagatacaca

SEQ ID NO: 63672 - DNA, 19 bp, Homo sapiens
  siRNA target sequence for LOC56902 (NM_020143.2,373-391).
gacttcagatacgctttaa

SEQ ID NO: 63673 - DNA, 19 bp, Homo sapiens
  siRNA target sequence for LOC56902 (NM_020143.2,378-396).
cagatacgctttaacttga

SEQ ID NO: 63674 - DNA, 19 bp, Homo sapiens
  siRNA target sequence for LOC56902 (NM_020143.2,380-398).
gatacgctttaacttgaaa

SEQ ID NO: 63675 - DNA, 19 bp, Homo sapiens
  siRNA target sequence for LOC56902 (NM_020143.2,395-413).
gaaatcaaggaatgtagaa

SEQ ID NO: 63676 - DNA, 19 bp, Homo sapiens
  siRNA target sequence for LOC56902 (NM_020143.2,539-557).
cctagagtcttttgaaatt

SEQ ID NO: 63677 - DNA, 19 bp, Homo sapiens
  siRNA target sequence for LOC56902 (NM_020143.2,573-591).
ctaaagggagaccatctat

SEQ ID NO: 63678 - DNA, 19 bp, Homo sapiens
  siRNA target sequence for LOC56902 (NM_020143.2,631-649).
ccaaattcaccatagagaa

SEQ ID NO: 63679 - DNA, 19 bp, Homo sapiens
  siRNA target sequence for LOC56902 (NM_020143.2,653-671).
gacacggacaaggatagtt

SEQ ID NO: 63680 - DNA, 19 bp, Homo sapiens
  siRNA target sequence for LOC56902 (NM_020143.2,655-673).
cacggacaaggatagtttt

SEQ ID NO: 63681 - DNA, 19 bp, Homo sapiens
  siRNA target sequence for LOC56931 (NM_020175.1,65-83).
cggaggctcctctagagaa

SEQ ID NO: 63682 - DNA, 19 bp, Homo sapiens
  siRNA target sequence for LOC56931 (NM_020175.1,134-152).
ccattaagcgtcaatacct

SEQ ID NO: 63683 - DNA, 19 bp, Homo sapiens
  siRNA target sequence for LOC56931 (NM_020175.1,392-410).
ccacgaactacgacaagaa

SEQ ID NO: 63684 - DNA, 19 bp, Homo sapiens
  siRNA target sequence for LOC56931 (NM_020175.1,435-453).
ggagtcggctgctaagtgt

SEQ ID NO: 63685 - DNA, 19 bp, Homo sapiens
  siRNA target sequence for LOC56931 (NM_020175.1,440-458).
cggctgctaagtgtttctt

SEQ ID NO: 63686 - DNA, 19 bp, Homo sapiens
  siRNA target sequence for LOC56931 (NM_020175.1,806-824).
gcgctcccaggcaggaaaa

SEQ ID NO: 63687 - DNA, 19 bp, Homo sapiens
  siRNA target sequence for LOC56931 (NM_020175.1,1091-1109).
ccgagtgggccctactcaa

SEQ ID NO: 63688 - DNA, 19 bp, Homo sapiens
  siRNA target sequence for LOC56931 (NM_020175.1,1092-1110).
cgagtgggccctactcaaa

SEQ ID NO: 63689 - DNA, 19 bp, Homo sapiens
  siRNA target sequence for LOC56931 (NM_020175.1,1199-1217).
ccgtggaggtggactttgt

SEQ ID NO: 63690 - DNA, 19 bp, Homo sapiens
  siRNA target sequence for LOC56931 (NM_020175.1,1534-1552).
ggaaatggggacatcttgt

SEQ ID NO: 63691 - DNA, 19 bp, Homo sapiens
  siRNA target sequence for LOC56931 (NM_020175.1,1585-1603).
ggtgtcaccgggatcatga

SEQ ID NO: 63692 - DNA, 19 bp, Homo sapiens
  siRNA target sequence for LOC56931 (NM_020175.1,1586-1604).
gtgtcaccgggatcatgat

SEQ ID NO: 63693 - DNA, 19 bp, Homo sapiens
  siRNA target sequence for LOC56931 (NM_020175.1,1631-1649).
ggctcttcacggagatcaa

SEQ ID NO: 63694 - DNA, 19 bp, Homo sapiens
  siRNA target sequence for LOC65243 (NM_023070.1,779-797).
ctacattgtggcctaatga

SEQ ID NO: 63695 - DNA, 19 bp, Homo sapiens
  siRNA target sequence for LOC65243 (NM_023070.1,789-807).
gcctaatgatggaaagatt

SEQ ID NO: 63696 - DNA, 19 bp, Homo sapiens
  siRNA target sequence for LOC65243 (NM_023070.1,790-808).
cctaatgatggaaagattt

SEQ ID NO: 63697 - DNA, 19 bp, Homo sapiens
  siRNA target sequence for LOC65243 (NM_023070.1,815-833).
ggaagcagcatgtattcca

SEQ ID NO: 63698 - DNA, 19 bp, Homo sapiens
  siRNA target sequence for LOC65243 (NM_023070.1,843-861).
gaatctccaaatgtaataa

SEQ ID NO: 63699 - DNA, 19 bp, Homo sapiens
  siRNA target sequence for LOC65243 (NM_023070.1,907-925).
ccccctgatgtgcaagaaa

SEQ ID NO: 63700 - DNA, 19 bp, Homo sapiens
  siRNA target sequence for LOC65243 (NM_023070.1,940-958).
gagaggccaagagtctaat

SEQ ID NO: 63701 - DNA, 19 bp, Homo sapiens
  siRNA target sequence for LOC65243 (NM_023070.1,944-962).
ggccaagagtctaatagat

SEQ ID NO: 63702 - DNA, 19 bp, Homo sapiens
  siRNA target sequence for LOC65243 (NM_023070.1,945-963).
gccaagagtctaatagatt

SEQ ID NO: 63703 - DNA, 19 bp, Homo sapiens
  siRNA target sequence for LOC65243 (NM_023070.1,946-964).
ccaagagtctaatagattt

SEQ ID NO: 63704 - DNA, 19 bp, Homo sapiens
  siRNA target sequence for LOC65243 (NM_023070.1,1017-1035).
caagaaaaagagatcgtaa

SEQ ID NO: 63705 - DNA, 19 bp, Homo sapiens
  siRNA target sequence for LOC65243 (NM_023070.1,1020-1038).
gaaaaagagatcgtaaata

SEQ ID NO: 63706 - DNA, 19 bp, Homo sapiens
  siRNA target sequence for LOC65243 (NM_023070.1,1066-1084).
caacatagatttagttaat

SEQ ID NO: 63707 - DNA, 19 bp, Homo sapiens
  siRNA target sequence for LOC65243 (NM_023070.1,1089-1107).
caaggagttatacaaaaat

SEQ ID NO: 63708 - DNA, 19 bp, Homo sapiens
  siRNA target sequence for LOC65243 (NM_023070.1,1092-1110).
ggagttatacaaaaatgaa

SEQ ID NO: 63709 - DNA, 19 bp, Homo sapiens
  siRNA target sequence for LOC65243 (NM_023070.1,1409-1427).
ggactgatccagcatttga

SEQ ID NO: 63710 - DNA, 19 bp, Homo sapiens
  siRNA target sequence for LOC65243 (NM_023070.1,1417-1435).
ccagcatttgagaactcat

SEQ ID NO: 63711 - DNA, 19 bp, Homo sapiens
  siRNA target sequence for LOC65243 (NM_023070.1,1420-1438).
gcatttgagaactcatgtt

SEQ ID NO: 63712 - DNA, 19 bp, Homo sapiens
  siRNA target sequence for LOC65243 (NM_023070.1,1421-1439).
catttgagaactcatgtta

SEQ ID NO: 63713 - DNA, 19 bp, Homo sapiens
  siRNA target sequence for LOC65243 (NM_023070.1,1436-1454).
gttagagagaaacctttta

SEQ ID NO: 63714 - DNA, 19 bp, Homo sapiens
  siRNA target sequence for LOC65243 (NM_023070.1,1476-1494).
cgtttttccagattagaca

SEQ ID NO: 63715 - DNA, 19 bp, Homo sapiens
  siRNA target sequence for LOC65243 (NM_023070.1,1491-1509).
gacaccttaggcaacatga

SEQ ID NO: 63716 - DNA, 19 bp, Homo sapiens
  siRNA target sequence for LOC65243 (NM_023070.1,1736-1754).
catgattcatcctttgcta

SEQ ID NO: 63717 - DNA, 19 bp, Homo sapiens
  siRNA target sequence for LOC65243 (NM_023070.1,1832-1850).
cttattagacactgcaaaa

SEQ ID NO: 63718 - DNA, 19 bp, Homo sapiens
  siRNA target sequence for LOC65243 (NM_023070.1,1843-1861).
ctgcaaaacacatttaaga

SEQ ID NO: 63719 - DNA, 19 bp, Homo sapiens
  siRNA target sequence for LOC81691 (NM_030941.1,253-271).
ggcaggccccaaataagct

SEQ ID NO: 63720 - DNA, 19 bp, Homo sapiens
  siRNA target sequence for LOC81691 (NM_030941.1,332-350).
caagaaagcccgcttatct

SEQ ID NO: 63721 - DNA, 19 bp, Homo sapiens
  siRNA target sequence for LOC81691 (NM_030941.1,342-360).
cgcttatctaccattttat

SEQ ID NO: 63722 - DNA, 19 bp, Homo sapiens
  siRNA target sequence for LOC81691 (NM_030941.1,349-367).
ctaccattttatttactga

SEQ ID NO: 63723 - DNA, 19 bp, Homo sapiens
  siRNA target sequence for LOC81691 (NM_030941.1,446-464).
cagctggtgccagcttttt

SEQ ID NO: 63724 - DNA, 19 bp, Homo sapiens
  siRNA target sequence for LOC81691 (NM_030941.1,522-540).
cacttttacaggttctatt

SEQ ID NO: 63725 - DNA, 19 bp, Homo sapiens
  siRNA target sequence for LOC81691 (NM_030941.1,545-563).
gtttggatgtcttcgaaaa

SEQ ID NO: 63726 - DNA, 19 bp, Homo sapiens
  siRNA target sequence for LOC81691 (NM_030941.1,615-633).
gatgttgttgggctacaaa

SEQ ID NO: 63727 - DNA, 19 bp, Homo sapiens
  siRNA target sequence for LOC81691 (NM_030941.1,674-692).
gcctttaccttctaatgca

SEQ ID NO: 63728 - DNA, 19 bp, Homo sapiens
  siRNA target sequence for LOC81691 (NM_030941.1,713-731).
ggatgatcccatcattcaa

SEQ ID NO: 63729 - DNA, 19 bp, Homo sapiens
  siRNA target sequence for LOC81691 (NM_030941.1,714-732).
gatgatcccatcattcaaa

SEQ ID NO: 63730 - DNA, 19 bp, Homo sapiens
  siRNA target sequence for LOC81691 (NM_030941.1,717-735).
gatcccatcattcaaaagt

SEQ ID NO: 63731 - DNA, 19 bp, Homo sapiens
  siRNA target sequence for LOC81691 (NM_030941.1,729-747).
caaaagtatggctctaaga

SEQ ID NO: 63732 - DNA, 19 bp, Homo sapiens
  siRNA target sequence for LOC81691 (NM_030941.1,793-811).
cgtttcactttccattaca

SEQ ID NO: 63733 - DNA, 19 bp, Homo sapiens
  siRNA target sequence for LOC81691 (NM_030941.1,794-812).
gtttcactttccattacaa

SEQ ID NO: 63734 - DNA, 19 bp, Homo sapiens
  siRNA target sequence for LOC81691 (NM_030941.1,813-831).
ggttttcctgattgtgaaa

SEQ ID NO: 63735 - DNA, 19 bp, Homo sapiens
  siRNA target sequence for LOC81691 (NM_030941.1,844-862).
ccaaatgtaatggttctat

SEQ ID NO: 63736 - DNA, 19 bp, Homo sapiens
  siRNA target sequence for LOC81691 (NM_030941.1,855-873).
ggttctatagcagacaata

SEQ ID NO: 63737 - DNA, 19 bp, Homo sapiens
  siRNA target sequence for LOC81691 (NM_030941.1,1024-1042).
cgggaatcacgaagaagat

SEQ ID NO: 63738 - DNA, 19 bp, Homo sapiens
  siRNA target sequence for LOC81691 (NM_030941.1,1025-1043).
gggaatcacgaagaagatt

SEQ ID NO: 63739 - DNA, 19 bp, Homo sapiens
  siRNA target sequence for LOC81691 (NM_030941.1,1027-1045).
gaatcacgaagaagattct

SEQ ID NO: 63740 - DNA, 19 bp, Homo sapiens
  siRNA target sequence for LOC81691 (NM_030941.1,1050-1068).
ccagtgacgaccaaactca

SEQ ID NO: 63741 - DNA, 19 bp, Homo sapiens
  siRNA target sequence for LOC81691 (NM_030941.1,1051-1069).
cagtgacgaccaaactcaa

SEQ ID NO: 63742 - DNA, 19 bp, Homo sapiens
  siRNA target sequence for LOC81691 (NM_030941.1,1057-1075).
cgaccaaactcaaagatgt

SEQ ID NO: 63743 - DNA, 19 bp, Homo sapiens
  siRNA target sequence for LOC81691 (NM_030941.1,1071-1089).
gatgtacagaggcagttaa

SEQ ID NO: 63744 - DNA, 19 bp, Homo sapiens
  siRNA target sequence for LOC81691 (NM_030941.1,1119-1137).
gtgggccactccttagatt

SEQ ID NO: 63745 - DNA, 19 bp, Homo sapiens
  siRNA target sequence for LOC81691 (NM_030941.1,1123-1141).
gccactccttagatttgga

SEQ ID NO: 63746 - DNA, 19 bp, Homo sapiens
  siRNA target sequence for LOC81691 (NM_030941.1,1124-1142).
ccactccttagatttggat

SEQ ID NO: 63747 - DNA, 19 bp, Homo sapiens
  siRNA target sequence for LOC81691 (NM_030941.1,1145-1163).
cagagcactgaaaatgata

SEQ ID NO: 63748 - DNA, 19 bp, Homo sapiens
  siRNA target sequence for LOC81691 (NM_030941.1,1147-1165).
gagcactgaaaatgataca

SEQ ID NO: 63749 - DNA, 19 bp, Homo sapiens
  siRNA target sequence for LOC81691 (NM_030941.1,1160-1178).
gatacatccatatgttatt

SEQ ID NO: 63750 - DNA, 19 bp, Homo sapiens
  siRNA target sequence for LOC81691 (NM_030941.1,1213-1231).
gaagatttaagctcaagtt

SEQ ID NO: 63751 - DNA, 19 bp, Homo sapiens
  siRNA target sequence for LOC81691 (NM_030941.1,1229-1247).
gttcttagccaaagttatt

SEQ ID NO: 63752 - DNA, 19 bp, Homo sapiens
  siRNA target sequence for LOC81691 (NM_030941.1,1303-1321).
ctagaacaatccttgaatt

SEQ ID NO: 63753 - DNA, 19 bp, Homo sapiens
  siRNA target sequence for LOC81691 (NM_030941.1,1324-1342).
ctcggtatttccttaagca

SEQ ID NO: 63754 - DNA, 19 bp, Homo sapiens
  siRNA target sequence for LOC81691 (NM_030941.1,1340-1358).
gcatggcccaaaaaagatt

SEQ ID NO: 63755 - DNA, 19 bp, Homo sapiens
  siRNA target sequence for LOC81691 (NM_030941.1,1384-1402).
ctaatcaccaagaaataca

SEQ ID NO: 63756 - DNA, 19 bp, Homo sapiens
  siRNA target sequence for LOC81691 (NM_030941.1,1408-1426).
caggccaagagcctaaaaa

SEQ ID NO: 63757 - DNA, 19 bp, Homo sapiens
  siRNA target sequence for LOC81691 (NM_030941.1,1410-1428).
ggccaagagcctaaaaaca

SEQ ID NO: 63758 - DNA, 19 bp, Homo sapiens
  siRNA target sequence for LOC81691 (NM_030941.1,1445-1463).
gcacccaaacacaagtgtt

SEQ ID NO: 63759 - DNA, 19 bp, Homo sapiens
  siRNA target sequence for LOC81691 (NM_030941.1,1637-1655).
ctcttttaaggccttttca

SEQ ID NO: 63760 - DNA, 19 bp, Homo sapiens
  siRNA target sequence for LOC81691 (NM_030941.1,1697-1715).
gtggacagagatatcaact

SEQ ID NO: 63761 - DNA, 19 bp, Homo sapiens
  siRNA target sequence for LOC81691 (NM_030941.1,1722-1740).
gctgggccatttagcaaaa

SEQ ID NO: 63762 - DNA, 19 bp, Homo sapiens
  siRNA target sequence for LOC81691 (NM_030941.1,1755-1773).
gctctgaagaggctgttta

SEQ ID NO: 63763 - DNA, 19 bp, Homo sapiens
  siRNA target sequence for LOC81691 (NM_030941.1,1782-1800).
ggcccagtccagtcaatga

SEQ ID NO: 63764 - DNA, 19 bp, Homo sapiens
  siRNA target sequence for LOC81691 (NM_030941.1,1784-1802).
cccagtccagtcaatgact

SEQ ID NO: 63765 - DNA, 19 bp, Homo sapiens
  siRNA target sequence for LOC81691 (NM_030941.1,1785-1803).
ccagtccagtcaatgactt

SEQ ID NO: 63766 - DNA, 19 bp, Homo sapiens
  siRNA target sequence for LOC81691 (NM_030941.1,1793-1811).
gtcaatgacttttgttctt

SEQ ID NO: 63767 - DNA, 19 bp, Homo sapiens
  siRNA target sequence for LOC81691 (NM_030941.1,1888-1906).
gtattctggtagatggtat

SEQ ID NO: 63768 - DNA, 19 bp, Homo sapiens
  siRNA target sequence for LOC81691 (NM_030941.1,1951-1969).
gtgacaccctcgtgaatga

SEQ ID NO: 63769 - DNA, 19 bp, Homo sapiens
  siRNA target sequence for LOC81691 (NM_030941.1,2249-2267).
cttaccacctgaatcaaca

SEQ ID NO: 63770 - DNA, 19 bp, Homo sapiens
  siRNA target sequence for LOC84524 (NM_032494.1,151-169).
cggactctgacgaaagaat

SEQ ID NO: 63771 - DNA, 19 bp, Homo sapiens
  siRNA target sequence for LOC84524 (NM_032494.1,155-173).
ctctgacgaaagaatcgat

SEQ ID NO: 63772 - DNA, 19 bp, Homo sapiens
  siRNA target sequence for LOC84524 (NM_032494.1,161-179).
cgaaagaatcgatgatgaa

SEQ ID NO: 63773 - DNA, 19 bp, Homo sapiens
  siRNA target sequence for LOC84524 (NM_032494.1,166-184).
gaatcgatgatgaaataga

SEQ ID NO: 63774 - DNA, 19 bp, Homo sapiens
  siRNA target sequence for LOC84524 (NM_032494.1,233-251).
gcaaattcccaaaaaattt

SEQ ID NO: 63775 - DNA, 19 bp, Homo sapiens
  siRNA target sequence for LOC84524 (NM_032494.1,257-275).
ctctgcaatatcaccaaaa

SEQ ID NO: 63776 - DNA, 19 bp, Homo sapiens
  siRNA target sequence for LOC84524 (NM_032494.1,298-316).
gaagtaaggactatgatgt

SEQ ID NO: 63777 - DNA, 19 bp, Homo sapiens
  siRNA target sequence for LOC84524 (NM_032494.1,301-319).
gtaaggactatgatgtata

SEQ ID NO: 63778 - DNA, 19 bp, Homo sapiens
  siRNA target sequence for LOC84524 (NM_032494.1,305-323).
ggactatgatgtatatagt

SEQ ID NO: 63779 - DNA, 19 bp, Homo sapiens
  siRNA target sequence for LOC84524 (NM_032494.1,414-432).
caacctgaagaatctacaa

SEQ ID NO: 63780 - DNA, 19 bp, Homo sapiens
  siRNA target sequence for LOC84524 (NM_032494.1,454-472).
ccccacaggctgctaaaca

SEQ ID NO: 63781 - DNA, 19 bp, Homo sapiens
  siRNA target sequence for LOC84524 (NM_032494.1,597-615).
gatggtaaacctaaagaga

SEQ ID NO: 63782 - DNA, 19 bp, Homo sapiens
  siRNA target sequence for LOC84524 (NM_032494.1,834-852).
ccttgtaagttttaccata

SEQ ID NO: 63783 - DNA, 19 bp, Homo sapiens
  siRNA target sequence for LOC84524 (NM_032494.1,926-944).
gttggctaaagttttggat

SEQ ID NO: 63784 - DNA, 19 bp, Homo sapiens
  siRNA target sequence for LOC84549 (NM_032509.2,12-30).
cagtcggatgatgttatct

SEQ ID NO: 63785 - DNA, 19 bp, Homo sapiens
  siRNA target sequence for LOC84549 (NM_032509.2,37-55).
cactaggaaacaagcaatt

SEQ ID NO: 63786 - DNA, 19 bp, Homo sapiens
  siRNA target sequence for LOC84549 (NM_032509.2,86-104).
gagcttctgccgaaatgaa

SEQ ID NO: 63787 - DNA, 19 bp, Homo sapiens
  siRNA target sequence for LOC84549 (NM_032509.2,88-106).
gcttctgccgaaatgaata

SEQ ID NO: 63788 - DNA, 19 bp, Homo sapiens
  siRNA target sequence for LOC84549 (NM_032509.2,109-127).
gcctgactggactgtgtaa

SEQ ID NO: 63789 - DNA, 19 bp, Homo sapiens
  siRNA target sequence for LOC84549 (NM_032509.2,137-155).
ctgtcccctggcaaatagt

SEQ ID NO: 63790 - DNA, 19 bp, Homo sapiens
  siRNA target sequence for LOC84549 (NM_032509.2,139-157).
gtcccctggcaaatagtca

SEQ ID NO: 63791 - DNA, 19 bp, Homo sapiens
  siRNA target sequence for LOC84549 (NM_032509.2,154-172).
gtcagtatgccactattaa

SEQ ID NO: 63792 - DNA, 19 bp, Homo sapiens
  siRNA target sequence for LOC84549 (NM_032509.2,183-201).
ggacagtgctacttgtata

SEQ ID NO: 63793 - DNA, 19 bp, Homo sapiens
  siRNA target sequence for LOC84549 (NM_032509.2,186-204).
cagtgctacttgtatatga

SEQ ID NO: 63794 - DNA, 19 bp, Homo sapiens
  siRNA target sequence for LOC84549 (NM_032509.2,243-261).
gaacgggtccggcttagta

SEQ ID NO: 63795 - DNA, 19 bp, Homo sapiens
  siRNA target sequence for LOC84549 (NM_032509.2,246-264).
cgggtccggcttagtaaaa

SEQ ID NO: 63796 - DNA, 19 bp, Homo sapiens
  siRNA target sequence for LOC84549 (NM_032509.2,247-265).
gggtccggcttagtaaaaa

SEQ ID NO: 63797 - DNA, 19 bp, Homo sapiens
  siRNA target sequence for LOC84549 (NM_032509.2,249-267).
gtccggcttagtaaaaact

SEQ ID NO: 63798 - DNA, 19 bp, Homo sapiens
  siRNA target sequence for LOC84549 (NM_032509.2,251-269).
ccggcttagtaaaaactat

SEQ ID NO: 63799 - DNA, 19 bp, Homo sapiens
  siRNA target sequence for LOC84549 (NM_032509.2,253-271).
ggcttagtaaaaactatga

SEQ ID NO: 63800 - DNA, 19 bp, Homo sapiens
  siRNA target sequence for LOC84549 (NM_032509.2,314-332).
ccgtttcattcgacacaaa

SEQ ID NO: 63801 - DNA, 19 bp, Homo sapiens
  siRNA target sequence for LOC84549 (NM_032509.2,350-368).
caagatcacccaataccta

SEQ ID NO: 63802 - DNA, 19 bp, Homo sapiens
  siRNA target sequence for LOC84549 (NM_032509.2,353-371).
gatcacccaatacctaatt

SEQ ID NO: 63803 - DNA, 19 bp, Homo sapiens
  siRNA target sequence for LOC84549 (NM_032509.2,356-374).
cacccaatacctaattcga

SEQ ID NO: 63804 - DNA, 19 bp, Homo sapiens
  siRNA target sequence for LOC84549 (NM_032509.2,358-376).
cccaatacctaattcgaat

SEQ ID NO: 63805 - DNA, 19 bp, Homo sapiens
  siRNA target sequence for LOC84549 (NM_032509.2,359-377).
ccaatacctaattcgaatt

SEQ ID NO: 63806 - DNA, 19 bp, Homo sapiens
  siRNA target sequence for LOC84549 (NM_032509.2,360-378).
caatacctaattcgaatta

SEQ ID NO: 63807 - DNA, 19 bp, Homo sapiens
  siRNA target sequence for LOC84549 (NM_032509.2,395-413).
gcgacagaggaaacttgtt

SEQ ID NO: 63808 - DNA, 19 bp, Homo sapiens
  siRNA target sequence for LOC84549 (NM_032509.2,431-449).
ggagcgtagggagaaaaga

SEQ ID NO: 63809 - DNA, 19 bp, Homo sapiens
  siRNA target sequence for LOC84549 (NM_032509.2,434-452).
gcgtagggagaaaagaaga

SEQ ID NO: 63810 - DNA, 19 bp, Homo sapiens
  siRNA target sequence for LOC84549 (NM_032509.2,509-527).
ggagagactgaaacaagat

SEQ ID NO: 63811 - DNA, 19 bp, Homo sapiens
  siRNA target sequence for LOC84549 (NM_032509.2,510-528).
gagagactgaaacaagata

SEQ ID NO: 63812 - DNA, 19 bp, Homo sapiens
  siRNA target sequence for LOC84549 (NM_032509.2,514-532).
gactgaaacaagatacgta

SEQ ID NO: 63813 - DNA, 19 bp, Homo sapiens
  siRNA target sequence for LOC84549 (NM_032509.2,598-616).
gtgactcttcagatactga

SEQ ID NO: 63814 - DNA, 19 bp, Homo sapiens
  siRNA target sequence for LOC84549 (NM_032509.2,683-701).
ggtagatgagagtgacata

SEQ ID NO: 63815 - DNA, 19 bp, Homo sapiens
  siRNA target sequence for LOC84549 (NM_032509.2,684-702).
gtagatgagagtgacataa

SEQ ID NO: 63816 - DNA, 19 bp, Homo sapiens
  siRNA target sequence for LOC84549 (NM_032509.2,692-710).
gagtgacataagtgatttt

SEQ ID NO: 63817 - DNA, 19 bp, Homo sapiens
  siRNA target sequence for LOC84549 (NM_032509.2,789-807).
gcccttagtgcgaaacaca

SEQ ID NO: 63818 - DNA, 19 bp, Homo sapiens
  siRNA target sequence for LOC84549 (NM_032509.2,790-808).
cccttagtgcgaaacacaa

SEQ ID NO: 63819 - DNA, 19 bp, Homo sapiens
  siRNA target sequence for LOC90233 (NM_138347.2,369-387).
ctgagcagagtgtatctat

SEQ ID NO: 63820 - DNA, 19 bp, Homo sapiens
  siRNA target sequence for LOC90233 (NM_138347.2,429-447).
ctcacctcagtgagattaa

SEQ ID NO: 63821 - DNA, 19 bp, Homo sapiens
  siRNA target sequence for LOC90233 (NM_138347.2,498-516).
ccacatcccctgtgcaaaa

SEQ ID NO: 63822 - DNA, 19 bp, Homo sapiens
  siRNA target sequence for LOC90233 (NM_138347.2,504-522).
cccctgtgcaaaagtcata

SEQ ID NO: 63823 - DNA, 19 bp, Homo sapiens
  siRNA target sequence for LOC90233 (NM_138347.2,506-524).
cctgtgcaaaagtcatact

SEQ ID NO: 63824 - DNA, 19 bp, Homo sapiens
  siRNA target sequence for LOC90233 (NM_138347.2,507-525).
ctgtgcaaaagtcatactt

SEQ ID NO: 63825 - DNA, 19 bp, Homo sapiens
  siRNA target sequence for LOC90233 (NM_138347.2,563-581).
gaccttcaccagcatcaaa

SEQ ID NO: 63826 - DNA, 19 bp, Homo sapiens
  siRNA target sequence for LOC90233 (NM_138347.2,572-590).
cagcatcaaaagcattaca

SEQ ID NO: 63827 - DNA, 19 bp, Homo sapiens
  siRNA target sequence for LOC90233 (NM_138347.2,646-664).
cagattccatgtgttgaat

SEQ ID NO: 63828 - DNA, 19 bp, Homo sapiens
  siRNA target sequence for LOC90233 (NM_138347.2,799-817).
gtggggtgaatacagaaaa

SEQ ID NO: 63829 - DNA, 19 bp, Homo sapiens
  siRNA target sequence for LOC90233 (NM_138347.2,950-968).
ggacaaaagatgtttgagt

SEQ ID NO: 63830 - DNA, 19 bp, Homo sapiens
  siRNA target sequence for LOC90233 (NM_138347.2,1002-1020).
gccacctaatcttacacaa

SEQ ID NO: 63831 - DNA, 19 bp, Homo sapiens
  siRNA target sequence for LOC90233 (NM_138347.2,1324-1342).
ctttagacaaatcttcaat

SEQ ID NO: 63832 - DNA, 19 bp, Homo sapiens
  siRNA target sequence for LOC90233 (NM_138347.2,1329-1347).
gacaaatcttcaatctcat

SEQ ID NO: 63833 - DNA, 19 bp, Homo sapiens
  siRNA target sequence for LOC90233 (NM_138347.2,1339-1357).
caatctcattcgacataga

SEQ ID NO: 63834 - DNA, 19 bp, Homo sapiens
  siRNA target sequence for LOC90233 (NM_138347.2,1413-1431).
gctgcaaatcggaactcat

SEQ ID NO: 63835 - DNA, 19 bp, Homo sapiens
  siRNA target sequence for LOC90233 (NM_138347.2,1414-1432).
ctgcaaatcggaactcatt

SEQ ID NO: 63836 - DNA, 19 bp, Homo sapiens
  siRNA target sequence for LOC90233 (NM_138347.2,1491-1509).
cctttagacaattctctaa

SEQ ID NO: 63837 - DNA, 19 bp, Homo sapiens
  siRNA target sequence for LOC90233 (NM_138347.2,1584-1602).
gcaaatttatcctgattca

SEQ ID NO: 63838 - DNA, 19 bp, Homo sapiens
  siRNA target sequence for LOC90462 (NM_183238.1,329-347).
gatccagtcacagatatca

SEQ ID NO: 63839 - DNA, 19 bp, Homo sapiens
  siRNA target sequence for LOC90462 (NM_183238.1,332-350).
ccagtcacagatatcattt

SEQ ID NO: 63840 - DNA, 19 bp, Homo sapiens
  siRNA target sequence for LOC90462 (NM_183238.1,378-396).
gaggaatggcagctactta

SEQ ID NO: 63841 - DNA, 19 bp, Homo sapiens
  siRNA target sequence for LOC90462 (NM_183238.1,380-398).
ggaatggcagctacttaat

SEQ ID NO: 63842 - DNA, 19 bp, Homo sapiens
  siRNA target sequence for LOC90462 (NM_183238.1,461-479).
ggaagtctggctagataat

SEQ ID NO: 63843 - DNA, 19 bp, Homo sapiens
  siRNA target sequence for LOC90462 (NM_183238.1,488-506).
gtggctccgagataatcaa

SEQ ID NO: 63844 - DNA, 19 bp, Homo sapiens
  siRNA target sequence for LOC90462 (NM_183238.1,490-508).
ggctccgagataatcaaga

SEQ ID NO: 63845 - DNA, 19 bp, Homo sapiens
  siRNA target sequence for LOC90462 (NM_183238.1,568-586).
caagcataaacattgttca

SEQ ID NO: 63846 - DNA, 19 bp, Homo sapiens
  siRNA target sequence for LOC90462 (NM_183238.1,591-609).
ggactgcgatcccataaat

SEQ ID NO: 63847 - DNA, 19 bp, Homo sapiens
  siRNA target sequence for LOC90462 (NM_183238.1,730-748).
gaacccatggtgggataaa

SEQ ID NO: 63848 - DNA, 19 bp, Homo sapiens
  siRNA target sequence for LOC90462 (NM_183238.1,733-751).
cccatggtgggataaaata

SEQ ID NO: 63849 - DNA, 19 bp, Homo sapiens
  siRNA target sequence for LOC90462 (NM_183238.1,741-759).
gggataaaatactgtgatt

SEQ ID NO: 63850 - DNA, 19 bp, Homo sapiens
  siRNA target sequence for LOC90462 (NM_183238.1,793-811).
catggctcactgctaatca

SEQ ID NO: 63851 - DNA, 19 bp, Homo sapiens
  siRNA target sequence for LOC90462 (NM_183238.1,797-815).
gctcactgctaatcacata

SEQ ID NO: 63852 - DNA, 19 bp, Homo sapiens
  siRNA target sequence for LOC90462 (NM_183238.1,817-835).
cacacacaggagtctattt

SEQ ID NO: 63853 - DNA, 19 bp, Homo sapiens
  siRNA target sequence for LOC90462 (NM_183238.1,819-837).
cacacaggagtctatttat

SEQ ID NO: 63854 - DNA, 19 bp, Homo sapiens
  siRNA target sequence for LOC90462 (NM_183238.1,1033-1051).
ggaagtcactcctcatttt

SEQ ID NO: 63855 - DNA, 19 bp, Homo sapiens
  siRNA target sequence for LOC90462 (NM_183238.1,1114-1132).
gtaggaagtcgcagcttaa

SEQ ID NO: 63856 - DNA, 19 bp, Homo sapiens
  siRNA target sequence for LOC90462 (NM_183238.1,1118-1136).
gaagtcgcagcttaaaaga

SEQ ID NO: 63857 - DNA, 19 bp, Homo sapiens
  siRNA target sequence for LOC90462 (NM_183238.1,1121-1139).
gtcgcagcttaaaagacat

SEQ ID NO: 63858 - DNA, 19 bp, Homo sapiens
  siRNA target sequence for LOC90462 (NM_183238.1,1191-1209).
gcattctcccagaaattaa

SEQ ID NO: 63859 - DNA, 19 bp, Homo sapiens
  siRNA target sequence for LOC90462 (NM_183238.1,1192-1210).
cattctcccagaaattaaa

SEQ ID NO: 63860 - DNA, 19 bp, Homo sapiens
  siRNA target sequence for LOC90462 (NM_183238.1,1286-1304).
gaagtcgcagctgattact

SEQ ID NO: 63861 - DNA, 19 bp, Homo sapiens
  siRNA target sequence for LOC90462 (NM_183238.1,1338-1356).
ggatgtggtgagtgtcaaa

SEQ ID NO: 63862 - DNA, 19 bp, Homo sapiens
  siRNA target sequence for LOC90462 (NM_183238.1,1491-1509).
ggagagaagaactatcgat

SEQ ID NO: 63863 - DNA, 19 bp, Homo sapiens
  siRNA target sequence for LOC90462 (NM_183238.1,1538-1556).
gaagtcagagttaataaga

SEQ ID NO: 63864 - DNA, 19 bp, Homo sapiens
  siRNA target sequence for LOC90462 (NM_183238.1,1541-1559).
gtcagagttaataagacat

SEQ ID NO: 63865 - DNA, 19 bp, Homo sapiens
  siRNA target sequence for LOC90462 (NM_183238.1,1545-1563).
gagttaataagacatcaaa

SEQ ID NO: 63866 - DNA, 19 bp, Homo sapiens
  siRNA target sequence for LOC90462 (NM_183238.1,1709-1727).
gtcaagcctgatatcacat

SEQ ID NO: 63867 - DNA, 19 bp, Homo sapiens
  siRNA target sequence for LOC90462 (NM_183238.1,1956-1974).
cagaaagtgcagctcatta

SEQ ID NO: 63868 - DNA, 19 bp, Homo sapiens
  siRNA target sequence for LOC90462 (NM_183238.1,2163-2181).
ggagataaatactatggat

SEQ ID NO: 63869 - DNA, 19 bp, Homo sapiens
  siRNA target sequence for LOC90462 (NM_183238.1,2209-2227).
ggaagtcgcagcttatgat

SEQ ID NO: 63870 - DNA, 19 bp, Homo sapiens
  siRNA target sequence for LOC90462 (NM_183238.1,2210-2228).
gaagtcgcagcttatgata

SEQ ID NO: 63871 - DNA, 19 bp, Homo sapiens
  siRNA target sequence for LOC90462 (NM_183238.1,2213-2231).
gtcgcagcttatgatacat

SEQ ID NO: 63872 - DNA, 19 bp, Homo sapiens
  siRNA target sequence for LOC90462 (NM_183238.1,2215-2233).
cgcagcttatgatacatca

SEQ ID NO: 63873 - DNA, 19 bp, Homo sapiens
  siRNA target sequence for LOC91120 (NM_033196.1,325-343).
gaggatttacacttaagga

SEQ ID NO: 63874 - DNA, 19 bp, Homo sapiens
  siRNA target sequence for LOC91120 (NM_033196.1,362-380).
gtgagtgtaaggatcaaaa

SEQ ID NO: 63875 - DNA, 19 bp, Homo sapiens
  siRNA target sequence for LOC91120 (NM_033196.1,411-429).
gtcaactctacctagcaaa

SEQ ID NO: 63876 - DNA, 19 bp, Homo sapiens
  siRNA target sequence for LOC91120 (NM_033196.1,425-443).
gcaaaattttcccatataa

SEQ ID NO: 63877 - DNA, 19 bp, Homo sapiens
  siRNA target sequence for LOC91120 (NM_033196.1,557-575).
caggcctttcttatcataa

SEQ ID NO: 63878 - DNA, 19 bp, Homo sapiens
  siRNA target sequence for LOC91120 (NM_033196.1,717-735).
ctggtgctcgagtcttact

SEQ ID NO: 63879 - DNA, 19 bp, Homo sapiens
  siRNA target sequence for LOC91120 (NM_033196.1,719-737).
ggtgctcgagtcttactaa

SEQ ID NO: 63880 - DNA, 19 bp, Homo sapiens
  siRNA target sequence for LOC91120 (NM_033196.1,720-738).
gtgctcgagtcttactaaa

SEQ ID NO: 63881 - DNA, 19 bp, Homo sapiens
  siRNA target sequence for LOC91120 (NM_033196.1,801-819).
ctggtgttcaccctttgtt

SEQ ID NO: 63882 - DNA, 19 bp, Homo sapiens
  siRNA target sequence for LOC91120 (NM_033196.1,806-824).
gttcaccctttgttagaca

SEQ ID NO: 63883 - DNA, 19 bp, Homo sapiens
  siRNA target sequence for LOC91120 (NM_033196.1,811-829).
ccctttgttagacataaga

SEQ ID NO: 63884 - DNA, 19 bp, Homo sapiens
  siRNA target sequence for LOC91120 (NM_033196.1,1343-1361).
ctgccgtcaaacgctataa

SEQ ID NO: 63885 - DNA, 19 bp, Homo sapiens
  siRNA target sequence for LOC91120 (NM_033196.1,1391-1409).
ggtgctcacatcttaatga

SEQ ID NO: 63886 - DNA, 19 bp, Homo sapiens
  siRNA target sequence for LOC92906 (NM_138394.2,555-573).
ggacaatatgctatgtgat

SEQ ID NO: 63887 - DNA, 19 bp, Homo sapiens
  siRNA target sequence for LOC92906 (NM_138394.2,591-609).
gacaggctctagtggaatt

SEQ ID NO: 63888 - DNA, 19 bp, Homo sapiens
  siRNA target sequence for LOC92906 (NM_138394.2,595-613).
ggctctagtggaatttgaa

SEQ ID NO: 63889 - DNA, 19 bp, Homo sapiens
  siRNA target sequence for LOC92906 (NM_138394.2,596-614).
gctctagtggaatttgaaa

SEQ ID NO: 63890 - DNA, 19 bp, Homo sapiens
  siRNA target sequence for LOC92906 (NM_138394.2,651-669).
cagatgaacccgtgtacat

SEQ ID NO: 63891 - DNA, 19 bp, Homo sapiens
  siRNA target sequence for LOC92906 (NM_138394.2,674-692).
ggtcaacaggcttttttca

SEQ ID NO: 63892 - DNA, 19 bp, Homo sapiens
  siRNA target sequence for LOC92906 (NM_138394.2,682-700).
ggcttttttcaactattct

SEQ ID NO: 63893 - DNA, 19 bp, Homo sapiens
  siRNA target sequence for LOC92906 (NM_138394.2,712-730).
gatcactcggccaggaaat

SEQ ID NO: 63894 - DNA, 19 bp, Homo sapiens
  siRNA target sequence for LOC92906 (NM_138394.2,717-735).
ctcggccaggaaatactga

SEQ ID NO: 63895 - DNA, 19 bp, Homo sapiens
  siRNA target sequence for LOC92906 (NM_138394.2,741-759).
catcaggaggcaacaaagt

SEQ ID NO: 63896 - DNA, 19 bp, Homo sapiens
  siRNA target sequence for LOC92906 (NM_138394.2,778-796).
gaatccgctttatccaatt

SEQ ID NO: 63897 - DNA, 19 bp, Homo sapiens
  siRNA target sequence for LOC92906 (NM_138394.2,791-809).
ccaattacagtggatgttt

SEQ ID NO: 63898 - DNA, 19 bp, Homo sapiens
  siRNA target sequence for LOC92906 (NM_138394.2,834-852).
gcaaagtgcaacgtattgt

SEQ ID NO: 63899 - DNA, 19 bp, Homo sapiens
  siRNA target sequence for LOC92906 (NM_138394.2,835-853).
caaagtgcaacgtattgtt

SEQ ID NO: 63900 - DNA, 19 bp, Homo sapiens
  siRNA target sequence for LOC92906 (NM_138394.2,839-857).
gtgcaacgtattgttatat

SEQ ID NO: 63901 - DNA, 19 bp, Homo sapiens
  siRNA target sequence for LOC92906 (NM_138394.2,842-860).
caacgtattgttatattca

SEQ ID NO: 63902 - DNA, 19 bp, Homo sapiens
  siRNA target sequence for LOC92906 (NM_138394.2,845-863).
cgtattgttatattcaaga

SEQ ID NO: 63903 - DNA, 19 bp, Homo sapiens
  siRNA target sequence for LOC92906 (NM_138394.2,864-882).
gaaatgggatacaagcaat

SEQ ID NO: 63904 - DNA, 19 bp, Homo sapiens
  siRNA target sequence for LOC92906 (NM_138394.2,878-896).
gcaatggttgagtttgaat

SEQ ID NO: 63905 - DNA, 19 bp, Homo sapiens
  siRNA target sequence for LOC92906 (NM_138394.2,950-968).
gctggatgttgcacactaa

SEQ ID NO: 63906 - DNA, 19 bp, Homo sapiens
  siRNA target sequence for LOC92906 (NM_138394.2,953-971).
ggatgttgcacactaaaaa

SEQ ID NO: 63907 - DNA, 19 bp, Homo sapiens
  siRNA target sequence for LOC92906 (NM_138394.2,960-978).
gcacactaaaaattgaata

SEQ ID NO: 63908 - DNA, 19 bp, Homo sapiens
  siRNA target sequence for LOC92906 (NM_138394.2,981-999).
cacggccaactcgtctaaa

SEQ ID NO: 63909 - DNA, 19 bp, Homo sapiens
  siRNA target sequence for LOC92906 (NM_138394.2,992-1010).
cgtctaaatgttattagga

SEQ ID NO: 63910 - DNA, 19 bp, Homo sapiens
  siRNA target sequence for LOC92906 (NM_138394.2,993-1011).
gtctaaatgttattaggaa

SEQ ID NO: 63911 - DNA, 19 bp, Homo sapiens
  siRNA target sequence for LOC92906 (NM_138394.2,1019-1037).
gacagttgggactacacta

SEQ ID NO: 63912 - DNA, 19 bp, Homo sapiens
  siRNA target sequence for LOC92906 (NM_138394.2,1026-1044).
gggactacactaaaccata

SEQ ID NO: 63913 - DNA, 19 bp, Homo sapiens
  siRNA target sequence for LOC92906 (NM_138394.2,1027-1045).
ggactacactaaaccatat

SEQ ID NO: 63914 - DNA, 19 bp, Homo sapiens
  siRNA target sequence for LOC92906 (NM_138394.2,1028-1046).
gactacactaaaccatatt

SEQ ID NO: 63915 - DNA, 19 bp, Homo sapiens
  siRNA target sequence for LOC92906 (NM_138394.2,1102-1120).
cccttcttcgtttagacat

SEQ ID NO: 63916 - DNA, 19 bp, Homo sapiens
  siRNA target sequence for LOC92906 (NM_138394.2,1130-1148).
ggatcccatggtccattat

SEQ ID NO: 63917 - DNA, 19 bp, Homo sapiens
  siRNA target sequence for LOC92906 (NM_138394.2,1188-1206).
cacctgaacttgttgctta

SEQ ID NO: 63918 - DNA, 19 bp, Homo sapiens
  siRNA target sequence for LOC92906 (NM_138394.2,1251-1269).
cctctggttcagttgtaat

SEQ ID NO: 63919 - DNA, 19 bp, Homo sapiens
  siRNA target sequence for LOC92906 (NM_138394.2,1254-1272).
ctggttcagttgtaatggt

SEQ ID NO: 63920 - DNA, 19 bp, Homo sapiens
  siRNA target sequence for LOC92906 (NM_138394.2,1256-1274).
ggttcagttgtaatggtta

SEQ ID NO: 63921 - DNA, 19 bp, Homo sapiens
  siRNA target sequence for LOC92906 (NM_138394.2,1275-1293).
gtggattacatcaactaaa

SEQ ID NO: 63922 - DNA, 19 bp, Homo sapiens
  siRNA target sequence for LOC92906 (NM_138394.2,1278-1296).
gattacatcaactaaaaat

SEQ ID NO: 63923 - DNA, 19 bp, Homo sapiens
  siRNA target sequence for LOC92906 (NM_138394.2,1418-1436).
gctgtcacacaccttaata

SEQ ID NO: 63924 - DNA, 19 bp, Homo sapiens
  siRNA target sequence for LOC92906 (NM_138394.2,1419-1437).
ctgtcacacaccttaataa

SEQ ID NO: 63925 - DNA, 19 bp, Homo sapiens
  siRNA target sequence for LOC92906 (NM_138394.2,1427-1445).
caccttaataatgtcaaat

SEQ ID NO: 63926 - DNA, 19 bp, Homo sapiens
  siRNA target sequence for LOC92906 (NM_138394.2,1555-1573).
caaaaataatcgctttaca

SEQ ID NO: 63927 - DNA, 19 bp, Homo sapiens
  siRNA target sequence for LOC92906 (NM_138394.2,1575-1593).
gtgctggccaagcatctaa

SEQ ID NO: 63928 - DNA, 19 bp, Homo sapiens
  siRNA target sequence for LOC92906 (NM_138394.2,1578-1596).
ctggccaagcatctaagaa

SEQ ID NO: 63929 - DNA, 19 bp, Homo sapiens
  siRNA target sequence for LOC92906 (NM_138394.2,1580-1598).
ggccaagcatctaagaata

SEQ ID NO: 63930 - DNA, 19 bp, Homo sapiens
  siRNA target sequence for LOC92906 (NM_138394.2,1582-1600).
ccaagcatctaagaatata

SEQ ID NO: 63931 - DNA, 19 bp, Homo sapiens
  siRNA target sequence for LOC92906 (NM_138394.2,1612-1630).
ctcctgtgttttgcattat

SEQ ID NO: 63932 - DNA, 19 bp, Homo sapiens
  siRNA target sequence for LOC92906 (NM_138394.2,1675-1693).
gtgtaatgaccatgaagtt

SEQ ID NO: 63933 - DNA, 19 bp, Homo sapiens
  siRNA target sequence for LOC92906 (NM_138394.2,1677-1695).
gtaatgaccatgaagttct

SEQ ID NO: 63934 - DNA, 19 bp, Homo sapiens
  siRNA target sequence for LOC92906 (NM_138394.2,1682-1700).
gaccatgaagttcttacat

SEQ ID NO: 63935 - DNA, 19 bp, Homo sapiens
  siRNA target sequence for LOC92906 (NM_138394.2,1688-1706).
gaagttcttacattcatca

SEQ ID NO: 63936 - DNA, 19 bp, Homo sapiens
  siRNA target sequence for LOC92906 (NM_138394.2,1691-1709).
gttcttacattcatcaaat

SEQ ID NO: 63937 - DNA, 19 bp, Homo sapiens
  siRNA target sequence for LOC92906 (NM_138394.2,1694-1712).
cttacattcatcaaatata

SEQ ID NO: 63938 - DNA, 19 bp, Homo sapiens
  siRNA target sequence for LOC92906 (NM_138394.2,1698-1716).
cattcatcaaatataaagt

SEQ ID NO: 63939 - DNA, 19 bp, Homo sapiens
  siRNA target sequence for LOC92906 (NM_138394.2,1743-1761).
cactttctgggctattaga

SEQ ID NO: 63940 - DNA, 19 bp, Homo sapiens
  siRNA target sequence for LOC92906 (NM_138394.2,1745-1763).
ctttctgggctattagaat

SEQ ID NO: 63941 - DNA, 19 bp, Homo sapiens
  siRNA target sequence for LOC92906 (NM_138394.2,1791-1809).
cccttacggcactgaatca

SEQ ID NO: 63942 - DNA, 19 bp, Homo sapiens
  siRNA target sequence for LOC92906 (NM_138394.2,1793-1811).
cttacggcactgaatcact

SEQ ID NO: 63943 - DNA, 19 bp, Homo sapiens
  siRNA target sequence for LOC92906 (NM_138394.2,1797-1815).
cggcactgaatcactatca

SEQ ID NO: 63944 - DNA, 19 bp, Homo sapiens
  siRNA target sequence for LOC92906 (NM_138394.2,1800-1818).
cactgaatcactatcagat

SEQ ID NO: 63945 - DNA, 19 bp, Homo sapiens
  siRNA target sequence for LOC92906 (NM_138394.2,1802-1820).
ctgaatcactatcagataa

SEQ ID NO: 63946 - DNA, 19 bp, Homo sapiens
  siRNA target sequence for LOC92906 (NM_138394.2,1833-1851).
gttccaatccctatacatt

SEQ ID NO: 63947 - DNA, 19 bp, Homo sapiens
  siRNA target sequence for LOC92906 (NM_138394.2,1841-1859).
ccctatacattgaagcttt

SEQ ID NO: 63948 - DNA, 19 bp, Homo sapiens
  siRNA target sequence for MADP-1 (NM_033114.2,194-212).
ggattggctccaagtaaga

SEQ ID NO: 63949 - DNA, 19 bp, Homo sapiens
  siRNA target sequence for MADP-1 (NM_033114.2,224-242).
gtatccaacttgccttttt

SEQ ID NO: 63950 - DNA, 19 bp, Homo sapiens
  siRNA target sequence for MADP-1 (NM_033114.2,257-275).
gacttgtaccggatatttt

SEQ ID NO: 63951 - DNA, 19 bp, Homo sapiens
  siRNA target sequence for MADP-1 (NM_033114.2,265-283).
ccggatattttccaagtat

SEQ ID NO: 63952 - DNA, 19 bp, Homo sapiens
  siRNA target sequence for MADP-1 (NM_033114.2,293-311).
gtaaaggttaccatcatga

SEQ ID NO: 63953 - DNA, 19 bp, Homo sapiens
  siRNA target sequence for MADP-1 (NM_033114.2,298-316).
ggttaccatcatgaaagat

SEQ ID NO: 63954 - DNA, 19 bp, Homo sapiens
  siRNA target sequence for MADP-1 (NM_033114.2,331-349).
gagtaaaggggttgcattt

SEQ ID NO: 63955 - DNA, 19 bp, Homo sapiens
  siRNA target sequence for MADP-1 (NM_033114.2,387-405).
ccagggcaataaacaacaa

SEQ ID NO: 63956 - DNA, 19 bp, Homo sapiens
  siRNA target sequence for MADP-1 (NM_033114.2,409-427).
gttatttggtagagtgata

SEQ ID NO: 63957 - DNA, 19 bp, Homo sapiens
  siRNA target sequence for MADP-1 (NM_033114.2,472-490).
ccgaaggcgaaactacttt

SEQ ID NO: 63958 - DNA, 19 bp, Homo sapiens
  siRNA target sequence for MADP-1 (NM_033114.2,474-492).
gaaggcgaaactactttga

SEQ ID NO: 63959 - DNA, 19 bp, Homo sapiens
  siRNA target sequence for MADP-1 (NM_033114.2,477-495).
ggcgaaactactttgataa

SEQ ID NO: 63960 - DNA, 19 bp, Homo sapiens
  siRNA target sequence for MADP-1 (NM_033114.2,478-496).
gcgaaactactttgataaa

SEQ ID NO: 63961 - DNA, 19 bp, Homo sapiens
  siRNA target sequence for MADP-1 (NM_033114.2,479-497).
cgaaactactttgataaat

SEQ ID NO: 63962 - DNA, 19 bp, Homo sapiens
  siRNA target sequence for MADP-1 (NM_033114.2,487-505).
ctttgataaatctaagtgt

SEQ ID NO: 63963 - DNA, 19 bp, Homo sapiens
  siRNA target sequence for MADP-1 (NM_033114.2,757-775).
cccctcaacatcagatgat

SEQ ID NO: 63964 - DNA, 19 bp, Homo sapiens
  siRNA target sequence for MADP-1 (NM_033114.2,758-776).
ccctcaacatcagatgatt

SEQ ID NO: 63965 - DNA, 19 bp, Homo sapiens
  siRNA target sequence for MADP-1 (NM_033114.2,780-798).
gacgcccaaggataaagaa

SEQ ID NO: 63966 - DNA, 19 bp, Homo sapiens
  siRNA target sequence for MAN1 (NM_014319.3,189-207).
caagacgcggaacagtaat

SEQ ID NO: 63967 - DNA, 19 bp, Homo sapiens
  siRNA target sequence for MAN1 (NM_014319.3,194-212).
cgcggaacagtaataacaa

SEQ ID NO: 63968 - DNA, 19 bp, Homo sapiens
  siRNA target sequence for MAN1 (NM_014319.3,195-213).
gcggaacagtaataacaat

SEQ ID NO: 63969 - DNA, 19 bp, Homo sapiens
  siRNA target sequence for MAN1 (NM_014319.3,196-214).
cggaacagtaataacaata

SEQ ID NO: 63970 - DNA, 19 bp, Homo sapiens
  siRNA target sequence for MAN1 (NM_014319.3,291-309).
gggcgacctctcctactta

SEQ ID NO: 63971 - DNA, 19 bp, Homo sapiens
  siRNA target sequence for MAN1 (NM_014319.3,541-559).
gccagcgaggtgactaaca

SEQ ID NO: 63972 - DNA, 19 bp, Homo sapiens
  siRNA target sequence for MAN1 (NM_014319.3,816-834).
ctccagcagacaggtatta

SEQ ID NO: 63973 - DNA, 19 bp, Homo sapiens
  siRNA target sequence for MAN1 (NM_014319.3,863-881).
ccagacgaacccatagtaa

SEQ ID NO: 63974 - DNA, 19 bp, Homo sapiens
  siRNA target sequence for MAN1 (NM_014319.3,945-963).
gggaggactcgcgatgaat

SEQ ID NO: 63975 - DNA, 19 bp, Homo sapiens
  siRNA target sequence for MAN1 (NM_014319.3,947-965).
gaggactcgcgatgaatga

SEQ ID NO: 63976 - DNA, 19 bp, Homo sapiens
  siRNA target sequence for MAN1 (NM_014319.3,949-967).
ggactcgcgatgaatgaca

SEQ ID NO: 63977 - DNA, 19 bp, Homo sapiens
  siRNA target sequence for MAN1 (NM_014319.3,1034-1052).
gaggagggtgtgatcaagt

SEQ ID NO: 63978 - DNA, 19 bp, Homo sapiens
  siRNA target sequence for MAN1 (NM_014319.3,1058-1076).
ccagccccgttcctagata

SEQ ID NO: 63979 - DNA, 19 bp, Homo sapiens
  siRNA target sequence for MAN1 (NM_014319.3,1077-1095).
ccgtgttaacgctaagaaa

SEQ ID NO: 63980 - DNA, 19 bp, Homo sapiens
  siRNA target sequence for MAN1 (NM_014319.3,1079-1097).
gtgttaacgctaagaaact

SEQ ID NO: 63981 - DNA, 19 bp, Homo sapiens
  siRNA target sequence for MAN1 (NM_014319.3,1081-1099).
gttaacgctaagaaactga

SEQ ID NO: 63982 - DNA, 19 bp, Homo sapiens
  siRNA target sequence for MAN1 (NM_014319.3,1156-1174).
ggctcccttctgaaaacca

SEQ ID NO: 63983 - DNA, 19 bp, Homo sapiens
  siRNA target sequence for MAN1 (NM_014319.3,1158-1176).
ctcccttctgaaaaccaat

SEQ ID NO: 63984 - DNA, 19 bp, Homo sapiens
  siRNA target sequence for MAN1 (NM_014319.3,1160-1178).
cccttctgaaaaccaataa

SEQ ID NO: 63985 - DNA, 19 bp, Homo sapiens
  siRNA target sequence for MAN1 (NM_014319.3,1211-1229).
cccccaggatttattctaa

SEQ ID NO: 63986 - DNA, 19 bp, Homo sapiens
  siRNA target sequence for MAN1 (NM_014319.3,1215-1233).
caggatttattctaacagt

SEQ ID NO: 63987 - DNA, 19 bp, Homo sapiens
  siRNA target sequence for MAN1 (NM_014319.3,1275-1293).
gatcaatcacgccaatcat

SEQ ID NO: 63988 - DNA, 19 bp, Homo sapiens
  siRNA target sequence for MAN1 (NM_014319.3,1291-1309).
catacgggctccaatcata

SEQ ID NO: 63989 - DNA, 19 bp, Homo sapiens
  siRNA target sequence for MAN1 (NM_014319.3,1295-1313).
cgggctccaatcataccta

SEQ ID NO: 63990 - DNA, 19 bp, Homo sapiens
  siRNA target sequence for MAN1 (NM_014319.3,1310-1328).
cctacctgaaaaacacata

SEQ ID NO: 63991 - DNA, 19 bp, Homo sapiens
  siRNA target sequence for MAN1 (NM_014319.3,1359-1377).
ggaacttctccagcaattt

SEQ ID NO: 63992 - DNA, 19 bp, Homo sapiens
  siRNA target sequence for MAN1 (NM_014319.3,1395-1413).
cccaacagggagtttcagt

SEQ ID NO: 63993 - DNA, 19 bp, Homo sapiens
  siRNA target sequence for MAN1 (NM_014319.3,1406-1424).
gtttcagtgcccactactt

SEQ ID NO: 63994 - DNA, 19 bp, Homo sapiens
  siRNA target sequence for MAN1 (NM_014319.3,1416-1434).
ccactacttgtcgatgttt

SEQ ID NO: 63995 - DNA, 19 bp, Homo sapiens
  siRNA target sequence for MAN1 (NM_014319.3,1422-1440).
cttgtcgatgtttctctta

SEQ ID NO: 63996 - DNA, 19 bp, Homo sapiens
  siRNA target sequence for MAN1 (NM_014319.3,1425-1443).
gtcgatgtttctcttaact

SEQ ID NO: 63997 - DNA, 19 bp, Homo sapiens
  siRNA target sequence for MAN1 (NM_014319.3,1447-1465).
gcctgcttatttttcctaa

SEQ ID NO: 63998 - DNA, 19 bp, Homo sapiens
  siRNA target sequence for MAN1 (NM_014319.3,1476-1494).
gacttacctaggaatgaga

SEQ ID NO: 63999 - DNA, 19 bp, Homo sapiens
  siRNA target sequence for MAN1 (NM_014319.3,1493-1511).
gagggacaggagtatctga

SEQ ID NO: 64000 - DNA, 19 bp, Homo sapiens
  siRNA target sequence for MAN1 (NM_014319.3,1516-1534).
ggagaactcagcatagaaa

SEQ ID NO: 64001 - DNA, 19 bp, Homo sapiens
  siRNA target sequence for MAN1 (NM_014319.3,1582-1600).
cttatgatgaacacattat

SEQ ID NO: 64002 - DNA, 19 bp, Homo sapiens
  siRNA target sequence for MAN1 (NM_014319.3,1595-1613).
cattatataagcttcatga

SEQ ID NO: 64003 - DNA, 19 bp, Homo sapiens
  siRNA target sequence for MAN1 (NM_014319.3,1639-1657).
catgaatgtggcagttcta

SEQ ID NO: 64004 - DNA, 19 bp, Homo sapiens
  siRNA target sequence for MAN1 (NM_014319.3,1658-1676).
gtcaaagaacgctttctgt

SEQ ID NO: 64005 - DNA, 19 bp, Homo sapiens
  siRNA target sequence for MAN1 (NM_014319.3,1664-1682).
gaacgctttctgttcaaga

SEQ ID NO: 64006 - DNA, 19 bp, Homo sapiens
  siRNA target sequence for MAN1 (NM_014319.3,1720-1738).
gaaggtatatttaacactt

SEQ ID NO: 64007 - DNA, 19 bp, Homo sapiens
  siRNA target sequence for MAN1 (NM_014319.3,1739-1757).
cattgcagtggatcttaga

SEQ ID NO: 64008 - DNA, 19 bp, Homo sapiens
  siRNA target sequence for MAN1 (NM_014319.3,1743-1761).
gcagtggatcttagaaaat

SEQ ID NO: 64009 - DNA, 19 bp, Homo sapiens
  siRNA target sequence for MAN1 (NM_014319.3,1746-1764).
gtggatcttagaaaatgga

SEQ ID NO: 64010 - DNA, 19 bp, Homo sapiens
  siRNA target sequence for MAN1 (NM_014319.3,1847-1865).
caagaccactgatgtcttt

SEQ ID NO: 64011 - DNA, 19 bp, Homo sapiens
  siRNA target sequence for MAN1 (NM_014319.3,1874-1892).
gttttcgacgtgcttttgt

SEQ ID NO: 64012 - DNA, 19 bp, Homo sapiens
  siRNA target sequence for MAN1 (NM_014319.3,1880-1898).
gacgtgcttttgttactgt

SEQ ID NO: 64013 - DNA, 19 bp, Homo sapiens
  siRNA target sequence for MAN1 (NM_014319.3,1928-1946).
gtgtagtgatggtttgtgt

SEQ ID NO: 64014 - DNA, 19 bp, Homo sapiens
  siRNA target sequence for MAN1 (NM_014319.3,1943-1961).
gtgtcgttctgcgttacat

SEQ ID NO: 64015 - DNA, 19 bp, Homo sapiens
  siRNA target sequence for MAN1 (NM_014319.3,1945-1963).
gtcgttctgcgttacatga

SEQ ID NO: 64016 - DNA, 19 bp, Homo sapiens
  siRNA target sequence for MAN1 (NM_014319.3,1947-1965).
cgttctgcgttacatgaaa

SEQ ID NO: 64017 - DNA, 19 bp, Homo sapiens
  siRNA target sequence for MAN1 (NM_014319.3,1948-1966).
gttctgcgttacatgaaat

SEQ ID NO: 64018 - DNA, 19 bp, Homo sapiens
  siRNA target sequence for MAN1 (NM_014319.3,1953-1971).
gcgttacatgaaatatcga

SEQ ID NO: 64019 - DNA, 19 bp, Homo sapiens
  siRNA target sequence for MAN1 (NM_014319.3,1954-1972).
cgttacatgaaatatcgat

SEQ ID NO: 64020 - DNA, 19 bp, Homo sapiens
  siRNA target sequence for MAN1 (NM_014319.3,1994-2012).
caaggcagatgtatgatat

SEQ ID NO: 64021 - DNA, 19 bp, Homo sapiens
  siRNA target sequence for MAN1 (NM_014319.3,1997-2015).
ggcagatgtatgatatggt

SEQ ID NO: 64022 - DNA, 19 bp, Homo sapiens
  siRNA target sequence for MAN1 (NM_014319.3,2008-2026).
gatatggtggtaaagatta

SEQ ID NO: 64023 - DNA, 19 bp, Homo sapiens
  siRNA target sequence for MAN1 (NM_014319.3,2013-2031).
ggtggtaaagattatagat

SEQ ID NO: 64024 - DNA, 19 bp, Homo sapiens
  siRNA target sequence for MAN1 (NM_014319.3,2016-2034).
ggtaaagattatagatgtt

SEQ ID NO: 64025 - DNA, 19 bp, Homo sapiens
  siRNA target sequence for MAN1 (NM_014319.3,2017-2035).
gtaaagattatagatgttt

SEQ ID NO: 64026 - DNA, 19 bp, Homo sapiens
  siRNA target sequence for MAN1 (NM_014319.3,2022-2040).
gattatagatgttttacga

SEQ ID NO: 64027 - DNA, 19 bp, Homo sapiens
  siRNA target sequence for MAN1 (NM_014319.3,2085-2103).
catgcctattccacatgta

SEQ ID NO: 64028 - DNA, 19 bp, Homo sapiens
  siRNA target sequence for MAN1 (NM_014319.3,2096-2114).
cacatgtacgcgattcctt

SEQ ID NO: 64029 - DNA, 19 bp, Homo sapiens
  siRNA target sequence for MAN1 (NM_014319.3,2098-2116).
catgtacgcgattccttaa

SEQ ID NO: 64030 - DNA, 19 bp, Homo sapiens
  siRNA target sequence for MAN1 (NM_014319.3,2198-2216).
gcacggaaacacgaagaat

SEQ ID NO: 64031 - DNA, 19 bp, Homo sapiens
  siRNA target sequence for MAN1 (NM_014319.3,2199-2217).
cacggaaacacgaagaata

SEQ ID NO: 64032 - DNA, 19 bp, Homo sapiens
  siRNA target sequence for MAN1 (NM_014319.3,2202-2220).
ggaaacacgaagaataggt

SEQ ID NO: 64033 - DNA, 19 bp, Homo sapiens
  siRNA target sequence for MAN1 (NM_014319.3,2258-2276).
ctgcatcctgtgacaaaat

SEQ ID NO: 64034 - DNA, 19 bp, Homo sapiens
  siRNA target sequence for MAN1 (NM_014319.3,2260-2278).
gcatcctgtgacaaaatat

SEQ ID NO: 64035 - DNA, 19 bp, Homo sapiens
  siRNA target sequence for MAN1 (NM_014319.3,2261-2279).
catcctgtgacaaaatatt

SEQ ID NO: 64036 - DNA, 19 bp, Homo sapiens
  siRNA target sequence for MAN1 (NM_014319.3,2264-2282).
cctgtgacaaaatattagt

SEQ ID NO: 64037 - DNA, 19 bp, Homo sapiens
  siRNA target sequence for MAN1 (NM_014319.3,2301-2319).
gcaaggtcaagcatttcat

SEQ ID NO: 64038 - DNA, 19 bp, Homo sapiens
  siRNA target sequence for MAN1 (NM_014319.3,2306-2324).
gtcaagcatttcatttaga

SEQ ID NO: 64039 - DNA, 19 bp, Homo sapiens
  siRNA target sequence for MAN1 (NM_014319.3,2352-2370).
gacaccgtgtctaaagatt

SEQ ID NO: 64040 - DNA, 19 bp, Homo sapiens
  siRNA target sequence for MAN1 (NM_014319.3,2379-2397).
gtttgatcccgttatggaa

SEQ ID NO: 64041 - DNA, 19 bp, Homo sapiens
  siRNA target sequence for MAN1 (NM_014319.3,2411-2429).
ggcatttggcaattcaaga

SEQ ID NO: 64042 - DNA, 19 bp, Homo sapiens
  siRNA target sequence for MAN1 (NM_014319.3,2412-2430).
gcatttggcaattcaagaa

SEQ ID NO: 64043 - DNA, 19 bp, Homo sapiens
  siRNA target sequence for MAN1 (NM_014319.3,2418-2436).
ggcaattcaagaagcaatt

SEQ ID NO: 64044 - DNA, 19 bp, Homo sapiens
  siRNA target sequence for MAN1 (NM_014319.3,2492-2510).
cacgtgagggttgtgtata

SEQ ID NO: 64045 - DNA, 19 bp, Homo sapiens
  siRNA target sequence for MAN1 (NM_014319.3,2499-2517).
gggttgtgtatatgttaaa

SEQ ID NO: 64046 - DNA, 19 bp, Homo sapiens
  siRNA target sequence for MAN1 (NM_014319.3,2707-2725).
cggactggcctaaccaatt

SEQ ID NO: 64047 - DNA, 19 bp, Homo sapiens
  siRNA target sequence for MBNL2 (NM_005757.3,801-819).
ccagtcagagatacaaaat

SEQ ID NO: 64048 - DNA, 19 bp, Homo sapiens
  siRNA target sequence for MBNL2 (NM_005757.3,834-852).
gtctgcagacagtttcaaa

SEQ ID NO: 64049 - DNA, 19 bp, Homo sapiens
  siRNA target sequence for MBNL2 (NM_005757.3,862-880).
gctcacgctctgatgaaga

SEQ ID NO: 64050 - DNA, 19 bp, Homo sapiens
  siRNA target sequence for MBNL2 (NM_005757.3,968-986).
gagagagaactgcaagtat

SEQ ID NO: 64051 - DNA, 19 bp, Homo sapiens
  siRNA target sequence for MBNL2 (NM_005757.3,1071-1089).
cttgcccagcagatgcaat

SEQ ID NO: 64052 - DNA, 19 bp, Homo sapiens
  siRNA target sequence for MBNL2 (NM_005757.3,1140-1158).
cccgcgatagggacaaata

SEQ ID NO: 64053 - DNA, 19 bp, Homo sapiens
  siRNA target sequence for MBNL2 (NM_005757.3,1149-1167).
gggacaaatacggctatta

SEQ ID NO: 64054 - DNA, 19 bp, Homo sapiens
  siRNA target sequence for MBNL2 (NM_005757.3,1153-1171).
caaatacggctattagctt

SEQ ID NO: 64055 - DNA, 19 bp, Homo sapiens
  siRNA target sequence for MBNL2 (NM_005757.3,1231-1249).
ccaccacgcctgttattgt

SEQ ID NO: 64056 - DNA, 19 bp, Homo sapiens
  siRNA target sequence for MBNL2 (NM_005757.3,1232-1250).
caccacgcctgttattgtt

SEQ ID NO: 64057 - DNA, 19 bp, Homo sapiens
  siRNA target sequence for MBNL2 (NM_005757.3,1334-1352).
gttccagcgaggaaactgt

SEQ ID NO: 64058 - DNA, 19 bp, Homo sapiens
  siRNA target sequence for MBNL2 (NM_005757.3,1424-1442).
cgtaaccgtttgtatggat

SEQ ID NO: 64059 - DNA, 19 bp, Homo sapiens
  siRNA target sequence for MBNL2 (NM_005757.3,1430-1448).
cgtttgtatggattacata

SEQ ID NO: 64060 - DNA, 19 bp, Homo sapiens
  siRNA target sequence for MBNL2 (NM_005757.3,1455-1473).
cgttgcatgagggagaaat

SEQ ID NO: 64061 - DNA, 19 bp, Homo sapiens
  siRNA target sequence for MBNL2 (NM_005757.3,1459-1477).
gcatgagggagaaatgcaa

SEQ ID NO: 64062 - DNA, 19 bp, Homo sapiens
  siRNA target sequence for MBNL2 (NM_005757.3,1495-1513).
cacacttgcaggccaaaat

SEQ ID NO: 64063 - DNA, 19 bp, Homo sapiens
  siRNA target sequence for MBNL2 (NM_005757.3,1497-1515).
cacttgcaggccaaaatca

SEQ ID NO: 64064 - DNA, 19 bp, Homo sapiens
  siRNA target sequence for MBNL2 (NM_005757.3,1499-1517).
cttgcaggccaaaatcaaa

SEQ ID NO: 64065 - DNA, 19 bp, Homo sapiens
  siRNA target sequence for MBNL2 (NM_144778.1,1646-1664).
ggtaccagcgcggtcttta

SEQ ID NO: 64066 - DNA, 19 bp, Homo sapiens
  siRNA target sequence for MBNL2 (NM_144778.1,1647-1665).
gtaccagcgcggtctttaa

SEQ ID NO: 64067 - DNA, 19 bp, Homo sapiens
  siRNA target sequence for MBNL2 (NM_144778.1,1858-1876).
cacagccaatcagataatt

SEQ ID NO: 64068 - DNA, 19 bp, Homo sapiens
  siRNA target sequence for MBNL2 (NM_144778.1,1862-1880).
gccaatcagataattctga

SEQ ID NO: 64069 - DNA, 19 bp, Homo sapiens
  siRNA target sequence for MBNL3 (NM_018388.2,99-117).
ccctgattcgtgataccaa

SEQ ID NO: 64070 - DNA, 19 bp, Homo sapiens
  siRNA target sequence for MBNL3 (NM_018388.2,114-132).
ccaagtggctgactttaga

SEQ ID NO: 64071 - DNA, 19 bp, Homo sapiens
  siRNA target sequence for MBNL3 (NM_018388.2,168-186).
gagctgatgcagattgcaa

SEQ ID NO: 64072 - DNA, 19 bp, Homo sapiens
  siRNA target sequence for MBNL3 (NM_018388.2,228-246).
gtgtggtggcctgttttga

SEQ ID NO: 64073 - DNA, 19 bp, Homo sapiens
  siRNA target sequence for MBNL3 (NM_018388.2,235-253).
ggcctgttttgattctcta

SEQ ID NO: 64074 - DNA, 19 bp, Homo sapiens
  siRNA target sequence for MBNL3 (NM_018388.2,322-340).
gattaatgggcggaacaat

SEQ ID NO: 64075 - DNA, 19 bp, Homo sapiens
  siRNA target sequence for MBNL3 (NM_018388.2,330-348).
ggcggaacaatctgattca

SEQ ID NO: 64076 - DNA, 19 bp, Homo sapiens
  siRNA target sequence for MBNL3 (NM_018388.2,331-349).
gcggaacaatctgattcaa

SEQ ID NO: 64077 - DNA, 19 bp, Homo sapiens
  siRNA target sequence for MBNL3 (NM_018388.2,403-421).
cgctcaaatgtcatcactt

SEQ ID NO: 64078 - DNA, 19 bp, Homo sapiens
  siRNA target sequence for MBNL3 (NM_018388.2,461-479).
cccatggctttcaatcctt

SEQ ID NO: 64079 - DNA, 19 bp, Homo sapiens
  siRNA target sequence for MBNL3 (NM_018388.2,462-480).
ccatggctttcaatcctta

SEQ ID NO: 64080 - DNA, 19 bp, Homo sapiens
  siRNA target sequence for MBNL3 (NM_018388.2,466-484).
ggctttcaatccttacata

SEQ ID NO: 64081 - DNA, 19 bp, Homo sapiens
  siRNA target sequence for MBNL3 (NM_018388.2,502-520).
cctcgttcctgcagaactt

SEQ ID NO: 64082 - DNA, 19 bp, Homo sapiens
  siRNA target sequence for MBNL3 (NM_018388.2,505-523).
cgttcctgcagaacttgta

SEQ ID NO: 64083 - DNA, 19 bp, Homo sapiens
  siRNA target sequence for MBNL3 (NM_018388.2,573-591).
gagctgttggcccaaaact

SEQ ID NO: 64084 - DNA, 19 bp, Homo sapiens
  siRNA target sequence for MBNL3 (NM_018388.2,642-660).
gtacccgtggggagaatga

SEQ ID NO: 64085 - DNA, 19 bp, Homo sapiens
  siRNA target sequence for MBNL3 (NM_018388.2,667-685).
ctatgctcaccctactgat

SEQ ID NO: 64086 - DNA, 19 bp, Homo sapiens
  siRNA target sequence for MBNL3 (NM_018388.2,694-712).
gattgaagcgagtgataat

SEQ ID NO: 64087 - DNA, 19 bp, Homo sapiens
  siRNA target sequence for MBNL3 (NM_018388.2,707-725).
gataatactgtgacaatct

SEQ ID NO: 64088 - DNA, 19 bp, Homo sapiens
  siRNA target sequence for MBNL3 (NM_018388.2,750-768).
gctcgcgggagaaatgcaa

SEQ ID NO: 64089 - DNA, 19 bp, Homo sapiens
  siRNA target sequence for MBNL3 (NM_018388.2,810-828).
cagctcatcatcagatgaa

SEQ ID NO: 64090 - DNA, 19 bp, Homo sapiens
  siRNA target sequence for MBNL3 (NM_018388.2,861-879).
ctggtacactgcaactgat

SEQ ID NO: 64091 - DNA, 19 bp, Homo sapiens
  siRNA target sequence for MBNL3 (NM_018388.2,867-885).
cactgcaactgataccaaa

SEQ ID NO: 64092 - DNA, 19 bp, Homo sapiens
  siRNA target sequence for MBNL3 (NM_018388.2,948-966).
gccaacaggctctgactaa

SEQ ID NO: 64093 - DNA, 19 bp, Homo sapiens
  siRNA target sequence for MBNL3 (NM_018388.2,974-992).
ctcccacagccggcattta

SEQ ID NO: 64094 - DNA, 19 bp, Homo sapiens
  siRNA target sequence for MBNL3 (NM_018388.2,995-1013).
cctgcagggccaatactgt

SEQ ID NO: 64095 - DNA, 19 bp, Homo sapiens
  siRNA target sequence for MBNL3 (NM_018388.2,1014-1032).
gcatggcacccgcttcaaa

SEQ ID NO: 64096 - DNA, 19 bp, Homo sapiens
  siRNA target sequence for MBNL3 (NM_018388.2,1018-1036).
ggcacccgcttcaaatatt

SEQ ID NO: 64097 - DNA, 19 bp, Homo sapiens
  siRNA target sequence for MBNL3 (NM_018388.2,1020-1038).
cacccgcttcaaatattgt

SEQ ID NO: 64098 - DNA, 19 bp, Homo sapiens
  siRNA target sequence for MBNL3 (NM_133486.1,1021-1039).
caatcagataccccaatta

SEQ ID NO: 64099 - DNA, 19 bp, Homo sapiens
  siRNA target sequence for MBNL3 (NM_133486.1,1027-1045).
gataccccaattatcaata

SEQ ID NO: 64100 - DNA, 19 bp, Homo sapiens
  siRNA target sequence for MBNL3 (NM_133486.1,1033-1051).
ccaattatcaatagatgaa

SEQ ID NO: 64101 - DNA, 19 bp, Homo sapiens
  siRNA target sequence for MDA5 (NM_022168.2,247-265).
gagaatttccgctatctca

SEQ ID NO: 64102 - DNA, 19 bp, Homo sapiens
  siRNA target sequence for MDA5 (NM_022168.2,443-461).
gttggactcgggaattcgt

SEQ ID NO: 64103 - DNA, 19 bp, Homo sapiens
  siRNA target sequence for MDA5 (NM_022168.2,529-547).
ccctctccatcgtttgaga

SEQ ID NO: 64104 - DNA, 19 bp, Homo sapiens
  siRNA target sequence for MDA5 (NM_022168.2,530-548).
cctctccatcgtttgagaa

SEQ ID NO: 64105 - DNA, 19 bp, Homo sapiens
  siRNA target sequence for MDA5 (NM_022168.2,544-562).
gagaacgctcatgatgaat

SEQ ID NO: 64106 - DNA, 19 bp, Homo sapiens
  siRNA target sequence for MDA5 (NM_022168.2,546-564).
gaacgctcatgatgaatat

SEQ ID NO: 64107 - DNA, 19 bp, Homo sapiens
  siRNA target sequence for MDA5 (NM_022168.2,600-618).
ggacaagcttctagttaga

SEQ ID NO: 64108 - DNA, 19 bp, Homo sapiens
  siRNA target sequence for MDA5 (NM_022168.2,613-631).
gttagagacgtcttggata

SEQ ID NO: 64109 - DNA, 19 bp, Homo sapiens
  siRNA target sequence for MDA5 (NM_022168.2,645-663).
ggaactgttgacaattgaa

SEQ ID NO: 64110 - DNA, 19 bp, Homo sapiens
  siRNA target sequence for MDA5 (NM_022168.2,709-727).
ggtgtaagagagctactaa

SEQ ID NO: 64111 - DNA, 19 bp, Homo sapiens
  siRNA target sequence for MDA5 (NM_022168.2,768-786).
gaatgttcttcgtcaaaca

SEQ ID NO: 64112 - DNA, 19 bp, Homo sapiens
  siRNA target sequence for MDA5 (NM_022168.2,796-814).
gaacttgtccaagagttaa

SEQ ID NO: 64113 - DNA, 19 bp, Homo sapiens
  siRNA target sequence for MDA5 (NM_022168.2,989-1007).
cagaatcagacacaagttt

SEQ ID NO: 64114 - DNA, 19 bp, Homo sapiens
  siRNA target sequence for MDA5 (NM_022168.2,1025-1043).
gctgcttagatgaaagtct

SEQ ID NO: 64115 - DNA, 19 bp, Homo sapiens
  siRNA target sequence for MDA5 (NM_022168.2,1026-1044).
ctgcttagatgaaagtctt

SEQ ID NO: 64116 - DNA, 19 bp, Homo sapiens
  siRNA target sequence for MDA5 (NM_022168.2,1080-1098).
catgggaagtgattcagat

SEQ ID NO: 64117 - DNA, 19 bp, Homo sapiens
  siRNA target sequence for MDA5 (NM_022168.2,1140-1158).
ccagctcaggccttaccaa

SEQ ID NO: 64118 - DNA, 19 bp, Homo sapiens
  siRNA target sequence for MDA5 (NM_022168.2,1146-1164).
caggccttaccaaatggaa

SEQ ID NO: 64119 - DNA, 19 bp, Homo sapiens
  siRNA target sequence for MDA5 (NM_022168.2,1245-1263).
cattgccaaggatcactta

SEQ ID NO: 64120 - DNA, 19 bp, Homo sapiens
  siRNA target sequence for MDA5 (NM_022168.2,1250-1268).
ccaaggatcacttagacaa

SEQ ID NO: 64121 - DNA, 19 bp, Homo sapiens
  siRNA target sequence for MDA5 (NM_022168.2,1292-1310).
gaaaagttatagttcttgt

SEQ ID NO: 64122 - DNA, 19 bp, Homo sapiens
  siRNA target sequence for MDA5 (NM_022168.2,1343-1361).
gcaaggagttccaaccatt

SEQ ID NO: 64123 - DNA, 19 bp, Homo sapiens
  siRNA target sequence for MDA5 (NM_022168.2,1373-1391).
ggtatcgtgttattggatt

SEQ ID NO: 64124 - DNA, 19 bp, Homo sapiens
  siRNA target sequence for MDA5 (NM_022168.2,1374-1392).
gtatcgtgttattggatta

SEQ ID NO: 64125 - DNA, 19 bp, Homo sapiens
  siRNA target sequence for MDA5 (NM_022168.2,1396-1414).
ggtgatacccaactgaaaa

SEQ ID NO: 64126 - DNA, 19 bp, Homo sapiens
  siRNA target sequence for MDA5 (NM_022168.2,1432-1450).
gtcaagtcctgtgatatta

SEQ ID NO: 64127 - DNA, 19 bp, Homo sapiens
  siRNA target sequence for MDA5 (NM_022168.2,1455-1473).
cagtacagctcaaatcctt

SEQ ID NO: 64128 - DNA, 19 bp, Homo sapiens
  siRNA target sequence for MDA5 (NM_022168.2,1516-1534).
gttcaattgtcagactttt

SEQ ID NO: 64129 - DNA, 19 bp, Homo sapiens
  siRNA target sequence for MDA5 (NM_022168.2,1528-1546).
gacttttccctcattatca

SEQ ID NO: 64130 - DNA, 19 bp, Homo sapiens
  siRNA target sequence for MDA5 (NM_022168.2,1535-1553).
ccctcattatcattgatga

SEQ ID NO: 64131 - DNA, 19 bp, Homo sapiens
  siRNA target sequence for MDA5 (NM_022168.2,1536-1554).
cctcattatcattgatgaa

SEQ ID NO: 64132 - DNA, 19 bp, Homo sapiens
  siRNA target sequence for MDA5 (NM_022168.2,1537-1555).
ctcattatcattgatgaat

SEQ ID NO: 64133 - DNA, 19 bp, Homo sapiens
  siRNA target sequence for MDA5 (NM_022168.2,1539-1557).
cattatcattgatgaatgt

SEQ ID NO: 64134 - DNA, 19 bp, Homo sapiens
  siRNA target sequence for MDA5 (NM_022168.2,1556-1574).
gtcatcacaccaacaaaga

SEQ ID NO: 64135 - DNA, 19 bp, Homo sapiens
  siRNA target sequence for MDA5 (NM_022168.2,1566-1584).
caacaaagaagcagtgtat

SEQ ID NO: 64136 - DNA, 19 bp, Homo sapiens
  siRNA target sequence for MDA5 (NM_022168.2,1573-1591).
gaagcagtgtataataaca

SEQ ID NO: 64137 - DNA, 19 bp, Homo sapiens
  siRNA target sequence for MDA5 (NM_022168.2,1576-1594).
gcagtgtataataacatca

SEQ ID NO: 64138 - DNA, 19 bp, Homo sapiens
  siRNA target sequence for MDA5 (NM_022168.2,1577-1595).
cagtgtataataacatcat

SEQ ID NO: 64139 - DNA, 19 bp, Homo sapiens
  siRNA target sequence for MDA5 (NM_022168.2,1821-1839).
ggagccatgcaagaagttt

SEQ ID NO: 64140 - DNA, 19 bp, Homo sapiens
  siRNA target sequence for MDA5 (NM_022168.2,1853-1871).
caaccagagaagatccatt

SEQ ID NO: 64141 - DNA, 19 bp, Homo sapiens
  siRNA target sequence for MDA5 (NM_022168.2,1901-1919).
ggattcaaacttattgtca

SEQ ID NO: 64142 - DNA, 19 bp, Homo sapiens
  siRNA target sequence for MDA5 (NM_022168.2,1902-1920).
gattcaaacttattgtcaa

SEQ ID NO: 64143 - DNA, 19 bp, Homo sapiens
  siRNA target sequence for MDA5 (NM_022168.2,2050-2068).
gccctacaaattaatgaca

SEQ ID NO: 64144 - DNA, 19 bp, Homo sapiens
  siRNA target sequence for MDA5 (NM_022168.2,2067-2085).
cacaattcgaatgatagat

SEQ ID NO: 64145 - DNA, 19 bp, Homo sapiens
  siRNA target sequence for MDA5 (NM_022168.2,2079-2097).
gatagatgcgtatactcat

SEQ ID NO: 64146 - DNA, 19 bp, Homo sapiens
  siRNA target sequence for MDA5 (NM_022168.2,2086-2104).
gcgtatactcatcttgaaa

SEQ ID NO: 64147 - DNA, 19 bp, Homo sapiens
  siRNA target sequence for MDA5 (NM_022168.2,2093-2111).
ctcatcttgaaactttcta

SEQ ID NO: 64148 - DNA, 19 bp, Homo sapiens
  siRNA target sequence for MDA5 (NM_022168.2,2163-2181).
gggtggtgatgatgagtat

SEQ ID NO: 64149 - DNA, 19 bp, Homo sapiens
  siRNA target sequence for MDA5 (NM_022168.2,2178-2196).
gtattgtgatggtgatgaa

SEQ ID NO: 64150 - DNA, 19 bp, Homo sapiens
  siRNA target sequence for MDA5 (NM_022168.2,2229-2247).
ggatgaaacagatagattt

SEQ ID NO: 64151 - DNA, 19 bp, Homo sapiens
  siRNA target sequence for MDA5 (NM_022168.2,2239-2257).
gatagatttctcatgactt

SEQ ID NO: 64152 - DNA, 19 bp, Homo sapiens
  siRNA target sequence for MDA5 (NM_022168.2,2343-2361).
cataatggagcaatatact

SEQ ID NO: 64153 - DNA, 19 bp, Homo sapiens
  siRNA target sequence for MDA5 (NM_022168.2,2729-2747).
gtggttcaggagttatcga

SEQ ID NO: 64154 - DNA, 19 bp, Homo sapiens
  siRNA target sequence for MDA5 (NM_022168.2,2735-2753).
caggagttatcgaacatga

SEQ ID NO: 64155 - DNA, 19 bp, Homo sapiens
  siRNA target sequence for MDA5 (NM_022168.2,2764-2782).
gatttccgagagaagatga

SEQ ID NO: 64156 - DNA, 19 bp, Homo sapiens
  siRNA target sequence for MDA5 (NM_022168.2,2769-2787).
ccgagagaagatgatgtat

SEQ ID NO: 64157 - DNA, 19 bp, Homo sapiens
  siRNA target sequence for MDA5 (NM_022168.2,2778-2796).
gatgatgtataaagctata

SEQ ID NO: 64158 - DNA, 19 bp, Homo sapiens
  siRNA target sequence for MDA5 (NM_022168.2,2823-2841).
ggagtatgctcataagatt

SEQ ID NO: 64159 - DNA, 19 bp, Homo sapiens
  siRNA target sequence for MDA5 (NM_022168.2,2899-2917).
gccaagcattacaagaata

SEQ ID NO: 64160 - DNA, 19 bp, Homo sapiens
  siRNA target sequence for MDA5 (NM_022168.2,2900-2918).
ccaagcattacaagaataa

SEQ ID NO: 64161 - DNA, 19 bp, Homo sapiens
  siRNA target sequence for MDA5 (NM_022168.2,2913-2931).
gaataacccatcactaata

SEQ ID NO: 64162 - DNA, 19 bp, Homo sapiens
  siRNA target sequence for MDA5 (NM_022168.2,2966-2984).
gttctggggaagatatcca

SEQ ID NO: 64163 - DNA, 19 bp, Homo sapiens
  siRNA target sequence for MDA5 (NM_022168.2,3069-3087).
gaagtgtgccgactatcaa

SEQ ID NO: 64164 - DNA, 19 bp, Homo sapiens
  siRNA target sequence for MDA5 (NM_022168.2,3072-3090).
gtgtgccgactatcaaata

SEQ ID NO: 64165 - DNA, 19 bp, Homo sapiens
  siRNA target sequence for MDA5 (NM_022168.2,3074-3092).
gtgccgactatcaaataaa

SEQ ID NO: 64166 - DNA, 19 bp, Homo sapiens
  siRNA target sequence for MDA5 (NM_022168.2,3078-3096).
cgactatcaaataaatggt

SEQ ID NO: 64167 - DNA, 19 bp, Homo sapiens
  siRNA target sequence for MDA5 (NM_022168.2,3231-3249).
ggtagaattacctatcaca

SEQ ID NO: 64168 - DNA, 19 bp, Homo sapiens
  siRNA target sequence for MDA5 (NM_022168.2,3232-3250).
gtagaattacctatcacat

SEQ ID NO: 64169 - DNA, 19 bp, Homo sapiens
  siRNA target sequence for MDA5 (NM_022168.2,3248-3266).
catttcccaatcttgacta

SEQ ID NO: 64170 - DNA, 19 bp, Homo sapiens
  siRNA target sequence for MDA5 (NM_022168.2,3254-3272).
ccaatcttgactattcaga

SEQ ID NO: 64171 - DNA, 19 bp, Homo sapiens
  siRNA target sequence for MDA5 (NM_022168.2,3255-3273).
caatcttgactattcagaa

SEQ ID NO: 64172 - DNA, 19 bp, Homo sapiens
  siRNA target sequence for MGC10433 (NM_024321.3,277-295).
cacggtccccacagtagaa

SEQ ID NO: 64173 - DNA, 19 bp, Homo sapiens
  siRNA target sequence for MGC10433 (NM_024321.3,801-819).
ggttgggcctgaaagagaa

SEQ ID NO: 64174 - DNA, 19 bp, Homo sapiens
  siRNA target sequence for MGC10433 (NM_024321.3,1284-1302).
gcttcccatccttccttaa

SEQ ID NO: 64175 - DNA, 19 bp, Homo sapiens
  siRNA target sequence for MGC10433 (NM_024321.3,1387-1405).
cgccatgcgtgagatgaat

SEQ ID NO: 64176 - DNA, 19 bp, Homo sapiens
  siRNA target sequence for MGC10520 (NM_030580.2,277-295).
gccaccccttgggatgtat

SEQ ID NO: 64177 - DNA, 19 bp, Homo sapiens
  siRNA target sequence for MGC10520 (NM_030580.2,278-296).
ccaccccttgggatgtatt

SEQ ID NO: 64178 - DNA, 19 bp, Homo sapiens
  siRNA target sequence for MGC10520 (NM_030580.2,279-297).
caccccttgggatgtatta

SEQ ID NO: 64179 - DNA, 19 bp, Homo sapiens
  siRNA target sequence for MGC10520 (NM_030580.2,787-805).
gacctcacaaatgtgatat

SEQ ID NO: 64180 - DNA, 19 bp, Homo sapiens
  siRNA target sequence for MGC10520 (NM_030580.2,822-840).
gaacagagatcatatctca

SEQ ID NO: 64181 - DNA, 19 bp, Homo sapiens
  siRNA target sequence for MGC10520 (NM_030580.2,851-869).
gcgtgtacacaggtcaaaa

SEQ ID NO: 64182 - DNA, 19 bp, Homo sapiens
  siRNA target sequence for MGC10520 (NM_030580.2,852-870).
cgtgtacacaggtcaaaaa

SEQ ID NO: 64183 - DNA, 19 bp, Homo sapiens
  siRNA target sequence for MGC10520 (NM_030580.2,885-903).
cgtaactctggggaaatct

SEQ ID NO: 64184 - DNA, 19 bp, Homo sapiens
  siRNA target sequence for MGC10520 (NM_030580.2,902-920).
cttcagtgcaaacttagtt

SEQ ID NO: 64185 - DNA, 19 bp, Homo sapiens
  siRNA target sequence for MGC10520 (NM_030580.2,907-925).
gtgcaaacttagttgttaa

SEQ ID NO: 64186 - DNA, 19 bp, Homo sapiens
  siRNA target sequence for MGC10520 (NM_030580.2,1079-1097).
gagctgcgagttcatcaat

SEQ ID NO: 64187 - DNA, 19 bp, Homo sapiens
  siRNA target sequence for MGC10520 (NM_030580.2,1081-1099).
gctgcgagttcatcaatca

SEQ ID NO: 64188 - DNA, 19 bp, Homo sapiens
  siRNA target sequence for MGC10520 (NM_030580.2,1246-1264).
cctactcttccctgattta

SEQ ID NO: 64189 - DNA, 19 bp, Homo sapiens
  siRNA target sequence for MGC10520 (NM_030580.2,1404-1422).
ggctttacacaaagttcta

SEQ ID NO: 64190 - DNA, 19 bp, Homo sapiens
  siRNA target sequence for MGC10520 (NM_030580.2,1504-1522).
ccaaactcgtggaacatca

SEQ ID NO: 64191 - DNA, 19 bp, Homo sapiens
  siRNA target sequence for MGC10520 (NM_030580.2,1694-1712).
gctgcaccacggagagaaa

SEQ ID NO: 64192 - DNA, 19 bp, Homo sapiens
  siRNA target sequence for MGC10715 (NM_024325.4,508-526).
cagcactgggagatcaata

SEQ ID NO: 64193 - DNA, 19 bp, Homo sapiens
  siRNA target sequence for MGC10715 (NM_024325.4,556-574).
gggaaaatgtagagactat

SEQ ID NO: 64194 - DNA, 19 bp, Homo sapiens
  siRNA target sequence for MGC10715 (NM_024325.4,601-619).
cgaaaggcttgccttctaa

SEQ ID NO: 64195 - DNA, 19 bp, Homo sapiens
  siRNA target sequence for MGC10715 (NM_024325.4,625-643).
ctgactgcccccagaaaaa

SEQ ID NO: 64196 - DNA, 19 bp, Homo sapiens
  siRNA target sequence for MGC10715 (NM_024325.4,663-681).
gtggtaccagttacattca

SEQ ID NO: 64197 - DNA, 19 bp, Homo sapiens
  siRNA target sequence for MGC10715 (NM_024325.4,1088-1106).
gtcagcaagtcctagaaaa

SEQ ID NO: 64198 - DNA, 19 bp, Homo sapiens
  siRNA target sequence for MGC10715 (NM_024325.4,1154-1172).
ccctgtgcagctagacaaa

SEQ ID NO: 64199 - DNA, 19 bp, Homo sapiens
  siRNA target sequence for MGC10715 (NM_024325.4,1236-1254).
cataacctggaatcaaact

SEQ ID NO: 64200 - DNA, 19 bp, Homo sapiens
  siRNA target sequence for MGC10715 (NM_024325.4,1313-1331).
gcgaagctttaaagataga

SEQ ID NO: 64201 - DNA, 19 bp, Homo sapiens
  siRNA target sequence for MGC10715 (NM_024325.4,1340-1358).
catcagacaccatcgtata

SEQ ID NO: 64202 - DNA, 19 bp, Homo sapiens
  siRNA target sequence for MGC10715 (NM_024325.4,1363-1381).
cgatggagaagccttatgt

SEQ ID NO: 64203 - DNA, 19 bp, Homo sapiens
  siRNA target sequence for MGC10715 (NM_024325.4,1479-1497).
gggcaaagctttagaagta

SEQ ID NO: 64204 - DNA, 19 bp, Homo sapiens
  siRNA target sequence for MGC10715 (NM_024325.4,1648-1666).
gacgaagcttttgtgataa

SEQ ID NO: 64205 - DNA, 19 bp, Homo sapiens
  siRNA target sequence for MGC10715 (NM_024325.4,1784-1802).
ggatgagaagccttatgtt

SEQ ID NO: 64206 - DNA, 19 bp, Homo sapiens
  siRNA target sequence for MGC10871 (NM_031492.2,275-293).
caaagcttcaaccaagtta

SEQ ID NO: 64207 - DNA, 19 bp, Homo sapiens
  siRNA target sequence for MGC10871 (NM_031492.2,593-611).
gggtcgtgtggcagacttt

SEQ ID NO: 64208 - DNA, 19 bp, Homo sapiens
  siRNA target sequence for MGC10871 (NM_031492.2,594-612).
ggtcgtgtggcagacttta

SEQ ID NO: 64209 - DNA, 19 bp, Homo sapiens
  siRNA target sequence for MGC10871 (NM_031492.2,620-638).
gtataatgaacaatatgga

SEQ ID NO: 64210 - DNA, 19 bp, Homo sapiens
  siRNA target sequence for MGC10871 (NM_031492.2,670-688).
gggaatccatgtattacaa

SEQ ID NO: 64211 - DNA, 19 bp, Homo sapiens
  siRNA target sequence for MGC10871 (NM_031492.2,680-698).
gtattacaacgatgcatat

SEQ ID NO: 64212 - DNA, 19 bp, Homo sapiens
  siRNA target sequence for MGC10871 (NM_031492.2,699-717).
ggagcactcgactactata

SEQ ID NO: 64213 - DNA, 19 bp, Homo sapiens
  siRNA target sequence for MGC10871 (NM_031492.2,700-718).
gagcactcgactactataa

SEQ ID NO: 64214 - DNA, 19 bp, Homo sapiens
  siRNA target sequence for MGC10871 (NM_031492.2,762-780).
gcggcttctgcatacaact

SEQ ID NO: 64215 - DNA, 19 bp, Homo sapiens
  siRNA target sequence for MGC10871 (NM_031492.2,862-880).
cctatgacagacacctatt

SEQ ID NO: 64216 - DNA, 19 bp, Homo sapiens
  siRNA target sequence for MGC10871 (NM_031492.2,932-950).
caccacttcctcctactat

SEQ ID NO: 64217 - DNA, 19 bp, Homo sapiens
  siRNA target sequence for MGC10871 (NM_031492.2,1020-1038).
gggccagagagtgaattat

SEQ ID NO: 64218 - DNA, 19 bp, Homo sapiens
  siRNA target sequence for MGC10871 (NM_031492.2,1022-1040).
gccagagagtgaattatct

SEQ ID NO: 64219 - DNA, 19 bp, Homo sapiens
  siRNA target sequence for MGC12466 (NM_033213.1,630-648).
gttgacagacacatggtaa

SEQ ID NO: 64220 - DNA, 19 bp, Homo sapiens
  siRNA target sequence for MGC12466 (NM_033213.1,793-811).
gttatcttcgtgaacatga

SEQ ID NO: 64221 - DNA, 19 bp, Homo sapiens
  siRNA target sequence for MGC12466 (NM_033213.1,961-979).
cttacttgggaatacatga

SEQ ID NO: 64222 - DNA, 19 bp, Homo sapiens
  siRNA target sequence for MGC12466 (NM_033213.1,1113-1131).
gccttcaaatattctagta

SEQ ID NO: 64223 - DNA, 19 bp, Homo sapiens
  siRNA target sequence for MGC12466 (NM_033213.1,1118-1136).
caaatattctagtaaccta

SEQ ID NO: 64224 - DNA, 19 bp, Homo sapiens
  siRNA target sequence for MGC12466 (NM_033213.1,1191-1209).
ggtaagtcgtttacttctt

SEQ ID NO: 64225 - DNA, 19 bp, Homo sapiens
  siRNA target sequence for MGC12466 (NM_033213.1,1311-1329).
catgaaagagcttatatgt

SEQ ID NO: 64226 - DNA, 19 bp, Homo sapiens
  siRNA target sequence for MGC13105 (NM_032497.1,659-677).
gtggttgacaaattactct

SEQ ID NO: 64227 - DNA, 19 bp, Homo sapiens
  siRNA target sequence for MGC13105 (NM_032497.1,731-749).
gactttgctggatcaaact

SEQ ID NO: 64228 - DNA, 19 bp, Homo sapiens
  siRNA target sequence for MGC13105 (NM_032497.1,733-751).
ctttgctggatcaaactca

SEQ ID NO: 64229 - DNA, 19 bp, Homo sapiens
  siRNA target sequence for MGC13105 (NM_032497.1,807-825).
gattgggagagtcatatta

SEQ ID NO: 64230 - DNA, 19 bp, Homo sapiens
  siRNA target sequence for MGC13105 (NM_032497.1,840-858).
gcacctcagcagaattttt

SEQ ID NO: 64231 - DNA, 19 bp, Homo sapiens
  siRNA target sequence for MGC13105 (NM_032497.1,871-889).
catccagtgtggtggaaat

SEQ ID NO: 64232 - DNA, 19 bp, Homo sapiens
  siRNA target sequence for MGC13105 (NM_032497.1,915-933).
ctgtttgactttaaccaat

SEQ ID NO: 64233 - DNA, 19 bp, Homo sapiens
  siRNA target sequence for MGC13105 (NM_032497.1,970-988).
ctcacaggagaacttactt

SEQ ID NO: 64234 - DNA, 19 bp, Homo sapiens
  siRNA target sequence for MGC13105 (NM_032497.1,979-997).
gaacttactttagaaagaa

SEQ ID NO: 64235 - DNA, 19 bp, Homo sapiens
  siRNA target sequence for MGC13105 (NM_032497.1,1042-1060).
ctatctttactttacacaa

SEQ ID NO: 64236 - DNA, 19 bp, Homo sapiens
  siRNA target sequence for MGC13105 (NM_032497.1,1083-1101).
cttcctaactgtaatcaat

SEQ ID NO: 64237 - DNA, 19 bp, Homo sapiens
  siRNA target sequence for MGC13105 (NM_032497.1,1238-1256).
ctcacacctcagagaatgt

SEQ ID NO: 64238 - DNA, 19 bp, Homo sapiens
  siRNA target sequence for MGC13105 (NM_032497.1,1269-1287).
ggtggagagagaccatata

SEQ ID NO: 64239 - DNA, 19 bp, Homo sapiens
  siRNA target sequence for MGC13105 (NM_032497.1,1275-1293).
gagagaccatatactcata

SEQ ID NO: 64240 - DNA, 19 bp, Homo sapiens
  siRNA target sequence for MGC13105 (NM_032497.1,1295-1313).
ggagtatgtcgaaaccttt

SEQ ID NO: 64241 - DNA, 19 bp, Homo sapiens
  siRNA target sequence for MGC13105 (NM_032497.1,1296-1314).
gagtatgtcgaaacctttt

SEQ ID NO: 64242 - DNA, 19 bp, Homo sapiens
  siRNA target sequence for MGC13105 (NM_032497.1,1298-1316).
gtatgtcgaaaccttttct

SEQ ID NO: 64243 - DNA, 19 bp, Homo sapiens
  siRNA target sequence for MGC13105 (NM_032497.1,1329-1347).
ctttttgtacacatgcaaa

SEQ ID NO: 64244 - DNA, 19 bp, Homo sapiens
  siRNA target sequence for MGC13105 (NM_032497.1,1394-1412).
cttcactgagtcgtcatat

SEQ ID NO: 64245 - DNA, 19 bp, Homo sapiens
  siRNA target sequence for MGC13105 (NM_032497.1,1397-1415).
cactgagtcgtcatatctt

SEQ ID NO: 64246 - DNA, 19 bp, Homo sapiens
  siRNA target sequence for MGC13105 (NM_032497.1,1434-1452).
catagtagagtgttaccta

SEQ ID NO: 64247 - DNA, 19 bp, Homo sapiens
  siRNA target sequence for MGC13105 (NM_032497.1,1438-1456).
gtagagtgttacctataga

SEQ ID NO: 64248 - DNA, 19 bp, Homo sapiens
  siRNA target sequence for MGC13105 (NM_032497.1,1449-1467).
cctatagaacataagaaat

SEQ ID NO: 64249 - DNA, 19 bp, Homo sapiens
  siRNA target sequence for MGC13105 (NM_032497.1,1489-1507).
ccccagatcttgctaaaca

SEQ ID NO: 64250 - DNA, 19 bp, Homo sapiens
  siRNA target sequence for MGC13105 (NM_032497.1,1570-1588).
gtttctcaaaactcaacat

SEQ ID NO: 64251 - DNA, 19 bp, Homo sapiens
  siRNA target sequence for MGC13105 (NM_032497.1,1651-1669).
ctgattcatcaggtcttat

SEQ ID NO: 64252 - DNA, 19 bp, Homo sapiens
  siRNA target sequence for MGC13105 (NM_032497.1,1850-1868).
gactcatcctggtgtaaaa

SEQ ID NO: 64253 - DNA, 19 bp, Homo sapiens
  siRNA target sequence for MGC13105 (NM_032497.1,1991-2009).
ctcctcgcaccttagtcaa

SEQ ID NO: 64254 - DNA, 19 bp, Homo sapiens
  siRNA target sequence for MGC13105 (NM_032497.1,2075-2093).
ctcatcaggccttacagta

SEQ ID NO: 64255 - DNA, 19 bp, Homo sapiens
  siRNA target sequence for MGC13105 (NM_032497.1,2150-2168).
ctttactcggtccacatat

SEQ ID NO: 64256 - DNA, 19 bp, Homo sapiens
  siRNA target sequence for MGC13105 (NM_032497.1,2155-2173).
ctcggtccacatatcttat

SEQ ID NO: 64257 - DNA, 19 bp, Homo sapiens
  siRNA target sequence for MGC13105 (NM_032497.1,2242-2260).
catgccttactgaatgtgt

SEQ ID NO: 64258 - DNA, 19 bp, Homo sapiens
  siRNA target sequence for MGC17986 (NM_153608.1,340-358).
ctaggaacttggcattcat

SEQ ID NO: 64259 - DNA, 19 bp, Homo sapiens
  siRNA target sequence for MGC17986 (NM_153608.1,366-384).
gcaactccatgtaaaacca

SEQ ID NO: 64260 - DNA, 19 bp, Homo sapiens
  siRNA target sequence for MGC17986 (NM_153608.1,367-385).
caactccatgtaaaaccaa

SEQ ID NO: 64261 - DNA, 19 bp, Homo sapiens
  siRNA target sequence for MGC17986 (NM_153608.1,394-412).
cccctcagccggatattct

SEQ ID NO: 64262 - DNA, 19 bp, Homo sapiens
  siRNA target sequence for MGC17986 (NM_153608.1,401-419).
gccggatattcttcctaaa

SEQ ID NO: 64263 - DNA, 19 bp, Homo sapiens
  siRNA target sequence for MGC17986 (NM_153608.1,467-485).
ccagcactccacattaaga

SEQ ID NO: 64264 - DNA, 19 bp, Homo sapiens
  siRNA target sequence for MGC17986 (NM_153608.1,521-539).
caggcagggggtgaataat

SEQ ID NO: 64265 - DNA, 19 bp, Homo sapiens
  siRNA target sequence for MGC17986 (NM_153608.1,608-626).
gaggaaccactctaaacct

SEQ ID NO: 64266 - DNA, 19 bp, Homo sapiens
  siRNA target sequence for MGC17986 (NM_153608.1,659-677).
cataagacaatgtatccta

SEQ ID NO: 64267 - DNA, 19 bp, Homo sapiens
  siRNA target sequence for MGC17986 (NM_153608.1,709-727).
ctgtcttaaacgatagtca

SEQ ID NO: 64268 - DNA, 19 bp, Homo sapiens
  siRNA target sequence for MGC17986 (NM_153608.1,782-800).
ggttccgtgtgggagaaaa

SEQ ID NO: 64269 - DNA, 19 bp, Homo sapiens
  siRNA target sequence for MGC17986 (NM_153608.1,783-801).
gttccgtgtgggagaaaaa

SEQ ID NO: 64270 - DNA, 19 bp, Homo sapiens
  siRNA target sequence for MGC17986 (NM_153608.1,839-857).
cactgtgcatcatatacgt

SEQ ID NO: 64271 - DNA, 19 bp, Homo sapiens
  siRNA target sequence for MGC17986 (NM_153608.1,845-863).
gcatcatatacgtgatgaa

SEQ ID NO: 64272 - DNA, 19 bp, Homo sapiens
  siRNA target sequence for MGC17986 (NM_153608.1,846-864).
catcatatacgtgatgaaa

SEQ ID NO: 64273 - DNA, 19 bp, Homo sapiens
  siRNA target sequence for MGC17986 (NM_153608.1,884-902).
gcaccagcggaatccattt

SEQ ID NO: 64274 - DNA, 19 bp, Homo sapiens
  siRNA target sequence for MGC17986 (NM_153608.1,948-966).
catggtcgagagaaaatgt

SEQ ID NO: 64275 - DNA, 19 bp, Homo sapiens
  siRNA target sequence for MGC17986 (NM_153608.1,952-970).
gtcgagagaaaatgtatga

SEQ ID NO: 64276 - DNA, 19 bp, Homo sapiens
  siRNA target sequence for MGC17986 (NM_153608.1,954-972).
cgagagaaaatgtatgatt

SEQ ID NO: 64277 - DNA, 19 bp, Homo sapiens
  siRNA target sequence for MGC17986 (NM_153608.1,992-1010).
ctccagaaataactcaatt

SEQ ID NO: 64278 - DNA, 19 bp, Homo sapiens
  siRNA target sequence for MGC17986 (NM_153608.1,1076-1094).
ctctgccaacgctccaaat

SEQ ID NO: 64279 - DNA, 19 bp, Homo sapiens
  siRNA target sequence for MGC17986 (NM_153608.1,1293-1311).
cagaagaagccctacgaat

SEQ ID NO: 64280 - DNA, 19 bp, Homo sapiens
  siRNA target sequence for MGC17986 (NM_153608.1,1331-1349).
cattcgggagtcctcaaaa

SEQ ID NO: 64281 - DNA, 19 bp, Homo sapiens
  siRNA target sequence for MGC17986 (NM_153608.1,1335-1353).
cgggagtcctcaaaatata

SEQ ID NO: 64282 - DNA, 19 bp, Homo sapiens
  siRNA target sequence for MGC17986 (NM_153608.1,1337-1355).
ggagtcctcaaaatataca

SEQ ID NO: 64283 - DNA, 19 bp, Homo sapiens
  siRNA target sequence for MGC2474 (NM_023931.2,538-556).
gtggggtttgcgttcttct

SEQ ID NO: 64284 - DNA, 19 bp, Homo sapiens
  siRNA target sequence for MGC26914 (NM_144976.1,394-412).
gccttcagtcagattctca

SEQ ID NO: 64285 - DNA, 19 bp, Homo sapiens
  siRNA target sequence for MGC26914 (NM_144976.1,395-413).
ccttcagtcagattctcaa

SEQ ID NO: 64286 - DNA, 19 bp, Homo sapiens
  siRNA target sequence for MGC26914 (NM_144976.1,426-444).
caagaaaattcctactata

SEQ ID NO: 64287 - DNA, 19 bp, Homo sapiens
  siRNA target sequence for MGC26914 (NM_144976.1,429-447).
gaaaattcctactatagta

SEQ ID NO: 64288 - DNA, 19 bp, Homo sapiens
  siRNA target sequence for MGC26914 (NM_144976.1,592-610).
gccttcagttcttgtcaat

SEQ ID NO: 64289 - DNA, 19 bp, Homo sapiens
  siRNA target sequence for MGC26914 (NM_144976.1,769-787).
cgcccaagtttatttcaga

SEQ ID NO: 64290 - DNA, 19 bp, Homo sapiens
  siRNA target sequence for MGC26914 (NM_144976.1,770-788).
gcccaagtttatttcagat

SEQ ID NO: 64291 - DNA, 19 bp, Homo sapiens
  siRNA target sequence for MGC26914 (NM_144976.1,771-789).
cccaagtttatttcagata

SEQ ID NO: 64292 - DNA, 19 bp, Homo sapiens
  siRNA target sequence for MGC26914 (NM_144976.1,1194-1212).
cagtaatgttcgaacacat

SEQ ID NO: 64293 - DNA, 19 bp, Homo sapiens
  siRNA target sequence for MGC26914 (NM_144976.1,1451-1469).
ggattagaaaacatatgat

SEQ ID NO: 64294 - DNA, 19 bp, Homo sapiens
  siRNA target sequence for MGC27016 (NM_144979.2,143-161).
gttcgaactggtattcaga

SEQ ID NO: 64295 - DNA, 19 bp, Homo sapiens
  siRNA target sequence for MGC27016 (NM_144979.2,168-186).
cagcattacttgctttgat

SEQ ID NO: 64296 - DNA, 19 bp, Homo sapiens
  siRNA target sequence for MGC27016 (NM_144979.2,272-290).
cctagaggctgtgaagttt

SEQ ID NO: 64297 - DNA, 19 bp, Homo sapiens
  siRNA target sequence for MGC27016 (NM_144979.2,297-315).
gaaaaatacctcgtgatat

SEQ ID NO: 64298 - DNA, 19 bp, Homo sapiens
  siRNA target sequence for MGC27016 (NM_144979.2,371-389).
cgacttatgatggaattta

SEQ ID NO: 64299 - DNA, 19 bp, Homo sapiens
  siRNA target sequence for MGC27016 (NM_144979.2,405-423).
gttatgcttttgtgatgta

SEQ ID NO: 64300 - DNA, 19 bp, Homo sapiens
  siRNA target sequence for MGC27016 (NM_144979.2,440-458).
gcccaattagccatcagaa

SEQ ID NO: 64301 - DNA, 19 bp, Homo sapiens
  siRNA target sequence for MGC27016 (NM_144979.2,441-459).
cccaattagccatcagaat

SEQ ID NO: 64302 - DNA, 19 bp, Homo sapiens
  siRNA target sequence for MGC27016 (NM_144979.2,506-524).
gtaagcctggataattgta

SEQ ID NO: 64303 - DNA, 19 bp, Homo sapiens
  siRNA target sequence for MGC27016 (NM_144979.2,511-529).
cctggataattgtagatta

SEQ ID NO: 64304 - DNA, 19 bp, Homo sapiens
  siRNA target sequence for MGC27016 (NM_144979.2,536-554).
ggagctattcccaaggaaa

SEQ ID NO: 64305 - DNA, 19 bp, Homo sapiens
  siRNA target sequence for MGC27016 (NM_144979.2,537-555).
gagctattcccaaggaaaa

SEQ ID NO: 64306 - DNA, 19 bp, Homo sapiens
  siRNA target sequence for MGC27016 (NM_144979.2,600-618).
gagttgtagatgtcattgt

SEQ ID NO: 64307 - DNA, 19 bp, Homo sapiens
  siRNA target sequence for MGC27016 (NM_144979.2,608-626).
gatgtcattgtttatccaa

SEQ ID NO: 64308 - DNA, 19 bp, Homo sapiens
  siRNA target sequence for MGC27016 (NM_144979.2,623-641).
ccaagtgcaactgataaga

SEQ ID NO: 64309 - DNA, 19 bp, Homo sapiens
  siRNA target sequence for MGC27016 (NM_144979.2,740-758).
cacaccattcaggtagatt

SEQ ID NO: 64310 - DNA, 19 bp, Homo sapiens
  siRNA target sequence for MGC27016 (NM_144979.2,792-810).
ccatgcagagagttaaagt

SEQ ID NO: 64311 - DNA, 19 bp, Homo sapiens
  siRNA target sequence for MGC27016 (NM_144979.2,793-811).
catgcagagagttaaagtt

SEQ ID NO: 64312 - DNA, 19 bp, Homo sapiens
  siRNA target sequence for MGC27016 (NM_144979.2,796-814).
gcagagagttaaagttctt

SEQ ID NO: 64313 - DNA, 19 bp, Homo sapiens
  siRNA target sequence for MGC27016 (NM_144979.2,799-817).
gagagttaaagttctttat

SEQ ID NO: 64314 - DNA, 19 bp, Homo sapiens
  siRNA target sequence for MGC27016 (NM_144979.2,888-906).
cagttgaacgggtaaagaa

SEQ ID NO: 64315 - DNA, 19 bp, Homo sapiens
  siRNA target sequence for MGC27016 (NM_144979.2,893-911).
gaacgggtaaagaaactta

SEQ ID NO: 64316 - DNA, 19 bp, Homo sapiens
  siRNA target sequence for MGC27016 (NM_144979.2,904-922).
gaaacttagagattatgct

SEQ ID NO: 64317 - DNA, 19 bp, Homo sapiens
  siRNA target sequence for MGC27016 (NM_144979.2,931-949).
ctttttcaaccgagaagat

SEQ ID NO: 64318 - DNA, 19 bp, Homo sapiens
  siRNA target sequence for MGC27016 (NM_144979.2,957-975).
ctgccatgtctgttatgaa

SEQ ID NO: 64319 - DNA, 19 bp, Homo sapiens
  siRNA target sequence for MGC27016 (NM_144979.2,996-1014).
caagtattgaggtaacact

SEQ ID NO: 64320 - DNA, 19 bp, Homo sapiens
  siRNA target sequence for MGC27016 (NM_144979.2,1006-1024).
ggtaacactagctaaacca

SEQ ID NO: 64321 - DNA, 19 bp, Homo sapiens
  siRNA target sequence for MGC27016 (NM_144979.2,1051-1069).
gcatcttaatggtcagatt

SEQ ID NO: 64322 - DNA, 19 bp, Homo sapiens
  siRNA target sequence for MGC27016 (NM_144979.2,1052-1070).
catcttaatggtcagatta

SEQ ID NO: 64323 - DNA, 19 bp, Homo sapiens
  siRNA target sequence for MGC27016 (NM_144979.2,1061-1079).
ggtcagattagtccaaatt

SEQ ID NO: 64324 - DNA, 19 bp, Homo sapiens
  siRNA target sequence for MGC27016 (NM_144979.2,1066-1084).
gattagtccaaattctgaa

SEQ ID NO: 64325 - DNA, 19 bp, Homo sapiens
  siRNA target sequence for MGC27016 (NM_144979.2,1114-1132).
gagccacccaaaaactcta

SEQ ID NO: 64326 - DNA, 19 bp, Homo sapiens
  siRNA target sequence for MGC27016 (NM_144979.2,1177-1195).
cccaagtccgcctgaagtt

SEQ ID NO: 64327 - DNA, 19 bp, Homo sapiens
  siRNA target sequence for MGC27016 (NM_144979.2,1179-1197).
caagtccgcctgaagttga

SEQ ID NO: 64328 - DNA, 19 bp, Homo sapiens
  siRNA target sequence for MGC27016 (NM_144979.2,1184-1202).
ccgcctgaagttgaaagat

SEQ ID NO: 64329 - DNA, 19 bp, Homo sapiens
  siRNA target sequence for MGC27016 (NM_144979.2,1200-1218).
gatgcacttacccttttta

SEQ ID NO: 64330 - DNA, 19 bp, Homo sapiens
  siRNA target sequence for MGC27016 (NM_144979.2,1232-1250).
cttactccaattagtatgt

SEQ ID NO: 64331 - DNA, 19 bp, Homo sapiens
  siRNA target sequence for MGC27016 (NM_144979.2,1249-1267).
gtattctttaaaatccaat

SEQ ID NO: 64332 - DNA, 19 bp, Homo sapiens
  siRNA target sequence for MGC27016 (NM_144979.2,1320-1338).
gggcaccaccagaatatta

SEQ ID NO: 64333 - DNA, 19 bp, Homo sapiens
  siRNA target sequence for MGC27016 (NM_144979.2,1323-1341).
caccaccagaatattattt

SEQ ID NO: 64334 - DNA, 19 bp, Homo sapiens
  siRNA target sequence for MGC27016 (NM_144979.2,1356-1374).
gtcaagatgggaaagtact

SEQ ID NO: 64335 - DNA, 19 bp, Homo sapiens
  siRNA target sequence for MGC27016 (NM_144979.2,1375-1393).
cttggtgtataagatagtt

SEQ ID NO: 64336 - DNA, 19 bp, Homo sapiens
  siRNA target sequence for MGC27016 (NM_144979.2,1378-1396).
ggtgtataagatagttatt

SEQ ID NO: 64337 - DNA, 19 bp, Homo sapiens
  siRNA target sequence for MGC27016 (NM_144979.2,1381-1399).
gtataagatagttattcct

SEQ ID NO: 64338 - DNA, 19 bp, Homo sapiens
  siRNA target sequence for MGC27016 (NM_144979.2,1407-1425).
caaatggatcccagagtta

SEQ ID NO: 64339 - DNA, 19 bp, Homo sapiens
  siRNA target sequence for MGC27016 (NM_144979.2,1412-1430).
ggatcccagagttacttca

SEQ ID NO: 64340 - DNA, 19 bp, Homo sapiens
  siRNA target sequence for MGC27016 (NM_144979.2,1413-1431).
gatcccagagttacttcat

SEQ ID NO: 64341 - DNA, 19 bp, Homo sapiens
  siRNA target sequence for MGC27016 (NM_144979.2,1444-1462).
ctgtactacgttagaagat

SEQ ID NO: 64342 - DNA, 19 bp, Homo sapiens
  siRNA target sequence for MGC27016 (NM_144979.2,1469-1487).
gaactggcagcccagttta

SEQ ID NO: 64343 - DNA, 19 bp, Homo sapiens
  siRNA target sequence for MGC27016 (NM_144979.2,1474-1492).
ggcagcccagtttacatta

SEQ ID NO: 64344 - DNA, 19 bp, Homo sapiens
  siRNA target sequence for MGC27016 (NM_144979.2,1476-1494).
cagcccagtttacattact

SEQ ID NO: 64345 - DNA, 19 bp, Homo sapiens
  siRNA target sequence for MGC27016 (NM_144979.2,1479-1497).
cccagtttacattacttca

SEQ ID NO: 64346 - DNA, 19 bp, Homo sapiens
  siRNA target sequence for MGC27016 (NM_144979.2,1480-1498).
ccagtttacattacttcat

SEQ ID NO: 64347 - DNA, 19 bp, Homo sapiens
  siRNA target sequence for MGC27016 (NM_144979.2,1513-1531).
ccatcgcagctcaataaat

SEQ ID NO: 64348 - DNA, 19 bp, Homo sapiens
  siRNA target sequence for MGC27016 (NM_144979.2,1514-1532).
catcgcagctcaataaata

SEQ ID NO: 64349 - DNA, 19 bp, Homo sapiens
  siRNA target sequence for MGC27016 (NM_144979.2,1576-1594).
cgtgcttccttatacttca

SEQ ID NO: 64350 - DNA, 19 bp, Homo sapiens
  siRNA target sequence for MGC27016 (NM_144979.2,1605-1623).
cttatccaggctatccttt

SEQ ID NO: 64351 - DNA, 19 bp, Homo sapiens
  siRNA target sequence for MGC27016 (NM_144979.2,1624-1642).
gtcaccaacaatatcactt

SEQ ID NO: 64352 - DNA, 19 bp, Homo sapiens
  siRNA target sequence for MGC27016 (NM_144979.2,1629-1647).
caacaatatcacttgctaa

SEQ ID NO: 64353 - DNA, 19 bp, Homo sapiens
  siRNA target sequence for MGC27016 (NM_144979.2,1658-1676).
gttggacagcggctatgta

SEQ ID NO: 64354 - DNA, 19 bp, Homo sapiens
  siRNA target sequence for MGC27016 (NM_144979.2,1661-1679).
ggacagcggctatgtatct

SEQ ID NO: 64355 - DNA, 19 bp, Homo sapiens
  siRNA target sequence for MGC2734 (NM_033117.2,135-153).
cttcccctggagaatgcat

SEQ ID NO: 64356 - DNA, 19 bp, Homo sapiens
  siRNA target sequence for MGC2734 (NM_033117.2,177-195).
caggaaggacaccgattat

SEQ ID NO: 64357 - DNA, 19 bp, Homo sapiens
  siRNA target sequence for MGC2734 (NM_033117.2,180-198).
gaaggacaccgattatgga

SEQ ID NO: 64358 - DNA, 19 bp, Homo sapiens
  siRNA target sequence for MGC2734 (NM_033117.2,314-332).
gcctcgaggctactgtttt

SEQ ID NO: 64359 - DNA, 19 bp, Homo sapiens
  siRNA target sequence for MGC2734 (NM_033117.2,316-334).
ctcgaggctactgttttgt

SEQ ID NO: 64360 - DNA, 19 bp, Homo sapiens
  siRNA target sequence for MGC2734 (NM_033117.2,421-439).
gggcacatgctcaagtaaa

SEQ ID NO: 64361 - DNA, 19 bp, Homo sapiens
  siRNA target sequence for MGC2734 (NM_033117.2,423-441).
gcacatgctcaagtaaaga

SEQ ID NO: 64362 - DNA, 19 bp, Homo sapiens
  siRNA target sequence for MGC2734 (NM_033117.2,435-453).
gtaaagagatatgatcata

SEQ ID NO: 64363 - DNA, 19 bp, Homo sapiens
  siRNA target sequence for MGC2734 (NM_033117.2,455-473).
caagaatgataagattctt

SEQ ID NO: 64364 - DNA, 19 bp, Homo sapiens
  siRNA target sequence for MGC2734 (NM_033117.2,506-524).
gcctactcagtctaaccta

SEQ ID NO: 64365 - DNA, 19 bp, Homo sapiens
  siRNA target sequence for MGC2734 (NM_033117.2,507-525).
cctactcagtctaacctaa

SEQ ID NO: 64366 - DNA, 19 bp, Homo sapiens
  siRNA target sequence for MGC2734 (NM_033117.2,511-529).
ctcagtctaacctaagtgt

SEQ ID NO: 64367 - DNA, 19 bp, Homo sapiens
  siRNA target sequence for MGC2734 (NM_033117.2,600-618).
gcagcgcctgtttattcct

SEQ ID NO: 64368 - DNA, 19 bp, Homo sapiens
  siRNA target sequence for MGC2734 (NM_033117.2,605-623).
gcctgtttattcctacttt

SEQ ID NO: 64369 - DNA, 19 bp, Homo sapiens
  siRNA target sequence for MGC32104 (NM_144684.1,481-499).
ggtaataaatggatgtaat

SEQ ID NO: 64370 - DNA, 19 bp, Homo sapiens
  siRNA target sequence for MGC32104 (NM_144684.1,625-643).
gaaagtacaccttagagaa

SEQ ID NO: 64371 - DNA, 19 bp, Homo sapiens
  siRNA target sequence for MGC32104 (NM_144684.1,1024-1042).
gtcatctctagcaaatcat

SEQ ID NO: 64372 - DNA, 19 bp, Homo sapiens
  siRNA target sequence for MGC32104 (NM_144684.1,1365-1383).
gcctttcagcccatcttgt

SEQ ID NO: 64373 - DNA, 19 bp, Homo sapiens
  siRNA target sequence for MGC32104 (NM_144684.1,1366-1384).
cctttcagcccatcttgta

SEQ ID NO: 64374 - DNA, 19 bp, Homo sapiens
  siRNA target sequence for MGC32104 (NM_144684.1,1367-1385).
ctttcagcccatcttgtaa

SEQ ID NO: 64375 - DNA, 19 bp, Homo sapiens
  siRNA target sequence for MGC32104 (NM_144684.1,1435-1453).
cagacacaagttatcacta

SEQ ID NO: 64376 - DNA, 19 bp, Homo sapiens
  siRNA target sequence for MGC32104 (NM_144684.1,1441-1459).
caagttatcactaaccaat

SEQ ID NO: 64377 - DNA, 19 bp, Homo sapiens
  siRNA target sequence for MGC32104 (NM_144684.1,1444-1462).
gttatcactaaccaatcat

SEQ ID NO: 64378 - DNA, 19 bp, Homo sapiens
  siRNA target sequence for MGC32104 (NM_144684.1,1599-1617).
cctttagtcgcatttcata

SEQ ID NO: 64379 - DNA, 19 bp, Homo sapiens
  siRNA target sequence for MGC33637 (NM_152596.2,200-218).
cagtgaattcctagcttat

SEQ ID NO: 64380 - DNA, 19 bp, Homo sapiens
  siRNA target sequence for MGC33637 (NM_152596.2,202-220).
gtgaattcctagcttatgt

SEQ ID NO: 64381 - DNA, 19 bp, Homo sapiens
  siRNA target sequence for MGC33637 (NM_152596.2,311-329).
gaaagttgaagacctaaat

SEQ ID NO: 64382 - DNA, 19 bp, Homo sapiens
  siRNA target sequence for MGC33637 (NM_152596.2,408-426).
gaagaggaggtgacataca

SEQ ID NO: 64383 - DNA, 19 bp, Homo sapiens
  siRNA target sequence for MGC33637 (NM_152596.2,427-445).
cagtcattaatcaattcca

SEQ ID NO: 64384 - DNA, 19 bp, Homo sapiens
  siRNA target sequence for MGC33637 (NM_152596.2,457-475).
gtgctgcgatactccatat

SEQ ID NO: 64385 - DNA, 19 bp, Homo sapiens
  siRNA target sequence for MGC33637 (NM_152596.2,459-477).
gctgcgatactccatatca

SEQ ID NO: 64386 - DNA, 19 bp, Homo sapiens
  siRNA target sequence for MGC33637 (NM_152596.2,460-478).
ctgcgatactccatatcaa

SEQ ID NO: 64387 - DNA, 19 bp, Homo sapiens
  siRNA target sequence for MGC33637 (NM_152596.2,556-574).
ccacaaattgccgagttta

SEQ ID NO: 64388 - DNA, 19 bp, Homo sapiens
  siRNA target sequence for MGC33637 (NM_152596.2,559-577).
caaattgccgagtttactt

SEQ ID NO: 64389 - DNA, 19 bp, Homo sapiens
  siRNA target sequence for MGC33637 (NM_152596.2,565-583).
gccgagtttacttatttga

SEQ ID NO: 64390 - DNA, 19 bp, Homo sapiens
  siRNA target sequence for MGC33637 (NM_152596.2,567-585).
cgagtttacttatttgaca

SEQ ID NO: 64391 - DNA, 19 bp, Homo sapiens
  siRNA target sequence for MGC33637 (NM_152596.2,568-586).
gagtttacttatttgacat

SEQ ID NO: 64392 - DNA, 19 bp, Homo sapiens
  siRNA target sequence for MGC33637 (NM_152596.2,653-671).
gaaggttatccatgattgt

SEQ ID NO: 64393 - DNA, 19 bp, Homo sapiens
  siRNA target sequence for MGC33637 (NM_152596.2,690-708).
ctctctcatcagtatggaa

SEQ ID NO: 64394 - DNA, 19 bp, Homo sapiens
  siRNA target sequence for MGC33637 (NM_152596.2,714-732).
ctgaataatgtctttgaca

SEQ ID NO: 64395 - DNA, 19 bp, Homo sapiens
  siRNA target sequence for MGC33637 (NM_152596.2,731-749).
cacacaggtagcagatgta

SEQ ID NO: 64396 - DNA, 19 bp, Homo sapiens
  siRNA target sequence for MGC33637 (NM_152596.2,733-751).
cacaggtagcagatgtact

SEQ ID NO: 64397 - DNA, 19 bp, Homo sapiens
  siRNA target sequence for MGC33637 (NM_152596.2,764-782).
ggaaacgggtggctatctt

SEQ ID NO: 64398 - DNA, 19 bp, Homo sapiens
  siRNA target sequence for MGC33637 (NM_152596.2,769-787).
cgggtggctatcttccaaa

SEQ ID NO: 64399 - DNA, 19 bp, Homo sapiens
  siRNA target sequence for MGC33637 (NM_152596.2,899-917).
gttcatccgacctgtttca

SEQ ID NO: 64400 - DNA, 19 bp, Homo sapiens
  siRNA target sequence for MGC33637 (NM_152596.2,919-937).
cctctttactgaaaatttt

SEQ ID NO: 64401 - DNA, 19 bp, Homo sapiens
  siRNA target sequence for MGC33637 (NM_152596.2,1006-1024).
ccaccctggtggatggtta

SEQ ID NO: 64402 - DNA, 19 bp, Homo sapiens
  siRNA target sequence for MGC33637 (NM_152596.2,1010-1028).
cctggtggatggttaccta

SEQ ID NO: 64403 - DNA, 19 bp, Homo sapiens
  siRNA target sequence for MGC33637 (NM_152596.2,1011-1029).
ctggtggatggttacctaa

SEQ ID NO: 64404 - DNA, 19 bp, Homo sapiens
  siRNA target sequence for MGC33637 (NM_152596.2,1167-1185).
gcacagggactcctgataa

SEQ ID NO: 64405 - DNA, 19 bp, Homo sapiens
  siRNA target sequence for MGC33637 (NM_152596.2,1244-1262).
caaaggcttcttatttggt

SEQ ID NO: 64406 - DNA, 19 bp, Homo sapiens
  siRNA target sequence for MGC33637 (NM_152596.2,1278-1296).
gataaagctccaagtttta

SEQ ID NO: 64407 - DNA, 19 bp, Homo sapiens
  siRNA target sequence for MGC33637 (NM_152596.2,1346-1364).
gaataaacaagctacaaat

SEQ ID NO: 64408 - DNA, 19 bp, Homo sapiens
  siRNA target sequence for MGC33637 (NM_152596.2,1357-1375).
ctacaaatcctcaacatct

SEQ ID NO: 64409 - DNA, 19 bp, Homo sapiens
  siRNA target sequence for MGC33637 (NM_152596.2,1478-1496).
ctttatgacacccaaacat

SEQ ID NO: 64410 - DNA, 19 bp, Homo sapiens
  siRNA target sequence for MGC33637 (NM_152596.2,1499-1517).
gtttcaggcaagtttatct

SEQ ID NO: 64411 - DNA, 19 bp, Homo sapiens
  siRNA target sequence for MGC33637 (NM_152596.2,1527-1545).
gagacagaacagttattga

SEQ ID NO: 64412 - DNA, 19 bp, Homo sapiens
  siRNA target sequence for MGC33637 (NM_152596.2,1574-1592).
cacaaaacaggctgtttca

SEQ ID NO: 64413 - DNA, 19 bp, Homo sapiens
  siRNA target sequence for MGC33637 (NM_152596.2,1581-1599).
caggctgtttcaatgtctt

SEQ ID NO: 64414 - DNA, 19 bp, Homo sapiens
  siRNA target sequence for MGC33637 (NM_152596.2,1622-1640).
gtctccaagtgacactttt

SEQ ID NO: 64415 - DNA, 19 bp, Homo sapiens
  siRNA target sequence for MGC33637 (NM_152596.2,1686-1704).
gccttggagaagatcgatt

SEQ ID NO: 64416 - DNA, 19 bp, Homo sapiens
  siRNA target sequence for MGC33637 (NM_152596.2,1697-1715).
gatcgattcctggataagt

SEQ ID NO: 64417 - DNA, 19 bp, Homo sapiens
  siRNA target sequence for MGC33637 (NM_152596.2,1706-1724).
ctggataagtccttttcta

SEQ ID NO: 64418 - DNA, 19 bp, Homo sapiens
  siRNA target sequence for MGC4054 (NM_024341.1,477-495).
cactggggaaccaagttga

SEQ ID NO: 64419 - DNA, 19 bp, Homo sapiens
  siRNA target sequence for MGC4054 (NM_024341.1,484-502).
gaaccaagttgataaacct

SEQ ID NO: 64420 - DNA, 19 bp, Homo sapiens
  siRNA target sequence for MGC4054 (NM_024341.1,619-637).
gctgcatgtttttcgaaaa

SEQ ID NO: 64421 - DNA, 19 bp, Homo sapiens
  siRNA target sequence for MGC4054 (NM_024341.1,626-644).
gtttttcgaaaagaacaat

SEQ ID NO: 64422 - DNA, 19 bp, Homo sapiens
  siRNA target sequence for MGC4054 (NM_024341.1,632-650).
cgaaaagaacaatctagaa

SEQ ID NO: 64423 - DNA, 19 bp, Homo sapiens
  siRNA target sequence for MGC4054 (NM_024341.1,677-695).
ggagcaacactcaacgaat

SEQ ID NO: 64424 - DNA, 19 bp, Homo sapiens
  siRNA target sequence for MGC4054 (NM_024341.1,680-698).
gcaacactcaacgaatgta

SEQ ID NO: 64425 - DNA, 19 bp, Homo sapiens
  siRNA target sequence for MGC4054 (NM_024341.1,681-699).
caacactcaacgaatgtaa

SEQ ID NO: 64426 - DNA, 19 bp, Homo sapiens
  siRNA target sequence for MGC4054 (NM_024341.1,986-1004).
ctcagaccgcacttgagaa

SEQ ID NO: 64427 - DNA, 19 bp, Homo sapiens
  siRNA target sequence for MGC4054 (NM_024341.1,988-1006).
cagaccgcacttgagaatt

SEQ ID NO: 64428 - DNA, 19 bp, Homo sapiens
  siRNA target sequence for MGC4054 (NM_024341.1,1055-1073).
cgcactcagtcaatcttca

SEQ ID NO: 64429 - DNA, 19 bp, Homo sapiens
  siRNA target sequence for MGC4054 (NM_024341.1,1095-1113).
cgggggagggtcattatgt

SEQ ID NO: 64430 - DNA, 19 bp, Homo sapiens
  siRNA target sequence for MGC4054 (NM_024341.1,1096-1114).
gggggagggtcattatgta

SEQ ID NO: 64431 - DNA, 19 bp, Homo sapiens
  siRNA target sequence for MGC4054 (NM_024341.1,1097-1115).
ggggagggtcattatgtat

SEQ ID NO: 64432 - DNA, 19 bp, Homo sapiens
  siRNA target sequence for MGC4054 (NM_024341.1,1100-1118).
gagggtcattatgtatgta

SEQ ID NO: 64433 - DNA, 19 bp, Homo sapiens
  siRNA target sequence for MGC4054 (NM_024341.1,1102-1120).
gggtcattatgtatgtaat

SEQ ID NO: 64434 - DNA, 19 bp, Homo sapiens
  siRNA target sequence for MGC4054 (NM_024341.1,1154-1172).
ctttcttcgcactatagca

SEQ ID NO: 64435 - DNA, 19 bp, Homo sapiens
  siRNA target sequence for MGC41917 (NM_153231.2,289-307).
gtgggcttctggtttcact

SEQ ID NO: 64436 - DNA, 19 bp, Homo sapiens
  siRNA target sequence for MGC41917 (NM_153231.2,440-458).
cacttacccgccagtctta

SEQ ID NO: 64437 - DNA, 19 bp, Homo sapiens
  siRNA target sequence for MGC41917 (NM_153231.2,669-687).
gcattacaagagtggttat

SEQ ID NO: 64438 - DNA, 19 bp, Homo sapiens
  siRNA target sequence for MGC41917 (NM_153231.2,680-698).
gtggttatcagcagatgtt

SEQ ID NO: 64439 - DNA, 19 bp, Homo sapiens
  siRNA target sequence for MGC41917 (NM_153231.2,682-700).
ggttatcagcagatgttct

SEQ ID NO: 64440 - DNA, 19 bp, Homo sapiens
  siRNA target sequence for MGC41917 (NM_153231.2,690-708).
gcagatgttctccatgaat

SEQ ID NO: 64441 - DNA, 19 bp, Homo sapiens
  siRNA target sequence for MGC41917 (NM_153231.2,727-745).
ggaaagacgccttgattca

SEQ ID NO: 64442 - DNA, 19 bp, Homo sapiens
  siRNA target sequence for MGC41917 (NM_153231.2,728-746).
gaaagacgccttgattcat

SEQ ID NO: 64443 - DNA, 19 bp, Homo sapiens
  siRNA target sequence for MGC41917 (NM_153231.2,1046-1064).
ccaccggtctacttttatt

SEQ ID NO: 64444 - DNA, 19 bp, Homo sapiens
  siRNA target sequence for MGC41917 (NM_153231.2,1129-1147).
gcaatagagcccacctaat

SEQ ID NO: 64445 - DNA, 19 bp, Homo sapiens
  siRNA target sequence for MGC41917 (NM_153231.2,1130-1148).
caatagagcccacctaatt

SEQ ID NO: 64446 - DNA, 19 bp, Homo sapiens
  siRNA target sequence for MGC41917 (NM_153231.2,1135-1153).
gagcccacctaattcaaca

SEQ ID NO: 64447 - DNA, 19 bp, Homo sapiens
  siRNA target sequence for MGC41917 (NM_153231.2,1137-1155).
gcccacctaattcaacatt

SEQ ID NO: 64448 - DNA, 19 bp, Homo sapiens
  siRNA target sequence for MGC41917 (NM_153231.2,1300-1318).
ggagcacgtacctcattca

SEQ ID NO: 64449 - DNA, 19 bp, Homo sapiens
  siRNA target sequence for MGC41917 (NM_153231.2,1404-1422).
caccaaagggtccatacat

SEQ ID NO: 64450 - DNA, 19 bp, Homo sapiens
  siRNA target sequence for MGC42415 (NM_153363.1,563-581).
cgccagagctaggcataaa

SEQ ID NO: 64451 - DNA, 19 bp, Homo sapiens
  siRNA target sequence for MGC42415 (NM_153363.1,851-869).
gcatggtttcacaactaca

SEQ ID NO: 64452 - DNA, 19 bp, Homo sapiens
  siRNA target sequence for MGC42415 (NM_153363.1,1359-1377).
ctcctcaactcttaatact

SEQ ID NO: 64453 - DNA, 19 bp, Homo sapiens
  siRNA target sequence for MGC43537 (NM_178544.2,192-210).
cacgggcctccaaatgact

SEQ ID NO: 64454 - DNA, 19 bp, Homo sapiens
  siRNA target sequence for MGC43537 (NM_178544.2,194-212).
cgggcctccaaatgacttt

SEQ ID NO: 64455 - DNA, 19 bp, Homo sapiens
  siRNA target sequence for MGC43537 (NM_178544.2,258-276).
cggtttctctggattctgt

SEQ ID NO: 64456 - DNA, 19 bp, Homo sapiens
  siRNA target sequence for MGC43537 (NM_178544.2,281-299).
ctccatggaggaaactcaa

SEQ ID NO: 64457 - DNA, 19 bp, Homo sapiens
  siRNA target sequence for MGC43537 (NM_178544.2,331-349).
ccatggccaatgtatcttt

SEQ ID NO: 64458 - DNA, 19 bp, Homo sapiens
  siRNA target sequence for MGC43537 (NM_178544.2,465-483).
ctgggatataccattccta

SEQ ID NO: 64459 - DNA, 19 bp, Homo sapiens
  siRNA target sequence for MGC43537 (NM_178544.2,564-582).
gatttggaatacaagtata

SEQ ID NO: 64460 - DNA, 19 bp, Homo sapiens
  siRNA target sequence for MGC43537 (NM_178544.2,570-588).
gaatacaagtatattacca

SEQ ID NO: 64461 - DNA, 19 bp, Homo sapiens
  siRNA target sequence for MGC43537 (NM_178544.2,601-619).
cagaaaagaatgtttgcaa

SEQ ID NO: 64462 - DNA, 19 bp, Homo sapiens
  siRNA target sequence for MGC43537 (NM_178544.2,672-690).
gaggacaccattttcagaa

SEQ ID NO: 64463 - DNA, 19 bp, Homo sapiens
  siRNA target sequence for MGC43537 (NM_178544.2,688-706).
gaaatggtttgcagtgtaa

SEQ ID NO: 64464 - DNA, 19 bp, Homo sapiens
  siRNA target sequence for MGC43537 (NM_178544.2,694-712).
gtttgcagtgtaaacatga

SEQ ID NO: 64465 - DNA, 19 bp, Homo sapiens
  siRNA target sequence for MGC43537 (NM_178544.2,737-755).
gatgggatgcgttagtcaa

SEQ ID NO: 64466 - DNA, 19 bp, Homo sapiens
  siRNA target sequence for MGC43537 (NM_178544.2,742-760).
gatgcgttagtcaaatgct

SEQ ID NO: 64467 - DNA, 19 bp, Homo sapiens
  siRNA target sequence for MGC43537 (NM_178544.2,745-763).
gcgttagtcaaatgctaat

SEQ ID NO: 64468 - DNA, 19 bp, Homo sapiens
  siRNA target sequence for MGC43537 (NM_178544.2,751-769).
gtcaaatgctaatccaaaa

SEQ ID NO: 64469 - DNA, 19 bp, Homo sapiens
  siRNA target sequence for MGC43537 (NM_178544.2,937-955).
gagtgggagaccttagagt

SEQ ID NO: 64470 - DNA, 19 bp, Homo sapiens
  siRNA target sequence for MGC43537 (NM_178544.2,1271-1289).
ggtacaacgacatattagt

SEQ ID NO: 64471 - DNA, 19 bp, Homo sapiens
  siRNA target sequence for MGC43537 (NM_178544.2,1279-1297).
gacatattagtcaacatca

SEQ ID NO: 64472 - DNA, 19 bp, Homo sapiens
  siRNA target sequence for MGC43537 (NM_178544.2,1598-1616).
ggcctttatttgtggttat

SEQ ID NO: 64473 - DNA, 19 bp, Homo sapiens
  siRNA target sequence for MGC43537 (NM_178544.2,1685-1703).
cttcagtagtcgctatcat

SEQ ID NO: 64474 - DNA, 19 bp, Homo sapiens
  siRNA target sequence for MGC43537 (NM_178544.2,1906-1924).
gcacctacatatgtaaaga

SEQ ID NO: 64475 - DNA, 19 bp, Homo sapiens
  siRNA target sequence for MGC43537 (NM_178544.2,2188-2206).
cgtttagtcggcactatca

SEQ ID NO: 64476 - DNA, 19 bp, Homo sapiens
  siRNA target sequence for MGC43537 (NM_178544.2,2189-2207).
gtttagtcggcactatcat

SEQ ID NO: 64477 - DNA, 19 bp, Homo sapiens
  siRNA target sequence for MGC43537 (NM_178544.2,2197-2215).
ggcactatcatcttactca

SEQ ID NO: 64478 - DNA, 19 bp, Homo sapiens
  siRNA target sequence for MGC43537 (NM_178544.2,2198-2216).
gcactatcatcttactcaa

SEQ ID NO: 64479 - DNA, 19 bp, Homo sapiens
  siRNA target sequence for MGC43537 (NM_178544.2,2281-2299).
gcagttatcgacttacatt

SEQ ID NO: 64480 - DNA, 19 bp, Homo sapiens
  siRNA target sequence for MGC43537 (NM_178544.2,2289-2307).
cgacttacattacatcaaa

SEQ ID NO: 64481 - DNA, 19 bp, Homo sapiens
  siRNA target sequence for MGC43537 (NM_178544.2,2357-2375).
ctttagtcgtcggtatcat

SEQ ID NO: 64482 - DNA, 19 bp, Homo sapiens
  siRNA target sequence for MGC43537 (NM_178544.2,2609-2627).
ctttattcgtagtgatcaa

SEQ ID NO: 64483 - DNA, 19 bp, Homo sapiens
  siRNA target sequence for MGC43537 (NM_178544.2,2656-2674).
gtgaggaagtcctatgcat

SEQ ID NO: 64484 - DNA, 19 bp, Homo sapiens
  siRNA target sequence for MGC43537 (NM_178544.2,2658-2676).
gaggaagtcctatgcataa

SEQ ID NO: 64485 - DNA, 19 bp, Homo sapiens
  siRNA target sequence for MGC43537 (NM_178544.2,2661-2679).
gaagtcctatgcataatgt

SEQ ID NO: 64486 - DNA, 19 bp, Homo sapiens
  siRNA target sequence for MGC4400 (NM_032679.1,414-432).
ggggaggggtcattgtcat

SEQ ID NO: 64487 - DNA, 19 bp, Homo sapiens
  siRNA target sequence for MGC4400 (NM_032679.1,487-505).
ctcagaaggtcttgtacaa

SEQ ID NO: 64488 - DNA, 19 bp, Homo sapiens
  siRNA target sequence for MGC4400 (NM_032679.1,524-542).
ctacatcaacctagtatca

SEQ ID NO: 64489 - DNA, 19 bp, Homo sapiens
  siRNA target sequence for MGC4400 (NM_032679.1,615-633).
ggagcagcccacagtcaaa

SEQ ID NO: 64490 - DNA, 19 bp, Homo sapiens
  siRNA target sequence for MGC4400 (NM_032679.1,616-634).
gagcagcccacagtcaaat

SEQ ID NO: 64491 - DNA, 19 bp, Homo sapiens
  siRNA target sequence for MGC4400 (NM_032679.1,744-762).
ggagttaaataccatagat

SEQ ID NO: 64492 - DNA, 19 bp, Homo sapiens
  siRNA target sequence for MGC4400 (NM_032679.1,789-807).
cagctcaatgacctacaaa

SEQ ID NO: 64493 - DNA, 19 bp, Homo sapiens
  siRNA target sequence for MGC4400 (NM_032679.1,863-881).
caggaaagcacagcttatt

SEQ ID NO: 64494 - DNA, 19 bp, Homo sapiens
  siRNA target sequence for MGC4400 (NM_032679.1,866-884).
gaaagcacagcttattcaa

SEQ ID NO: 64495 - DNA, 19 bp, Homo sapiens
  siRNA target sequence for MGC4400 (NM_032679.1,1116-1134).
cggaagtgccggctcaata

SEQ ID NO: 64496 - DNA, 19 bp, Homo sapiens
  siRNA target sequence for MGC4400 (NM_032679.1,1118-1136).
gaagtgccggctcaataga

SEQ ID NO: 64497 - DNA, 19 bp, Homo sapiens
  siRNA target sequence for MGC4400 (NM_032679.1,1121-1139).
gtgccggctcaatagacat

SEQ ID NO: 64498 - DNA, 19 bp, Homo sapiens
  siRNA target sequence for MGC4400 (NM_032679.1,1369-1387).
gcaagtcgaagctcattca

SEQ ID NO: 64499 - DNA, 19 bp, Homo sapiens
  siRNA target sequence for MGC4400 (NM_032679.1,1452-1470).
cacatgtcagtcctcatta

SEQ ID NO: 64500 - DNA, 19 bp, Homo sapiens
  siRNA target sequence for MGC4400 (NM_032679.1,1589-1607).
gaacacagtacctatagaa

SEQ ID NO: 64501 - DNA, 19 bp, Homo sapiens
  siRNA target sequence for MGC4400 (NM_032679.1,1649-1667).
gcgcctagtgggcagaaat

SEQ ID NO: 64502 - DNA, 19 bp, Homo sapiens
  siRNA target sequence for MGC4400 (NM_032679.1,1651-1669).
gcctagtgggcagaaatgt

SEQ ID NO: 64503 - DNA, 19 bp, Homo sapiens
  siRNA target sequence for MGC4400 (NM_032679.1,1652-1670).
cctagtgggcagaaatgta

SEQ ID NO: 64504 - DNA, 19 bp, Homo sapiens
  siRNA target sequence for MGC4400 (NM_032679.1,1677-1695).
gtggaacaaccttttccaa

SEQ ID NO: 64505 - DNA, 19 bp, Homo sapiens
  siRNA target sequence for MGC4400 (NM_032679.1,1696-1714).
gaaatcaagcctttgtagt

SEQ ID NO: 64506 - DNA, 19 bp, Homo sapiens
  siRNA target sequence for MGC4400 (NM_032679.1,1733-1751).
gagaataagcctcacaaat

SEQ ID NO: 64507 - DNA, 19 bp, Homo sapiens
  siRNA target sequence for MGC4400 (NM_032679.1,1735-1753).
gaataagcctcacaaatga

SEQ ID NO: 64508 - DNA, 19 bp, Homo sapiens
  siRNA target sequence for MGC4400 (NM_032679.1,1763-1781).
ggccccatcagtaataaat

SEQ ID NO: 64509 - DNA, 19 bp, Homo sapiens
  siRNA target sequence for MGC4400 (NM_032679.1,1764-1782).
gccccatcagtaataaatt

SEQ ID NO: 64510 - DNA, 19 bp, Homo sapiens
  siRNA target sequence for MGC4400 (NM_032679.1,1765-1783).
ccccatcagtaataaatta

SEQ ID NO: 64511 - DNA, 19 bp, Homo sapiens
  siRNA target sequence for MGC4400 (NM_032679.1,1767-1785).
ccatcagtaataaattata

SEQ ID NO: 64512 - DNA, 19 bp, Homo sapiens
  siRNA target sequence for MGC45380 (NM_133466.1,240-258).
cccttcgatcagtgatgtt

SEQ ID NO: 64513 - DNA, 19 bp, Homo sapiens
  siRNA target sequence for MGC45380 (NM_133466.1,776-794).
gtgcgccaacagcttactt

SEQ ID NO: 64514 - DNA, 19 bp, Homo sapiens
  siRNA target sequence for MGC45380 (NM_133466.1,778-796).
gcgccaacagcttactttt

SEQ ID NO: 64515 - DNA, 19 bp, Homo sapiens
  siRNA target sequence for MGC45380 (NM_133466.1,940-958).
catatgtggtgcagatctt

SEQ ID NO: 64516 - DNA, 19 bp, Homo sapiens
  siRNA target sequence for MGC45380 (NM_133466.1,1027-1045).
ggtacgaggacaacttact

SEQ ID NO: 64517 - DNA, 19 bp, Homo sapiens
  siRNA target sequence for MGC45380 (NM_133466.1,1130-1148).
cggcatcagaagcttaata

SEQ ID NO: 64518 - DNA, 19 bp, Homo sapiens
  siRNA target sequence for MGC45380 (NM_133466.1,1197-1215).
gtggctctggtcttagagt

SEQ ID NO: 64519 - DNA, 19 bp, Homo sapiens
  siRNA target sequence for MGC45380 (NM_133466.1,1201-1219).
ctctggtcttagagtacat

SEQ ID NO: 64520 - DNA, 19 bp, Homo sapiens
  siRNA target sequence for MGC45380 (NM_133466.1,1357-1375).
ctttagccgtggttatcat

SEQ ID NO: 64521 - DNA, 19 bp, Homo sapiens
  siRNA target sequence for MGC45380 (NM_133466.1,1362-1380).
gccgtggttatcatcttat

SEQ ID NO: 64522 - DNA, 19 bp, Homo sapiens
  siRNA target sequence for MGC45380 (NM_133466.1,1522-1540).
ggccttcagactactttca

SEQ ID NO: 64523 - DNA, 19 bp, Homo sapiens
  siRNA target sequence for MGC45380 (NM_133466.1,1524-1542).
ccttcagactactttcaca

SEQ ID NO: 64524 - DNA, 19 bp, Homo sapiens
  siRNA target sequence for MGC45380 (NM_133466.1,1525-1543).
cttcagactactttcacaa

SEQ ID NO: 64525 - DNA, 19 bp, Homo sapiens
  siRNA target sequence for MGC45380 (NM_133466.1,1609-1627).
ctttagattgcgccaaaaa

SEQ ID NO: 64526 - DNA, 19 bp, Homo sapiens
  siRNA target sequence for MGC45380 (NM_133466.1,1618-1636).
gcgccaaaaacttactcta

SEQ ID NO: 64527 - DNA, 19 bp, Homo sapiens
  siRNA target sequence for MGC45586 (NM_152603.2,278-296).
gccatggacatcatttgca

SEQ ID NO: 64528 - DNA, 19 bp, Homo sapiens
  siRNA target sequence for MGC45586 (NM_152603.2,327-345).
gctgaagactttttagtga

SEQ ID NO: 64529 - DNA, 19 bp, Homo sapiens
  siRNA target sequence for MGC45586 (NM_152603.2,353-371).
ggaacaccaagagaagtat

SEQ ID NO: 64530 - DNA, 19 bp, Homo sapiens
  siRNA target sequence for MGC45586 (NM_152603.2,357-375).
caccaagagaagtattcta

SEQ ID NO: 64531 - DNA, 19 bp, Homo sapiens
  siRNA target sequence for MGC45586 (NM_152603.2,373-391).
ctagatcagttgtaagcat

SEQ ID NO: 64532 - DNA, 19 bp, Homo sapiens
  siRNA target sequence for MGC45586 (NM_152603.2,533-551).
catcagtaatctaaatcct

SEQ ID NO: 64533 - DNA, 19 bp, Homo sapiens
  siRNA target sequence for MGC45586 (NM_152603.2,553-571).
caagaaagagacttagtga

SEQ ID NO: 64534 - DNA, 19 bp, Homo sapiens
  siRNA target sequence for MGC45586 (NM_152603.2,560-578).
gagacttagtgagtataat

SEQ ID NO: 64535 - DNA, 19 bp, Homo sapiens
  siRNA target sequence for MGC45586 (NM_152603.2,592-610).
cactcctgagtactaaaca

SEQ ID NO: 64536 - DNA, 19 bp, Homo sapiens
  siRNA target sequence for MGC45586 (NM_152603.2,632-650).
caaatcccataatcaaagt

SEQ ID NO: 64537 - DNA, 19 bp, Homo sapiens
  siRNA target sequence for MGC45586 (NM_152603.2,653-671).
cagagctttcagtcataat

SEQ ID NO: 64538 - DNA, 19 bp, Homo sapiens
  siRNA target sequence for MGC45586 (NM_152603.2,655-673).
gagctttcagtcataatga

SEQ ID NO: 64539 - DNA, 19 bp, Homo sapiens
  siRNA target sequence for MGC45586 (NM_152603.2,662-680).
cagtcataatgaagttctt

SEQ ID NO: 64540 - DNA, 19 bp, Homo sapiens
  siRNA target sequence for MGC45586 (NM_152603.2,754-772).
ggggaggcctgattacaca

SEQ ID NO: 64541 - DNA, 19 bp, Homo sapiens
  siRNA target sequence for MGC45586 (NM_152603.2,756-774).
ggaggcctgattacacata

SEQ ID NO: 64542 - DNA, 19 bp, Homo sapiens
  siRNA target sequence for MGC45586 (NM_152603.2,761-779).
cctgattacacatagtaga

SEQ ID NO: 64543 - DNA, 19 bp, Homo sapiens
  siRNA target sequence for MGC45586 (NM_152603.2,823-841).
gagcaaccaatattgaaaa

SEQ ID NO: 64544 - DNA, 19 bp, Homo sapiens
  siRNA target sequence for MGC45586 (NM_152603.2,825-843).
gcaaccaatattgaaaaaa

SEQ ID NO: 64545 - DNA, 19 bp, Homo sapiens
  siRNA target sequence for MGC45586 (NM_152603.2,897-915).
ctgcatcagggaattcact

SEQ ID NO: 64546 - DNA, 19 bp, Homo sapiens
  siRNA target sequence for MGC45586 (NM_152603.2,1388-1406).
gacaacccttgctcttcat

SEQ ID NO: 64547 - DNA, 19 bp, Homo sapiens
  siRNA target sequence for MGC45586 (NM_152603.2,1390-1408).
caacccttgctcttcatga

SEQ ID NO: 64548 - DNA, 19 bp, Homo sapiens
  siRNA target sequence for MGC45586 (NM_152603.2,1640-1658).
gacaaatctcaatctacat

SEQ ID NO: 64549 - DNA, 19 bp, Homo sapiens
  siRNA target sequence for MGC45586 (NM_152603.2,1757-1775).
cggccagaaatcctatgaa

SEQ ID NO: 64550 - DNA, 19 bp, Homo sapiens
  siRNA target sequence for MGC45586 (NM_152603.2,1956-1974).
ggtaagtctttcagttata

SEQ ID NO: 64551 - DNA, 19 bp, Homo sapiens
  siRNA target sequence for MGC45586 (NM_152603.2,1957-1975).
gtaagtctttcagttataa

SEQ ID NO: 64552 - DNA, 19 bp, Homo sapiens
  siRNA target sequence for MGC48625 (NM_182609.1,385-403).
ccatctggtgatattagaa

SEQ ID NO: 64553 - DNA, 19 bp, Homo sapiens
  siRNA target sequence for MGC48625 (NM_182609.1,386-404).
catctggtgatattagaaa

SEQ ID NO: 64554 - DNA, 19 bp, Homo sapiens
  siRNA target sequence for MGC48625 (NM_182609.1,414-432).
gccatggcatcaacaattt

SEQ ID NO: 64555 - DNA, 19 bp, Homo sapiens
  siRNA target sequence for MGC48625 (NM_182609.1,415-433).
ccatggcatcaacaatttt

SEQ ID NO: 64556 - DNA, 19 bp, Homo sapiens
  siRNA target sequence for MGC48625 (NM_182609.1,474-492).
gcctgtgggactatgatgt

SEQ ID NO: 64557 - DNA, 19 bp, Homo sapiens
  siRNA target sequence for MGC48625 (NM_182609.1,475-493).
cctgtgggactatgatgta

SEQ ID NO: 64558 - DNA, 19 bp, Homo sapiens
  siRNA target sequence for MGC48625 (NM_182609.1,476-494).
ctgtgggactatgatgtaa

SEQ ID NO: 64559 - DNA, 19 bp, Homo sapiens
  siRNA target sequence for MGC48625 (NM_182609.1,478-496).
gtgggactatgatgtaaaa

SEQ ID NO: 64560 - DNA, 19 bp, Homo sapiens
  siRNA target sequence for MGC48625 (NM_182609.1,481-499).
ggactatgatgtaaaaaat

SEQ ID NO: 64561 - DNA, 19 bp, Homo sapiens
  siRNA target sequence for MGC48625 (NM_182609.1,511-529).
gcctttgacctgtaacaaa

SEQ ID NO: 64562 - DNA, 19 bp, Homo sapiens
  siRNA target sequence for MGC48625 (NM_182609.1,535-553).
cactcacagaaaagatcaa

SEQ ID NO: 64563 - DNA, 19 bp, Homo sapiens
  siRNA target sequence for MGC48625 (NM_182609.1,739-757).
ggcacagctggctgaacta

SEQ ID NO: 64564 - DNA, 19 bp, Homo sapiens
  siRNA target sequence for MGC48625 (NM_182609.1,1842-1860).
gttataatagagaaaaaca

SEQ ID NO: 64565 - DNA, 19 bp, Homo sapiens
  siRNA target sequence for MKI67IP (NM_032390.3,69-87).
gccaatcctgtcgcttaat

SEQ ID NO: 64566 - DNA, 19 bp, Homo sapiens
  siRNA target sequence for MKI67IP (NM_032390.3,94-112).
gaagatgtcgagtttcaaa

SEQ ID NO: 64567 - DNA, 19 bp, Homo sapiens
  siRNA target sequence for MKI67IP (NM_032390.3,136-154).
cgcataacccagcgaaaaa

SEQ ID NO: 64568 - DNA, 19 bp, Homo sapiens
  siRNA target sequence for MKI67IP (NM_032390.3,189-207).
gcgccacctacctaaccta

SEQ ID NO: 64569 - DNA, 19 bp, Homo sapiens
  siRNA target sequence for MKI67IP (NM_032390.3,213-231).
cgaaacccagatcttttca

SEQ ID NO: 64570 - DNA, 19 bp, Homo sapiens
  siRNA target sequence for MKI67IP (NM_032390.3,383-401).
gactcttggagtgtcattt

SEQ ID NO: 64571 - DNA, 19 bp, Homo sapiens
  siRNA target sequence for MKI67IP (NM_032390.3,385-403).
ctcttggagtgtcatttta

SEQ ID NO: 64572 - DNA, 19 bp, Homo sapiens
  siRNA target sequence for MKI67IP (NM_032390.3,406-424).
ccacctgaaaaagtacata

SEQ ID NO: 64573 - DNA, 19 bp, Homo sapiens
  siRNA target sequence for MKI67IP (NM_032390.3,439-457).
gactggaatattccattta

SEQ ID NO: 64574 - DNA, 19 bp, Homo sapiens
  siRNA target sequence for MKI67IP (NM_032390.3,443-461).
ggaatattccatttaagca

SEQ ID NO: 64575 - DNA, 19 bp, Homo sapiens
  siRNA target sequence for MKI67IP (NM_032390.3,494-512).
ggaatcggacactaacaca

SEQ ID NO: 64576 - DNA, 19 bp, Homo sapiens
  siRNA target sequence for MKI67IP (NM_032390.3,495-513).
gaatcggacactaacacaa

SEQ ID NO: 64577 - DNA, 19 bp, Homo sapiens
  siRNA target sequence for MKI67IP (NM_032390.3,520-538).
cggatggaggagcgattta

SEQ ID NO: 64578 - DNA, 19 bp, Homo sapiens
  siRNA target sequence for MKI67IP (NM_032390.3,521-539).
ggatggaggagcgatttaa

SEQ ID NO: 64579 - DNA, 19 bp, Homo sapiens
  siRNA target sequence for MKI67IP (NM_032390.3,522-540).
gatggaggagcgatttaaa

SEQ ID NO: 64580 - DNA, 19 bp, Homo sapiens
  siRNA target sequence for MKI67IP (NM_032390.3,571-589).
gctaaaaaaggaattgact

SEQ ID NO: 64581 - DNA, 19 bp, Homo sapiens
  siRNA target sequence for MKI67IP (NM_032390.3,572-590).
ctaaaaaaggaattgacta

SEQ ID NO: 64582 - DNA, 19 bp, Homo sapiens
  siRNA target sequence for MKI67IP (NM_032390.3,768-786).
ggagaggcgaaaatctcaa

SEQ ID NO: 64583 - DNA, 19 bp, Homo sapiens
  siRNA target sequence for MKRN1 (NM_013446.2,401-419).
ctctgacagtccgtatagt

SEQ ID NO: 64584 - DNA, 19 bp, Homo sapiens
  siRNA target sequence for MKRN1 (NM_013446.2,403-421).
ctgacagtccgtatagtgt

SEQ ID NO: 64585 - DNA, 19 bp, Homo sapiens
  siRNA target sequence for MKRN2 (NM_014160.3,111-129).
ggaagtcagtgcctattct

SEQ ID NO: 64586 - DNA, 19 bp, Homo sapiens
  siRNA target sequence for MKRN2 (NM_014160.3,199-217).
gaactcggtgcagatatga

SEQ ID NO: 64587 - DNA, 19 bp, Homo sapiens
  siRNA target sequence for MKRN2 (NM_014160.3,311-329).
cgaggtcactgcatccatt

SEQ ID NO: 64588 - DNA, 19 bp, Homo sapiens
  siRNA target sequence for MKRN2 (NM_014160.3,326-344).
cattgtgaaaactaactca

SEQ ID NO: 64589 - DNA, 19 bp, Homo sapiens
  siRNA target sequence for MKRN2 (NM_014160.3,353-371).
cggaaagcgtgaaaagaga

SEQ ID NO: 64590 - DNA, 19 bp, Homo sapiens
  siRNA target sequence for MKRN2 (NM_014160.3,400-418).
ctggcatggctgaaaggaa

SEQ ID NO: 64591 - DNA, 19 bp, Homo sapiens
  siRNA target sequence for MKRN2 (NM_014160.3,425-443).
gccgagcatggtgagtaat

SEQ ID NO: 64592 - DNA, 19 bp, Homo sapiens
  siRNA target sequence for MKRN2 (NM_014160.3,428-446).
gagcatggtgagtaatcca

SEQ ID NO: 64593 - DNA, 19 bp, Homo sapiens
  siRNA target sequence for MKRN2 (NM_014160.3,621-639).
cacggggaggtgtgtgaaa

SEQ ID NO: 64594 - DNA, 19 bp, Homo sapiens
  siRNA target sequence for MKRN2 (NM_014160.3,759-777).
gacaaagtgtgcagtatct

SEQ ID NO: 64595 - DNA, 19 bp, Homo sapiens
  siRNA target sequence for MKRN2 (NM_014160.3,772-790).
gtatctgcatggaagtgat

SEQ ID NO: 64596 - DNA, 19 bp, Homo sapiens
  siRNA target sequence for MKRN2 (NM_014160.3,841-859).
gcaatcacacgtactgttt

SEQ ID NO: 64597 - DNA, 19 bp, Homo sapiens
  siRNA target sequence for MKRN2 (NM_014160.3,929-947).
ccgtgtgatatcagagttt

SEQ ID NO: 64598 - DNA, 19 bp, Homo sapiens
  siRNA target sequence for MKRN2 (NM_014160.3,931-949).
gtgtgatatcagagtttgt

SEQ ID NO: 64599 - DNA, 19 bp, Homo sapiens
  siRNA target sequence for MKRN2 (NM_014160.3,1084-1102).
gtctttatcgccatgctta

SEQ ID NO: 64600 - DNA, 19 bp, Homo sapiens
  siRNA target sequence for MKRN2 (NM_014160.3,1160-1178).
cactgtgaggttctttaat

SEQ ID NO: 64601 - DNA, 19 bp, Homo sapiens
  siRNA target sequence for MKRN2 (NM_014160.3,1182-1200).
gtgcggctctgggatttca

SEQ ID NO: 64602 - DNA, 19 bp, Homo sapiens
  siRNA target sequence for MKRN2 (NM_014160.3,1220-1238).
gcatgtccccaacaatgaa

SEQ ID NO: 64603 - DNA, 19 bp, Homo sapiens
  siRNA target sequence for MKRN3 (NM_005664.1,825-843).
gtgggttgcggttttgcta

SEQ ID NO: 64604 - DNA, 19 bp, Homo sapiens
  siRNA target sequence for MKRN3 (NM_005664.1,827-845).
gggttgcggttttgctatt

SEQ ID NO: 64605 - DNA, 19 bp, Homo sapiens
  siRNA target sequence for MKRN3 (NM_005664.1,828-846).
ggttgcggttttgctatta

SEQ ID NO: 64606 - DNA, 19 bp, Homo sapiens
  siRNA target sequence for MKRN3 (NM_005664.1,832-850).
gcggttttgctattatgct

SEQ ID NO: 64607 - DNA, 19 bp, Homo sapiens
  siRNA target sequence for MKRN3 (NM_005664.1,833-851).
cggttttgctattatgctt

SEQ ID NO: 64608 - DNA, 19 bp, Homo sapiens
  siRNA target sequence for MKRN3 (NM_005664.1,869-887).
cgtggggagagctgtatgt

SEQ ID NO: 64609 - DNA, 19 bp, Homo sapiens
  siRNA target sequence for MKRN3 (NM_005664.1,886-904).
gtacctccatggagacata

SEQ ID NO: 64610 - DNA, 19 bp, Homo sapiens
  siRNA target sequence for MKRN3 (NM_005664.1,1092-1110).
gctttggcattctttccaa

SEQ ID NO: 64611 - DNA, 19 bp, Homo sapiens
  siRNA target sequence for MKRN3 (NM_005664.1,1107-1125).
ccaattgcaaccattcctt

SEQ ID NO: 64612 - DNA, 19 bp, Homo sapiens
  siRNA target sequence for MKRN3 (NM_005664.1,1113-1131).
gcaaccattccttctgtat

SEQ ID NO: 64613 - DNA, 19 bp, Homo sapiens
  siRNA target sequence for MKRN3 (NM_005664.1,1356-1374).
gcttttacaagcatgaata

SEQ ID NO: 64614 - DNA, 19 bp, Homo sapiens
  siRNA target sequence for MKRN3 (NM_005664.1,1425-1443).
gcgcatactggcatcaact

SEQ ID NO: 64615 - DNA, 19 bp, Homo sapiens
  siRNA target sequence for MKRN3 (NM_005664.1,1426-1444).
cgcatactggcatcaactt

SEQ ID NO: 64616 - DNA, 19 bp, Homo sapiens
  siRNA target sequence for MKRN3 (NM_005664.1,1478-1496).
ctctataaaagcattaaga

SEQ ID NO: 64617 - DNA, 19 bp, Homo sapiens
  siRNA target sequence for MKRN3 (NM_005664.1,1517-1535).
ctggccagtctgttgttta

SEQ ID NO: 64618 - DNA, 19 bp, Homo sapiens
  siRNA target sequence for MKRN3 (NM_005664.1,1528-1546).
gttgtttaagcggtttctt

SEQ ID NO: 64619 - DNA, 19 bp, Homo sapiens
  siRNA target sequence for MKRN3 (NM_005664.1,1531-1549).
gtttaagcggtttctttca

SEQ ID NO: 64620 - DNA, 19 bp, Homo sapiens
  siRNA target sequence for MKRN3 (NM_005664.1,1603-1621).
gctggaagaatatttcaat

SEQ ID NO: 64621 - DNA, 19 bp, Homo sapiens
  siRNA target sequence for MNAB (NM_018835.1,274-292).
ccttgaagctggtgttact

SEQ ID NO: 64622 - DNA, 19 bp, Homo sapiens
  siRNA target sequence for MNAB (NM_018835.1,284-302).
ggtgttactggcattagaa

SEQ ID NO: 64623 - DNA, 19 bp, Homo sapiens
  siRNA target sequence for MNAB (NM_018835.1,313-331).
ccctctcaaggaaagttct

SEQ ID NO: 64624 - DNA, 19 bp, Homo sapiens
  siRNA target sequence for MNAB (NM_018835.1,322-340).
ggaaagttctggtactttt

SEQ ID NO: 64625 - DNA, 19 bp, Homo sapiens
  siRNA target sequence for MNAB (NM_018835.1,350-368).
gagactagaaccaagattt

SEQ ID NO: 64626 - DNA, 19 bp, Homo sapiens
  siRNA target sequence for MNAB (NM_018835.1,394-412).
gtcatgttgtgcaactact

SEQ ID NO: 64627 - DNA, 19 bp, Homo sapiens
  siRNA target sequence for MNAB (NM_018835.1,411-429).
ctgtatcgagcttcttgtt

SEQ ID NO: 64628 - DNA, 19 bp, Homo sapiens
  siRNA target sequence for MNAB (NM_018835.1,424-442).
cttgttttaaggttaccaa

SEQ ID NO: 64629 - DNA, 19 bp, Homo sapiens
  siRNA target sequence for MNAB (NM_018835.1,434-452).
ggttaccaaaagagatgaa

SEQ ID NO: 64630 - DNA, 19 bp, Homo sapiens
  siRNA target sequence for MNAB (NM_018835.1,476-494).
ggaggaatttcggagttat

SEQ ID NO: 64631 - DNA, 19 bp, Homo sapiens
  siRNA target sequence for MNAB (NM_018835.1,499-517).
cattacgcagagaacatga

SEQ ID NO: 64632 - DNA, 19 bp, Homo sapiens
  siRNA target sequence for MNAB (NM_018835.1,516-534).
gatgcccaaattgttcata

SEQ ID NO: 64633 - DNA, 19 bp, Homo sapiens
  siRNA target sequence for MNAB (NM_018835.1,620-638).
gtctatcattgataagcta

SEQ ID NO: 64634 - DNA, 19 bp, Homo sapiens
  siRNA target sequence for MNAB (NM_018835.1,643-661).
ctccagagtcatttgcaaa

SEQ ID NO: 64635 - DNA, 19 bp, Homo sapiens
  siRNA target sequence for MNAB (NM_018835.1,658-676).
caaagagtgtccaggaatt

SEQ ID NO: 64636 - DNA, 19 bp, Homo sapiens
  siRNA target sequence for MNAB (NM_018835.1,699-717).
ggtgacccagctaacttaa

SEQ ID NO: 64637 - DNA, 19 bp, Homo sapiens
  siRNA target sequence for MNAB (NM_018835.1,700-718).
gtgacccagctaacttaaa

SEQ ID NO: 64638 - DNA, 19 bp, Homo sapiens
  siRNA target sequence for MNAB (NM_018835.1,702-720).
gacccagctaacttaaata

SEQ ID NO: 64639 - DNA, 19 bp, Homo sapiens
  siRNA target sequence for MNAB (NM_018835.1,706-724).
cagctaacttaaatagact

SEQ ID NO: 64640 - DNA, 19 bp, Homo sapiens
  siRNA target sequence for MNAB (NM_018835.1,721-739).
gactgaggcctcatttaga

SEQ ID NO: 64641 - DNA, 19 bp, Homo sapiens
  siRNA target sequence for MNAB (NM_018835.1,794-812).
gctggaaaatgcaatggta

SEQ ID NO: 64642 - DNA, 19 bp, Homo sapiens
  siRNA target sequence for MNAB (NM_018835.1,809-827).
ggtagctgttaaaacagta

SEQ ID NO: 64643 - DNA, 19 bp, Homo sapiens
  siRNA target sequence for MNAB (NM_018835.1,814-832).
ctgttaaaacagtagttca

SEQ ID NO: 64644 - DNA, 19 bp, Homo sapiens
  siRNA target sequence for MNAB (NM_018835.1,836-854).
ccttgtggacttcatacaa

SEQ ID NO: 64645 - DNA, 19 bp, Homo sapiens
  siRNA target sequence for MNAB (NM_018835.1,840-858).
gtggacttcatacaaaatt

SEQ ID NO: 64646 - DNA, 19 bp, Homo sapiens
  siRNA target sequence for MNAB (NM_018835.1,848-866).
catacaaaattatagtaga

SEQ ID NO: 64647 - DNA, 19 bp, Homo sapiens
  siRNA target sequence for MNAB (NM_018835.1,913-931).
ctagcatgtgccgagattt

SEQ ID NO: 64648 - DNA, 19 bp, Homo sapiens
  siRNA target sequence for MNAB (NM_018835.1,946-964).
gttgtccacgaggaacaaa

SEQ ID NO: 64649 - DNA, 19 bp, Homo sapiens
  siRNA target sequence for MNAB (NM_018835.1,951-969).
ccacgaggaacaaattgta

SEQ ID NO: 64650 - DNA, 19 bp, Homo sapiens
  siRNA target sequence for MNAB (NM_018835.1,954-972).
cgaggaacaaattgtacat

SEQ ID NO: 64651 - DNA, 19 bp, Homo sapiens
  siRNA target sequence for MNAB (NM_018835.1,993-1011).
cttgaaaagtatcgattaa

SEQ ID NO: 64652 - DNA, 19 bp, Homo sapiens
  siRNA target sequence for MNAB (NM_018835.1,1001-1019).
gtatcgattaaggaacaaa

SEQ ID NO: 64653 - DNA, 19 bp, Homo sapiens
  siRNA target sequence for MNAB (NM_018835.1,1022-1040).
gatcaatgccactgtaaga

SEQ ID NO: 64654 - DNA, 19 bp, Homo sapiens
  siRNA target sequence for MNAB (NM_018835.1,1039-1057).
gaacgtttcctcttctaaa

SEQ ID NO: 64655 - DNA, 19 bp, Homo sapiens
  siRNA target sequence for MNAB (NM_018835.1,1084-1102).
caaccacagccggaaatgt

SEQ ID NO: 64656 - DNA, 19 bp, Homo sapiens
  siRNA target sequence for MNAB (NM_018835.1,1087-1105).
ccacagccggaaatgtcat

SEQ ID NO: 64657 - DNA, 19 bp, Homo sapiens
  siRNA target sequence for MNAB (NM_018835.1,1088-1106).
cacagccggaaatgtcatt

SEQ ID NO: 64658 - DNA, 19 bp, Homo sapiens
  siRNA target sequence for MNAB (NM_018835.1,1110-1128).
gtcataggaagtactgaaa

SEQ ID NO: 64659 - DNA, 19 bp, Homo sapiens
  siRNA target sequence for MNAB (NM_018835.1,1190-1208).
gctaatctcacgtagtact

SEQ ID NO: 64660 - DNA, 19 bp, Homo sapiens
  siRNA target sequence for MNAB (NM_018835.1,1326-1344).
cccaagactcctgtaagta

SEQ ID NO: 64661 - DNA, 19 bp, Homo sapiens
  siRNA target sequence for MNAB (NM_018835.1,1327-1345).
ccaagactcctgtaagtaa

SEQ ID NO: 64662 - DNA, 19 bp, Homo sapiens
  siRNA target sequence for MNAB (NM_018835.1,1328-1346).
caagactcctgtaagtaat

SEQ ID NO: 64663 - DNA, 19 bp, Homo sapiens
  siRNA target sequence for MNAB (NM_018835.1,1331-1349).
gactcctgtaagtaatgta

SEQ ID NO: 64664 - DNA, 19 bp, Homo sapiens
  siRNA target sequence for MNAB (NM_018835.1,1415-1433).
cccatttctaactagagta

SEQ ID NO: 64665 - DNA, 19 bp, Homo sapiens
  siRNA target sequence for MNAB (NM_018835.1,1443-1461).
cctccgcattctgaaaaca

SEQ ID NO: 64666 - DNA, 19 bp, Homo sapiens
  siRNA target sequence for MNAB (NM_018835.1,1484-1502).
gactcagataccctttgaa

SEQ ID NO: 64667 - DNA, 19 bp, Homo sapiens
  siRNA target sequence for MNAB (NM_018835.1,1514-1532).
cccacagacaggatactat

SEQ ID NO: 64668 - DNA, 19 bp, Homo sapiens
  siRNA target sequence for MNAB (NM_018835.1,1578-1596).
cgctttgtgaggtccaata

SEQ ID NO: 64669 - DNA, 19 bp, Homo sapiens
  siRNA target sequence for MNAB (NM_018835.1,1640-1658).
cgatcattacagtacattt

SEQ ID NO: 64670 - DNA, 19 bp, Homo sapiens
  siRNA target sequence for MNAB (NM_018835.1,1660-1678).
cccctcgagatcgaatgaa

SEQ ID NO: 64671 - DNA, 19 bp, Homo sapiens
  siRNA target sequence for MNAB (NM_018835.1,1661-1679).
ccctcgagatcgaatgaat

SEQ ID NO: 64672 - DNA, 19 bp, Homo sapiens
  siRNA target sequence for MNAB (NM_018835.1,1665-1683).
cgagatcgaatgaattctt

SEQ ID NO: 64673 - DNA, 19 bp, Homo sapiens
  siRNA target sequence for MNAB (NM_018835.1,1790-1808).
gtaccaacgagatgacatt

SEQ ID NO: 64674 - DNA, 19 bp, Homo sapiens
  siRNA target sequence for MNAB (NM_018835.1,1797-1815).
cgagatgacattattagaa

SEQ ID NO: 64675 - DNA, 19 bp, Homo sapiens
  siRNA target sequence for MNAB (NM_018835.1,1852-1870).
ctgtctatcagacatcttt

SEQ ID NO: 64676 - DNA, 19 bp, Homo sapiens
  siRNA target sequence for MNAB (NM_018835.1,1867-1885).
ctttgcgggaaagatataa

SEQ ID NO: 64677 - DNA, 19 bp, Homo sapiens
  siRNA target sequence for MNAB (NM_018835.1,1886-1904).
ctcattagatggatattat

SEQ ID NO: 64678 - DNA, 19 bp, Homo sapiens
  siRNA target sequence for MNAB (NM_018835.1,2101-2119).
ctctgttcagtgtagactt

SEQ ID NO: 64679 - DNA, 19 bp, Homo sapiens
  siRNA target sequence for MNAB (NM_018835.1,2115-2133).
gactttcgtgcggatttct

SEQ ID NO: 64680 - DNA, 19 bp, Homo sapiens
  siRNA target sequence for MNAB (NM_018835.1,2117-2135).
ctttcgtgcggatttctca

SEQ ID NO: 64681 - DNA, 19 bp, Homo sapiens
  siRNA target sequence for MNAB (NM_018835.1,2146-2164).
gtggtacaaaatttgaaga

SEQ ID NO: 64682 - DNA, 19 bp, Homo sapiens
  siRNA target sequence for MNAB (NM_018835.1,2201-2219).
caccataggctcctgtata

SEQ ID NO: 64683 - DNA, 19 bp, Homo sapiens
  siRNA target sequence for MNAB (NM_018835.1,2203-2221).
ccataggctcctgtataaa

SEQ ID NO: 64684 - DNA, 19 bp, Homo sapiens
  siRNA target sequence for MNAB (NM_018835.1,2204-2222).
cataggctcctgtataaat

SEQ ID NO: 64685 - DNA, 19 bp, Homo sapiens
  siRNA target sequence for MNAB (NM_018835.1,2260-2278).
caaatgctgtgttaatgga

SEQ ID NO: 64686 - DNA, 19 bp, Homo sapiens
  siRNA target sequence for MNAB (NM_018835.1,2391-2409).
ggtgcgatttccagatctt

SEQ ID NO: 64687 - DNA, 19 bp, Homo sapiens
  siRNA target sequence for MNAB (NM_018835.1,2476-2494).
ccatcagtgtatcagatta

SEQ ID NO: 64688 - DNA, 19 bp, Homo sapiens
  siRNA target sequence for MNAB (NM_018835.1,2538-2556).
ggcaacgaggccacatcat

SEQ ID NO: 64689 - DNA, 19 bp, Homo sapiens
  siRNA target sequence for MNAB (NM_018835.1,2540-2558).
caacgaggccacatcatca

SEQ ID NO: 64690 - DNA, 19 bp, Homo sapiens
  siRNA target sequence for MNAB (NM_018835.1,2549-2567).
cacatcatcagcacactat

SEQ ID NO: 64691 - DNA, 19 bp, Homo sapiens
  siRNA target sequence for MNAB (NM_018835.1,2551-2569).
catcatcagcacactatgt

SEQ ID NO: 64692 - DNA, 19 bp, Homo sapiens
  siRNA target sequence for MNAB (NM_018835.1,2554-2572).
catcagcacactatgttga

SEQ ID NO: 64693 - DNA, 19 bp, Homo sapiens
  siRNA target sequence for MNAB (NM_018835.1,2576-2594).
ggacagattcattgttact

SEQ ID NO: 64694 - DNA, 19 bp, Homo sapiens
  siRNA target sequence for MNAB (NM_018835.1,2585-2603).
cattgttactgatttatct

SEQ ID NO: 64695 - DNA, 19 bp, Homo sapiens
  siRNA target sequence for MNAB (NM_018835.1,2698-2716).
ctttggccatgcaacagaa

SEQ ID NO: 64696 - DNA, 19 bp, Homo sapiens
  siRNA target sequence for MNAB (NM_018835.1,2736-2754).
ggccgtcaccttaccttaa

SEQ ID NO: 64697 - DNA, 19 bp, Homo sapiens
  siRNA target sequence for MNAB (NM_018835.1,2737-2755).
gccgtcaccttaccttaaa

SEQ ID NO: 64698 - DNA, 19 bp, Homo sapiens
  siRNA target sequence for MNAB (NM_018835.1,2744-2762).
ccttaccttaaacctttta

SEQ ID NO: 64699 - DNA, 19 bp, Homo sapiens
  siRNA target sequence for MNAB (NM_018835.1,2765-2783).
caaggaaattgaactaaga

SEQ ID NO: 64700 - DNA, 19 bp, Homo sapiens
  siRNA target sequence for MNAB (NM_018835.1,2807-2825).
cctttcggcttcatgctta

SEQ ID NO: 64701 - DNA, 19 bp, Homo sapiens
  siRNA target sequence for MNAB (NM_018835.1,2812-2830).
cggcttcatgcttaatgta

SEQ ID NO: 64702 - DNA, 19 bp, Homo sapiens
  siRNA target sequence for MNAB (NM_018835.1,2813-2831).
ggcttcatgcttaatgtat

SEQ ID NO: 64703 - DNA, 19 bp, Homo sapiens
  siRNA target sequence for MNAB (NM_018835.1,2841-2859).
gctgctgcatcttggttat

SEQ ID NO: 64704 - DNA, 19 bp, Homo sapiens
  siRNA target sequence for MNAB (NM_018835.1,2848-2866).
catcttggttataccatta

SEQ ID NO: 64705 - DNA, 19 bp, Homo sapiens
  siRNA target sequence for MSI2 (NM_138962.2,222-240).
cagcacgaccccggtaaaa

SEQ ID NO: 64706 - DNA, 19 bp, Homo sapiens
  siRNA target sequence for MSI2 (NM_138962.2,225-243).
cacgaccccggtaaaatgt

SEQ ID NO: 64707 - DNA, 19 bp, Homo sapiens
  siRNA target sequence for MSI2 (NM_138962.2,227-245).
cgaccccggtaaaatgttt

SEQ ID NO: 64708 - DNA, 19 bp, Homo sapiens
  siRNA target sequence for MSI2 (NM_138962.2,228-246).
gaccccggtaaaatgttta

SEQ ID NO: 64709 - DNA, 19 bp, Homo sapiens
  siRNA target sequence for MSI2 (NM_138962.2,271-289).
caccagatagccttagaga

SEQ ID NO: 64710 - DNA, 19 bp, Homo sapiens
  siRNA target sequence for MSI2 (NM_138962.2,276-294).
gatagccttagagactatt

SEQ ID NO: 64711 - DNA, 19 bp, Homo sapiens
  siRNA target sequence for MSI2 (NM_138962.2,332-350).
gagagatcccactacgaaa

SEQ ID NO: 64712 - DNA, 19 bp, Homo sapiens
  siRNA target sequence for MSI2 (NM_138962.2,1012-1030).
gacctgtcgccgatctcta

SEQ ID NO: 64713 - DNA, 19 bp, Homo sapiens
  siRNA target sequence for MSI2 (NM_138962.2,1052-1070).
cggagtggggaattacata

SEQ ID NO: 64714 - DNA, 19 bp, Homo sapiens
  siRNA target sequence for MSI2 (NM_138962.2,1111-1129).
gcatagctggacctttgat

SEQ ID NO: 64715 - DNA, 19 bp, Homo sapiens
  siRNA target sequence for MSI2 (NM_138962.2,1112-1130).
catagctggacctttgatt

SEQ ID NO: 64716 - DNA, 19 bp, Homo sapiens
  siRNA target sequence for MSI2 (NM_138962.2,1127-1145).
gattgcaacggcctttaca

SEQ ID NO: 64717 - DNA, 19 bp, Homo sapiens
  siRNA target sequence for MSI2 (NM_138962.2,1135-1153).
cggcctttacaaatggata

SEQ ID NO: 64718 - DNA, 19 bp, Homo sapiens
  siRNA target sequence for MYEOV (NM_138768.1,796-814).
gggactcgttgctcatgtt

SEQ ID NO: 64719 - DNA, 19 bp, Homo sapiens
  siRNA target sequence for MYEOV (NM_138768.1,798-816).
gactcgttgctcatgttca

SEQ ID NO: 64720 - DNA, 19 bp, Homo sapiens
  siRNA target sequence for MYEOV (NM_138768.1,1197-1215).
catgggctctccatggaaa

SEQ ID NO: 64721 - DNA, 19 bp, Homo sapiens
  siRNA target sequence for MYEOV (NM_138768.1,1201-1219).
ggctctccatggaaattat

SEQ ID NO: 64722 - DNA, 19 bp, Homo sapiens
  siRNA target sequence for MYEOV (NM_138768.1,1306-1324).
cgagctgccctgactatga

SEQ ID NO: 64723 - DNA, 19 bp, Homo sapiens
  siRNA target sequence for NARS (NM_004539.2,147-165).
catttaaaacaggtctaaa

SEQ ID NO: 64724 - DNA, 19 bp, Homo sapiens
  siRNA target sequence for NARS (NM_004539.2,158-176).
ggtctaaaggctttgatga

SEQ ID NO: 64725 - DNA, 19 bp, Homo sapiens
  siRNA target sequence for NARS (NM_004539.2,182-200).
gggaaagaaccatttccta

SEQ ID NO: 64726 - DNA, 19 bp, Homo sapiens
  siRNA target sequence for NARS (NM_004539.2,188-206).
gaaccatttcctaccattt

SEQ ID NO: 64727 - DNA, 19 bp, Homo sapiens
  siRNA target sequence for NARS (NM_004539.2,197-215).
cctaccatttacgtagatt

SEQ ID NO: 64728 - DNA, 19 bp, Homo sapiens
  siRNA target sequence for NARS (NM_004539.2,201-219).
ccatttacgtagattcaca

SEQ ID NO: 64729 - DNA, 19 bp, Homo sapiens
  siRNA target sequence for NARS (NM_004539.2,202-220).
catttacgtagattcacaa

SEQ ID NO: 64730 - DNA, 19 bp, Homo sapiens
  siRNA target sequence for NARS (NM_004539.2,230-248).
gagaggtggaatgttattt

SEQ ID NO: 64731 - DNA, 19 bp, Homo sapiens
  siRNA target sequence for NARS (NM_004539.2,234-252).
ggtggaatgttatttctaa

SEQ ID NO: 64732 - DNA, 19 bp, Homo sapiens
  siRNA target sequence for NARS (NM_004539.2,325-343).
ggcagaagatagtttacga

SEQ ID NO: 64733 - DNA, 19 bp, Homo sapiens
  siRNA target sequence for NARS (NM_004539.2,326-344).
gcagaagatagtttacgaa

SEQ ID NO: 64734 - DNA, 19 bp, Homo sapiens
  siRNA target sequence for NARS (NM_004539.2,332-350).
gatagtttacgaagagaaa

SEQ ID NO: 64735 - DNA, 19 bp, Homo sapiens
  siRNA target sequence for NARS (NM_004539.2,418-436).
gaagattggtgcgttagaa

SEQ ID NO: 64736 - DNA, 19 bp, Homo sapiens
  siRNA target sequence for NARS (NM_004539.2,425-443).
ggtgcgttagaaggatata

SEQ ID NO: 64737 - DNA, 19 bp, Homo sapiens
  siRNA target sequence for NARS (NM_004539.2,438-456).
gatatagaggccaaagagt

SEQ ID NO: 64738 - DNA, 19 bp, Homo sapiens
  siRNA target sequence for NARS (NM_004539.2,484-502).
gcgcaggcaaggaaagaat

SEQ ID NO: 64739 - DNA, 19 bp, Homo sapiens
  siRNA target sequence for NARS (NM_004539.2,485-503).
cgcaggcaaggaaagaatt

SEQ ID NO: 64740 - DNA, 19 bp, Homo sapiens
  siRNA target sequence for NARS (NM_004539.2,520-538).
gcgagatggtacaggttat

SEQ ID NO: 64741 - DNA, 19 bp, Homo sapiens
  siRNA target sequence for NARS (NM_004539.2,522-540).
gagatggtacaggttatct

SEQ ID NO: 64742 - DNA, 19 bp, Homo sapiens
  siRNA target sequence for NARS (NM_004539.2,546-564).
gtgtcttggcggatgagtt

SEQ ID NO: 64743 - DNA, 19 bp, Homo sapiens
  siRNA target sequence for NARS (NM_004539.2,562-580).
gttgtgtcagtgctacaat

SEQ ID NO: 64744 - DNA, 19 bp, Homo sapiens
  siRNA target sequence for NARS (NM_004539.2,826-844).
ggtcaccaggtgctttaga

SEQ ID NO: 64745 - DNA, 19 bp, Homo sapiens
  siRNA target sequence for NARS (NM_004539.2,829-847).
caccaggtgctttagagat

SEQ ID NO: 64746 - DNA, 19 bp, Homo sapiens
  siRNA target sequence for NARS (NM_004539.2,834-852).
ggtgctttagagatcactt

SEQ ID NO: 64747 - DNA, 19 bp, Homo sapiens
  siRNA target sequence for NARS (NM_004539.2,862-880).
ggggtactatgaagttact

SEQ ID NO: 64748 - DNA, 19 bp, Homo sapiens
  siRNA target sequence for NARS (NM_004539.2,885-903).
caacattagtgcaaacaca

SEQ ID NO: 64749 - DNA, 19 bp, Homo sapiens
  siRNA target sequence for NARS (NM_004539.2,921-939).
cactcttcaagcttgacta

SEQ ID NO: 64750 - DNA, 19 bp, Homo sapiens
  siRNA target sequence for NARS (NM_004539.2,923-941).
ctcttcaagcttgactatt

SEQ ID NO: 64751 - DNA, 19 bp, Homo sapiens
  siRNA target sequence for NARS (NM_004539.2,946-964).
ggaagaggcatttttgact

SEQ ID NO: 64752 - DNA, 19 bp, Homo sapiens
  siRNA target sequence for NARS (NM_004539.2,965-983).
caatcctctcagttgtact

SEQ ID NO: 64753 - DNA, 19 bp, Homo sapiens
  siRNA target sequence for NARS (NM_004539.2,1232-1250).
cctttcaaacggatgaact

SEQ ID NO: 64754 - DNA, 19 bp, Homo sapiens
  siRNA target sequence for NARS (NM_004539.2,1233-1251).
ctttcaaacggatgaacta

SEQ ID NO: 64755 - DNA, 19 bp, Homo sapiens
  siRNA target sequence for NARS (NM_004539.2,1249-1267).
ctattcagatgctatcgtt

SEQ ID NO: 64756 - DNA, 19 bp, Homo sapiens
  siRNA target sequence for NARS (NM_004539.2,1264-1282).
cgtttggctaaaagaacat

SEQ ID NO: 64757 - DNA, 19 bp, Homo sapiens
  siRNA target sequence for NARS (NM_004539.2,1349-1367).
ctgatgacagacaccatta

SEQ ID NO: 64758 - DNA, 19 bp, Homo sapiens
  siRNA target sequence for NARS (NM_004539.2,1435-1453).
ggattcccgtcttactgaa

SEQ ID NO: 64759 - DNA, 19 bp, Homo sapiens
  siRNA target sequence for NARS (NM_004539.2,1436-1454).
gattcccgtcttactgaat

SEQ ID NO: 64760 - DNA, 19 bp, Homo sapiens
  siRNA target sequence for NARS (NM_004539.2,1575-1593).
ggtatacggatcagagaaa

SEQ ID NO: 64761 - DNA, 19 bp, Homo sapiens
  siRNA target sequence for NARS (NM_004539.2,1576-1594).
gtatacggatcagagaaaa

SEQ ID NO: 64762 - DNA, 19 bp, Homo sapiens
  siRNA target sequence for NARS (NM_004539.2,1588-1606).
gagaaaatacggtacatgt

SEQ ID NO: 64763 - DNA, 19 bp, Homo sapiens
  siRNA target sequence for NARS (NM_004539.2,1627-1645).
gggcttggaacgattctta

SEQ ID NO: 64764 - DNA, 19 bp, Homo sapiens
  siRNA target sequence for NARS (NM_004539.2,1628-1646).
ggcttggaacgattcttaa

SEQ ID NO: 64765 - DNA, 19 bp, Homo sapiens
  siRNA target sequence for NARS (NM_004539.2,1647-1665).
cgtggattctgaataggta

SEQ ID NO: 64766 - DNA, 19 bp, Homo sapiens
  siRNA target sequence for NARS (NM_004539.2,1648-1666).
gtggattctgaataggtat

SEQ ID NO: 64767 - DNA, 19 bp, Homo sapiens
  siRNA target sequence for NARS (NM_004539.2,1683-1701).
gcttataccctcgatttgt

SEQ ID NO: 64768 - DNA, 19 bp, Homo sapiens
  siRNA target sequence for NPM2 (NM_182795.1,257-275).
ccagtagcacggaggaaaa

SEQ ID NO: 64769 - DNA, 19 bp, Homo sapiens
  siRNA target sequence for NPM2 (NM_182795.1,369-387).
gctgttgcttcatacgatt

SEQ ID NO: 64770 - DNA, 19 bp, Homo sapiens
  siRNA target sequence for NPM2 (NM_182795.1,370-388).
ctgttgcttcatacgattt

SEQ ID NO: 64771 - DNA, 19 bp, Homo sapiens
  siRNA target sequence for NPM2 (NM_182795.1,585-603).
cagtggccaggaacgttat

SEQ ID NO: 64772 - DNA, 19 bp, Homo sapiens
  siRNA target sequence for NPM2 (NM_182795.1,718-736).
cctgtcaaacaagtcaaaa

SEQ ID NO: 64773 - DNA, 19 bp, Homo sapiens
  siRNA target sequence for NPM2 (NM_182795.1,756-774).
ggcgagcgtggctaagaaa

SEQ ID NO: 64774 - DNA, 19 bp, Homo sapiens
  siRNA target sequence for NPM2 (NM_182795.1,758-776).
cgagcgtggctaagaaaaa

SEQ ID NO: 64775 - DNA, 19 bp, Homo sapiens
  siRNA target sequence for NPM2 (NM_182795.1,759-777).
gagcgtggctaagaaaaaa

SEQ ID NO: 64776 - DNA, 19 bp, Homo sapiens
  siRNA target sequence for NPM3 (NM_006993.1,30-48).
gctgccttagcgtttttga

SEQ ID NO: 64777 - DNA, 19 bp, Homo sapiens
  siRNA target sequence for NPM3 (NM_006993.1,103-121).
cggtcactatggacagttt

SEQ ID NO: 64778 - DNA, 19 bp, Homo sapiens
  siRNA target sequence for NPM3 (NM_006993.1,105-123).
gtcactatggacagttttt

SEQ ID NO: 64779 - DNA, 19 bp, Homo sapiens
  siRNA target sequence for NPM3 (NM_006993.1,154-172).
gctccttcacctttaaggt

SEQ ID NO: 64780 - DNA, 19 bp, Homo sapiens
  siRNA target sequence for NPM3 (NM_006993.1,232-250).
gagccaaagacgagtgtaa

SEQ ID NO: 64781 - DNA, 19 bp, Homo sapiens
  siRNA target sequence for NPM3 (NM_006993.1,235-253).
ccaaagacgagtgtaatgt

SEQ ID NO: 64782 - DNA, 19 bp, Homo sapiens
  siRNA target sequence for NPM3 (NM_006993.1,418-436).
ggcaccagattgttacgat

SEQ ID NO: 64783 - DNA, 19 bp, Homo sapiens
  siRNA target sequence for NUPL2 (NM_007342.1,330-348).
gcagccttcaggtaataat

SEQ ID NO: 64784 - DNA, 19 bp, Homo sapiens
  siRNA target sequence for NUPL2 (NM_007342.1,333-351).
gccttcaggtaataataga

SEQ ID NO: 64785 - DNA, 19 bp, Homo sapiens
  siRNA target sequence for NUPL2 (NM_007342.1,352-370).
cgtggatggaatacaacta

SEQ ID NO: 64786 - DNA, 19 bp, Homo sapiens
  siRNA target sequence for NUPL2 (NM_007342.1,373-391).
cagagatattccaatgtca

SEQ ID NO: 64787 - DNA, 19 bp, Homo sapiens
  siRNA target sequence for NUPL2 (NM_007342.1,519-537).
cccatttgcttcacttagt

SEQ ID NO: 64788 - DNA, 19 bp, Homo sapiens
  siRNA target sequence for NUPL2 (NM_007342.1,695-713).
ggcttgaataccataactt

SEQ ID NO: 64789 - DNA, 19 bp, Homo sapiens
  siRNA target sequence for NUPL2 (NM_007342.1,714-732).
cttaaccagcaataactta

SEQ ID NO: 64790 - DNA, 19 bp, Homo sapiens
  siRNA target sequence for NUPL2 (NM_007342.1,722-740).
gcaataacttacagagtta

SEQ ID NO: 64791 - DNA, 19 bp, Homo sapiens
  siRNA target sequence for NUPL2 (NM_007342.1,723-741).
caataacttacagagttat

SEQ ID NO: 64792 - DNA, 19 bp, Homo sapiens
  siRNA target sequence for NUPL2 (NM_007342.1,749-767).
ctgtccaacgtttaataaa

SEQ ID NO: 64793 - DNA, 19 bp, Homo sapiens
  siRNA target sequence for NUPL2 (NM_007342.1,753-771).
ccaacgtttaataaatcaa

SEQ ID NO: 64794 - DNA, 19 bp, Homo sapiens
  siRNA target sequence for NUPL2 (NM_007342.1,754-772).
caacgtttaataaatcaat

SEQ ID NO: 64795 - DNA, 19 bp, Homo sapiens
  siRNA target sequence for NUPL2 (NM_007342.1,828-846).
gctctctgatgtaaaggat

SEQ ID NO: 64796 - DNA, 19 bp, Homo sapiens
  siRNA target sequence for NUPL2 (NM_007342.1,887-905).
gtcaagcagcaacatttat

SEQ ID NO: 64797 - DNA, 19 bp, Homo sapiens
  siRNA target sequence for NUPL2 (NM_007342.1,940-958).
gataatgctcagaacttta

SEQ ID NO: 64798 - DNA, 19 bp, Homo sapiens
  siRNA target sequence for NUPL2 (NM_007342.1,946-964).
gctcagaactttagtttta

SEQ ID NO: 64799 - DNA, 19 bp, Homo sapiens
  siRNA target sequence for NUPL2 (NM_007342.1,1255-1273).
ggtagtccgggctcacatt

SEQ ID NO: 64800 - DNA, 19 bp, Homo sapiens
  siRNA target sequence for NUPL2 (NM_007342.1,1259-1277).
gtccgggctcacattctca

SEQ ID NO: 64801 - DNA, 19 bp, Homo sapiens
  siRNA target sequence for NUPL2 (NM_007342.1,1270-1288).
cattctcacactgcttttt

SEQ ID NO: 64802 - DNA, 19 bp, Homo sapiens
  siRNA target sequence for NUPL2 (NM_007342.1,1352-1370).
gcatcattgcaacagataa

SEQ ID NO: 64803 - DNA, 19 bp, Homo sapiens
  siRNA target sequence for NUPL2 (NM_007342.1,1353-1371).
catcattgcaacagataat

SEQ ID NO: 64804 - DNA, 19 bp, Homo sapiens
  siRNA target sequence for NUPL2 (NM_007342.1,1360-1378).
gcaacagataatgtgttat

SEQ ID NO: 64805 - DNA, 19 bp, Homo sapiens
  siRNA target sequence for NUPL2 (NM_007342.1,1386-1404).
cagagataaactaacagta

SEQ ID NO: 64806 - DNA, 19 bp, Homo sapiens
  siRNA target sequence for PCTAIRE2BP (NM_014290.1,261-279).
gctgttctgcagtctcata

SEQ ID NO: 64807 - DNA, 19 bp, Homo sapiens
  siRNA target sequence for PCTAIRE2BP (NM_014290.1,264-282).
gttctgcagtctcataaga

SEQ ID NO: 64808 - DNA, 19 bp, Homo sapiens
  siRNA target sequence for PCTAIRE2BP (NM_014290.1,343-361).
ccttcaaacagctaggttt

SEQ ID NO: 64809 - DNA, 19 bp, Homo sapiens
  siRNA target sequence for PCTAIRE2BP (NM_014290.1,353-371).
gctaggtttccctacacta

SEQ ID NO: 64810 - DNA, 19 bp, Homo sapiens
  siRNA target sequence for PCTAIRE2BP (NM_014290.1,402-420).
gtcaggatagagactagta

SEQ ID NO: 64811 - DNA, 19 bp, Homo sapiens
  siRNA target sequence for PCTAIRE2BP (NM_014290.1,404-422).
caggatagagactagtaga

SEQ ID NO: 64812 - DNA, 19 bp, Homo sapiens
  siRNA target sequence for PCTAIRE2BP (NM_014290.1,407-425).
gatagagactagtagatct

SEQ ID NO: 64813 - DNA, 19 bp, Homo sapiens
  siRNA target sequence for PCTAIRE2BP (NM_014290.1,486-504).
gctcgtcaaaggagttcta

SEQ ID NO: 64814 - DNA, 19 bp, Homo sapiens
  siRNA target sequence for PCTAIRE2BP (NM_014290.1,487-505).
ctcgtcaaaggagttctaa

SEQ ID NO: 64815 - DNA, 19 bp, Homo sapiens
  siRNA target sequence for PCTAIRE2BP (NM_014290.1,489-507).
cgtcaaaggagttctaaaa

SEQ ID NO: 64816 - DNA, 19 bp, Homo sapiens
  siRNA target sequence for PCTAIRE2BP (NM_014290.1,517-535).
ggcgtcaagttaattgtca

SEQ ID NO: 64817 - DNA, 19 bp, Homo sapiens
  siRNA target sequence for PCTAIRE2BP (NM_014290.1,554-572).
catgccattttttctagaa

SEQ ID NO: 64818 - DNA, 19 bp, Homo sapiens
  siRNA target sequence for PCTAIRE2BP (NM_014290.1,593-611).
cagacaaccaggatttgct

SEQ ID NO: 64819 - DNA, 19 bp, Homo sapiens
  siRNA target sequence for PCTAIRE2BP (NM_014290.1,622-640).
ctgttggcaaaaaacctaa

SEQ ID NO: 64820 - DNA, 19 bp, Homo sapiens
  siRNA target sequence for PCTAIRE2BP (NM_014290.1,648-666).
ccgttaagagacaaaggaa

SEQ ID NO: 64821 - DNA, 19 bp, Homo sapiens
  siRNA target sequence for PCTAIRE2BP (NM_014290.1,664-682).
gaaactctgttggagttaa

SEQ ID NO: 64822 - DNA, 19 bp, Homo sapiens
  siRNA target sequence for PCTAIRE2BP (NM_014290.1,879-897).
gttgaaaaacccaatgtca

SEQ ID NO: 64823 - DNA, 19 bp, Homo sapiens
  siRNA target sequence for PCTAIRE2BP (NM_014290.1,903-921).
cctgcctcttacacttata

SEQ ID NO: 64824 - DNA, 19 bp, Homo sapiens
  siRNA target sequence for PCTAIRE2BP (NM_014290.1,904-922).
ctgcctcttacacttataa

SEQ ID NO: 64825 - DNA, 19 bp, Homo sapiens
  siRNA target sequence for PCTAIRE2BP (NM_014290.1,942-960).
cgcataaaggaaatactaa

SEQ ID NO: 64826 - DNA, 19 bp, Homo sapiens
  siRNA target sequence for PCTAIRE2BP (NM_014290.1,966-984).
cataacaatggcatttgga

SEQ ID NO: 64827 - DNA, 19 bp, Homo sapiens
  siRNA target sequence for PCTAIRE2BP (NM_014290.1,971-989).
caatggcatttggatatct

SEQ ID NO: 64828 - DNA, 19 bp, Homo sapiens
  siRNA target sequence for PCTAIRE2BP (NM_014290.1,977-995).
catttggatatctaagctt

SEQ ID NO: 64829 - DNA, 19 bp, Homo sapiens
  siRNA target sequence for PCTAIRE2BP (NM_014290.1,1093-1111).
gcagtggtggccaagattt

SEQ ID NO: 64830 - DNA, 19 bp, Homo sapiens
  siRNA target sequence for PCTAIRE2BP (NM_014290.1,1094-1112).
cagtggtggccaagattta

SEQ ID NO: 64831 - DNA, 19 bp, Homo sapiens
  siRNA target sequence for PCTAIRE2BP (NM_014290.1,1096-1114).
gtggtggccaagatttact

SEQ ID NO: 64832 - DNA, 19 bp, Homo sapiens
  siRNA target sequence for PCTAIRE2BP (NM_014290.1,1185-1203).
ctacctggtcccaaacaaa

SEQ ID NO: 64833 - DNA, 19 bp, Homo sapiens
  siRNA target sequence for PCTAIRE2BP (NM_014290.1,1214-1232).
gaaagggtgtccaacagtt

SEQ ID NO: 64834 - DNA, 19 bp, Homo sapiens
  siRNA target sequence for PCTAIRE2BP (NM_014290.1,1230-1248).
gttatggcaggagacttta

SEQ ID NO: 64835 - DNA, 19 bp, Homo sapiens
  siRNA target sequence for PCTAIRE2BP (NM_014290.1,1300-1318).
gtgcacttccgaaagcatt

SEQ ID NO: 64836 - DNA, 19 bp, Homo sapiens
  siRNA target sequence for PCTAIRE2BP (NM_014290.1,1303-1321).
cacttccgaaagcatttga

SEQ ID NO: 64837 - DNA, 19 bp, Homo sapiens
  siRNA target sequence for PCTAIRE2BP (NM_014290.1,1343-1361).
ccctgaggatgccttaaaa

SEQ ID NO: 64838 - DNA, 19 bp, Homo sapiens
  siRNA target sequence for PCTAIRE2BP (NM_014290.1,1368-1386).
gcctcactttctgatgtat

SEQ ID NO: 64839 - DNA, 19 bp, Homo sapiens
  siRNA target sequence for PCTAIRE2BP (NM_014290.1,1413-1431).
ccccagaaggccattctct

SEQ ID NO: 64840 - DNA, 19 bp, Homo sapiens
  siRNA target sequence for PCTAIRE2BP (NM_014290.1,1415-1433).
ccagaaggccattctctat

SEQ ID NO: 64841 - DNA, 19 bp, Homo sapiens
  siRNA target sequence for PCTAIRE2BP (NM_014290.1,1423-1441).
ccattctctatgctaaact

SEQ ID NO: 64842 - DNA, 19 bp, Homo sapiens
  siRNA target sequence for PCTAIRE2BP (NM_014290.1,1443-1461).
ccattgcccactgacaaaa

SEQ ID NO: 64843 - DNA, 19 bp, Homo sapiens
  siRNA target sequence for PCTAIRE2BP (NM_014290.1,1444-1462).
cattgcccactgacaaaat

SEQ ID NO: 64844 - DNA, 19 bp, Homo sapiens
  siRNA target sequence for PCTAIRE2BP (NM_014290.1,1448-1466).
gcccactgacaaaatccaa

SEQ ID NO: 64845 - DNA, 19 bp, Homo sapiens
  siRNA target sequence for PCTAIRE2BP (NM_014290.1,1449-1467).
cccactgacaaaatccaaa

SEQ ID NO: 64846 - DNA, 19 bp, Homo sapiens
  siRNA target sequence for PCTAIRE2BP (NM_014290.1,1507-1525).
ctatggttgaacaagagta

SEQ ID NO: 64847 - DNA, 19 bp, Homo sapiens
  siRNA target sequence for PCTAIRE2BP (NM_014290.1,1555-1573).
gtgctaatacctttatgga

SEQ ID NO: 64848 - DNA, 19 bp, Homo sapiens
  siRNA target sequence for PCTAIRE2BP (NM_014290.1,1621-1639).
ctgtattggtggttgaact

SEQ ID NO: 64849 - DNA, 19 bp, Homo sapiens
  siRNA target sequence for PCTAIRE2BP (NM_014290.1,1713-1731).
gagatgaaggaatattaca

SEQ ID NO: 64850 - DNA, 19 bp, Homo sapiens
  siRNA target sequence for PCTAIRE2BP (NM_014290.1,1775-1793).
gcagttgctggccgtaaat

SEQ ID NO: 64851 - DNA, 19 bp, Homo sapiens
  siRNA target sequence for PCTAIRE2BP (NM_014290.1,1815-1833).
cgggcacaggtcatctcaa

SEQ ID NO: 64852 - DNA, 19 bp, Homo sapiens
  siRNA target sequence for PCTAIRE2BP (NM_014290.1,1859-1877).
ctatgttgactatggtttt

SEQ ID NO: 64853 - DNA, 19 bp, Homo sapiens
  siRNA target sequence for PCTAIRE2BP (NM_014290.1,1866-1884).
gactatggttttagtgaaa

SEQ ID NO: 64854 - DNA, 19 bp, Homo sapiens
  siRNA target sequence for PCTAIRE2BP (NM_014290.1,1887-1905).
gttgaaaaaagcaaagcat

SEQ ID NO: 64855 - DNA, 19 bp, Homo sapiens
  siRNA target sequence for PCTAIRE2BP (NM_014290.1,1907-1925).
caaattaaacccgaagttt

SEQ ID NO: 64856 - DNA, 19 bp, Homo sapiens
  siRNA target sequence for PCTAIRE2BP (NM_014290.1,1981-1999).
gcgatgaccctgatctagt

SEQ ID NO: 64857 - DNA, 19 bp, Homo sapiens
  siRNA target sequence for PCTAIRE2BP (NM_014290.1,2003-2021).
ggtggttgaatctttaact

SEQ ID NO: 64858 - DNA, 19 bp, Homo sapiens
  siRNA target sequence for PCTAIRE2BP (NM_014290.1,2004-2022).
gtggttgaatctttaactt

SEQ ID NO: 64859 - DNA, 19 bp, Homo sapiens
  siRNA target sequence for PCTAIRE2BP (NM_014290.1,2006-2024).
ggttgaatctttaacttgt

SEQ ID NO: 64860 - DNA, 19 bp, Homo sapiens
  siRNA target sequence for PCTAIRE2BP (NM_014290.1,2059-2077).
ctgacattccacttgttgt

SEQ ID NO: 64861 - DNA, 19 bp, Homo sapiens
  siRNA target sequence for PCTAIRE2BP (NM_014290.1,2089-2107).
cctcaggagaagatgatat

SEQ ID NO: 64862 - DNA, 19 bp, Homo sapiens
  siRNA target sequence for PCTAIRE2BP (NM_014290.1,2123-2141).
ctgcttgaaggctatatgt

SEQ ID NO: 64863 - DNA, 19 bp, Homo sapiens
  siRNA target sequence for PCTAIRE2BP (NM_014290.1,2166-2184).
caggttgacgccatgtaca

SEQ ID NO: 64864 - DNA, 19 bp, Homo sapiens
  siRNA target sequence for PCTAIRE2BP (NM_014290.1,2169-2187).
gttgacgccatgtacacaa

SEQ ID NO: 64865 - DNA, 19 bp, Homo sapiens
  siRNA target sequence for PCTAIRE2BP (NM_014290.1,2263-2281).
gtgaccttctacgtaagat

SEQ ID NO: 64866 - DNA, 19 bp, Homo sapiens
  siRNA target sequence for PCTAIRE2BP (NM_014290.1,2275-2293).
gtaagatagaggactactt

SEQ ID NO: 64867 - DNA, 19 bp, Homo sapiens
  siRNA target sequence for PCTAIRE2BP (NM_014290.1,2309-2327).
gacctctgagtgctttgtt

SEQ ID NO: 64868 - DNA, 19 bp, Homo sapiens
  siRNA target sequence for PCTAIRE2BP (NM_014290.1,2312-2330).
ctctgagtgctttgtttca

SEQ ID NO: 64869 - DNA, 19 bp, Homo sapiens
  siRNA target sequence for PCTAIRE2BP (NM_014290.1,2383-2401).
gagtagagatcacaaatgt

SEQ ID NO: 64870 - DNA, 19 bp, Homo sapiens
  siRNA target sequence for PCTAIRE2BP (NM_014290.1,2465-2483).
gtcagagctcagggaaatt

SEQ ID NO: 64871 - DNA, 19 bp, Homo sapiens
  siRNA target sequence for PCTAIRE2BP (NM_014290.1,2488-2506).
ctcggtttctacaagaaat

SEQ ID NO: 64872 - DNA, 19 bp, Homo sapiens
  siRNA target sequence for PCTAIRE2BP (NM_014290.1,2496-2514).
ctacaagaaatgattgcaa

SEQ ID NO: 64873 - DNA, 19 bp, Homo sapiens
  siRNA target sequence for PCTAIRE2BP (NM_014290.1,2517-2535).
ccacctcaggccattaagt

SEQ ID NO: 64874 - DNA, 19 bp, Homo sapiens
  siRNA target sequence for PCTAIRE2BP (NM_014290.1,2591-2609).
gtggttaagagattctgtt

SEQ ID NO: 64875 - DNA, 19 bp, Homo sapiens
  siRNA target sequence for PCTAIRE2BP (NM_014290.1,2601-2619).
gattctgttttgaattgct

SEQ ID NO: 64876 - DNA, 19 bp, Homo sapiens
  siRNA target sequence for PCTAIRE2BP (NM_014290.1,2617-2635).
gctcggactgtagcattaa

SEQ ID NO: 64877 - DNA, 19 bp, Homo sapiens
  siRNA target sequence for PCTAIRE2BP (NM_014290.1,2620-2638).
cggactgtagcattaaggt

SEQ ID NO: 64878 - DNA, 19 bp, Homo sapiens
  siRNA target sequence for PCTAIRE2BP (NM_014290.1,2622-2640).
gactgtagcattaaggtta

SEQ ID NO: 64879 - DNA, 19 bp, Homo sapiens
  siRNA target sequence for PCTAIRE2BP (NM_014290.1,2629-2647).
gcattaaggttacaaaagt

SEQ ID NO: 64880 - DNA, 19 bp, Homo sapiens
  siRNA target sequence for PCTAIRE2BP (NM_014290.1,2637-2655).
gttacaaaagtggatgaaa

SEQ ID NO: 64881 - DNA, 19 bp, Homo sapiens
  siRNA target sequence for PCTAIRE2BP (NM_014290.1,2657-2675).
cagagggatcgcacatgtt

SEQ ID NO: 64882 - DNA, 19 bp, Homo sapiens
  siRNA target sequence for PCTAIRE2BP (NM_014290.1,2659-2677).
gagggatcgcacatgttta

SEQ ID NO: 64883 - DNA, 19 bp, Homo sapiens
  siRNA target sequence for PCTAIRE2BP (NM_014290.1,2703-2721).
gaccctcatcgcagtatta

SEQ ID NO: 64884 - DNA, 19 bp, Homo sapiens
  siRNA target sequence for PDIP46 (NM_032311.3,147-165).
ggcgaaaggacggcttaat

SEQ ID NO: 64885 - DNA, 19 bp, Homo sapiens
  siRNA target sequence for PDIP46 (NM_032311.3,339-357).
gaaagatgcccgatttcga

SEQ ID NO: 64886 - DNA, 19 bp, Homo sapiens
  siRNA target sequence for PDIP46 (NM_032311.3,589-607).
cctgccggaatgagaatca

SEQ ID NO: 64887 - DNA, 19 bp, Homo sapiens
  siRNA target sequence for PDIP46 (NM_032311.3,590-608).
ctgccggaatgagaatcaa

SEQ ID NO: 64888 - DNA, 19 bp, Homo sapiens
  siRNA target sequence for PDIP46 (NM_032311.3,593-611).
ccggaatgagaatcaatgt

SEQ ID NO: 64889 - DNA, 19 bp, Homo sapiens
  siRNA target sequence for PDIP46 (NM_032311.3,594-612).
cggaatgagaatcaatgtt

SEQ ID NO: 64890 - DNA, 19 bp, Homo sapiens
  siRNA target sequence for PDIP46 (NM_032311.3,596-614).
gaatgagaatcaatgttgt

SEQ ID NO: 64891 - DNA, 19 bp, Homo sapiens
  siRNA target sequence for PDIP46 (NM_032311.3,658-676).
gatgatgatggtatagctt

SEQ ID NO: 64892 - DNA, 19 bp, Homo sapiens
  siRNA target sequence for PDIP46 (NM_032311.3,674-692).
cttccgttcctactaaaca

SEQ ID NO: 64893 - DNA, 19 bp, Homo sapiens
  siRNA target sequence for PDIP46 (NM_032311.3,677-695).
ccgttcctactaaacagat

SEQ ID NO: 64894 - DNA, 19 bp, Homo sapiens
  siRNA target sequence for PDIP46 (NM_032311.3,682-700).
cctactaaacagatgaagt

SEQ ID NO: 64895 - DNA, 19 bp, Homo sapiens
  siRNA target sequence for PDIP46 (NM_032311.3,780-798).
caccaaagtggttcagaat

SEQ ID NO: 64896 - DNA, 19 bp, Homo sapiens
  siRNA target sequence for PDIP46 (NM_032311.3,783-801).
caaagtggttcagaatgat

SEQ ID NO: 64897 - DNA, 19 bp, Homo sapiens
  siRNA target sequence for PDIP46 (NM_032311.3,824-842).
cttcctctattcgaacaaa

SEQ ID NO: 64898 - DNA, 19 bp, Homo sapiens
  siRNA target sequence for PDIP46 (NM_032311.3,860-878).
cccggacactggtgaacaa

SEQ ID NO: 64899 - DNA, 19 bp, Homo sapiens
  siRNA target sequence for PDIP46 (NM_032311.3,972-990).
cactgaggaggacattgtt

SEQ ID NO: 64900 - DNA, 19 bp, Homo sapiens
  siRNA target sequence for PDIP46 (NM_032311.3,1075-1093).
gatgccatcaccgcatata

SEQ ID NO: 64901 - DNA, 19 bp, Homo sapiens
  siRNA target sequence for PDIP46 (NM_032311.3,1078-1096).
gccatcaccgcatataaga

SEQ ID NO: 64902 - DNA, 19 bp, Homo sapiens
  siRNA target sequence for PDIP46 (NM_032311.3,1117-1135).
gacgggcagccgatgaagt

SEQ ID NO: 64903 - DNA, 19 bp, Homo sapiens
  siRNA target sequence for PDIP46 (NM_032311.3,1134-1152).
gtgcaaccttcacatgaat

SEQ ID NO: 64904 - DNA, 19 bp, Homo sapiens
  siRNA target sequence for PDIP46 (NM_032311.3,1196-1214).
gtgacagcccatcaatgaa

SEQ ID NO: 64905 - DNA, 19 bp, Homo sapiens
  siRNA target sequence for PDIP46 (NM_032311.3,1202-1220).
gcccatcaatgaaaaagga

SEQ ID NO: 64906 - DNA, 19 bp, Homo sapiens
  siRNA target sequence for PERC (NM_133263.2,132-150).
cggggaggagcaactctat

SEQ ID NO: 64907 - DNA, 19 bp, Homo sapiens
  siRNA target sequence for PERC (NM_133263.2,141-159).
gcaactctatgctgacttt

SEQ ID NO: 64908 - DNA, 19 bp, Homo sapiens
  siRNA target sequence for PERC (NM_133263.2,184-202).
gatgccagcgactttgact

SEQ ID NO: 64909 - DNA, 19 bp, Homo sapiens
  siRNA target sequence for PERC (NM_133263.2,281-299).
ccgagctcttccagattga

SEQ ID NO: 64910 - DNA, 19 bp, Homo sapiens
  siRNA target sequence for PERC (NM_133263.2,283-301).
gagctcttccagattgaca

SEQ ID NO: 64911 - DNA, 19 bp, Homo sapiens
  siRNA target sequence for PERC (NM_133263.2,585-603).
ggcaggcctcagatctaaa

SEQ ID NO: 64912 - DNA, 19 bp, Homo sapiens
  siRNA target sequence for PERC (NM_133263.2,586-604).
gcaggcctcagatctaaaa

SEQ ID NO: 64913 - DNA, 19 bp, Homo sapiens
  siRNA target sequence for PERC (NM_133263.2,663-681).
gtctcagagccgaagttgt

SEQ ID NO: 64914 - DNA, 19 bp, Homo sapiens
  siRNA target sequence for PERC (NM_133263.2,674-692).
gaagttgtacagaactaca

SEQ ID NO: 64915 - DNA, 19 bp, Homo sapiens
  siRNA target sequence for PERC (NM_133263.2,897-915).
ggcgatggtgcaactcata

SEQ ID NO: 64916 - DNA, 19 bp, Homo sapiens
  siRNA target sequence for PERC (NM_133263.2,1121-1139).
gtctggccacgcctgttta

SEQ ID NO: 64917 - DNA, 19 bp, Homo sapiens
  siRNA target sequence for PERC (NM_133263.2,1211-1229).
cggtggaggaggtaaggat

SEQ ID NO: 64918 - DNA, 19 bp, Homo sapiens
  siRNA target sequence for PERC (NM_133263.2,1778-1796).
cacaaagcgacccaacttt

SEQ ID NO: 64919 - DNA, 19 bp, Homo sapiens
  siRNA target sequence for PERC (NM_133263.2,1898-1916).
ccttcaaaccagacatcaa

SEQ ID NO: 64920 - DNA, 19 bp, Homo sapiens
  siRNA target sequence for PERC (NM_133263.2,1907-1925).
cagacatcaagcatagtct

SEQ ID NO: 64921 - DNA, 19 bp, Homo sapiens
  siRNA target sequence for PERC (NM_133263.2,2105-2123).
cctttggagaccatgacta

SEQ ID NO: 64922 - DNA, 19 bp, Homo sapiens
  siRNA target sequence for PERC (NM_133263.2,2641-2659).
gccactcgaaggaacttca

SEQ ID NO: 64923 - DNA, 19 bp, Homo sapiens
  siRNA target sequence for PERC (NM_133263.2,2746-2764).
cgcgtggtgtacattcaaa

SEQ ID NO: 64924 - DNA, 19 bp, Homo sapiens
  siRNA target sequence for PERC (NM_133263.2,2747-2765).
gcgtggtgtacattcaaaa

SEQ ID NO: 64925 - DNA, 19 bp, Homo sapiens
  siRNA target sequence for PERC (NM_133263.2,2748-2766).
cgtggtgtacattcaaaat

SEQ ID NO: 64926 - DNA, 19 bp, Homo sapiens
  siRNA target sequence for PERC (NM_133263.2,2752-2770).
gtgtacattcaaaatctct

SEQ ID NO: 64927 - DNA, 19 bp, Homo sapiens
  siRNA target sequence for PERC (NM_133263.2,2799-2817).
gaggcgctttgaagtgttt

SEQ ID NO: 64928 - DNA, 19 bp, Homo sapiens
  siRNA target sequence for PERC (NM_133263.2,2834-2852).
gcgaggtgctgacaagaaa

SEQ ID NO: 64929 - DNA, 19 bp, Homo sapiens
  siRNA target sequence for PERC (NM_133263.2,3003-3021).
cactgactacgattccaat

SEQ ID NO: 64930 - DNA, 19 bp, Homo sapiens
  siRNA target sequence for PERC (NM_133263.2,3009-3027).
ctacgattccaattcagaa

SEQ ID NO: 64931 - DNA, 19 bp, Homo sapiens
  siRNA target sequence for PINX1 (NM_017884.3,186-204).
gaacactgcctggagtaat

SEQ ID NO: 64932 - DNA, 19 bp, Homo sapiens
  siRNA target sequence for PINX1 (NM_017884.3,197-215).
ggagtaatgacgattccaa

SEQ ID NO: 64933 - DNA, 19 bp, Homo sapiens
  siRNA target sequence for PINX1 (NM_017884.3,237-255).
gaagatggggtggtctaaa

SEQ ID NO: 64934 - DNA, 19 bp, Homo sapiens
  siRNA target sequence for PINX1 (NM_017884.3,240-258).
gatggggtggtctaaagga

SEQ ID NO: 64935 - DNA, 19 bp, Homo sapiens
  siRNA target sequence for PINX1 (NM_017884.3,284-302).
gagccacagatcatattaa

SEQ ID NO: 64936 - DNA, 19 bp, Homo sapiens
  siRNA target sequence for PINX1 (NM_017884.3,287-305).
ccacagatcatattaaagt

SEQ ID NO: 64937 - DNA, 19 bp, Homo sapiens
  siRNA target sequence for PINX1 (NM_017884.3,288-306).
cacagatcatattaaagtt

SEQ ID NO: 64938 - DNA, 19 bp, Homo sapiens
  siRNA target sequence for PINX1 (NM_017884.3,290-308).
cagatcatattaaagttca

SEQ ID NO: 64939 - DNA, 19 bp, Homo sapiens
  siRNA target sequence for PINX1 (NM_017884.3,331-349).
ctcggagctaccatcaata

SEQ ID NO: 64940 - DNA, 19 bp, Homo sapiens
  siRNA target sequence for PINX1 (NM_017884.3,338-356).
ctaccatcaataatgaaga

SEQ ID NO: 64941 - DNA, 19 bp, Homo sapiens
  siRNA target sequence for PINX1 (NM_017884.3,394-412).
ctggccgaactgaacactt

SEQ ID NO: 64942 - DNA, 19 bp, Homo sapiens
  siRNA target sequence for PINX1 (NM_017884.3,431-449).
cagattcctcggacaagaa

SEQ ID NO: 64943 - DNA, 19 bp, Homo sapiens
  siRNA target sequence for PINX1 (NM_017884.3,491-509).
ccaaaaaccgtgttcacta

SEQ ID NO: 64944 - DNA, 19 bp, Homo sapiens
  siRNA target sequence for PINX1 (NM_017884.3,498-516).
ccgtgttcactatatgaaa

SEQ ID NO: 64945 - DNA, 19 bp, Homo sapiens
  siRNA target sequence for PINX1 (NM_017884.3,535-553).
ctgtcatctcggagcaaaa

SEQ ID NO: 64946 - DNA, 19 bp, Homo sapiens
  siRNA target sequence for PINX1 (NM_017884.3,537-555).
gtcatctcggagcaaaaca

SEQ ID NO: 64947 - DNA, 19 bp, Homo sapiens
  siRNA target sequence for PINX1 (NM_017884.3,794-812).
gtaaagatgtggaaagtta

SEQ ID NO: 64948 - DNA, 19 bp, Homo sapiens
  siRNA target sequence for PINX1 (NM_017884.3,1063-1081).
gacgctacactagaagaaa

SEQ ID NO: 64949 - DNA, 19 bp, Homo sapiens
  siRNA target sequence for PINX1 (NM_017884.3,1078-1096).
gaaacgctagtgaaaaaga

SEQ ID NO: 64950 - DNA, 19 bp, Homo sapiens
  siRNA target sequence for PNMA3 (NM_013364.1,114-132).
ctgtggcgaggatgagttt

SEQ ID NO: 64951 - DNA, 19 bp, Homo sapiens
  siRNA target sequence for PNMA3 (NM_013364.1,116-134).
gtggcgaggatgagtttga

SEQ ID NO: 64952 - DNA, 19 bp, Homo sapiens
  siRNA target sequence for PNMA3 (NM_013364.1,207-225).
gaacgcccaggcgattcta

SEQ ID NO: 64953 - DNA, 19 bp, Homo sapiens
  siRNA target sequence for PNMA3 (NM_013364.1,226-244).
ctggagctggcacaagata

SEQ ID NO: 64954 - DNA, 19 bp, Homo sapiens
  siRNA target sequence for PNMA3 (NM_013364.1,238-256).
caagatatcgactatgctt

SEQ ID NO: 64955 - DNA, 19 bp, Homo sapiens
  siRNA target sequence for PNMA3 (NM_013364.1,258-276).
gctcccaagggaaatacca

SEQ ID NO: 64956 - DNA, 19 bp, Homo sapiens
  siRNA target sequence for PNMA3 (NM_013364.1,288-306).
gccctgggaagtgattgta

SEQ ID NO: 64957 - DNA, 19 bp, Homo sapiens
  siRNA target sequence for PNMA3 (NM_013364.1,289-307).
ccctgggaagtgattgtaa

SEQ ID NO: 64958 - DNA, 19 bp, Homo sapiens
  siRNA target sequence for PNMA3 (NM_013364.1,368-386).
ggcggaccgtgtcagatat

SEQ ID NO: 64959 - DNA, 19 bp, Homo sapiens
  siRNA target sequence for PNMA3 (NM_013364.1,370-388).
cggaccgtgtcagatatga

SEQ ID NO: 64960 - DNA, 19 bp, Homo sapiens
  siRNA target sequence for PNMA3 (NM_013364.1,371-389).
ggaccgtgtcagatatgaa

SEQ ID NO: 64961 - DNA, 19 bp, Homo sapiens
  siRNA target sequence for PNMA3 (NM_013364.1,397-415).
ctcgggtcggacaccaatt

SEQ ID NO: 64962 - DNA, 19 bp, Homo sapiens
  siRNA target sequence for PNMA3 (NM_013364.1,399-417).
cgggtcggacaccaattgt

SEQ ID NO: 64963 - DNA, 19 bp, Homo sapiens
  siRNA target sequence for PNMA3 (NM_013364.1,400-418).
gggtcggacaccaattgtt

SEQ ID NO: 64964 - DNA, 19 bp, Homo sapiens
  siRNA target sequence for PNMA3 (NM_013364.1,419-437).
cggctccaagagtgactat

SEQ ID NO: 64965 - DNA, 19 bp, Homo sapiens
  siRNA target sequence for PNMA3 (NM_013364.1,420-438).
ggctccaagagtgactata

SEQ ID NO: 64966 - DNA, 19 bp, Homo sapiens
  siRNA target sequence for PNMA3 (NM_013364.1,421-439).
gctccaagagtgactatat

SEQ ID NO: 64967 - DNA, 19 bp, Homo sapiens
  siRNA target sequence for PNMA3 (NM_013364.1,510-528).
ccgagaactaagagtgttt

SEQ ID NO: 64968 - DNA, 19 bp, Homo sapiens
  siRNA target sequence for PNMA3 (NM_013364.1,511-529).
cgagaactaagagtgtttt

SEQ ID NO: 64969 - DNA, 19 bp, Homo sapiens
  siRNA target sequence for PNMA3 (NM_013364.1,690-708).
ggccagcaatgcttccata

SEQ ID NO: 64970 - DNA, 19 bp, Homo sapiens
  siRNA target sequence for PNMA3 (NM_013364.1,752-770).
ctgtggagagccataaaat

SEQ ID NO: 64971 - DNA, 19 bp, Homo sapiens
  siRNA target sequence for PNMA3 (NM_013364.1,773-791).
cccaggtgaagttgtgtaa

SEQ ID NO: 64972 - DNA, 19 bp, Homo sapiens
  siRNA target sequence for PNMA3 (NM_013364.1,774-792).
ccaggtgaagttgtgtaaa

SEQ ID NO: 64973 - DNA, 19 bp, Homo sapiens
  siRNA target sequence for PNMA3 (NM_013364.1,821-839).
ctagctttgtgttacgttt

SEQ ID NO: 64974 - DNA, 19 bp, Homo sapiens
  siRNA target sequence for PNMA3 (NM_013364.1,904-922).
cgcctgaaacgagtcttaa

SEQ ID NO: 64975 - DNA, 19 bp, Homo sapiens
  siRNA target sequence for PNMA3 (NM_013364.1,906-924).
cctgaaacgagtcttaagt

SEQ ID NO: 64976 - DNA, 19 bp, Homo sapiens
  siRNA target sequence for PNMA3 (NM_013364.1,938-956).
ctgacaaactccgagataa

SEQ ID NO: 64977 - DNA, 19 bp, Homo sapiens
  siRNA target sequence for PNMA3 (NM_013364.1,1029-1047).
ggaatgggaggccacttta

SEQ ID NO: 64978 - DNA, 19 bp, Homo sapiens
  siRNA target sequence for PNMA3 (NM_013364.1,1132-1150).
cctgcctctggcaacagtt

SEQ ID NO: 64979 - DNA, 19 bp, Homo sapiens
  siRNA target sequence for PNMA3 (NM_013364.1,1136-1154).
cctctggcaacagttttga

SEQ ID NO: 64980 - DNA, 19 bp, Homo sapiens
  siRNA target sequence for PNMA3 (NM_013364.1,1137-1155).
ctctggcaacagttttgat

SEQ ID NO: 64981 - DNA, 19 bp, Homo sapiens
  siRNA target sequence for PNMA3 (NM_013364.1,1229-1247).
gctctcgaggctcaagaaa

SEQ ID NO: 64982 - DNA, 19 bp, Homo sapiens
  siRNA target sequence for PNMA3 (NM_013364.1,1230-1248).
ctctcgaggctcaagaaaa

SEQ ID NO: 64983 - DNA, 19 bp, Homo sapiens
  siRNA target sequence for PNMA3 (NM_013364.1,1255-1273).
cgccacacattctgctata

SEQ ID NO: 64984 - DNA, 19 bp, Homo sapiens
  siRNA target sequence for PPIL4 (NM_139126.2,95-113).
cgcgtgcctgcttgaattt

SEQ ID NO: 64985 - DNA, 19 bp, Homo sapiens
  siRNA target sequence for PPIL4 (NM_139126.2,149-167).
gccttattcacaatgtaca

SEQ ID NO: 64986 - DNA, 19 bp, Homo sapiens
  siRNA target sequence for PPIL4 (NM_139126.2,171-189).
ggattttatcatacaaact

SEQ ID NO: 64987 - DNA, 19 bp, Homo sapiens
  siRNA target sequence for PPIL4 (NM_139126.2,224-242).
ctatctttggccaactgta

SEQ ID NO: 64988 - DNA, 19 bp, Homo sapiens
  siRNA target sequence for PPIL4 (NM_139126.2,234-252).
ccaactgtatggtgatcaa

SEQ ID NO: 64989 - DNA, 19 bp, Homo sapiens
  siRNA target sequence for PPIL4 (NM_139126.2,281-299).
caagaattaagcacaagaa

SEQ ID NO: 64990 - DNA, 19 bp, Homo sapiens
  siRNA target sequence for PPIL4 (NM_139126.2,321-339).
gaataatggcagtgatcaa

SEQ ID NO: 64991 - DNA, 19 bp, Homo sapiens
  siRNA target sequence for PPIL4 (NM_139126.2,425-443).
gcatggacataattaagaa

SEQ ID NO: 64992 - DNA, 19 bp, Homo sapiens
  siRNA target sequence for PPIL4 (NM_139126.2,465-483).
caaggactttgtaccatat

SEQ ID NO: 64993 - DNA, 19 bp, Homo sapiens
  siRNA target sequence for PPIL4 (NM_139126.2,475-493).
gtaccatatcaggatatca

SEQ ID NO: 64994 - DNA, 19 bp, Homo sapiens
  siRNA target sequence for PPIL4 (NM_139126.2,487-505).
gatatcaggataaatcata

SEQ ID NO: 64995 - DNA, 19 bp, Homo sapiens
  siRNA target sequence for PPIL4 (NM_139126.2,510-528).
gattttagatgatccattt

SEQ ID NO: 64996 - DNA, 19 bp, Homo sapiens
  siRNA target sequence for PPIL4 (NM_139126.2,529-547).
gatgaccctcctgatttat

SEQ ID NO: 64997 - DNA, 19 bp, Homo sapiens
  siRNA target sequence for PPIL4 (NM_139126.2,568-586).
gaacctacaagggaacaat

SEQ ID NO: 64998 - DNA, 19 bp, Homo sapiens
  siRNA target sequence for PPIL4 (NM_139126.2,680-698).
ctaaaactcaggctatact

SEQ ID NO: 64999 - DNA, 19 bp, Homo sapiens
  siRNA target sequence for PPIL4 (NM_139126.2,718-736).
ctacctgatgcagatatta

SEQ ID NO: 65000 - DNA, 19 bp, Homo sapiens
  siRNA target sequence for PPIL4 (NM_139126.2,793-811).
gatctggaaataatattct

SEQ ID NO: 65001 - DNA, 19 bp, Homo sapiens
  siRNA target sequence for PPIL4 (NM_139126.2,870-888).
cctctgttacgcttttatt

SEQ ID NO: 65002 - DNA, 19 bp, Homo sapiens
  siRNA target sequence for PPIL4 (NM_139126.2,875-893).
gttacgcttttattgaatt

SEQ ID NO: 65003 - DNA, 19 bp, Homo sapiens
  siRNA target sequence for PPIL4 (NM_139126.2,979-997).
cagtcggttgcaaaggtta

SEQ ID NO: 65004 - DNA, 19 bp, Homo sapiens
  siRNA target sequence for PPIL4 (NM_139126.2,981-999).
gtcggttgcaaaggttaaa

SEQ ID NO: 65005 - DNA, 19 bp, Homo sapiens
  siRNA target sequence for PPIL4 (NM_139126.2,1031-1049).
gtgatttcaaggagtatga

SEQ ID NO: 65006 - DNA, 19 bp, Homo sapiens
  siRNA target sequence for PPIL4 (NM_139126.2,1057-1075).
caggataaaccacctaatt

SEQ ID NO: 65007 - DNA, 19 bp, Homo sapiens
  siRNA target sequence for PPIL4 (NM_139126.2,1137-1155).
gcaggccgaagactcaaaa

SEQ ID NO: 65008 - DNA, 19 bp, Homo sapiens
  siRNA target sequence for PPIL4 (NM_139126.2,1140-1158).
ggccgaagactcaaaatca

SEQ ID NO: 65009 - DNA, 19 bp, Homo sapiens
  siRNA target sequence for PPIL4 (NM_139126.2,1230-1248).
ctacatgccaatcaaaaat

SEQ ID NO: 65010 - DNA, 19 bp, Homo sapiens
  siRNA target sequence for PPIL4 (NM_139126.2,1236-1254).
gccaatcaaaaatactaat

SEQ ID NO: 65011 - DNA, 19 bp, Homo sapiens
  siRNA target sequence for PPIL4 (NM_139126.2,1376-1394).
gggatggccattatagtaa

SEQ ID NO: 65012 - DNA, 19 bp, Homo sapiens
  siRNA target sequence for PPIL4 (NM_139126.2,1377-1395).
ggatggccattatagtaat

SEQ ID NO: 65013 - DNA, 19 bp, Homo sapiens
  siRNA target sequence for PPIL4 (NM_139126.2,1382-1400).
gccattatagtaatagtca

SEQ ID NO: 65014 - DNA, 19 bp, Homo sapiens
  siRNA target sequence for PPIL4 (NM_139126.2,1383-1401).
ccattatagtaatagtcat

SEQ ID NO: 65015 - DNA, 19 bp, Homo sapiens
  siRNA target sequence for PPIL4 (NM_139126.2,1384-1402).
cattatagtaatagtcata

SEQ ID NO: 65016 - DNA, 19 bp, Homo sapiens
  siRNA target sequence for PPP1R10 (NM_002714.2,613-631).
cgagatggggaagtcaaaa

SEQ ID NO: 65017 - DNA, 19 bp, Homo sapiens
  siRNA target sequence for PPP1R10 (NM_002714.2,632-650).
gtgtggatgggatttccaa

SEQ ID NO: 65018 - DNA, 19 bp, Homo sapiens
  siRNA target sequence for PPP1R10 (NM_002714.2,637-655).
gatgggatttccaagatct

SEQ ID NO: 65019 - DNA, 19 bp, Homo sapiens
  siRNA target sequence for PPP1R10 (NM_002714.2,685-703).
gtgagtcgatgcacttact

SEQ ID NO: 65020 - DNA, 19 bp, Homo sapiens
  siRNA target sequence for PPP1R10 (NM_002714.2,695-713).
gcacttacttgaacattct

SEQ ID NO: 65021 - DNA, 19 bp, Homo sapiens
  siRNA target sequence for PPP1R10 (NM_002714.2,720-738).
gacccgttcaccagaaata

SEQ ID NO: 65022 - DNA, 19 bp, Homo sapiens
  siRNA target sequence for PPP1R10 (NM_002714.2,725-743).
gttcaccagaaatattggt

SEQ ID NO: 65023 - DNA, 19 bp, Homo sapiens
  siRNA target sequence for PPP1R10 (NM_002714.2,760-778).
ggcggctacaaacttctta

SEQ ID NO: 65024 - DNA, 19 bp, Homo sapiens
  siRNA target sequence for PPP1R10 (NM_002714.2,819-837).
cctcctccagcaaattcta

SEQ ID NO: 65025 - DNA, 19 bp, Homo sapiens
  siRNA target sequence for PPP1R10 (NM_002714.2,871-889).
catctcaagcagaacaaca

SEQ ID NO: 65026 - DNA, 19 bp, Homo sapiens
  siRNA target sequence for PPP1R10 (NM_002714.2,1250-1268).
ctgacaagtacaaccttaa

SEQ ID NO: 65027 - DNA, 19 bp, Homo sapiens
  siRNA target sequence for PPP1R10 (NM_002714.2,1360-1378).
cctaatgccaccaaagaga

SEQ ID NO: 65028 - DNA, 19 bp, Homo sapiens
  siRNA target sequence for PPP1R10 (NM_002714.2,1448-1466).
ctgttccaggcatcaaaat

SEQ ID NO: 65029 - DNA, 19 bp, Homo sapiens
  siRNA target sequence for PPP1R10 (NM_002714.2,1450-1468).
gttccaggcatcaaaatta

SEQ ID NO: 65030 - DNA, 19 bp, Homo sapiens
  siRNA target sequence for PPP1R10 (NM_002714.2,1614-1632).
cccggttccccctgttgaa

SEQ ID NO: 65031 - DNA, 19 bp, Homo sapiens
  siRNA target sequence for PPP1R10 (NM_002714.2,1616-1634).
cggttccccctgttgaagt

SEQ ID NO: 65032 - DNA, 19 bp, Homo sapiens
  siRNA target sequence for PPP1R10 (NM_002714.2,1762-1780).
gaaggcaaactgagagaat

SEQ ID NO: 65033 - DNA, 19 bp, Homo sapiens
  siRNA target sequence for PPP1R10 (NM_002714.2,1807-1825).
gaacgagtaaatgtgaata

SEQ ID NO: 65034 - DNA, 19 bp, Homo sapiens
  siRNA target sequence for PPP1R10 (NM_002714.2,1810-1828).
cgagtaaatgtgaataaga

SEQ ID NO: 65035 - DNA, 19 bp, Homo sapiens
  siRNA target sequence for PPP1R10 (NM_002714.2,1866-1884).
gtcagaccgacatgcattt

SEQ ID NO: 65036 - DNA, 19 bp, Homo sapiens
  siRNA target sequence for PPP1R10 (NM_002714.2,1895-1913).
ggcgtctgagccatgataa

SEQ ID NO: 65037 - DNA, 19 bp, Homo sapiens
  siRNA target sequence for PPP1R10 (NM_002714.2,1897-1915).
cgtctgagccatgataaca

SEQ ID NO: 65038 - DNA, 19 bp, Homo sapiens
  siRNA target sequence for PPP1R10 (NM_002714.2,1898-1916).
gtctgagccatgataacat

SEQ ID NO: 65039 - DNA, 19 bp, Homo sapiens
  siRNA target sequence for PPP1R10 (NM_002714.2,1974-1992).
cacccctggaagcaatagt

SEQ ID NO: 65040 - DNA, 19 bp, Homo sapiens
  siRNA target sequence for PPP1R10 (NM_002714.2,1976-1994).
cccctggaagcaatagtca

SEQ ID NO: 65041 - DNA, 19 bp, Homo sapiens
  siRNA target sequence for PPP1R10 (NM_002714.2,1991-2009).
gtcaggagcgatatatcca

SEQ ID NO: 65042 - DNA, 19 bp, Homo sapiens
  siRNA target sequence for PPP1R10 (NM_002714.2,2093-2111).
ccataccccctaaactcat

SEQ ID NO: 65043 - DNA, 19 bp, Homo sapiens
  siRNA target sequence for PPP1R10 (NM_002714.2,2136-2154).
ggatgagactccgtatgtt

SEQ ID NO: 65044 - DNA, 19 bp, Homo sapiens
  siRNA target sequence for PPP1R10 (NM_002714.2,2276-2294).
gaggaggaggcattaatgt

SEQ ID NO: 65045 - DNA, 19 bp, Homo sapiens
  siRNA target sequence for PPP1R10 (NM_002714.2,2285-2303).
gcattaatgtccaagagat

SEQ ID NO: 65046 - DNA, 19 bp, Homo sapiens
  siRNA target sequence for PPP1R10 (NM_002714.2,2316-2334).
catgggtagcccaaacagt

SEQ ID NO: 65047 - DNA, 19 bp, Homo sapiens
  siRNA target sequence for PPP1R10 (NM_002714.2,2353-2371).
ctgaaacaaccagactatt

SEQ ID NO: 65048 - DNA, 19 bp, Homo sapiens
  siRNA target sequence for PPP1R10 (NM_002714.2,2363-2381).
cagactattcggacaagat

SEQ ID NO: 65049 - DNA, 19 bp, Homo sapiens
  siRNA target sequence for PPP1R10 (NM_002714.2,2365-2383).
gactattcggacaagatca

SEQ ID NO: 65050 - DNA, 19 bp, Homo sapiens
  siRNA target sequence for PPP1R10 (NM_002714.2,2420-2438).
gcccaatagccaatggttt

SEQ ID NO: 65051 - DNA, 19 bp, Homo sapiens
  siRNA target sequence for PPP1R10 (NM_002714.2,3281-3299).
ctgtctgccgacatttcat

SEQ ID NO: 65052 - DNA, 19 bp, Homo sapiens
  siRNA target sequence for PPP1R10 (NM_002714.2,3287-3305).
gccgacatttcatgatgaa

SEQ ID NO: 65053 - DNA, 19 bp, Homo sapiens
  siRNA target sequence for PRC (NM_015062.3,260-278).
gggacaaggacctggaaat

SEQ ID NO: 65054 - DNA, 19 bp, Homo sapiens
  siRNA target sequence for PRC (NM_015062.3,425-443).
cggctctgacggagatctt

SEQ ID NO: 65055 - DNA, 19 bp, Homo sapiens
  siRNA target sequence for PRC (NM_015062.3,622-640).
gggagtggggttgaaatgt

SEQ ID NO: 65056 - DNA, 19 bp, Homo sapiens
  siRNA target sequence for PRC (NM_015062.3,1174-1192).
gactcgctagagactagtt

SEQ ID NO: 65057 - DNA, 19 bp, Homo sapiens
  siRNA target sequence for PRC (NM_015062.3,1193-1211).
ctgccttgcagctgcttat

SEQ ID NO: 65058 - DNA, 19 bp, Homo sapiens
  siRNA target sequence for PRC (NM_015062.3,1273-1291).
gaggggttgtcattgaact

SEQ ID NO: 65059 - DNA, 19 bp, Homo sapiens
  siRNA target sequence for PRC (NM_015062.3,1303-1321).
ctggactcagcctgcttat

SEQ ID NO: 65060 - DNA, 19 bp, Homo sapiens
  siRNA target sequence for PRC (NM_015062.3,1306-1324).
gactcagcctgcttattga

SEQ ID NO: 65061 - DNA, 19 bp, Homo sapiens
  siRNA target sequence for PRC (NM_015062.3,1497-1515).
gtctactgtaggtacagaa

SEQ ID NO: 65062 - DNA, 19 bp, Homo sapiens
  siRNA target sequence for PRC (NM_015062.3,1662-1680).
gagaagtgctggacaaagt

SEQ ID NO: 65063 - DNA, 19 bp, Homo sapiens
  siRNA target sequence for PRC (NM_015062.3,1720-1738).
ctggctgacactatccaaa

SEQ ID NO: 65064 - DNA, 19 bp, Homo sapiens
  siRNA target sequence for PRC (NM_015062.3,1730-1748).
ctatccaaaccaatcctat

SEQ ID NO: 65065 - DNA, 19 bp, Homo sapiens
  siRNA target sequence for PRC (NM_015062.3,1734-1752).
ccaaaccaatcctatacca

SEQ ID NO: 65066 - DNA, 19 bp, Homo sapiens
  siRNA target sequence for PRC (NM_015062.3,1978-1996).
gttcccatctcagataact

SEQ ID NO: 65067 - DNA, 19 bp, Homo sapiens
  siRNA target sequence for PRC (NM_015062.3,2024-2042).
gcccagcaccagttgatct

SEQ ID NO: 65068 - DNA, 19 bp, Homo sapiens
  siRNA target sequence for PRC (NM_015062.3,2025-2043).
cccagcaccagttgatcta

SEQ ID NO: 65069 - DNA, 19 bp, Homo sapiens
  siRNA target sequence for PRC (NM_015062.3,2080-2098).
gttgacccagtgctagtta

SEQ ID NO: 65070 - DNA, 19 bp, Homo sapiens
  siRNA target sequence for PRC (NM_015062.3,2083-2101).
gacccagtgctagttaagt

SEQ ID NO: 65071 - DNA, 19 bp, Homo sapiens
  siRNA target sequence for PRC (NM_015062.3,2285-2303).
ggcctctcagcttatctga

SEQ ID NO: 65072 - DNA, 19 bp, Homo sapiens
  siRNA target sequence for PRC (NM_015062.3,2322-2340).
gcaacgccaagcagaaaca

SEQ ID NO: 65073 - DNA, 19 bp, Homo sapiens
  siRNA target sequence for PRC (NM_015062.3,2727-2745).
cttgcagcctcctagtctt

SEQ ID NO: 65074 - DNA, 19 bp, Homo sapiens
  siRNA target sequence for PRC (NM_015062.3,2738-2756).
ctagtcttccattgtctat

SEQ ID NO: 65075 - DNA, 19 bp, Homo sapiens
  siRNA target sequence for PRC (NM_015062.3,2751-2769).
gtctatggggccagtacta

SEQ ID NO: 65076 - DNA, 19 bp, Homo sapiens
  siRNA target sequence for PRC (NM_015062.3,2799-2817).
gccatcctggccttgttat

SEQ ID NO: 65077 - DNA, 19 bp, Homo sapiens
  siRNA target sequence for PRC (NM_015062.3,2958-2976).
cagttccacatgtacctat

SEQ ID NO: 65078 - DNA, 19 bp, Homo sapiens
  siRNA target sequence for PRC (NM_015062.3,3227-3245).
ctccccatccgaaacacaa

SEQ ID NO: 65079 - DNA, 19 bp, Homo sapiens
  siRNA target sequence for PRC (NM_015062.3,3508-3526).
gtggtacaggctttcatca

SEQ ID NO: 65080 - DNA, 19 bp, Homo sapiens
  siRNA target sequence for PRC (NM_015062.3,3675-3693).
gcccctagaccggttacaa

SEQ ID NO: 65081 - DNA, 19 bp, Homo sapiens
  siRNA target sequence for PRC (NM_015062.3,3914-3932).
gctctggggaccatgacta

SEQ ID NO: 65082 - DNA, 19 bp, Homo sapiens
  siRNA target sequence for PRC (NM_015062.3,3915-3933).
ctctggggaccatgactat

SEQ ID NO: 65083 - DNA, 19 bp, Homo sapiens
  siRNA target sequence for PRC (NM_015062.3,3920-3938).
gggaccatgactattgtgt

SEQ ID NO: 65084 - DNA, 19 bp, Homo sapiens
  siRNA target sequence for PRC (NM_015062.3,3991-4009).
ggctcccgatggaatgtca

SEQ ID NO: 65085 - DNA, 19 bp, Homo sapiens
  siRNA target sequence for PRC (NM_015062.3,3992-4010).
gctcccgatggaatgtcaa

SEQ ID NO: 65086 - DNA, 19 bp, Homo sapiens
  siRNA target sequence for PRC (NM_015062.3,4435-4453).
cgaaggtccagctgtagtt

SEQ ID NO: 65087 - DNA, 19 bp, Homo sapiens
  siRNA target sequence for PRC (NM_015062.3,4587-4605).
gcggtacagctcttatcgt

SEQ ID NO: 65088 - DNA, 19 bp, Homo sapiens
  siRNA target sequence for PRC (NM_015062.3,4588-4606).
cggtacagctcttatcgtt

SEQ ID NO: 65089 - DNA, 19 bp, Homo sapiens
  siRNA target sequence for PRC (NM_015062.3,4604-4622).
gttcacatgaccattacca

SEQ ID NO: 65090 - DNA, 19 bp, Homo sapiens
  siRNA target sequence for PRC (NM_015062.3,4625-4643).
ggcaaagagtgctacaaaa

SEQ ID NO: 65091 - DNA, 19 bp, Homo sapiens
  siRNA target sequence for PRC (NM_015062.3,4644-4662).
ggagcgtgcaatagaagaa

SEQ ID NO: 65092 - DNA, 19 bp, Homo sapiens
  siRNA target sequence for PRC (NM_015062.3,4645-4663).
gagcgtgcaatagaagaaa

SEQ ID NO: 65093 - DNA, 19 bp, Homo sapiens
  siRNA target sequence for PRC (NM_015062.3,4703-4721).
ctcgatcagagctgaaaca

SEQ ID NO: 65094 - DNA, 19 bp, Homo sapiens
  siRNA target sequence for PRC (NM_015062.3,4705-4723).
cgatcagagctgaaacaga

SEQ ID NO: 65095 - DNA, 19 bp, Homo sapiens
  siRNA target sequence for PRC (NM_015062.3,4785-4803).
ctacggcttcgtcacttat

SEQ ID NO: 65096 - DNA, 19 bp, Homo sapiens
  siRNA target sequence for PRC (NM_015062.3,4819-4837).
gcatttgcagccattgaga

SEQ ID NO: 65097 - DNA, 19 bp, Homo sapiens
  siRNA target sequence for PRC (NM_015062.3,4913-4931).
ggagctattctgatcttga

SEQ ID NO: 65098 - DNA, 19 bp, Homo sapiens
  siRNA target sequence for PRC (NM_015062.3,4951-4969).
gacccagcacctgtaaaga

SEQ ID NO: 65099 - DNA, 19 bp, Homo sapiens
  siRNA target sequence for PRC (NM_015062.3,4982-5000).
ctcttgactttgacacatt

SEQ ID NO: 65100 - DNA, 19 bp, Homo sapiens
  siRNA target sequence for PRR3 (NM_025263.1,454-472).
gacacgatgccgaaacgaa

SEQ ID NO: 65101 - DNA, 19 bp, Homo sapiens
  siRNA target sequence for PRR3 (NM_025263.1,847-865).
cctcgaaggctcaaaagct

SEQ ID NO: 65102 - DNA, 19 bp, Homo sapiens
  siRNA target sequence for PRR3 (NM_025263.1,863-881).
gctggtctcttatcaagaa

SEQ ID NO: 65103 - DNA, 19 bp, Homo sapiens
  siRNA target sequence for PRR3 (NM_025263.1,941-959).
gccgacattttgccaaaaa

SEQ ID NO: 65104 - DNA, 19 bp, Homo sapiens
  siRNA target sequence for PSPC1 (NM_018282.1,360-378).
gaggagatggggttcacta

SEQ ID NO: 65105 - DNA, 19 bp, Homo sapiens
  siRNA target sequence for PSPC1 (NM_018282.1,370-388).
ggttcactatcgacatcaa

SEQ ID NO: 65106 - DNA, 19 bp, Homo sapiens
  siRNA target sequence for PSPC1 (NM_018282.1,376-394).
ctatcgacatcaagagttt

SEQ ID NO: 65107 - DNA, 19 bp, Homo sapiens
  siRNA target sequence for PSPC1 (NM_018282.1,502-520).
gcgagcccagcgaagtctt

SEQ ID NO: 65108 - DNA, 19 bp, Homo sapiens
  siRNA target sequence for PSPC1 (NM_018282.1,507-525).
cccagcgaagtcttcatca

SEQ ID NO: 65109 - DNA, 19 bp, Homo sapiens
  siRNA target sequence for PSPC1 (NM_018282.1,563-581).
cagaaccctggctgaaatt

SEQ ID NO: 65110 - DNA, 19 bp, Homo sapiens
  siRNA target sequence for PSPC1 (NM_018282.1,594-612).
ctggacggcaccattctca

SEQ ID NO: 65111 - DNA, 19 bp, Homo sapiens
  siRNA target sequence for PSPC1 (NM_018282.1,629-647).
gattcgcttcgctacacat

SEQ ID NO: 65112 - DNA, 19 bp, Homo sapiens
  siRNA target sequence for PSPC1 (NM_018282.1,668-686).
gaacctttctccagttgtt

SEQ ID NO: 65113 - DNA, 19 bp, Homo sapiens
  siRNA target sequence for PSPC1 (NM_018282.1,695-713).
gctgctagagcaagcattt

SEQ ID NO: 65114 - DNA, 19 bp, Homo sapiens
  siRNA target sequence for PSPC1 (NM_018282.1,696-714).
ctgctagagcaagcatttt

SEQ ID NO: 65115 - DNA, 19 bp, Homo sapiens
  siRNA target sequence for PSPC1 (NM_018282.1,761-779).
cggtagagctacaggaaaa

SEQ ID NO: 65116 - DNA, 19 bp, Homo sapiens
  siRNA target sequence for PSPC1 (NM_018282.1,832-850).
gtggtgatggggcattctt

SEQ ID NO: 65117 - DNA, 19 bp, Homo sapiens
  siRNA target sequence for PSPC1 (NM_018282.1,837-855).
gatggggcattcttgctaa

SEQ ID NO: 65118 - DNA, 19 bp, Homo sapiens
  siRNA target sequence for PSPC1 (NM_018282.1,840-858).
ggggcattcttgctaacaa

SEQ ID NO: 65119 - DNA, 19 bp, Homo sapiens
  siRNA target sequence for PSPC1 (NM_018282.1,982-1000).
ctcaacctgggacatttga

SEQ ID NO: 65120 - DNA, 19 bp, Homo sapiens
  siRNA target sequence for PSPC1 (NM_018282.1,984-1002).
caacctgggacatttgaat

SEQ ID NO: 65121 - DNA, 19 bp, Homo sapiens
  siRNA target sequence for PSPC1 (NM_018282.1,990-1008).
gggacatttgaatttgagt

SEQ ID NO: 65122 - DNA, 19 bp, Homo sapiens
  siRNA target sequence for PSPC1 (NM_018282.1,1021-1039).
ggaaggctcttgatgaaat

SEQ ID NO: 65123 - DNA, 19 bp, Homo sapiens
  siRNA target sequence for PSPC1 (NM_018282.1,1050-1068).
cagcgtgagcaggttgata

SEQ ID NO: 65124 - DNA, 19 bp, Homo sapiens
  siRNA target sequence for PSPC1 (NM_018282.1,1052-1070).
gcgtgagcaggttgataga

SEQ ID NO: 65125 - DNA, 19 bp, Homo sapiens
  siRNA target sequence for PSPC1 (NM_018282.1,1053-1071).
cgtgagcaggttgatagaa

SEQ ID NO: 65126 - DNA, 19 bp, Homo sapiens
  siRNA target sequence for PSPC1 (NM_018282.1,1054-1072).
gtgagcaggttgatagaaa

SEQ ID NO: 65127 - DNA, 19 bp, Homo sapiens
  siRNA target sequence for PSPC1 (NM_018282.1,1056-1074).
gagcaggttgatagaaaca

SEQ ID NO: 65128 - DNA, 19 bp, Homo sapiens
  siRNA target sequence for PSPC1 (NM_018282.1,1218-1236).
cggaagcaaatacaactaa

SEQ ID NO: 65129 - DNA, 19 bp, Homo sapiens
  siRNA target sequence for PSPC1 (NM_018282.1,1220-1238).
gaagcaaatacaactaaga

SEQ ID NO: 65130 - DNA, 19 bp, Homo sapiens
  siRNA target sequence for PSPC1 (NM_018282.1,1306-1324).
gacagcaagagggctttaa

SEQ ID NO: 65131 - DNA, 19 bp, Homo sapiens
  siRNA target sequence for PSPC1 (NM_018282.1,1317-1335).
ggctttaagccaaactaca

SEQ ID NO: 65132 - DNA, 19 bp, Homo sapiens
  siRNA target sequence for PSPC1 (NM_018282.1,1318-1336).
gctttaagccaaactacat

SEQ ID NO: 65133 - DNA, 19 bp, Homo sapiens
  siRNA target sequence for PSPC1 (NM_018282.1,1325-1343).
gccaaactacatggaaaat

SEQ ID NO: 65134 - DNA, 19 bp, Homo sapiens
  siRNA target sequence for PTBP2 (NM_021190.1,93-111).
gaggatctgacgaactact

SEQ ID NO: 65135 - DNA, 19 bp, Homo sapiens
  siRNA target sequence for PTBP2 (NM_021190.1,125-143).
ctcagtagtccgaactcta

SEQ ID NO: 65136 - DNA, 19 bp, Homo sapiens
  siRNA target sequence for PTBP2 (NM_021190.1,127-145).
cagtagtccgaactctaat

SEQ ID NO: 65137 - DNA, 19 bp, Homo sapiens
  siRNA target sequence for PTBP2 (NM_021190.1,129-147).
gtagtccgaactctaatat

SEQ ID NO: 65138 - DNA, 19 bp, Homo sapiens
  siRNA target sequence for PTBP2 (NM_021190.1,158-176).
gtagttacagccaatggta

SEQ ID NO: 65139 - DNA, 19 bp, Homo sapiens
  siRNA target sequence for PTBP2 (NM_021190.1,167-185).
gccaatggtaatgatagta

SEQ ID NO: 65140 - DNA, 19 bp, Homo sapiens
  siRNA target sequence for PTBP2 (NM_021190.1,168-186).
ccaatggtaatgatagtaa

SEQ ID NO: 65141 - DNA, 19 bp, Homo sapiens
  siRNA target sequence for PTBP2 (NM_021190.1,221-239).
ccttctcgtgtacttcata

SEQ ID NO: 65142 - DNA, 19 bp, Homo sapiens
  siRNA target sequence for PTBP2 (NM_021190.1,222-240).
cttctcgtgtacttcatat

SEQ ID NO: 65143 - DNA, 19 bp, Homo sapiens
  siRNA target sequence for PTBP2 (NM_021190.1,227-245).
cgtgtacttcatattcgaa

SEQ ID NO: 65144 - DNA, 19 bp, Homo sapiens
  siRNA target sequence for PTBP2 (NM_021190.1,228-246).
gtgtacttcatattcgaaa

SEQ ID NO: 65145 - DNA, 19 bp, Homo sapiens
  siRNA target sequence for PTBP2 (NM_021190.1,371-389).
gctattactatggttaatt

SEQ ID NO: 65146 - DNA, 19 bp, Homo sapiens
  siRNA target sequence for PTBP2 (NM_021190.1,416-434).
cgtaaccaaccaatatata

SEQ ID NO: 65147 - DNA, 19 bp, Homo sapiens
  siRNA target sequence for PTBP2 (NM_021190.1,417-435).
gtaaccaaccaatatatat

SEQ ID NO: 65148 - DNA, 19 bp, Homo sapiens
  siRNA target sequence for PTBP2 (NM_021190.1,436-454).
ccagtactcgaatcacaaa

SEQ ID NO: 65149 - DNA, 19 bp, Homo sapiens
  siRNA target sequence for PTBP2 (NM_021190.1,442-460).
ctcgaatcacaaagaacta

SEQ ID NO: 65150 - DNA, 19 bp, Homo sapiens
  siRNA target sequence for PTBP2 (NM_021190.1,458-476).
ctaaagacagataatacat

SEQ ID NO: 65151 - DNA, 19 bp, Homo sapiens
  siRNA target sequence for PTBP2 (NM_021190.1,465-483).
cagataatacattaaacca

SEQ ID NO: 65152 - DNA, 19 bp, Homo sapiens
  siRNA target sequence for PTBP2 (NM_021190.1,515-533).
gctgtccagacagcaaata

SEQ ID NO: 65153 - DNA, 19 bp, Homo sapiens
  siRNA target sequence for PTBP2 (NM_021190.1,578-596).
gcccagagtccagtactta

SEQ ID NO: 65154 - DNA, 19 bp, Homo sapiens
  siRNA target sequence for PTBP2 (NM_021190.1,580-598).
ccagagtccagtacttaga

SEQ ID NO: 65155 - DNA, 19 bp, Homo sapiens
  siRNA target sequence for PTBP2 (NM_021190.1,581-599).
cagagtccagtacttagaa

SEQ ID NO: 65156 - DNA, 19 bp, Homo sapiens
  siRNA target sequence for PTBP2 (NM_021190.1,583-601).
gagtccagtacttagaata

SEQ ID NO: 65157 - DNA, 19 bp, Homo sapiens
  siRNA target sequence for PTBP2 (NM_021190.1,585-603).
gtccagtacttagaataat

SEQ ID NO: 65158 - DNA, 19 bp, Homo sapiens
  siRNA target sequence for PTBP2 (NM_021190.1,587-605).
ccagtacttagaataatta

SEQ ID NO: 65159 - DNA, 19 bp, Homo sapiens
  siRNA target sequence for PTBP2 (NM_021190.1,619-637).
ctaccctgtaacacttgat

SEQ ID NO: 65160 - DNA, 19 bp, Homo sapiens
  siRNA target sequence for PTBP2 (NM_021190.1,622-640).
ccctgtaacacttgatgtt

SEQ ID NO: 65161 - DNA, 19 bp, Homo sapiens
  siRNA target sequence for PTBP2 (NM_021190.1,624-642).
ctgtaacacttgatgttct

SEQ ID NO: 65162 - DNA, 19 bp, Homo sapiens
  siRNA target sequence for PTBP2 (NM_021190.1,761-779).
gccctagatggtcagaata

SEQ ID NO: 65163 - DNA, 19 bp, Homo sapiens
  siRNA target sequence for PTBP2 (NM_021190.1,762-780).
ccctagatggtcagaatat

SEQ ID NO: 65164 - DNA, 19 bp, Homo sapiens
  siRNA target sequence for PTBP2 (NM_021190.1,763-781).
cctagatggtcagaatatt

SEQ ID NO: 65165 - DNA, 19 bp, Homo sapiens
  siRNA target sequence for PTBP2 (NM_021190.1,764-782).
ctagatggtcagaatattt

SEQ ID NO: 65166 - DNA, 19 bp, Homo sapiens
  siRNA target sequence for PTBP2 (NM_021190.1,789-807).
cctgctgtaccctaaggat

SEQ ID NO: 65167 - DNA, 19 bp, Homo sapiens
  siRNA target sequence for PTBP2 (NM_021190.1,790-808).
ctgctgtaccctaaggatt

SEQ ID NO: 65168 - DNA, 19 bp, Homo sapiens
  siRNA target sequence for PTBP2 (NM_021190.1,793-811).
ctgtaccctaaggattgat

SEQ ID NO: 65169 - DNA, 19 bp, Homo sapiens
  siRNA target sequence for PTBP2 (NM_021190.1,795-813).
gtaccctaaggattgattt

SEQ ID NO: 65170 - DNA, 19 bp, Homo sapiens
  siRNA target sequence for PTBP2 (NM_021190.1,851-869).
gataaaagtagggattata

SEQ ID NO: 65171 - DNA, 19 bp, Homo sapiens
  siRNA target sequence for PTBP2 (NM_021190.1,1065-1083).
cagtcctgttggttagcaa

SEQ ID NO: 65172 - DNA, 19 bp, Homo sapiens
  siRNA target sequence for PTBP2 (NM_021190.1,1145-1163).
gtgcagcgtgtgaagattt

SEQ ID NO: 65173 - DNA, 19 bp, Homo sapiens
  siRNA target sequence for PTBP2 (NM_021190.1,1147-1165).
gcagcgtgtgaagatttta

SEQ ID NO: 65174 - DNA, 19 bp, Homo sapiens
  siRNA target sequence for PTBP2 (NM_021190.1,1148-1166).
cagcgtgtgaagattttat

SEQ ID NO: 65175 - DNA, 19 bp, Homo sapiens
  siRNA target sequence for PTBP2 (NM_021190.1,1220-1238).
cttgccatgaatcatctta

SEQ ID NO: 65176 - DNA, 19 bp, Homo sapiens
  siRNA target sequence for PTBP2 (NM_021190.1,1305-1323).
ctcgagagggacttgatga

SEQ ID NO: 65177 - DNA, 19 bp, Homo sapiens
  siRNA target sequence for PTBP2 (NM_021190.1,1319-1337).
gatgatcaagggctaacaa

SEQ ID NO: 65178 - DNA, 19 bp, Homo sapiens
  siRNA target sequence for PTBP2 (NM_021190.1,1325-1343).
caagggctaacaaaagatt

SEQ ID NO: 65179 - DNA, 19 bp, Homo sapiens
  siRNA target sequence for PTBP2 (NM_021190.1,1330-1348).
gctaacaaaagattttggt

SEQ ID NO: 65180 - DNA, 19 bp, Homo sapiens
  siRNA target sequence for PTBP2 (NM_021190.1,1331-1349).
ctaacaaaagattttggta

SEQ ID NO: 65181 - DNA, 19 bp, Homo sapiens
  siRNA target sequence for PTBP2 (NM_021190.1,1355-1373).
ccattgcatcgttttaaga

SEQ ID NO: 65182 - DNA, 19 bp, Homo sapiens
  siRNA target sequence for PTBP2 (NM_021190.1,1379-1397).
ggatccaaaaattttcaaa

SEQ ID NO: 65183 - DNA, 19 bp, Homo sapiens
  siRNA target sequence for PTBP2 (NM_021190.1,1415-1433).
gccacccttcacctatcta

SEQ ID NO: 65184 - DNA, 19 bp, Homo sapiens
  siRNA target sequence for PTBP2 (NM_021190.1,1570-1588).
ggccttgattgatcttcat

SEQ ID NO: 65185 - DNA, 19 bp, Homo sapiens
  siRNA target sequence for PTBP2 (NM_021190.1,1572-1590).
ccttgattgatcttcataa

SEQ ID NO: 65186 - DNA, 19 bp, Homo sapiens
  siRNA target sequence for R3HDM (NM_015361.2,379-397).
gtctgatactgttactgta

SEQ ID NO: 65187 - DNA, 19 bp, Homo sapiens
  siRNA target sequence for R3HDM (NM_015361.2,447-465).
caaccagagttgaaaatct

SEQ ID NO: 65188 - DNA, 19 bp, Homo sapiens
  siRNA target sequence for R3HDM (NM_015361.2,544-562).
gccattgcagtcatttgga

SEQ ID NO: 65189 - DNA, 19 bp, Homo sapiens
  siRNA target sequence for R3HDM (NM_015361.2,641-659).
ccccctgcaccagagatat

SEQ ID NO: 65190 - DNA, 19 bp, Homo sapiens
  siRNA target sequence for R3HDM (NM_015361.2,683-701).
cagatccagttaacacaat

SEQ ID NO: 65191 - DNA, 19 bp, Homo sapiens
  siRNA target sequence for R3HDM (NM_015361.2,746-764).
gaaaaggccagtgataagt

SEQ ID NO: 65192 - DNA, 19 bp, Homo sapiens
  siRNA target sequence for R3HDM (NM_015361.2,763-781).
gttgcccagaaaaatgtta

SEQ ID NO: 65193 - DNA, 19 bp, Homo sapiens
  siRNA target sequence for R3HDM (NM_015361.2,786-804).
gagattccagtcaagaata

SEQ ID NO: 65194 - DNA, 19 bp, Homo sapiens
  siRNA target sequence for R3HDM (NM_015361.2,816-834).
ctggcatagatctacatga

SEQ ID NO: 65195 - DNA, 19 bp, Homo sapiens
  siRNA target sequence for R3HDM (NM_015361.2,819-837).
gcatagatctacatgaatt

SEQ ID NO: 65196 - DNA, 19 bp, Homo sapiens
  siRNA target sequence for R3HDM (NM_015361.2,949-967).
cccaatgacatcttaccat

SEQ ID NO: 65197 - DNA, 19 bp, Homo sapiens
  siRNA target sequence for R3HDM (NM_015361.2,950-968).
ccaatgacatcttaccata

SEQ ID NO: 65198 - DNA, 19 bp, Homo sapiens
  siRNA target sequence for R3HDM (NM_015361.2,982-1000).
cagagtagccgcttacttt

SEQ ID NO: 65199 - DNA, 19 bp, Homo sapiens
  siRNA target sequence for R3HDM (NM_015361.2,986-1004).
gtagccgcttactttggat

SEQ ID NO: 65200 - DNA, 19 bp, Homo sapiens
  siRNA target sequence for R3HDM (NM_015361.2,990-1008).
ccgcttactttggattaga

SEQ ID NO: 65201 - DNA, 19 bp, Homo sapiens
  siRNA target sequence for R3HDM (NM_015361.2,1002-1020).
gattagaccacaatgttga

SEQ ID NO: 65202 - DNA, 19 bp, Homo sapiens
  siRNA target sequence for R3HDM (NM_015361.2,1024-1042).
gagtgggaagtctgtcata

SEQ ID NO: 65203 - DNA, 19 bp, Homo sapiens
  siRNA target sequence for R3HDM (NM_015361.2,1026-1044).
gtgggaagtctgtcatagt

SEQ ID NO: 65204 - DNA, 19 bp, Homo sapiens
  siRNA target sequence for R3HDM (NM_015361.2,1062-1080).
caagaatacctgatcagaa

SEQ ID NO: 65205 - DNA, 19 bp, Homo sapiens
  siRNA target sequence for R3HDM (NM_015361.2,1112-1130).
gaagactttcagaaacgtt

SEQ ID NO: 65206 - DNA, 19 bp, Homo sapiens
  siRNA target sequence for R3HDM (NM_015361.2,1115-1133).
gactttcagaaacgttata

SEQ ID NO: 65207 - DNA, 19 bp, Homo sapiens
  siRNA target sequence for R3HDM (NM_015361.2,1135-1153).
cctcaagagagataactct

SEQ ID NO: 65208 - DNA, 19 bp, Homo sapiens
  siRNA target sequence for R3HDM (NM_015361.2,1136-1154).
ctcaagagagataactcta

SEQ ID NO: 65209 - DNA, 19 bp, Homo sapiens
  siRNA target sequence for R3HDM (NM_015361.2,1145-1163).
gataactctagctttgaca

SEQ ID NO: 65210 - DNA, 19 bp, Homo sapiens
  siRNA target sequence for R3HDM (NM_015361.2,1152-1170).
ctagctttgacaaagatga

SEQ ID NO: 65211 - DNA, 19 bp, Homo sapiens
  siRNA target sequence for R3HDM (NM_015361.2,1182-1200).
gaatacgtttgaaagatga

SEQ ID NO: 65212 - DNA, 19 bp, Homo sapiens
  siRNA target sequence for R3HDM (NM_015361.2,1245-1263).
gagccagagaccgaatatt

SEQ ID NO: 65213 - DNA, 19 bp, Homo sapiens
  siRNA target sequence for R3HDM (NM_015361.2,1247-1265).
gccagagaccgaatatttt

SEQ ID NO: 65214 - DNA, 19 bp, Homo sapiens
  siRNA target sequence for R3HDM (NM_015361.2,1319-1337).
gacgaggatgccagtagta

SEQ ID NO: 65215 - DNA, 19 bp, Homo sapiens
  siRNA target sequence for R3HDM (NM_015361.2,1340-1358).
cagcagaggcgccagatat

SEQ ID NO: 65216 - DNA, 19 bp, Homo sapiens
  siRNA target sequence for R3HDM (NM_015361.2,1342-1360).
gcagaggcgccagatattt

SEQ ID NO: 65217 - DNA, 19 bp, Homo sapiens
  siRNA target sequence for R3HDM (NM_015361.2,1343-1361).
cagaggcgccagatattta

SEQ ID NO: 65218 - DNA, 19 bp, Homo sapiens
  siRNA target sequence for R3HDM (NM_015361.2,1347-1365).
ggcgccagatatttagagt

SEQ ID NO: 65219 - DNA, 19 bp, Homo sapiens
  siRNA target sequence for R3HDM (NM_015361.2,1349-1367).
cgccagatatttagagtta

SEQ ID NO: 65220 - DNA, 19 bp, Homo sapiens
  siRNA target sequence for R3HDM (NM_015361.2,1351-1369).
ccagatatttagagttaat

SEQ ID NO: 65221 - DNA, 19 bp, Homo sapiens
  siRNA target sequence for R3HDM (NM_015361.2,1376-1394).
gcttcagggagatctacaa

SEQ ID NO: 65222 - DNA, 19 bp, Homo sapiens
  siRNA target sequence for R3HDM (NM_015361.2,1410-1428).
gcactgagaatgagttgaa

SEQ ID NO: 65223 - DNA, 19 bp, Homo sapiens
  siRNA target sequence for R3HDM (NM_015361.2,1415-1433).
gagaatgagttgaagtact

SEQ ID NO: 65224 - DNA, 19 bp, Homo sapiens
  siRNA target sequence for R3HDM (NM_015361.2,1464-1482).
cagacagctctcttcgaaa

SEQ ID NO: 65225 - DNA, 19 bp, Homo sapiens
  siRNA target sequence for R3HDM (NM_015361.2,1531-1549).
cctgacaagaggtgatagt

SEQ ID NO: 65226 - DNA, 19 bp, Homo sapiens
  siRNA target sequence for R3HDM (NM_015361.2,1534-1552).
gacaagaggtgatagttct

SEQ ID NO: 65227 - DNA, 19 bp, Homo sapiens
  siRNA target sequence for R3HDM (NM_015361.2,1566-1584).
gcataggcaggctttcaaa

SEQ ID NO: 65228 - DNA, 19 bp, Homo sapiens
  siRNA target sequence for R3HDM (NM_015361.2,1567-1585).
cataggcaggctttcaaaa

SEQ ID NO: 65229 - DNA, 19 bp, Homo sapiens
  siRNA target sequence for R3HDM (NM_015361.2,1604-1622).
ggtagtgtagggtcatcta

SEQ ID NO: 65230 - DNA, 19 bp, Homo sapiens
  siRNA target sequence for R3HDM (NM_015361.2,1688-1706).
gcacctgtcgtctatccaa

SEQ ID NO: 65231 - DNA, 19 bp, Homo sapiens
  siRNA target sequence for R3HDM (NM_015361.2,1703-1721).
ccaactgtcagcactcata

SEQ ID NO: 65232 - DNA, 19 bp, Homo sapiens
  siRNA target sequence for R3HDM (NM_015361.2,1711-1729).
cagcactcatagttctctt

SEQ ID NO: 65233 - DNA, 19 bp, Homo sapiens
  siRNA target sequence for R3HDM (NM_015361.2,1732-1750).
ctttgatggtggcctaaat

SEQ ID NO: 65234 - DNA, 19 bp, Homo sapiens
  siRNA target sequence for R3HDM (NM_015361.2,1766-1784).
cctagcactagcttctttt

SEQ ID NO: 65235 - DNA, 19 bp, Homo sapiens
  siRNA target sequence for R3HDM (NM_015361.2,1770-1788).
gcactagcttctttttgct

SEQ ID NO: 65236 - DNA, 19 bp, Homo sapiens
  siRNA target sequence for R3HDM (NM_015361.2,1811-1829).
ccacctggcagtattctga

SEQ ID NO: 65237 - DNA, 19 bp, Homo sapiens
  siRNA target sequence for R3HDM (NM_015361.2,1815-1833).
ctggcagtattctgatcaa

SEQ ID NO: 65238 - DNA, 19 bp, Homo sapiens
  siRNA target sequence for R3HDM (NM_015361.2,1869-1887).
ggagtccagttgtgtataa

SEQ ID NO: 65239 - DNA, 19 bp, Homo sapiens
  siRNA target sequence for R3HDM (NM_015361.2,1870-1888).
gagtccagttgtgtataat

SEQ ID NO: 65240 - DNA, 19 bp, Homo sapiens
  siRNA target sequence for R3HDM (NM_015361.2,1897-1915).
gactcaacaaccagttaga

SEQ ID NO: 65241 - DNA, 19 bp, Homo sapiens
  siRNA target sequence for R3HDM (NM_015361.2,1964-1982).
caaccagcagctaatcaca

SEQ ID NO: 65242 - DNA, 19 bp, Homo sapiens
  siRNA target sequence for R3HDM (NM_015361.2,2102-2120).
ccacagcagtctggttata

SEQ ID NO: 65243 - DNA, 19 bp, Homo sapiens
  siRNA target sequence for R3HDM (NM_015361.2,2103-2121).
cacagcagtctggttatat

SEQ ID NO: 65244 - DNA, 19 bp, Homo sapiens
  siRNA target sequence for R3HDM (NM_015361.2,2105-2123).
cagcagtctggttatatca

SEQ ID NO: 65245 - DNA, 19 bp, Homo sapiens
  siRNA target sequence for R3HDM (NM_015361.2,2108-2126).
cagtctggttatatcatga

SEQ ID NO: 65246 - DNA, 19 bp, Homo sapiens
  siRNA target sequence for R3HDM (NM_015361.2,2354-2372).
gtcccttctgttcattaca

SEQ ID NO: 65247 - DNA, 19 bp, Homo sapiens
  siRNA target sequence for R3HDM (NM_015361.2,2371-2389).
caattcacatctaaaccaa

SEQ ID NO: 65248 - DNA, 19 bp, Homo sapiens
  siRNA target sequence for R3HDM (NM_015361.2,2407-2425).
gcagcagacaggttatcaa

SEQ ID NO: 65249 - DNA, 19 bp, Homo sapiens
  siRNA target sequence for R3HDM (NM_015361.2,2504-2522).
caacccaacagcattggaa

SEQ ID NO: 65250 - DNA, 19 bp, Homo sapiens
  siRNA target sequence for R3HDM (NM_015361.2,2537-2555).
gtggtcatcccctatactt

SEQ ID NO: 65251 - DNA, 19 bp, Homo sapiens
  siRNA target sequence for R3HDM (NM_015361.2,2604-2622).
cccatcagacttatcaaca

SEQ ID NO: 65252 - DNA, 19 bp, Homo sapiens
  siRNA target sequence for R3HDM (NM_015361.2,2613-2631).
cttatcaacagcctgttat

SEQ ID NO: 65253 - DNA, 19 bp, Homo sapiens
  siRNA target sequence for R3HDM (NM_015361.2,2627-2645).
gttatgttccctaatcagt

SEQ ID NO: 65254 - DNA, 19 bp, Homo sapiens
  siRNA target sequence for R3HDM (NM_015361.2,2635-2653).
ccctaatcagtctaatcaa

SEQ ID NO: 65255 - DNA, 19 bp, Homo sapiens
  siRNA target sequence for R3HDM (NM_015361.2,2708-2726).
caacaaaacaatttaagct

SEQ ID NO: 65256 - DNA, 19 bp, Homo sapiens
  siRNA target sequence for R3HDM (NM_015361.2,2979-2997).
gcagtgtagacaatattgt

SEQ ID NO: 65257 - DNA, 19 bp, Homo sapiens
  siRNA target sequence for R3HDM (NM_015361.2,3014-3032).
ctcagtagccccattattt

SEQ ID NO: 65258 - DNA, 19 bp, Homo sapiens
  siRNA target sequence for R3HDM (NM_015361.2,3090-3108).
ctggaccaccactttccat

SEQ ID NO: 65259 - DNA, 19 bp, Homo sapiens
  siRNA target sequence for R3HDM (NM_015361.2,3146-3164).
ggagattccaggtatccat

SEQ ID NO: 65260 - DNA, 19 bp, Homo sapiens
  siRNA target sequence for R3HDM (NM_015361.2,3203-3221).
ctgcacggacacattccaa

SEQ ID NO: 65261 - DNA, 19 bp, Homo sapiens
  siRNA target sequence for R3HDM (NM_015361.2,3317-3335).
gttgggaaggtcttggaaa

SEQ ID NO: 65262 - DNA, 19 bp, Homo sapiens
  siRNA target sequence for R3HDM (NM_015361.2,3320-3338).
gggaaggtcttggaaatta

SEQ ID NO: 65263 - DNA, 19 bp, Homo sapiens
  siRNA target sequence for R3HDM (NM_015361.2,3328-3346).
cttggaaattactgaacta

SEQ ID NO: 65264 - DNA, 19 bp, Homo sapiens
  siRNA target sequence for R3HDM (NM_015361.2,3360-3378).
ctcgcatggaagctgaaaa

SEQ ID NO: 65265 - DNA, 19 bp, Homo sapiens
  siRNA target sequence for R3HDM (NM_015361.2,3379-3397).
gctttttggggaactcttt

SEQ ID NO: 65266 - DNA, 19 bp, Homo sapiens
  siRNA target sequence for R3HDM (NM_015361.2,3487-3505).
caaccctgaacgctctaaa

SEQ ID NO: 65267 - DNA, 19 bp, Homo sapiens
  siRNA target sequence for R3HDM (NM_015361.2,3594-3612).
cagttaacaagtttaagct

SEQ ID NO: 65268 - DNA, 19 bp, Homo sapiens
  siRNA target sequence for R3HDM (NM_015361.2,3618-3636).
caagcaagaagcactatga

SEQ ID NO: 65269 - DNA, 19 bp, Homo sapiens
  siRNA target sequence for R3HDM (NM_015361.2,3621-3639).
gcaagaagcactatgactt

SEQ ID NO: 65270 - DNA, 19 bp, Homo sapiens
  siRNA target sequence for RAD52B (NM_145654.2,124-142).
gccgaggctttgcatcatt

SEQ ID NO: 65271 - DNA, 19 bp, Homo sapiens
  siRNA target sequence for RAD52B (NM_145654.2,126-144).
cgaggctttgcatcattct

SEQ ID NO: 65272 - DNA, 19 bp, Homo sapiens
  siRNA target sequence for RAD52B (NM_145654.2,163-181).
cagtttggccttctgtatt

SEQ ID NO: 65273 - DNA, 19 bp, Homo sapiens
  siRNA target sequence for RAD52B (NM_145654.2,165-183).
gtttggccttctgtattca

SEQ ID NO: 65274 - DNA, 19 bp, Homo sapiens
  siRNA target sequence for RAD52B (NM_145654.2,220-238).
ggtttctatgccgtcatta

SEQ ID NO: 65275 - DNA, 19 bp, Homo sapiens
  siRNA target sequence for RAD52B (NM_145654.2,221-239).
gtttctatgccgtcattaa

SEQ ID NO: 65276 - DNA, 19 bp, Homo sapiens
  siRNA target sequence for RAD52B (NM_145654.2,229-247).
gccgtcattaagttttatt

SEQ ID NO: 65277 - DNA, 19 bp, Homo sapiens
  siRNA target sequence for RAD52B (NM_145654.2,281-299).
gcgaccggaagcagctttt

SEQ ID NO: 65278 - DNA, 19 bp, Homo sapiens
  siRNA target sequence for RAD52B (NM_145654.2,286-304).
cggaagcagctttttcaga

SEQ ID NO: 65279 - DNA, 19 bp, Homo sapiens
  siRNA target sequence for RAD52B (NM_145654.2,322-340).
cgtcttggcaccagacata

SEQ ID NO: 65280 - DNA, 19 bp, Homo sapiens
  siRNA target sequence for RAD52B (NM_145654.2,323-341).
gtcttggcaccagacataa

SEQ ID NO: 65281 - DNA, 19 bp, Homo sapiens
  siRNA target sequence for RAD52B (NM_145654.2,358-376).
gcccttgccctgaacagtt

SEQ ID NO: 65282 - DNA, 19 bp, Homo sapiens
  siRNA target sequence for RAD52B (NM_145654.2,394-412).
gcgaattactactttggtt

SEQ ID NO: 65283 - DNA, 19 bp, Homo sapiens
  siRNA target sequence for RAD52B (NM_145654.2,395-413).
cgaattactactttggttt

SEQ ID NO: 65284 - DNA, 19 bp, Homo sapiens
  siRNA target sequence for RAD52B (NM_145654.2,538-556).
gtgttgccatcctgtgatt

SEQ ID NO: 65285 - DNA, 19 bp, Homo sapiens
  siRNA target sequence for RAD52B (NM_145654.2,600-618).
ggtggaggaaggaccatta

SEQ ID NO: 65286 - DNA, 19 bp, Homo sapiens
  siRNA target sequence for RAD52B (NM_145654.2,604-622).
gaggaaggaccattatcat

SEQ ID NO: 65287 - DNA, 19 bp, Homo sapiens
  siRNA target sequence for RAD52B (NM_145654.2,610-628).
ggaccattatcattcctta

SEQ ID NO: 65288 - DNA, 19 bp, Homo sapiens
  siRNA target sequence for RAD52B (NM_145654.2,613-631).
ccattatcattccttatga

SEQ ID NO: 65289 - DNA, 19 bp, Homo sapiens
  siRNA target sequence for RAD52B (NM_145654.2,703-721).
gttctagaaagtggtaaaa

SEQ ID NO: 65290 - DNA, 19 bp, Homo sapiens
  siRNA target sequence for RAD52B (NM_145654.2,762-780).
cagatgcgaagaagaacta

SEQ ID NO: 65291 - DNA, 19 bp, Homo sapiens
  siRNA target sequence for RAD52B (NM_145654.2,772-790).
gaagaactacacggtttaa

SEQ ID NO: 65292 - DNA, 19 bp, Homo sapiens
  siRNA target sequence for RAD52B (NM_145654.2,838-856).
gggtatctctcggatttca

SEQ ID NO: 65293 - DNA, 19 bp, Homo sapiens
  siRNA target sequence for RAVER1 (NM_133452.1,31-49).
cggacgtgtccgttactca

SEQ ID NO: 65294 - DNA, 19 bp, Homo sapiens
  siRNA target sequence for RAVER1 (NM_133452.1,136-154).
ctctagatccagaagagat

SEQ ID NO: 65295 - DNA, 19 bp, Homo sapiens
  siRNA target sequence for RAVER1 (NM_133452.1,262-280).
gtgactatgagctcaaata

SEQ ID NO: 65296 - DNA, 19 bp, Homo sapiens
  siRNA target sequence for RAVER1 (NM_133452.1,338-356).
ggccgaggccgcaatcaat

SEQ ID NO: 65297 - DNA, 19 bp, Homo sapiens
  siRNA target sequence for RAVER1 (NM_133452.1,342-360).
gaggccgcaatcaatgctt

SEQ ID NO: 65298 - DNA, 19 bp, Homo sapiens
  siRNA target sequence for RBAK (NM_021163.2,767-785).
gagttgatgacctgataga

SEQ ID NO: 65299 - DNA, 19 bp, Homo sapiens
  siRNA target sequence for RBAK (NM_021163.2,815-833).
caaggcaagctgcttgtat

SEQ ID NO: 65300 - DNA, 19 bp, Homo sapiens
  siRNA target sequence for RBAK (NM_021163.2,818-836).
ggcaagctgcttgtatcaa

SEQ ID NO: 65301 - DNA, 19 bp, Homo sapiens
  siRNA target sequence for RBAK (NM_021163.2,820-838).
caagctgcttgtatcaata

SEQ ID NO: 65302 - DNA, 19 bp, Homo sapiens
  siRNA target sequence for RBAK (NM_021163.2,823-841).
gctgcttgtatcaatagca

SEQ ID NO: 65303 - DNA, 19 bp, Homo sapiens
  siRNA target sequence for RBAK (NM_021163.2,824-842).
ctgcttgtatcaatagcaa

SEQ ID NO: 65304 - DNA, 19 bp, Homo sapiens
  siRNA target sequence for RBAK (NM_021163.2,869-887).
catttagtcaaatttacat

SEQ ID NO: 65305 - DNA, 19 bp, Homo sapiens
  siRNA target sequence for RBAK (NM_021163.2,908-926).
caagcataatagctcataa

SEQ ID NO: 65306 - DNA, 19 bp, Homo sapiens
  siRNA target sequence for RBAK (NM_021163.2,952-970).
gaatctatttcgcaattaa

SEQ ID NO: 65307 - DNA, 19 bp, Homo sapiens
  siRNA target sequence for RBAK (NM_021163.2,963-981).
gcaattaattagtagtgat

SEQ ID NO: 65308 - DNA, 19 bp, Homo sapiens
  siRNA target sequence for RBAK (NM_021163.2,987-1005).
ctatgctaggacaaaacct

SEQ ID NO: 65309 - DNA, 19 bp, Homo sapiens
  siRNA target sequence for RBAK (NM_021163.2,1063-1081).
caaaatggggatacctatt

SEQ ID NO: 65310 - DNA, 19 bp, Homo sapiens
  siRNA target sequence for RBAK (NM_021163.2,1148-1166).
gcatggaagccttagacaa

SEQ ID NO: 65311 - DNA, 19 bp, Homo sapiens
  siRNA target sequence for RBAK (NM_021163.2,1149-1167).
catggaagccttagacaat

SEQ ID NO: 65312 - DNA, 19 bp, Homo sapiens
  siRNA target sequence for RBAK (NM_021163.2,1232-1250).
ctggaccagacttcataca

SEQ ID NO: 65313 - DNA, 19 bp, Homo sapiens
  siRNA target sequence for RBAK (NM_021163.2,1235-1253).
gaccagacttcatacagat

SEQ ID NO: 65314 - DNA, 19 bp, Homo sapiens
  siRNA target sequence for RBAK (NM_021163.2,1519-1537).
caacacctaagaactcatt

SEQ ID NO: 65315 - DNA, 19 bp, Homo sapiens
  siRNA target sequence for RBAK (NM_021163.2,1753-1771).
cgaaagtctactctgatta

SEQ ID NO: 65316 - DNA, 19 bp, Homo sapiens
  siRNA target sequence for RBAK (NM_021163.2,1838-1856).
gggtgtcatacctcactat

SEQ ID NO: 65317 - DNA, 19 bp, Homo sapiens
  siRNA target sequence for RBAK (NM_021163.2,1839-1857).
ggtgtcatacctcactata

SEQ ID NO: 65318 - DNA, 19 bp, Homo sapiens
  siRNA target sequence for RBAK (NM_021163.2,1906-1924).
ggcaaaaccttcaatttaa

SEQ ID NO: 65319 - DNA, 19 bp, Homo sapiens
  siRNA target sequence for RBAK (NM_021163.2,2019-2037).
ccatcatacagctcattta

SEQ ID NO: 65320 - DNA, 19 bp, Homo sapiens
  siRNA target sequence for RBAK (NM_021163.2,2102-2120).
ggcaccagccacttccaaa

SEQ ID NO: 65321 - DNA, 19 bp, Homo sapiens
  siRNA target sequence for RBAK (NM_021163.2,2103-2121).
gcaccagccacttccaaaa

SEQ ID NO: 65322 - DNA, 19 bp, Homo sapiens
  siRNA target sequence for RBAK (NM_021163.2,2153-2171).
gaaagttattcaatgagtt

SEQ ID NO: 65323 - DNA, 19 bp, Homo sapiens
  siRNA target sequence for RBAK (NM_021163.2,2169-2187).
gttgtcatactatactgaa

SEQ ID NO: 65324 - DNA, 19 bp, Homo sapiens
  siRNA target sequence for RBAK (NM_021163.2,2178-2196).
ctatactgaacattataga

SEQ ID NO: 65325 - DNA, 19 bp, Homo sapiens
  siRNA target sequence for RBAK (NM_021163.2,2349-2367).
cactatacatcatcgaatt

SEQ ID NO: 65326 - DNA, 19 bp, Homo sapiens
  siRNA target sequence for RBAK (NM_021163.2,2630-2648).
gaaatatgaacgtacttga

SEQ ID NO: 65327 - DNA, 19 bp, Homo sapiens
  siRNA target sequence for RBAK (NM_021163.2,2640-2658).
cgtacttgatgtggaaaat

SEQ ID NO: 65328 - DNA, 19 bp, Homo sapiens
  siRNA target sequence for RBM14 (NM_006328.1,167-185).
gagctgcgccgtcatgaaa

SEQ ID NO: 65329 - DNA, 19 bp, Homo sapiens
  siRNA target sequence for RBM14 (NM_006328.1,169-187).
gctgcgccgtcatgaaaca

SEQ ID NO: 65330 - DNA, 19 bp, Homo sapiens
  siRNA target sequence for RBM14 (NM_006328.1,172-190).
gcgccgtcatgaaacagtt

SEQ ID NO: 65331 - DNA, 19 bp, Homo sapiens
  siRNA target sequence for RBM14 (NM_006328.1,296-314).
cccaaggcctcttaatact

SEQ ID NO: 65332 - DNA, 19 bp, Homo sapiens
  siRNA target sequence for RBM14 (NM_006328.1,413-431).
gaaagactacgcgtttgtt

SEQ ID NO: 65333 - DNA, 19 bp, Homo sapiens
  siRNA target sequence for RBM14 (NM_006328.1,742-760).
ctccccgagcctcttatgt

SEQ ID NO: 65334 - DNA, 19 bp, Homo sapiens
  siRNA target sequence for RBM14 (NM_006328.1,1250-1268).
ctcctcactagcttatgga

SEQ ID NO: 65335 - DNA, 19 bp, Homo sapiens
  siRNA target sequence for RBM14 (NM_006328.1,1269-1287).
gcccaggcagcttcatata

SEQ ID NO: 65336 - DNA, 19 bp, Homo sapiens
  siRNA target sequence for RBM14 (NM_006328.1,1270-1288).
cccaggcagcttcatataa

SEQ ID NO: 65337 - DNA, 19 bp, Homo sapiens
  siRNA target sequence for RBM14 (NM_006328.1,1293-1311).
cagccctcggcctcttaca

SEQ ID NO: 65338 - DNA, 19 bp, Homo sapiens
  siRNA target sequence for RBM14 (NM_006328.1,1295-1313).
gccctcggcctcttacaat

SEQ ID NO: 65339 - DNA, 19 bp, Homo sapiens
  siRNA target sequence for RBM14 (NM_006328.1,1316-1334).
ccagtctgccccatatgct

SEQ ID NO: 65340 - DNA, 19 bp, Homo sapiens
  siRNA target sequence for RBM14 (NM_006328.1,1482-1500).
cagacccagctgaatagtt

SEQ ID NO: 65341 - DNA, 19 bp, Homo sapiens
  siRNA target sequence for RBM14 (NM_006328.1,1841-1859).
ctacgacgatccctacaaa

SEQ ID NO: 65342 - DNA, 19 bp, Homo sapiens
  siRNA target sequence for RBM14 (NM_006328.1,1863-1881).
gctgtcgccatgtcgaaaa

SEQ ID NO: 65343 - DNA, 19 bp, Homo sapiens
  siRNA target sequence for RBM14 (NM_006328.1,1866-1884).
gtcgccatgtcgaaaaggt

SEQ ID NO: 65344 - DNA, 19 bp, Homo sapiens
  siRNA target sequence for RBM14 (NM_006328.1,1868-1886).
cgccatgtcgaaaaggtat

SEQ ID NO: 65345 - DNA, 19 bp, Homo sapiens
  siRNA target sequence for RBM14 (NM_006328.1,1933-1951).
cagagtcgcagctttcgtt

SEQ ID NO: 65346 - DNA, 19 bp, Homo sapiens
  siRNA target sequence for RBM14 (NM_006328.1,1966-1984).
caaagtcctcgctggatta

SEQ ID NO: 65347 - DNA, 19 bp, Homo sapiens
  siRNA target sequence for RBM14 (NM_006328.1,2019-2037).
cgctattcgggctcctata

SEQ ID NO: 65348 - DNA, 19 bp, Homo sapiens
  siRNA target sequence for RBM14 (NM_006328.1,2020-2038).
gctattcgggctcctataa

SEQ ID NO: 65349 - DNA, 19 bp, Homo sapiens
  siRNA target sequence for RBM14 (NM_006328.1,2021-2039).
ctattcgggctcctataat

SEQ ID NO: 65350 - DNA, 19 bp, Homo sapiens
  siRNA target sequence for RBM14 (NM_006328.1,2026-2044).
cgggctcctataatgatta

SEQ ID NO: 65351 - DNA, 19 bp, Homo sapiens
  siRNA target sequence for RBM14 (NM_006328.1,2029-2047).
gctcctataatgattacct

SEQ ID NO: 65352 - DNA, 19 bp, Homo sapiens
  siRNA target sequence for RECQL4 (NM_004260.1,388-406).
ctaggaagagcctcatcta

SEQ ID NO: 65353 - DNA, 19 bp, Homo sapiens
  siRNA target sequence for RECQL4 (NM_004260.1,585-603).
cagtgaggtcccagatttt

SEQ ID NO: 65354 - DNA, 19 bp, Homo sapiens
  siRNA target sequence for RECQL4 (NM_004260.1,639-657).
ctcagaggaatcacaactt

SEQ ID NO: 65355 - DNA, 19 bp, Homo sapiens
  siRNA target sequence for RECQL4 (NM_004260.1,1040-1058).
gccatgacaggggcaatta

SEQ ID NO: 65356 - DNA, 19 bp, Homo sapiens
  siRNA target sequence for RECQL4 (NM_004260.1,2071-2089).
ctgctgcaaggcaaacgtt

SEQ ID NO: 65357 - DNA, 19 bp, Homo sapiens
  siRNA target sequence for RECQL4 (NM_004260.1,2073-2091).
gctgcaaggcaaacgtttt

SEQ ID NO: 65358 - DNA, 19 bp, Homo sapiens
  siRNA target sequence for RECQL4 (NM_004260.1,2098-2116).
ctcgattccattatcattt

SEQ ID NO: 65359 - DNA, 19 bp, Homo sapiens
  siRNA target sequence for RECQL4 (NM_004260.1,2200-2218).
ggtcgtgcccccaaaacca

SEQ ID NO: 65360 - DNA, 19 bp, Homo sapiens
  siRNA target sequence for RECQL4 (NM_004260.1,3138-3156).
ggagaaggaccagatatgt

SEQ ID NO: 65361 - DNA, 19 bp, Homo sapiens
  siRNA target sequence for RECQL4 (NM_004260.1,3540-3558).
ccgacgcttctggagaaaa

SEQ ID NO: 65362 - DNA, 19 bp, Homo sapiens
  siRNA target sequence for RECQL4 (NM_004260.1,3542-3560).
gacgcttctggagaaaata

SEQ ID NO: 65363 - DNA, 19 bp, Homo sapiens
  siRNA target sequence for RECQL5 (NM_004259.3,172-190).
ccataccacctttcctttt

SEQ ID NO: 65364 - DNA, 19 bp, Homo sapiens
  siRNA target sequence for RECQL5 (NM_004259.3,269-287).
gcgaccatggctgtagtaa

SEQ ID NO: 65365 - DNA, 19 bp, Homo sapiens
  siRNA target sequence for RECQL5 (NM_004259.3,270-288).
cgaccatggctgtagtaaa

SEQ ID NO: 65366 - DNA, 19 bp, Homo sapiens
  siRNA target sequence for RECQL5 (NM_004259.3,271-289).
gaccatggctgtagtaaaa

SEQ ID NO: 65367 - DNA, 19 bp, Homo sapiens
  siRNA target sequence for RECQL5 (NM_004259.3,367-385).
caaaggcatcaccattgta

SEQ ID NO: 65368 - DNA, 19 bp, Homo sapiens
  siRNA target sequence for RECQL5 (NM_004259.3,427-445).
cttgctaaccctaaaggta

SEQ ID NO: 65369 - DNA, 19 bp, Homo sapiens
  siRNA target sequence for RECQL5 (NM_004259.3,436-454).
cctaaaggtacgagtaagt

SEQ ID NO: 65370 - DNA, 19 bp, Homo sapiens
  siRNA target sequence for RECQL5 (NM_004259.3,648-666).
cccaatgggggcatgactt

SEQ ID NO: 65371 - DNA, 19 bp, Homo sapiens
  siRNA target sequence for RECQL5 (NM_004259.3,649-667).
ccaatgggggcatgacttt

SEQ ID NO: 65372 - DNA, 19 bp, Homo sapiens
  siRNA target sequence for RECQL5 (NM_004259.3,919-937).
ggctgataaagggttatct

SEQ ID NO: 65373 - DNA, 19 bp, Homo sapiens
  siRNA target sequence for RECQL5 (NM_004259.3,1012-1030).
gaacgccaaggcttaccat

SEQ ID NO: 65374 - DNA, 19 bp, Homo sapiens
  siRNA target sequence for RECQL5 (NM_004259.3,1084-1102).
gaaggtccctgtaattgtt

SEQ ID NO: 65375 - DNA, 19 bp, Homo sapiens
  siRNA target sequence for RECQL5 (NM_004259.3,1094-1112).
gtaattgttgcaaccatta

SEQ ID NO: 65376 - DNA, 19 bp, Homo sapiens
  siRNA target sequence for RECQL5 (NM_004259.3,1146-1164).
ggtttgtcgcccattggaa

SEQ ID NO: 65377 - DNA, 19 bp, Homo sapiens
  siRNA target sequence for RECQL5 (NM_004259.3,1147-1165).
gtttgtcgcccattggaat

SEQ ID NO: 65378 - DNA, 19 bp, Homo sapiens
  siRNA target sequence for RECQL5 (NM_004259.3,1161-1179).
ggaatattgccaagtctat

SEQ ID NO: 65379 - DNA, 19 bp, Homo sapiens
  siRNA target sequence for RECQL5 (NM_004259.3,1230-1248).
cctggtgccgtctctatta

SEQ ID NO: 65380 - DNA, 19 bp, Homo sapiens
  siRNA target sequence for RECQL5 (NM_004259.3,1320-1338).
gaaacaaagcatctgataa

SEQ ID NO: 65381 - DNA, 19 bp, Homo sapiens
  siRNA target sequence for RECQL5 (NM_004259.3,1332-1350).
ctgataaagccactatcat

SEQ ID NO: 65382 - DNA, 19 bp, Homo sapiens
  siRNA target sequence for RECQL5 (NM_004259.3,1342-1360).
cactatcatggcctttgat

SEQ ID NO: 65383 - DNA, 19 bp, Homo sapiens
  siRNA target sequence for RECQL5 (NM_004259.3,2000-2018).
gatgggcagccctatgaca

SEQ ID NO: 65384 - DNA, 19 bp, Homo sapiens
  siRNA target sequence for RECQL5 (NM_004259.3,2085-2103).
caccagcctcccatgtgta

SEQ ID NO: 65385 - DNA, 19 bp, Homo sapiens
  siRNA target sequence for RECQL5 (NM_004259.3,2553-2571).
cgatggccccagagaagta

SEQ ID NO: 65386 - DNA, 19 bp, Homo sapiens
  siRNA target sequence for RECQL5 (NM_004259.3,2830-2848).
cgaacagggcaccttgaat

SEQ ID NO: 65387 - DNA, 19 bp, Homo sapiens
  siRNA target sequence for RECQL5 (NM_004259.3,2957-2975).
gcttccaaggagttgttta

SEQ ID NO: 65388 - DNA, 19 bp, Homo sapiens
  siRNA target sequence for RECQL5 (NM_004259.3,3024-3042).
ctggaaggagcgtgaaaga

SEQ ID NO: 65389 - DNA, 19 bp, Homo sapiens
  siRNA target sequence for RIG-I (NM_014314.2,275-293).
gtatattcaggctgagaaa

SEQ ID NO: 65390 - DNA, 19 bp, Homo sapiens
  siRNA target sequence for RIG-I (NM_014314.2,361-379).
gctggttccgtggcttttt

SEQ ID NO: 65391 - DNA, 19 bp, Homo sapiens
  siRNA target sequence for RIG-I (NM_014314.2,365-383).
gttccgtggctttttggat

SEQ ID NO: 65392 - DNA, 19 bp, Homo sapiens
  siRNA target sequence for RIG-I (NM_014314.2,386-404).
cctagaccatgcaggttat

SEQ ID NO: 65393 - DNA, 19 bp, Homo sapiens
  siRNA target sequence for RIG-I (NM_014314.2,387-405).
ctagaccatgcaggttatt

SEQ ID NO: 65394 - DNA, 19 bp, Homo sapiens
  siRNA target sequence for RIG-I (NM_014314.2,461-479).
ggagtatagattactttta

SEQ ID NO: 65395 - DNA, 19 bp, Homo sapiens
  siRNA target sequence for RIG-I (NM_014314.2,515-533).
cccaaccgatatcatttct

SEQ ID NO: 65396 - DNA, 19 bp, Homo sapiens
  siRNA target sequence for RIG-I (NM_014314.2,532-550).
ctgatctgtctgaatgttt

SEQ ID NO: 65397 - DNA, 19 bp, Homo sapiens
  siRNA target sequence for RIG-I (NM_014314.2,656-674).
ctggcccaaaactttgaaa

SEQ ID NO: 65398 - DNA, 19 bp, Homo sapiens
  siRNA target sequence for RIG-I (NM_014314.2,761-779).
ggataagatggaaacttct

SEQ ID NO: 65399 - DNA, 19 bp, Homo sapiens
  siRNA target sequence for RIG-I (NM_014314.2,778-796).
ctgacatacagattttcta

SEQ ID NO: 65400 - DNA, 19 bp, Homo sapiens
  siRNA target sequence for RIG-I (NM_014314.2,816-834).
cagaatcttagtgagaatt

SEQ ID NO: 65401 - DNA, 19 bp, Homo sapiens
  siRNA target sequence for RIG-I (NM_014314.2,843-861).
ccttcagaagtgtctgata

SEQ ID NO: 65402 - DNA, 19 bp, Homo sapiens
  siRNA target sequence for RIG-I (NM_014314.2,847-865).
cagaagtgtctgatacaaa

SEQ ID NO: 65403 - DNA, 19 bp, Homo sapiens
  siRNA target sequence for RIG-I (NM_014314.2,849-867).
gaagtgtctgatacaaact

SEQ ID NO: 65404 - DNA, 19 bp, Homo sapiens
  siRNA target sequence for RIG-I (NM_014314.2,852-870).
gtgtctgatacaaacttgt

SEQ ID NO: 65405 - DNA, 19 bp, Homo sapiens
  siRNA target sequence for RIG-I (NM_014314.2,866-884).
cttgtacagcccatttaaa

SEQ ID NO: 65406 - DNA, 19 bp, Homo sapiens
  siRNA target sequence for RIG-I (NM_014314.2,869-887).
gtacagcccatttaaacca

SEQ ID NO: 65407 - DNA, 19 bp, Homo sapiens
  siRNA target sequence for RIG-I (NM_014314.2,1038-1056).
gtcttttttgcgaatcaga

SEQ ID NO: 65408 - DNA, 19 bp, Homo sapiens
  siRNA target sequence for RIG-I (NM_014314.2,1049-1067).
gaatcagatcccagtgtat

SEQ ID NO: 65409 - DNA, 19 bp, Homo sapiens
  siRNA target sequence for RIG-I (NM_014314.2,1209-1227).
cttgtgaacaaccttaaaa

SEQ ID NO: 65410 - DNA, 19 bp, Homo sapiens
  siRNA target sequence for RIG-I (NM_014314.2,1220-1238).
ccttaaaaagggaacgatt

SEQ ID NO: 65411 - DNA, 19 bp, Homo sapiens
  siRNA target sequence for RIG-I (NM_014314.2,1229-1247).
gggaacgattccatcacta

SEQ ID NO: 65412 - DNA, 19 bp, Homo sapiens
  siRNA target sequence for RIG-I (NM_014314.2,1230-1248).
ggaacgattccatcactat

SEQ ID NO: 65413 - DNA, 19 bp, Homo sapiens
  siRNA target sequence for RIG-I (NM_014314.2,1234-1252).
cgattccatcactatccat

SEQ ID NO: 65414 - DNA, 19 bp, Homo sapiens
  siRNA target sequence for RIG-I (NM_014314.2,1239-1257).
ccatcactatccatcttta

SEQ ID NO: 65415 - DNA, 19 bp, Homo sapiens
  siRNA target sequence for RIG-I (NM_014314.2,1279-1297).
gccacaacactagtaaaca

SEQ ID NO: 65416 - DNA, 19 bp, Homo sapiens
  siRNA target sequence for RIG-I (NM_014314.2,1296-1314).
caacacccgtacaatatga

SEQ ID NO: 65417 - DNA, 19 bp, Homo sapiens
  siRNA target sequence for RIG-I (NM_014314.2,1299-1317).
cacccgtacaatatgatca

SEQ ID NO: 65418 - DNA, 19 bp, Homo sapiens
  siRNA target sequence for RIG-I (NM_014314.2,1302-1320).
ccgtacaatatgatcatgt

SEQ ID NO: 65419 - DNA, 19 bp, Homo sapiens
  siRNA target sequence for RIG-I (NM_014314.2,1303-1321).
cgtacaatatgatcatgtt

SEQ ID NO: 65420 - DNA, 19 bp, Homo sapiens
  siRNA target sequence for RIG-I (NM_014314.2,1313-1331).
gatcatgtttaattatcta

SEQ ID NO: 65421 - DNA, 19 bp, Homo sapiens
  siRNA target sequence for RIG-I (NM_014314.2,1419-1437).
gatgaagccttggattata

SEQ ID NO: 65422 - DNA, 19 bp, Homo sapiens
  siRNA target sequence for RIG-I (NM_014314.2,1422-1440).
gaagccttggattatatct

SEQ ID NO: 65423 - DNA, 19 bp, Homo sapiens
  siRNA target sequence for RIG-I (NM_014314.2,1445-1463).
gctgtgtgcttctcttgat

SEQ ID NO: 65424 - DNA, 19 bp, Homo sapiens
  siRNA target sequence for RIG-I (NM_014314.2,1461-1479).
gatgcgtcagtgatagcaa

SEQ ID NO: 65425 - DNA, 19 bp, Homo sapiens
  siRNA target sequence for RIG-I (NM_014314.2,1477-1495).
caacagtcaaacacaatct

SEQ ID NO: 65426 - DNA, 19 bp, Homo sapiens
  siRNA target sequence for RIG-I (NM_014314.2,1503-1521).
ctggagcaagttgtttata

SEQ ID NO: 65427 - DNA, 19 bp, Homo sapiens
  siRNA target sequence for RIG-I (NM_014314.2,1552-1570).
cacggattagcgacaaatt

SEQ ID NO: 65428 - DNA, 19 bp, Homo sapiens
  siRNA target sequence for RIG-I (NM_014314.2,1554-1572).
cggattagcgacaaattta

SEQ ID NO: 65429 - DNA, 19 bp, Homo sapiens
  siRNA target sequence for RIG-I (NM_014314.2,1555-1573).
ggattagcgacaaatttaa

SEQ ID NO: 65430 - DNA, 19 bp, Homo sapiens
  siRNA target sequence for RIG-I (NM_014314.2,1556-1574).
gattagcgacaaatttaaa

SEQ ID NO: 65431 - DNA, 19 bp, Homo sapiens
  siRNA target sequence for RIG-I (NM_014314.2,1634-1652).
cctcgaaaacttatctcaa

SEQ ID NO: 65432 - DNA, 19 bp, Homo sapiens
  siRNA target sequence for RIG-I (NM_014314.2,1635-1653).
ctcgaaaacttatctcaaa

SEQ ID NO: 65433 - DNA, 19 bp, Homo sapiens
  siRNA target sequence for RIG-I (NM_014314.2,1656-1674).
caaaatagggaatttggaa

SEQ ID NO: 65434 - DNA, 19 bp, Homo sapiens
  siRNA target sequence for RIG-I (NM_014314.2,1698-1716).
gttacagttcagaaagcat

SEQ ID NO: 65435 - DNA, 19 bp, Homo sapiens
  siRNA target sequence for RIG-I (NM_014314.2,1783-1801).
cttcacatttgcggaaata

SEQ ID NO: 65436 - DNA, 19 bp, Homo sapiens
  siRNA target sequence for RIG-I (NM_014314.2,1822-1840).
gtgagcatgcacgaatgaa

SEQ ID NO: 65437 - DNA, 19 bp, Homo sapiens
  siRNA target sequence for RIG-I (NM_014314.2,1888-1906).
caggattcgatgagattga

SEQ ID NO: 65438 - DNA, 19 bp, Homo sapiens
  siRNA target sequence for RIG-I (NM_014314.2,1899-1917).
gagattgagcaagatctta

SEQ ID NO: 65439 - DNA, 19 bp, Homo sapiens
  siRNA target sequence for RIG-I (NM_014314.2,1901-1919).
gattgagcaagatcttact

SEQ ID NO: 65440 - DNA, 19 bp, Homo sapiens
  siRNA target sequence for RIG-I (NM_014314.2,2013-2031).
caagaagagtaccacttaa

SEQ ID NO: 65441 - DNA, 19 bp, Homo sapiens
  siRNA target sequence for RIG-I (NM_014314.2,2035-2053).
cagagacaataacaattct

SEQ ID NO: 65442 - DNA, 19 bp, Homo sapiens
  siRNA target sequence for RIG-I (NM_014314.2,2071-2089).
cacttgtggacgctttaaa

SEQ ID NO: 65443 - DNA, 19 bp, Homo sapiens
  siRNA target sequence for RIG-I (NM_014314.2,2076-2094).
gtggacgctttaaaaaatt

SEQ ID NO: 65444 - DNA, 19 bp, Homo sapiens
  siRNA target sequence for RIG-I (NM_014314.2,2124-2142).
ctaaaacctggcatattga

SEQ ID NO: 65445 - DNA, 19 bp, Homo sapiens
  siRNA target sequence for RIG-I (NM_014314.2,2143-2161).
ctggacgtggcaaaacaaa

SEQ ID NO: 65446 - DNA, 19 bp, Homo sapiens
  siRNA target sequence for RIG-I (NM_014314.2,2146-2164).
gacgtggcaaaacaaatca

SEQ ID NO: 65447 - DNA, 19 bp, Homo sapiens
  siRNA target sequence for RIG-I (NM_014314.2,2148-2166).
cgtggcaaaacaaatcaga

SEQ ID NO: 65448 - DNA, 19 bp, Homo sapiens
  siRNA target sequence for RIG-I (NM_014314.2,2149-2167).
gtggcaaaacaaatcagaa

SEQ ID NO: 65449 - DNA, 19 bp, Homo sapiens
  siRNA target sequence for RIG-I (NM_014314.2,2183-2201).
cccggcacagaagtgtata

SEQ ID NO: 65450 - DNA, 19 bp, Homo sapiens
  siRNA target sequence for RIG-I (NM_014314.2,2185-2203).
cggcacagaagtgtatatt

SEQ ID NO: 65451 - DNA, 19 bp, Homo sapiens
  siRNA target sequence for RIG-I (NM_014314.2,2188-2206).
cacagaagtgtatattgga

SEQ ID NO: 65452 - DNA, 19 bp, Homo sapiens
  siRNA target sequence for RIG-I (NM_014314.2,2218-2236).
ccagtggagatcacaatat

SEQ ID NO: 65453 - DNA, 19 bp, Homo sapiens
  siRNA target sequence for RIG-I (NM_014314.2,2224-2242).
gagatcacaatattctgat

SEQ ID NO: 65454 - DNA, 19 bp, Homo sapiens
  siRNA target sequence for RIG-I (NM_014314.2,2304-2322).
gagtatgtgggcaatgtca

SEQ ID NO: 65455 - DNA, 19 bp, Homo sapiens
  siRNA target sequence for RIG-I (NM_014314.2,2313-2331).
ggcaatgtcatcaaaatga

SEQ ID NO: 65456 - DNA, 19 bp, Homo sapiens
  siRNA target sequence for RIG-I (NM_014314.2,2371-2389).
gcttccttctgactagtaa

SEQ ID NO: 65457 - DNA, 19 bp, Homo sapiens
  siRNA target sequence for RIG-I (NM_014314.2,2386-2404).
gtaatgctggtgtaattga

SEQ ID NO: 65458 - DNA, 19 bp, Homo sapiens
  siRNA target sequence for RIG-I (NM_014314.2,2438-2456).
gatgaatgactctatttta

SEQ ID NO: 65459 - DNA, 19 bp, Homo sapiens
  siRNA target sequence for RIG-I (NM_014314.2,2478-2496).
gcagtatttagggaaaaga

SEQ ID NO: 65460 - DNA, 19 bp, Homo sapiens
  siRNA target sequence for RIG-I (NM_014314.2,2501-2519).
gcatatacagactcatgaa

SEQ ID NO: 65461 - DNA, 19 bp, Homo sapiens
  siRNA target sequence for RIG-I (NM_014314.2,2596-2614).
gcaaagccttggcatgtta

SEQ ID NO: 65462 - DNA, 19 bp, Homo sapiens
  siRNA target sequence for RIG-I (NM_014314.2,2620-2638).
ctgacgtaagagtgataga

SEQ ID NO: 65463 - DNA, 19 bp, Homo sapiens
  siRNA target sequence for RIG-I (NM_014314.2,2700-2718).
cccaagccaaagcagtttt

SEQ ID NO: 65464 - DNA, 19 bp, Homo sapiens
  siRNA target sequence for RIG-I (NM_014314.2,2776-2794).
ggggaatccatgtgaagta

SEQ ID NO: 65465 - DNA, 19 bp, Homo sapiens
  siRNA target sequence for RIG-I (NM_014314.2,2779-2797).
gaatccatgtgaagtacaa

SEQ ID NO: 65466 - DNA, 19 bp, Homo sapiens
  siRNA target sequence for RIG-I (NM_014314.2,2784-2802).
catgtgaagtacaagacat

SEQ ID NO: 65467 - DNA, 19 bp, Homo sapiens
  siRNA target sequence for RIG-I (NM_014314.2,2879-2897).
gtggaaggactttcatttt

SEQ ID NO: 65468 - DNA, 19 bp, Homo sapiens
  siRNA target sequence for RNASE2 (NM_002934.1,150-168).
gtcaaacctccacagttta

SEQ ID NO: 65469 - DNA, 19 bp, Homo sapiens
  siRNA target sequence for RNASE2 (NM_002934.1,170-188).
ctgggctcaatggtttgaa

SEQ ID NO: 65470 - DNA, 19 bp, Homo sapiens
  siRNA target sequence for RNASE2 (NM_002934.1,186-204).
gaaacccagcacatcaata

SEQ ID NO: 65471 - DNA, 19 bp, Homo sapiens
  siRNA target sequence for RNASE2 (NM_002934.1,228-246).
gcaatgcaggtcattaaca

SEQ ID NO: 65472 - DNA, 19 bp, Homo sapiens
  siRNA target sequence for RNASE2 (NM_002934.1,229-247).
caatgcaggtcattaacaa

SEQ ID NO: 65473 - DNA, 19 bp, Homo sapiens
  siRNA target sequence for RNASE2 (NM_002934.1,332-350).
gacctgtcctagtaacaaa

SEQ ID NO: 65474 - DNA, 19 bp, Homo sapiens
  siRNA target sequence for RNASE2 (NM_002934.1,412-430).
ctccaagtccacagaatat

SEQ ID NO: 65475 - DNA, 19 bp, Homo sapiens
  siRNA target sequence for RNASE2 (NM_002934.1,454-472).
caccagcaaacatgttcta

SEQ ID NO: 65476 - DNA, 19 bp, Homo sapiens
  siRNA target sequence for RNASE3 (NM_002935.1,142-160).
gccagacccccacagttta

SEQ ID NO: 65477 - DNA, 19 bp, Homo sapiens
  siRNA target sequence for RNASE3 (NM_002935.1,205-223).
cctcgatgcaccattgcaa

SEQ ID NO: 65478 - DNA, 19 bp, Homo sapiens
  siRNA target sequence for RNASE3 (NM_002935.1,206-224).
ctcgatgcaccattgcaat

SEQ ID NO: 65479 - DNA, 19 bp, Homo sapiens
  siRNA target sequence for RNASE3 (NM_002935.1,220-238).
gcaatgcgggcaattaaca

SEQ ID NO: 65480 - DNA, 19 bp, Homo sapiens
  siRNA target sequence for RNASE3 (NM_002935.1,225-243).
gcgggcaattaacaattat

SEQ ID NO: 65481 - DNA, 19 bp, Homo sapiens
  siRNA target sequence for RNASE3 (NM_002935.1,228-246).
ggcaattaacaattatcga

SEQ ID NO: 65482 - DNA, 19 bp, Homo sapiens
  siRNA target sequence for RNASE3 (NM_002935.1,229-247).
gcaattaacaattatcgat

SEQ ID NO: 65483 - DNA, 19 bp, Homo sapiens
  siRNA target sequence for RNASE3 (NM_002935.1,320-338).
gtatacgctgccctcataa

SEQ ID NO: 65484 - DNA, 19 bp, Homo sapiens
  siRNA target sequence for RNASE3 (NM_002935.1,325-343).
cgctgccctcataacagaa

SEQ ID NO: 65485 - DNA, 19 bp, Homo sapiens
  siRNA target sequence for RNASE3 (NM_002935.1,339-357).
cagaactctcaacaattgt

SEQ ID NO: 65486 - DNA, 19 bp, Homo sapiens
  siRNA target sequence for RNASE3 (NM_002935.1,368-386).
gattccgggtgcctttact

SEQ ID NO: 65487 - DNA, 19 bp, Homo sapiens
  siRNA target sequence for RNASE3 (NM_002935.1,387-405).
ccactgtgacctcataaat

SEQ ID NO: 65488 - DNA, 19 bp, Homo sapiens
  siRNA target sequence for RNASE3 (NM_002935.1,449-467).
caggaaggaggttctatgt

SEQ ID NO: 65489 - DNA, 19 bp, Homo sapiens
  siRNA target sequence for RNASE3 (NM_002935.1,452-470).
gaaggaggttctatgtagt

SEQ ID NO: 65490 - DNA, 19 bp, Homo sapiens
  siRNA target sequence for RNASE4 (NM_002937.3,570-588).
ctgcagaggacccattcat

SEQ ID NO: 65491 - DNA, 19 bp, Homo sapiens
  siRNA target sequence for RNASE4 (NM_002937.3,711-729).
gatcgctactgcaacttga

SEQ ID NO: 65492 - DNA, 19 bp, Homo sapiens
  siRNA target sequence for RNASE4 (NM_002937.3,714-732).
cgctactgcaacttgatga

SEQ ID NO: 65493 - DNA, 19 bp, Homo sapiens
  siRNA target sequence for RNASE4 (NM_002937.3,715-733).
gctactgcaacttgatgat

SEQ ID NO: 65494 - DNA, 19 bp, Homo sapiens
  siRNA target sequence for RNASE4 (NM_002937.3,792-810).
gatatctggaacattcgta

SEQ ID NO: 65495 - DNA, 19 bp, Homo sapiens
  siRNA target sequence for RNASE4 (NM_002937.3,823-841).
ccaccaatatccaatgcaa

SEQ ID NO: 65496 - DNA, 19 bp, Homo sapiens
  siRNA target sequence for RNASE6 (NM_005615.2,380-398).
caaggctcactggtttgaa

SEQ ID NO: 65497 - DNA, 19 bp, Homo sapiens
  siRNA target sequence for RNASE6 (NM_005615.2,383-401).
ggctcactggtttgaaatt

SEQ ID NO: 65498 - DNA, 19 bp, Homo sapiens
  siRNA target sequence for RNASE6 (NM_005615.2,415-433).
caagtcctctccaatgcaa

SEQ ID NO: 65499 - DNA, 19 bp, Homo sapiens
  siRNA target sequence for RNASE6 (NM_005615.2,465-483).
cagcactgtaagcatcaaa

SEQ ID NO: 65500 - DNA, 19 bp, Homo sapiens
  siRNA target sequence for RNASE6 (NM_005615.2,467-485).
gcactgtaagcatcaaaat

SEQ ID NO: 65501 - DNA, 19 bp, Homo sapiens
  siRNA target sequence for RNASE6 (NM_005615.2,468-486).
cactgtaagcatcaaaata

SEQ ID NO: 65502 - DNA, 19 bp, Homo sapiens
  siRNA target sequence for RNASE6 (NM_005615.2,472-490).
gtaagcatcaaaatacctt

SEQ ID NO: 65503 - DNA, 19 bp, Homo sapiens
  siRNA target sequence for RNASE6 (NM_005615.2,528-546).
gatttgctcagcattgtct

SEQ ID NO: 65504 - DNA, 19 bp, Homo sapiens
  siRNA target sequence for RNASE6 (NM_005615.2,648-666).
gctgcccagtacaaattct

SEQ ID NO: 65505 - DNA, 19 bp, Homo sapiens
  siRNA target sequence for RNASE6 (NM_005615.2,697-715).
gcgatcccccctacaagtt

SEQ ID NO: 65506 - DNA, 19 bp, Homo sapiens
  siRNA target sequence for RNASE6 (NM_005615.2,720-738).
cctgtacacttagatagta

SEQ ID NO: 65507 - DNA, 19 bp, Homo sapiens
  siRNA target sequence for RNASE6 (NM_005615.2,721-739).
ctgtacacttagatagtat

SEQ ID NO: 65508 - DNA, 19 bp, Homo sapiens
  siRNA target sequence for RNASE7 (NM_032572.2,632-650).
gtaagcctccccagaaaaa

SEQ ID NO: 65509 - DNA, 19 bp, Homo sapiens
  siRNA target sequence for RNASE8 (NM_138331.1,155-173).
cagccatgagcatcatcaa

SEQ ID NO: 65510 - DNA, 19 bp, Homo sapiens
  siRNA target sequence for RNASE8 (NM_138331.1,157-175).
gccatgagcatcatcaata

SEQ ID NO: 65511 - DNA, 19 bp, Homo sapiens
  siRNA target sequence for RNASE8 (NM_138331.1,158-176).
ccatgagcatcatcaataa

SEQ ID NO: 65512 - DNA, 19 bp, Homo sapiens
  siRNA target sequence for RNPC4 (NM_018107.3,187-205).
gatgactttgacatagtga

SEQ ID NO: 65513 - DNA, 19 bp, Homo sapiens
  siRNA target sequence for RNPC4 (NM_018107.3,216-234).
gctggaagctccctataaa

SEQ ID NO: 65514 - DNA, 19 bp, Homo sapiens
  siRNA target sequence for RNPC4 (NM_018107.3,217-235).
ctggaagctccctataaaa

SEQ ID NO: 65515 - DNA, 19 bp, Homo sapiens
  siRNA target sequence for RNPC4 (NM_018107.3,219-237).
ggaagctccctataaaaaa

SEQ ID NO: 65516 - DNA, 19 bp, Homo sapiens
  siRNA target sequence for RNPC4 (NM_018107.3,343-361).
ggggagacaagcaatcgta

SEQ ID NO: 65517 - DNA, 19 bp, Homo sapiens
  siRNA target sequence for RNPC4 (NM_018107.3,376-394).
cggtatagacggagaaata

SEQ ID NO: 65518 - DNA, 19 bp, Homo sapiens
  siRNA target sequence for RNPC4 (NM_018107.3,378-396).
gtatagacggagaaatagt

SEQ ID NO: 65519 - DNA, 19 bp, Homo sapiens
  siRNA target sequence for RNPC4 (NM_018107.3,488-506).
gtgaggatcgtgtgcatta

SEQ ID NO: 65520 - DNA, 19 bp, Homo sapiens
  siRNA target sequence for RNPC4 (NM_018107.3,517-535).
ccacttgccactggttata

SEQ ID NO: 65521 - DNA, 19 bp, Homo sapiens
  siRNA target sequence for RNPC4 (NM_018107.3,580-598).
gtcagggagccagttgata

SEQ ID NO: 65522 - DNA, 19 bp, Homo sapiens
  siRNA target sequence for RNPC4 (NM_018107.3,584-602).
gggagccagttgataatct

SEQ ID NO: 65523 - DNA, 19 bp, Homo sapiens
  siRNA target sequence for RNPC4 (NM_018107.3,616-634).
cgtgatgcccgcacagttt

SEQ ID NO: 65524 - DNA, 19 bp, Homo sapiens
  siRNA target sequence for RNPC4 (NM_018107.3,617-635).
gtgatgcccgcacagtttt

SEQ ID NO: 65525 - DNA, 19 bp, Homo sapiens
  siRNA target sequence for RNPC4 (NM_018107.3,619-637).
gatgcccgcacagttttct

SEQ ID NO: 65526 - DNA, 19 bp, Homo sapiens
  siRNA target sequence for RNPC4 (NM_018107.3,622-640).
gcccgcacagttttctgta

SEQ ID NO: 65527 - DNA, 19 bp, Homo sapiens
  siRNA target sequence for RNPC4 (NM_018107.3,623-641).
cccgcacagttttctgtat

SEQ ID NO: 65528 - DNA, 19 bp, Homo sapiens
  siRNA target sequence for RNPC4 (NM_018107.3,667-685).
cgagatctggaggactttt

SEQ ID NO: 65529 - DNA, 19 bp, Homo sapiens
  siRNA target sequence for RNPC4 (NM_018107.3,731-749).
ggaactcacgtcgttctaa

SEQ ID NO: 65530 - DNA, 19 bp, Homo sapiens
  siRNA target sequence for RNPC4 (NM_018107.3,822-840).
gctgggagtgcctatcatt

SEQ ID NO: 65531 - DNA, 19 bp, Homo sapiens
  siRNA target sequence for RNPC4 (NM_018107.3,825-843).
gggagtgcctatcattgta

SEQ ID NO: 65532 - DNA, 19 bp, Homo sapiens
  siRNA target sequence for RNPC4 (NM_018107.3,827-845).
gagtgcctatcattgtaca

SEQ ID NO: 65533 - DNA, 19 bp, Homo sapiens
  siRNA target sequence for RNPC4 (NM_018107.3,911-929).
gaccaatgcgcctctatgt

SEQ ID NO: 65534 - DNA, 19 bp, Homo sapiens
  siRNA target sequence for RNPC4 (NM_018107.3,930-948).
gggttccctgcacttcaat

SEQ ID NO: 65535 - DNA, 19 bp, Homo sapiens
  siRNA target sequence for RNPC4 (NM_018107.3,931-949).
ggttccctgcacttcaata

SEQ ID NO: 65536 - DNA, 19 bp, Homo sapiens
  siRNA target sequence for RNPC4 (NM_018107.3,981-999).
gccctttggtaaaattgat

SEQ ID NO: 65537 - DNA, 19 bp, Homo sapiens
  siRNA target sequence for RNPC4 (NM_018107.3,1011-1029).
gatgaaggactcagataca

SEQ ID NO: 65538 - DNA, 19 bp, Homo sapiens
  siRNA target sequence for RNPC4 (NM_018107.3,1032-1050).
ccgctctaaaggttatggt

SEQ ID NO: 65539 - DNA, 19 bp, Homo sapiens
  siRNA target sequence for RNPC4 (NM_018107.3,1033-1051).
cgctctaaaggttatggtt

SEQ ID NO: 65540 - DNA, 19 bp, Homo sapiens
  siRNA target sequence for RNPC4 (NM_018107.3,1162-1180).
ggtggcacagacatcactt

SEQ ID NO: 65541 - DNA, 19 bp, Homo sapiens
  siRNA target sequence for RNPC4 (NM_018107.3,1214-1232).
cagcaggtggacgttttca

SEQ ID NO: 65542 - DNA, 19 bp, Homo sapiens
  siRNA target sequence for RNPC6 (NM_153020.1,146-164).
ggatcccaatcccatcatt

SEQ ID NO: 65543 - DNA, 19 bp, Homo sapiens
  siRNA target sequence for RNPC6 (NM_153020.1,191-209).
ggcatacttaggagcaaaa

SEQ ID NO: 65544 - DNA, 19 bp, Homo sapiens
  siRNA target sequence for RNPC6 (NM_153020.1,236-254).
ctttggtgttcaacaactt

SEQ ID NO: 65545 - DNA, 19 bp, Homo sapiens
  siRNA target sequence for RNPC6 (NM_153020.1,255-273).
catccagcccttatacaaa

SEQ ID NO: 65546 - DNA, 19 bp, Homo sapiens
  siRNA target sequence for RNPC6 (NM_153020.1,483-501).
gctgctgcaggatatgtta

SEQ ID NO: 65547 - DNA, 19 bp, Homo sapiens
  siRNA target sequence for RNPC6 (NM_153020.1,626-644).
gcagacagaccgaatgcaa

SEQ ID NO: 65548 - DNA, 19 bp, Homo sapiens
  siRNA target sequence for RNPC6 (NM_153020.1,627-645).
cagacagaccgaatgcaat

SEQ ID NO: 65549 - DNA, 19 bp, Homo sapiens
  siRNA target sequence for RoXaN (NM_017590.4,272-290).
cgacactacccctaaagca

SEQ ID NO: 65550 - DNA, 19 bp, Homo sapiens
  siRNA target sequence for RoXaN (NM_017590.4,273-291).
gacactacccctaaagcaa

SEQ ID NO: 65551 - DNA, 19 bp, Homo sapiens
  siRNA target sequence for RoXaN (NM_017590.4,459-477).
gtgcaagctgcatgtcaat

SEQ ID NO: 65552 - DNA, 19 bp, Homo sapiens
  siRNA target sequence for RoXaN (NM_017590.4,497-515).
ccatgggcctgtatgagaa

SEQ ID NO: 65553 - DNA, 19 bp, Homo sapiens
  siRNA target sequence for RoXaN (NM_017590.4,579-597).
caaggcacgcgctctcaat

SEQ ID NO: 65554 - DNA, 19 bp, Homo sapiens
  siRNA target sequence for RoXaN (NM_017590.4,582-600).
ggcacgcgctctcaatgaa

SEQ ID NO: 65555 - DNA, 19 bp, Homo sapiens
  siRNA target sequence for RoXaN (NM_017590.4,584-602).
cacgcgctctcaatgaact

SEQ ID NO: 65556 - DNA, 19 bp, Homo sapiens
  siRNA target sequence for RoXaN (NM_017590.4,649-667).
gccctgccccacgatgaaa

SEQ ID NO: 65557 - DNA, 19 bp, Homo sapiens
  siRNA target sequence for RoXaN (NM_017590.4,713-731).
gagttcgcaaggcgtataa

SEQ ID NO: 65558 - DNA, 19 bp, Homo sapiens
  siRNA target sequence for RoXaN (NM_017590.4,715-733).
gttcgcaaggcgtataaga

SEQ ID NO: 65559 - DNA, 19 bp, Homo sapiens
  siRNA target sequence for RoXaN (NM_017590.4,796-814).
cagggaacttctaatggat

SEQ ID NO: 65560 - DNA, 19 bp, Homo sapiens
  siRNA target sequence for RoXaN (NM_017590.4,962-980).
ccgacagcctggatgactt

SEQ ID NO: 65561 - DNA, 19 bp, Homo sapiens
  siRNA target sequence for RoXaN (NM_017590.4,981-999).
ctcagacggggatgtcttt

SEQ ID NO: 65562 - DNA, 19 bp, Homo sapiens
  siRNA target sequence for RoXaN (NM_017590.4,1383-1401).
ccctagcggtgctcagaaa

SEQ ID NO: 65563 - DNA, 19 bp, Homo sapiens
  siRNA target sequence for RoXaN (NM_017590.4,1463-1481).
ctgccacccacgagttcaa

SEQ ID NO: 65564 - DNA, 19 bp, Homo sapiens
  siRNA target sequence for RoXaN (NM_017590.4,1881-1899).
gatctgctttgacagtaaa

SEQ ID NO: 65565 - DNA, 19 bp, Homo sapiens
  siRNA target sequence for RoXaN (NM_017590.4,2165-2183).
gcatgacccacgaagacat

SEQ ID NO: 65566 - DNA, 19 bp, Homo sapiens
  siRNA target sequence for RoXaN (NM_017590.4,2286-2304).
cctgcagatgaagtttgta

SEQ ID NO: 65567 - DNA, 19 bp, Homo sapiens
  siRNA target sequence for RoXaN (NM_017590.4,2452-2470).
ccactgccatccattcgta

SEQ ID NO: 65568 - DNA, 19 bp, Homo sapiens
  siRNA target sequence for RoXaN (NM_017590.4,2453-2471).
cactgccatccattcgtaa

SEQ ID NO: 65569 - DNA, 19 bp, Homo sapiens
  siRNA target sequence for RoXaN (NM_017590.4,2569-2587).
gacatgtggaccttcatga

SEQ ID NO: 65570 - DNA, 19 bp, Homo sapiens
  siRNA target sequence for RoXaN (NM_017590.4,2716-2734).
gactacgcggacatcatga

SEQ ID NO: 65571 - DNA, 19 bp, Homo sapiens
  siRNA target sequence for RSN (NM_002956.2,246-264).
gctccagtagaaaaaacca

SEQ ID NO: 65572 - DNA, 19 bp, Homo sapiens
  siRNA target sequence for RSN (NM_002956.2,342-360).
cgagtttgggtgaatggaa

SEQ ID NO: 65573 - DNA, 19 bp, Homo sapiens
  siRNA target sequence for RSN (NM_002956.2,343-361).
gagtttgggtgaatggaaa

SEQ ID NO: 65574 - DNA, 19 bp, Homo sapiens
  siRNA target sequence for RSN (NM_002956.2,345-363).
gtttgggtgaatggaaata

SEQ ID NO: 65575 - DNA, 19 bp, Homo sapiens
  siRNA target sequence for RSN (NM_002956.2,410-428).
ccagtgggctggaattgtt

SEQ ID NO: 65576 - DNA, 19 bp, Homo sapiens
  siRNA target sequence for RSN (NM_002956.2,413-431).
gtgggctggaattgtttta

SEQ ID NO: 65577 - DNA, 19 bp, Homo sapiens
  siRNA target sequence for RSN (NM_002956.2,512-530).
ccgaccttcaaagttaaca

SEQ ID NO: 65578 - DNA, 19 bp, Homo sapiens
  siRNA target sequence for RSN (NM_002956.2,533-551).
gaaggtgcaagcagaagat

SEQ ID NO: 65579 - DNA, 19 bp, Homo sapiens
  siRNA target sequence for RSN (NM_002956.2,578-596).
cgcctcccgagctacttca

SEQ ID NO: 65580 - DNA, 19 bp, Homo sapiens
  siRNA target sequence for RSN (NM_002956.2,636-654).
ccctccaccccttcaaaca

SEQ ID NO: 65581 - DNA, 19 bp, Homo sapiens
  siRNA target sequence for RSN (NM_002956.2,705-723).
ccgatcagcaaccttacaa

SEQ ID NO: 65582 - DNA, 19 bp, Homo sapiens
  siRNA target sequence for RSN (NM_002956.2,878-896).
gtgtggcgtggagttagat

SEQ ID NO: 65583 - DNA, 19 bp, Homo sapiens
  siRNA target sequence for RSN (NM_002956.2,971-989).
cgctcctgtccacaaagtt

SEQ ID NO: 65584 - DNA, 19 bp, Homo sapiens
  siRNA target sequence for RSN (NM_002956.2,976-994).
ctgtccacaaagttaccaa

SEQ ID NO: 65585 - DNA, 19 bp, Homo sapiens
  siRNA target sequence for RSN (NM_002956.2,980-998).
ccacaaagttaccaagatt

SEQ ID NO: 65586 - DNA, 19 bp, Homo sapiens
  siRNA target sequence for RSN (NM_002956.2,1144-1162).
ccagtcggacaggactatt

SEQ ID NO: 65587 - DNA, 19 bp, Homo sapiens
  siRNA target sequence for RSN (NM_002956.2,1179-1197).
cgttacgccaggaagatct

SEQ ID NO: 65588 - DNA, 19 bp, Homo sapiens
  siRNA target sequence for RSN (NM_002956.2,1484-1502).
ccgggttgaagaagaatca

SEQ ID NO: 65589 - DNA, 19 bp, Homo sapiens
  siRNA target sequence for RSN (NM_002956.2,1485-1503).
cgggttgaagaagaatcaa

SEQ ID NO: 65590 - DNA, 19 bp, Homo sapiens
  siRNA target sequence for RSN (NM_002956.2,1622-1640).
cactagggtggctacagtt

SEQ ID NO: 65591 - DNA, 19 bp, Homo sapiens
  siRNA target sequence for RSN (NM_002956.2,1642-1660).
cagaaaagtcacgtataat

SEQ ID NO: 65592 - DNA, 19 bp, Homo sapiens
  siRNA target sequence for RSN (NM_002956.2,1714-1732).
gaaggctagagtccaataa

SEQ ID NO: 65593 - DNA, 19 bp, Homo sapiens
  siRNA target sequence for RSN (NM_002956.2,1764-1782).
cttttgcaagagataagct

SEQ ID NO: 65594 - DNA, 19 bp, Homo sapiens
  siRNA target sequence for RSN (NM_002956.2,1881-1899).
gagataaaggctctgtata

SEQ ID NO: 65595 - DNA, 19 bp, Homo sapiens
  siRNA target sequence for RSN (NM_002956.2,1946-1964).
gctggagcatgccaacaaa

SEQ ID NO: 65596 - DNA, 19 bp, Homo sapiens
  siRNA target sequence for RSN (NM_002956.2,2082-2100).
gcagaatttgctgaactaa

SEQ ID NO: 65597 - DNA, 19 bp, Homo sapiens
  siRNA target sequence for RSN (NM_002956.2,2083-2101).
cagaatttgctgaactaaa

SEQ ID NO: 65598 - DNA, 19 bp, Homo sapiens
  siRNA target sequence for RSN (NM_002956.2,2133-2151).
caacacgaaatagaaaatt

SEQ ID NO: 65599 - DNA, 19 bp, Homo sapiens
  siRNA target sequence for RSN (NM_002956.2,2203-2221).
ccttgagggctaaactgat

SEQ ID NO: 65600 - DNA, 19 bp, Homo sapiens
  siRNA target sequence for RSN (NM_002956.2,2209-2227).
gggctaaactgatgaaagt

SEQ ID NO: 65601 - DNA, 19 bp, Homo sapiens
  siRNA target sequence for RSN (NM_002956.2,2210-2228).
ggctaaactgatgaaagtt

SEQ ID NO: 65602 - DNA, 19 bp, Homo sapiens
  siRNA target sequence for RSN (NM_002956.2,2361-2379).
gtactgcaagccaaatgca

SEQ ID NO: 65603 - DNA, 19 bp, Homo sapiens
  siRNA target sequence for RSN (NM_002956.2,2389-2407).
ccaaggttattgataattt

SEQ ID NO: 65604 - DNA, 19 bp, Homo sapiens
  siRNA target sequence for RSN (NM_002956.2,2390-2408).
caaggttattgataatttt

SEQ ID NO: 65605 - DNA, 19 bp, Homo sapiens
  siRNA target sequence for RSN (NM_002956.2,2466-2484).
gccagttccgaaggtaaat

SEQ ID NO: 65606 - DNA, 19 bp, Homo sapiens
  siRNA target sequence for RSN (NM_002956.2,2478-2496).
ggtaaatcggaaatgaaga

SEQ ID NO: 65607 - DNA, 19 bp, Homo sapiens
  siRNA target sequence for RSN (NM_002956.2,2521-2539).
ctgagaaacagattaaaca

SEQ ID NO: 65608 - DNA, 19 bp, Homo sapiens
  siRNA target sequence for RSN (NM_002956.2,2605-2623).
gagagctaaagcttactaa

SEQ ID NO: 65609 - DNA, 19 bp, Homo sapiens
  siRNA target sequence for RSN (NM_002956.2,2641-2659).
gtgaagtcagtcaagtgaa

SEQ ID NO: 65610 - DNA, 19 bp, Homo sapiens
  siRNA target sequence for RSN (NM_002956.2,2740-2758).
gtatgcaagaaactgtaaa

SEQ ID NO: 65611 - DNA, 19 bp, Homo sapiens
  siRNA target sequence for RSN (NM_002956.2,2818-2836).
gagaaaacttagcagatat

SEQ ID NO: 65612 - DNA, 19 bp, Homo sapiens
  siRNA target sequence for RSN (NM_002956.2,2830-2848).
cagatatggaggcaaaatt

SEQ ID NO: 65613 - DNA, 19 bp, Homo sapiens
  siRNA target sequence for RSN (NM_002956.2,2832-2850).
gatatggaggcaaaattta

SEQ ID NO: 65614 - DNA, 19 bp, Homo sapiens
  siRNA target sequence for RSN (NM_002956.2,2970-2988).
gaattacgtctgaaagaaa

SEQ ID NO: 65615 - DNA, 19 bp, Homo sapiens
  siRNA target sequence for RSN (NM_002956.2,3015-3033).
cttacaaaggctaatgaaa

SEQ ID NO: 65616 - DNA, 19 bp, Homo sapiens
  siRNA target sequence for RSN (NM_002956.2,3195-3213).
ctgaaagccaggtatgaga

SEQ ID NO: 65617 - DNA, 19 bp, Homo sapiens
  siRNA target sequence for RSN (NM_002956.2,3214-3232).
gagccacttctgagacaaa

SEQ ID NO: 65618 - DNA, 19 bp, Homo sapiens
  siRNA target sequence for RSN (NM_002956.2,3692-3710).
ggacgaagtcacaagtcat

SEQ ID NO: 65619 - DNA, 19 bp, Homo sapiens
  siRNA target sequence for RSN (NM_002956.2,3695-3713).
cgaagtcacaagtcatcaa

SEQ ID NO: 65620 - DNA, 19 bp, Homo sapiens
  siRNA target sequence for RSN (NM_002956.2,3726-3744).
gaaagatctgtgctcaata

SEQ ID NO: 65621 - DNA, 19 bp, Homo sapiens
  siRNA target sequence for RSN (NM_002956.2,3740-3758).
caataatcagttgttagaa

SEQ ID NO: 65622 - DNA, 19 bp, Homo sapiens
  siRNA target sequence for RSN (NM_002956.2,3815-3833).
gcagaaatccatcagtata

SEQ ID NO: 65623 - DNA, 19 bp, Homo sapiens
  siRNA target sequence for RSN (NM_002956.2,3818-3836).
gaaatccatcagtataact

SEQ ID NO: 65624 - DNA, 19 bp, Homo sapiens
  siRNA target sequence for RSN (NM_002956.2,3838-3856).
gtgccttactcacagaaaa

SEQ ID NO: 65625 - DNA, 19 bp, Homo sapiens
  siRNA target sequence for RSN (NM_002956.2,3841-3859).
ccttactcacagaaaagga

SEQ ID NO: 65626 - DNA, 19 bp, Homo sapiens
  siRNA target sequence for RSN (NM_002956.2,3842-3860).
cttactcacagaaaaggat

SEQ ID NO: 65627 - DNA, 19 bp, Homo sapiens
  siRNA target sequence for RSN (NM_002956.2,3942-3960).
cagactctagagtctgata

SEQ ID NO: 65628 - DNA, 19 bp, Homo sapiens
  siRNA target sequence for RSN (NM_002956.2,3969-3987).
ctcgagctcaaggtaaaga

SEQ ID NO: 65629 - DNA, 19 bp, Homo sapiens
  siRNA target sequence for RSN (NM_002956.2,3992-4010).
ggagcttcaactcaaagaa

SEQ ID NO: 65630 - DNA, 19 bp, Homo sapiens
  siRNA target sequence for RSN (NM_002956.2,4028-4046).
cagctcctcaggtaataca

SEQ ID NO: 65631 - DNA, 19 bp, Homo sapiens
  siRNA target sequence for RSN (NM_002956.2,4030-4048).
gctcctcaggtaatacaga

SEQ ID NO: 65632 - DNA, 19 bp, Homo sapiens
  siRNA target sequence for RSN (NM_002956.2,4053-4071).
caggcagacgaggatgaaa

SEQ ID NO: 65633 - DNA, 19 bp, Homo sapiens
  siRNA target sequence for RSN (NM_002956.2,4075-4093).
cccaggagagtcagattga

SEQ ID NO: 65634 - DNA, 19 bp, Homo sapiens
  siRNA target sequence for RSN (NM_002956.2,4088-4106).
gattgatttcctaaattca

SEQ ID NO: 65635 - DNA, 19 bp, Homo sapiens
  siRNA target sequence for RSN (NM_002956.2,4092-4110).
gatttcctaaattcagtaa

SEQ ID NO: 65636 - DNA, 19 bp, Homo sapiens
  siRNA target sequence for RSN (NM_002956.2,4115-4133).
ggaccttcaaaggaagaat

SEQ ID NO: 65637 - DNA, 19 bp, Homo sapiens
  siRNA target sequence for RSN (NM_002956.2,4187-4205).
cggggatgacctaaacaat

SEQ ID NO: 65638 - DNA, 19 bp, Homo sapiens
  siRNA target sequence for RSN (NM_002956.2,4188-4206).
ggggatgacctaaacaatt

SEQ ID NO: 65639 - DNA, 19 bp, Homo sapiens
  siRNA target sequence for RSN (NM_002956.2,4189-4207).
gggatgacctaaacaatta

SEQ ID NO: 65640 - DNA, 19 bp, Homo sapiens
  siRNA target sequence for RSN (NM_002956.2,4190-4208).
ggatgacctaaacaattat

SEQ ID NO: 65641 - DNA, 19 bp, Homo sapiens
  siRNA target sequence for RSN (NM_002956.2,4365-4383).
gaacgcccatactgtgaaa

SEQ ID NO: 65642 - DNA, 19 bp, Homo sapiens
  siRNA target sequence for RSN (NM_002956.2,4417-4435).
gcaatgacgacgaaacctt

SEQ ID NO: 65643 - DNA, 19 bp, Homo sapiens
  siRNA target sequence for RSN (NM_198240.1,1518-1536).
cttgaggtggctacagttt

SEQ ID NO: 65644 - DNA, 19 bp, Homo sapiens
  siRNA target sequence for RY1 (NM_006857.1,403-421).
gcctatgccataaatgtct

SEQ ID NO: 65645 - DNA, 19 bp, Homo sapiens
  siRNA target sequence for RY1 (NM_006857.1,440-458).
ggcagtacatgaatcgaaa

SEQ ID NO: 65646 - DNA, 19 bp, Homo sapiens
  siRNA target sequence for RY1 (NM_006857.1,441-459).
gcagtacatgaatcgaaaa

SEQ ID NO: 65647 - DNA, 19 bp, Homo sapiens
  siRNA target sequence for RY1 (NM_006857.1,444-462).
gtacatgaatcgaaaaggt

SEQ ID NO: 65648 - DNA, 19 bp, Homo sapiens
  siRNA target sequence for SART3 (NM_014706.2,134-152).
gtggccgctgcgacataca

SEQ ID NO: 65649 - DNA, 19 bp, Homo sapiens
  siRNA target sequence for SART3 (NM_014706.2,623-641).
gttcgctccgtgtttgaaa

SEQ ID NO: 65650 - DNA, 19 bp, Homo sapiens
  siRNA target sequence for SART3 (NM_014706.2,645-663).
ctctctcgtctgttggttt

SEQ ID NO: 65651 - DNA, 19 bp, Homo sapiens
  siRNA target sequence for SART3 (NM_014706.2,649-667).
ctcgtctgttggtttacat

SEQ ID NO: 65652 - DNA, 19 bp, Homo sapiens
  siRNA target sequence for SART3 (NM_014706.2,651-669).
cgtctgttggtttacatat

SEQ ID NO: 65653 - DNA, 19 bp, Homo sapiens
  siRNA target sequence for SART3 (NM_014706.2,691-709).
ggaggcttaccgagagttt

SEQ ID NO: 65654 - DNA, 19 bp, Homo sapiens
  siRNA target sequence for SART3 (NM_014706.2,694-712).
ggcttaccgagagtttgaa

SEQ ID NO: 65655 - DNA, 19 bp, Homo sapiens
  siRNA target sequence for SART3 (NM_014706.2,729-747).
ctgctcggcttgagaaagt

SEQ ID NO: 65656 - DNA, 19 bp, Homo sapiens
  siRNA target sequence for SART3 (NM_014706.2,833-851).
ccaataccagagtcagtaa

SEQ ID NO: 65657 - DNA, 19 bp, Homo sapiens
  siRNA target sequence for SART3 (NM_014706.2,834-852).
caataccagagtcagtaat

SEQ ID NO: 65658 - DNA, 19 bp, Homo sapiens
  siRNA target sequence for SART3 (NM_014706.2,958-976).
cgattttgagatgaaaatt

SEQ ID NO: 65659 - DNA, 19 bp, Homo sapiens
  siRNA target sequence for SART3 (NM_014706.2,987-1005).
ctcgcattcagttgatctt

SEQ ID NO: 65660 - DNA, 19 bp, Homo sapiens
  siRNA target sequence for SART3 (NM_014706.2,1042-1060).
cttatggatccgttacagt

SEQ ID NO: 65661 - DNA, 19 bp, Homo sapiens
  siRNA target sequence for SART3 (NM_014706.2,1066-1084).
cctagatcgacaactgaaa

SEQ ID NO: 65662 - DNA, 19 bp, Homo sapiens
  siRNA target sequence for SART3 (NM_014706.2,1070-1088).
gatcgacaactgaaagtaa

SEQ ID NO: 65663 - DNA, 19 bp, Homo sapiens
  siRNA target sequence for SART3 (NM_014706.2,1106-1124).
gtacataaccgcgctatta

SEQ ID NO: 65664 - DNA, 19 bp, Homo sapiens
  siRNA target sequence for SART3 (NM_014706.2,1109-1127).
cataaccgcgctattagaa

SEQ ID NO: 65665 - DNA, 19 bp, Homo sapiens
  siRNA target sequence for SART3 (NM_014706.2,1264-1282).
gatttggcaggcatacctt

SEQ ID NO: 65666 - DNA, 19 bp, Homo sapiens
  siRNA target sequence for SART3 (NM_014706.2,1269-1287).
ggcaggcataccttgatta

SEQ ID NO: 65667 - DNA, 19 bp, Homo sapiens
  siRNA target sequence for SART3 (NM_014706.2,1309-1327).
caaacaagactccagtaaa

SEQ ID NO: 65668 - DNA, 19 bp, Homo sapiens
  siRNA target sequence for SART3 (NM_014706.2,1358-1376).
cgtgccttggagtatctga

SEQ ID NO: 65669 - DNA, 19 bp, Homo sapiens
  siRNA target sequence for SART3 (NM_014706.2,1412-1430).
gatccaagctgcgtgatta

SEQ ID NO: 65670 - DNA, 19 bp, Homo sapiens
  siRNA target sequence for SART3 (NM_014706.2,1416-1434).
caagctgcgtgattatgca

SEQ ID NO: 65671 - DNA, 19 bp, Homo sapiens
  siRNA target sequence for SART3 (NM_014706.2,1454-1472).
gctcgactgtgcaataaca

SEQ ID NO: 65672 - DNA, 19 bp, Homo sapiens
  siRNA target sequence for SART3 (NM_014706.2,1455-1473).
ctcgactgtgcaataacat

SEQ ID NO: 65673 - DNA, 19 bp, Homo sapiens
  siRNA target sequence for SART3 (NM_014706.2,1501-1519).
catcatgaccagaggaaat

SEQ ID NO: 65674 - DNA, 19 bp, Homo sapiens
  siRNA target sequence for SART3 (NM_014706.2,1636-1654).
gcacgtctgcgaagtgtta

SEQ ID NO: 65675 - DNA, 19 bp, Homo sapiens
  siRNA target sequence for SART3 (NM_014706.2,1640-1658).
gtctgcgaagtgttactca

SEQ ID NO: 65676 - DNA, 19 bp, Homo sapiens
  siRNA target sequence for SART3 (NM_014706.2,1692-1710).
gggatatagctgttcagaa

SEQ ID NO: 65677 - DNA, 19 bp, Homo sapiens
  siRNA target sequence for SART3 (NM_014706.2,1720-1738).
ccgattagctcgtgtcaat

SEQ ID NO: 65678 - DNA, 19 bp, Homo sapiens
  siRNA target sequence for SART3 (NM_014706.2,1731-1749).
gtgtcaatgagcagagaat

SEQ ID NO: 65679 - DNA, 19 bp, Homo sapiens
  siRNA target sequence for SART3 (NM_014706.2,2207-2225).
cagatccgacccatcttca

SEQ ID NO: 65680 - DNA, 19 bp, Homo sapiens
  siRNA target sequence for SART3 (NM_014706.2,2251-2269).
ctgctacgtggagtttaaa

SEQ ID NO: 65681 - DNA, 19 bp, Homo sapiens
  siRNA target sequence for SART3 (NM_014706.2,2253-2271).
gctacgtggagtttaaaga

SEQ ID NO: 65682 - DNA, 19 bp, Homo sapiens
  siRNA target sequence for SART3 (NM_014706.2,2299-2317).
gatggaccggaaaagtgta

SEQ ID NO: 65683 - DNA, 19 bp, Homo sapiens
  siRNA target sequence for SART3 (NM_014706.2,2302-2320).
ggaccggaaaagtgtagaa

SEQ ID NO: 65684 - DNA, 19 bp, Homo sapiens
  siRNA target sequence for SART3 (NM_014706.2,2358-2376).
gcaaaaaccccgattttaa

SEQ ID NO: 65685 - DNA, 19 bp, Homo sapiens
  siRNA target sequence for SART3 (NM_014706.2,2429-2447).
ctgcctttctcctgtacta

SEQ ID NO: 65686 - DNA, 19 bp, Homo sapiens
  siRNA target sequence for SART3 (NM_014706.2,2433-2451).
ctttctcctgtactaaaga

SEQ ID NO: 65687 - DNA, 19 bp, Homo sapiens
  siRNA target sequence for SART3 (NM_014706.2,2536-2554).
ggcctacgtggagtatgaa

SEQ ID NO: 65688 - DNA, 19 bp, Homo sapiens
  siRNA target sequence for SART3 (NM_014706.2,2539-2557).
ctacgtggagtatgaaaat

SEQ ID NO: 65689 - DNA, 19 bp, Homo sapiens
  siRNA target sequence for SART3 (NM_014706.2,2542-2560).
cgtggagtatgaaaatgaa

SEQ ID NO: 65690 - DNA, 19 bp, Homo sapiens
  siRNA target sequence for SART3 (NM_014706.2,2543-2561).
gtggagtatgaaaatgaat

SEQ ID NO: 65691 - DNA, 19 bp, Homo sapiens
  siRNA target sequence for SART3 (NM_014706.2,2568-2586).
cgtcgcaggctgtgatgaa

SEQ ID NO: 65692 - DNA, 19 bp, Homo sapiens
  siRNA target sequence for SART3 (NM_014706.2,2594-2612).
ggcatgactatcaaagaga

SEQ ID NO: 65693 - DNA, 19 bp, Homo sapiens
  siRNA target sequence for SART3 (NM_014706.2,2595-2613).
gcatgactatcaaagagaa

SEQ ID NO: 65694 - DNA, 19 bp, Homo sapiens
  siRNA target sequence for SART3 (NM_014706.2,2857-2875).
gatgtccaatgccgatttt

SEQ ID NO: 65695 - DNA, 19 bp, Homo sapiens
  siRNA target sequence for SBNO1 (NM_018183.2,39-57).
gagtgagagtggaattagt

SEQ ID NO: 65696 - DNA, 19 bp, Homo sapiens
  siRNA target sequence for SBNO1 (NM_018183.2,56-74).
gtccgaatgacctctttga

SEQ ID NO: 65697 - DNA, 19 bp, Homo sapiens
  siRNA target sequence for SBNO1 (NM_018183.2,58-76).
ccgaatgacctctttgata

SEQ ID NO: 65698 - DNA, 19 bp, Homo sapiens
  siRNA target sequence for SBNO1 (NM_018183.2,129-147).
gcagtcagtgccacttagt

SEQ ID NO: 65699 - DNA, 19 bp, Homo sapiens
  siRNA target sequence for SBNO1 (NM_018183.2,138-156).
gccacttagtgcattagaa

SEQ ID NO: 65700 - DNA, 19 bp, Homo sapiens
  siRNA target sequence for SBNO1 (NM_018183.2,146-164).
gtgcattagaactaggttt

SEQ ID NO: 65701 - DNA, 19 bp, Homo sapiens
  siRNA target sequence for SBNO1 (NM_018183.2,211-229).
cctactccagcactattaa

SEQ ID NO: 65702 - DNA, 19 bp, Homo sapiens
  siRNA target sequence for SBNO1 (NM_018183.2,212-230).
ctactccagcactattaaa

SEQ ID NO: 65703 - DNA, 19 bp, Homo sapiens
  siRNA target sequence for SBNO1 (NM_018183.2,286-304).
ccacccttgggatctacaa

SEQ ID NO: 65704 - DNA, 19 bp, Homo sapiens
  siRNA target sequence for SBNO1 (NM_018183.2,287-305).
cacccttgggatctacaat

SEQ ID NO: 65705 - DNA, 19 bp, Homo sapiens
  siRNA target sequence for SBNO1 (NM_018183.2,342-360).
gcaaaccatcactttaact

SEQ ID NO: 65706 - DNA, 19 bp, Homo sapiens
  siRNA target sequence for SBNO1 (NM_018183.2,343-361).
caaaccatcactttaacta

SEQ ID NO: 65707 - DNA, 19 bp, Homo sapiens
  siRNA target sequence for SBNO1 (NM_018183.2,347-365).
ccatcactttaactaagtt

SEQ ID NO: 65708 - DNA, 19 bp, Homo sapiens
  siRNA target sequence for SBNO1 (NM_018183.2,348-366).
catcactttaactaagttt

SEQ ID NO: 65709 - DNA, 19 bp, Homo sapiens
  siRNA target sequence for SBNO1 (NM_018183.2,502-520).
ctaaagccacctgctaata

SEQ ID NO: 65710 - DNA, 19 bp, Homo sapiens
  siRNA target sequence for SBNO1 (NM_018183.2,507-525).
gccacctgctaatattgct

SEQ ID NO: 65711 - DNA, 19 bp, Homo sapiens
  siRNA target sequence for SBNO1 (NM_018183.2,553-571).
gtaagcaatggtacagtaa

SEQ ID NO: 65712 - DNA, 19 bp, Homo sapiens
  siRNA target sequence for SBNO1 (NM_018183.2,568-586).
gtaaagaaagagtcttcta

SEQ ID NO: 65713 - DNA, 19 bp, Homo sapiens
  siRNA target sequence for SBNO1 (NM_018183.2,573-591).
gaaagagtcttctaataaa

SEQ ID NO: 65714 - DNA, 19 bp, Homo sapiens
  siRNA target sequence for SBNO1 (NM_018183.2,599-617).
ctagaatgtggataaacga

SEQ ID NO: 65715 - DNA, 19 bp, Homo sapiens
  siRNA target sequence for SBNO1 (NM_018183.2,608-626).
ggataaacgacatgaagat

SEQ ID NO: 65716 - DNA, 19 bp, Homo sapiens
  siRNA target sequence for SBNO1 (NM_018183.2,645-663).
catgaaggttcctgttgta

SEQ ID NO: 65717 - DNA, 19 bp, Homo sapiens
  siRNA target sequence for SBNO1 (NM_018183.2,705-723).
gggtcatgcagaaacctat

SEQ ID NO: 65718 - DNA, 19 bp, Homo sapiens
  siRNA target sequence for SBNO1 (NM_018183.2,715-733).
gaaacctatgcagaataca

SEQ ID NO: 65719 - DNA, 19 bp, Homo sapiens
  siRNA target sequence for SBNO1 (NM_018183.2,725-743).
cagaatacatgccaataaa

SEQ ID NO: 65720 - DNA, 19 bp, Homo sapiens
  siRNA target sequence for SBNO1 (NM_018183.2,806-824).
ctcctcctgatgtttggta

SEQ ID NO: 65721 - DNA, 19 bp, Homo sapiens
  siRNA target sequence for SBNO1 (NM_018183.2,814-832).
gatgtttggtacaaaacat

SEQ ID NO: 65722 - DNA, 19 bp, Homo sapiens
  siRNA target sequence for SBNO1 (NM_018183.2,876-894).
gcagcttgaggcaattaca

SEQ ID NO: 65723 - DNA, 19 bp, Homo sapiens
  siRNA target sequence for SBNO1 (NM_018183.2,877-895).
cagcttgaggcaattacat

SEQ ID NO: 65724 - DNA, 19 bp, Homo sapiens
  siRNA target sequence for SBNO1 (NM_018183.2,879-897).
gcttgaggcaattacatat

SEQ ID NO: 65725 - DNA, 19 bp, Homo sapiens
  siRNA target sequence for SBNO1 (NM_018183.2,901-919).
gcccagcaacatgaaactt

SEQ ID NO: 65726 - DNA, 19 bp, Homo sapiens
  siRNA target sequence for SBNO1 (NM_018183.2,983-1001).
ggacgatagcaggaatcat

SEQ ID NO: 65727 - DNA, 19 bp, Homo sapiens
  siRNA target sequence for SBNO1 (NM_018183.2,986-1004).
cgatagcaggaatcatcta

SEQ ID NO: 65728 - DNA, 19 bp, Homo sapiens
  siRNA target sequence for SBNO1 (NM_018183.2,987-1005).
gatagcaggaatcatctat

SEQ ID NO: 65729 - DNA, 19 bp, Homo sapiens
  siRNA target sequence for SBNO1 (NM_018183.2,991-1009).
gcaggaatcatctatgaaa

SEQ ID NO: 65730 - DNA, 19 bp, Homo sapiens
  siRNA target sequence for SBNO1 (NM_018183.2,992-1010).
caggaatcatctatgaaaa

SEQ ID NO: 65731 - DNA, 19 bp, Homo sapiens
  siRNA target sequence for SBNO1 (NM_018183.2,1031-1049).
gagcattgtggtttagtgt

SEQ ID NO: 65732 - DNA, 19 bp, Homo sapiens
  siRNA target sequence for SBNO1 (NM_018183.2,1052-1070).
caaatgacttaaagtatga

SEQ ID NO: 65733 - DNA, 19 bp, Homo sapiens
  siRNA target sequence for SBNO1 (NM_018183.2,1107-1125).
cattttggttcattcgtta

SEQ ID NO: 65734 - DNA, 19 bp, Homo sapiens
  siRNA target sequence for SBNO1 (NM_018183.2,1183-1201).
gttatttttgctacttact

SEQ ID NO: 65735 - DNA, 19 bp, Homo sapiens
  siRNA target sequence for SBNO1 (NM_018183.2,1221-1239).
ccagtctggcggcaagtat

SEQ ID NO: 65736 - DNA, 19 bp, Homo sapiens
  siRNA target sequence for SBNO1 (NM_018183.2,1222-1240).
cagtctggcggcaagtata

SEQ ID NO: 65737 - DNA, 19 bp, Homo sapiens
  siRNA target sequence for SBNO1 (NM_018183.2,1224-1242).
gtctggcggcaagtataaa

SEQ ID NO: 65738 - DNA, 19 bp, Homo sapiens
  siRNA target sequence for SBNO1 (NM_018183.2,1228-1246).
ggcggcaagtataaaacta

SEQ ID NO: 65739 - DNA, 19 bp, Homo sapiens
  siRNA target sequence for SBNO1 (NM_018183.2,1359-1377).
gacaggcttagcagtttta

SEQ ID NO: 65740 - DNA, 19 bp, Homo sapiens
  siRNA target sequence for SBNO1 (NM_018183.2,1361-1379).
caggcttagcagttttaga

SEQ ID NO: 65741 - DNA, 19 bp, Homo sapiens
  siRNA target sequence for SBNO1 (NM_018183.2,1370-1388).
cagttttagagcttcagaa

SEQ ID NO: 65742 - DNA, 19 bp, Homo sapiens
  siRNA target sequence for SBNO1 (NM_018183.2,1444-1462).
cgcaacatggcctatatga

SEQ ID NO: 65743 - DNA, 19 bp, Homo sapiens
  siRNA target sequence for SBNO1 (NM_018183.2,1445-1463).
gcaacatggcctatatgaa

SEQ ID NO: 65744 - DNA, 19 bp, Homo sapiens
  siRNA target sequence for SBNO1 (NM_018183.2,1479-1497).
gggtgagggtactccattt

SEQ ID NO: 65745 - DNA, 19 bp, Homo sapiens
  siRNA target sequence for SBNO1 (NM_018183.2,1480-1498).
ggtgagggtactccattta

SEQ ID NO: 65746 - DNA, 19 bp, Homo sapiens
  siRNA target sequence for SBNO1 (NM_018183.2,1485-1503).
gggtactccatttagagaa

SEQ ID NO: 65747 - DNA, 19 bp, Homo sapiens
  siRNA target sequence for SBNO1 (NM_018183.2,1486-1504).
ggtactccatttagagaat

SEQ ID NO: 65748 - DNA, 19 bp, Homo sapiens
  siRNA target sequence for SBNO1 (NM_018183.2,1538-1556).
gagttggtgccatggaaat

SEQ ID NO: 65749 - DNA, 19 bp, Homo sapiens
  siRNA target sequence for SBNO1 (NM_018183.2,1561-1579).
gctatggatatgaagctta

SEQ ID NO: 65750 - DNA, 19 bp, Homo sapiens
  siRNA target sequence for SBNO1 (NM_018183.2,1594-1612).
gctcgacaactgagcttta

SEQ ID NO: 65751 - DNA, 19 bp, Homo sapiens
  siRNA target sequence for SBNO1 (NM_018183.2,1613-1631).
ctggagtgaccttcaaaat

SEQ ID NO: 65752 - DNA, 19 bp, Homo sapiens
  siRNA target sequence for SBNO1 (NM_018183.2,1645-1663).
ctttctcagagctacgtta

SEQ ID NO: 65753 - DNA, 19 bp, Homo sapiens
  siRNA target sequence for SBNO1 (NM_018183.2,1649-1667).
ctcagagctacgttaaaat

SEQ ID NO: 65754 - DNA, 19 bp, Homo sapiens
  siRNA target sequence for SBNO1 (NM_018183.2,1651-1669).
cagagctacgttaaaatgt

SEQ ID NO: 65755 - DNA, 19 bp, Homo sapiens
  siRNA target sequence for SBNO1 (NM_018183.2,1655-1673).
gctacgttaaaatgtataa

SEQ ID NO: 65756 - DNA, 19 bp, Homo sapiens
  siRNA target sequence for SBNO1 (NM_018183.2,1783-1801).
gctcaccagaggttcttca

SEQ ID NO: 65757 - DNA, 19 bp, Homo sapiens
  siRNA target sequence for SBNO1 (NM_018183.2,1806-1824).
cttatgcatagcatccaaa

SEQ ID NO: 65758 - DNA, 19 bp, Homo sapiens
  siRNA target sequence for SBNO1 (NM_018183.2,1811-1829).
gcatagcatccaaagttaa

SEQ ID NO: 65759 - DNA, 19 bp, Homo sapiens
  siRNA target sequence for SBNO1 (NM_018183.2,1901-1919).
gagaagctagaacattaga

SEQ ID NO: 65760 - DNA, 19 bp, Homo sapiens
  siRNA target sequence for SBNO1 (NM_018183.2,1977-1995).
gttgcagtcactcattgaa

SEQ ID NO: 65761 - DNA, 19 bp, Homo sapiens
  siRNA target sequence for SBNO1 (NM_018183.2,1980-1998).
gcagtcactcattgaaaaa

SEQ ID NO: 65762 - DNA, 19 bp, Homo sapiens
  siRNA target sequence for SBNO1 (NM_018183.2,2033-2051).
gtttactaggaatcgattt

SEQ ID NO: 65763 - DNA, 19 bp, Homo sapiens
  siRNA target sequence for SBNO1 (NM_018183.2,2056-2074).
gctccaagtaacaacagtt

SEQ ID NO: 65764 - DNA, 19 bp, Homo sapiens
  siRNA target sequence for SBNO1 (NM_018183.2,2067-2085).
caacagttcgccaagagat

SEQ ID NO: 65765 - DNA, 19 bp, Homo sapiens
  siRNA target sequence for SBNO1 (NM_018183.2,2070-2088).
cagttcgccaagagatagt

SEQ ID NO: 65766 - DNA, 19 bp, Homo sapiens
  siRNA target sequence for SBNO1 (NM_018183.2,2078-2096).
caagagatagtccttgtaa

SEQ ID NO: 65767 - DNA, 19 bp, Homo sapiens
  siRNA target sequence for SBNO1 (NM_018183.2,2081-2099).
gagatagtccttgtaaaga

SEQ ID NO: 65768 - DNA, 19 bp, Homo sapiens
  siRNA target sequence for SBNO1 (NM_018183.2,2188-2206).
gacgacagtggaagtgaat

SEQ ID NO: 65769 - DNA, 19 bp, Homo sapiens
  siRNA target sequence for SBNO1 (NM_018183.2,2190-2208).
cgacagtggaagtgaatct

SEQ ID NO: 65770 - DNA, 19 bp, Homo sapiens
  siRNA target sequence for SBNO1 (NM_018183.2,2233-2251).
gactatgagagctctaaaa

SEQ ID NO: 65771 - DNA, 19 bp, Homo sapiens
  siRNA target sequence for SBNO1 (NM_018183.2,2378-2396).
gtatagatccagattctat

SEQ ID NO: 65772 - DNA, 19 bp, Homo sapiens
  siRNA target sequence for SBNO1 (NM_018183.2,2398-2416).
caaagtgccttattagcat

SEQ ID NO: 65773 - DNA, 19 bp, Homo sapiens
  siRNA target sequence for SBNO1 (NM_018183.2,2426-2444).
gatcaaaacgacctagttt

SEQ ID NO: 65774 - DNA, 19 bp, Homo sapiens
  siRNA target sequence for SBNO1 (NM_018183.2,2434-2452).
cgacctagtttttcatcta

SEQ ID NO: 65775 - DNA, 19 bp, Homo sapiens
  siRNA target sequence for SBNO1 (NM_018183.2,2596-2614).
gaagacctcccccctaata

SEQ ID NO: 65776 - DNA, 19 bp, Homo sapiens
  siRNA target sequence for SBNO1 (NM_018183.2,2609-2627).
ctaataccctggatgaact

SEQ ID NO: 65777 - DNA, 19 bp, Homo sapiens
  siRNA target sequence for SBNO1 (NM_018183.2,2685-2703).
ggttgtgagcaatgatgat

SEQ ID NO: 65778 - DNA, 19 bp, Homo sapiens
  siRNA target sequence for SBNO1 (NM_018183.2,2694-2712).
caatgatgatggaagcata

SEQ ID NO: 65779 - DNA, 19 bp, Homo sapiens
  siRNA target sequence for SBNO1 (NM_018183.2,2704-2722).
ggaagcatatcttatgagt

SEQ ID NO: 65780 - DNA, 19 bp, Homo sapiens
  siRNA target sequence for SBNO1 (NM_018183.2,2723-2741).
caagatctgaacttgatgt

SEQ ID NO: 65781 - DNA, 19 bp, Homo sapiens
  siRNA target sequence for SBNO1 (NM_018183.2,2740-2758).
gtgcctgtggaaatactaa

SEQ ID NO: 65782 - DNA, 19 bp, Homo sapiens
  siRNA target sequence for SBNO1 (NM_018183.2,2744-2762).
ctgtggaaatactaaacat

SEQ ID NO: 65783 - DNA, 19 bp, Homo sapiens
  siRNA target sequence for SBNO1 (NM_018183.2,2822-2840).
ccagctcgggtatttcatt

SEQ ID NO: 65784 - DNA, 19 bp, Homo sapiens
  siRNA target sequence for SBNO1 (NM_018183.2,2823-2841).
cagctcgggtatttcatta

SEQ ID NO: 65785 - DNA, 19 bp, Homo sapiens
  siRNA target sequence for SBNO1 (NM_018183.2,2866-2884).
caaaggcgaagagttcata

SEQ ID NO: 65786 - DNA, 19 bp, Homo sapiens
  siRNA target sequence for SBNO1 (NM_018183.2,2906-2924).
gcgctgatagagcaattca

SEQ ID NO: 65787 - DNA, 19 bp, Homo sapiens
  siRNA target sequence for SBNO1 (NM_018183.2,2907-2925).
cgctgatagagcaattcaa

SEQ ID NO: 65788 - DNA, 19 bp, Homo sapiens
  siRNA target sequence for SBNO1 (NM_018183.2,2926-2944).
cagttcggacgtactcata

SEQ ID NO: 65789 - DNA, 19 bp, Homo sapiens
  siRNA target sequence for SBNO1 (NM_018183.2,2928-2946).
gttcggacgtactcataga

SEQ ID NO: 65790 - DNA, 19 bp, Homo sapiens
  siRNA target sequence for SBNO1 (NM_018183.2,2931-2949).
cggacgtactcatagatca

SEQ ID NO: 65791 - DNA, 19 bp, Homo sapiens
  siRNA target sequence for SBNO1 (NM_018183.2,2932-2950).
ggacgtactcatagatcaa

SEQ ID NO: 65792 - DNA, 19 bp, Homo sapiens
  siRNA target sequence for SBNO1 (NM_018183.2,2933-2951).
gacgtactcatagatcaaa

SEQ ID NO: 65793 - DNA, 19 bp, Homo sapiens
  siRNA target sequence for SBNO1 (NM_018183.2,2960-2978).
ctgctcctgagtatgtctt

SEQ ID NO: 65794 - DNA, 19 bp, Homo sapiens
  siRNA target sequence for SBNO1 (NM_018183.2,2965-2983).
cctgagtatgtctttctga

SEQ ID NO: 65795 - DNA, 19 bp, Homo sapiens
  siRNA target sequence for SBNO1 (NM_018183.2,3017-3035).
ctattgttgctaaaagact

SEQ ID NO: 65796 - DNA, 19 bp, Homo sapiens
  siRNA target sequence for SBNO1 (NM_018183.2,3095-3113).
gcaggttcaactttgataa

SEQ ID NO: 65797 - DNA, 19 bp, Homo sapiens
  siRNA target sequence for SBNO1 (NM_018183.2,3096-3114).
caggttcaactttgataat

SEQ ID NO: 65798 - DNA, 19 bp, Homo sapiens
  siRNA target sequence for SBNO1 (NM_018183.2,3131-3149).
ctttagaaattgtcatgaa

SEQ ID NO: 65799 - DNA, 19 bp, Homo sapiens
  siRNA target sequence for SBNO1 (NM_018183.2,3191-3209).
cagactatcctggagaatt

SEQ ID NO: 65800 - DNA, 19 bp, Homo sapiens
  siRNA target sequence for SBNO1 (NM_018183.2,3239-3257).
gcgttggcctgataaatgt

SEQ ID NO: 65801 - DNA, 19 bp, Homo sapiens
  siRNA target sequence for SBNO1 (NM_018183.2,3240-3258).
cgttggcctgataaatgta

SEQ ID NO: 65802 - DNA, 19 bp, Homo sapiens
  siRNA target sequence for SBNO1 (NM_018183.2,3262-3280).
gatcgctcgggaattctta

SEQ ID NO: 65803 - DNA, 19 bp, Homo sapiens
  siRNA target sequence for SBNO1 (NM_018183.2,3266-3284).
gctcgggaattcttactct

SEQ ID NO: 65804 - DNA, 19 bp, Homo sapiens
  siRNA target sequence for SBNO1 (NM_018183.2,3281-3299).
ctctcgataaagattataa

SEQ ID NO: 65805 - DNA, 19 bp, Homo sapiens
  siRNA target sequence for SBNO1 (NM_018183.2,3283-3301).
ctcgataaagattataaca

SEQ ID NO: 65806 - DNA, 19 bp, Homo sapiens
  siRNA target sequence for SBNO1 (NM_018183.2,3292-3310).
gattataacaacataggaa

SEQ ID NO: 65807 - DNA, 19 bp, Homo sapiens
  siRNA target sequence for SBNO1 (NM_018183.2,3351-3369).
gaatgcgttatttcagtat

SEQ ID NO: 65808 - DNA, 19 bp, Homo sapiens
  siRNA target sequence for SBNO1 (NM_018183.2,3463-3481).
gtgcggaaaagtgatgtta

SEQ ID NO: 65809 - DNA, 19 bp, Homo sapiens
  siRNA target sequence for SBNO1 (NM_018183.2,3465-3483).
gcggaaaagtgatgttaaa

SEQ ID NO: 65810 - DNA, 19 bp, Homo sapiens
  siRNA target sequence for SBNO1 (NM_018183.2,3510-3528).
ctctggccacgtagaatta

SEQ ID NO: 65811 - DNA, 19 bp, Homo sapiens
  siRNA target sequence for SBNO1 (NM_018183.2,3514-3532).
ggccacgtagaattataca

SEQ ID NO: 65812 - DNA, 19 bp, Homo sapiens
  siRNA target sequence for SBNO1 (NM_018183.2,3516-3534).
ccacgtagaattatacaca

SEQ ID NO: 65813 - DNA, 19 bp, Homo sapiens
  siRNA target sequence for SBNO1 (NM_018183.2,3517-3535).
cacgtagaattatacacaa

SEQ ID NO: 65814 - DNA, 19 bp, Homo sapiens
  siRNA target sequence for SBNO1 (NM_018183.2,3519-3537).
cgtagaattatacacaatt

SEQ ID NO: 65815 - DNA, 19 bp, Homo sapiens
  siRNA target sequence for SBNO1 (NM_018183.2,3596-3614).
gaccagacgatggctttta

SEQ ID NO: 65816 - DNA, 19 bp, Homo sapiens
  siRNA target sequence for SBNO1 (NM_018183.2,3598-3616).
ccagacgatggcttttact

SEQ ID NO: 65817 - DNA, 19 bp, Homo sapiens
  siRNA target sequence for SBNO1 (NM_018183.2,3604-3622).
gatggcttttacttgtcat

SEQ ID NO: 65818 - DNA, 19 bp, Homo sapiens
  siRNA target sequence for SBNO1 (NM_018183.2,3647-3665).
ctgccatcttagttaaaga

SEQ ID NO: 65819 - DNA, 19 bp, Homo sapiens
  siRNA target sequence for SBNO1 (NM_018183.2,3650-3668).
ccatcttagttaaagaagt

SEQ ID NO: 65820 - DNA, 19 bp, Homo sapiens
  siRNA target sequence for SBNO1 (NM_018183.2,3658-3676).
gttaaagaagtgaatccta

SEQ ID NO: 65821 - DNA, 19 bp, Homo sapiens
  siRNA target sequence for SBNO1 (NM_018183.2,3690-3708).
cttagtttatcgaccaaat

SEQ ID NO: 65822 - DNA, 19 bp, Homo sapiens
  siRNA target sequence for SBNO1 (NM_018183.2,3713-3731).
ggaagcagctcaaattaga

SEQ ID NO: 65823 - DNA, 19 bp, Homo sapiens
  siRNA target sequence for SBNO1 (NM_018183.2,3762-3780).
gaaggtcgtctcagatgat

SEQ ID NO: 65824 - DNA, 19 bp, Homo sapiens
  siRNA target sequence for SBNO1 (NM_018183.2,3783-3801).
cctgatgcactggttagat

SEQ ID NO: 65825 - DNA, 19 bp, Homo sapiens
  siRNA target sequence for SBNO1 (NM_018183.2,3847-3865).
ggcaattgcaaaaaagcaa

SEQ ID NO: 65826 - DNA, 19 bp, Homo sapiens
  siRNA target sequence for SBNO1 (NM_018183.2,3862-3880).
gcaagcttggggctagttt

SEQ ID NO: 65827 - DNA, 19 bp, Homo sapiens
  siRNA target sequence for SBNO1 (NM_018183.2,3866-3884).
gcttggggctagtttgtga

SEQ ID NO: 65828 - DNA, 19 bp, Homo sapiens
  siRNA target sequence for SBNO1 (NM_018183.2,3873-3891).
gctagtttgtgaaataggt

SEQ ID NO: 65829 - DNA, 19 bp, Homo sapiens
  siRNA target sequence for SBNO1 (NM_018183.2,3890-3908).
gtcttcgttgccgtacata

SEQ ID NO: 65830 - DNA, 19 bp, Homo sapiens
  siRNA target sequence for SBNO1 (NM_018183.2,3892-3910).
cttcgttgccgtacatatt

SEQ ID NO: 65831 - DNA, 19 bp, Homo sapiens
  siRNA target sequence for SBNO1 (NM_018183.2,3896-3914).
gttgccgtacatattatgt

SEQ ID NO: 65832 - DNA, 19 bp, Homo sapiens
  siRNA target sequence for SBNO1 (NM_018183.2,3899-3917).
gccgtacatattatgtatt

SEQ ID NO: 65833 - DNA, 19 bp, Homo sapiens
  siRNA target sequence for SBNO1 (NM_018183.2,3901-3919).
cgtacatattatgtattat

SEQ ID NO: 65834 - DNA, 19 bp, Homo sapiens
  siRNA target sequence for SBNO1 (NM_018183.2,3933-3951).
gagtgtctggacaaaagtt

SEQ ID NO: 65835 - DNA, 19 bp, Homo sapiens
  siRNA target sequence for SBNO1 (NM_018183.2,3935-3953).
gtgtctggacaaaagttga

SEQ ID NO: 65836 - DNA, 19 bp, Homo sapiens
  siRNA target sequence for SBNO1 (NM_018183.2,3974-3992).
gtggcacaaacgtgaagat

SEQ ID NO: 65837 - DNA, 19 bp, Homo sapiens
  siRNA target sequence for SBNO1 (NM_018183.2,3994-4012).
cagatcgtgcggctaagaa

SEQ ID NO: 65838 - DNA, 19 bp, Homo sapiens
  siRNA target sequence for SBNO1 (NM_018183.2,4022-4040).
ggcaacggattgtaggttt

SEQ ID NO: 65839 - DNA, 19 bp, Homo sapiens
  siRNA target sequence for SBNO1 (NM_018183.2,4027-4045).
cggattgtaggtttgatca

SEQ ID NO: 65840 - DNA, 19 bp, Homo sapiens
  siRNA target sequence for SBNO1 (NM_018183.2,4028-4046).
ggattgtaggtttgatcat

SEQ ID NO: 65841 - DNA, 19 bp, Homo sapiens
  siRNA target sequence for SBNO1 (NM_018183.2,4029-4047).
gattgtaggtttgatcatt

SEQ ID NO: 65842 - DNA, 19 bp, Homo sapiens
  siRNA target sequence for SBNO1 (NM_018183.2,4041-4059).
gatcattccggcaaattgt

SEQ ID NO: 65843 - DNA, 19 bp, Homo sapiens
  siRNA target sequence for SBNO1 (NM_018183.2,4107-4125).
gcttgcggtccaacagaaa

SEQ ID NO: 65844 - DNA, 19 bp, Homo sapiens
  siRNA target sequence for SBZF3 (NM_020394.2,252-270).
ggtgaggatagcttcaata

SEQ ID NO: 65845 - DNA, 19 bp, Homo sapiens
  siRNA target sequence for SBZF3 (NM_020394.2,253-271).
gtgaggatagcttcaatat

SEQ ID NO: 65846 - DNA, 19 bp, Homo sapiens
  siRNA target sequence for SBZF3 (NM_020394.2,257-275).
ggatagcttcaatatgcaa

SEQ ID NO: 65847 - DNA, 19 bp, Homo sapiens
  siRNA target sequence for SBZF3 (NM_020394.2,258-276).
gatagcttcaatatgcaat

SEQ ID NO: 65848 - DNA, 19 bp, Homo sapiens
  siRNA target sequence for SBZF3 (NM_020394.2,263-281).
cttcaatatgcaattccta

SEQ ID NO: 65849 - DNA, 19 bp, Homo sapiens
  siRNA target sequence for SBZF3 (NM_020394.2,266-284).
caatatgcaattcctattt

SEQ ID NO: 65850 - DNA, 19 bp, Homo sapiens
  siRNA target sequence for SBZF3 (NM_020394.2,285-303).
cacagtcttgctatgtcta

SEQ ID NO: 65851 - DNA, 19 bp, Homo sapiens
  siRNA target sequence for SBZF3 (NM_020394.2,417-435).
gagcagggcctgcaagttt

SEQ ID NO: 65852 - DNA, 19 bp, Homo sapiens
  siRNA target sequence for SBZF3 (NM_020394.2,419-437).
gcagggcctgcaagtttca

SEQ ID NO: 65853 - DNA, 19 bp, Homo sapiens
  siRNA target sequence for SBZF3 (NM_020394.2,480-498).
gagaaattacgcttaagga

SEQ ID NO: 65854 - DNA, 19 bp, Homo sapiens
  siRNA target sequence for SBZF3 (NM_020394.2,482-500).
gaaattacgcttaaggaat

SEQ ID NO: 65855 - DNA, 19 bp, Homo sapiens
  siRNA target sequence for SEC8 (NM_021807.2,195-213).
cgtgacctggatgaattga

SEQ ID NO: 65856 - DNA, 19 bp, Homo sapiens
  siRNA target sequence for SEC8 (NM_021807.2,278-296).
cactaactcccgaaataaa

SEQ ID NO: 65857 - DNA, 19 bp, Homo sapiens
  siRNA target sequence for SEC8 (NM_021807.2,280-298).
ctaactcccgaaataaaat

SEQ ID NO: 65858 - DNA, 19 bp, Homo sapiens
  siRNA target sequence for SEC8 (NM_021807.2,599-617).
ggttctcatagatgaacta

SEQ ID NO: 65859 - DNA, 19 bp, Homo sapiens
  siRNA target sequence for SEC8 (NM_021807.2,620-638).
ccggcacctgtacatcaaa

SEQ ID NO: 65860 - DNA, 19 bp, Homo sapiens
  siRNA target sequence for SEC8 (NM_021807.2,621-639).
cggcacctgtacatcaaat

SEQ ID NO: 65861 - DNA, 19 bp, Homo sapiens
  siRNA target sequence for SEC8 (NM_021807.2,654-672).
gtgcagcgtaacaaggaaa

SEQ ID NO: 65862 - DNA, 19 bp, Homo sapiens
  siRNA target sequence for SEC8 (NM_021807.2,656-674).
gcagcgtaacaaggaaaaa

SEQ ID NO: 65863 - DNA, 19 bp, Homo sapiens
  siRNA target sequence for SEC8 (NM_021807.2,683-701).
cagctccctcgtgaaagat

SEQ ID NO: 65864 - DNA, 19 bp, Homo sapiens
  siRNA target sequence for SEC8 (NM_021807.2,741-759).
cctcgaaaattccttgata

SEQ ID NO: 65865 - DNA, 19 bp, Homo sapiens
  siRNA target sequence for SEC8 (NM_021807.2,810-828).
caggacatcaaggaagatt

SEQ ID NO: 65866 - DNA, 19 bp, Homo sapiens
  siRNA target sequence for SEC8 (NM_021807.2,913-931).
cagttaaggcaatcataga

SEQ ID NO: 65867 - DNA, 19 bp, Homo sapiens
  siRNA target sequence for SEC8 (NM_021807.2,939-957).
gagcaggagttgaagcaaa

SEQ ID NO: 65868 - DNA, 19 bp, Homo sapiens
  siRNA target sequence for SEC8 (NM_021807.2,945-963).
gagttgaagcaaattgtga

SEQ ID NO: 65869 - DNA, 19 bp, Homo sapiens
  siRNA target sequence for SEC8 (NM_021807.2,1033-1051).
caaggttgcttctagaact

SEQ ID NO: 65870 - DNA, 19 bp, Homo sapiens
  siRNA target sequence for SEC8 (NM_021807.2,1149-1167).
caggaagatatcaaactgt

SEQ ID NO: 65871 - DNA, 19 bp, Homo sapiens
  siRNA target sequence for SEC8 (NM_021807.2,1166-1184).
gtatgatatggcagatgta

SEQ ID NO: 65872 - DNA, 19 bp, Homo sapiens
  siRNA target sequence for SEC8 (NM_021807.2,1409-1427).
gagaagggagctctatagt

SEQ ID NO: 65873 - DNA, 19 bp, Homo sapiens
  siRNA target sequence for SEC8 (NM_021807.2,1448-1466).
gggtcctgatgacaactta

SEQ ID NO: 65874 - DNA, 19 bp, Homo sapiens
  siRNA target sequence for SEC8 (NM_021807.2,1449-1467).
ggtcctgatgacaacttaa

SEQ ID NO: 65875 - DNA, 19 bp, Homo sapiens
  siRNA target sequence for SEC8 (NM_021807.2,1510-1528).
gaaacattaccgtcatatt

SEQ ID NO: 65876 - DNA, 19 bp, Homo sapiens
  siRNA target sequence for SEC8 (NM_021807.2,1523-1541).
catattccacccattacta

SEQ ID NO: 65877 - DNA, 19 bp, Homo sapiens
  siRNA target sequence for SEC8 (NM_021807.2,1529-1547).
ccacccattactaagattt

SEQ ID NO: 65878 - DNA, 19 bp, Homo sapiens
  siRNA target sequence for SEC8 (NM_021807.2,1575-1593).
cttggcccagccaaacagt

SEQ ID NO: 65879 - DNA, 19 bp, Homo sapiens
  siRNA target sequence for SEC8 (NM_021807.2,1592-1610).
gtgtcctcttcgagagttt

SEQ ID NO: 65880 - DNA, 19 bp, Homo sapiens
  siRNA target sequence for SEC8 (NM_021807.2,1596-1614).
cctcttcgagagtttctca

SEQ ID NO: 65881 - DNA, 19 bp, Homo sapiens
  siRNA target sequence for SEC8 (NM_021807.2,1611-1629).
ctcaccgtgtacatcaaaa

SEQ ID NO: 65882 - DNA, 19 bp, Homo sapiens
  siRNA target sequence for SEC8 (NM_021807.2,1615-1633).
ccgtgtacatcaaaaacat

SEQ ID NO: 65883 - DNA, 19 bp, Homo sapiens
  siRNA target sequence for SEC8 (NM_021807.2,1617-1635).
gtgtacatcaaaaacatct

SEQ ID NO: 65884 - DNA, 19 bp, Homo sapiens
  siRNA target sequence for SEC8 (NM_021807.2,1693-1711).
ctgaccctttgaagattct

SEQ ID NO: 65885 - DNA, 19 bp, Homo sapiens
  siRNA target sequence for SEC8 (NM_021807.2,1757-1775).
cctacagagcacaatcatt

SEQ ID NO: 65886 - DNA, 19 bp, Homo sapiens
  siRNA target sequence for SEC8 (NM_021807.2,1811-1829).
gcatgacttgagtgcatat

SEQ ID NO: 65887 - DNA, 19 bp, Homo sapiens
  siRNA target sequence for SEC8 (NM_021807.2,1817-1835).
cttgagtgcatattcagat

SEQ ID NO: 65888 - DNA, 19 bp, Homo sapiens
  siRNA target sequence for SEC8 (NM_021807.2,1820-1838).
gagtgcatattcagatcaa

SEQ ID NO: 65889 - DNA, 19 bp, Homo sapiens
  siRNA target sequence for SEC8 (NM_021807.2,1822-1840).
gtgcatattcagatcaatt

SEQ ID NO: 65890 - DNA, 19 bp, Homo sapiens
  siRNA target sequence for SEC8 (NM_021807.2,1831-1849).
cagatcaattcctcaacat

SEQ ID NO: 65891 - DNA, 19 bp, Homo sapiens
  siRNA target sequence for SEC8 (NM_021807.2,1891-1909).
cagcttacaggggtattgt

SEQ ID NO: 65892 - DNA, 19 bp, Homo sapiens
  siRNA target sequence for SEC8 (NM_021807.2,2189-2207).
ggcaagtcgaacaaagtca

SEQ ID NO: 65893 - DNA, 19 bp, Homo sapiens
  siRNA target sequence for SEC8 (NM_021807.2,2204-2222).
gtcagctttctccaatctt

SEQ ID NO: 65894 - DNA, 19 bp, Homo sapiens
  siRNA target sequence for SEC8 (NM_021807.2,2208-2226).
gctttctccaatctttcta

SEQ ID NO: 65895 - DNA, 19 bp, Homo sapiens
  siRNA target sequence for SEC8 (NM_021807.2,2311-2329).
gtgaacttgccaaatcgtt

SEQ ID NO: 65896 - DNA, 19 bp, Homo sapiens
  siRNA target sequence for SEC8 (NM_021807.2,2345-2363).
ccgctgcttgcttgtctta

SEQ ID NO: 65897 - DNA, 19 bp, Homo sapiens
  siRNA target sequence for SEC8 (NM_021807.2,2382-2400).
cactgtttccactatctta

SEQ ID NO: 65898 - DNA, 19 bp, Homo sapiens
  siRNA target sequence for SEC8 (NM_021807.2,2433-2451).
gtggctaatgtggaaagta

SEQ ID NO: 65899 - DNA, 19 bp, Homo sapiens
  siRNA target sequence for SEC8 (NM_021807.2,2619-2637).
gagtctggcatcaagaaaa

SEQ ID NO: 65900 - DNA, 19 bp, Homo sapiens
  siRNA target sequence for SEC8 (NM_021807.2,2633-2651).
gaaaatgtgtaggaacatt

SEQ ID NO: 65901 - DNA, 19 bp, Homo sapiens
  siRNA target sequence for SEC8 (NM_021807.2,2718-2736).
cagtactacgagatgcttt

SEQ ID NO: 65902 - DNA, 19 bp, Homo sapiens
  siRNA target sequence for SECP43 (NM_017846.3,104-122).
ccgtaatgagcgtcaaaat

SEQ ID NO: 65903 - DNA, 19 bp, Homo sapiens
  siRNA target sequence for SECP43 (NM_017846.3,105-123).
cgtaatgagcgtcaaaatt

SEQ ID NO: 65904 - DNA, 19 bp, Homo sapiens
  siRNA target sequence for SECP43 (NM_017846.3,106-124).
gtaatgagcgtcaaaatta

SEQ ID NO: 65905 - DNA, 19 bp, Homo sapiens
  siRNA target sequence for SECP43 (NM_017846.3,154-172).
ggctactgctttgtagaat

SEQ ID NO: 65906 - DNA, 19 bp, Homo sapiens
  siRNA target sequence for SECP43 (NM_017846.3,235-253).
gccacacctgcgaaacgtt

SEQ ID NO: 65907 - DNA, 19 bp, Homo sapiens
  siRNA target sequence for SECP43 (NM_017846.3,236-254).
ccacacctgcgaaacgttt

SEQ ID NO: 65908 - DNA, 19 bp, Homo sapiens
  siRNA target sequence for SECP43 (NM_017846.3,237-255).
cacacctgcgaaacgtttt

SEQ ID NO: 65909 - DNA, 19 bp, Homo sapiens
  siRNA target sequence for SECP43 (NM_017846.3,239-257).
cacctgcgaaacgttttaa

SEQ ID NO: 65910 - DNA, 19 bp, Homo sapiens
  siRNA target sequence for SECP43 (NM_017846.3,242-260).
ctgcgaaacgttttaaact

SEQ ID NO: 65911 - DNA, 19 bp, Homo sapiens
  siRNA target sequence for SECP43 (NM_017846.3,244-262).
gcgaaacgttttaaactga

SEQ ID NO: 65912 - DNA, 19 bp, Homo sapiens
  siRNA target sequence for SECP43 (NM_017846.3,245-263).
cgaaacgttttaaactgaa

SEQ ID NO: 65913 - DNA, 19 bp, Homo sapiens
  siRNA target sequence for SECP43 (NM_017846.3,358-376).
gaattcttcgtcaaagtct

SEQ ID NO: 65914 - DNA, 19 bp, Homo sapiens
  siRNA target sequence for SECP43 (NM_017846.3,420-438).
cgtgtctaagggttatggt

SEQ ID NO: 65915 - DNA, 19 bp, Homo sapiens
  siRNA target sequence for SECP43 (NM_017846.3,421-439).
gtgtctaagggttatggtt

SEQ ID NO: 65916 - DNA, 19 bp, Homo sapiens
  siRNA target sequence for SECP43 (NM_017846.3,556-574).
gtaaagccagtggaatata

SEQ ID NO: 65917 - DNA, 19 bp, Homo sapiens
  siRNA target sequence for SECP43 (NM_017846.3,577-595).
cagatgtacagttatagct

SEQ ID NO: 65918 - DNA, 19 bp, Homo sapiens
  siRNA target sequence for SECP43 (NM_017846.3,612-630).
gcagtaccagaactactat

SEQ ID NO: 65919 - DNA, 19 bp, Homo sapiens
  siRNA target sequence for SECP43 (NM_017846.3,699-717).
gagcaccatgcagacatat

SEQ ID NO: 65920 - DNA, 19 bp, Homo sapiens
  siRNA target sequence for SFRS12 (NM_139168.1,361-379).
gtgcaggattgcttccaat

SEQ ID NO: 65921 - DNA, 19 bp, Homo sapiens
  siRNA target sequence for SFRS12 (NM_139168.1,398-416).
gactactcttggtgtttca

SEQ ID NO: 65922 - DNA, 19 bp, Homo sapiens
  siRNA target sequence for SFRS12 (NM_139168.1,400-418).
ctactcttggtgtttcact

SEQ ID NO: 65923 - DNA, 19 bp, Homo sapiens
  siRNA target sequence for SFRS12 (NM_139168.1,450-468).
ctagaccccaacattgcaa

SEQ ID NO: 65924 - DNA, 19 bp, Homo sapiens
  siRNA target sequence for SFRS12 (NM_139168.1,509-527).
ggatccttccaaaatagat

SEQ ID NO: 65925 - DNA, 19 bp, Homo sapiens
  siRNA target sequence for SFRS12 (NM_139168.1,538-556).
gaacggtttatgttggaaa

SEQ ID NO: 65926 - DNA, 19 bp, Homo sapiens
  siRNA target sequence for SFRS12 (NM_139168.1,569-587).
gacaacgacagctgatcaa

SEQ ID NO: 65927 - DNA, 19 bp, Homo sapiens
  siRNA target sequence for SFRS12 (NM_139168.1,571-589).
caacgacagctgatcaact

SEQ ID NO: 65928 - DNA, 19 bp, Homo sapiens
  siRNA target sequence for SFRS12 (NM_139168.1,651-669).
cagccaactcggtttgctt

SEQ ID NO: 65929 - DNA, 19 bp, Homo sapiens
  siRNA target sequence for SFRS12 (NM_139168.1,653-671).
gccaactcggtttgctttt

SEQ ID NO: 65930 - DNA, 19 bp, Homo sapiens
  siRNA target sequence for SFRS12 (NM_139168.1,655-673).
caactcggtttgcttttgt

SEQ ID NO: 65931 - DNA, 19 bp, Homo sapiens
  siRNA target sequence for SFRS12 (NM_139168.1,735-753).
gacaggccactgaaaataa

SEQ ID NO: 65932 - DNA, 19 bp, Homo sapiens
  siRNA target sequence for SFRS12 (NM_139168.1,739-757).
ggccactgaaaataaatca

SEQ ID NO: 65933 - DNA, 19 bp, Homo sapiens
  siRNA target sequence for SFRS12 (NM_139168.1,758-776).
ctccaacaatgcaatagta

SEQ ID NO: 65934 - DNA, 19 bp, Homo sapiens
  siRNA target sequence for SFRS12 (NM_139168.1,760-778).
ccaacaatgcaatagtaaa

SEQ ID NO: 65935 - DNA, 19 bp, Homo sapiens
  siRNA target sequence for SFRS12 (NM_139168.1,761-779).
caacaatgcaatagtaaaa

SEQ ID NO: 65936 - DNA, 19 bp, Homo sapiens
  siRNA target sequence for SFRS12 (NM_139168.1,840-858).
cgagaagctcagtcattta

SEQ ID NO: 65937 - DNA, 19 bp, Homo sapiens
  siRNA target sequence for SFRS12 (NM_139168.1,924-942).
catactcgctcaaaatcca

SEQ ID NO: 65938 - DNA, 19 bp, Homo sapiens
  siRNA target sequence for SFRS12 (NM_139168.1,992-1010).
caggagtagatcccataat

SEQ ID NO: 65939 - DNA, 19 bp, Homo sapiens
  siRNA target sequence for SFRS12 (NM_139168.1,995-1013).
gagtagatcccataataga

SEQ ID NO: 65940 - DNA, 19 bp, Homo sapiens
  siRNA target sequence for SFRS12 (NM_139168.1,1028-1046).
gaaagacagacgtagatct

SEQ ID NO: 65941 - DNA, 19 bp, Homo sapiens
  siRNA target sequence for SFRS12 (NM_139168.1,1032-1050).
gacagacgtagatctaaga

SEQ ID NO: 65942 - DNA, 19 bp, Homo sapiens
  siRNA target sequence for SFRS12 (NM_139168.1,1042-1060).
gatctaagagcccacataa

SEQ ID NO: 65943 - DNA, 19 bp, Homo sapiens
  siRNA target sequence for SFRS12 (NM_139168.1,1056-1074).
cataaaaaacgctctaaat

SEQ ID NO: 65944 - DNA, 19 bp, Homo sapiens
  siRNA target sequence for SFRS12 (NM_139168.1,1429-1447).
caccacccaggagttacaa

SEQ ID NO: 65945 - DNA, 19 bp, Homo sapiens
  siRNA target sequence for SFRS12 (NM_139168.1,1434-1452).
cccaggagttacaatgcat

SEQ ID NO: 65946 - DNA, 19 bp, Homo sapiens
  siRNA target sequence for SFRS12 (NM_139168.1,1445-1463).
caatgcatcgcgaagatct

SEQ ID NO: 65947 - DNA, 19 bp, Homo sapiens
  siRNA target sequence for SFRS12 (NM_139168.1,1513-1531).
gatcgccaagaacatcaaa

SEQ ID NO: 65948 - DNA, 19 bp, Homo sapiens
  siRNA target sequence for SFRS12 (NM_139168.1,1641-1659).
cgttcaacgtctatgagaa

SEQ ID NO: 65949 - DNA, 19 bp, Homo sapiens
  siRNA target sequence for SFRS12 (NM_139168.1,1642-1660).
gttcaacgtctatgagaaa

SEQ ID NO: 65950 - DNA, 19 bp, Homo sapiens
  siRNA target sequence for SFRS12 (NM_139168.1,1661-1679).
gagttctaatgatagagat

SEQ ID NO: 65951 - DNA, 19 bp, Homo sapiens
  siRNA target sequence for SFRS12 (NM_139168.1,1697-1715).
gaagaacagtacttcactt

SEQ ID NO: 65952 - DNA, 19 bp, Homo sapiens
  siRNA target sequence for SFRS12 (NM_139168.1,1700-1718).
gaacagtacttcacttaaa

SEQ ID NO: 65953 - DNA, 19 bp, Homo sapiens
  siRNA target sequence for SFRS12 (NM_139168.1,1756-1774).
gcaaagaagtagatgacaa

SEQ ID NO: 65954 - DNA, 19 bp, Homo sapiens
  siRNA target sequence for SFRS12 (NM_139168.1,1816-1834).
ggaattgtcagctgaatga

SEQ ID NO: 65955 - DNA, 19 bp, Homo sapiens
  siRNA target sequence for SFRS12 (NM_139168.1,1817-1835).
gaattgtcagctgaatgaa

SEQ ID NO: 65956 - DNA, 19 bp, Homo sapiens
  siRNA target sequence for SHARP (NM_015001.2,253-271).
gtgcgggaagagaagatca

SEQ ID NO: 65957 - DNA, 19 bp, Homo sapiens
  siRNA target sequence for SHARP (NM_015001.2,267-285).
gatcatcgagcatttcaaa

SEQ ID NO: 65958 - DNA, 19 bp, Homo sapiens
  siRNA target sequence for SHARP (NM_015001.2,295-313).
cgcgtggaaagtgtcaaaa

SEQ ID NO: 65959 - DNA, 19 bp, Homo sapiens
  siRNA target sequence for SHARP (NM_015001.2,296-314).
gcgtggaaagtgtcaaaat

SEQ ID NO: 65960 - DNA, 19 bp, Homo sapiens
  siRNA target sequence for SHARP (NM_015001.2,297-315).
cgtggaaagtgtcaaaatt

SEQ ID NO: 65961 - DNA, 19 bp, Homo sapiens
  siRNA target sequence for SHARP (NM_015001.2,389-407).
ctcacaactcggtcaacaa

SEQ ID NO: 65962 - DNA, 19 bp, Homo sapiens
  siRNA target sequence for SHARP (NM_015001.2,421-439).
gacctacgcacggattata

SEQ ID NO: 65963 - DNA, 19 bp, Homo sapiens
  siRNA target sequence for SHARP (NM_015001.2,423-441).
cctacgcacggattataat

SEQ ID NO: 65964 - DNA, 19 bp, Homo sapiens
  siRNA target sequence for SHARP (NM_015001.2,492-510).
catagcatctcgtagtaga

SEQ ID NO: 65965 - DNA, 19 bp, Homo sapiens
  siRNA target sequence for SHARP (NM_015001.2,623-641).
gggagcgtgcttatgaaca

SEQ ID NO: 65966 - DNA, 19 bp, Homo sapiens
  siRNA target sequence for SHARP (NM_015001.2,624-642).
ggagcgtgcttatgaacat

SEQ ID NO: 65967 - DNA, 19 bp, Homo sapiens
  siRNA target sequence for SHARP (NM_015001.2,625-643).
gagcgtgcttatgaacata

SEQ ID NO: 65968 - DNA, 19 bp, Homo sapiens
  siRNA target sequence for SHARP (NM_015001.2,627-645).
gcgtgcttatgaacatagt

SEQ ID NO: 65969 - DNA, 19 bp, Homo sapiens
  siRNA target sequence for SHARP (NM_015001.2,665-683).
gggggacgggaggatttga

SEQ ID NO: 65970 - DNA, 19 bp, Homo sapiens
  siRNA target sequence for SHARP (NM_015001.2,666-684).
ggggacgggaggatttgat

SEQ ID NO: 65971 - DNA, 19 bp, Homo sapiens
  siRNA target sequence for SHARP (NM_015001.2,692-710).
gacattacgatcaggatta

SEQ ID NO: 65972 - DNA, 19 bp, Homo sapiens
  siRNA target sequence for SHARP (NM_015001.2,694-712).
cattacgatcaggattact

SEQ ID NO: 65973 - DNA, 19 bp, Homo sapiens
  siRNA target sequence for SHARP (NM_015001.2,699-717).
cgatcaggattactataga

SEQ ID NO: 65974 - DNA, 19 bp, Homo sapiens
  siRNA target sequence for SHARP (NM_015001.2,722-740).
ctcgagagcggactttaca

SEQ ID NO: 65975 - DNA, 19 bp, Homo sapiens
  siRNA target sequence for SHARP (NM_015001.2,725-743).
gagagcggactttacaaca

SEQ ID NO: 65976 - DNA, 19 bp, Homo sapiens
  siRNA target sequence for SHARP (NM_015001.2,791-809).
ctcatgacccccgatatga

SEQ ID NO: 65977 - DNA, 19 bp, Homo sapiens
  siRNA target sequence for SHARP (NM_015001.2,816-834).
ggctcgcgagcagtttaca

SEQ ID NO: 65978 - DNA, 19 bp, Homo sapiens
  siRNA target sequence for SHARP (NM_015001.2,818-836).
ctcgcgagcagtttacact

SEQ ID NO: 65979 - DNA, 19 bp, Homo sapiens
  siRNA target sequence for SHARP (NM_015001.2,844-862).
gtggtacacagggatatct

SEQ ID NO: 65980 - DNA, 19 bp, Homo sapiens
  siRNA target sequence for SHARP (NM_015001.2,856-874).
gatatctacagggatgata

SEQ ID NO: 65981 - DNA, 19 bp, Homo sapiens
  siRNA target sequence for SHARP (NM_015001.2,896-914).
gaaggccagagcggaatta

SEQ ID NO: 65982 - DNA, 19 bp, Homo sapiens
  siRNA target sequence for SHARP (NM_015001.2,899-917).
ggccagagcggaattacca

SEQ ID NO: 65983 - DNA, 19 bp, Homo sapiens
  siRNA target sequence for SHARP (NM_015001.2,940-958).
cattcatcccagtctagaa

SEQ ID NO: 65984 - DNA, 19 bp, Homo sapiens
  siRNA target sequence for SHARP (NM_015001.2,1014-1032).
cggcagcggctctagaagt

SEQ ID NO: 65985 - DNA, 19 bp, Homo sapiens
  siRNA target sequence for SHARP (NM_015001.2,1017-1035).
cagcggctctagaagtaga

SEQ ID NO: 65986 - DNA, 19 bp, Homo sapiens
  siRNA target sequence for SHARP (NM_015001.2,1095-1113).
cagcagtagttcaagtgat

SEQ ID NO: 65987 - DNA, 19 bp, Homo sapiens
  siRNA target sequence for SHARP (NM_015001.2,1189-1207).
gatgagccccgtaaaagtt

SEQ ID NO: 65988 - DNA, 19 bp, Homo sapiens
  siRNA target sequence for SHARP (NM_015001.2,1231-1249).
ccagtacgctctacagata

SEQ ID NO: 65989 - DNA, 19 bp, Homo sapiens
  siRNA target sequence for SHARP (NM_015001.2,1264-1282).
ggccttttccatgaattta

SEQ ID NO: 65990 - DNA, 19 bp, Homo sapiens
  siRNA target sequence for SHARP (NM_015001.2,1334-1352).
ggtatggtctggtattctt

SEQ ID NO: 65991 - DNA, 19 bp, Homo sapiens
  siRNA target sequence for SHARP (NM_015001.2,1335-1353).
gtatggtctggtattcttt

SEQ ID NO: 65992 - DNA, 19 bp, Homo sapiens
  siRNA target sequence for SHARP (NM_015001.2,1411-1429).
ggcatgcagattgaagtaa

SEQ ID NO: 65993 - DNA, 19 bp, Homo sapiens
  siRNA target sequence for SHARP (NM_015001.2,1472-1490).
gccccttggatgaaaggat

SEQ ID NO: 65994 - DNA, 19 bp, Homo sapiens
  siRNA target sequence for SHARP (NM_015001.2,1473-1491).
ccccttggatgaaaggata

SEQ ID NO: 65995 - DNA, 19 bp, Homo sapiens
  siRNA target sequence for SHARP (NM_015001.2,1510-1528).
gcaacaagaactctcttta

SEQ ID NO: 65996 - DNA, 19 bp, Homo sapiens
  siRNA target sequence for SHARP (NM_015001.2,1558-1576).
catgaccttcgcaacatct

SEQ ID NO: 65997 - DNA, 19 bp, Homo sapiens
  siRNA target sequence for SHARP (NM_015001.2,1647-1665).
gcaatactgtgatattgct

SEQ ID NO: 65998 - DNA, 19 bp, Homo sapiens
  siRNA target sequence for SHARP (NM_015001.2,1648-1666).
caatactgtgatattgcta

SEQ ID NO: 65999 - DNA, 19 bp, Homo sapiens
  siRNA target sequence for SHARP (NM_015001.2,1657-1675).
gatattgctagcgtttgta

SEQ ID NO: 66000 - DNA, 19 bp, Homo sapiens
  siRNA target sequence for SHARP (NM_015001.2,1663-1681).
gctagcgtttgtaaagcta

SEQ ID NO: 66001 - DNA, 19 bp, Homo sapiens
  siRNA target sequence for SHARP (NM_015001.2,1664-1682).
ctagcgtttgtaaagctat

SEQ ID NO: 66002 - DNA, 19 bp, Homo sapiens
  siRNA target sequence for SHARP (NM_015001.2,1689-1707).
gatggatggggaatatctt

SEQ ID NO: 66003 - DNA, 19 bp, Homo sapiens
  siRNA target sequence for SHARP (NM_015001.2,1720-1738).
ctcaagctgggttttggaa

SEQ ID NO: 66004 - DNA, 19 bp, Homo sapiens
  siRNA target sequence for SHARP (NM_015001.2,1771-1789).
gggctttcttcgaatgtgt

SEQ ID NO: 66005 - DNA, 19 bp, Homo sapiens
  siRNA target sequence for SHARP (NM_015001.2,1781-1799).
cgaatgtgtcagatcagta

SEQ ID NO: 66006 - DNA, 19 bp, Homo sapiens
  siRNA target sequence for SHARP (NM_015001.2,1820-1838).
gatatgggcctgtggtaaa

SEQ ID NO: 66007 - DNA, 19 bp, Homo sapiens
  siRNA target sequence for SHARP (NM_015001.2,1928-1946).
ggaaaatcggtgggaataa

SEQ ID NO: 66008 - DNA, 19 bp, Homo sapiens
  siRNA target sequence for SHARP (NM_015001.2,1976-1994).
gtcagctggctttttatca

SEQ ID NO: 66009 - DNA, 19 bp, Homo sapiens
  siRNA target sequence for SHARP (NM_015001.2,2066-2084).
gggcatcctacgactataa

SEQ ID NO: 66010 - DNA, 19 bp, Homo sapiens
  siRNA target sequence for SHARP (NM_015001.2,2069-2087).
catcctacgactataacca

SEQ ID NO: 66011 - DNA, 19 bp, Homo sapiens
  siRNA target sequence for SHARP (NM_015001.2,2085-2103).
ccaagatcgtacatattat

SEQ ID NO: 66012 - DNA, 19 bp, Homo sapiens
  siRNA target sequence for SHARP (NM_015001.2,2089-2107).
gatcgtacatattatgaga

SEQ ID NO: 66013 - DNA, 19 bp, Homo sapiens
  siRNA target sequence for SHARP (NM_015001.2,2165-2183).
ggagagagttttattcaga

SEQ ID NO: 66014 - DNA, 19 bp, Homo sapiens
  siRNA target sequence for SHARP (NM_015001.2,2192-2210).
cttaccaaggagactacta

SEQ ID NO: 66015 - DNA, 19 bp, Homo sapiens
  siRNA target sequence for SHARP (NM_015001.2,2197-2215).
caaggagactactatgaat

SEQ ID NO: 66016 - DNA, 19 bp, Homo sapiens
  siRNA target sequence for SHARP (NM_015001.2,2272-2290).
caagatattagggaatata

SEQ ID NO: 66017 - DNA, 19 bp, Homo sapiens
  siRNA target sequence for SHARP (NM_015001.2,2315-2333).
gagaacgtgaaagatttga

SEQ ID NO: 66018 - DNA, 19 bp, Homo sapiens
  siRNA target sequence for SHARP (NM_015001.2,2513-2531).
cccctccaagatatgagaa

SEQ ID NO: 66019 - DNA, 19 bp, Homo sapiens
  siRNA target sequence for SHARP (NM_015001.2,2514-2532).
ccctccaagatatgagaaa

SEQ ID NO: 66020 - DNA, 19 bp, Homo sapiens
  siRNA target sequence for SHARP (NM_015001.2,2545-2563).
cgtttggagcgctatacaa

SEQ ID NO: 66021 - DNA, 19 bp, Homo sapiens
  siRNA target sequence for SHARP (NM_015001.2,2576-2594).
cagataaagaacgaacttt

SEQ ID NO: 66022 - DNA, 19 bp, Homo sapiens
  siRNA target sequence for SHARP (NM_015001.2,2613-2631).
gagagagagacgcttaata

SEQ ID NO: 66023 - DNA, 19 bp, Homo sapiens
  siRNA target sequence for SHARP (NM_015001.2,2754-2772).
gcccaggagttgtaataaa

SEQ ID NO: 66024 - DNA, 19 bp, Homo sapiens
  siRNA target sequence for SHARP (NM_015001.2,2756-2774).
ccaggagttgtaataaact

SEQ ID NO: 66025 - DNA, 19 bp, Homo sapiens
  siRNA target sequence for SHARP (NM_015001.2,2829-2847).
gccttgcgtggttttgact

SEQ ID NO: 66026 - DNA, 19 bp, Homo sapiens
  siRNA target sequence for SHARP (NM_015001.2,2838-2856).
ggttttgactcgagtgaaa

SEQ ID NO: 66027 - DNA, 19 bp, Homo sapiens
  siRNA target sequence for SHARP (NM_015001.2,2844-2862).
gactcgagtgaaagagaaa

SEQ ID NO: 66028 - DNA, 19 bp, Homo sapiens
  siRNA target sequence for SHARP (NM_015001.2,2905-2923).
gccaagcttgataatgaca

SEQ ID NO: 66029 - DNA, 19 bp, Homo sapiens
  siRNA target sequence for SHARP (NM_015001.2,2967-2985).
gacggagcctgcaaaatct

SEQ ID NO: 66030 - DNA, 19 bp, Homo sapiens
  siRNA target sequence for SHARP (NM_015001.2,2991-3009).
gtctaaactggaatcagtt

SEQ ID NO: 66031 - DNA, 19 bp, Homo sapiens
  siRNA target sequence for SHARP (NM_015001.2,3000-3018).
ggaatcagttagaatgaaa

SEQ ID NO: 66032 - DNA, 19 bp, Homo sapiens
  siRNA target sequence for SHARP (NM_015001.2,3161-3179).
ggcgctttgcagattccaa

SEQ ID NO: 66033 - DNA, 19 bp, Homo sapiens
  siRNA target sequence for SHARP (NM_015001.2,3162-3180).
gcgctttgcagattccaat

SEQ ID NO: 66034 - DNA, 19 bp, Homo sapiens
  siRNA target sequence for SHARP (NM_015001.2,3163-3181).
cgctttgcagattccaatt

SEQ ID NO: 66035 - DNA, 19 bp, Homo sapiens
  siRNA target sequence for SHARP (NM_015001.2,3164-3182).
gctttgcagattccaattt

SEQ ID NO: 66036 - DNA, 19 bp, Homo sapiens
  siRNA target sequence for SHARP (NM_015001.2,3235-3253).
gatgctcgcgtgctttcaa

SEQ ID NO: 66037 - DNA, 19 bp, Homo sapiens
  siRNA target sequence for SHARP (NM_015001.2,3238-3256).
gctcgcgtgctttcaaaaa

SEQ ID NO: 66038 - DNA, 19 bp, Homo sapiens
  siRNA target sequence for SHARP (NM_015001.2,3239-3257).
ctcgcgtgctttcaaaaaa

SEQ ID NO: 66039 - DNA, 19 bp, Homo sapiens
  siRNA target sequence for SHARP (NM_015001.2,3242-3260).
gcgtgctttcaaaaaagca

SEQ ID NO: 66040 - DNA, 19 bp, Homo sapiens
  siRNA target sequence for SHARP (NM_015001.2,3530-3548).
caaaaccacagctcaaaca

SEQ ID NO: 66041 - DNA, 19 bp, Homo sapiens
  siRNA target sequence for SHARP (NM_015001.2,3549-3567).
gctgcaggtattagatgat

SEQ ID NO: 66042 - DNA, 19 bp, Homo sapiens
  siRNA target sequence for SHARP (NM_015001.2,3579-3597).
gagagaagacgttaggaaa

SEQ ID NO: 66043 - DNA, 19 bp, Homo sapiens
  siRNA target sequence for SHARP (NM_015001.2,3586-3604).
gacgttaggaaaaactatt

SEQ ID NO: 66044 - DNA, 19 bp, Homo sapiens
  siRNA target sequence for SHARP (NM_015001.2,3589-3607).
gttaggaaaaactattgca

SEQ ID NO: 66045 - DNA, 19 bp, Homo sapiens
  siRNA target sequence for SHARP (NM_015001.2,3648-3666).
gaaatcacattcagtaaat

SEQ ID NO: 66046 - DNA, 19 bp, Homo sapiens
  siRNA target sequence for SHARP (NM_015001.2,3774-3792).
gaagtttggcagtcctaaa

SEQ ID NO: 66047 - DNA, 19 bp, Homo sapiens
  siRNA target sequence for SHARP (NM_015001.2,3777-3795).
gtttggcagtcctaaaaaa

SEQ ID NO: 66048 - DNA, 19 bp, Homo sapiens
  siRNA target sequence for SHARP (NM_015001.2,3782-3800).
gcagtcctaaaaaagatgt

SEQ ID NO: 66049 - DNA, 19 bp, Homo sapiens
  siRNA target sequence for SHARP (NM_015001.2,3839-3857).
gcaaaccccctcaagatgt

SEQ ID NO: 66050 - DNA, 19 bp, Homo sapiens
  siRNA target sequence for SHARP (NM_015001.2,3865-3883).
gactctcctcctagcaaaa

SEQ ID NO: 66051 - DNA, 19 bp, Homo sapiens
  siRNA target sequence for SHARP (NM_015001.2,3890-3908).
ggatggatcatgtcgattt

SEQ ID NO: 66052 - DNA, 19 bp, Homo sapiens
  siRNA target sequence for SHARP (NM_015001.2,3895-3913).
gatcatgtcgattttgata

SEQ ID NO: 66053 - DNA, 19 bp, Homo sapiens
  siRNA target sequence for SHARP (NM_015001.2,3920-3938).
ccaagcgagaacggaatta

SEQ ID NO: 66054 - DNA, 19 bp, Homo sapiens
  siRNA target sequence for SHARP (NM_015001.2,3924-3942).
gcgagaacggaattacaga

SEQ ID NO: 66055 - DNA, 19 bp, Homo sapiens
  siRNA target sequence for SHARP (NM_015001.2,3925-3943).
cgagaacggaattacagaa

SEQ ID NO: 66056 - DNA, 19 bp, Homo sapiens
  siRNA target sequence for SHARP (NM_015001.2,3949-3967).
cgccaaatcagcgaagatt

SEQ ID NO: 66057 - DNA, 19 bp, Homo sapiens
  siRNA target sequence for SHARP (NM_015001.2,3951-3969).
ccaaatcagcgaagattct

SEQ ID NO: 66058 - DNA, 19 bp, Homo sapiens
  siRNA target sequence for SHARP (NM_015001.2,4004-4022).
gttccttccatgaagatga

SEQ ID NO: 66059 - DNA, 19 bp, Homo sapiens
  siRNA target sequence for SHARP (NM_015001.2,4039-4057).
cctaggctactgtcagtaa

SEQ ID NO: 66060 - DNA, 19 bp, Homo sapiens
  siRNA target sequence for SHARP (NM_015001.2,4062-4080).
gtctcctaaagtagatgaa

SEQ ID NO: 66061 - DNA, 19 bp, Homo sapiens
  siRNA target sequence for SHARP (NM_015001.2,4086-4104).
cctcccctattctaacata

SEQ ID NO: 66062 - DNA, 19 bp, Homo sapiens
  siRNA target sequence for SHARP (NM_015001.2,4106-4124).
cagtcagggaagagtcttt

SEQ ID NO: 66063 - DNA, 19 bp, Homo sapiens
  siRNA target sequence for SHARP (NM_015001.2,4223-4241).
gggactctcagatgaaaca

SEQ ID NO: 66064 - DNA, 19 bp, Homo sapiens
  siRNA target sequence for SHARP (NM_015001.2,4242-4260).
ggatgctggcagatttgat

SEQ ID NO: 66065 - DNA, 19 bp, Homo sapiens
  siRNA target sequence for SHARP (NM_015001.2,4265-4283).
gtttcccaaacagcataat

SEQ ID NO: 66066 - DNA, 19 bp, Homo sapiens
  siRNA target sequence for SHARP (NM_015001.2,4287-4305).
gagagatagccttcgaaaa

SEQ ID NO: 66067 - DNA, 19 bp, Homo sapiens
  siRNA target sequence for SHARP (NM_015001.2,4291-4309).
gatagccttcgaaaaaggt

SEQ ID NO: 66068 - DNA, 19 bp, Homo sapiens
  siRNA target sequence for SHARP (NM_015001.2,4382-4400).
ccagagcctctgcattata

SEQ ID NO: 66069 - DNA, 19 bp, Homo sapiens
  siRNA target sequence for SHARP (NM_015001.2,4402-4420).
gaaagttctcgattgtctt

SEQ ID NO: 66070 - DNA, 19 bp, Homo sapiens
  siRNA target sequence for SHARP (NM_015001.2,4447-4465).
ctacgtgagcgagatgaaa

SEQ ID NO: 66071 - DNA, 19 bp, Homo sapiens
  siRNA target sequence for SHARP (NM_015001.2,4472-4490).
ctagttctttagaaaggaa

SEQ ID NO: 66072 - DNA, 19 bp, Homo sapiens
  siRNA target sequence for SHARP (NM_015001.2,4566-4584).
ctcttcatctcgtgaagaa

SEQ ID NO: 66073 - DNA, 19 bp, Homo sapiens
  siRNA target sequence for SHARP (NM_015001.2,4605-4623).
ggactcccgatttgcaaat

SEQ ID NO: 66074 - DNA, 19 bp, Homo sapiens
  siRNA target sequence for SHARP (NM_015001.2,4606-4624).
gactcccgatttgcaaatt

SEQ ID NO: 66075 - DNA, 19 bp, Homo sapiens
  siRNA target sequence for SHARP (NM_015001.2,4611-4629).
ccgatttgcaaattttcga

SEQ ID NO: 66076 - DNA, 19 bp, Homo sapiens
  siRNA target sequence for SHARP (NM_015001.2,4612-4630).
cgatttgcaaattttcgaa

SEQ ID NO: 66077 - DNA, 19 bp, Homo sapiens
  siRNA target sequence for SHARP (NM_015001.2,4656-4674).
ctctgctccaagacctatt

SEQ ID NO: 66078 - DNA, 19 bp, Homo sapiens
  siRNA target sequence for SHARP (NM_015001.2,4698-4716).
gaaaattaggactgattca

SEQ ID NO: 66079 - DNA, 19 bp, Homo sapiens
  siRNA target sequence for SHARP (NM_015001.2,4802-4820).
gctcaatctttgaacaaga

SEQ ID NO: 66080 - DNA, 19 bp, Homo sapiens
  siRNA target sequence for SHARP (NM_015001.2,4803-4821).
ctcaatctttgaacaagat

SEQ ID NO: 66081 - DNA, 19 bp, Homo sapiens
  siRNA target sequence for SHARP (NM_015001.2,5065-5083).
gaatctgctcctgagaata

SEQ ID NO: 66082 - DNA, 19 bp, Homo sapiens
  siRNA target sequence for SHARP (NM_015001.2,5126-5144).
gtgtcacagtcgtaactct

SEQ ID NO: 66083 - DNA, 19 bp, Homo sapiens
  siRNA target sequence for SHARP (NM_015001.2,5169-5187).
gaagaccactggtgacaaa

SEQ ID NO: 66084 - DNA, 19 bp, Homo sapiens
  siRNA target sequence for SHARP (NM_015001.2,5190-5208).
ggtagaggcgcctttggta

SEQ ID NO: 66085 - DNA, 19 bp, Homo sapiens
  siRNA target sequence for SHARP (NM_015001.2,5191-5209).
gtagaggcgcctttggtaa

SEQ ID NO: 66086 - DNA, 19 bp, Homo sapiens
  siRNA target sequence for SHARP (NM_015001.2,5378-5396).
gtgaccagccgccttatct

SEQ ID NO: 66087 - DNA, 19 bp, Homo sapiens
  siRNA target sequence for SHARP (NM_015001.2,5472-5490).
ccagccactttcaaaacca

SEQ ID NO: 66088 - DNA, 19 bp, Homo sapiens
  siRNA target sequence for SHARP (NM_015001.2,5599-5617).
cccccagcttctgaagatt

SEQ ID NO: 66089 - DNA, 19 bp, Homo sapiens
  siRNA target sequence for SHARP (NM_015001.2,5831-5849).
caaggactgcttctaaaaa

SEQ ID NO: 66090 - DNA, 19 bp, Homo sapiens
  siRNA target sequence for SHARP (NM_015001.2,5914-5932).
gtaaggagcgtctatgcaa

SEQ ID NO: 66091 - DNA, 19 bp, Homo sapiens
  siRNA target sequence for SHARP (NM_015001.2,6260-6278).
cccaaataggcgtgaaaga

SEQ ID NO: 66092 - DNA, 19 bp, Homo sapiens
  siRNA target sequence for SHARP (NM_015001.2,6262-6280).
caaataggcgtgaaagaga

SEQ ID NO: 66093 - DNA, 19 bp, Homo sapiens
  siRNA target sequence for SHARP (NM_015001.2,6377-6395).
cccctgttgaagttgtaga

SEQ ID NO: 66094 - DNA, 19 bp, Homo sapiens
  siRNA target sequence for SHARP (NM_015001.2,6456-6474).
gttagcagtggacaaatct

SEQ ID NO: 66095 - DNA, 19 bp, Homo sapiens
  siRNA target sequence for SHARP (NM_015001.2,6599-6617).
gtttatcatcccagttgaa

SEQ ID NO: 66096 - DNA, 19 bp, Homo sapiens
  siRNA target sequence for SHARP (NM_015001.2,6758-6776).
ctgcctctgctgcctataa

SEQ ID NO: 66097 - DNA, 19 bp, Homo sapiens
  siRNA target sequence for SHARP (NM_015001.2,6864-6882).
ctccatcatcaatgacatt

SEQ ID NO: 66098 - DNA, 19 bp, Homo sapiens
  siRNA target sequence for SHARP (NM_015001.2,6884-6902).
ctggggagccagaaaactt

SEQ ID NO: 66099 - DNA, 19 bp, Homo sapiens
  siRNA target sequence for SHARP (NM_015001.2,7030-7048).
gaggctgctacagaatctt

SEQ ID NO: 66100 - DNA, 19 bp, Homo sapiens
  siRNA target sequence for SHARP (NM_015001.2,7219-7237).
cgccgcaagcgaaacacaa

SEQ ID NO: 66101 - DNA, 19 bp, Homo sapiens
  siRNA target sequence for SHARP (NM_015001.2,7220-7238).
gccgcaagcgaaacacaaa

SEQ ID NO: 66102 - DNA, 19 bp, Homo sapiens
  siRNA target sequence for SHARP (NM_015001.2,7222-7240).
cgcaagcgaaacacaaaca

SEQ ID NO: 66103 - DNA, 19 bp, Homo sapiens
  siRNA target sequence for SHARP (NM_015001.2,7265-7283).
gccatgtccctgaatccaa

SEQ ID NO: 66104 - DNA, 19 bp, Homo sapiens
  siRNA target sequence for SHARP (NM_015001.2,7416-7434).
gattccctccacagagaat

SEQ ID NO: 66105 - DNA, 19 bp, Homo sapiens
  siRNA target sequence for SHARP (NM_015001.2,7550-7568).
gggtgcattccatcattga

SEQ ID NO: 66106 - DNA, 19 bp, Homo sapiens
  siRNA target sequence for SHARP (NM_015001.2,7551-7569).
ggtgcattccatcattgaa

SEQ ID NO: 66107 - DNA, 19 bp, Homo sapiens
  siRNA target sequence for SHARP (NM_015001.2,7552-7570).
gtgcattccatcattgaaa

SEQ ID NO: 66108 - DNA, 19 bp, Homo sapiens
  siRNA target sequence for SHARP (NM_015001.2,7767-7785).
cacaaaggcctctgatgtt

SEQ ID NO: 66109 - DNA, 19 bp, Homo sapiens
  siRNA target sequence for SHARP (NM_015001.2,7769-7787).
caaaggcctctgatgttga

SEQ ID NO: 66110 - DNA, 19 bp, Homo sapiens
  siRNA target sequence for SHARP (NM_015001.2,7802-7820).
ccctgaggaagattctcat

SEQ ID NO: 66111 - DNA, 19 bp, Homo sapiens
  siRNA target sequence for SHARP (NM_015001.2,7925-7943).
cgccagttgactctaaaaa

SEQ ID NO: 66112 - DNA, 19 bp, Homo sapiens
  siRNA target sequence for SHARP (NM_015001.2,7966-7984).
cctccagtgacaaacaact

SEQ ID NO: 66113 - DNA, 19 bp, Homo sapiens
  siRNA target sequence for SHARP (NM_015001.2,8050-8068).
cccaaaattacctctgtta

SEQ ID NO: 66114 - DNA, 19 bp, Homo sapiens
  siRNA target sequence for SHARP (NM_015001.2,8088-8106).
cattgacctggaaaattca

SEQ ID NO: 66115 - DNA, 19 bp, Homo sapiens
  siRNA target sequence for SHARP (NM_015001.2,8283-8301).
gaaagggcctgtgaatgtt

SEQ ID NO: 66116 - DNA, 19 bp, Homo sapiens
  siRNA target sequence for SHARP (NM_015001.2,8500-8518).
gtgattgcgccgtcaacaa

SEQ ID NO: 66117 - DNA, 19 bp, Homo sapiens
  siRNA target sequence for SHARP (NM_015001.2,8529-8547).
gagagcgagtgctaatgaa

SEQ ID NO: 66118 - DNA, 19 bp, Homo sapiens
  siRNA target sequence for SHARP (NM_015001.2,8531-8549).
gagcgagtgctaatgaaaa

SEQ ID NO: 66119 - DNA, 19 bp, Homo sapiens
  siRNA target sequence for SHARP (NM_015001.2,8533-8551).
gcgagtgctaatgaaaaca

SEQ ID NO: 66120 - DNA, 19 bp, Homo sapiens
  siRNA target sequence for SHARP (NM_015001.2,8535-8553).
gagtgctaatgaaaacagt

SEQ ID NO: 66121 - DNA, 19 bp, Homo sapiens
  siRNA target sequence for SHARP (NM_015001.2,8689-8707).
cggatcagcgccaagatca

SEQ ID NO: 66122 - DNA, 19 bp, Homo sapiens
  siRNA target sequence for SHARP (NM_015001.2,8723-8741).
ccagtgcaatggacattga

SEQ ID NO: 66123 - DNA, 19 bp, Homo sapiens
  siRNA target sequence for SHARP (NM_015001.2,8866-8884).
ctgaccgcccagacatata

SEQ ID NO: 66124 - DNA, 19 bp, Homo sapiens
  siRNA target sequence for SHARP (NM_015001.2,8887-8905).
gcctctcctgtgatttcgt

SEQ ID NO: 66125 - DNA, 19 bp, Homo sapiens
  siRNA target sequence for SHARP (NM_015001.2,9020-9038).
cccctgtgctggttcacaa

SEQ ID NO: 66126 - DNA, 19 bp, Homo sapiens
  siRNA target sequence for SHARP (NM_015001.2,9045-9063).
ggtcctcaccccaagcatt

SEQ ID NO: 66127 - DNA, 19 bp, Homo sapiens
  siRNA target sequence for SHARP (NM_015001.2,9049-9067).
ctcaccccaagcattgtca

SEQ ID NO: 66128 - DNA, 19 bp, Homo sapiens
  siRNA target sequence for SHARP (NM_015001.2,9092-9110).
ccgtcacccttaaaatcga

SEQ ID NO: 66129 - DNA, 19 bp, Homo sapiens
  siRNA target sequence for SHARP (NM_015001.2,9485-9503).
cccagggcgaggtgagaat

SEQ ID NO: 66130 - DNA, 19 bp, Homo sapiens
  siRNA target sequence for SHARP (NM_015001.2,9487-9505).
cagggcgaggtgagaatga

SEQ ID NO: 66131 - DNA, 19 bp, Homo sapiens
  siRNA target sequence for SHARP (NM_015001.2,9671-9689).
ccgaggaggaagtgcatta

SEQ ID NO: 66132 - DNA, 19 bp, Homo sapiens
  siRNA target sequence for SHARP (NM_015001.2,9672-9690).
cgaggaggaagtgcattat

SEQ ID NO: 66133 - DNA, 19 bp, Homo sapiens
  siRNA target sequence for SHARP (NM_015001.2,9756-9774).
ccgactgcacccctatact

SEQ ID NO: 66134 - DNA, 19 bp, Homo sapiens
  siRNA target sequence for SHARP (NM_015001.2,9758-9776).
gactgcacccctatactgt

SEQ ID NO: 66135 - DNA, 19 bp, Homo sapiens
  siRNA target sequence for SHARP (NM_015001.2,10562-10580).
caaaacagccgttgtttgt

SEQ ID NO: 66136 - DNA, 19 bp, Homo sapiens
  siRNA target sequence for SHARP (NM_015001.2,10683-10701).
gagacccgtggatatggtt

SEQ ID NO: 66137 - DNA, 19 bp, Homo sapiens
  siRNA target sequence for SHARP (NM_015001.2,10688-10706).
ccgtggatatggttcaact

SEQ ID NO: 66138 - DNA, 19 bp, Homo sapiens
  siRNA target sequence for SHARP (NM_015001.2,10689-10707).
cgtggatatggttcaactt

SEQ ID NO: 66139 - DNA, 19 bp, Homo sapiens
  siRNA target sequence for SHARP (NM_015001.2,10737-10755).
cctgctggccctcaagaat

SEQ ID NO: 66140 - DNA, 19 bp, Homo sapiens
  siRNA target sequence for SHARP (NM_015001.2,11023-11041).
caggcggcagggatcatca

SEQ ID NO: 66141 - DNA, 19 bp, Homo sapiens
  siRNA target sequence for SHARP (NM_015001.2,11165-11183).
ctccccacctcatgattgt

SEQ ID NO: 66142 - DNA, 19 bp, Homo sapiens
  siRNA target sequence for SHARP (NM_015001.2,11169-11187).
ccacctcatgattgtcatt

SEQ ID NO: 66143 - DNA, 19 bp, Homo sapiens
  siRNA target sequence for SIAHBP1 (NM_014281.3,143-161).
gtggcagcgggagacaaat

SEQ ID NO: 66144 - DNA, 19 bp, Homo sapiens
  siRNA target sequence for SIAHBP1 (NM_014281.3,146-164).
gcagcgggagacaaatgga

SEQ ID NO: 66145 - DNA, 19 bp, Homo sapiens
  siRNA target sequence for SIAHBP1 (NM_014281.3,147-165).
cagcgggagacaaatggaa

SEQ ID NO: 66146 - DNA, 19 bp, Homo sapiens
  siRNA target sequence for SIAHBP1 (NM_014281.3,177-195).
gcacagactccatcaagat

SEQ ID NO: 66147 - DNA, 19 bp, Homo sapiens
  siRNA target sequence for SIAHBP1 (NM_014281.3,404-422).
gtctacgtgggctctatct

SEQ ID NO: 66148 - DNA, 19 bp, Homo sapiens
  siRNA target sequence for SIAHBP1 (NM_014281.3,409-427).
cgtgggctctatctactat

SEQ ID NO: 66149 - DNA, 19 bp, Homo sapiens
  siRNA target sequence for SIAHBP1 (NM_014281.3,1488-1506).
ccgtgaaccgcgtcatcat

SEQ ID NO: 66150 - DNA, 19 bp, Homo sapiens
  siRNA target sequence for SIAHBP1 (NM_014281.3,1490-1508).
gtgaaccgcgtcatcatct

SEQ ID NO: 66151 - DNA, 19 bp, Homo sapiens
  siRNA target sequence for SIAHBP1 (NM_014281.3,1558-1576).
ctttgtggagttttccata

SEQ ID NO: 66152 - DNA, 19 bp, Homo sapiens
  siRNA target sequence for SIAHBP1 (NM_014281.3,1654-1672).
cgaccaggagcgttttgat

SEQ ID NO: 66153 - DNA, 19 bp, Homo sapiens
  siRNA target sequence for SIAHBP1 (NM_014281.3,1658-1676).
caggagcgttttgataaca

SEQ ID NO: 66154 - DNA, 19 bp, Homo sapiens
  siRNA target sequence for SIAHBP1 (NM_014281.3,1660-1678).
ggagcgttttgataacagt

SEQ ID NO: 66155 - DNA, 19 bp, Homo sapiens
  siRNA target sequence for SLM1 (NM_152688.1,832-850).
ggtcgtggcagaggtatta

SEQ ID NO: 66156 - DNA, 19 bp, Homo sapiens
  siRNA target sequence for SLM1 (NM_152688.1,946-964).
cctcggggaagcactgtaa

SEQ ID NO: 66157 - DNA, 19 bp, Homo sapiens
  siRNA target sequence for SLM1 (NM_152688.1,1103-1121).
gctacgggggtgaatatga

SEQ ID NO: 66158 - DNA, 19 bp, Homo sapiens
  siRNA target sequence for SLM1 (NM_152688.1,1104-1122).
ctacgggggtgaatatgat

SEQ ID NO: 66159 - DNA, 19 bp, Homo sapiens
  siRNA target sequence for SLM1 (NM_152688.1,1120-1138).
gatgaccagacctatgaga

SEQ ID NO: 66160 - DNA, 19 bp, Homo sapiens
  siRNA target sequence for SLM1 (NM_152688.1,1125-1143).
ccagacctatgagacttat

SEQ ID NO: 66161 - DNA, 19 bp, Homo sapiens
  siRNA target sequence for SLM1 (NM_152688.1,1130-1148).
cctatgagacttatgataa

SEQ ID NO: 66162 - DNA, 19 bp, Homo sapiens
  siRNA target sequence for SND1 (NM_014390.1,276-294).
ctcagggtgcgccatcatt

SEQ ID NO: 66163 - DNA, 19 bp, Homo sapiens
  siRNA target sequence for SND1 (NM_014390.1,348-366).
caacattcgtgctggaaat

SEQ ID NO: 66164 - DNA, 19 bp, Homo sapiens
  siRNA target sequence for SND1 (NM_014390.1,351-369).
cattcgtgctggaaatctt

SEQ ID NO: 66165 - DNA, 19 bp, Homo sapiens
  siRNA target sequence for SND1 (NM_014390.1,437-455).
ctcgagagttccttcgaaa

SEQ ID NO: 66166 - DNA, 19 bp, Homo sapiens
  siRNA target sequence for SND1 (NM_014390.1,440-458).
gagagttccttcgaaagaa

SEQ ID NO: 66167 - DNA, 19 bp, Homo sapiens
  siRNA target sequence for SND1 (NM_014390.1,479-497).
gtttcacgatagaaaacaa

SEQ ID NO: 66168 - DNA, 19 bp, Homo sapiens
  siRNA target sequence for SND1 (NM_014390.1,511-529).
cgagagtatggcatgatct

SEQ ID NO: 66169 - DNA, 19 bp, Homo sapiens
  siRNA target sequence for SND1 (NM_014390.1,512-530).
gagagtatggcatgatcta

SEQ ID NO: 66170 - DNA, 19 bp, Homo sapiens
  siRNA target sequence for SND1 (NM_014390.1,521-539).
gcatgatctaccttggaaa

SEQ ID NO: 66171 - DNA, 19 bp, Homo sapiens
  siRNA target sequence for SND1 (NM_014390.1,522-540).
catgatctaccttggaaaa

SEQ ID NO: 66172 - DNA, 19 bp, Homo sapiens
  siRNA target sequence for SND1 (NM_014390.1,525-543).
gatctaccttggaaaagat

SEQ ID NO: 66173 - DNA, 19 bp, Homo sapiens
  siRNA target sequence for SND1 (NM_014390.1,531-549).
ccttggaaaagataccaat

SEQ ID NO: 66174 - DNA, 19 bp, Homo sapiens
  siRNA target sequence for SND1 (NM_014390.1,627-645).
gcagaaccggctttcagaa

SEQ ID NO: 66175 - DNA, 19 bp, Homo sapiens
  siRNA target sequence for SND1 (NM_014390.1,628-646).
cagaaccggctttcagaat

SEQ ID NO: 66176 - DNA, 19 bp, Homo sapiens
  siRNA target sequence for SND1 (NM_014390.1,630-648).
gaaccggctttcagaatgt

SEQ ID NO: 66177 - DNA, 19 bp, Homo sapiens
  siRNA target sequence for SND1 (NM_014390.1,688-706).
gaggggaacggttcacata

SEQ ID NO: 66178 - DNA, 19 bp, Homo sapiens
  siRNA target sequence for SND1 (NM_014390.1,691-709).
gggaacggttcacatacta

SEQ ID NO: 66179 - DNA, 19 bp, Homo sapiens
  siRNA target sequence for SND1 (NM_014390.1,692-710).
ggaacggttcacatactat

SEQ ID NO: 66180 - DNA, 19 bp, Homo sapiens
  siRNA target sequence for SND1 (NM_014390.1,707-725).
ctatccgggatctcaagta

SEQ ID NO: 66181 - DNA, 19 bp, Homo sapiens
  siRNA target sequence for SND1 (NM_014390.1,712-730).
cgggatctcaagtatacca

SEQ ID NO: 66182 - DNA, 19 bp, Homo sapiens
  siRNA target sequence for SND1 (NM_014390.1,714-732).
ggatctcaagtataccatt

SEQ ID NO: 66183 - DNA, 19 bp, Homo sapiens
  siRNA target sequence for SND1 (NM_014390.1,870-888).
caagtgcccaacttttcga

SEQ ID NO: 66184 - DNA, 19 bp, Homo sapiens
  siRNA target sequence for SND1 (NM_014390.1,1150-1168).
gagcgcaggctgagaatat

SEQ ID NO: 66185 - DNA, 19 bp, Homo sapiens
  siRNA target sequence for SND1 (NM_014390.1,1163-1181).
gaatatggagagactatgt

SEQ ID NO: 66186 - DNA, 19 bp, Homo sapiens
  siRNA target sequence for SND1 (NM_014390.1,1180-1198).
gtggctcccacagctaatt

SEQ ID NO: 66187 - DNA, 19 bp, Homo sapiens
  siRNA target sequence for SND1 (NM_014390.1,1184-1202).
ctcccacagctaatttgga

SEQ ID NO: 66188 - DNA, 19 bp, Homo sapiens
  siRNA target sequence for SND1 (NM_014390.1,1193-1211).
ctaatttggaccaaaagga

SEQ ID NO: 66189 - DNA, 19 bp, Homo sapiens
  siRNA target sequence for SND1 (NM_014390.1,1270-1288).
ctgaactcaggcgattaca

SEQ ID NO: 66190 - DNA, 19 bp, Homo sapiens
  siRNA target sequence for SND1 (NM_014390.1,1360-1378).
ctgcgtcccctgtatgaca

SEQ ID NO: 66191 - DNA, 19 bp, Homo sapiens
  siRNA target sequence for SND1 (NM_014390.1,1362-1380).
gcgtcccctgtatgacatt

SEQ ID NO: 66192 - DNA, 19 bp, Homo sapiens
  siRNA target sequence for SND1 (NM_014390.1,1399-1417).
cgggaatttcttcgaaaaa

SEQ ID NO: 66193 - DNA, 19 bp, Homo sapiens
  siRNA target sequence for SND1 (NM_014390.1,1441-1459).
gtgacggtggactacatta

SEQ ID NO: 66194 - DNA, 19 bp, Homo sapiens
  siRNA target sequence for SND1 (NM_014390.1,1567-1585).
ctagccacagtgatcagat

SEQ ID NO: 66195 - DNA, 19 bp, Homo sapiens
  siRNA target sequence for SND1 (NM_014390.1,1583-1601).
gataccggcaggatgatga

SEQ ID NO: 66196 - DNA, 19 bp, Homo sapiens
  siRNA target sequence for SND1 (NM_014390.1,1610-1628).
catcacactacgatgaact

SEQ ID NO: 66197 - DNA, 19 bp, Homo sapiens
  siRNA target sequence for SND1 (NM_014390.1,1639-1657).
gaggccagagctattaaga

SEQ ID NO: 66198 - DNA, 19 bp, Homo sapiens
  siRNA target sequence for SND1 (NM_014390.1,1695-1713).
ccaccgtgttgcagatata

SEQ ID NO: 66199 - DNA, 19 bp, Homo sapiens
  siRNA target sequence for SND1 (NM_014390.1,1696-1714).
caccgtgttgcagatatat

SEQ ID NO: 66200 - DNA, 19 bp, Homo sapiens
  siRNA target sequence for SND1 (NM_014390.1,1698-1716).
ccgtgttgcagatatatct

SEQ ID NO: 66201 - DNA, 19 bp, Homo sapiens
  siRNA target sequence for SND1 (NM_014390.1,1718-1736).
gggatacccaaaaagcaaa

SEQ ID NO: 66202 - DNA, 19 bp, Homo sapiens
  siRNA target sequence for SND1 (NM_014390.1,1758-1776).
gcgggcaggtcgttctgaa

SEQ ID NO: 66203 - DNA, 19 bp, Homo sapiens
  siRNA target sequence for SND1 (NM_014390.1,1801-1819).
ggttctcgtctcaaactct

SEQ ID NO: 66204 - DNA, 19 bp, Homo sapiens
  siRNA target sequence for SND1 (NM_014390.1,1802-1820).
gttctcgtctcaaactcta

SEQ ID NO: 66205 - DNA, 19 bp, Homo sapiens
  siRNA target sequence for SND1 (NM_014390.1,1851-1869).
cttgcttgcaggcattgaa

SEQ ID NO: 66206 - DNA, 19 bp, Homo sapiens
  siRNA target sequence for SND1 (NM_014390.1,1925-1943).
gcgaggaagctacactttt

SEQ ID NO: 66207 - DNA, 19 bp, Homo sapiens
  siRNA target sequence for SND1 (NM_014390.1,2328-2346).
gaacatgcgcaatgacatt

SEQ ID NO: 66208 - DNA, 19 bp, Homo sapiens
  siRNA target sequence for SND1 (NM_014390.1,2430-2448).
ccgtgcccgagtagagaaa

SEQ ID NO: 66209 - DNA, 19 bp, Homo sapiens
  siRNA target sequence for SND1 (NM_014390.1,2432-2450).
gtgcccgagtagagaaagt

SEQ ID NO: 66210 - DNA, 19 bp, Homo sapiens
  siRNA target sequence for SND1 (NM_014390.1,2451-2469).
cgagtctcctgccaaaata

SEQ ID NO: 66211 - DNA, 19 bp, Homo sapiens
  siRNA target sequence for SND1 (NM_014390.1,2470-2488).
catgtcttctacattgact

SEQ ID NO: 66212 - DNA, 19 bp, Homo sapiens
  siRNA target sequence for SND1 (NM_014390.1,2598-2616).
ggtgccccaagatgatgat

SEQ ID NO: 66213 - DNA, 19 bp, Homo sapiens
  siRNA target sequence for SND1 (NM_014390.1,2639-2657).
gcgtagttcgggatatcca

SEQ ID NO: 66214 - DNA, 19 bp, Homo sapiens
  siRNA target sequence for SND1 (NM_014390.1,2868-2886).
gtggcgctatggagacttt

SEQ ID NO: 66215 - DNA, 19 bp, Homo sapiens
  siRNA target sequence for SPAG7 (NM_004890.1,172-190).
ggaggtgtcagatttcatt

SEQ ID NO: 66216 - DNA, 19 bp, Homo sapiens
  siRNA target sequence for SPAG7 (NM_004890.1,235-253).
gatcgagaggagcatacta

SEQ ID NO: 66217 - DNA, 19 bp, Homo sapiens
  siRNA target sequence for SPAG7 (NM_004890.1,238-256).
cgagaggagcatactacat

SEQ ID NO: 66218 - DNA, 19 bp, Homo sapiens
  siRNA target sequence for SPAG7 (NM_004890.1,241-259).
gaggagcatactacatgat

SEQ ID NO: 66219 - DNA, 19 bp, Homo sapiens
  siRNA target sequence for SPAG7 (NM_004890.1,312-330).
gtcgctatgtcatgatctt

SEQ ID NO: 66220 - DNA, 19 bp, Homo sapiens
  siRNA target sequence for SPAG7 (NM_004890.1,314-332).
cgctatgtcatgatcttca

SEQ ID NO: 66221 - DNA, 19 bp, Homo sapiens
  siRNA target sequence for SPAG7 (NM_004890.1,340-358).
gtttgcaccctcagatgaa

SEQ ID NO: 66222 - DNA, 19 bp, Homo sapiens
  siRNA target sequence for SPAG7 (NM_004890.1,492-510).
gcgactacaaggacaagta

SEQ ID NO: 66223 - DNA, 19 bp, Homo sapiens
  siRNA target sequence for SPAG7 (NM_004890.1,582-600).
gtgtgcccgtggccaataa

SEQ ID NO: 66224 - DNA, 19 bp, Homo sapiens
  siRNA target sequence for SPAG7 (NM_004890.1,620-638).
gaagaggctatgaatgaga

SEQ ID NO: 66225 - DNA, 19 bp, Homo sapiens
  siRNA target sequence for SPAG7 (NM_004890.1,660-678).
ggcagagtggggaagagtt

SEQ ID NO: 66226 - DNA, 19 bp, Homo sapiens
  siRNA target sequence for SPAG7 (NM_004890.1,746-764).
gacaaggctgctgctatta

SEQ ID NO: 66227 - DNA, 19 bp, Homo sapiens
  siRNA target sequence for SPAG7 (NM_004890.1,846-864).
caccgttggagcttggata

SEQ ID NO: 66228 - DNA, 19 bp, Homo sapiens
  siRNA target sequence for SPF45 (NM_032905.3,220-238).
ggctggtccaaaaacttca

SEQ ID NO: 66229 - DNA, 19 bp, Homo sapiens
  siRNA target sequence for SPF45 (NM_032905.3,291-309).
gagccaaaggacgaaacaa

SEQ ID NO: 66230 - DNA, 19 bp, Homo sapiens
  siRNA target sequence for SPF45 (NM_032905.3,294-312).
ccaaaggacgaaacaaagt

SEQ ID NO: 66231 - DNA, 19 bp, Homo sapiens
  siRNA target sequence for SPF45 (NM_032905.3,295-313).
caaaggacgaaacaaagta

SEQ ID NO: 66232 - DNA, 19 bp, Homo sapiens
  siRNA target sequence for SPF45 (NM_032905.3,356-374).
cagatgaccggcaaattgt

SEQ ID NO: 66233 - DNA, 19 bp, Homo sapiens
  siRNA target sequence for SPF45 (NM_032905.3,431-449).
ctgcaggggaagttctgat

SEQ ID NO: 66234 - DNA, 19 bp, Homo sapiens
  siRNA target sequence for SPF45 (NM_032905.3,462-480).
cgaatatgaccctatgttt

SEQ ID NO: 66235 - DNA, 19 bp, Homo sapiens
  siRNA target sequence for SPF45 (NM_032905.3,534-552).
gcgggagctggaaagacaa

SEQ ID NO: 66236 - DNA, 19 bp, Homo sapiens
  siRNA target sequence for SPF45 (NM_032905.3,729-747).
gttaccccgagattttcct

SEQ ID NO: 66237 - DNA, 19 bp, Homo sapiens
  siRNA target sequence for SPF45 (NM_032905.3,735-753).
ccgagattttccttatgaa

SEQ ID NO: 66238 - DNA, 19 bp, Homo sapiens
  siRNA target sequence for SPF45 (NM_032905.3,875-893).
gcacggtggcgcacaagat

SEQ ID NO: 66239 - DNA, 19 bp, Homo sapiens
  siRNA target sequence for SPF45 (NM_032905.3,878-896).
cggtggcgcacaagatcat

SEQ ID NO: 66240 - DNA, 19 bp, Homo sapiens
  siRNA target sequence for SPF45 (NM_032905.3,1046-1064).
caaatccgctgactgaaat

SEQ ID NO: 66241 - DNA, 19 bp, Homo sapiens
  siRNA target sequence for SPF45 (NM_032905.3,1051-1069).
ccgctgactgaaatactta

SEQ ID NO: 66242 - DNA, 19 bp, Homo sapiens
  siRNA target sequence for SPF45 (NM_032905.3,1076-1094).
ctactaaagtggtcttact

SEQ ID NO: 66243 - DNA, 19 bp, Homo sapiens
  siRNA target sequence for SPF45 (NM_032905.3,1225-1243).
gtacggatatttttagaat

SEQ ID NO: 66244 - DNA, 19 bp, Homo sapiens
  siRNA target sequence for SPF45 (NM_032905.3,1240-1258).
gaatttgagagagttgaat

SEQ ID NO: 66245 - DNA, 19 bp, Homo sapiens
  siRNA target sequence for SPF45 (NM_032905.3,1303-1321).
ggacgggtggtaaaagcat

SEQ ID NO: 66246 - DNA, 19 bp, Homo sapiens
  siRNA target sequence for SPF45 (NM_032905.3,1307-1325).
gggtggtaaaagcatgttt

SEQ ID NO: 66247 - DNA, 19 bp, Homo sapiens
  siRNA target sequence for SRP46 (NM_032102.1,854-872).
gctcatctggttacagtaa

SEQ ID NO: 66248 - DNA, 19 bp, Homo sapiens
  siRNA target sequence for SRP46 (NM_032102.1,877-895).
cgctacagccgatatcaca

SEQ ID NO: 66249 - DNA, 19 bp, Homo sapiens
  siRNA target sequence for SRrp35 (NM_080743.2,203-221).
ggacttgcgccgtgagttt

SEQ ID NO: 66250 - DNA, 19 bp, Homo sapiens
  siRNA target sequence for SRrp35 (NM_080743.2,212-230).
ccgtgagtttggtcgatat

SEQ ID NO: 66251 - DNA, 19 bp, Homo sapiens
  siRNA target sequence for SRrp35 (NM_080743.2,226-244).
gatatggccctatagtaga

SEQ ID NO: 66252 - DNA, 19 bp, Homo sapiens
  siRNA target sequence for SRrp35 (NM_080743.2,232-250).
gccctatagtagacgttta

SEQ ID NO: 66253 - DNA, 19 bp, Homo sapiens
  siRNA target sequence for SRrp35 (NM_080743.2,235-253).
ctatagtagacgtttacat

SEQ ID NO: 66254 - DNA, 19 bp, Homo sapiens
  siRNA target sequence for SRrp35 (NM_080743.2,321-339).
gctgaagatgctctttata

SEQ ID NO: 66255 - DNA, 19 bp, Homo sapiens
  siRNA target sequence for SRrp35 (NM_080743.2,356-374).
ggtatgtggccgtcagatt

SEQ ID NO: 66256 - DNA, 19 bp, Homo sapiens
  siRNA target sequence for SRrp35 (NM_080743.2,527-545).
gcggtcagacagccttaaa

SEQ ID NO: 66257 - DNA, 19 bp, Homo sapiens
  siRNA target sequence for SRrp35 (NM_080743.2,552-570).
cgacacaggcgattttctt

SEQ ID NO: 66258 - DNA, 19 bp, Homo sapiens
  siRNA target sequence for SRrp35 (NM_080743.2,553-571).
gacacaggcgattttctta

SEQ ID NO: 66259 - DNA, 19 bp, Homo sapiens
  siRNA target sequence for SRrp35 (NM_080743.2,578-596).
gtctaaatctcgttccaaa

SEQ ID NO: 66260 - DNA, 19 bp, Homo sapiens
  siRNA target sequence for SRrp35 (NM_080743.2,673-691).
ggtccaagtccttacaaaa

SEQ ID NO: 66261 - DNA, 19 bp, Homo sapiens
  siRNA target sequence for SRrp35 (NM_080743.2,687-705).
caaaagaggtccaagtcaa

SEQ ID NO: 66262 - DNA, 19 bp, Homo sapiens
  siRNA target sequence for SRrp35 (NM_080743.2,721-739).
caagttcacctcaaaagca

SEQ ID NO: 66263 - DNA, 19 bp, Homo sapiens
  siRNA target sequence for SRrp35 (NM_080743.2,772-790).
gaagacattctgactcaat

SEQ ID NO: 66264 - DNA, 19 bp, Homo sapiens
  siRNA target sequence for SRrp35 (NM_080743.2,792-810).
gcaagatccccgtgtaaat

SEQ ID NO: 66265 - DNA, 19 bp, Homo sapiens
  siRNA target sequence for SRrp35 (NM_080743.2,811-829).
ctcccaaagggtataccaa

SEQ ID NO: 66266 - DNA, 19 bp, Homo sapiens
  siRNA target sequence for SRrp35 (NM_080743.2,813-831).
cccaaagggtataccaatt

SEQ ID NO: 66267 - DNA, 19 bp, Homo sapiens
  siRNA target sequence for SRrp35 (NM_080743.2,815-833).
caaagggtataccaattct

SEQ ID NO: 66268 - DNA, 19 bp, Homo sapiens
  siRNA target sequence for SRrp35 (NM_080743.2,819-837).
gggtataccaattctgaaa

SEQ ID NO: 66269 - DNA, 19 bp, Homo sapiens
  siRNA target sequence for SRrp35 (NM_080743.2,821-839).
gtataccaattctgaaact

SEQ ID NO: 66270 - DNA, 19 bp, Homo sapiens
  siRNA target sequence for SRrp35 (NM_080743.2,881-899).
cagatctcgaagttatcgt

SEQ ID NO: 66271 - DNA, 19 bp, Homo sapiens
  siRNA target sequence for SRrp35 (NM_080743.2,886-904).
ctcgaagttatcgtcataa

SEQ ID NO: 66272 - DNA, 19 bp, Homo sapiens
  siRNA target sequence for SRrp35 (NM_080743.2,888-906).
cgaagttatcgtcataaaa

SEQ ID NO: 66273 - DNA, 19 bp, Homo sapiens
  siRNA target sequence for SRrp35 (NM_080743.2,889-907).
gaagttatcgtcataaaaa

SEQ ID NO: 66274 - DNA, 19 bp, Homo sapiens
  siRNA target sequence for SSX1 (NM_005635.2,508-526).
gcaccccccaggaaaagca

SEQ ID NO: 66275 - DNA, 19 bp, Homo sapiens
  siRNA target sequence for SSX1 (NM_005635.2,509-527).
caccccccaggaaaagcaa

SEQ ID NO: 66276 - DNA, 19 bp, Homo sapiens
  siRNA target sequence for SSX2 (NM_003147.4,645-663).
caacattggtcgattcagt

SEQ ID NO: 66277 - DNA, 19 bp, Homo sapiens
  siRNA target sequence for SSX2 (NM_003147.4,655-673).
cgattcagtttgtcaactt

SEQ ID NO: 66278 - DNA, 19 bp, Homo sapiens
  siRNA target sequence for SSX3 (NM_175711.1,558-576).
ctggtgtccttcagagata

SEQ ID NO: 66279 - DNA, 19 bp, Homo sapiens
  siRNA target sequence for SSX4 (NM_005636.3,94-112).
ggatgatgctcaaatatca

SEQ ID NO: 66280 - DNA, 19 bp, Homo sapiens
  siRNA target sequence for SSX4 (NM_005636.3,301-319).
gaatgattttggtaacgat

SEQ ID NO: 66281 - DNA, 19 bp, Homo sapiens
  siRNA target sequence for SSX5 (NM_021015.3,151-169).
gaatacatttggtgaatct

SEQ ID NO: 66282 - DNA, 19 bp, Homo sapiens
  siRNA target sequence for SSX5 (NM_021015.3,240-258).
gctagggccttcgatgata

SEQ ID NO: 66283 - DNA, 19 bp, Homo sapiens
  siRNA target sequence for SSX5 (NM_021015.3,241-259).
ctagggccttcgatgatat

SEQ ID NO: 66284 - DNA, 19 bp, Homo sapiens
  siRNA target sequence for STK31 (NM_031414.2,24-42).
ccagggtcactcttctaga

SEQ ID NO: 66285 - DNA, 19 bp, Homo sapiens
  siRNA target sequence for STK31 (NM_031414.2,152-170).
cattttgggcccagagtat

SEQ ID NO: 66286 - DNA, 19 bp, Homo sapiens
  siRNA target sequence for STK31 (NM_031414.2,159-177).
ggcccagagtatcaataga

SEQ ID NO: 66287 - DNA, 19 bp, Homo sapiens
  siRNA target sequence for STK31 (NM_031414.2,160-178).
gcccagagtatcaatagaa

SEQ ID NO: 66288 - DNA, 19 bp, Homo sapiens
  siRNA target sequence for STK31 (NM_031414.2,184-202).
gatatcatgaagattggtt

SEQ ID NO: 66289 - DNA, 19 bp, Homo sapiens
  siRNA target sequence for STK31 (NM_031414.2,261-279).
caagatttatggtggatta

SEQ ID NO: 66290 - DNA, 19 bp, Homo sapiens
  siRNA target sequence for STK31 (NM_031414.2,289-307).
gatcagtgttggtacagat

SEQ ID NO: 66291 - DNA, 19 bp, Homo sapiens
  siRNA target sequence for STK31 (NM_031414.2,294-312).
gtgttggtacagatgcaaa

SEQ ID NO: 66292 - DNA, 19 bp, Homo sapiens
  siRNA target sequence for STK31 (NM_031414.2,351-369).
gtacattgactatggaaat

SEQ ID NO: 66293 - DNA, 19 bp, Homo sapiens
  siRNA target sequence for STK31 (NM_031414.2,385-403).
cgatctgatatagttgaaa

SEQ ID NO: 66294 - DNA, 19 bp, Homo sapiens
  siRNA target sequence for STK31 (NM_031414.2,386-404).
gatctgatatagttgaaat

SEQ ID NO: 66295 - DNA, 19 bp, Homo sapiens
  siRNA target sequence for STK31 (NM_031414.2,513-531).
ggggagcttgatttttgaa

SEQ ID NO: 66296 - DNA, 19 bp, Homo sapiens
  siRNA target sequence for STK31 (NM_031414.2,709-727).
gttctcaggaacctcaaaa

SEQ ID NO: 66297 - DNA, 19 bp, Homo sapiens
  siRNA target sequence for STK31 (NM_031414.2,721-739).
ctcaaaagccccattcctt

SEQ ID NO: 66298 - DNA, 19 bp, Homo sapiens
  siRNA target sequence for STK31 (NM_031414.2,736-754).
cctttgtgggggcatagat

SEQ ID NO: 66299 - DNA, 19 bp, Homo sapiens
  siRNA target sequence for STK31 (NM_031414.2,783-801).
ggggcacttaagtgagaaa

SEQ ID NO: 66300 - DNA, 19 bp, Homo sapiens
  siRNA target sequence for STK31 (NM_031414.2,893-911).
ctaacgtcagcctggaaaa

SEQ ID NO: 66301 - DNA, 19 bp, Homo sapiens
  siRNA target sequence for STK31 (NM_031414.2,897-915).
cgtcagcctggaaaaaatt

SEQ ID NO: 66302 - DNA, 19 bp, Homo sapiens
  siRNA target sequence for STK31 (NM_031414.2,898-916).
gtcagcctggaaaaaatta

SEQ ID NO: 66303 - DNA, 19 bp, Homo sapiens
  siRNA target sequence for STK31 (NM_031414.2,966-984).
ggacgctcttcttgaaagt

SEQ ID NO: 66304 - DNA, 19 bp, Homo sapiens
  siRNA target sequence for STK31 (NM_031414.2,967-985).
gacgctcttcttgaaagtt

SEQ ID NO: 66305 - DNA, 19 bp, Homo sapiens
  siRNA target sequence for STK31 (NM_031414.2,969-987).
cgctcttcttgaaagttat

SEQ ID NO: 66306 - DNA, 19 bp, Homo sapiens
  siRNA target sequence for STK31 (NM_031414.2,983-1001).
gttataaggcgttagaatt

SEQ ID NO: 66307 - DNA, 19 bp, Homo sapiens
  siRNA target sequence for STK31 (NM_031414.2,990-1008).
ggcgttagaattgaaagta

SEQ ID NO: 66308 - DNA, 19 bp, Homo sapiens
  siRNA target sequence for STK31 (NM_031414.2,1120-1138).
gctaagatggaaatactga

SEQ ID NO: 66309 - DNA, 19 bp, Homo sapiens
  siRNA target sequence for STK31 (NM_031414.2,1163-1181).
gtgtccgtttcggaaaaga

SEQ ID NO: 66310 - DNA, 19 bp, Homo sapiens
  siRNA target sequence for STK31 (NM_031414.2,1182-1200).
cctttcagatgctatacaa

SEQ ID NO: 66311 - DNA, 19 bp, Homo sapiens
  siRNA target sequence for STK31 (NM_031414.2,1206-1224).
ggatgaagggtgctttact

SEQ ID NO: 66312 - DNA, 19 bp, Homo sapiens
  siRNA target sequence for STK31 (NM_031414.2,1207-1225).
gatgaagggtgctttacta

SEQ ID NO: 66313 - DNA, 19 bp, Homo sapiens
  siRNA target sequence for STK31 (NM_031414.2,1235-1253).
ctttgaatggattagagat

SEQ ID NO: 66314 - DNA, 19 bp, Homo sapiens
  siRNA target sequence for STK31 (NM_031414.2,1271-1289).
gtctggctcaggagaatat

SEQ ID NO: 66315 - DNA, 19 bp, Homo sapiens
  siRNA target sequence for STK31 (NM_031414.2,1273-1291).
ctggctcaggagaatatta

SEQ ID NO: 66316 - DNA, 19 bp, Homo sapiens
  siRNA target sequence for STK31 (NM_031414.2,1393-1411).
gatgagtcatctcttaata

SEQ ID NO: 66317 - DNA, 19 bp, Homo sapiens
  siRNA target sequence for STK31 (NM_031414.2,1403-1421).
ctcttaataaacgcttaaa

SEQ ID NO: 66318 - DNA, 19 bp, Homo sapiens
  siRNA target sequence for STK31 (NM_031414.2,1443-1461).
ctctttagaagcagtgtat

SEQ ID NO: 66319 - DNA, 19 bp, Homo sapiens
  siRNA target sequence for STK31 (NM_031414.2,1536-1554).
ggagttcaccagtgttaga

SEQ ID NO: 66320 - DNA, 19 bp, Homo sapiens
  siRNA target sequence for STK31 (NM_031414.2,1582-1600).
cttgtagcatggttccaaa

SEQ ID NO: 66321 - DNA, 19 bp, Homo sapiens
  siRNA target sequence for STK31 (NM_031414.2,1629-1647).
ggaaggatcactgatttca

SEQ ID NO: 66322 - DNA, 19 bp, Homo sapiens
  siRNA target sequence for STK31 (NM_031414.2,1646-1664).
cagaagacgcaatggataa

SEQ ID NO: 66323 - DNA, 19 bp, Homo sapiens
  siRNA target sequence for STK31 (NM_031414.2,1653-1671).
cgcaatggataatattgat

SEQ ID NO: 66324 - DNA, 19 bp, Homo sapiens
  siRNA target sequence for STK31 (NM_031414.2,1814-1832).
ccacagtacaagctaagta

SEQ ID NO: 66325 - DNA, 19 bp, Homo sapiens
  siRNA target sequence for STK31 (NM_031414.2,1817-1835).
cagtacaagctaagtacaa

SEQ ID NO: 66326 - DNA, 19 bp, Homo sapiens
  siRNA target sequence for STK31 (NM_031414.2,1883-1901).
gtcccagtgtggatcactt

SEQ ID NO: 66327 - DNA, 19 bp, Homo sapiens
  siRNA target sequence for STK31 (NM_031414.2,1893-1911).
ggatcacttgctatccatt

SEQ ID NO: 66328 - DNA, 19 bp, Homo sapiens
  siRNA target sequence for STK31 (NM_031414.2,1894-1912).
gatcacttgctatccatta

SEQ ID NO: 66329 - DNA, 19 bp, Homo sapiens
  siRNA target sequence for STK31 (NM_031414.2,1897-1915).
cacttgctatccattaaga

SEQ ID NO: 66330 - DNA, 19 bp, Homo sapiens
  siRNA target sequence for STK31 (NM_031414.2,1936-1954).
gctctactcagatggaaat

SEQ ID NO: 66331 - DNA, 19 bp, Homo sapiens
  siRNA target sequence for STK31 (NM_031414.2,1991-2009).
ctgatggctctcaaattga

SEQ ID NO: 66332 - DNA, 19 bp, Homo sapiens
  siRNA target sequence for STK31 (NM_031414.2,1993-2011).
gatggctctcaaattgaga

SEQ ID NO: 66333 - DNA, 19 bp, Homo sapiens
  siRNA target sequence for STK31 (NM_031414.2,2030-2048).
ctcagctgcgcaataatgt

SEQ ID NO: 66334 - DNA, 19 bp, Homo sapiens
  siRNA target sequence for STK31 (NM_031414.2,2034-2052).
gctgcgcaataatgtcttt

SEQ ID NO: 66335 - DNA, 19 bp, Homo sapiens
  siRNA target sequence for STK31 (NM_031414.2,2077-2095).
gaatatgagatgctaacta

SEQ ID NO: 66336 - DNA, 19 bp, Homo sapiens
  siRNA target sequence for STK31 (NM_031414.2,2137-2155).
cctgaaataggattactca

SEQ ID NO: 66337 - DNA, 19 bp, Homo sapiens
  siRNA target sequence for STK31 (NM_031414.2,2146-2164).
ggattactcaaatacatga

SEQ ID NO: 66338 - DNA, 19 bp, Homo sapiens
  siRNA target sequence for STK31 (NM_031414.2,2147-2165).
gattactcaaatacatgaa

SEQ ID NO: 66339 - DNA, 19 bp, Homo sapiens
  siRNA target sequence for STK31 (NM_031414.2,2189-2207).
gcttggaacgagatcttct

SEQ ID NO: 66340 - DNA, 19 bp, Homo sapiens
  siRNA target sequence for STK31 (NM_031414.2,2190-2208).
cttggaacgagatcttctt

SEQ ID NO: 66341 - DNA, 19 bp, Homo sapiens
  siRNA target sequence for STK31 (NM_031414.2,2235-2253).
cagcaagcgtcctttggta

SEQ ID NO: 66342 - DNA, 19 bp, Homo sapiens
  siRNA target sequence for STK31 (NM_031414.2,2250-2268).
ggtacgttctgaggttaat

SEQ ID NO: 66343 - DNA, 19 bp, Homo sapiens
  siRNA target sequence for STK31 (NM_031414.2,2262-2280).
ggttaatgggcagataatt

SEQ ID NO: 66344 - DNA, 19 bp, Homo sapiens
  siRNA target sequence for STK31 (NM_031414.2,2291-2309).
gctattctgtggatgttga

SEQ ID NO: 66345 - DNA, 19 bp, Homo sapiens
  siRNA target sequence for STK31 (NM_031414.2,2380-2398).
gggttactgccattgatat

SEQ ID NO: 66346 - DNA, 19 bp, Homo sapiens
  siRNA target sequence for STK31 (NM_031414.2,2400-2418).
cctgtttttatgtaagtct

SEQ ID NO: 66347 - DNA, 19 bp, Homo sapiens
  siRNA target sequence for STK31 (NM_031414.2,2417-2435).
ctgatcctatggcttatct

SEQ ID NO: 66348 - DNA, 19 bp, Homo sapiens
  siRNA target sequence for STK31 (NM_031414.2,2419-2437).
gatcctatggcttatctga

SEQ ID NO: 66349 - DNA, 19 bp, Homo sapiens
  siRNA target sequence for STK31 (NM_031414.2,2479-2497).
gccaacatgcctttaaatt

SEQ ID NO: 66350 - DNA, 19 bp, Homo sapiens
  siRNA target sequence for STK31 (NM_031414.2,2531-2549).
cccagggtctgcatacatt

SEQ ID NO: 66351 - DNA, 19 bp, Homo sapiens
  siRNA target sequence for STK31 (NM_031414.2,2535-2553).
gggtctgcatacattgcat

SEQ ID NO: 66352 - DNA, 19 bp, Homo sapiens
  siRNA target sequence for STK31 (NM_031414.2,2550-2568).
gcataaggctgacataatt

SEQ ID NO: 66353 - DNA, 19 bp, Homo sapiens
  siRNA target sequence for STK31 (NM_031414.2,2573-2591).
gatcacttcatcagaacaa

SEQ ID NO: 66354 - DNA, 19 bp, Homo sapiens
  siRNA target sequence for STK31 (NM_031414.2,2659-2677).
cgagcctcggtgaacatga

SEQ ID NO: 66355 - DNA, 19 bp, Homo sapiens
  siRNA target sequence for STK31 (NM_031414.2,2660-2678).
gagcctcggtgaacatgat

SEQ ID NO: 66356 - DNA, 19 bp, Homo sapiens
  siRNA target sequence for STK31 (NM_031414.2,2697-2715).
gatgtcacctgagttgaaa

SEQ ID NO: 66357 - DNA, 19 bp, Homo sapiens
  siRNA target sequence for STK31 (NM_031414.2,2737-2755).
ggttcagacttatatgctt

SEQ ID NO: 66358 - DNA, 19 bp, Homo sapiens
  siRNA target sequence for STK31 (NM_031414.2,2738-2756).
gttcagacttatatgctta

SEQ ID NO: 66359 - DNA, 19 bp, Homo sapiens
  siRNA target sequence for STK31 (NM_031414.2,2752-2770).
gcttatggctgcctcttat

SEQ ID NO: 66360 - DNA, 19 bp, Homo sapiens
  siRNA target sequence for STK31 (NM_031414.2,2753-2771).
cttatggctgcctcttatt

SEQ ID NO: 66361 - DNA, 19 bp, Homo sapiens
  siRNA target sequence for STK31 (NM_031414.2,2839-2857).
catctggatgataaagtca

SEQ ID NO: 66362 - DNA, 19 bp, Homo sapiens
  siRNA target sequence for STK31 (NM_031414.2,2862-2880).
cctcctctgtagcttgata

SEQ ID NO: 66363 - DNA, 19 bp, Homo sapiens
  siRNA target sequence for STK31 (NM_031414.2,2868-2886).
ctgtagcttgatatgttat

SEQ ID NO: 66364 - DNA, 19 bp, Homo sapiens
  siRNA target sequence for STK31 (NM_031414.2,2975-2993).
ctgaatacaccctatataa

SEQ ID NO: 66365 - DNA, 19 bp, Homo sapiens
  siRNA target sequence for STK31 (NM_031414.2,2977-2995).
gaatacaccctatataaaa

SEQ ID NO: 66366 - DNA, 19 bp, Homo sapiens
  siRNA target sequence for STK31 (NM_031414.2,3012-3030).
gacggagaacttggataaa

SEQ ID NO: 66367 - DNA, 19 bp, Homo sapiens
  siRNA target sequence for SZF1 (NM_016089.1,403-421).
cagctttgcagaactataa

SEQ ID NO: 66368 - DNA, 19 bp, Homo sapiens
  siRNA target sequence for SZF1 (NM_016089.1,405-423).
gctttgcagaactataata

SEQ ID NO: 66369 - DNA, 19 bp, Homo sapiens
  siRNA target sequence for SZF1 (NM_016089.1,662-680).
gccaagatgagctacacaa

SEQ ID NO: 66370 - DNA, 19 bp, Homo sapiens
  siRNA target sequence for SZF1 (NM_016089.1,753-771).
gtcacaacatccttctgat

SEQ ID NO: 66371 - DNA, 19 bp, Homo sapiens
  siRNA target sequence for SZF1 (NM_016089.1,755-773).
cacaacatccttctgataa

SEQ ID NO: 66372 - DNA, 19 bp, Homo sapiens
  siRNA target sequence for SZF1 (NM_016089.1,757-775).
caacatccttctgataaaa

SEQ ID NO: 66373 - DNA, 19 bp, Homo sapiens
  siRNA target sequence for SZF1 (NM_016089.1,817-835).
ggcgtcagacccttgtttt

SEQ ID NO: 66374 - DNA, 19 bp, Homo sapiens
  siRNA target sequence for SZF1 (NM_016089.1,820-838).
gtcagacccttgttttgga

SEQ ID NO: 66375 - DNA, 19 bp, Homo sapiens
  siRNA target sequence for SZF1 (NM_016089.1,855-873).
ggctttagtgggtttctct

SEQ ID NO: 66376 - DNA, 19 bp, Homo sapiens
  siRNA target sequence for SZF1 (NM_016089.1,856-874).
gctttagtgggtttctcta

SEQ ID NO: 66377 - DNA, 19 bp, Homo sapiens
  siRNA target sequence for SZF1 (NM_016089.1,883-901).
cagagaccaccaataagct

SEQ ID NO: 66378 - DNA, 19 bp, Homo sapiens
  siRNA target sequence for SZF1 (NM_016089.1,905-923).
ggggaggcaacagaatatt

SEQ ID NO: 66379 - DNA, 19 bp, Homo sapiens
  siRNA target sequence for SZF1 (NM_016089.1,906-924).
gggaggcaacagaatatta

SEQ ID NO: 66380 - DNA, 19 bp, Homo sapiens
  siRNA target sequence for SZF1 (NM_016089.1,1028-1046).
gtgcactagcttttaacca

SEQ ID NO: 66381 - DNA, 19 bp, Homo sapiens
  siRNA target sequence for SZF1 (NM_016089.1,1211-1229).
gtgggcgaggctttatagt

SEQ ID NO: 66382 - DNA, 19 bp, Homo sapiens
  siRNA target sequence for SZF1 (NM_016089.1,1214-1232).
ggcgaggctttatagttga

SEQ ID NO: 66383 - DNA, 19 bp, Homo sapiens
  siRNA target sequence for SZF1 (NM_016089.1,1481-1499).
gcaactgtgttcttccatt

SEQ ID NO: 66384 - DNA, 19 bp, Homo sapiens
  siRNA target sequence for SZF1 (NM_016089.1,1482-1500).
caactgtgttcttccatta

SEQ ID NO: 66385 - DNA, 19 bp, Homo sapiens
  siRNA target sequence for SZF1 (NM_016089.1,1560-1578).
ctcctaccccacctttaga

SEQ ID NO: 66386 - DNA, 19 bp, Homo sapiens
  siRNA target sequence for SZF1 (NM_016089.1,1562-1580).
cctaccccacctttagatt

SEQ ID NO: 66387 - DNA, 19 bp, Homo sapiens
  siRNA target sequence for SZF1 (NM_016089.1,1563-1581).
ctaccccacctttagattt

SEQ ID NO: 66388 - DNA, 19 bp, Homo sapiens
  siRNA target sequence for SZF1 (NM_016089.1,1595-1613).
gtctccagccctacaatct

SEQ ID NO: 66389 - DNA, 19 bp, Homo sapiens
  siRNA target sequence for SZF1 (NM_016089.1,1597-1615).
ctccagccctacaatctga

SEQ ID NO: 66390 - DNA, 19 bp, Homo sapiens
  siRNA target sequence for SZFP41 (NM_152279.2,682-700).
cacagttcaaggtacatct

SEQ ID NO: 66391 - DNA, 19 bp, Homo sapiens
  siRNA target sequence for SZFP41 (NM_152279.2,843-861).
caagtatcgtctcttttca

SEQ ID NO: 66392 - DNA, 19 bp, Homo sapiens
  siRNA target sequence for SZFP41 (NM_152279.2,1094-1112).
ccagaaaacacaattgatt

SEQ ID NO: 66393 - DNA, 19 bp, Homo sapiens
  siRNA target sequence for T54 (NM_015698.3,51-69).
ccactgccccaatttcatt

SEQ ID NO: 66394 - DNA, 19 bp, Homo sapiens
  siRNA target sequence for T54 (NM_015698.3,134-152).
ccggaggagaaggatttct

SEQ ID NO: 66395 - DNA, 19 bp, Homo sapiens
  siRNA target sequence for T54 (NM_015698.3,135-153).
cggaggagaaggatttctt

SEQ ID NO: 66396 - DNA, 19 bp, Homo sapiens
  siRNA target sequence for T54 (NM_015698.3,559-577).
ccgcaccttcaatcaagta

SEQ ID NO: 66397 - DNA, 19 bp, Homo sapiens
  siRNA target sequence for T54 (NM_015698.3,561-579).
gcaccttcaatcaagtagt

SEQ ID NO: 66398 - DNA, 19 bp, Homo sapiens
  siRNA target sequence for T54 (NM_015698.3,564-582).
ccttcaatcaagtagtgaa

SEQ ID NO: 66399 - DNA, 19 bp, Homo sapiens
  siRNA target sequence for T54 (NM_015698.3,1100-1118).
cggtttgtggacaacatgt

SEQ ID NO: 66400 - DNA, 19 bp, Homo sapiens
  siRNA target sequence for T54 (NM_015698.3,1101-1119).
ggtttgtggacaacatgta

SEQ ID NO: 66401 - DNA, 19 bp, Homo sapiens
  siRNA target sequence for T54 (NM_015698.3,1117-1135).
gtacaaaggaggccaatat

SEQ ID NO: 66402 - DNA, 19 bp, Homo sapiens
  siRNA target sequence for T54 (NM_015698.3,1124-1142).
ggaggccaatattacaaca

SEQ ID NO: 66403 - DNA, 19 bp, Homo sapiens
  siRNA target sequence for T54 (NM_015698.3,1141-1159).
caccaagatgataattgaa

SEQ ID NO: 66404 - DNA, 19 bp, Homo sapiens
  siRNA target sequence for T54 (NM_015698.3,1143-1161).
ccaagatgataattgaaga

SEQ ID NO: 66405 - DNA, 19 bp, Homo sapiens
  siRNA target sequence for TDRD1 (NM_198795.1,178-196).
gtgatgtcaagaaataatt

SEQ ID NO: 66406 - DNA, 19 bp, Homo sapiens
  siRNA target sequence for TDRD1 (NM_198795.1,216-234).
gatgacagagccatttaat

SEQ ID NO: 66407 - DNA, 19 bp, Homo sapiens
  siRNA target sequence for TDRD1 (NM_198795.1,259-277).
ccaccacatgagtctttaa

SEQ ID NO: 66408 - DNA, 19 bp, Homo sapiens
  siRNA target sequence for TDRD1 (NM_198795.1,281-299).
gtcctggaacacttcctaa

SEQ ID NO: 66409 - DNA, 19 bp, Homo sapiens
  siRNA target sequence for TDRD1 (NM_198795.1,292-310).
cttcctaaccaccctaatt

SEQ ID NO: 66410 - DNA, 19 bp, Homo sapiens
  siRNA target sequence for TDRD1 (NM_198795.1,295-313).
cctaaccaccctaatttca

SEQ ID NO: 66411 - DNA, 19 bp, Homo sapiens
  siRNA target sequence for TDRD1 (NM_198795.1,304-322).
cctaatttcaggctgaaaa

SEQ ID NO: 66412 - DNA, 19 bp, Homo sapiens
  siRNA target sequence for TDRD1 (NM_198795.1,385-403).
gctagtcaggaagacaatt

SEQ ID NO: 66413 - DNA, 19 bp, Homo sapiens
  siRNA target sequence for TDRD1 (NM_198795.1,425-443).
gcatcaacggagaagtagt

SEQ ID NO: 66414 - DNA, 19 bp, Homo sapiens
  siRNA target sequence for TDRD1 (NM_198795.1,496-514).
ccaagtgctgaaagtaatt

SEQ ID NO: 66415 - DNA, 19 bp, Homo sapiens
  siRNA target sequence for TDRD1 (NM_198795.1,553-571).
gtacgtcctgcaaaatcaa

SEQ ID NO: 66416 - DNA, 19 bp, Homo sapiens
  siRNA target sequence for TDRD1 (NM_198795.1,556-574).
cgtcctgcaaaatcaaaaa

SEQ ID NO: 66417 - DNA, 19 bp, Homo sapiens
  siRNA target sequence for TDRD1 (NM_198795.1,592-610).
gagaattccttgtccataa

SEQ ID NO: 66418 - DNA, 19 bp, Homo sapiens
  siRNA target sequence for TDRD1 (NM_198795.1,600-618).
cttgtccataagtaatcca

SEQ ID NO: 66419 - DNA, 19 bp, Homo sapiens
  siRNA target sequence for TDRD1 (NM_198795.1,667-685).
cgctgtggcctatttggat

SEQ ID NO: 66420 - DNA, 19 bp, Homo sapiens
  siRNA target sequence for TDRD1 (NM_198795.1,702-720).
gtgcaagcagacctactat

SEQ ID NO: 66421 - DNA, 19 bp, Homo sapiens
  siRNA target sequence for TDRD1 (NM_198795.1,773-791).
ggcctgttcagccaaattt

SEQ ID NO: 66422 - DNA, 19 bp, Homo sapiens
  siRNA target sequence for TDRD1 (NM_198795.1,828-846).
ggatgtggaggtaaacaat

SEQ ID NO: 66423 - DNA, 19 bp, Homo sapiens
  siRNA target sequence for TDRD1 (NM_198795.1,829-847).
gatgtggaggtaaacaata

SEQ ID NO: 66424 - DNA, 19 bp, Homo sapiens
  siRNA target sequence for TDRD1 (NM_198795.1,834-852).
ggaggtaaacaataagagt

SEQ ID NO: 66425 - DNA, 19 bp, Homo sapiens
  siRNA target sequence for TDRD1 (NM_198795.1,855-873).
ctgtccacttggagttact

SEQ ID NO: 66426 - DNA, 19 bp, Homo sapiens
  siRNA target sequence for TDRD1 (NM_198795.1,857-875).
gtccacttggagttactaa

SEQ ID NO: 66427 - DNA, 19 bp, Homo sapiens
  siRNA target sequence for TDRD1 (NM_198795.1,955-973).
ggtacggttaccgaattca

SEQ ID NO: 66428 - DNA, 19 bp, Homo sapiens
  siRNA target sequence for TDRD1 (NM_198795.1,956-974).
gtacggttaccgaattcaa

SEQ ID NO: 66429 - DNA, 19 bp, Homo sapiens
  siRNA target sequence for TDRD1 (NM_198795.1,987-1005).
cttctacgtgcagttatat

SEQ ID NO: 66430 - DNA, 19 bp, Homo sapiens
  siRNA target sequence for TDRD1 (NM_198795.1,990-1008).
ctacgtgcagttatattct

SEQ ID NO: 66431 - DNA, 19 bp, Homo sapiens
  siRNA target sequence for TDRD1 (NM_198795.1,1033-1051).
caactctctgccagcttaa

SEQ ID NO: 66432 - DNA, 19 bp, Homo sapiens
  siRNA target sequence for TDRD1 (NM_198795.1,1043-1061).
ccagcttaaaagaaacata

SEQ ID NO: 66433 - DNA, 19 bp, Homo sapiens
  siRNA target sequence for TDRD1 (NM_198795.1,1090-1108).
cctgttaagggggaagttt

SEQ ID NO: 66434 - DNA, 19 bp, Homo sapiens
  siRNA target sequence for TDRD1 (NM_198795.1,1136-1154).
cctggaacagagcaatcat

SEQ ID NO: 66435 - DNA, 19 bp, Homo sapiens
  siRNA target sequence for TDRD1 (NM_198795.1,1137-1155).
ctggaacagagcaatcata

SEQ ID NO: 66436 - DNA, 19 bp, Homo sapiens
  siRNA target sequence for TDRD1 (NM_198795.1,1145-1163).
gagcaatcatacaaaacgt

SEQ ID NO: 66437 - DNA, 19 bp, Homo sapiens
  siRNA target sequence for TDRD1 (NM_198795.1,1179-1197).
gaaggcacatgtcttatat

SEQ ID NO: 66438 - DNA, 19 bp, Homo sapiens
  siRNA target sequence for TDRD1 (NM_198795.1,1184-1202).
cacatgtcttatatattga

SEQ ID NO: 66439 - DNA, 19 bp, Homo sapiens
  siRNA target sequence for TDRD1 (NM_198795.1,1246-1264).
ctcaacaggaacattgact

SEQ ID NO: 66440 - DNA, 19 bp, Homo sapiens
  siRNA target sequence for TDRD1 (NM_198795.1,1270-1288).
cctccttgtgccataaagt

SEQ ID NO: 66441 - DNA, 19 bp, Homo sapiens
  siRNA target sequence for TDRD1 (NM_198795.1,1309-1327).
ccagcagaagggaattgga

SEQ ID NO: 66442 - DNA, 19 bp, Homo sapiens
  siRNA target sequence for TDRD1 (NM_198795.1,1325-1343).
ggagcagtgattgtatcaa

SEQ ID NO: 66443 - DNA, 19 bp, Homo sapiens
  siRNA target sequence for TDRD1 (NM_198795.1,1326-1344).
gagcagtgattgtatcaaa

SEQ ID NO: 66444 - DNA, 19 bp, Homo sapiens
  siRNA target sequence for TDRD1 (NM_198795.1,1346-1364).
ctactaaaccactgttaat

SEQ ID NO: 66445 - DNA, 19 bp, Homo sapiens
  siRNA target sequence for TDRD1 (NM_198795.1,1349-1367).
ctaaaccactgttaatgga

SEQ ID NO: 66446 - DNA, 19 bp, Homo sapiens
  siRNA target sequence for TDRD1 (NM_198795.1,1366-1384).
gagcagtactgctccataa

SEQ ID NO: 66447 - DNA, 19 bp, Homo sapiens
  siRNA target sequence for TDRD1 (NM_198795.1,1369-1387).
cagtactgctccataaaga

SEQ ID NO: 66448 - DNA, 19 bp, Homo sapiens
  siRNA target sequence for TDRD1 (NM_198795.1,1371-1389).
gtactgctccataaagatt

SEQ ID NO: 66449 - DNA, 19 bp, Homo sapiens
  siRNA target sequence for TDRD1 (NM_198795.1,1462-1480).
gaccatgtgcttatagaaa

SEQ ID NO: 66450 - DNA, 19 bp, Homo sapiens
  siRNA target sequence for TDRD1 (NM_198795.1,1498-1516).
cccagtggacaagattcta

SEQ ID NO: 66451 - DNA, 19 bp, Homo sapiens
  siRNA target sequence for TDRD1 (NM_198795.1,1502-1520).
gtggacaagattctaagaa

SEQ ID NO: 66452 - DNA, 19 bp, Homo sapiens
  siRNA target sequence for TDRD1 (NM_198795.1,1578-1596).
cattgtcgtagacaaaagt

SEQ ID NO: 66453 - DNA, 19 bp, Homo sapiens
  siRNA target sequence for TDRD1 (NM_198795.1,1646-1664).
gtgtggttgcccacattca

SEQ ID NO: 66454 - DNA, 19 bp, Homo sapiens
  siRNA target sequence for TDRD1 (NM_198795.1,1695-1713).
gcaaagtggccgaaagctt

SEQ ID NO: 66455 - DNA, 19 bp, Homo sapiens
  siRNA target sequence for TDRD1 (NM_198795.1,1777-1795).
ccagccattggtgatatat

SEQ ID NO: 66456 - DNA, 19 bp, Homo sapiens
  siRNA target sequence for TDRD1 (NM_198795.1,1845-1863).
ggcttacgcttctgaagaa

SEQ ID NO: 66457 - DNA, 19 bp, Homo sapiens
  siRNA target sequence for TDRD1 (NM_198795.1,1846-1864).
gcttacgcttctgaagaat

SEQ ID NO: 66458 - DNA, 19 bp, Homo sapiens
  siRNA target sequence for TDRD1 (NM_198795.1,1865-1883).
ctgtactggtcggatatgt

SEQ ID NO: 66459 - DNA, 19 bp, Homo sapiens
  siRNA target sequence for TDRD1 (NM_198795.1,1870-1888).
ctggtcggatatgtagatt

SEQ ID NO: 66460 - DNA, 19 bp, Homo sapiens
  siRNA target sequence for TDRD1 (NM_198795.1,1872-1890).
ggtcggatatgtagattat

SEQ ID NO: 66461 - DNA, 19 bp, Homo sapiens
  siRNA target sequence for TDRD1 (NM_198795.1,1875-1893).
cggatatgtagattatgga

SEQ ID NO: 66462 - DNA, 19 bp, Homo sapiens
  siRNA target sequence for TDRD1 (NM_198795.1,1876-1894).
ggatatgtagattatggaa

SEQ ID NO: 66463 - DNA, 19 bp, Homo sapiens
  siRNA target sequence for TDRD1 (NM_198795.1,1900-1918).
gaaatccttagtttgatga

SEQ ID NO: 66464 - DNA, 19 bp, Homo sapiens
  siRNA target sequence for TDRD1 (NM_198795.1,1925-1943).
gtcccataatcccaaagtt

SEQ ID NO: 66465 - DNA, 19 bp, Homo sapiens
  siRNA target sequence for TDRD1 (NM_198795.1,1927-1945).
cccataatcccaaagttgt

SEQ ID NO: 66466 - DNA, 19 bp, Homo sapiens
  siRNA target sequence for TDRD1 (NM_198795.1,1982-2000).
caggagtaaagccatcatt

SEQ ID NO: 66467 - DNA, 19 bp, Homo sapiens
  siRNA target sequence for TDRD1 (NM_198795.1,2020-2038).
gctatttgtctcatgaaaa

SEQ ID NO: 66468 - DNA, 19 bp, Homo sapiens
  siRNA target sequence for TDRD1 (NM_198795.1,2093-2111).
gttccctggtggagcttat

SEQ ID NO: 66469 - DNA, 19 bp, Homo sapiens
  siRNA target sequence for TDRD1 (NM_198795.1,2097-2115).
cctggtggagcttattgat

SEQ ID NO: 66470 - DNA, 19 bp, Homo sapiens
  siRNA target sequence for TDRD1 (NM_198795.1,2098-2116).
ctggtggagcttattgata

SEQ ID NO: 66471 - DNA, 19 bp, Homo sapiens
  siRNA target sequence for TDRD1 (NM_198795.1,2129-2147).
ctcatgtcagtgttagcaa

SEQ ID NO: 66472 - DNA, 19 bp, Homo sapiens
  siRNA target sequence for TDRD1 (NM_198795.1,2203-2221).
cccagtgacgtgaaagaaa

SEQ ID NO: 66473 - DNA, 19 bp, Homo sapiens
  siRNA target sequence for TDRD1 (NM_198795.1,2308-2326).
gtggtctgtgtgatatata

SEQ ID NO: 66474 - DNA, 19 bp, Homo sapiens
  siRNA target sequence for TDRD1 (NM_198795.1,2352-2370).
gcttaaagaggatgcttta

SEQ ID NO: 66475 - DNA, 19 bp, Homo sapiens
  siRNA target sequence for TDRD1 (NM_198795.1,2411-2429).
gccagcagaagttacctaa

SEQ ID NO: 66476 - DNA, 19 bp, Homo sapiens
  siRNA target sequence for TDRD1 (NM_198795.1,2415-2433).
gcagaagttacctaatggt

SEQ ID NO: 66477 - DNA, 19 bp, Homo sapiens
  siRNA target sequence for TDRD1 (NM_198795.1,2445-2463).
gataggacaaccttgttgt

SEQ ID NO: 66478 - DNA, 19 bp, Homo sapiens
  siRNA target sequence for TDRD1 (NM_198795.1,2486-2504).
gttggtatcgtgctttagt

SEQ ID NO: 66479 - DNA, 19 bp, Homo sapiens
  siRNA target sequence for TDRD1 (NM_198795.1,2489-2507).
ggtatcgtgctttagtcaa

SEQ ID NO: 66480 - DNA, 19 bp, Homo sapiens
  siRNA target sequence for TDRD1 (NM_198795.1,2494-2512).
cgtgctttagtcaaggaaa

SEQ ID NO: 66481 - DNA, 19 bp, Homo sapiens
  siRNA target sequence for TDRD1 (NM_198795.1,2581-2599).
gaactccgaatgatatcat

SEQ ID NO: 66482 - DNA, 19 bp, Homo sapiens
  siRNA target sequence for TDRD1 (NM_198795.1,2584-2602).
ctccgaatgatatcatcaa

SEQ ID NO: 66483 - DNA, 19 bp, Homo sapiens
  siRNA target sequence for TDRD1 (NM_198795.1,2633-2651).
ggtgccagttagcagatat

SEQ ID NO: 66484 - DNA, 19 bp, Homo sapiens
  siRNA target sequence for TDRD1 (NM_198795.1,2634-2652).
gtgccagttagcagatata

SEQ ID NO: 66485 - DNA, 19 bp, Homo sapiens
  siRNA target sequence for TDRD1 (NM_198795.1,2636-2654).
gccagttagcagatataca

SEQ ID NO: 66486 - DNA, 19 bp, Homo sapiens
  siRNA target sequence for TDRD1 (NM_198795.1,2638-2656).
cagttagcagatatacagt

SEQ ID NO: 66487 - DNA, 19 bp, Homo sapiens
  siRNA target sequence for TDRD1 (NM_198795.1,2644-2662).
gcagatatacagtctagaa

SEQ ID NO: 66488 - DNA, 19 bp, Homo sapiens
  siRNA target sequence for TDRD1 (NM_198795.1,2673-2691).
gtctgaagaagccataaca

SEQ ID NO: 66489 - DNA, 19 bp, Homo sapiens
  siRNA target sequence for TDRD1 (NM_198795.1,2703-2721).
gtgtgttgctgggataaaa

SEQ ID NO: 66490 - DNA, 19 bp, Homo sapiens
  siRNA target sequence for TDRD1 (NM_198795.1,2734-2752).
gtggttgaagtcactgaaa

SEQ ID NO: 66491 - DNA, 19 bp, Homo sapiens
  siRNA target sequence for TDRD1 (NM_198795.1,2774-2792).
ccgatctctccacttgtta

SEQ ID NO: 66492 - DNA, 19 bp, Homo sapiens
  siRNA target sequence for TDRD1 (NM_198795.1,2775-2793).
cgatctctccacttgttat

SEQ ID NO: 66493 - DNA, 19 bp, Homo sapiens
  siRNA target sequence for TDRD1 (NM_198795.1,2786-2804).
cttgttatcccagaataat

SEQ ID NO: 66494 - DNA, 19 bp, Homo sapiens
  siRNA target sequence for TDRD1 (NM_198795.1,2807-2825).
gtgatgttctgattgatga

SEQ ID NO: 66495 - DNA, 19 bp, Homo sapiens
  siRNA target sequence for TDRD1 (NM_198795.1,2843-2861).
ctgcttcaccacataaaga

SEQ ID NO: 66496 - DNA, 19 bp, Homo sapiens
  siRNA target sequence for TDRD1 (NM_198795.1,2846-2864).
cttcaccacataaagactt

SEQ ID NO: 66497 - DNA, 19 bp, Homo sapiens
  siRNA target sequence for TDRD1 (NM_198795.1,2940-2958).
gcaatggaagacgatagaa

SEQ ID NO: 66498 - DNA, 19 bp, Homo sapiens
  siRNA target sequence for TDRD1 (NM_198795.1,2941-2959).
caatggaagacgatagaat

SEQ ID NO: 66499 - DNA, 19 bp, Homo sapiens
  siRNA target sequence for TDRD1 (NM_198795.1,2956-2974).
gaattgccagtggataaaa

SEQ ID NO: 66500 - DNA, 19 bp, Homo sapiens
  siRNA target sequence for TDRD1 (NM_198795.1,2963-2981).
cagtggataaaactataca

SEQ ID NO: 66501 - DNA, 19 bp, Homo sapiens
  siRNA target sequence for TDRD1 (NM_198795.1,2975-2993).
ctatacaagcaaatgtatt

SEQ ID NO: 66502 - DNA, 19 bp, Homo sapiens
  siRNA target sequence for TDRD1 (NM_198795.1,3000-3018).
cataagcccaaacttgttt

SEQ ID NO: 66503 - DNA, 19 bp, Homo sapiens
  siRNA target sequence for TDRD1 (NM_198795.1,3015-3033).
gttttatgctctaccaaaa

SEQ ID NO: 66504 - DNA, 19 bp, Homo sapiens
  siRNA target sequence for TDRD1 (NM_198795.1,3113-3131).
caccctatagaccaagaat

SEQ ID NO: 66505 - DNA, 19 bp, Homo sapiens
  siRNA target sequence for TDRD1 (NM_198795.1,3139-3157).
gcatgctgtgccaaataca

SEQ ID NO: 66506 - DNA, 19 bp, Homo sapiens
  siRNA target sequence for TDRD1 (NM_198795.1,3284-3302).
gccacctggcgcttccttt

SEQ ID NO: 66507 - DNA, 19 bp, Homo sapiens
  siRNA target sequence for TDRD1 (NM_198795.1,3288-3306).
cctggcgcttcctttccaa

SEQ ID NO: 66508 - DNA, 19 bp, Homo sapiens
  siRNA target sequence for TDRD1 (NM_198795.1,3289-3307).
ctggcgcttcctttccaaa

SEQ ID NO: 66509 - DNA, 19 bp, Homo sapiens
  siRNA target sequence for TDRD1 (NM_198795.1,3292-3310).
gcgcttcctttccaaatta

SEQ ID NO: 66510 - DNA, 19 bp, Homo sapiens
  siRNA target sequence for TDRD1 (NM_198795.1,3293-3311).
cgcttcctttccaaattat

SEQ ID NO: 66511 - DNA, 19 bp, Homo sapiens
  siRNA target sequence for TDRD1 (NM_198795.1,3298-3316).
cctttccaaattattagat

SEQ ID NO: 66512 - DNA, 19 bp, Homo sapiens
  siRNA target sequence for TDRD1 (NM_198795.1,3314-3332).
gatgttcacttgaaggatt

SEQ ID NO: 66513 - DNA, 19 bp, Homo sapiens
  siRNA target sequence for TDRD1 (NM_198795.1,3320-3338).
cacttgaaggattaatgga

SEQ ID NO: 66514 - DNA, 19 bp, Homo sapiens
  siRNA target sequence for TDRD1 (NM_198795.1,3387-3405).
catgttgaatcagaatgta

SEQ ID NO: 66515 - DNA, 19 bp, Homo sapiens
  siRNA target sequence for TDRD1 (NM_198795.1,3480-3498).
cgatgtagctgataagcta

SEQ ID NO: 66516 - DNA, 19 bp, Homo sapiens
  siRNA target sequence for TDRD1 (NM_198795.1,3488-3506).
ctgataagctagtgacatt

SEQ ID NO: 66517 - DNA, 19 bp, Homo sapiens
  siRNA target sequence for TDRD1 (NM_198795.1,3532-3550).
caaaggcagagtgctttaa

SEQ ID NO: 66518 - DNA, 19 bp, Homo sapiens
  siRNA target sequence for TDRD1 (NM_198795.1,3540-3558).
gagtgctttaaatacagaa

SEQ ID NO: 66519 - DNA, 19 bp, Homo sapiens
  siRNA target sequence for TDRD1 (NM_198795.1,3630-3648).
cttcctcttaaacaattca

SEQ ID NO: 66520 - DNA, 19 bp, Homo sapiens
  siRNA target sequence for TDRD3 (NM_030794.1,272-290).
gatgactgatggtcatata

SEQ ID NO: 66521 - DNA, 19 bp, Homo sapiens
  siRNA target sequence for TDRD3 (NM_030794.1,275-293).
gactgatggtcatataagt

SEQ ID NO: 66522 - DNA, 19 bp, Homo sapiens
  siRNA target sequence for TDRD3 (NM_030794.1,300-318).
gcagtagaatttagttata

SEQ ID NO: 66523 - DNA, 19 bp, Homo sapiens
  siRNA target sequence for TDRD3 (NM_030794.1,303-321).
gtagaatttagttatatgt

SEQ ID NO: 66524 - DNA, 19 bp, Homo sapiens
  siRNA target sequence for TDRD3 (NM_030794.1,338-356).
cacaccacctggaactaaa

SEQ ID NO: 66525 - DNA, 19 bp, Homo sapiens
  siRNA target sequence for TDRD3 (NM_030794.1,391-409).
gattcctgctcttgaatga

SEQ ID NO: 66526 - DNA, 19 bp, Homo sapiens
  siRNA target sequence for TDRD3 (NM_030794.1,399-417).
ctcttgaatgactctaaca

SEQ ID NO: 66527 - DNA, 19 bp, Homo sapiens
  siRNA target sequence for TDRD3 (NM_030794.1,410-428).
ctctaacaccacagttctt

SEQ ID NO: 66528 - DNA, 19 bp, Homo sapiens
  siRNA target sequence for TDRD3 (NM_030794.1,462-480).
gagttacagagaagcttat

SEQ ID NO: 66529 - DNA, 19 bp, Homo sapiens
  siRNA target sequence for TDRD3 (NM_030794.1,464-482).
gttacagagaagcttatca

SEQ ID NO: 66530 - DNA, 19 bp, Homo sapiens
  siRNA target sequence for TDRD3 (NM_030794.1,514-532).
gtggaccaccgccttttgt

SEQ ID NO: 66531 - DNA, 19 bp, Homo sapiens
  siRNA target sequence for TDRD3 (NM_030794.1,541-559).
gacagaagtgtgtatctca

SEQ ID NO: 66532 - DNA, 19 bp, Homo sapiens
  siRNA target sequence for TDRD3 (NM_030794.1,569-587).
ggatagcagagaacttgat

SEQ ID NO: 66533 - DNA, 19 bp, Homo sapiens
  siRNA target sequence for TDRD3 (NM_030794.1,577-595).
gagaacttgatcgaagaaa

SEQ ID NO: 66534 - DNA, 19 bp, Homo sapiens
  siRNA target sequence for TDRD3 (NM_030794.1,582-600).
cttgatcgaagaaaaacat

SEQ ID NO: 66535 - DNA, 19 bp, Homo sapiens
  siRNA target sequence for TDRD3 (NM_030794.1,614-632).
gcctgtcaaacctacaaat

SEQ ID NO: 66536 - DNA, 19 bp, Homo sapiens
  siRNA target sequence for TDRD3 (NM_030794.1,616-634).
ctgtcaaacctacaaatga

SEQ ID NO: 66537 - DNA, 19 bp, Homo sapiens
  siRNA target sequence for TDRD3 (NM_030794.1,653-671).
gcaaaggacggctgctatt

SEQ ID NO: 66538 - DNA, 19 bp, Homo sapiens
  siRNA target sequence for TDRD3 (NM_030794.1,662-680).
ggctgctattgctgaagtt

SEQ ID NO: 66539 - DNA, 19 bp, Homo sapiens
  siRNA target sequence for TDRD3 (NM_030794.1,723-741).
ggtgctagaagtaatctca

SEQ ID NO: 66540 - DNA, 19 bp, Homo sapiens
  siRNA target sequence for TDRD3 (NM_030794.1,724-742).
gtgctagaagtaatctcaa

SEQ ID NO: 66541 - DNA, 19 bp, Homo sapiens
  siRNA target sequence for TDRD3 (NM_030794.1,726-744).
gctagaagtaatctcaata

SEQ ID NO: 66542 - DNA, 19 bp, Homo sapiens
  siRNA target sequence for TDRD3 (NM_030794.1,730-748).
gaagtaatctcaatatgaa

SEQ ID NO: 66543 - DNA, 19 bp, Homo sapiens
  siRNA target sequence for TDRD3 (NM_030794.1,750-768).
gctgctggtaaccgaaata

SEQ ID NO: 66544 - DNA, 19 bp, Homo sapiens
  siRNA target sequence for TDRD3 (NM_030794.1,761-779).
ccgaaatagggaagtttta

SEQ ID NO: 66545 - DNA, 19 bp, Homo sapiens
  siRNA target sequence for TDRD3 (NM_030794.1,889-907).
catcgaggcaagctcttat

SEQ ID NO: 66546 - DNA, 19 bp, Homo sapiens
  siRNA target sequence for TDRD3 (NM_030794.1,933-951).
gcactgaacgtacttctta

SEQ ID NO: 66547 - DNA, 19 bp, Homo sapiens
  siRNA target sequence for TDRD3 (NM_030794.1,936-954).
ctgaacgtacttcttacaa

SEQ ID NO: 66548 - DNA, 19 bp, Homo sapiens
  siRNA target sequence for TDRD3 (NM_030794.1,941-959).
cgtacttcttacaagcaat

SEQ ID NO: 66549 - DNA, 19 bp, Homo sapiens
  siRNA target sequence for TDRD3 (NM_030794.1,948-966).
cttacaagcaataaacaga

SEQ ID NO: 66550 - DNA, 19 bp, Homo sapiens
  siRNA target sequence for TDRD3 (NM_030794.1,1013-1031).
gcgaataagatctgaagat

SEQ ID NO: 66551 - DNA, 19 bp, Homo sapiens
  siRNA target sequence for TDRD3 (NM_030794.1,1080-1098).
gatttcttggaatctaaaa

SEQ ID NO: 66552 - DNA, 19 bp, Homo sapiens
  siRNA target sequence for TDRD3 (NM_030794.1,1255-1273).
cgcctcgttttcaaagaga

SEQ ID NO: 66553 - DNA, 19 bp, Homo sapiens
  siRNA target sequence for TDRD3 (NM_030794.1,1274-1292).
ctcccaaaattcaaagtca

SEQ ID NO: 66554 - DNA, 19 bp, Homo sapiens
  siRNA target sequence for TDRD3 (NM_030794.1,1303-1321).
gcagtggattacctagaaa

SEQ ID NO: 66555 - DNA, 19 bp, Homo sapiens
  siRNA target sequence for TDRD3 (NM_030794.1,1304-1322).
cagtggattacctagaaat

SEQ ID NO: 66556 - DNA, 19 bp, Homo sapiens
  siRNA target sequence for TDRD3 (NM_030794.1,1342-1360).
gtacttcttcagtatctga

SEQ ID NO: 66557 - DNA, 19 bp, Homo sapiens
  siRNA target sequence for TDRD3 (NM_030794.1,1376-1394).
cagaatcaaatgtgataga

SEQ ID NO: 66558 - DNA, 19 bp, Homo sapiens
  siRNA target sequence for TDRD3 (NM_030794.1,1389-1407).
gatagaccgtattctagat

SEQ ID NO: 66559 - DNA, 19 bp, Homo sapiens
  siRNA target sequence for TDRD3 (NM_030794.1,1393-1411).
gaccgtattctagatatga

SEQ ID NO: 66560 - DNA, 19 bp, Homo sapiens
  siRNA target sequence for TDRD3 (NM_030794.1,1395-1413).
ccgtattctagatatgaca

SEQ ID NO: 66561 - DNA, 19 bp, Homo sapiens
  siRNA target sequence for TDRD3 (NM_030794.1,1545-1563).
caaggatctgtagattata

SEQ ID NO: 66562 - DNA, 19 bp, Homo sapiens
  siRNA target sequence for TDRD3 (NM_030794.1,1548-1566).
ggatctgtagattataata

SEQ ID NO: 66563 - DNA, 19 bp, Homo sapiens
  siRNA target sequence for TDRD3 (NM_030794.1,1549-1567).
gatctgtagattataataa

SEQ ID NO: 66564 - DNA, 19 bp, Homo sapiens
  siRNA target sequence for TDRD3 (NM_030794.1,1552-1570).
ctgtagattataataatca

SEQ ID NO: 66565 - DNA, 19 bp, Homo sapiens
  siRNA target sequence for TDRD3 (NM_030794.1,1585-1603).
gagaaagccaaacatctat

SEQ ID NO: 66566 - DNA, 19 bp, Homo sapiens
  siRNA target sequence for TDRD3 (NM_030794.1,1647-1665).
gaagctttcagtggtataa

SEQ ID NO: 66567 - DNA, 19 bp, Homo sapiens
  siRNA target sequence for TDRD3 (NM_030794.1,1703-1721).
gaatccagttcgaagtaat

SEQ ID NO: 66568 - DNA, 19 bp, Homo sapiens
  siRNA target sequence for TDRD3 (NM_030794.1,1707-1725).
ccagttcgaagtaatagtt

SEQ ID NO: 66569 - DNA, 19 bp, Homo sapiens
  siRNA target sequence for TDRD3 (NM_030794.1,1708-1726).
cagttcgaagtaatagttt

SEQ ID NO: 66570 - DNA, 19 bp, Homo sapiens
  siRNA target sequence for TDRD3 (NM_030794.1,1710-1728).
gttcgaagtaatagtttca

SEQ ID NO: 66571 - DNA, 19 bp, Homo sapiens
  siRNA target sequence for TDRD3 (NM_030794.1,1723-1741).
gtttcattggtgttccaaa

SEQ ID NO: 66572 - DNA, 19 bp, Homo sapiens
  siRNA target sequence for TDRD3 (NM_030794.1,1771-1789).
gacgaataggacctattaa

SEQ ID NO: 66573 - DNA, 19 bp, Homo sapiens
  siRNA target sequence for TDRD3 (NM_030794.1,1809-1827).
gctgtaccctgtgatgata

SEQ ID NO: 66574 - DNA, 19 bp, Homo sapiens
  siRNA target sequence for TDRD3 (NM_030794.1,1810-1828).
ctgtaccctgtgatgataa

SEQ ID NO: 66575 - DNA, 19 bp, Homo sapiens
  siRNA target sequence for TDRD3 (NM_030794.1,1854-1872).
cgaagatctgggccaatta

SEQ ID NO: 66576 - DNA, 19 bp, Homo sapiens
  siRNA target sequence for TDRD3 (NM_030794.1,1855-1873).
gaagatctgggccaattaa

SEQ ID NO: 66577 - DNA, 19 bp, Homo sapiens
  siRNA target sequence for TDRD3 (NM_030794.1,1925-1943).
gaaacctggagatgaatgt

SEQ ID NO: 66578 - DNA, 19 bp, Homo sapiens
  siRNA target sequence for TDRD3 (NM_030794.1,1970-1988).
gttttaccgggcagaagtt

SEQ ID NO: 66579 - DNA, 19 bp, Homo sapiens
  siRNA target sequence for TDRD3 (NM_030794.1,2006-2024).
gggtatgacagcagttgtt

SEQ ID NO: 66580 - DNA, 19 bp, Homo sapiens
  siRNA target sequence for TDRD3 (NM_030794.1,2007-2025).
ggtatgacagcagttgtta

SEQ ID NO: 66581 - DNA, 19 bp, Homo sapiens
  siRNA target sequence for TDRD3 (NM_030794.1,2030-2048).
cattgactacggaaactat

SEQ ID NO: 66582 - DNA, 19 bp, Homo sapiens
  siRNA target sequence for TDRD3 (NM_030794.1,2055-2073).
gtgctactgagcaatatca

SEQ ID NO: 66583 - DNA, 19 bp, Homo sapiens
  siRNA target sequence for TDRD3 (NM_030794.1,2066-2084).
caatatcaagcccattcaa

SEQ ID NO: 66584 - DNA, 19 bp, Homo sapiens
  siRNA target sequence for TDRD3 (NM_030794.1,2103-2121).
gaaggcacctacgatcaaa

SEQ ID NO: 66585 - DNA, 19 bp, Homo sapiens
  siRNA target sequence for TDRD3 (NM_030794.1,2107-2125).
gcacctacgatcaaactct

SEQ ID NO: 66586 - DNA, 19 bp, Homo sapiens
  siRNA target sequence for TDRD3 (NM_030794.1,2167-2185).
ctcggccaacccaacagtt

SEQ ID NO: 66587 - DNA, 19 bp, Homo sapiens
  siRNA target sequence for TDRD3 (NM_030794.1,2169-2187).
cggccaacccaacagtttt

SEQ ID NO: 66588 - DNA, 19 bp, Homo sapiens
  siRNA target sequence for TDRD3 (NM_030794.1,2173-2191).
caacccaacagttttacca

SEQ ID NO: 66589 - DNA, 19 bp, Homo sapiens
  siRNA target sequence for TDRD4 (NM_019038.2,290-308).
gggcctagcatcttatgaa

SEQ ID NO: 66590 - DNA, 19 bp, Homo sapiens
  siRNA target sequence for TDRD4 (NM_019038.2,291-309).
ggcctagcatcttatgaaa

SEQ ID NO: 66591 - DNA, 19 bp, Homo sapiens
  siRNA target sequence for TDRD4 (NM_019038.2,292-310).
gcctagcatcttatgaaat

SEQ ID NO: 66592 - DNA, 19 bp, Homo sapiens
  siRNA target sequence for TDRD4 (NM_019038.2,293-311).
cctagcatcttatgaaata

SEQ ID NO: 66593 - DNA, 19 bp, Homo sapiens
  siRNA target sequence for TDRD4 (NM_019038.2,313-331).
gatacatcctcaaagataa

SEQ ID NO: 66594 - DNA, 19 bp, Homo sapiens
  siRNA target sequence for TDRD4 (NM_019038.2,459-477).
gaattgcctgtgcatatct

SEQ ID NO: 66595 - DNA, 19 bp, Homo sapiens
  siRNA target sequence for TDRD4 (NM_019038.2,490-508).
ctcctgagaagatttatgt

SEQ ID NO: 66596 - DNA, 19 bp, Homo sapiens
  siRNA target sequence for TDRD4 (NM_019038.2,514-532).
ggttgttaactgaaaactt

SEQ ID NO: 66597 - DNA, 19 bp, Homo sapiens
  siRNA target sequence for TDRD4 (NM_019038.2,515-533).
gttgttaactgaaaactta

SEQ ID NO: 66598 - DNA, 19 bp, Homo sapiens
  siRNA target sequence for TDRD4 (NM_019038.2,518-536).
gttaactgaaaacttactt

SEQ ID NO: 66599 - DNA, 19 bp, Homo sapiens
  siRNA target sequence for TDRD4 (NM_019038.2,530-548).
cttacttaatagtttagaa

SEQ ID NO: 66600 - DNA, 19 bp, Homo sapiens
  siRNA target sequence for TDRD4 (NM_019038.2,619-637).
ctgttaagatccaagataa

SEQ ID NO: 66601 - DNA, 19 bp, Homo sapiens
  siRNA target sequence for TDRD4 (NM_019038.2,646-664).
ggcgaagaggccagatcat

SEQ ID NO: 66602 - DNA, 19 bp, Homo sapiens
  siRNA target sequence for TDRD4 (NM_019038.2,648-666).
cgaagaggccagatcatca

SEQ ID NO: 66603 - DNA, 19 bp, Homo sapiens
  siRNA target sequence for TDRD4 (NM_019038.2,656-674).
ccagatcatcagaatggtt

SEQ ID NO: 66604 - DNA, 19 bp, Homo sapiens
  siRNA target sequence for TDRD4 (NM_019038.2,671-689).
ggttacagacacattggta

SEQ ID NO: 66605 - DNA, 19 bp, Homo sapiens
  siRNA target sequence for TDRD4 (NM_019038.2,712-730).
gtgttgaactagtagtgaa

SEQ ID NO: 66606 - DNA, 19 bp, Homo sapiens
  siRNA target sequence for TDRD4 (NM_019038.2,876-894).
ggagctgtagcaactataa

SEQ ID NO: 66607 - DNA, 19 bp, Homo sapiens
  siRNA target sequence for TDRD4 (NM_019038.2,879-897).
gctgtagcaactataatct

SEQ ID NO: 66608 - DNA, 19 bp, Homo sapiens
  siRNA target sequence for TDRD4 (NM_019038.2,923-941).
cacaacatggccattacct

SEQ ID NO: 66609 - DNA, 19 bp, Homo sapiens
  siRNA target sequence for TDRD4 (NM_019038.2,931-949).
ggccattacctgtgaaaat

SEQ ID NO: 66610 - DNA, 19 bp, Homo sapiens
  siRNA target sequence for TDRD4 (NM_019038.2,933-951).
ccattacctgtgaaaattt

SEQ ID NO: 66611 - DNA, 19 bp, Homo sapiens
  siRNA target sequence for TDRD4 (NM_019038.2,969-987).
ggagagcgtgttgatgttt

SEQ ID NO: 66612 - DNA, 19 bp, Homo sapiens
  siRNA target sequence for TDRD4 (NM_019038.2,972-990).
gagcgtgttgatgtttcta

SEQ ID NO: 66613 - DNA, 19 bp, Homo sapiens
  siRNA target sequence for TDRD4 (NM_019038.2,1027-1045).
ggagaattaataacttaga

SEQ ID NO: 66614 - DNA, 19 bp, Homo sapiens
  siRNA target sequence for TDRD4 (NM_019038.2,1028-1046).
gagaattaataacttagat

SEQ ID NO: 66615 - DNA, 19 bp, Homo sapiens
  siRNA target sequence for TDRD4 (NM_019038.2,1083-1101).
cccctggaacaggaagatt

SEQ ID NO: 66616 - DNA, 19 bp, Homo sapiens
  siRNA target sequence for TDRD4 (NM_019038.2,1092-1110).
caggaagattcagtagtta

SEQ ID NO: 66617 - DNA, 19 bp, Homo sapiens
  siRNA target sequence for TDRD4 (NM_019038.2,1094-1112).
ggaagattcagtagttact

SEQ ID NO: 66618 - DNA, 19 bp, Homo sapiens
  siRNA target sequence for TDRD4 (NM_019038.2,1223-1241).
gtataagccaccagctatt

SEQ ID NO: 66619 - DNA, 19 bp, Homo sapiens
  siRNA target sequence for TDRD4 (NM_019038.2,1231-1249).
caccagctattcctaacat

SEQ ID NO: 66620 - DNA, 19 bp, Homo sapiens
  siRNA target sequence for TDRD4 (NM_019038.2,1234-1252).
cagctattcctaacatgaa

SEQ ID NO: 66621 - DNA, 19 bp, Homo sapiens
  siRNA target sequence for TDRD4 (NM_019038.2,1243-1261).
ctaacatgaacgtatttga

SEQ ID NO: 66622 - DNA, 19 bp, Homo sapiens
  siRNA target sequence for TDRD4 (NM_019038.2,1294-1312).
ctatatttgtagtacctaa

SEQ ID NO: 66623 - DNA, 19 bp, Homo sapiens
  siRNA target sequence for TDRD4 (NM_019038.2,1305-1323).
gtacctaaactatcagaat

SEQ ID NO: 66624 - DNA, 19 bp, Homo sapiens
  siRNA target sequence for TDRD4 (NM_019038.2,1473-1491).
ggcgctgtcagagtacaat

SEQ ID NO: 66625 - DNA, 19 bp, Homo sapiens
  siRNA target sequence for TDRD4 (NM_019038.2,1474-1492).
gcgctgtcagagtacaata

SEQ ID NO: 66626 - DNA, 19 bp, Homo sapiens
  siRNA target sequence for TDRD4 (NM_019038.2,1475-1493).
cgctgtcagagtacaatat

SEQ ID NO: 66627 - DNA, 19 bp, Homo sapiens
  siRNA target sequence for TDRD4 (NM_019038.2,1477-1495).
ctgtcagagtacaatattt

SEQ ID NO: 66628 - DNA, 19 bp, Homo sapiens
  siRNA target sequence for TDRD4 (NM_019038.2,1683-1701).
ccatgggagaaattgtcta

SEQ ID NO: 66629 - DNA, 19 bp, Homo sapiens
  siRNA target sequence for TDRD4 (NM_019038.2,1757-1775).
ctgtacttctgaacatact

SEQ ID NO: 66630 - DNA, 19 bp, Homo sapiens
  siRNA target sequence for TDRD4 (NM_019038.2,1770-1788).
catactgaggagatgttga

SEQ ID NO: 66631 - DNA, 19 bp, Homo sapiens
  siRNA target sequence for TDRD4 (NM_019038.2,1882-1900).
ctcttttaccaccatattt

SEQ ID NO: 66632 - DNA, 19 bp, Homo sapiens
  siRNA target sequence for TDRD4 (NM_019038.2,1929-1947).
ctctatgctgttcaagtta

SEQ ID NO: 66633 - DNA, 19 bp, Homo sapiens
  siRNA target sequence for TDRD4 (NM_019038.2,1949-1967).
gcacgttgtctcacctaat

SEQ ID NO: 66634 - DNA, 19 bp, Homo sapiens
  siRNA target sequence for TDRD4 (NM_019038.2,1973-1991).
gtatatttgccttgattct

SEQ ID NO: 66635 - DNA, 19 bp, Homo sapiens
  siRNA target sequence for TDRD4 (NM_019038.2,2041-2059).
gagtcagcggggaatcaga

SEQ ID NO: 66636 - DNA, 19 bp, Homo sapiens
  siRNA target sequence for TDRD4 (NM_019038.2,2079-2097).
gcactgcagagggttaata

SEQ ID NO: 66637 - DNA, 19 bp, Homo sapiens
  siRNA target sequence for TDRD4 (NM_019038.2,2115-2133).
cctcctctgacggatttta

SEQ ID NO: 66638 - DNA, 19 bp, Homo sapiens
  siRNA target sequence for TDRD4 (NM_019038.2,2118-2136).
cctctgacggattttagaa

SEQ ID NO: 66639 - DNA, 19 bp, Homo sapiens
  siRNA target sequence for TDRD4 (NM_019038.2,2123-2141).
gacggattttagaacagaa

SEQ ID NO: 66640 - DNA, 19 bp, Homo sapiens
  siRNA target sequence for TDRD4 (NM_019038.2,2163-2181).
gatgatggcttatggtata

SEQ ID NO: 66641 - DNA, 19 bp, Homo sapiens
  siRNA target sequence for TDRD4 (NM_019038.2,2176-2194).
ggtatagagcgaagattgt

SEQ ID NO: 66642 - DNA, 19 bp, Homo sapiens
  siRNA target sequence for TDRD4 (NM_019038.2,2185-2203).
cgaagattgttgccattaa

SEQ ID NO: 66643 - DNA, 19 bp, Homo sapiens
  siRNA target sequence for TDRD4 (NM_019038.2,2232-2250).
caatttgttgattatggat

SEQ ID NO: 66644 - DNA, 19 bp, Homo sapiens
  siRNA target sequence for TDRD4 (NM_019038.2,2251-2269).
caactgcaaagctgacatt

SEQ ID NO: 66645 - DNA, 19 bp, Homo sapiens
  siRNA target sequence for TDRD4 (NM_019038.2,2256-2274).
gcaaagctgacattaaaca

SEQ ID NO: 66646 - DNA, 19 bp, Homo sapiens
  siRNA target sequence for TDRD4 (NM_019038.2,2311-2329).
cagctcgagccataaaggt

SEQ ID NO: 66647 - DNA, 19 bp, Homo sapiens
  siRNA target sequence for TDRD4 (NM_019038.2,2369-2387).
ggagacaagaataccatat

SEQ ID NO: 66648 - DNA, 19 bp, Homo sapiens
  siRNA target sequence for TDRD4 (NM_019038.2,2370-2388).
gagacaagaataccatatt

SEQ ID NO: 66649 - DNA, 19 bp, Homo sapiens
  siRNA target sequence for TDRD4 (NM_019038.2,2372-2390).
gacaagaataccatattgt

SEQ ID NO: 66650 - DNA, 19 bp, Homo sapiens
  siRNA target sequence for TDRD4 (NM_019038.2,2382-2400).
ccatattgtcccaaatgga

SEQ ID NO: 66651 - DNA, 19 bp, Homo sapiens
  siRNA target sequence for TDRD4 (NM_019038.2,2408-2426).
ggcactgtgggctatgata

SEQ ID NO: 66652 - DNA, 19 bp, Homo sapiens
  siRNA target sequence for TDRD4 (NM_019038.2,2478-2496).
gaacagatagtgacattat

SEQ ID NO: 66653 - DNA, 19 bp, Homo sapiens
  siRNA target sequence for TDRD4 (NM_019038.2,2491-2509).
cattatatgacgatgaaca

SEQ ID NO: 66654 - DNA, 19 bp, Homo sapiens
  siRNA target sequence for TDRD4 (NM_019038.2,2505-2523).
gaacagcatccagttcata

SEQ ID NO: 66655 - DNA, 19 bp, Homo sapiens
  siRNA target sequence for TDRD4 (NM_019038.2,2520-2538).
catatgccgttggtagaaa

SEQ ID NO: 66656 - DNA, 19 bp, Homo sapiens
  siRNA target sequence for TDRD4 (NM_019038.2,2540-2558).
ggggcttgcagataaagat

SEQ ID NO: 66657 - DNA, 19 bp, Homo sapiens
  siRNA target sequence for TDRKH (NM_006862.2,203-221).
gtccaccattcagaaaata

SEQ ID NO: 66658 - DNA, 19 bp, Homo sapiens
  siRNA target sequence for TDRKH (NM_006862.2,247-265).
gtgcaacagttgcctatat

SEQ ID NO: 66659 - DNA, 19 bp, Homo sapiens
  siRNA target sequence for TDRKH (NM_006862.2,250-268).
caacagttgcctatatcct

SEQ ID NO: 66660 - DNA, 19 bp, Homo sapiens
  siRNA target sequence for TDRKH (NM_006862.2,253-271).
cagttgcctatatcctata

SEQ ID NO: 66661 - DNA, 19 bp, Homo sapiens
  siRNA target sequence for TDRKH (NM_006862.2,292-310).
gagaagagcggctgacatt

SEQ ID NO: 66662 - DNA, 19 bp, Homo sapiens
  siRNA target sequence for TDRKH (NM_006862.2,378-396).
cggcaaggagccaatatta

SEQ ID NO: 66663 - DNA, 19 bp, Homo sapiens
  siRNA target sequence for TDRKH (NM_006862.2,413-431).
gacaggtgctcggattgat

SEQ ID NO: 66664 - DNA, 19 bp, Homo sapiens
  siRNA target sequence for TDRKH (NM_006862.2,415-433).
caggtgctcggattgatgt

SEQ ID NO: 66665 - DNA, 19 bp, Homo sapiens
  siRNA target sequence for TDRKH (NM_006862.2,458-476).
gcgagtgctgcttatcagt

SEQ ID NO: 66666 - DNA, 19 bp, Homo sapiens
  siRNA target sequence for TDRKH (NM_006862.2,464-482).
gctgcttatcagtggtttt

SEQ ID NO: 66667 - DNA, 19 bp, Homo sapiens
  siRNA target sequence for TDRKH (NM_006862.2,500-518).
ggccaaagcagcaatccat

SEQ ID NO: 66668 - DNA, 19 bp, Homo sapiens
  siRNA target sequence for TDRKH (NM_006862.2,545-563).
gtctgagcagctttcagtt

SEQ ID NO: 66669 - DNA, 19 bp, Homo sapiens
  siRNA target sequence for TDRKH (NM_006862.2,601-619).
gcgagacaattcgttctat

SEQ ID NO: 66670 - DNA, 19 bp, Homo sapiens
  siRNA target sequence for TDRKH (NM_006862.2,603-621).
gagacaattcgttctatct

SEQ ID NO: 66671 - DNA, 19 bp, Homo sapiens
  siRNA target sequence for TDRKH (NM_006862.2,605-623).
gacaattcgttctatctgt

SEQ ID NO: 66672 - DNA, 19 bp, Homo sapiens
  siRNA target sequence for TDRKH (NM_006862.2,607-625).
caattcgttctatctgtaa

SEQ ID NO: 66673 - DNA, 19 bp, Homo sapiens
  siRNA target sequence for TDRKH (NM_006862.2,626-644).
ggcatctggagccaaaatt

SEQ ID NO: 66674 - DNA, 19 bp, Homo sapiens
  siRNA target sequence for TDRKH (NM_006862.2,663-681).
gaagggacattactactat

SEQ ID NO: 66675 - DNA, 19 bp, Homo sapiens
  siRNA target sequence for TDRKH (NM_006862.2,666-684).
gggacattactactatcaa

SEQ ID NO: 66676 - DNA, 19 bp, Homo sapiens
  siRNA target sequence for TDRKH (NM_006862.2,675-693).
ctactatcaagacttataa

SEQ ID NO: 66677 - DNA, 19 bp, Homo sapiens
  siRNA target sequence for TDRKH (NM_006862.2,720-738).
gcagcagccaagcatttga

SEQ ID NO: 66678 - DNA, 19 bp, Homo sapiens
  siRNA target sequence for TDRKH (NM_006862.2,721-739).
cagcagccaagcatttgat

SEQ ID NO: 66679 - DNA, 19 bp, Homo sapiens
  siRNA target sequence for TDRKH (NM_006862.2,737-755).
gatactggagaaagtttca

SEQ ID NO: 66680 - DNA, 19 bp, Homo sapiens
  siRNA target sequence for TDRKH (NM_006862.2,865-883).
gagagccagcattatggaa

SEQ ID NO: 66681 - DNA, 19 bp, Homo sapiens
  siRNA target sequence for TDRKH (NM_006862.2,980-998).
ctgggagaaacctagtgat

SEQ ID NO: 66682 - DNA, 19 bp, Homo sapiens
  siRNA target sequence for TDRKH (NM_006862.2,1060-1078).
gtcctgacttcagttttca

SEQ ID NO: 66683 - DNA, 19 bp, Homo sapiens
  siRNA target sequence for TDRKH (NM_006862.2,1153-1171).
cccgcagcctgcaattgga

SEQ ID NO: 66684 - DNA, 19 bp, Homo sapiens
  siRNA target sequence for TDRKH (NM_006862.2,1155-1173).
cgcagcctgcaattggata

SEQ ID NO: 66685 - DNA, 19 bp, Homo sapiens
  siRNA target sequence for TDRKH (NM_006862.2,1156-1174).
gcagcctgcaattggataa

SEQ ID NO: 66686 - DNA, 19 bp, Homo sapiens
  siRNA target sequence for TDRKH (NM_006862.2,1159-1177).
gcctgcaattggataagct

SEQ ID NO: 66687 - DNA, 19 bp, Homo sapiens
  siRNA target sequence for TDRKH (NM_006862.2,1160-1178).
cctgcaattggataagctt

SEQ ID NO: 66688 - DNA, 19 bp, Homo sapiens
  siRNA target sequence for TDRKH (NM_006862.2,1170-1188).
gataagcttgtcaatgaga

SEQ ID NO: 66689 - DNA, 19 bp, Homo sapiens
  siRNA target sequence for TDRKH (NM_006862.2,1190-1208).
gacccagcactatgagaat

SEQ ID NO: 66690 - DNA, 19 bp, Homo sapiens
  siRNA target sequence for TDRKH (NM_006862.2,1193-1211).
ccagcactatgagaatagt

SEQ ID NO: 66691 - DNA, 19 bp, Homo sapiens
  siRNA target sequence for TDRKH (NM_006862.2,1252-1270).
cagcacctttacctacaaa

SEQ ID NO: 66692 - DNA, 19 bp, Homo sapiens
  siRNA target sequence for TDRKH (NM_006862.2,1314-1332).
gggaacttggacctctatt

SEQ ID NO: 66693 - DNA, 19 bp, Homo sapiens
  siRNA target sequence for TDRKH (NM_006862.2,1316-1334).
gaacttggacctctatttt

SEQ ID NO: 66694 - DNA, 19 bp, Homo sapiens
  siRNA target sequence for TDRKH (NM_006862.2,1383-1401).
ctcaggagtgacttcctaa

SEQ ID NO: 66695 - DNA, 19 bp, Homo sapiens
  siRNA target sequence for TDRKH (NM_006862.2,1407-1425).
ccatttcaagcaatagaat

SEQ ID NO: 66696 - DNA, 19 bp, Homo sapiens
  siRNA target sequence for TDRKH (NM_006862.2,1521-1539).
ctggtagccaagatctcta

SEQ ID NO: 66697 - DNA, 19 bp, Homo sapiens
  siRNA target sequence for TDRKH (NM_006862.2,1545-1563).
gtccagactgggatctcaa

SEQ ID NO: 66698 - DNA, 19 bp, Homo sapiens
  siRNA target sequence for TDRKH (NM_006862.2,1564-1582).
cttggccaaagatctactt

SEQ ID NO: 66699 - DNA, 19 bp, Homo sapiens
  siRNA target sequence for TDRKH (NM_006862.2,1567-1585).
ggccaaagatctacttata

SEQ ID NO: 66700 - DNA, 19 bp, Homo sapiens
  siRNA target sequence for TDRKH (NM_006862.2,1568-1586).
gccaaagatctacttatat

SEQ ID NO: 66701 - DNA, 19 bp, Homo sapiens
  siRNA target sequence for TDRKH (NM_006862.2,1570-1588).
caaagatctacttatatga

SEQ ID NO: 66702 - DNA, 19 bp, Homo sapiens
  siRNA target sequence for TDRKH (NM_006862.2,1591-1609).
ctagcaatgggaagaaact

SEQ ID NO: 66703 - DNA, 19 bp, Homo sapiens
  siRNA target sequence for TDRKH (NM_006862.2,1608-1626).
cttgatattgggctagaat

SEQ ID NO: 66704 - DNA, 19 bp, Homo sapiens
  siRNA target sequence for TDRKH (NM_006862.2,1618-1636).
ggctagaattagtacacaa

SEQ ID NO: 66705 - DNA, 19 bp, Homo sapiens
  siRNA target sequence for TDRKH (NM_006862.2,1680-1698).
gctgtcccagacatgttga

SEQ ID NO: 66706 - DNA, 19 bp, Homo sapiens
  siRNA target sequence for TDRKH (NM_006862.2,1681-1699).
ctgtcccagacatgttgaa

SEQ ID NO: 66707 - DNA, 19 bp, Homo sapiens
  siRNA target sequence for TDRKH (NM_006862.2,1813-1831).
ccatgtctggtgatgataa

SEQ ID NO: 66708 - DNA, 19 bp, Homo sapiens
  siRNA target sequence for TDRKH (NM_006862.2,1832-1850).
ccttgaagatgactactta

SEQ ID NO: 66709 - DNA, 19 bp, Homo sapiens
  siRNA target sequence for TDRKH (NM_006862.2,1954-1972).
gttccgtagggaaccttta

SEQ ID NO: 66710 - DNA, 19 bp, Homo sapiens
  siRNA target sequence for TDRKH (NM_006862.2,1958-1976).
cgtagggaacctttactct

SEQ ID NO: 66711 - DNA, 19 bp, Homo sapiens
  siRNA target sequence for TFIP11 (NM_012143.1,292-310).
gggaaggccgcattgatga

SEQ ID NO: 66712 - DNA, 19 bp, Homo sapiens
  siRNA target sequence for TFIP11 (NM_012143.1,349-367).
gggatctccagaatgagtt

SEQ ID NO: 66713 - DNA, 19 bp, Homo sapiens
  siRNA target sequence for TFIP11 (NM_012143.1,487-505).
ctgcgccagtcaacttcat

SEQ ID NO: 66714 - DNA, 19 bp, Homo sapiens
  siRNA target sequence for TFIP11 (NM_012143.1,489-507).
gcgccagtcaacttcatca

SEQ ID NO: 66715 - DNA, 19 bp, Homo sapiens
  siRNA target sequence for TFIP11 (NM_012143.1,584-602).
ggacgactttcctaaggat

SEQ ID NO: 66716 - DNA, 19 bp, Homo sapiens
  siRNA target sequence for TFIP11 (NM_012143.1,660-678).
gcaggaggaaccaaatctt

SEQ ID NO: 66717 - DNA, 19 bp, Homo sapiens
  siRNA target sequence for TFIP11 (NM_012143.1,663-681).
ggaggaaccaaatctttca

SEQ ID NO: 66718 - DNA, 19 bp, Homo sapiens
  siRNA target sequence for TFIP11 (NM_012143.1,773-791).
gaatgcacaaggtatcatt

SEQ ID NO: 66719 - DNA, 19 bp, Homo sapiens
  siRNA target sequence for TFIP11 (NM_012143.1,784-802).
gtatcattaacccaattga

SEQ ID NO: 66720 - DNA, 19 bp, Homo sapiens
  siRNA target sequence for TFIP11 (NM_012143.1,859-877).
ctcagtccatgcaagactt

SEQ ID NO: 66721 - DNA, 19 bp, Homo sapiens
  siRNA target sequence for TFIP11 (NM_012143.1,1481-1499).
cctgcaggacaagtactat

SEQ ID NO: 66722 - DNA, 19 bp, Homo sapiens
  siRNA target sequence for TFIP11 (NM_012143.1,1552-1570).
cactcatgaaggagtactt

SEQ ID NO: 66723 - DNA, 19 bp, Homo sapiens
  siRNA target sequence for TFIP11 (NM_012143.1,1586-1604).
cctcaaagactgcacttat

SEQ ID NO: 66724 - DNA, 19 bp, Homo sapiens
  siRNA target sequence for TFIP11 (NM_012143.1,1600-1618).
cttatggcaccgagatcat

SEQ ID NO: 66725 - DNA, 19 bp, Homo sapiens
  siRNA target sequence for TFIP11 (NM_012143.1,1605-1623).
ggcaccgagatcatctcta

SEQ ID NO: 66726 - DNA, 19 bp, Homo sapiens
  siRNA target sequence for TFIP11 (NM_012143.1,1606-1624).
gcaccgagatcatctctaa

SEQ ID NO: 66727 - DNA, 19 bp, Homo sapiens
  siRNA target sequence for TFIP11 (NM_012143.1,1689-1707).
gcctttcacaggttgatat

SEQ ID NO: 66728 - DNA, 19 bp, Homo sapiens
  siRNA target sequence for TFIP11 (NM_012143.1,1717-1735).
ggatgccttttgttcgaaa

SEQ ID NO: 66729 - DNA, 19 bp, Homo sapiens
  siRNA target sequence for TFIP11 (NM_012143.1,1721-1739).
gccttttgttcgaaatatt

SEQ ID NO: 66730 - DNA, 19 bp, Homo sapiens
  siRNA target sequence for TFIP11 (NM_012143.1,1767-1785).
gacccgatggtggactttt

SEQ ID NO: 66731 - DNA, 19 bp, Homo sapiens
  siRNA target sequence for TFIP11 (NM_012143.1,1771-1789).
cgatggtggactttttgga

SEQ ID NO: 66732 - DNA, 19 bp, Homo sapiens
  siRNA target sequence for TFIP11 (NM_012143.1,1772-1790).
gatggtggactttttggat

SEQ ID NO: 66733 - DNA, 19 bp, Homo sapiens
  siRNA target sequence for TFIP11 (NM_012143.1,1809-1827).
cctgtgtggatcttagata

SEQ ID NO: 66734 - DNA, 19 bp, Homo sapiens
  siRNA target sequence for TFIP11 (NM_012143.1,1810-1828).
ctgtgtggatcttagataa

SEQ ID NO: 66735 - DNA, 19 bp, Homo sapiens
  siRNA target sequence for TFIP11 (NM_012143.1,1814-1832).
gtggatcttagataacata

SEQ ID NO: 66736 - DNA, 19 bp, Homo sapiens
  siRNA target sequence for TFIP11 (NM_012143.1,1947-1965).
cggctggagccactctatt

SEQ ID NO: 66737 - DNA, 19 bp, Homo sapiens
  siRNA target sequence for TFIP11 (NM_012143.1,2068-2086).
gctcctgggaagcattcat

SEQ ID NO: 66738 - DNA, 19 bp, Homo sapiens
  siRNA target sequence for TFIP11 (NM_012143.1,2079-2097).
gcattcatggtcaaaaaca

SEQ ID NO: 66739 - DNA, 19 bp, Homo sapiens
  siRNA target sequence for TFIP11 (NM_012143.1,2121-2139).
cttggtgagctagtcatta

SEQ ID NO: 66740 - DNA, 19 bp, Homo sapiens
  siRNA target sequence for TFIP11 (NM_012143.1,2153-2171).
gcacatggatgcattctat

SEQ ID NO: 66741 - DNA, 19 bp, Homo sapiens
  siRNA target sequence for TFIP11 (NM_012143.1,2211-2229).
ctggtgggacttcttgaaa

SEQ ID NO: 66742 - DNA, 19 bp, Homo sapiens
  siRNA target sequence for TFIP11 (NM_012143.1,2271-2289).
ctcagtaacagcccaaatt

SEQ ID NO: 66743 - DNA, 19 bp, Homo sapiens
  siRNA target sequence for TFIP11 (NM_012143.1,2316-2334).
ggttggaagtcgatgttct

SEQ ID NO: 66744 - DNA, 19 bp, Homo sapiens
  siRNA target sequence for TFIP11 (NM_012143.1,2566-2584).
ctgtgcccatgaactttaa

SEQ ID NO: 66745 - DNA, 19 bp, Homo sapiens
  siRNA target sequence for TFIP11 (NM_012143.1,2603-2621).
ggctgaggagcacaacatt

SEQ ID NO: 66746 - DNA, 19 bp, Homo sapiens
  siRNA target sequence for TFIP11 (NM_012143.1,2607-2625).
gaggagcacaacattgtct

SEQ ID NO: 66747 - DNA, 19 bp, Homo sapiens
  siRNA target sequence for TFIP11 (NM_012143.1,2676-2694).
ggccgcattgtgatctaca

SEQ ID NO: 66748 - DNA, 19 bp, Homo sapiens
  siRNA target sequence for TFIP11 (NM_012143.1,2677-2695).
gccgcattgtgatctacat

SEQ ID NO: 66749 - DNA, 19 bp, Homo sapiens
  siRNA target sequence for THOC4 (NM_005782.1,56-74).
ctctggacgacatcattaa

SEQ ID NO: 66750 - DNA, 19 bp, Homo sapiens
  siRNA target sequence for THOC4 (NM_005782.1,61-79).
gacgacatcattaaactga

SEQ ID NO: 66751 - DNA, 19 bp, Homo sapiens
  siRNA target sequence for THOC4 (NM_005782.1,254-272).
cctacagcaggccaaaaca

SEQ ID NO: 66752 - DNA, 19 bp, Homo sapiens
  siRNA target sequence for THOC4 (NM_005782.1,287-305).
ggcagcacgatcttttcga

SEQ ID NO: 66753 - DNA, 19 bp, Homo sapiens
  siRNA target sequence for THOC4 (NM_005782.1,354-372).
ggtgtccaatctggatttt

SEQ ID NO: 66754 - DNA, 19 bp, Homo sapiens
  siRNA target sequence for THOC4 (NM_005782.1,396-414).
ggaactctttgctgaattt

SEQ ID NO: 66755 - DNA, 19 bp, Homo sapiens
  siRNA target sequence for THOC4 (NM_005782.1,564-582).
gcttgtcacgtcacagatt

SEQ ID NO: 66756 - DNA, 19 bp, Homo sapiens
  siRNA target sequence for TIPARP (NM_015508.2,313-331).
gacttttcatgccaaatga

SEQ ID NO: 66757 - DNA, 19 bp, Homo sapiens
  siRNA target sequence for TIPARP (NM_015508.2,315-333).
cttttcatgccaaatgaga

SEQ ID NO: 66758 - DNA, 19 bp, Homo sapiens
  siRNA target sequence for TIPARP (NM_015508.2,410-428).
ggtctttgaggccaatatt

SEQ ID NO: 66759 - DNA, 19 bp, Homo sapiens
  siRNA target sequence for TIPARP (NM_015508.2,454-472).
cttgatggggtttttagat

SEQ ID NO: 66760 - DNA, 19 bp, Homo sapiens
  siRNA target sequence for TIPARP (NM_015508.2,457-475).
gatggggtttttagatcta

SEQ ID NO: 66761 - DNA, 19 bp, Homo sapiens
  siRNA target sequence for TIPARP (NM_015508.2,500-518).
gcttacatgaacctatgat

SEQ ID NO: 66762 - DNA, 19 bp, Homo sapiens
  siRNA target sequence for TIPARP (NM_015508.2,505-523).
catgaacctatgatgaaga

SEQ ID NO: 66763 - DNA, 19 bp, Homo sapiens
  siRNA target sequence for TIPARP (NM_015508.2,526-544).
gccatggaaatcaattcat

SEQ ID NO: 66764 - DNA, 19 bp, Homo sapiens
  siRNA target sequence for TIPARP (NM_015508.2,641-659).
cagaacgagtggttccaat

SEQ ID NO: 66765 - DNA, 19 bp, Homo sapiens
  siRNA target sequence for TIPARP (NM_015508.2,721-739).
cacttccagactgatcttt

SEQ ID NO: 66766 - DNA, 19 bp, Homo sapiens
  siRNA target sequence for TIPARP (NM_015508.2,775-793).
gactgcttagacaaagtca

SEQ ID NO: 66767 - DNA, 19 bp, Homo sapiens
  siRNA target sequence for TIPARP (NM_015508.2,779-797).
gcttagacaaagtcataga

SEQ ID NO: 66768 - DNA, 19 bp, Homo sapiens
  siRNA target sequence for TIPARP (NM_015508.2,810-828).
cattttccaagaaaacagt

SEQ ID NO: 66769 - DNA, 19 bp, Homo sapiens
  siRNA target sequence for TIPARP (NM_015508.2,827-845).
gttttacaatccaatacat

SEQ ID NO: 66770 - DNA, 19 bp, Homo sapiens
  siRNA target sequence for TIPARP (NM_015508.2,905-923).
cccttgacctcgtgtttga

SEQ ID NO: 66771 - DNA, 19 bp, Homo sapiens
  siRNA target sequence for TIPARP (NM_015508.2,1043-1061).
catatcattggcagatcaa

SEQ ID NO: 66772 - DNA, 19 bp, Homo sapiens
  siRNA target sequence for TIPARP (NM_015508.2,1048-1066).
cattggcagatcaaaagga

SEQ ID NO: 66773 - DNA, 19 bp, Homo sapiens
  siRNA target sequence for TIPARP (NM_015508.2,1054-1072).
cagatcaaaaggacaacta

SEQ ID NO: 66774 - DNA, 19 bp, Homo sapiens
  siRNA target sequence for TIPARP (NM_015508.2,1075-1093).
caaaagtggcagagtgtat

SEQ ID NO: 66775 - DNA, 19 bp, Homo sapiens
  siRNA target sequence for TIPARP (NM_015508.2,1080-1098).
gtggcagagtgtattcaat

SEQ ID NO: 66776 - DNA, 19 bp, Homo sapiens
  siRNA target sequence for TIPARP (NM_015508.2,1082-1100).
ggcagagtgtattcaatga

SEQ ID NO: 66777 - DNA, 19 bp, Homo sapiens
  siRNA target sequence for TIPARP (NM_015508.2,1083-1101).
gcagagtgtattcaatgat

SEQ ID NO: 66778 - DNA, 19 bp, Homo sapiens
  siRNA target sequence for TIPARP (NM_015508.2,1084-1102).
cagagtgtattcaatgatt

SEQ ID NO: 66779 - DNA, 19 bp, Homo sapiens
  siRNA target sequence for TIPARP (NM_015508.2,1086-1104).
gagtgtattcaatgattct

SEQ ID NO: 66780 - DNA, 19 bp, Homo sapiens
  siRNA target sequence for TIPARP (NM_015508.2,1088-1106).
gtgtattcaatgattctca

SEQ ID NO: 66781 - DNA, 19 bp, Homo sapiens
  siRNA target sequence for TIPARP (NM_015508.2,1105-1123).
caggagcacttggaaagat

SEQ ID NO: 66782 - DNA, 19 bp, Homo sapiens
  siRNA target sequence for TIPARP (NM_015508.2,1197-1215).
catgaacgtgtatgaaaca

SEQ ID NO: 66783 - DNA, 19 bp, Homo sapiens
  siRNA target sequence for TIPARP (NM_015508.2,1200-1218).
gaacgtgtatgaaacaact

SEQ ID NO: 66784 - DNA, 19 bp, Homo sapiens
  siRNA target sequence for TIPARP (NM_015508.2,1203-1221).
cgtgtatgaaacaactgaa

SEQ ID NO: 66785 - DNA, 19 bp, Homo sapiens
  siRNA target sequence for TIPARP (NM_015508.2,1245-1263).
cacaccaccctctagcaat

SEQ ID NO: 66786 - DNA, 19 bp, Homo sapiens
  siRNA target sequence for TIPARP (NM_015508.2,1249-1267).
ccaccctctagcaatgtca

SEQ ID NO: 66787 - DNA, 19 bp, Homo sapiens
  siRNA target sequence for TIPARP (NM_015508.2,1250-1268).
caccctctagcaatgtcaa

SEQ ID NO: 66788 - DNA, 19 bp, Homo sapiens
  siRNA target sequence for TIPARP (NM_015508.2,1256-1274).
ctagcaatgtcaactctat

SEQ ID NO: 66789 - DNA, 19 bp, Homo sapiens
  siRNA target sequence for TIPARP (NM_015508.2,1285-1303).
gtctggaaattcttctgta

SEQ ID NO: 66790 - DNA, 19 bp, Homo sapiens
  siRNA target sequence for TIPARP (NM_015508.2,1326-1344).
gtatcccgagtctgtcatt

SEQ ID NO: 66791 - DNA, 19 bp, Homo sapiens
  siRNA target sequence for TIPARP (NM_015508.2,1330-1348).
cccgagtctgtcattcgat

SEQ ID NO: 66792 - DNA, 19 bp, Homo sapiens
  siRNA target sequence for TIPARP (NM_015508.2,1331-1349).
ccgagtctgtcattcgatt

SEQ ID NO: 66793 - DNA, 19 bp, Homo sapiens
  siRNA target sequence for TIPARP (NM_015508.2,1335-1353).
gtctgtcattcgattgatt

SEQ ID NO: 66794 - DNA, 19 bp, Homo sapiens
  siRNA target sequence for TIPARP (NM_015508.2,1373-1391).
gtctgaaagaggttcgatt

SEQ ID NO: 66795 - DNA, 19 bp, Homo sapiens
  siRNA target sequence for TIPARP (NM_015508.2,1375-1393).
ctgaaagaggttcgattta

SEQ ID NO: 66796 - DNA, 19 bp, Homo sapiens
  siRNA target sequence for TIPARP (NM_015508.2,1381-1399).
gaggttcgatttatgatgt

SEQ ID NO: 66797 - DNA, 19 bp, Homo sapiens
  siRNA target sequence for TIPARP (NM_015508.2,1410-1428).
ctacatcctccacaattca

SEQ ID NO: 66798 - DNA, 19 bp, Homo sapiens
  siRNA target sequence for TIPARP (NM_015508.2,1480-1498).
ctgcttccatatttacaga

SEQ ID NO: 66799 - DNA, 19 bp, Homo sapiens
  siRNA target sequence for TIPARP (NM_015508.2,1534-1552).
cttgaagcaacttcatcat

SEQ ID NO: 66800 - DNA, 19 bp, Homo sapiens
  siRNA target sequence for TIPARP (NM_015508.2,1544-1562).
cttcatcatcacaaattat

SEQ ID NO: 66801 - DNA, 19 bp, Homo sapiens
  siRNA target sequence for TIPARP (NM_015508.2,1672-1690).
cggatcatttacaatcttt

SEQ ID NO: 66802 - DNA, 19 bp, Homo sapiens
  siRNA target sequence for TIPARP (NM_015508.2,1683-1701).
caatctttttcataagact

SEQ ID NO: 66803 - DNA, 19 bp, Homo sapiens
  siRNA target sequence for TIPARP (NM_015508.2,1698-1716).
gactgtgcctgagtttaaa

SEQ ID NO: 66804 - DNA, 19 bp, Homo sapiens
  siRNA target sequence for TIPARP (NM_015508.2,1708-1726).
gagtttaaatacagaattt

SEQ ID NO: 66805 - DNA, 19 bp, Homo sapiens
  siRNA target sequence for TIPARP (NM_015508.2,1807-1825).
ggccgtgacaggataataa

SEQ ID NO: 66806 - DNA, 19 bp, Homo sapiens
  siRNA target sequence for TIPARP (NM_015508.2,1808-1826).
gccgtgacaggataataaa

SEQ ID NO: 66807 - DNA, 19 bp, Homo sapiens
  siRNA target sequence for TIPARP (NM_015508.2,1809-1827).
ccgtgacaggataataaat

SEQ ID NO: 66808 - DNA, 19 bp, Homo sapiens
  siRNA target sequence for TIPARP (NM_015508.2,1907-1925).
gaaagcatgctacaatgtt

SEQ ID NO: 66809 - DNA, 19 bp, Homo sapiens
  siRNA target sequence for TIPARP (NM_015508.2,1923-1941).
gtttggacaaggcagttat

SEQ ID NO: 66810 - DNA, 19 bp, Homo sapiens
  siRNA target sequence for TIPARP (NM_015508.2,1959-1977).
ctactctcataacttttct

SEQ ID NO: 66811 - DNA, 19 bp, Homo sapiens
  siRNA target sequence for TIPARP (NM_015508.2,2023-2041).
ctgacgggcagatacacaa

SEQ ID NO: 66812 - DNA, 19 bp, Homo sapiens
  siRNA target sequence for TIPARP (NM_015508.2,2107-2125).
gactcttgtgtggataatt

SEQ ID NO: 66813 - DNA, 19 bp, Homo sapiens
  siRNA target sequence for TIPARP (NM_015508.2,2131-2149).
gagcctcagatttttgtca

SEQ ID NO: 66814 - DNA, 19 bp, Homo sapiens
  siRNA target sequence for TIPARP (NM_015508.2,2197-2215).
gaagtcagtaacactgttt

SEQ ID NO: 66815 - DNA, 19 bp, Homo sapiens
  siRNA target sequence for TIZ (NM_138330.1,441-459).
cagttaaaaggctgtaaaa

SEQ ID NO: 66816 - DNA, 19 bp, Homo sapiens
  siRNA target sequence for TNRC6 (NM_014494.1,469-487).
ggaacacaggtggtgaaaa

SEQ ID NO: 66817 - DNA, 19 bp, Homo sapiens
  siRNA target sequence for TNRC6 (NM_014494.1,513-531).
cttggttcccaaaacaagt

SEQ ID NO: 66818 - DNA, 19 bp, Homo sapiens
  siRNA target sequence for TNRC6 (NM_014494.1,520-538).
cccaaaacaagtttgtagt

SEQ ID NO: 66819 - DNA, 19 bp, Homo sapiens
  siRNA target sequence for TNRC6 (NM_014494.1,521-539).
ccaaaacaagtttgtagtt

SEQ ID NO: 66820 - DNA, 19 bp, Homo sapiens
  siRNA target sequence for TNRC6 (NM_014494.1,558-576).
gtgggccatggaagtagta

SEQ ID NO: 66821 - DNA, 19 bp, Homo sapiens
  siRNA target sequence for TNRC6 (NM_014494.1,560-578).
gggccatggaagtagtact

SEQ ID NO: 66822 - DNA, 19 bp, Homo sapiens
  siRNA target sequence for TNRC6 (NM_014494.1,597-615).
catggagccataataagca

SEQ ID NO: 66823 - DNA, 19 bp, Homo sapiens
  siRNA target sequence for TNRC6 (NM_014494.1,684-702).
ggcactgtaagttcttcat

SEQ ID NO: 66824 - DNA, 19 bp, Homo sapiens
  siRNA target sequence for TNRC6 (NM_014494.1,758-776).
gccagtattagagaacaat

SEQ ID NO: 66825 - DNA, 19 bp, Homo sapiens
  siRNA target sequence for TNRC6 (NM_014494.1,773-791).
caatggacttgccctaaaa

SEQ ID NO: 66826 - DNA, 19 bp, Homo sapiens
  siRNA target sequence for TNRC6 (NM_014494.1,846-864).
cagatgcctaacaatcaga

SEQ ID NO: 66827 - DNA, 19 bp, Homo sapiens
  siRNA target sequence for TNRC6 (NM_014494.1,851-869).
gcctaacaatcagagtatt

SEQ ID NO: 66828 - DNA, 19 bp, Homo sapiens
  siRNA target sequence for TNRC6 (NM_014494.1,852-870).
cctaacaatcagagtatta

SEQ ID NO: 66829 - DNA, 19 bp, Homo sapiens
  siRNA target sequence for TNRC6 (NM_014494.1,945-963).
ggtacacagaaggtttcat

SEQ ID NO: 66830 - DNA, 19 bp, Homo sapiens
  siRNA target sequence for TNRC6 (NM_014494.1,965-983).
cagtggtcaacctcaaaat

SEQ ID NO: 66831 - DNA, 19 bp, Homo sapiens
  siRNA target sequence for TNRC6 (NM_014494.1,969-987).
ggtcaacctcaaaatatta

SEQ ID NO: 66832 - DNA, 19 bp, Homo sapiens
  siRNA target sequence for TNRC6 (NM_014494.1,1002-1020).
ggaccaaataacactacta

SEQ ID NO: 66833 - DNA, 19 bp, Homo sapiens
  siRNA target sequence for TNRC6 (NM_014494.1,1003-1021).
gaccaaataacactactaa

SEQ ID NO: 66834 - DNA, 19 bp, Homo sapiens
  siRNA target sequence for TNRC6 (NM_014494.1,1005-1023).
ccaaataacactactaact

SEQ ID NO: 66835 - DNA, 19 bp, Homo sapiens
  siRNA target sequence for TNRC6 (NM_014494.1,1006-1024).
caaataacactactaactt

SEQ ID NO: 66836 - DNA, 19 bp, Homo sapiens
  siRNA target sequence for TNRC6 (NM_014494.1,1048-1066).
ccggttcagtgcagaataa

SEQ ID NO: 66837 - DNA, 19 bp, Homo sapiens
  siRNA target sequence for TNRC6 (NM_014494.1,1049-1067).
cggttcagtgcagaataat

SEQ ID NO: 66838 - DNA, 19 bp, Homo sapiens
  siRNA target sequence for TNRC6 (NM_014494.1,1051-1069).
gttcagtgcagaataatga

SEQ ID NO: 66839 - DNA, 19 bp, Homo sapiens
  siRNA target sequence for TNRC6 (NM_014494.1,1068-1086).
gagctgcctagtagtaaca

SEQ ID NO: 66840 - DNA, 19 bp, Homo sapiens
  siRNA target sequence for TNRC6 (NM_014494.1,1070-1088).
gctgcctagtagtaacaca

SEQ ID NO: 66841 - DNA, 19 bp, Homo sapiens
  siRNA target sequence for TNRC6 (NM_014494.1,1097-1115).
gcgtgtgagcacaatgaat

SEQ ID NO: 66842 - DNA, 19 bp, Homo sapiens
  siRNA target sequence for TNRC6 (NM_014494.1,1099-1117).
gtgtgagcacaatgaatca

SEQ ID NO: 66843 - DNA, 19 bp, Homo sapiens
  siRNA target sequence for TNRC6 (NM_014494.1,1172-1190).
caatggagagtcaaaaagt

SEQ ID NO: 66844 - DNA, 19 bp, Homo sapiens
  siRNA target sequence for TNRC6 (NM_014494.1,1194-1212).
ggctcttatggtactacat

SEQ ID NO: 66845 - DNA, 19 bp, Homo sapiens
  siRNA target sequence for TNRC6 (NM_014494.1,1213-1231).
ggggtgcctatggttctaa

SEQ ID NO: 66846 - DNA, 19 bp, Homo sapiens
  siRNA target sequence for TNRC6 (NM_014494.1,1215-1233).
ggtgcctatggttctaatt

SEQ ID NO: 66847 - DNA, 19 bp, Homo sapiens
  siRNA target sequence for TNRC6 (NM_014494.1,1216-1234).
gtgcctatggttctaatta

SEQ ID NO: 66848 - DNA, 19 bp, Homo sapiens
  siRNA target sequence for TNRC6 (NM_014494.1,1218-1236).
gcctatggttctaattact

SEQ ID NO: 66849 - DNA, 19 bp, Homo sapiens
  siRNA target sequence for TNRC6 (NM_014494.1,1255-1273).
gccctaatggccaagctaa

SEQ ID NO: 66850 - DNA, 19 bp, Homo sapiens
  siRNA target sequence for TNRC6 (NM_014494.1,1256-1274).
ccctaatggccaagctaat

SEQ ID NO: 66851 - DNA, 19 bp, Homo sapiens
  siRNA target sequence for TNRC6 (NM_014494.1,1301-1319).
gcagcctggcgtaaatggt

SEQ ID NO: 66852 - DNA, 19 bp, Homo sapiens
  siRNA target sequence for TNRC6 (NM_014494.1,1317-1335).
ggtcctatgggcactaact

SEQ ID NO: 66853 - DNA, 19 bp, Homo sapiens
  siRNA target sequence for TNRC6 (NM_014494.1,1318-1336).
gtcctatgggcactaactt

SEQ ID NO: 66854 - DNA, 19 bp, Homo sapiens
  siRNA target sequence for TNRC6 (NM_014494.1,1321-1339).
ctatgggcactaactttca

SEQ ID NO: 66855 - DNA, 19 bp, Homo sapiens
  siRNA target sequence for TNRC6 (NM_014494.1,1383-1401).
gcaaactcccagagtacat

SEQ ID NO: 66856 - DNA, 19 bp, Homo sapiens
  siRNA target sequence for TNRC6 (NM_014494.1,1499-1517).
gaacaaactgcctagcaat

SEQ ID NO: 66857 - DNA, 19 bp, Homo sapiens
  siRNA target sequence for TNRC6 (NM_014494.1,1544-1562).
caatggtaagacgtttaca

SEQ ID NO: 66858 - DNA, 19 bp, Homo sapiens
  siRNA target sequence for TNRC6 (NM_014494.1,2134-2152).
ggaatgactcgcaaaagaa

SEQ ID NO: 66859 - DNA, 19 bp, Homo sapiens
  siRNA target sequence for TNRC6 (NM_014494.1,2245-2263).
ggggtgaggccaataagaa

SEQ ID NO: 66860 - DNA, 19 bp, Homo sapiens
  siRNA target sequence for TNRC6 (NM_014494.1,2246-2264).
gggtgaggccaataagaaa

SEQ ID NO: 66861 - DNA, 19 bp, Homo sapiens
  siRNA target sequence for TNRC6 (NM_014494.1,2305-2323).
gttggaacgaacttggtaa

SEQ ID NO: 66862 - DNA, 19 bp, Homo sapiens
  siRNA target sequence for TNRC6 (NM_014494.1,2309-2327).
gaacgaacttggtaaaact

SEQ ID NO: 66863 - DNA, 19 bp, Homo sapiens
  siRNA target sequence for TNRC6 (NM_014494.1,2373-2391).
ggatgggatgaatcttcta

SEQ ID NO: 66864 - DNA, 19 bp, Homo sapiens
  siRNA target sequence for TNRC6 (NM_014494.1,2378-2396).
ggatgaatcttctaaacct

SEQ ID NO: 66865 - DNA, 19 bp, Homo sapiens
  siRNA target sequence for TNRC6 (NM_014494.1,2379-2397).
gatgaatcttctaaaccta

SEQ ID NO: 66866 - DNA, 19 bp, Homo sapiens
  siRNA target sequence for TNRC6 (NM_014494.1,2421-2439).
cctccaaagtctaatcagt

SEQ ID NO: 66867 - DNA, 19 bp, Homo sapiens
  siRNA target sequence for TNRC6 (NM_014494.1,2558-2576).
gctggggggacctatacca

SEQ ID NO: 66868 - DNA, 19 bp, Homo sapiens
  siRNA target sequence for TNRC6 (NM_014494.1,2629-2647).
ctatacgtcgcaaaatgga

SEQ ID NO: 66869 - DNA, 19 bp, Homo sapiens
  siRNA target sequence for TNRC6 (NM_014494.1,2673-2691).
ggagatccaagcaaataca

SEQ ID NO: 66870 - DNA, 19 bp, Homo sapiens
  siRNA target sequence for TNRC6 (NM_014494.1,2674-2692).
gagatccaagcaaatacaa

SEQ ID NO: 66871 - DNA, 19 bp, Homo sapiens
  siRNA target sequence for TNRC6 (NM_014494.1,2676-2694).
gatccaagcaaatacaact

SEQ ID NO: 66872 - DNA, 19 bp, Homo sapiens
  siRNA target sequence for TNRC6 (NM_014494.1,2785-2803).
caagtgccatctcaaacaa

SEQ ID NO: 66873 - DNA, 19 bp, Homo sapiens
  siRNA target sequence for TNRC6 (NM_014494.1,2837-2855).
ctggggggagccttctact

SEQ ID NO: 66874 - DNA, 19 bp, Homo sapiens
  siRNA target sequence for TNRC6 (NM_014494.1,2857-2875).
cagccacaactgtggataa

SEQ ID NO: 66875 - DNA, 19 bp, Homo sapiens
  siRNA target sequence for TNRC6 (NM_014494.1,2861-2879).
cacaactgtggataatggt

SEQ ID NO: 66876 - DNA, 19 bp, Homo sapiens
  siRNA target sequence for TNRC6 (NM_014494.1,2976-2994).
ggtccacaagcattaagca

SEQ ID NO: 66877 - DNA, 19 bp, Homo sapiens
  siRNA target sequence for TNRC6 (NM_014494.1,2977-2995).
gtccacaagcattaagcaa

SEQ ID NO: 66878 - DNA, 19 bp, Homo sapiens
  siRNA target sequence for TNRC6 (NM_014494.1,3021-3039).
ggctggtgtggtgatgata

SEQ ID NO: 66879 - DNA, 19 bp, Homo sapiens
  siRNA target sequence for TNRC6 (NM_014494.1,3022-3040).
gctggtgtggtgatgatat

SEQ ID NO: 66880 - DNA, 19 bp, Homo sapiens
  siRNA target sequence for TNRC6 (NM_014494.1,3101-3119).
gtggaatagtaattcatct

SEQ ID NO: 66881 - DNA, 19 bp, Homo sapiens
  siRNA target sequence for TNRC6 (NM_014494.1,3120-3138).
caagagcttaactcatctt

SEQ ID NO: 66882 - DNA, 19 bp, Homo sapiens
  siRNA target sequence for TNRC6 (NM_014494.1,3234-3252).
caagaagaagcgtggataa

SEQ ID NO: 66883 - DNA, 19 bp, Homo sapiens
  siRNA target sequence for TNRC6 (NM_014494.1,3245-3263).
gtggataaatccatttgtt

SEQ ID NO: 66884 - DNA, 19 bp, Homo sapiens
  siRNA target sequence for TNRC6 (NM_014494.1,3340-3358).
gaggaatgttacaagacaa

SEQ ID NO: 66885 - DNA, 19 bp, Homo sapiens
  siRNA target sequence for TNRC6 (NM_014494.1,3457-3475).
ccatggagcgcaatcctta

SEQ ID NO: 66886 - DNA, 19 bp, Homo sapiens
  siRNA target sequence for TNRC6 (NM_014494.1,3464-3482).
gcgcaatccttattttgat

SEQ ID NO: 66887 - DNA, 19 bp, Homo sapiens
  siRNA target sequence for TNRC6 (NM_014494.1,3465-3483).
cgcaatccttattttgata

SEQ ID NO: 66888 - DNA, 19 bp, Homo sapiens
  siRNA target sequence for TNRC6 (NM_014494.1,3508-3526).
cccaaaacatgcagtttat

SEQ ID NO: 66889 - DNA, 19 bp, Homo sapiens
  siRNA target sequence for TNRC6 (NM_014494.1,3519-3537).
cagtttatgtccagtcaaa

SEQ ID NO: 66890 - DNA, 19 bp, Homo sapiens
  siRNA target sequence for TNRC6 (NM_014494.1,3542-3560).
gaagcttcccccttcaaat

SEQ ID NO: 66891 - DNA, 19 bp, Homo sapiens
  siRNA target sequence for TNRC6 (NM_014494.1,3702-3720).
gcacaacctcttagttcat

SEQ ID NO: 66892 - DNA, 19 bp, Homo sapiens
  siRNA target sequence for TNRC6 (NM_014494.1,3744-3762).
gtgcctcctccattactct

SEQ ID NO: 66893 - DNA, 19 bp, Homo sapiens
  siRNA target sequence for TNRC6 (NM_014494.1,3889-3907).
cccagttacagcgattgtt

SEQ ID NO: 66894 - DNA, 19 bp, Homo sapiens
  siRNA target sequence for TNRC6 (NM_014494.1,3974-3992).
gcagggtcgacctcttagt

SEQ ID NO: 66895 - DNA, 19 bp, Homo sapiens
  siRNA target sequence for TNRC6 (NM_014494.1,3991-4009).
gtgtgcagcagcaaatgat

SEQ ID NO: 66896 - DNA, 19 bp, Homo sapiens
  siRNA target sequence for TNRC6 (NM_014494.1,4010-4028).
gcaacaatctcgtcaactt

SEQ ID NO: 66897 - DNA, 19 bp, Homo sapiens
  siRNA target sequence for TNRC6 (NM_014494.1,4151-4169).
gccatcaccaataaatgct

SEQ ID NO: 66898 - DNA, 19 bp, Homo sapiens
  siRNA target sequence for TNRC6 (NM_014494.1,4152-4170).
ccatcaccaataaatgctt

SEQ ID NO: 66899 - DNA, 19 bp, Homo sapiens
  siRNA target sequence for TNRC6 (NM_014494.1,4182-4200).
cctataggcttgaactcaa

SEQ ID NO: 66900 - DNA, 19 bp, Homo sapiens
  siRNA target sequence for TNRC6 (NM_014494.1,4183-4201).
ctataggcttgaactcaaa

SEQ ID NO: 66901 - DNA, 19 bp, Homo sapiens
  siRNA target sequence for TNRC6 (NM_014494.1,4188-4206).
ggcttgaactcaaacttga

SEQ ID NO: 66902 - DNA, 19 bp, Homo sapiens
  siRNA target sequence for TNRC6 (NM_014494.1,4313-4331).
caaacatggtgctatttca

SEQ ID NO: 66903 - DNA, 19 bp, Homo sapiens
  siRNA target sequence for TNRC6 (NM_014494.1,4356-4374).
ccatttgttccctatgact

SEQ ID NO: 66904 - DNA, 19 bp, Homo sapiens
  siRNA target sequence for TNRC6 (NM_014494.1,4357-4375).
catttgttccctatgactt

SEQ ID NO: 66905 - DNA, 19 bp, Homo sapiens
  siRNA target sequence for TNRC6 (NM_014494.1,4451-4469).
cggctctagcagtgttaat

SEQ ID NO: 66906 - DNA, 19 bp, Homo sapiens
  siRNA target sequence for TNRC6 (NM_014494.1,4452-4470).
ggctctagcagtgttaatt

SEQ ID NO: 66907 - DNA, 19 bp, Homo sapiens
  siRNA target sequence for TNRC6 (NM_014494.1,4496-4514).
gccatggaaaggttatcca

SEQ ID NO: 66908 - DNA, 19 bp, Homo sapiens
  siRNA target sequence for TNRC6 (NM_014494.1,4544-4562).
cactcctggcagtgtcata

SEQ ID NO: 66909 - DNA, 19 bp, Homo sapiens
  siRNA target sequence for TNRC6 (NM_014494.1,4546-4564).
ctcctggcagtgtcataaa

SEQ ID NO: 66910 - DNA, 19 bp, Homo sapiens
  siRNA target sequence for TNRC6 (NM_014494.1,4552-4570).
gcagtgtcataaacaatct

SEQ ID NO: 66911 - DNA, 19 bp, Homo sapiens
  siRNA target sequence for TNRC6 (NM_014494.1,4565-4583).
caatctttcaattaatact

SEQ ID NO: 66912 - DNA, 19 bp, Homo sapiens
  siRNA target sequence for TNRC6 (NM_014494.1,4643-4661).
cacgctgccttcaactagt

SEQ ID NO: 66913 - DNA, 19 bp, Homo sapiens
  siRNA target sequence for TNRC6 (NM_014494.1,4761-4779).
cctggttcagttacaaaca

SEQ ID NO: 66914 - DNA, 19 bp, Homo sapiens
  siRNA target sequence for TNRC6 (NM_014494.1,4805-4823).
ggtccctttgccacctaaa

SEQ ID NO: 66915 - DNA, 19 bp, Homo sapiens
  siRNA target sequence for TNRC6 (NM_014494.1,4877-4895).
cttgtctacgtgggataat

SEQ ID NO: 66916 - DNA, 19 bp, Homo sapiens
  siRNA target sequence for TNRC6 (NM_014494.1,4880-4898).
gtctacgtgggataattct

SEQ ID NO: 66917 - DNA, 19 bp, Homo sapiens
  siRNA target sequence for TNRC6 (NM_014494.1,5087-5105).
cctccctcacggaaatgct

SEQ ID NO: 66918 - DNA, 19 bp, Homo sapiens
  siRNA target sequence for TNRC6 (NM_014494.1,5108-5126).
ggtccgctacagttcaaaa

SEQ ID NO: 66919 - DNA, 19 bp, Homo sapiens
  siRNA target sequence for TNRC6 (NM_014494.1,5133-5151).
gtagtgaaggcacaaaagt

SEQ ID NO: 66920 - DNA, 19 bp, Homo sapiens
  siRNA target sequence for TNRC6 (NM_014494.1,5166-5184).
gtactggggaacactacta

SEQ ID NO: 66921 - DNA, 19 bp, Homo sapiens
  siRNA target sequence for TNRC6 (NM_014494.1,5304-5322).
gactgttcccactcattct

SEQ ID NO: 66922 - DNA, 19 bp, Homo sapiens
  siRNA target sequence for TNRC6 (NM_014494.1,5323-5341).
ccagccggaccgatctcaa

SEQ ID NO: 66923 - DNA, 19 bp, Homo sapiens
  siRNA target sequence for TNRC6 (NM_014494.1,5324-5342).
cagccggaccgatctcaat

SEQ ID NO: 66924 - DNA, 19 bp, Homo sapiens
  siRNA target sequence for TNRC6 (NM_014494.1,5326-5344).
gccggaccgatctcaatca

SEQ ID NO: 66925 - DNA, 19 bp, Homo sapiens
  siRNA target sequence for TNRC6 (NM_014494.1,5328-5346).
cggaccgatctcaatcact

SEQ ID NO: 66926 - DNA, 19 bp, Homo sapiens
  siRNA target sequence for TNRC6 (NM_014494.1,5358-5376).
gggctgtcgggaactaact

SEQ ID NO: 66927 - DNA, 19 bp, Homo sapiens
  siRNA target sequence for TNRC6 (NM_014494.1,5360-5378).
gctgtcgggaactaactgt

SEQ ID NO: 66928 - DNA, 19 bp, Homo sapiens
  siRNA target sequence for TNRC6 (NM_014494.1,5402-5420).
ctgggggaccccgcattat

SEQ ID NO: 66929 - DNA, 19 bp, Homo sapiens
  siRNA target sequence for TNRC6 (NM_014494.1,5406-5424).
gggaccccgcattattcca

SEQ ID NO: 66930 - DNA, 19 bp, Homo sapiens
  siRNA target sequence for TNRC6 (NM_014494.1,5450-5468).
cagcgacccccgaggaatt

SEQ ID NO: 66931 - DNA, 19 bp, Homo sapiens
  siRNA target sequence for TNRC6 (NM_014494.1,5470-5488).
gcagcccatctcccattaa

SEQ ID NO: 66932 - DNA, 19 bp, Homo sapiens
  siRNA target sequence for TNRC6 (NM_014494.1,5481-5499).
cccattaacgcttttcttt

SEQ ID NO: 66933 - DNA, 19 bp, Homo sapiens
  siRNA target sequence for TNRC6 (NM_020847.1,22-40).
gctaccaaagacgtagaaa

SEQ ID NO: 66934 - DNA, 19 bp, Homo sapiens
  siRNA target sequence for TNRC6 (NM_020847.1,31-49).
gacgtagaaagaaatctta

SEQ ID NO: 66935 - DNA, 19 bp, Homo sapiens
  siRNA target sequence for TNRC6 (NM_020847.1,172-190).
cagataaagcccagtgtaa

SEQ ID NO: 66936 - DNA, 19 bp, Homo sapiens
  siRNA target sequence for TNRC6 (NM_020847.1,199-217).
cagcctgccaactctaata

SEQ ID NO: 66937 - DNA, 19 bp, Homo sapiens
  siRNA target sequence for TNRC6 (NM_020847.1,232-250).
gcaaccagcactaataata

SEQ ID NO: 66938 - DNA, 19 bp, Homo sapiens
  siRNA target sequence for TNRC6 (NM_020847.1,258-276).
gcgagctacagccaacaat

SEQ ID NO: 66939 - DNA, 19 bp, Homo sapiens
  siRNA target sequence for TNRC6 (NM_020847.1,455-473).
gtcagcattttcctgttat

SEQ ID NO: 66940 - DNA, 19 bp, Homo sapiens
  siRNA target sequence for TNRC6 (NM_020847.1,491-509).
ctgctgttaaggtgttaaa

SEQ ID NO: 66941 - DNA, 19 bp, Homo sapiens
  siRNA target sequence for TNRC6 (NM_020847.1,634-652).
cggggacctgtgtcttcta

SEQ ID NO: 66942 - DNA, 19 bp, Homo sapiens
  siRNA target sequence for TNRC6 (NM_020847.1,636-654).
gggacctgtgtcttctaca

SEQ ID NO: 66943 - DNA, 19 bp, Homo sapiens
  siRNA target sequence for TNRC6 (NM_020847.1,637-655).
ggacctgtgtcttctacaa

SEQ ID NO: 66944 - DNA, 19 bp, Homo sapiens
  siRNA target sequence for TNRC6 (NM_020847.1,672-690).
ctgtaagaatgctgttgta

SEQ ID NO: 66945 - DNA, 19 bp, Homo sapiens
  siRNA target sequence for TNRC6 (NM_020847.1,692-710).
gtgacttgtcggaaaaaga

SEQ ID NO: 66946 - DNA, 19 bp, Homo sapiens
  siRNA target sequence for TOE1 (NM_025077.2,638-656).
gtcagcaaaagcacaacat

SEQ ID NO: 66947 - DNA, 19 bp, Homo sapiens
  siRNA target sequence for TOE1 (NM_025077.2,657-675).
ctggggaggagctagtagt

SEQ ID NO: 66948 - DNA, 19 bp, Homo sapiens
  siRNA target sequence for TOE1 (NM_025077.2,740-758).
gccataaagacagctaatt

SEQ ID NO: 66949 - DNA, 19 bp, Homo sapiens
  siRNA target sequence for TOE1 (NM_025077.2,788-806).
cttggggacaggaagagtt

SEQ ID NO: 66950 - DNA, 19 bp, Homo sapiens
  siRNA target sequence for TOE1 (NM_025077.2,819-837).
gcattgaggaacgttacaa

SEQ ID NO: 66951 - DNA, 19 bp, Homo sapiens
  siRNA target sequence for TOE1 (NM_025077.2,852-870).
ctgccaggacccgttctat

SEQ ID NO: 66952 - DNA, 19 bp, Homo sapiens
  siRNA target sequence for TOE1 (NM_025077.2,932-950).
gctcaagtgttcaatctca

SEQ ID NO: 66953 - DNA, 19 bp, Homo sapiens
  siRNA target sequence for TOE1 (NM_025077.2,961-979).
catggaggagtatgtcata

SEQ ID NO: 66954 - DNA, 19 bp, Homo sapiens
  siRNA target sequence for TOE1 (NM_025077.2,990-1008).
ctgtgcagttcctgataca

SEQ ID NO: 66955 - DNA, 19 bp, Homo sapiens
  siRNA target sequence for TOE1 (NM_025077.2,1095-1113).
cagtacggaccctattcct

SEQ ID NO: 66956 - DNA, 19 bp, Homo sapiens
  siRNA target sequence for TOE1 (NM_025077.2,1144-1162).
gctacacaatggccttata

SEQ ID NO: 66957 - DNA, 19 bp, Homo sapiens
  siRNA target sequence for TOE1 (NM_025077.2,1148-1166).
cacaatggccttatagact

SEQ ID NO: 66958 - DNA, 19 bp, Homo sapiens
  siRNA target sequence for TOE1 (NM_025077.2,1297-1315).
cgtggcctcctacttagaa

SEQ ID NO: 66959 - DNA, 19 bp, Homo sapiens
  siRNA target sequence for TOE1 (NM_025077.2,1298-1316).
gtggcctcctacttagaat

SEQ ID NO: 66960 - DNA, 19 bp, Homo sapiens
  siRNA target sequence for TOE1 (NM_025077.2,1300-1318).
ggcctcctacttagaatat

SEQ ID NO: 66961 - DNA, 19 bp, Homo sapiens
  siRNA target sequence for TOE1 (NM_025077.2,1404-1422).
ccagcatgagggaccatat

SEQ ID NO: 66962 - DNA, 19 bp, Homo sapiens
  siRNA target sequence for TOE1 (NM_025077.2,1405-1423).
cagcatgagggaccatatt

SEQ ID NO: 66963 - DNA, 19 bp, Homo sapiens
  siRNA target sequence for TOE1 (NM_025077.2,1408-1426).
catgagggaccatattgat

SEQ ID NO: 66964 - DNA, 19 bp, Homo sapiens
  siRNA target sequence for TOE1 (NM_025077.2,1524-1542).
gtcctcagtctcacgatat

SEQ ID NO: 66965 - DNA, 19 bp, Homo sapiens
  siRNA target sequence for TOE1 (NM_025077.2,1535-1553).
cacgatattgaccttatca

SEQ ID NO: 66966 - DNA, 19 bp, Homo sapiens
  siRNA target sequence for TOE1 (NM_025077.2,1537-1555).
cgatattgaccttatcatt

SEQ ID NO: 66967 - DNA, 19 bp, Homo sapiens
  siRNA target sequence for TOE1 (NM_025077.2,1594-1612).
gcgacgacgtagggaaaaa

SEQ ID NO: 66968 - DNA, 19 bp, Homo sapiens
  siRNA target sequence for TOE1 (NM_025077.2,1613-1631).
cggaagagggctttattga

SEQ ID NO: 66969 - DNA, 19 bp, Homo sapiens
  siRNA target sequence for TOE1 (NM_025077.2,1614-1632).
ggaagagggctttattgaa

SEQ ID NO: 66970 - DNA, 19 bp, Homo sapiens
  siRNA target sequence for TOE1 (NM_025077.2,1730-1748).
gtggctgccgatgaaacta

SEQ ID NO: 66971 - DNA, 19 bp, Homo sapiens
  siRNA target sequence for TOE1 (NM_025077.2,1813-1831).
gcctgaaatagctgataga

SEQ ID NO: 66972 - DNA, 19 bp, Homo sapiens
  siRNA target sequence for TOE1 (NM_025077.2,1891-1909).
gcaccgggctggttttgat

SEQ ID NO: 66973 - DNA, 19 bp, Homo sapiens
  siRNA target sequence for TOE1 (NM_025077.2,1911-1929).
cctttatgacaggttatgt

SEQ ID NO: 66974 - DNA, 19 bp, Homo sapiens
  siRNA target sequence for TOE1 (NM_025077.2,1985-2003).
ctccctgaatgccacaata

SEQ ID NO: 66975 - DNA, 19 bp, Homo sapiens
  siRNA target sequence for TOE1 (NM_025077.2,1991-2009).
gaatgccacaataaggtat

SEQ ID NO: 66976 - DNA, 19 bp, Homo sapiens
  siRNA target sequence for TOE1 (NM_025077.2,1999-2017).
caataaggtatatttgagt

SEQ ID NO: 66977 - DNA, 19 bp, Homo sapiens
  siRNA target sequence for TOE1 (NM_025077.2,2072-2090).
gcccacaatcagaagatga

SEQ ID NO: 66978 - DNA, 19 bp, Homo sapiens
  siRNA target sequence for TRAF6 (NM_004620.2,278-296).
ggatccagccagtctgaaa

SEQ ID NO: 66979 - DNA, 19 bp, Homo sapiens
  siRNA target sequence for TRAF6 (NM_004620.2,322-340).
ctcctgtagcgctgtaaca

SEQ ID NO: 66980 - DNA, 19 bp, Homo sapiens
  siRNA target sequence for TRAF6 (NM_004620.2,324-342).
cctgtagcgctgtaacaaa

SEQ ID NO: 66981 - DNA, 19 bp, Homo sapiens
  siRNA target sequence for TRAF6 (NM_004620.2,325-343).
ctgtagcgctgtaacaaaa

SEQ ID NO: 66982 - DNA, 19 bp, Homo sapiens
  siRNA target sequence for TRAF6 (NM_004620.2,327-345).
gtagcgctgtaacaaaaga

SEQ ID NO: 66983 - DNA, 19 bp, Homo sapiens
  siRNA target sequence for TRAF6 (NM_004620.2,330-348).
gcgctgtaacaaaagatga

SEQ ID NO: 66984 - DNA, 19 bp, Homo sapiens
  siRNA target sequence for TRAF6 (NM_004620.2,331-349).
cgctgtaacaaaagatgat

SEQ ID NO: 66985 - DNA, 19 bp, Homo sapiens
  siRNA target sequence for TRAF6 (NM_004620.2,400-418).
ggagatccagggatatgat

SEQ ID NO: 66986 - DNA, 19 bp, Homo sapiens
  siRNA target sequence for TRAF6 (NM_004620.2,403-421).
gatccagggatatgatgta

SEQ ID NO: 66987 - DNA, 19 bp, Homo sapiens
  siRNA target sequence for TRAF6 (NM_004620.2,463-481).
ctgcttgatggcattacga

SEQ ID NO: 66988 - DNA, 19 bp, Homo sapiens
  siRNA target sequence for TRAF6 (NM_004620.2,495-513).
cgccatgcggccataggtt

SEQ ID NO: 66989 - DNA, 19 bp, Homo sapiens
  siRNA target sequence for TRAF6 (NM_004620.2,516-534).
gcaaagcctgcatcataaa

SEQ ID NO: 66990 - DNA, 19 bp, Homo sapiens
  siRNA target sequence for TRAF6 (NM_004620.2,561-579).
gtccagttgacaatgaaat

SEQ ID NO: 66991 - DNA, 19 bp, Homo sapiens
  siRNA target sequence for TRAF6 (NM_004620.2,581-599).
ctgctggaaaatcaactat

SEQ ID NO: 66992 - DNA, 19 bp, Homo sapiens
  siRNA target sequence for TRAF6 (NM_004620.2,593-611).
caactatttccagacaatt

SEQ ID NO: 66993 - DNA, 19 bp, Homo sapiens
  siRNA target sequence for TRAF6 (NM_004620.2,614-632).
gcaaaacgtgagattcttt

SEQ ID NO: 66994 - DNA, 19 bp, Homo sapiens
  siRNA target sequence for TRAF6 (NM_004620.2,684-702).
gacatcttgaggatcatca

SEQ ID NO: 66995 - DNA, 19 bp, Homo sapiens
  siRNA target sequence for TRAF6 (NM_004620.2,694-712).
ggatcatcaagcacattgt

SEQ ID NO: 66996 - DNA, 19 bp, Homo sapiens
  siRNA target sequence for TRAF6 (NM_004620.2,742-760).
ccagcgtcccttccaaaaa

SEQ ID NO: 66997 - DNA, 19 bp, Homo sapiens
  siRNA target sequence for TRAF6 (NM_004620.2,743-761).
cagcgtcccttccaaaaat

SEQ ID NO: 66998 - DNA, 19 bp, Homo sapiens
  siRNA target sequence for TRAF6 (NM_004620.2,889-907).
ctgtgaatactgcaatact

SEQ ID NO: 66999 - DNA, 19 bp, Homo sapiens
  siRNA target sequence for TRAF6 (NM_004620.2,925-943).
gatgcctaatcattatgat

SEQ ID NO: 67000 - DNA, 19 bp, Homo sapiens
  siRNA target sequence for TRAF6 (NM_004620.2,928-946).
gcctaatcattatgatcta

SEQ ID NO: 67001 - DNA, 19 bp, Homo sapiens
  siRNA target sequence for TRAF6 (NM_004620.2,930-948).
ctaatcattatgatctaga

SEQ ID NO: 67002 - DNA, 19 bp, Homo sapiens
  siRNA target sequence for TRAF6 (NM_004620.2,952-970).
ccctacagccccaattcca

SEQ ID NO: 67003 - DNA, 19 bp, Homo sapiens
  siRNA target sequence for TRAF6 (NM_004620.2,953-971).
cctacagccccaattccat

SEQ ID NO: 67004 - DNA, 19 bp, Homo sapiens
  siRNA target sequence for TRAF6 (NM_004620.2,968-986).
ccatgcacattcagtactt

SEQ ID NO: 67005 - DNA, 19 bp, Homo sapiens
  siRNA target sequence for TRAF6 (NM_004620.2,969-987).
catgcacattcagtacttt

SEQ ID NO: 67006 - DNA, 19 bp, Homo sapiens
  siRNA target sequence for TRAF6 (NM_004620.2,973-991).
cacattcagtacttttggt

SEQ ID NO: 67007 - DNA, 19 bp, Homo sapiens
  siRNA target sequence for TRAF6 (NM_004620.2,1044-1062).
cccagtcacacatgagaat

SEQ ID NO: 67008 - DNA, 19 bp, Homo sapiens
  siRNA target sequence for TRAF6 (NM_004620.2,1066-1084).
ggcccaggctgttcatagt

SEQ ID NO: 67009 - DNA, 19 bp, Homo sapiens
  siRNA target sequence for TRAF6 (NM_004620.2,1067-1085).
gcccaggctgttcatagtt

SEQ ID NO: 67010 - DNA, 19 bp, Homo sapiens
  siRNA target sequence for TRAF6 (NM_004620.2,1097-1115).
cccgactctgggtatatct

SEQ ID NO: 67011 - DNA, 19 bp, Homo sapiens
  siRNA target sequence for TRAF6 (NM_004620.2,1099-1117).
cgactctgggtatatctca

SEQ ID NO: 67012 - DNA, 19 bp, Homo sapiens
  siRNA target sequence for TRAF6 (NM_004620.2,1124-1142).
cggaatttccaggaaacta

SEQ ID NO: 67013 - DNA, 19 bp, Homo sapiens
  siRNA target sequence for TRAF6 (NM_004620.2,1156-1174).
gggtcgccttgtaagacaa

SEQ ID NO: 67014 - DNA, 19 bp, Homo sapiens
  siRNA target sequence for TRAF6 (NM_004620.2,1186-1204).
ccgggagctgactgctaaa

SEQ ID NO: 67015 - DNA, 19 bp, Homo sapiens
  siRNA target sequence for TRAF6 (NM_004620.2,1187-1205).
cgggagctgactgctaaaa

SEQ ID NO: 67016 - DNA, 19 bp, Homo sapiens
  siRNA target sequence for TRAF6 (NM_004620.2,1188-1206).
gggagctgactgctaaaat

SEQ ID NO: 67017 - DNA, 19 bp, Homo sapiens
  siRNA target sequence for TRAF6 (NM_004620.2,1207-1225).
ggaaactcagagtatgtat

SEQ ID NO: 67018 - DNA, 19 bp, Homo sapiens
  siRNA target sequence for TRAF6 (NM_004620.2,1226-1244).
gtaagtgagctcaaacgaa

SEQ ID NO: 67019 - DNA, 19 bp, Homo sapiens
  siRNA target sequence for TRAF6 (NM_004620.2,1235-1253).
ctcaaacgaaccattcgaa

SEQ ID NO: 67020 - DNA, 19 bp, Homo sapiens
  siRNA target sequence for TRAF6 (NM_004620.2,1264-1282).
caaagttgctgaaatcgaa

SEQ ID NO: 67021 - DNA, 19 bp, Homo sapiens
  siRNA target sequence for TRAF6 (NM_004620.2,1288-1306).
gcagtgcaatggaatttat

SEQ ID NO: 67022 - DNA, 19 bp, Homo sapiens
  siRNA target sequence for TRAF6 (NM_004620.2,1319-1337).
ggcaactttggaatgcatt

SEQ ID NO: 67023 - DNA, 19 bp, Homo sapiens
  siRNA target sequence for TRAF6 (NM_004620.2,1354-1372).
ggagaaacctgttgtgatt

SEQ ID NO: 67024 - DNA, 19 bp, Homo sapiens
  siRNA target sequence for TRAF6 (NM_004620.2,1395-1413).
gcaaacccgggtacaaact

SEQ ID NO: 67025 - DNA, 19 bp, Homo sapiens
  siRNA target sequence for TRAF6 (NM_004620.2,1420-1438).
gcgcttgcaccttcagtta

SEQ ID NO: 67026 - DNA, 19 bp, Homo sapiens
  siRNA target sequence for TRAF6 (NM_004620.2,1448-1466).
cagcgctgtgcaaactata

SEQ ID NO: 67027 - DNA, 19 bp, Homo sapiens
  siRNA target sequence for TRAF6 (NM_004620.2,1450-1468).
gcgctgtgcaaactatata

SEQ ID NO: 67028 - DNA, 19 bp, Homo sapiens
  siRNA target sequence for TRAF6 (NM_004620.2,1451-1469).
cgctgtgcaaactatatat

SEQ ID NO: 67029 - DNA, 19 bp, Homo sapiens
  siRNA target sequence for TRAF6 (NM_004620.2,1529-1547).
ggtacaatacgccttacaa

SEQ ID NO: 67030 - DNA, 19 bp, Homo sapiens
  siRNA target sequence for TRAF6 (NM_004620.2,1530-1548).
gtacaatacgccttacaat

SEQ ID NO: 67031 - DNA, 19 bp, Homo sapiens
  siRNA target sequence for TRAF6 (NM_004620.2,1533-1551).
caatacgccttacaattct

SEQ ID NO: 67032 - DNA, 19 bp, Homo sapiens
  siRNA target sequence for TRAF6 (NM_004620.2,1582-1600).
ccacgaagagataatggat

SEQ ID NO: 67033 - DNA, 19 bp, Homo sapiens
  siRNA target sequence for TRAF6 (NM_004620.2,1639-1657).
cccacggaacccaaaaggt

SEQ ID NO: 67034 - DNA, 19 bp, Homo sapiens
  siRNA target sequence for TRAF6 (NM_004620.2,1640-1658).
ccacggaacccaaaaggtt

SEQ ID NO: 67035 - DNA, 19 bp, Homo sapiens
  siRNA target sequence for TRAF6 (NM_004620.2,1641-1659).
cacggaacccaaaaggttt

SEQ ID NO: 67036 - DNA, 19 bp, Homo sapiens
  siRNA target sequence for TRF4-2 (NM_022447.1,376-394).
gcttgcatccccaatacaa

SEQ ID NO: 67037 - DNA, 19 bp, Homo sapiens
  siRNA target sequence for TRF4-2 (NM_022447.1,381-399).
catccccaatacaaactat

SEQ ID NO: 67038 - DNA, 19 bp, Homo sapiens
  siRNA target sequence for TRF4-2 (NM_022447.1,396-414).
ctatggtgttctcttaata

SEQ ID NO: 67039 - DNA, 19 bp, Homo sapiens
  siRNA target sequence for TRF4-2 (NM_022447.1,433-451).
ggacgacacttcaattatt

SEQ ID NO: 67040 - DNA, 19 bp, Homo sapiens
  siRNA target sequence for TRF4-2 (NM_022447.1,434-452).
gacgacacttcaattattt

SEQ ID NO: 67041 - DNA, 19 bp, Homo sapiens
  siRNA target sequence for TRF4-2 (NM_022447.1,436-454).
cgacacttcaattatttaa

SEQ ID NO: 67042 - DNA, 19 bp, Homo sapiens
  siRNA target sequence for TRF4-2 (NM_022447.1,458-476).
ctggcatccggataaagga

SEQ ID NO: 67043 - DNA, 19 bp, Homo sapiens
  siRNA target sequence for TRF4-2 (NM_022447.1,577-595).
gatgttggaaggagttcat

SEQ ID NO: 67044 - DNA, 19 bp, Homo sapiens
  siRNA target sequence for TRF4-2 (NM_022447.1,625-643).
gattatgcctacgttgttt

SEQ ID NO: 67045 - DNA, 19 bp, Homo sapiens
  siRNA target sequence for TRF4-2 (NM_022447.1,652-670).
gctgtatcaccaatagcaa

SEQ ID NO: 67046 - DNA, 19 bp, Homo sapiens
  siRNA target sequence for TRF4-2 (NM_022447.1,672-690).
gtactatcccaacaatgaa

SEQ ID NO: 67047 - DNA, 19 bp, Homo sapiens
  siRNA target sequence for TRIM56 (NM_030961.1,436-454).
ggtgtggcctccttcaaga

SEQ ID NO: 67048 - DNA, 19 bp, Homo sapiens
  siRNA target sequence for TRIM56 (NM_030961.1,446-464).
ccttcaagaccaacttctt

SEQ ID NO: 67049 - DNA, 19 bp, Homo sapiens
  siRNA target sequence for TRIM56 (NM_030961.1,889-907).
ctggccggtgtggacaata

SEQ ID NO: 67050 - DNA, 19 bp, Homo sapiens
  siRNA target sequence for TRIM56 (NM_030961.1,893-911).
ccggtgtggacaataacct

SEQ ID NO: 67051 - DNA, 19 bp, Homo sapiens
  siRNA target sequence for TRIM56 (NM_030961.1,1298-1316).
ctgggctcctggacaagaa

SEQ ID NO: 67052 - DNA, 19 bp, Homo sapiens
  siRNA target sequence for TRIM56 (NM_030961.1,1300-1318).
gggctcctggacaagaact

SEQ ID NO: 67053 - DNA, 19 bp, Homo sapiens
  siRNA target sequence for TRIM56 (NM_030961.1,1591-1609).
ggtggcagacccaacaaga

SEQ ID NO: 67054 - DNA, 19 bp, Homo sapiens
  siRNA target sequence for TRIM56 (NM_030961.1,1592-1610).
gtggcagacccaacaagaa

SEQ ID NO: 67055 - DNA, 19 bp, Homo sapiens
  siRNA target sequence for TRIM56 (NM_030961.1,1624-1642).
ggcaggctcaagtcaattt

SEQ ID NO: 67056 - DNA, 19 bp, Homo sapiens
  siRNA target sequence for TRIM56 (NM_030961.1,1835-1853).
ccctcaacggcgactacaa

SEQ ID NO: 67057 - DNA, 19 bp, Homo sapiens
  siRNA target sequence for TRIM56 (NM_030961.1,1928-1946).
ctagcgcacggctctatct

SEQ ID NO: 67058 - DNA, 19 bp, Homo sapiens
  siRNA target sequence for TRIM56 (NM_030961.1,1931-1949).
gcgcacggctctatctcat

SEQ ID NO: 67059 - DNA, 19 bp, Homo sapiens
  siRNA target sequence for TRIM56 (NM_030961.1,1934-1952).
cacggctctatctcatcaa

SEQ ID NO: 67060 - DNA, 19 bp, Homo sapiens
  siRNA target sequence for TRIM56 (NM_030961.1,2064-2082).
ggaggtgtacaatatggaa

SEQ ID NO: 67061 - DNA, 19 bp, Homo sapiens
  siRNA target sequence for TRIM56 (NM_030961.1,2088-2106).
cctggccacccggttcatt

SEQ ID NO: 67062 - DNA, 19 bp, Homo sapiens
  siRNA target sequence for TRIM56 (NM_030961.1,2159-2177).
gcccccaggggcatttcgt

SEQ ID NO: 67063 - DNA, 19 bp, Homo sapiens
  siRNA target sequence for TRIM56 (NM_030961.1,2184-2202).
ggactggcagcagaatagt

SEQ ID NO: 67064 - DNA, 19 bp, Homo sapiens
  siRNA target sequence for TRIM56 (NM_030961.1,2196-2214).
gaatagtgtggtaatctgt

SEQ ID NO: 67065 - DNA, 19 bp, Homo sapiens
  siRNA target sequence for TRIM56 (NM_030961.1,2279-2297).
ccgtgtctgtggataagaa

SEQ ID NO: 67066 - DNA, 19 bp, Homo sapiens
  siRNA target sequence for TRIM56 (NM_030961.1,2315-2333).
cccttcgagaagtcaacaa

SEQ ID NO: 67067 - DNA, 19 bp, Homo sapiens
  siRNA target sequence for TRIM56 (NM_030961.1,2457-2475).
cgggaccatccacatcttt

SEQ ID NO: 67068 - DNA, 19 bp, Homo sapiens
  siRNA target sequence for U1SNRNPBP (NM_007020.2,673-691).
catcgccaaggagtatgat

SEQ ID NO: 67069 - DNA, 19 bp, Homo sapiens
  siRNA target sequence for U1SNRNPBP (NM_007020.2,754-772).
ggcaatgctggcacgatat

SEQ ID NO: 67070 - DNA, 19 bp, Homo sapiens
  siRNA target sequence for U1SNRNPBP (NM_007020.2,756-774).
caatgctggcacgatatgt

SEQ ID NO: 67071 - DNA, 19 bp, Homo sapiens
  siRNA target sequence for U1SNRNPBP (NM_007020.2,958-976).
ggagcgtgccgtgatcaaa

SEQ ID NO: 67072 - DNA, 19 bp, Homo sapiens
  siRNA target sequence for U1SNRNPBP (NM_007020.2,1036-1054).
gctggaaaggactctcaaa

SEQ ID NO: 67073 - DNA, 19 bp, Homo sapiens
  siRNA target sequence for U1SNRNPBP (NM_007020.2,1127-1145).
cgggaccggccttttcgaa

SEQ ID NO: 67074 - DNA, 19 bp, Homo sapiens
  siRNA target sequence for U1SNRNPBP (NM_007020.2,1129-1147).
ggaccggccttttcgaaaa

SEQ ID NO: 67075 - DNA, 19 bp, Homo sapiens
  siRNA target sequence for U1SNRNPBP (NM_007020.2,1132-1150).
ccggccttttcgaaaacct

SEQ ID NO: 67076 - DNA, 19 bp, Homo sapiens
  siRNA target sequence for U1SNRNPBP (NM_007020.2,1166-1184).
gttaaaaacgacctctata

SEQ ID NO: 67077 - DNA, 19 bp, Homo sapiens
  siRNA target sequence for U1SNRNPBP (NM_007020.2,1215-1233).
ctcgatcccgagaaagaca

SEQ ID NO: 67078 - DNA, 19 bp, Homo sapiens
  siRNA target sequence for U1SNRNPBP (NM_180699.1,766-784).
ccagctaacatgaacgatt

SEQ ID NO: 67079 - DNA, 19 bp, Homo sapiens
  siRNA target sequence for U2AF1L3 (NM_144987.1,27-45).
gaatatttagcttcgatat

SEQ ID NO: 67080 - DNA, 19 bp, Homo sapiens
  siRNA target sequence for U2AF1L3 (NM_144987.1,62-80).
caaggttaactgctctttt

SEQ ID NO: 67081 - DNA, 19 bp, Homo sapiens
  siRNA target sequence for U2AF1L3 (NM_144987.1,115-133).
ggtgctcccggcttcacaa

SEQ ID NO: 67082 - DNA, 19 bp, Homo sapiens
  siRNA target sequence for U2AF1L3 (NM_144987.1,129-147).
cacaacaagccgacattca

SEQ ID NO: 67083 - DNA, 19 bp, Homo sapiens
  siRNA target sequence for U2AF1L3 (NM_144987.1,235-253).
gcaacgtctatgtcaagtt

SEQ ID NO: 67084 - DNA, 19 bp, Homo sapiens
  siRNA target sequence for U2AF1L3 (NM_144987.1,280-298).
ccgtggctgaactcagtaa

SEQ ID NO: 67085 - DNA, 19 bp, Homo sapiens
  siRNA target sequence for UNKL (NM_024023.1,464-482).
cgggcctcctaggtgattt

SEQ ID NO: 67086 - DNA, 19 bp, Homo sapiens
  siRNA target sequence for UNKL (NM_024023.1,495-513).
ctcgcagtctcgagaatgt

SEQ ID NO: 67087 - DNA, 19 bp, Homo sapiens
  siRNA target sequence for UNKL (NM_024023.1,497-515).
cgcagtctcgagaatgtgt

SEQ ID NO: 67088 - DNA, 19 bp, Homo sapiens
  siRNA target sequence for UNKL (NM_024023.1,498-516).
gcagtctcgagaatgtgtt

SEQ ID NO: 67089 - DNA, 19 bp, Homo sapiens
  siRNA target sequence for UNKL (NM_024023.1,499-517).
cagtctcgagaatgtgtta

SEQ ID NO: 67090 - DNA, 19 bp, Homo sapiens
  siRNA target sequence for UNKL (NM_024023.1,849-867).
ccggtggcaagcattgctt

SEQ ID NO: 67091 - DNA, 19 bp, Homo sapiens
  siRNA target sequence for UNKL (NM_024023.1,885-903).
gcaccgtgtggcccatttt

SEQ ID NO: 67092 - DNA, 19 bp, Homo sapiens
  siRNA target sequence for UNKL (NM_024023.1,1108-1126).
ggcgacggctgccagtatt

SEQ ID NO: 67093 - DNA, 19 bp, Homo sapiens
  siRNA target sequence for UNKL (NM_024023.1,1270-1288).
ggccacagccgcaccataa

SEQ ID NO: 67094 - DNA, 19 bp, Homo sapiens
  siRNA target sequence for UNKL (NM_024023.1,1271-1289).
gccacagccgcaccataaa

SEQ ID NO: 67095 - DNA, 19 bp, Homo sapiens
  siRNA target sequence for UNKL (NM_024023.1,1272-1290).
ccacagccgcaccataaat

SEQ ID NO: 67096 - DNA, 19 bp, Homo sapiens
  siRNA target sequence for UNKL (NM_024023.1,1275-1293).
cagccgcaccataaatcct

SEQ ID NO: 67097 - DNA, 19 bp, Homo sapiens
  siRNA target sequence for UNKL (NM_024023.1,1403-1421).
gcgtgttccctatctacaa

SEQ ID NO: 67098 - DNA, 19 bp, Homo sapiens
  siRNA target sequence for UNKL (NM_024023.1,1404-1422).
cgtgttccctatctacaaa

SEQ ID NO: 67099 - DNA, 19 bp, Homo sapiens
  siRNA target sequence for UNKL (NM_024023.1,1653-1671).
gcgcgctcacggtgtttat

SEQ ID NO: 67100 - DNA, 19 bp, Homo sapiens
  siRNA target sequence for UNKL (NM_024023.1,1664-1682).
gtgtttatgtctttgaaca

SEQ ID NO: 67101 - DNA, 19 bp, Homo sapiens
  siRNA target sequence for UNKL (NM_024023.1,2064-2082).
ggccagacccgcaatgact

SEQ ID NO: 67102 - DNA, 19 bp, Homo sapiens
  siRNA target sequence for USP6 (NM_004505.1,1705-1723).
ggtagagaatgcagatagt

SEQ ID NO: 67103 - DNA, 19 bp, Homo sapiens
  siRNA target sequence for USP6 (NM_004505.1,1735-1753).
ggagcggaaggacatactt

SEQ ID NO: 67104 - DNA, 19 bp, Homo sapiens
  siRNA target sequence for USP6 (NM_004505.1,1736-1754).
gagcggaaggacatactta

SEQ ID NO: 67105 - DNA, 19 bp, Homo sapiens
  siRNA target sequence for USP6 (NM_004505.1,1739-1757).
cggaaggacatacttatga

SEQ ID NO: 67106 - DNA, 19 bp, Homo sapiens
  siRNA target sequence for USP6 (NM_004505.1,1803-1821).
ctgagcccgttggaatcaa

SEQ ID NO: 67107 - DNA, 19 bp, Homo sapiens
  siRNA target sequence for USP6 (NM_004505.1,1805-1823).
gagcccgttggaatcaaca

SEQ ID NO: 67108 - DNA, 19 bp, Homo sapiens
  siRNA target sequence for USP6 (NM_004505.1,1960-1978).
gcacagtagcaaactcata

SEQ ID NO: 67109 - DNA, 19 bp, Homo sapiens
  siRNA target sequence for USP6 (NM_004505.1,1963-1981).
cagtagcaaactcatagat

SEQ ID NO: 67110 - DNA, 19 bp, Homo sapiens
  siRNA target sequence for USP6 (NM_004505.1,2595-2613).
ccagcattgctcttaaggt

SEQ ID NO: 67111 - DNA, 19 bp, Homo sapiens
  siRNA target sequence for USP6 (NM_004505.1,2657-2675).
gcacgtctgcggaaccaat

SEQ ID NO: 67112 - DNA, 19 bp, Homo sapiens
  siRNA target sequence for USP6 (NM_004505.1,2658-2676).
cacgtctgcggaaccaatt

SEQ ID NO: 67113 - DNA, 19 bp, Homo sapiens
  siRNA target sequence for USP6 (NM_004505.1,2911-2929).
gccatgggcatctcgtttt

SEQ ID NO: 67114 - DNA, 19 bp, Homo sapiens
  siRNA target sequence for USP6 (NM_004505.1,3100-3118).
cccccattatgattttgaa

SEQ ID NO: 67115 - DNA, 19 bp, Homo sapiens
  siRNA target sequence for USP6 (NM_004505.1,3186-3204).
gcggagaggttcacaacaa

SEQ ID NO: 67116 - DNA, 19 bp, Homo sapiens
  siRNA target sequence for VIK (NM_024061.2,558-576).
ggtctcactgggcatactt

SEQ ID NO: 67117 - DNA, 19 bp, Homo sapiens
  siRNA target sequence for VIK (NM_024061.2,590-608).
ccacccggattcatagtgt

SEQ ID NO: 67118 - DNA, 19 bp, Homo sapiens
  siRNA target sequence for VIK (NM_024061.2,594-612).
ccggattcatagtgtgaat

SEQ ID NO: 67119 - DNA, 19 bp, Homo sapiens
  siRNA target sequence for VIK (NM_024061.2,679-697).
gcaggaatctccaagagat

SEQ ID NO: 67120 - DNA, 19 bp, Homo sapiens
  siRNA target sequence for VIK (NM_024061.2,690-708).
caagagatggcccaagtat

SEQ ID NO: 67121 - DNA, 19 bp, Homo sapiens
  siRNA target sequence for VIK (NM_024061.2,711-729).
gcttcccatcgatattgct

SEQ ID NO: 67122 - DNA, 19 bp, Homo sapiens
  siRNA target sequence for VIK (NM_138494.1,415-433).
gtgcattcatacaaagtga

SEQ ID NO: 67123 - DNA, 19 bp, Homo sapiens
  siRNA target sequence for VIK (NM_138494.1,432-450).
gagagtaggaagactcaaa

SEQ ID NO: 67124 - DNA, 19 bp, Homo sapiens
  siRNA target sequence for VIK (NM_138494.1,440-458).
gaagactcaaacacgatat

SEQ ID NO: 67125 - DNA, 19 bp, Homo sapiens
  siRNA target sequence for VIK (NM_138494.1,470-488).
ctgagactagagaagtgta

SEQ ID NO: 67126 - DNA, 19 bp, Homo sapiens
  siRNA target sequence for VIK (NM_138494.1,597-615).
gaagaacaatgaatgtcat

SEQ ID NO: 67127 - DNA, 19 bp, Homo sapiens
  siRNA target sequence for VIK (NM_138494.1,613-631).
catgaacccgaaaaaagct

SEQ ID NO: 67128 - DNA, 19 bp, Homo sapiens
  siRNA target sequence for VIK (NM_138494.1,635-653).
gtctggactctactattga

SEQ ID NO: 67129 - DNA, 19 bp, Homo sapiens
  siRNA target sequence for VIK (NM_138494.1,681-699).
gaataccgatgacaatgat

SEQ ID NO: 67130 - DNA, 19 bp, Homo sapiens
  siRNA target sequence for VIK (NM_138494.1,686-704).
ccgatgacaatgataagta

SEQ ID NO: 67131 - DNA, 19 bp, Homo sapiens
  siRNA target sequence for VIK (NM_138494.1,731-749).
cctctggtaaacatgaaca

SEQ ID NO: 67132 - DNA, 19 bp, Homo sapiens
  siRNA target sequence for VIK (NM_138494.1,801-819).
ggatctctcccaccttaat

SEQ ID NO: 67133 - DNA, 19 bp, Homo sapiens
  siRNA target sequence for VIK (NM_138494.1,805-823).
ctctcccaccttaataaat

SEQ ID NO: 67134 - DNA, 19 bp, Homo sapiens
  siRNA target sequence for VIK (NM_138494.1,825-843).
ggagagcatccctaacact

SEQ ID NO: 67135 - DNA, 19 bp, Homo sapiens
  siRNA target sequence for VIK (NM_138494.1,1073-1091).
gtccaagctcaggcataat

SEQ ID NO: 67136 - DNA, 19 bp, Homo sapiens
  siRNA target sequence for VIK (NM_138494.1,1076-1094).
caagctcaggcataattca

SEQ ID NO: 67137 - DNA, 19 bp, Homo sapiens
  siRNA target sequence for VIK (NM_138494.1,1160-1178).
gtagtgtccaccttactca

SEQ ID NO: 67138 - DNA, 19 bp, Homo sapiens
  siRNA target sequence for VIK (NM_138494.1,1244-1262).
cttcatacctacttgaaca

SEQ ID NO: 67139 - DNA, 19 bp, Homo sapiens
  siRNA target sequence for VIK (NM_138494.1,1269-1287).
ggtccatcatgaagagaaa

SEQ ID NO: 67140 - DNA, 19 bp, Homo sapiens
  siRNA target sequence for VIK (NM_138494.1,1333-1351).
ggaattcatttcagagaaa

SEQ ID NO: 67141 - DNA, 19 bp, Homo sapiens
  siRNA target sequence for VIK (NM_138494.1,1386-1404).
cagattgaattcacatctt

SEQ ID NO: 67142 - DNA, 19 bp, Homo sapiens
  siRNA target sequence for VIK (NM_138494.1,1507-1525).
cataggaaagagaaatcgt

SEQ ID NO: 67143 - DNA, 19 bp, Homo sapiens
  siRNA target sequence for VIK (NM_138494.1,1537-1555).
gagtatgagggcagtttca

SEQ ID NO: 67144 - DNA, 19 bp, Homo sapiens
  siRNA target sequence for VIK (NM_138494.1,1539-1557).
gtatgagggcagtttcagt

SEQ ID NO: 67145 - DNA, 19 bp, Homo sapiens
  siRNA target sequence for VIK (NM_138494.1,1543-1561).
gagggcagtttcagtcata

SEQ ID NO: 67146 - DNA, 19 bp, Homo sapiens
  siRNA target sequence for VIK (NM_138494.1,1606-1624).
gcctttgattgtgatgtat

SEQ ID NO: 67147 - DNA, 19 bp, Homo sapiens
  siRNA target sequence for VIK (NM_138494.1,1640-1658).
gtcagagagcacatctagt

SEQ ID NO: 67148 - DNA, 19 bp, Homo sapiens
  siRNA target sequence for VIK (NM_138494.1,1646-1664).
gagcacatctagttcaaca

SEQ ID NO: 67149 - DNA, 19 bp, Homo sapiens
  siRNA target sequence for ZC3HAV1 (NM_020119.3,602-620).
gtctgccgtcgcaagtact

SEQ ID NO: 67150 - DNA, 19 bp, Homo sapiens
  siRNA target sequence for ZC3HAV1 (NM_020119.3,684-702).
cgcagtccgagcggaattt

SEQ ID NO: 67151 - DNA, 19 bp, Homo sapiens
  siRNA target sequence for ZC3HAV1 (NM_020119.3,685-703).
gcagtccgagcggaattta

SEQ ID NO: 67152 - DNA, 19 bp, Homo sapiens
  siRNA target sequence for ZC3HAV1 (NM_020119.3,686-704).
cagtccgagcggaatttat

SEQ ID NO: 67153 - DNA, 19 bp, Homo sapiens
  siRNA target sequence for ZC3HAV1 (NM_020119.3,690-708).
ccgagcggaatttatgcaa

SEQ ID NO: 67154 - DNA, 19 bp, Homo sapiens
  siRNA target sequence for ZC3HAV1 (NM_020119.3,692-710).
gagcggaatttatgcaaat

SEQ ID NO: 67155 - DNA, 19 bp, Homo sapiens
  siRNA target sequence for ZC3HAV1 (NM_020119.3,695-713).
cggaatttatgcaaatatt

SEQ ID NO: 67156 - DNA, 19 bp, Homo sapiens
  siRNA target sequence for ZC3HAV1 (NM_020119.3,775-793).
gaacaaagaggaattagca

SEQ ID NO: 67157 - DNA, 19 bp, Homo sapiens
  siRNA target sequence for ZC3HAV1 (NM_020119.3,796-814).
gctcctcctccaaagtgat

SEQ ID NO: 67158 - DNA, 19 bp, Homo sapiens
  siRNA target sequence for ZC3HAV1 (NM_020119.3,803-821).
ctccaaagtgatccttttt

SEQ ID NO: 67159 - DNA, 19 bp, Homo sapiens
  siRNA target sequence for ZC3HAV1 (NM_020119.3,826-844).
gcccgagatatgcaaaagt

SEQ ID NO: 67160 - DNA, 19 bp, Homo sapiens
  siRNA target sequence for ZC3HAV1 (NM_020119.3,827-845).
cccgagatatgcaaaagtt

SEQ ID NO: 67161 - DNA, 19 bp, Homo sapiens
  siRNA target sequence for ZC3HAV1 (NM_020119.3,828-846).
ccgagatatgcaaaagtta

SEQ ID NO: 67162 - DNA, 19 bp, Homo sapiens
  siRNA target sequence for ZC3HAV1 (NM_020119.3,829-847).
cgagatatgcaaaagttat

SEQ ID NO: 67163 - DNA, 19 bp, Homo sapiens
  siRNA target sequence for ZC3HAV1 (NM_020119.3,854-872).
gagggtcggcagcagattt

SEQ ID NO: 67164 - DNA, 19 bp, Homo sapiens
  siRNA target sequence for ZC3HAV1 (NM_020119.3,922-940).
ccgagggaactgtcgtttt

SEQ ID NO: 67165 - DNA, 19 bp, Homo sapiens
  siRNA target sequence for ZC3HAV1 (NM_020119.3,948-966).
gcctccggtcccataacct

SEQ ID NO: 67166 - DNA, 19 bp, Homo sapiens
  siRNA target sequence for ZC3HAV1 (NM_020119.3,1014-1032).
ccgacgtggtccagaacat

SEQ ID NO: 67167 - DNA, 19 bp, Homo sapiens
  siRNA target sequence for ZC3HAV1 (NM_020119.3,1050-1068).
gcaagcacatgcagaagaa

SEQ ID NO: 67168 - DNA, 19 bp, Homo sapiens
  siRNA target sequence for ZC3HAV1 (NM_020119.3,1051-1069).
caagcacatgcagaagaat

SEQ ID NO: 67169 - DNA, 19 bp, Homo sapiens
  siRNA target sequence for ZC3HAV1 (NM_020119.3,1092-1110).
cttcacatcgtagaaacat

SEQ ID NO: 67170 - DNA, 19 bp, Homo sapiens
  siRNA target sequence for ZC3HAV1 (NM_020119.3,1206-1224).
cacctagtccagatcagat

SEQ ID NO: 67171 - DNA, 19 bp, Homo sapiens
  siRNA target sequence for ZC3HAV1 (NM_020119.3,1321-1339).
ctcgtccaaggctactgat

SEQ ID NO: 67172 - DNA, 19 bp, Homo sapiens
  siRNA target sequence for ZC3HAV1 (NM_020119.3,1324-1342).
gtccaaggctactgatctt

SEQ ID NO: 67173 - DNA, 19 bp, Homo sapiens
  siRNA target sequence for ZC3HAV1 (NM_020119.3,1363-1381).
gacaagccagaggttttta

SEQ ID NO: 67174 - DNA, 19 bp, Homo sapiens
  siRNA target sequence for ZC3HAV1 (NM_020119.3,1399-1417).
ggacctcttgcatggaaat

SEQ ID NO: 67175 - DNA, 19 bp, Homo sapiens
  siRNA target sequence for ZC3HAV1 (NM_020119.3,1402-1420).
cctcttgcatggaaatcca

SEQ ID NO: 67176 - DNA, 19 bp, Homo sapiens
  siRNA target sequence for ZC3HAV1 (NM_020119.3,1621-1639).
gatcatcaatggcaaaagt

SEQ ID NO: 67177 - DNA, 19 bp, Homo sapiens
  siRNA target sequence for ZC3HAV1 (NM_020119.3,1659-1677).
ctggccctctttttaataa

SEQ ID NO: 67178 - DNA, 19 bp, Homo sapiens
  siRNA target sequence for ZC3HAV1 (NM_020119.3,1661-1679).
ggccctctttttaataata

SEQ ID NO: 67179 - DNA, 19 bp, Homo sapiens
  siRNA target sequence for ZC3HAV1 (NM_020119.3,1685-1703).
gatggagtggccacagata

SEQ ID NO: 67180 - DNA, 19 bp, Homo sapiens
  siRNA target sequence for ZC3HAV1 (NM_020119.3,1688-1706).
ggagtggccacagatataa

SEQ ID NO: 67181 - DNA, 19 bp, Homo sapiens
  siRNA target sequence for ZC3HAV1 (NM_020119.3,1741-1759).
cagcggtcacagagaaata

SEQ ID NO: 67182 - DNA, 19 bp, Homo sapiens
  siRNA target sequence for ZC3HAV1 (NM_020119.3,1744-1762).
cggtcacagagaaatatca

SEQ ID NO: 67183 - DNA, 19 bp, Homo sapiens
  siRNA target sequence for ZC3HAV1 (NM_020119.3,1838-1856).
ccaagagtagcacttgtta

SEQ ID NO: 67184 - DNA, 19 bp, Homo sapiens
  siRNA target sequence for ZC3HAV1 (NM_020119.3,1842-1860).
gagtagcacttgttaacga

SEQ ID NO: 67185 - DNA, 19 bp, Homo sapiens
  siRNA target sequence for ZC3HAV1 (NM_020119.3,1844-1862).
gtagcacttgttaacgatt

SEQ ID NO: 67186 - DNA, 19 bp, Homo sapiens
  siRNA target sequence for ZC3HAV1 (NM_020119.3,1847-1865).
gcacttgttaacgattctt

SEQ ID NO: 67187 - DNA, 19 bp, Homo sapiens
  siRNA target sequence for ZC3HAV1 (NM_020119.3,1848-1866).
cacttgttaacgattcttt

SEQ ID NO: 67188 - DNA, 19 bp, Homo sapiens
  siRNA target sequence for ZC3HAV1 (NM_020119.3,1874-1892).
gtcacaagtaccacatctt

SEQ ID NO: 67189 - DNA, 19 bp, Homo sapiens
  siRNA target sequence for ZC3HAV1 (NM_020119.3,1893-1911).
ctagggtggatgatcatga

SEQ ID NO: 67190 - DNA, 19 bp, Homo sapiens
  siRNA target sequence for ZC3HAV1 (NM_020119.3,1926-1944).
gtcttgaccatctgtgtaa

SEQ ID NO: 67191 - DNA, 19 bp, Homo sapiens
  siRNA target sequence for ZC3HAV1 (NM_020119.3,1945-1963).
gggttgtccgcttaatggt

SEQ ID NO: 67192 - DNA, 19 bp, Homo sapiens
  siRNA target sequence for ZC3HAV1 (NM_020119.3,1946-1964).
ggttgtccgcttaatggta

SEQ ID NO: 67193 - DNA, 19 bp, Homo sapiens
  siRNA target sequence for ZC3HAV1 (NM_020119.3,1996-2014).
ccggtggcagatgcttatt

SEQ ID NO: 67194 - DNA, 19 bp, Homo sapiens
  siRNA target sequence for ZC3HAV1 (NM_020119.3,2003-2021).
cagatgcttattggtaaaa

SEQ ID NO: 67195 - DNA, 19 bp, Homo sapiens
  siRNA target sequence for ZC3HAV1 (NM_020119.3,2096-2114).
ggaagttatacaatcaatt

SEQ ID NO: 67196 - DNA, 19 bp, Homo sapiens
  siRNA target sequence for ZC3HAV1 (NM_020119.3,2110-2128).
caattttcgggtaatgagt

SEQ ID NO: 67197 - DNA, 19 bp, Homo sapiens
  siRNA target sequence for ZC3HAV1 (NM_020119.3,2117-2135).
cgggtaatgagttgtgatt

SEQ ID NO: 67198 - DNA, 19 bp, Homo sapiens
  siRNA target sequence for ZC3HAV1 (NM_020119.3,2175-2193).
ccaagccagccaattctgt

SEQ ID NO: 67199 - DNA, 19 bp, Homo sapiens
  siRNA target sequence for ZC3HAV1 (NM_020119.3,2192-2210).
gtcttcaccaccaaatgga

SEQ ID NO: 67200 - DNA, 19 bp, Homo sapiens
  siRNA target sequence for ZC3HAV1 (NM_020119.3,2200-2218).
caccaaatggatttggtat

SEQ ID NO: 67201 - DNA, 19 bp, Homo sapiens
  siRNA target sequence for ZC3HAV1 (NM_020119.3,2215-2233).
gtattggaagaatgaatct

SEQ ID NO: 67202 - DNA, 19 bp, Homo sapiens
  siRNA target sequence for ZC3HAV1 (NM_020119.3,2280-2298).
caaacgtcgactcttcata

SEQ ID NO: 67203 - DNA, 19 bp, Homo sapiens
  siRNA target sequence for ZC3HAV1 (NM_020119.3,2328-2346).
ggggagttgtgccatttca

SEQ ID NO: 67204 - DNA, 19 bp, Homo sapiens
  siRNA target sequence for ZC3HAV1 (NM_020119.3,2373-2391).
gtttccaagggatgattca

SEQ ID NO: 67205 - DNA, 19 bp, Homo sapiens
  siRNA target sequence for ZC3HAV1 (NM_020119.3,2381-2399).
gggatgattcagacaaaca

SEQ ID NO: 67206 - DNA, 19 bp, Homo sapiens
  siRNA target sequence for ZC3HAV1 (NM_020119.3,2382-2400).
ggatgattcagacaaacat

SEQ ID NO: 67207 - DNA, 19 bp, Homo sapiens
  siRNA target sequence for ZC3HAV1 (NM_020119.3,2398-2416).
catagcttccaaaactcaa

SEQ ID NO: 67208 - DNA, 19 bp, Homo sapiens
  siRNA target sequence for ZC3HAV1 (NM_020119.3,2414-2432).
caaaaggatgtcatcagaa

SEQ ID NO: 67209 - DNA, 19 bp, Homo sapiens
  siRNA target sequence for ZC3HAV1 (NM_020119.3,2500-2518).
gacctcgtcagtgtcttta

SEQ ID NO: 67210 - DNA, 19 bp, Homo sapiens
  siRNA target sequence for ZC3HAV1 (NM_020119.3,2686-2704).
gctcctggataaatttaca

SEQ ID NO: 67211 - DNA, 19 bp, Homo sapiens
  siRNA target sequence for ZC3HAV1 (NM_020119.3,2687-2705).
ctcctggataaatttacat

SEQ ID NO: 67212 - DNA, 19 bp, Homo sapiens
  siRNA target sequence for ZC3HAV1 (NM_020119.3,2759-2777).
cgtgcctatgtggaatcta

SEQ ID NO: 67213 - DNA, 19 bp, Homo sapiens
  siRNA target sequence for ZC3HAV1 (NM_020119.3,2760-2778).
gtgcctatgtggaatctat

SEQ ID NO: 67214 - DNA, 19 bp, Homo sapiens
  siRNA target sequence for ZC3HAV1 (NM_020119.3,2762-2780).
gcctatgtggaatctatct

SEQ ID NO: 67215 - DNA, 19 bp, Homo sapiens
  siRNA target sequence for ZC3HAV1 (NM_020119.3,2770-2788).
ggaatctatctgttcgaat

SEQ ID NO: 67216 - DNA, 19 bp, Homo sapiens
  siRNA target sequence for ZC3HAV1 (NM_020119.3,2771-2789).
gaatctatctgttcgaata

SEQ ID NO: 67217 - DNA, 19 bp, Homo sapiens
  siRNA target sequence for ZC3HAV1 (NM_020119.3,2775-2793).
ctatctgttcgaataattt

SEQ ID NO: 67218 - DNA, 19 bp, Homo sapiens
  siRNA target sequence for ZC3HAV1 (NM_020119.3,2797-2815).
cagtttcctacatgaaact

SEQ ID NO: 67219 - DNA, 19 bp, Homo sapiens
  siRNA target sequence for ZC3HAV1 (NM_020119.3,2799-2817).
gtttcctacatgaaactca

SEQ ID NO: 67220 - DNA, 19 bp, Homo sapiens
  siRNA target sequence for ZC3HAV1 (NM_020119.3,2824-2842).
caaatacggaaaaggaatt

SEQ ID NO: 67221 - DNA, 19 bp, Homo sapiens
  siRNA target sequence for ZC3HAV1 (NM_020119.3,2849-2867).
gcaaaagatgccatctatt

SEQ ID NO: 67222 - DNA, 19 bp, Homo sapiens
  siRNA target sequence for ZC3HAV1 (NM_020119.3,2883-2901).
cgtatgatgccaaaaacgt

SEQ ID NO: 67223 - DNA, 19 bp, Homo sapiens
  siRNA target sequence for ZC3HAV1 (NM_020119.3,2891-2909).
gccaaaaacgtcgttatgt

SEQ ID NO: 67224 - DNA, 19 bp, Homo sapiens
  siRNA target sequence for ZC3HAV1 (NM_020119.3,2892-2910).
ccaaaaacgtcgttatgtt

SEQ ID NO: 67225 - DNA, 19 bp, Homo sapiens
  siRNA target sequence for ZC3HAV1 (NM_020119.3,2893-2911).
caaaaacgtcgttatgttt

SEQ ID NO: 67226 - DNA, 19 bp, Homo sapiens
  siRNA target sequence for ZC3HAV1 (NM_020119.3,2940-2958).
ctgaaggaaatataacgta

SEQ ID NO: 67227 - DNA, 19 bp, Homo sapiens
  siRNA target sequence for ZC3HAV1 (NM_020119.3,3012-3030).
ccgtttttgtcatctttca

SEQ ID NO: 67228 - DNA, 19 bp, Homo sapiens
  siRNA target sequence for ZC3HAV1 (NM_020119.3,3046-3064).
cccacaatatgtgattgaa

SEQ ID NO: 67229 - DNA, 19 bp, Homo sapiens
  siRNA target sequence for ZC3HAV1 (NM_020119.3,3074-3092).
gacaaagcctgcgtgatta

SEQ ID NO: 67230 - DNA, 19 bp, Homo sapiens
  siRNA target sequence for ZC3HAV1 (NM_020119.3,3076-3094).
caaagcctgcgtgattagt

SEQ ID NO: 67231 - DNA, 19 bp, Homo sapiens
  siRNA target sequence for ZC3HDC1 (NM_022750.1,812-830).
ctgagagccgggaagaact

SEQ ID NO: 67232 - DNA, 19 bp, Homo sapiens
  siRNA target sequence for ZC3HDC1 (NM_022750.1,994-1012).
cggctcttgtgcctttcaa

SEQ ID NO: 67233 - DNA, 19 bp, Homo sapiens
  siRNA target sequence for ZC3HDC1 (NM_022750.1,995-1013).
ggctcttgtgcctttcaaa

SEQ ID NO: 67234 - DNA, 19 bp, Homo sapiens
  siRNA target sequence for ZC3HDC1 (NM_022750.1,1070-1088).
ggcactagctgtaagagat

SEQ ID NO: 67235 - DNA, 19 bp, Homo sapiens
  siRNA target sequence for ZC3HDC1 (NM_022750.1,1080-1098).
gtaagagatcccatgattt

SEQ ID NO: 67236 - DNA, 19 bp, Homo sapiens
  siRNA target sequence for ZC3HDC1 (NM_022750.1,1156-1174).
gagcaggctgcctaccatt

SEQ ID NO: 67237 - DNA, 19 bp, Homo sapiens
  siRNA target sequence for ZC3HDC1 (NM_022750.1,1158-1176).
gcaggctgcctaccattta

SEQ ID NO: 67238 - DNA, 19 bp, Homo sapiens
  siRNA target sequence for ZC3HDC1 (NM_022750.1,1159-1177).
caggctgcctaccatttat

SEQ ID NO: 67239 - DNA, 19 bp, Homo sapiens
  siRNA target sequence for ZC3HDC1 (NM_022750.1,1162-1180).
gctgcctaccatttataga

SEQ ID NO: 67240 - DNA, 19 bp, Homo sapiens
  siRNA target sequence for ZC3HDC1 (NM_022750.1,1165-1183).
gcctaccatttatagaaat

SEQ ID NO: 67241 - DNA, 19 bp, Homo sapiens
  siRNA target sequence for ZC3HDC1 (NM_022750.1,1310-1328).
ggtgatcagatctgtttgt

SEQ ID NO: 67242 - DNA, 19 bp, Homo sapiens
  siRNA target sequence for ZC3HDC1 (NM_022750.1,1311-1329).
gtgatcagatctgtttgta

SEQ ID NO: 67243 - DNA, 19 bp, Homo sapiens
  siRNA target sequence for ZC3HDC1 (NM_022750.1,1316-1334).
cagatctgtttgtaccata

SEQ ID NO: 67244 - DNA, 19 bp, Homo sapiens
  siRNA target sequence for ZC3HDC1 (NM_022750.1,1327-1345).
gtaccatatccggaaaagt

SEQ ID NO: 67245 - DNA, 19 bp, Homo sapiens
  siRNA target sequence for ZC3HDC1 (NM_022750.1,1336-1354).
ccggaaaagttgtagcttt

SEQ ID NO: 67246 - DNA, 19 bp, Homo sapiens
  siRNA target sequence for ZC3HDC1 (NM_022750.1,1365-1383).
gccatagagttcatttcca

SEQ ID NO: 67247 - DNA, 19 bp, Homo sapiens
  siRNA target sequence for ZC3HDC1 (NM_022750.1,1366-1384).
ccatagagttcatttccat

SEQ ID NO: 67248 - DNA, 19 bp, Homo sapiens
  siRNA target sequence for ZC3HDC1 (NM_022750.1,1388-1406).
ccgtatcgatggcaattct

SEQ ID NO: 67249 - DNA, 19 bp, Homo sapiens
  siRNA target sequence for ZC3HDC1 (NM_022750.1,1389-1407).
cgtatcgatggcaattctt

SEQ ID NO: 67250 - DNA, 19 bp, Homo sapiens
  siRNA target sequence for ZC3HDC1 (NM_022750.1,1394-1412).
cgatggcaattcttggata

SEQ ID NO: 67251 - DNA, 19 bp, Homo sapiens
  siRNA target sequence for ZC3HDC1 (NM_022750.1,1416-1434).
gcaaatgggaggatttgga

SEQ ID NO: 67252 - DNA, 19 bp, Homo sapiens
  siRNA target sequence for ZC3HDC1 (NM_022750.1,1458-1476).
catattgcaatcccaaaat

SEQ ID NO: 67253 - DNA, 19 bp, Homo sapiens
  siRNA target sequence for ZC3HDC1 (NM_022750.1,1613-1631).
ctcaccactgactggattt

SEQ ID NO: 67254 - DNA, 19 bp, Homo sapiens
  siRNA target sequence for ZC3HDC1 (NM_022750.1,1617-1635).
ccactgactggatttggta

SEQ ID NO: 67255 - DNA, 19 bp, Homo sapiens
  siRNA target sequence for ZC3HDC1 (NM_022750.1,1763-1781).
caggcagccaccttgaagt

SEQ ID NO: 67256 - DNA, 19 bp, Homo sapiens
  siRNA target sequence for ZC3HDC1 (NM_022750.1,1795-1813).
gcacaactacgagttagat

SEQ ID NO: 67257 - DNA, 19 bp, Homo sapiens
  siRNA target sequence for ZC3HDC1 (NM_022750.1,1796-1814).
cacaactacgagttagatt

SEQ ID NO: 67258 - DNA, 19 bp, Homo sapiens
  siRNA target sequence for ZC3HDC1 (NM_022750.1,1801-1819).
ctacgagttagatttcaaa

SEQ ID NO: 67259 - DNA, 19 bp, Homo sapiens
  siRNA target sequence for ZC3HDC1 (NM_022750.1,1838-1856).
ctggtctatggcacaacta

SEQ ID NO: 67260 - DNA, 19 bp, Homo sapiens
  siRNA target sequence for ZC3HDC1 (NM_022750.1,1866-1884).
gccgcagacccaaatacgt

SEQ ID NO: 67261 - DNA, 19 bp, Homo sapiens
  siRNA target sequence for ZC3HDC1 (NM_022750.1,1895-1913).
gatgtgacgaccatgcaaa

SEQ ID NO: 67262 - DNA, 19 bp, Homo sapiens
  siRNA target sequence for ZC3HDC1 (NM_022750.1,1939-1957).
gaagagcatcccagactat

SEQ ID NO: 67263 - DNA, 19 bp, Homo sapiens
  siRNA target sequence for ZC3HDC1 (NM_022750.1,1991-2009).
cagaagatcacccttagtt

SEQ ID NO: 67264 - DNA, 19 bp, Homo sapiens
  siRNA target sequence for ZC3HDC1 (NM_022750.1,2007-2025).
gttcttcctcggaagagta

SEQ ID NO: 67265 - DNA, 19 bp, Homo sapiens
  siRNA target sequence for ZC3HDC1 (NM_022750.1,2010-2028).
cttcctcggaagagtatca

SEQ ID NO: 67266 - DNA, 19 bp, Homo sapiens
  siRNA target sequence for ZC3HDC1 (NM_022750.1,2188-2206).
cggcaccagcgccattttt

SEQ ID NO: 67267 - DNA, 19 bp, Homo sapiens
  siRNA target sequence for ZC3HDC1 (NM_022750.1,2215-2233).
catctgccagcagaacttt

SEQ ID NO: 67268 - DNA, 19 bp, Homo sapiens
  siRNA target sequence for ZC3HDC1 (NM_022750.1,2239-2257).
gcgggtctgtggtgttcat

SEQ ID NO: 67269 - DNA, 19 bp, Homo sapiens
  siRNA target sequence for ZC3HDC1 (NM_022750.1,2269-2287).
cggcaaggggagctacttt

SEQ ID NO: 67270 - DNA, 19 bp, Homo sapiens
  siRNA target sequence for ZC3HDC1 (NM_022750.1,2425-2443).
gagcaacgccttctatgat

SEQ ID NO: 67271 - DNA, 19 bp, Homo sapiens
  siRNA target sequence for ZC3HDC1 (NM_022750.1,2463-2481).
ccgacccctccatctttgt

SEQ ID NO: 67272 - DNA, 19 bp, Homo sapiens
  siRNA target sequence for ZC3HDC1 (NM_022750.1,2501-2519).
gtctacccagagtatgtca

SEQ ID NO: 67273 - DNA, 19 bp, Homo sapiens
  siRNA target sequence for ZCCHC2 (NM_017742.2,297-315).
ggagtacactttcaaagta

SEQ ID NO: 67274 - DNA, 19 bp, Homo sapiens
  siRNA target sequence for ZCCHC2 (NM_017742.2,298-316).
gagtacactttcaaagtaa

SEQ ID NO: 67275 - DNA, 19 bp, Homo sapiens
  siRNA target sequence for ZCCHC2 (NM_017742.2,328-346).
ctttcagtcacaacagtaa

SEQ ID NO: 67276 - DNA, 19 bp, Homo sapiens
  siRNA target sequence for ZCCHC2 (NM_017742.2,478-496).
gacctagagcccatcctaa

SEQ ID NO: 67277 - DNA, 19 bp, Homo sapiens
  siRNA target sequence for ZCCHC2 (NM_017742.2,544-562).
gtacacagcttctttcagt

SEQ ID NO: 67278 - DNA, 19 bp, Homo sapiens
  siRNA target sequence for ZCCHC2 (NM_017742.2,576-594).
ctccctacacagtatcaat

SEQ ID NO: 67279 - DNA, 19 bp, Homo sapiens
  siRNA target sequence for ZCCHC2 (NM_017742.2,612-630).
gaagacttctaagatatta

SEQ ID NO: 67280 - DNA, 19 bp, Homo sapiens
  siRNA target sequence for ZCCHC2 (NM_017742.2,617-635).
cttctaagatattagaaca

SEQ ID NO: 67281 - DNA, 19 bp, Homo sapiens
  siRNA target sequence for ZCCHC2 (NM_017742.2,620-638).
ctaagatattagaacactt

SEQ ID NO: 67282 - DNA, 19 bp, Homo sapiens
  siRNA target sequence for ZCCHC2 (NM_017742.2,651-669).
ctctgaagcttcaagtcaa

SEQ ID NO: 67283 - DNA, 19 bp, Homo sapiens
  siRNA target sequence for ZCCHC2 (NM_017742.2,715-733).
gggaaaagtcccattgtga

SEQ ID NO: 67284 - DNA, 19 bp, Homo sapiens
  siRNA target sequence for ZCCHC2 (NM_017742.2,726-744).
cattgtgaacaatattggt

SEQ ID NO: 67285 - DNA, 19 bp, Homo sapiens
  siRNA target sequence for ZCCHC2 (NM_017742.2,732-750).
gaacaatattggtacaagt

SEQ ID NO: 67286 - DNA, 19 bp, Homo sapiens
  siRNA target sequence for ZCCHC2 (NM_017742.2,763-781).
gatgggcttaccatgcaat

SEQ ID NO: 67287 - DNA, 19 bp, Homo sapiens
  siRNA target sequence for ZCCHC2 (NM_017742.2,766-784).
gggcttaccatgcaatatt

SEQ ID NO: 67288 - DNA, 19 bp, Homo sapiens
  siRNA target sequence for ZCCHC2 (NM_017742.2,768-786).
gcttaccatgcaatattct

SEQ ID NO: 67289 - DNA, 19 bp, Homo sapiens
  siRNA target sequence for ZCCHC2 (NM_017742.2,777-795).
gcaatattctgaacagaat

SEQ ID NO: 67290 - DNA, 19 bp, Homo sapiens
  siRNA target sequence for ZCCHC2 (NM_017742.2,1016-1034).
gtggtactgtgaaagatgt

SEQ ID NO: 67291 - DNA, 19 bp, Homo sapiens
  siRNA target sequence for ZCCHC2 (NM_017742.2,1177-1195).
gaggattctgggaatccat

SEQ ID NO: 67292 - DNA, 19 bp, Homo sapiens
  siRNA target sequence for ZCCHC2 (NM_017742.2,1186-1204).
gggaatccatcaacaacta

SEQ ID NO: 67293 - DNA, 19 bp, Homo sapiens
  siRNA target sequence for ZCCHC2 (NM_017742.2,1192-1210).
ccatcaacaactaggttta

SEQ ID NO: 67294 - DNA, 19 bp, Homo sapiens
  siRNA target sequence for ZCCHC2 (NM_017742.2,1313-1331).
cacccaagtatcagcatat

SEQ ID NO: 67295 - DNA, 19 bp, Homo sapiens
  siRNA target sequence for ZCCHC2 (NM_017742.2,1408-1426).
cccgctgatggcaaaacca

SEQ ID NO: 67296 - DNA, 19 bp, Homo sapiens
  siRNA target sequence for ZCCHC2 (NM_017742.2,1409-1427).
ccgctgatggcaaaaccat

SEQ ID NO: 67297 - DNA, 19 bp, Homo sapiens
  siRNA target sequence for ZCCHC2 (NM_017742.2,1410-1428).
cgctgatggcaaaaccata

SEQ ID NO: 67298 - DNA, 19 bp, Homo sapiens
  siRNA target sequence for ZCCHC2 (NM_017742.2,1450-1468).
gttgctatttctgcaataa

SEQ ID NO: 67299 - DNA, 19 bp, Homo sapiens
  siRNA target sequence for ZCCHC2 (NM_017742.2,1484-1502).
caacccctgttggaatact

SEQ ID NO: 67300 - DNA, 19 bp, Homo sapiens
  siRNA target sequence for ZCCHC2 (NM_017742.2,1551-1569).
ggcttcccctttacctatt

SEQ ID NO: 67301 - DNA, 19 bp, Homo sapiens
  siRNA target sequence for ZCCHC2 (NM_017742.2,1581-1599).
ccttccacacagtagtact

SEQ ID NO: 67302 - DNA, 19 bp, Homo sapiens
  siRNA target sequence for ZCCHC2 (NM_017742.2,1657-1675).
gagagctgcacagttaaca

SEQ ID NO: 67303 - DNA, 19 bp, Homo sapiens
  siRNA target sequence for ZCCHC2 (NM_017742.2,1704-1722).
catcgcatcaccaaacact

SEQ ID NO: 67304 - DNA, 19 bp, Homo sapiens
  siRNA target sequence for ZCCHC2 (NM_017742.2,1723-1741).
gcctttattcctatccata

SEQ ID NO: 67305 - DNA, 19 bp, Homo sapiens
  siRNA target sequence for ZCCHC2 (NM_017742.2,1776-1794).
cacggaccccatcacaaaa

SEQ ID NO: 67306 - DNA, 19 bp, Homo sapiens
  siRNA target sequence for ZCCHC2 (NM_017742.2,1779-1797).
ggaccccatcacaaaatct

SEQ ID NO: 67307 - DNA, 19 bp, Homo sapiens
  siRNA target sequence for ZCCHC2 (NM_017742.2,1807-1825).
gtggtaggactcaatcaaa

SEQ ID NO: 67308 - DNA, 19 bp, Homo sapiens
  siRNA target sequence for ZCCHC2 (NM_017742.2,1871-1889).
ccaatgtgaaggtagttct

SEQ ID NO: 67309 - DNA, 19 bp, Homo sapiens
  siRNA target sequence for ZCCHC2 (NM_017742.2,2134-2152).
gacagcacctcttacatca

SEQ ID NO: 67310 - DNA, 19 bp, Homo sapiens
  siRNA target sequence for ZCCHC2 (NM_017742.2,2263-2281).
cttcagctaaatagttact

SEQ ID NO: 67311 - DNA, 19 bp, Homo sapiens
  siRNA target sequence for ZCCHC2 (NM_017742.2,2268-2286).
gctaaatagttactattat

SEQ ID NO: 67312 - DNA, 19 bp, Homo sapiens
  siRNA target sequence for ZCCHC2 (NM_017742.2,2294-2312).
caatgcctggaccaatgta

SEQ ID NO: 67313 - DNA, 19 bp, Homo sapiens
  siRNA target sequence for ZCCHC2 (NM_017742.2,2313-2331).
ccgagtcccttcattcttt

SEQ ID NO: 67314 - DNA, 19 bp, Homo sapiens
  siRNA target sequence for ZCCHC2 (NM_017742.2,2314-2332).
cgagtcccttcattcttta

SEQ ID NO: 67315 - DNA, 19 bp, Homo sapiens
  siRNA target sequence for ZCCHC2 (NM_017742.2,2409-2427).
gcctcagactccatatgca

SEQ ID NO: 67316 - DNA, 19 bp, Homo sapiens
  siRNA target sequence for ZCCHC2 (NM_017742.2,2454-2472).
ggggagccaagccaactat

SEQ ID NO: 67317 - DNA, 19 bp, Homo sapiens
  siRNA target sequence for ZCCHC2 (NM_017742.2,2498-2516).
ggagattctatcctgtata

SEQ ID NO: 67318 - DNA, 19 bp, Homo sapiens
  siRNA target sequence for ZCCHC2 (NM_017742.2,2499-2517).
gagattctatcctgtatat

SEQ ID NO: 67319 - DNA, 19 bp, Homo sapiens
  siRNA target sequence for ZCCHC2 (NM_017742.2,2631-2649).
gtccatggaggccaatcaa

SEQ ID NO: 67320 - DNA, 19 bp, Homo sapiens
  siRNA target sequence for ZCCHC2 (NM_017742.2,2654-2672).
gcacttacagactgagata

SEQ ID NO: 67321 - DNA, 19 bp, Homo sapiens
  siRNA target sequence for ZCCHC2 (NM_017742.2,2682-2700).
cctccccccttctaatgat

SEQ ID NO: 67322 - DNA, 19 bp, Homo sapiens
  siRNA target sequence for ZCCHC2 (NM_017742.2,2683-2701).
ctccccccttctaatgata

SEQ ID NO: 67323 - DNA, 19 bp, Homo sapiens
  siRNA target sequence for ZCCHC2 (NM_017742.2,2687-2705).
ccccttctaatgatacgtt

SEQ ID NO: 67324 - DNA, 19 bp, Homo sapiens
  siRNA target sequence for ZCCHC5 (NM_152694.1,306-324).
gacttagcagcctcctata

SEQ ID NO: 67325 - DNA, 19 bp, Homo sapiens
  siRNA target sequence for ZCCHC5 (NM_152694.1,308-326).
cttagcagcctcctatatt

SEQ ID NO: 67326 - DNA, 19 bp, Homo sapiens
  siRNA target sequence for ZCCHC5 (NM_152694.1,313-331).
cagcctcctatattgttct

SEQ ID NO: 67327 - DNA, 19 bp, Homo sapiens
  siRNA target sequence for ZCCHC5 (NM_152694.1,316-334).
cctcctatattgttctgaa

SEQ ID NO: 67328 - DNA, 19 bp, Homo sapiens
  siRNA target sequence for ZCCHC5 (NM_152694.1,430-448).
cagccaaggagtatgatct

SEQ ID NO: 67329 - DNA, 19 bp, Homo sapiens
  siRNA target sequence for ZCCHC5 (NM_152694.1,725-743).
cacccaggatgccacaata

SEQ ID NO: 67330 - DNA, 19 bp, Homo sapiens
  siRNA target sequence for ZCCHC5 (NM_152694.1,866-884).
gcctctggagccttcaaat

SEQ ID NO: 67331 - DNA, 19 bp, Homo sapiens
  siRNA target sequence for ZCCHC5 (NM_152694.1,880-898).
caaatgcccaggaattcct

SEQ ID NO: 67332 - DNA, 19 bp, Homo sapiens
  siRNA target sequence for ZCCHC5 (NM_152694.1,920-938).
gtccctggagggtctaata

SEQ ID NO: 67333 - DNA, 19 bp, Homo sapiens
  siRNA target sequence for ZCCHC5 (NM_152694.1,984-1002).
gggttagaggctacagatt

SEQ ID NO: 67334 - DNA, 19 bp, Homo sapiens
  siRNA target sequence for ZCCHC5 (NM_152694.1,985-1003).
ggttagaggctacagattt

SEQ ID NO: 67335 - DNA, 19 bp, Homo sapiens
  siRNA target sequence for ZCCHC5 (NM_152694.1,997-1015).
cagatttccccctgcaata

SEQ ID NO: 67336 - DNA, 19 bp, Homo sapiens
  siRNA target sequence for ZCCHC5 (NM_152694.1,999-1017).
gatttccccctgcaataca

SEQ ID NO: 67337 - DNA, 19 bp, Homo sapiens
  siRNA target sequence for ZCCHC5 (NM_152694.1,1005-1023).
cccctgcaatacactttaa

SEQ ID NO: 67338 - DNA, 19 bp, Homo sapiens
  siRNA target sequence for ZCCHC5 (NM_152694.1,1058-1076).
cctggttcagctgtatagt

SEQ ID NO: 67339 - DNA, 19 bp, Homo sapiens
  siRNA target sequence for ZCCHC5 (NM_152694.1,1059-1077).
ctggttcagctgtatagtt

SEQ ID NO: 67340 - DNA, 19 bp, Homo sapiens
  siRNA target sequence for ZCCHC5 (NM_152694.1,1062-1080).
gttcagctgtatagttaca

SEQ ID NO: 67341 - DNA, 19 bp, Homo sapiens
  siRNA target sequence for ZCCHC5 (NM_152694.1,1065-1083).
cagctgtatagttacatga

SEQ ID NO: 67342 - DNA, 19 bp, Homo sapiens
  siRNA target sequence for ZCCHC5 (NM_152694.1,1172-1190).
gctcttactggatatccaa

SEQ ID NO: 67343 - DNA, 19 bp, Homo sapiens
  siRNA target sequence for ZCCHC5 (NM_152694.1,1173-1191).
ctcttactggatatccaaa

SEQ ID NO: 67344 - DNA, 19 bp, Homo sapiens
  siRNA target sequence for ZCCHC5 (NM_152694.1,1196-1214).
cttactggagcaatgtgaa

SEQ ID NO: 67345 - DNA, 19 bp, Homo sapiens
  siRNA target sequence for ZCCHC5 (NM_152694.1,1229-1247).
gctccaggatacttttgat

SEQ ID NO: 67346 - DNA, 19 bp, Homo sapiens
  siRNA target sequence for ZCCHC5 (NM_152694.1,1230-1248).
ctccaggatacttttgata

SEQ ID NO: 67347 - DNA, 19 bp, Homo sapiens
  siRNA target sequence for ZCCHC5 (NM_152694.1,1360-1378).
gcactctctggatccaatt

SEQ ID NO: 67348 - DNA, 19 bp, Homo sapiens
  siRNA target sequence for ZCCHC5 (NM_152694.1,1383-1401).
gaaggtcttgccagttcta

SEQ ID NO: 67349 - DNA, 19 bp, Homo sapiens
  siRNA target sequence for ZCCHC5 (NM_152694.1,1387-1405).
gtcttgccagttctataca

SEQ ID NO: 67350 - DNA, 19 bp, Homo sapiens
  siRNA target sequence for ZCCHC5 (NM_152694.1,1393-1411).
ccagttctatacaagatga

SEQ ID NO: 67351 - DNA, 19 bp, Homo sapiens
  siRNA target sequence for ZCCHC5 (NM_152694.1,1394-1412).
cagttctatacaagatgaa

SEQ ID NO: 67352 - DNA, 19 bp, Homo sapiens
  siRNA target sequence for ZCCHC5 (NM_152694.1,1396-1414).
gttctatacaagatgaact

SEQ ID NO: 67353 - DNA, 19 bp, Homo sapiens
  siRNA target sequence for ZCCHC5 (NM_152694.1,1435-1453).
ccaacctatctgatctcat

SEQ ID NO: 67354 - DNA, 19 bp, Homo sapiens
  siRNA target sequence for ZCCHC5 (NM_152694.1,1481-1499).
gcctgatcccaatccatta

SEQ ID NO: 67355 - DNA, 19 bp, Homo sapiens
  siRNA target sequence for ZCCHC5 (NM_152694.1,1490-1508).
caatccattagggaaaagt

SEQ ID NO: 67356 - DNA, 19 bp, Homo sapiens
  siRNA target sequence for ZCCHC5 (NM_152694.1,1650-1668).
ggtcattttgccagagatt

SEQ ID NO: 67357 - DNA, 19 bp, Homo sapiens
  siRNA target sequence for ZCCHC5 (NM_152694.1,1690-1708).
ccctgcaggcgggaaacat

SEQ ID NO: 67358 - DNA, 19 bp, Homo sapiens
  siRNA target sequence for ZNF183 (NM_006978.1,367-385).
gtggttcgaccggaaaaga

SEQ ID NO: 67359 - DNA, 19 bp, Homo sapiens
  siRNA target sequence for ZNF183 (NM_006978.1,393-411).
gacccacaatccaatgata

SEQ ID NO: 67360 - DNA, 19 bp, Homo sapiens
  siRNA target sequence for ZNF183 (NM_006978.1,395-413).
cccacaatccaatgataca

SEQ ID NO: 67361 - DNA, 19 bp, Homo sapiens
  siRNA target sequence for ZNF183 (NM_006978.1,417-435).
gacccgtgacagtggtaaa

SEQ ID NO: 67362 - DNA, 19 bp, Homo sapiens
  siRNA target sequence for ZNF183 (NM_006978.1,419-437).
cccgtgacagtggtaaaca

SEQ ID NO: 67363 - DNA, 19 bp, Homo sapiens
  siRNA target sequence for ZNF183 (NM_006978.1,421-439).
cgtgacagtggtaaacaga

SEQ ID NO: 67364 - DNA, 19 bp, Homo sapiens
  siRNA target sequence for ZNF183 (NM_006978.1,492-510).
gagtctcggcgtggtttat

SEQ ID NO: 67365 - DNA, 19 bp, Homo sapiens
  siRNA target sequence for ZNF183 (NM_006978.1,496-514).
ctcggcgtggtttataaat

SEQ ID NO: 67366 - DNA, 19 bp, Homo sapiens
  siRNA target sequence for ZNF183 (NM_006978.1,499-517).
ggcgtggtttataaatcca

SEQ ID NO: 67367 - DNA, 19 bp, Homo sapiens
  siRNA target sequence for ZNF183 (NM_006978.1,554-572).
gagcgacagctgtctatga

SEQ ID NO: 67368 - DNA, 19 bp, Homo sapiens
  siRNA target sequence for ZNF183 (NM_006978.1,594-612).
cgatgcacaagccatcttt

SEQ ID NO: 67369 - DNA, 19 bp, Homo sapiens
  siRNA target sequence for ZNF183 (NM_006978.1,666-684).
ctatcggggaatcaacaat

SEQ ID NO: 67370 - DNA, 19 bp, Homo sapiens
  siRNA target sequence for ZNF183 (NM_006978.1,924-942).
gggtcgctatggtgtctat

SEQ ID NO: 67371 - DNA, 19 bp, Homo sapiens
  siRNA target sequence for ZNF183 (NM_006978.1,926-944).
gtcgctatggtgtctatga

SEQ ID NO: 67372 - DNA, 19 bp, Homo sapiens
  siRNA target sequence for ZNF183 (NM_006978.1,937-955).
gtctatgaggatgaaaact

SEQ ID NO: 67373 - DNA, 19 bp, Homo sapiens
  siRNA target sequence for ZNF183 (NM_006978.1,1128-1146).
cttcaatccagcgaaagaa

SEQ ID NO: 67374 - DNA, 19 bp, Homo sapiens
  siRNA target sequence for ZNF183 (NM_006978.1,1212-1230).
ccccgatgaggatgcaatt

SEQ ID NO: 67375 - DNA, 19 bp, Homo sapiens
  siRNA target sequence for ZNF183 (NM_006978.1,1221-1239).
ggatgcaattcccattact

SEQ ID NO: 67376 - DNA, 19 bp, Homo sapiens
  siRNA target sequence for ZNF183L1 (NM_178861.3,453-471).
gggagcacgaccacatcta

SEQ ID NO: 67377 - DNA, 19 bp, Homo sapiens
  siRNA target sequence for ZNF183L1 (NM_178861.3,694-712).
gctcgggtgggagattgaa

SEQ ID NO: 67378 - DNA, 19 bp, Homo sapiens
  siRNA target sequence for ZNF183L1 (NM_178861.3,722-740).
gaagagggtcgctactgta

SEQ ID NO: 67379 - DNA, 19 bp, Homo sapiens
  siRNA target sequence for ZNF183L1 (NM_178861.3,725-743).
gagggtcgctactgtatct

SEQ ID NO: 67380 - DNA, 19 bp, Homo sapiens
  siRNA target sequence for ZNF2 (NM_021088.1,937-955).
ccctgtccagggaaattct

SEQ ID NO: 67381 - DNA, 19 bp, Homo sapiens
  siRNA target sequence for ZNF2 (NM_021088.1,1154-1172).
gtgctcaaaagccttcttt

SEQ ID NO: 67382 - DNA, 19 bp, Homo sapiens
  siRNA target sequence for ZNF2 (NM_021088.1,1332-1350).
gcctttagccagaaaagta

SEQ ID NO: 67383 - DNA, 19 bp, Homo sapiens
  siRNA target sequence for ZNF2 (NM_021088.1,1357-1375).
ctcgccatcagctaatcca

SEQ ID NO: 67384 - DNA, 19 bp, Homo sapiens
  siRNA target sequence for ZNF2 (NM_021088.1,1425-1443).
ggtgtctcgtctctgaata

SEQ ID NO: 67385 - DNA, 19 bp, Homo sapiens
  siRNA target sequence for ZNF2 (NM_021088.1,1430-1448).
ctcgtctctgaatagacat

SEQ ID NO: 67386 - DNA, 19 bp, Homo sapiens
  siRNA target sequence for ZNF2 (NM_021088.1,1464-1482).
ggggaccctcgctatcagt

SEQ ID NO: 67387 - DNA, 19 bp, Homo sapiens
  siRNA target sequence for ZNF2 (NM_021088.1,1663-1681).
ggaaagttttcagttcaaa

SEQ ID NO: 67388 - DNA, 19 bp, Homo sapiens
  siRNA target sequence for ZNF227 (NM_182490.1,314-332).
ctgcgactgctcgatctta

SEQ ID NO: 67389 - DNA, 19 bp, Homo sapiens
  siRNA target sequence for ZNF227 (NM_182490.1,518-536).
gcattaaaatacctttcaa

SEQ ID NO: 67390 - DNA, 19 bp, Homo sapiens
  siRNA target sequence for ZNF227 (NM_182490.1,545-563).
ctgtcctgctggcaaatct

SEQ ID NO: 67391 - DNA, 19 bp, Homo sapiens
  siRNA target sequence for ZNF227 (NM_182490.1,607-625).
gagttcccagttattacaa

SEQ ID NO: 67392 - DNA, 19 bp, Homo sapiens
  siRNA target sequence for ZNF227 (NM_182490.1,704-722).
caagagtttccattttgga

SEQ ID NO: 67393 - DNA, 19 bp, Homo sapiens
  siRNA target sequence for ZNF227 (NM_182490.1,772-790).
gagtagaggtaagcaaatt

SEQ ID NO: 67394 - DNA, 19 bp, Homo sapiens
  siRNA target sequence for ZNF227 (NM_182490.1,774-792).
gtagaggtaagcaaattga

SEQ ID NO: 67395 - DNA, 19 bp, Homo sapiens
  siRNA target sequence for ZNF227 (NM_182490.1,1002-1020).
cccttcatccgaatgttca

SEQ ID NO: 67396 - DNA, 19 bp, Homo sapiens
  siRNA target sequence for ZNF227 (NM_182490.1,1028-1046).
gaaaaatgcttcagtcaaa

SEQ ID NO: 67397 - DNA, 19 bp, Homo sapiens
  siRNA target sequence for ZNF227 (NM_182490.1,1057-1075).
gcgaactcatcagagaatt

SEQ ID NO: 67398 - DNA, 19 bp, Homo sapiens
  siRNA target sequence for ZNF227 (NM_182490.1,1093-1111).
caatagatgtcatgaatct

SEQ ID NO: 67399 - DNA, 19 bp, Homo sapiens
  siRNA target sequence for ZNF227 (NM_182490.1,1120-1138).
cttcaataagagctctttt

SEQ ID NO: 67400 - DNA, 19 bp, Homo sapiens
  siRNA target sequence for ZNF227 (NM_182490.1,1206-1224).
gtagcagcacgggtcttat

SEQ ID NO: 67401 - DNA, 19 bp, Homo sapiens
  siRNA target sequence for ZNF227 (NM_182490.1,1209-1227).
gcagcacgggtcttatcat

SEQ ID NO: 67402 - DNA, 19 bp, Homo sapiens
  siRNA target sequence for ZNF227 (NM_182490.1,1212-1230).
gcacgggtcttatcattca

SEQ ID NO: 67403 - DNA, 19 bp, Homo sapiens
  siRNA target sequence for ZNF227 (NM_182490.1,1215-1233).
cgggtcttatcattcatta

SEQ ID NO: 67404 - DNA, 19 bp, Homo sapiens
  siRNA target sequence for ZNF227 (NM_182490.1,1217-1235).
ggtcttatcattcattaca

SEQ ID NO: 67405 - DNA, 19 bp, Homo sapiens
  siRNA target sequence for ZNF227 (NM_182490.1,1225-1243).
cattcattacagaactcat

SEQ ID NO: 67406 - DNA, 19 bp, Homo sapiens
  siRNA target sequence for ZNF227 (NM_182490.1,1292-1310).
caaagttcaaattttcagt

SEQ ID NO: 67407 - DNA, 19 bp, Homo sapiens
  siRNA target sequence for ZNF227 (NM_182490.1,1367-1385).
ggcttcggttggagtgtta

SEQ ID NO: 67408 - DNA, 19 bp, Homo sapiens
  siRNA target sequence for ZNF227 (NM_182490.1,1368-1386).
gcttcggttggagtgttaa

SEQ ID NO: 67409 - DNA, 19 bp, Homo sapiens
  siRNA target sequence for ZNF227 (NM_182490.1,1369-1387).
cttcggttggagtgttaat

SEQ ID NO: 67410 - DNA, 19 bp, Homo sapiens
  siRNA target sequence for ZNF227 (NM_182490.1,1543-1561).
ccacaattcaccattaata

SEQ ID NO: 67411 - DNA, 19 bp, Homo sapiens
  siRNA target sequence for ZNF227 (NM_182490.1,1620-1638).
gctttacccgtaatacaga

SEQ ID NO: 67412 - DNA, 19 bp, Homo sapiens
  siRNA target sequence for ZNF227 (NM_182490.1,1629-1647).
gtaatacagatctgcatat

SEQ ID NO: 67413 - DNA, 19 bp, Homo sapiens
  siRNA target sequence for ZNF227 (NM_182490.1,2132-2150).
cagtcctctggtcttcaat

SEQ ID NO: 67414 - DNA, 19 bp, Homo sapiens
  siRNA target sequence for ZNF227 (NM_182490.1,2214-2232).
gatacagttcgcagtttat

SEQ ID NO: 67415 - DNA, 19 bp, Homo sapiens
  siRNA target sequence for ZNF227 (NM_182490.1,2220-2238).
gttcgcagtttatatacca

SEQ ID NO: 67416 - DNA, 19 bp, Homo sapiens
  siRNA target sequence for ZNF227 (NM_182490.1,2293-2311).
ctttggtaggagcttgaat

SEQ ID NO: 67417 - DNA, 19 bp, Homo sapiens
  siRNA target sequence for ZNF227 (NM_182490.1,2380-2398).
cagtctcccctcaaatctt

SEQ ID NO: 67418 - DNA, 19 bp, Homo sapiens
  siRNA target sequence for ZNF227 (NM_182490.1,2526-2544).
gtgacatatgtgataagga

SEQ ID NO: 67419 - DNA, 19 bp, Homo sapiens
  siRNA target sequence for ZNF227 (NM_182490.1,2554-2572).
ccgttcacgtcttacatat

SEQ ID NO: 67420 - DNA, 19 bp, Homo sapiens
  siRNA target sequence for ZNF227 (NM_182490.1,2556-2574).
gttcacgtcttacatatca

SEQ ID NO: 67421 - DNA, 19 bp, Homo sapiens
  siRNA target sequence for ZNF227 (NM_182490.1,2562-2580).
gtcttacatatcatcagaa

SEQ ID NO: 67422 - DNA, 19 bp, Homo sapiens
  siRNA target sequence for ZNF248 (NM_021045.1,613-631).
ggaaaattatagcaatctt

SEQ ID NO: 67423 - DNA, 19 bp, Homo sapiens
  siRNA target sequence for ZNF248 (NM_021045.1,699-717).
ggatattagaaaaaggatt

SEQ ID NO: 67424 - DNA, 19 bp, Homo sapiens
  siRNA target sequence for ZNF248 (NM_021045.1,823-841).
caaaacagtaagtgtagaa

SEQ ID NO: 67425 - DNA, 19 bp, Homo sapiens
  siRNA target sequence for ZNF248 (NM_021045.1,848-866).
gatagaggaagcaaaactt

SEQ ID NO: 67426 - DNA, 19 bp, Homo sapiens
  siRNA target sequence for ZNF248 (NM_021045.1,951-969).
cgggcttaattattagtaa

SEQ ID NO: 67427 - DNA, 19 bp, Homo sapiens
  siRNA target sequence for ZNF248 (NM_021045.1,1122-1140).
caagttttggccaatcttt

SEQ ID NO: 67428 - DNA, 19 bp, Homo sapiens
  siRNA target sequence for ZNF248 (NM_021045.1,1133-1151).
caatcttttgagtatagta

SEQ ID NO: 67429 - DNA, 19 bp, Homo sapiens
  siRNA target sequence for ZNF248 (NM_021045.1,1158-1176).
gacaaggcttccatgatga

SEQ ID NO: 67430 - DNA, 19 bp, Homo sapiens
  siRNA target sequence for ZNF248 (NM_021045.1,1214-1232).
gagacagtctgtaaatata

SEQ ID NO: 67431 - DNA, 19 bp, Homo sapiens
  siRNA target sequence for ZNF248 (NM_021045.1,1218-1236).
cagtctgtaaatataacga

SEQ ID NO: 67432 - DNA, 19 bp, Homo sapiens
  siRNA target sequence for ZNF248 (NM_021045.1,1220-1238).
gtctgtaaatataacgaat

SEQ ID NO: 67433 - DNA, 19 bp, Homo sapiens
  siRNA target sequence for ZNF248 (NM_021045.1,1295-1313).
gaaatggagccgtatggat

SEQ ID NO: 67434 - DNA, 19 bp, Homo sapiens
  siRNA target sequence for ZNF248 (NM_021045.1,1336-1354).
ctgcatgaatttaaggttt

SEQ ID NO: 67435 - DNA, 19 bp, Homo sapiens
  siRNA target sequence for ZNF248 (NM_021045.1,1441-1459).
ccatcagggagcttacaca

SEQ ID NO: 67436 - DNA, 19 bp, Homo sapiens
  siRNA target sequence for ZNF248 (NM_021045.1,1469-1487).
ctccgtgaatataaagtga

SEQ ID NO: 67437 - DNA, 19 bp, Homo sapiens
  siRNA target sequence for ZNF248 (NM_021045.1,1512-1530).
ctctcttaaaacatcaaat

SEQ ID NO: 67438 - DNA, 19 bp, Homo sapiens
  siRNA target sequence for ZNF248 (NM_021045.1,1540-1558).
ggggggaaagtcttatgat

SEQ ID NO: 67439 - DNA, 19 bp, Homo sapiens
  siRNA target sequence for ZNF350 (NM_021632.2,228-246).
cccaggaatccataacact

SEQ ID NO: 67440 - DNA, 19 bp, Homo sapiens
  siRNA target sequence for ZNF350 (NM_021632.2,453-471).
cagacatatggaaagttga

SEQ ID NO: 67441 - DNA, 19 bp, Homo sapiens
  siRNA target sequence for ZNF350 (NM_021632.2,457-475).
catatggaaagttgatcat

SEQ ID NO: 67442 - DNA, 19 bp, Homo sapiens
  siRNA target sequence for ZNF350 (NM_021632.2,482-500).
gagcgcttgcagagtgaaa

SEQ ID NO: 67443 - DNA, 19 bp, Homo sapiens
  siRNA target sequence for ZNF350 (NM_021632.2,506-524).
gtgaacagaaggaaaccat

SEQ ID NO: 67444 - DNA, 19 bp, Homo sapiens
  siRNA target sequence for ZNF350 (NM_021632.2,516-534).
ggaaaccatgtcatgaaca

SEQ ID NO: 67445 - DNA, 19 bp, Homo sapiens
  siRNA target sequence for ZNF350 (NM_021632.2,517-535).
gaaaccatgtcatgaacat

SEQ ID NO: 67446 - DNA, 19 bp, Homo sapiens
  siRNA target sequence for ZNF350 (NM_021632.2,574-592).
gtttctgttagggcaaaat

SEQ ID NO: 67447 - DNA, 19 bp, Homo sapiens
  siRNA target sequence for ZNF350 (NM_021632.2,659-677).
ggctatgaaataaagaact

SEQ ID NO: 67448 - DNA, 19 bp, Homo sapiens
  siRNA target sequence for ZNF350 (NM_021632.2,728-746).
cgacttcatactgcaatta

SEQ ID NO: 67449 - DNA, 19 bp, Homo sapiens
  siRNA target sequence for ZNF350 (NM_021632.2,753-771).
ctgcaagtcaaaaactcat

SEQ ID NO: 67450 - DNA, 19 bp, Homo sapiens
  siRNA target sequence for ZNF350 (NM_021632.2,774-792).
gcactaagtcccaattcat

SEQ ID NO: 67451 - DNA, 19 bp, Homo sapiens
  siRNA target sequence for ZNF350 (NM_021632.2,882-900).
ctgatcaccaggtaatgca

SEQ ID NO: 67452 - DNA, 19 bp, Homo sapiens
  siRNA target sequence for ZNF350 (NM_021632.2,884-902).
gatcaccaggtaatgcata

SEQ ID NO: 67453 - DNA, 19 bp, Homo sapiens
  siRNA target sequence for ZNF350 (NM_021632.2,1440-1458).
ggaaagcgtttgcgtatat

SEQ ID NO: 67454 - DNA, 19 bp, Homo sapiens
  siRNA target sequence for ZNF350 (NM_021632.2,1459-1477).
gtcgtgtctggttaagcat

SEQ ID NO: 67455 - DNA, 19 bp, Homo sapiens
  siRNA target sequence for ZNF350 (NM_021632.2,1461-1479).
cgtgtctggttaagcataa

SEQ ID NO: 67456 - DNA, 19 bp, Homo sapiens
  siRNA target sequence for ZNF350 (NM_021632.2,1620-1638).
cccctcagacatcattaaa

SEQ ID NO: 67457 - DNA, 19 bp, Homo sapiens
  siRNA target sequence for ZNF354B (NM_058230.1,439-457).
gtaagagcacacctaaaat

SEQ ID NO: 67458 - DNA, 19 bp, Homo sapiens
  siRNA target sequence for ZNF354B (NM_058230.1,443-461).
gagcacacctaaaatgaca

SEQ ID NO: 67459 - DNA, 19 bp, Homo sapiens
  siRNA target sequence for ZNF354B (NM_058230.1,469-487).
ctcaaactcaggattcatt

SEQ ID NO: 67460 - DNA, 19 bp, Homo sapiens
  siRNA target sequence for ZNF354B (NM_058230.1,519-537).
gatgaaccctggaacttca

SEQ ID NO: 67461 - DNA, 19 bp, Homo sapiens
  siRNA target sequence for ZNF354B (NM_058230.1,530-548).
gaacttcatatcagaaaga

SEQ ID NO: 67462 - DNA, 19 bp, Homo sapiens
  siRNA target sequence for ZNF354B (NM_058230.1,613-631).
cagttgcccatacaaaaat

SEQ ID NO: 67463 - DNA, 19 bp, Homo sapiens
  siRNA target sequence for ZNF354B (NM_058230.1,618-636).
gcccatacaaaaatcctta

SEQ ID NO: 67464 - DNA, 19 bp, Homo sapiens
  siRNA target sequence for ZNF354B (NM_058230.1,663-681).
gaatttggccaaaacttct

SEQ ID NO: 67465 - DNA, 19 bp, Homo sapiens
  siRNA target sequence for ZNF354B (NM_058230.1,704-722).
gcaacagagatttgctaaa

SEQ ID NO: 67466 - DNA, 19 bp, Homo sapiens
  siRNA target sequence for ZNF354B (NM_058230.1,764-782).
caagcagaattcaaattta

SEQ ID NO: 67467 - DNA, 19 bp, Homo sapiens
  siRNA target sequence for ZNF354B (NM_058230.1,1026-1044).
gcatccctttgtaagcatt

SEQ ID NO: 67468 - DNA, 19 bp, Homo sapiens
  siRNA target sequence for ZNF354B (NM_058230.1,1146-1164).
gaaaatccccataaataca

SEQ ID NO: 67469 - DNA, 19 bp, Homo sapiens
  siRNA target sequence for ZNF354B (NM_058230.1,1736-1754).
gaaaccatatcgatgttta

SEQ ID NO: 67470 - DNA, 19 bp, Homo sapiens
  siRNA target sequence for ZNF354B (NM_058230.1,1740-1758).
ccatatcgatgtttagaat

SEQ ID NO: 67471 - DNA, 19 bp, Homo sapiens
  siRNA target sequence for ZNF354B (NM_058230.1,1993-2011).
ccttaaaagccgatttgca

SEQ ID NO: 67472 - DNA, 19 bp, Homo sapiens
  siRNA target sequence for ZNF354B (NM_058230.1,1994-2012).
cttaaaagccgatttgcat

SEQ ID NO: 67473 - DNA, 19 bp, Homo sapiens
  siRNA target sequence for ZNF354C (NM_014594.1,282-300).
caatgccaaagttgattca

SEQ ID NO: 67474 - DNA, 19 bp, Homo sapiens
  siRNA target sequence for ZNF354C (NM_014594.1,351-369).
cagatacccgtctaggttt

SEQ ID NO: 67475 - DNA, 19 bp, Homo sapiens
  siRNA target sequence for ZNF354C (NM_014594.1,359-377).
cgtctaggtttcaagactt

SEQ ID NO: 67476 - DNA, 19 bp, Homo sapiens
  siRNA target sequence for ZNF354C (NM_014594.1,398-416).
cctcatagacaggacattt

SEQ ID NO: 67477 - DNA, 19 bp, Homo sapiens
  siRNA target sequence for ZNF354C (NM_014594.1,399-417).
ctcatagacaggacatttt

SEQ ID NO: 67478 - DNA, 19 bp, Homo sapiens
  siRNA target sequence for ZNF354C (NM_014594.1,464-482).
gatggtcactgggacatta

SEQ ID NO: 67479 - DNA, 19 bp, Homo sapiens
  siRNA target sequence for ZNF354C (NM_014594.1,557-575).
gattcgcatgagaaaacca

SEQ ID NO: 67480 - DNA, 19 bp, Homo sapiens
  siRNA target sequence for ZNF354C (NM_014594.1,645-663).
cacaacagagtgttcctat

SEQ ID NO: 67481 - DNA, 19 bp, Homo sapiens
  siRNA target sequence for ZNF354C (NM_014594.1,654-672).
gtgttcctatagaaaggat

SEQ ID NO: 67482 - DNA, 19 bp, Homo sapiens
  siRNA target sequence for ZNF354C (NM_014594.1,665-683).
gaaaggatacccaatatgt

SEQ ID NO: 67483 - DNA, 19 bp, Homo sapiens
  siRNA target sequence for ZNF354C (NM_014594.1,752-770).
ggaaaacctcacatctgta

SEQ ID NO: 67484 - DNA, 19 bp, Homo sapiens
  siRNA target sequence for ZNF354C (NM_014594.1,753-771).
gaaaacctcacatctgtaa

SEQ ID NO: 67485 - DNA, 19 bp, Homo sapiens
  siRNA target sequence for ZNF354C (NM_014594.1,1210-1228).
cagccagtttacatctcta

SEQ ID NO: 67486 - DNA, 19 bp, Homo sapiens
  siRNA target sequence for ZNF354C (NM_014594.1,1287-1305).
gaaccttcacacgtattgt

SEQ ID NO: 67487 - DNA, 19 bp, Homo sapiens
  siRNA target sequence for ZNF354C (NM_014594.1,1299-1317).
gtattgtaacccttatcga

SEQ ID NO: 67488 - DNA, 19 bp, Homo sapiens
  siRNA target sequence for ZNF354C (NM_014594.1,1457-1475).
gcctttggttgcaaatcta

SEQ ID NO: 67489 - DNA, 19 bp, Homo sapiens
  siRNA target sequence for ZNF354C (NM_014594.1,1458-1476).
cctttggttgcaaatctaa

SEQ ID NO: 67490 - DNA, 19 bp, Homo sapiens
  siRNA target sequence for ZNF354C (NM_014594.1,1557-1575).
catttttaaccgaacatga

SEQ ID NO: 67491 - DNA, 19 bp, Homo sapiens
  siRNA target sequence for ZNF354C (NM_014594.1,1621-1639).
gaaagcctacagttacaga

SEQ ID NO: 67492 - DNA, 19 bp, Homo sapiens
  siRNA target sequence for ZNF354C (NM_014594.1,1725-1743).
cctcacttacccagtatca

SEQ ID NO: 67493 - DNA, 19 bp, Homo sapiens
  siRNA target sequence for ZNF354C (NM_014594.1,1736-1754).
cagtatcagagatttttta

SEQ ID NO: 67494 - DNA, 19 bp, Homo sapiens
  siRNA target sequence for ZNF415 (NM_018355.2,243-261).
ctgtctcgtaactgtgtaa

SEQ ID NO: 67495 - DNA, 19 bp, Homo sapiens
  siRNA target sequence for ZNF415 (NM_018355.2,247-265).
ctcgtaactgtgtaatcaa

SEQ ID NO: 67496 - DNA, 19 bp, Homo sapiens
  siRNA target sequence for ZNF415 (NM_018355.2,288-306).
ggtaacccaggagaagtat

SEQ ID NO: 67497 - DNA, 19 bp, Homo sapiens
  siRNA target sequence for ZNF415 (NM_018355.2,479-497).
cgatagaagaggtatagga

SEQ ID NO: 67498 - DNA, 19 bp, Homo sapiens
  siRNA target sequence for ZNF415 (NM_018355.2,489-507).
ggtataggaaacaagtcta

SEQ ID NO: 67499 - DNA, 19 bp, Homo sapiens
  siRNA target sequence for ZNF415 (NM_018355.2,627-645).
gtttcaccaccccaaataa

SEQ ID NO: 67500 - DNA, 19 bp, Homo sapiens
  siRNA target sequence for ZNF415 (NM_018355.2,764-782).
gtgcgacaaagccttgaat

SEQ ID NO: 67501 - DNA, 19 bp, Homo sapiens
  siRNA target sequence for ZNF415 (NM_018355.2,767-785).
cgacaaagccttgaatcat

SEQ ID NO: 67502 - DNA, 19 bp, Homo sapiens
  siRNA target sequence for ZNF415 (NM_018355.2,799-817).
ctgtacgtcaggtaagtca

SEQ ID NO: 67503 - DNA, 19 bp, Homo sapiens
  siRNA target sequence for ZNF415 (NM_018355.2,801-819).
gtacgtcaggtaagtcatt

SEQ ID NO: 67504 - DNA, 19 bp, Homo sapiens
  siRNA target sequence for ZNF426 (NM_024106.1,282-300).
gtcccatggacattatctt

SEQ ID NO: 67505 - DNA, 19 bp, Homo sapiens
  siRNA target sequence for ZNF426 (NM_024106.1,355-373).
gctgactgcctaacagatt

SEQ ID NO: 67506 - DNA, 19 bp, Homo sapiens
  siRNA target sequence for ZNF426 (NM_024106.1,358-376).
gactgcctaacagattgtt

SEQ ID NO: 67507 - DNA, 19 bp, Homo sapiens
  siRNA target sequence for ZNF426 (NM_024106.1,505-523).
gtaggaggtcagatcatca

SEQ ID NO: 67508 - DNA, 19 bp, Homo sapiens
  siRNA target sequence for ZNF426 (NM_024106.1,611-629).
cccagtggtctatacttca

SEQ ID NO: 67509 - DNA, 19 bp, Homo sapiens
  siRNA target sequence for ZNF426 (NM_024106.1,642-660).
gaggggtcagacatccatt

SEQ ID NO: 67510 - DNA, 19 bp, Homo sapiens
  siRNA target sequence for ZNF426 (NM_024106.1,651-669).
gacatccattgggatacaa

SEQ ID NO: 67511 - DNA, 19 bp, Homo sapiens
  siRNA target sequence for ZNF426 (NM_024106.1,656-674).
ccattgggatacaattgga

SEQ ID NO: 67512 - DNA, 19 bp, Homo sapiens
  siRNA target sequence for ZNF426 (NM_024106.1,657-675).
cattgggatacaattggaa

SEQ ID NO: 67513 - DNA, 19 bp, Homo sapiens
  siRNA target sequence for ZNF426 (NM_024106.1,776-794).
ggaacactcatgactgtaa

SEQ ID NO: 67514 - DNA, 19 bp, Homo sapiens
  siRNA target sequence for ZNF426 (NM_024106.1,777-795).
gaacactcatgactgtaat

SEQ ID NO: 67515 - DNA, 19 bp, Homo sapiens
  siRNA target sequence for ZNF426 (NM_024106.1,798-816).
gtatggaaaagatttcctt

SEQ ID NO: 67516 - DNA, 19 bp, Homo sapiens
  siRNA target sequence for ZNF426 (NM_024106.1,882-900).
cagcctgacaccaaatatt

SEQ ID NO: 67517 - DNA, 19 bp, Homo sapiens
  siRNA target sequence for ZNF426 (NM_024106.1,909-927).
gagaactagcacacaagaa

SEQ ID NO: 67518 - DNA, 19 bp, Homo sapiens
  siRNA target sequence for ZNF426 (NM_024106.1,974-992).
cataccttcaggcacatat

SEQ ID NO: 67519 - DNA, 19 bp, Homo sapiens
  siRNA target sequence for ZNF426 (NM_024106.1,978-996).
ccttcaggcacatatgaga

SEQ ID NO: 67520 - DNA, 19 bp, Homo sapiens
  siRNA target sequence for ZNF426 (NM_024106.1,1017-1035).
ctacgaatggaggaattat

SEQ ID NO: 67521 - DNA, 19 bp, Homo sapiens
  siRNA target sequence for ZNF426 (NM_024106.1,1029-1047).
gaattatgggccaggtttt

SEQ ID NO: 67522 - DNA, 19 bp, Homo sapiens
  siRNA target sequence for ZNF426 (NM_024106.1,1139-1157).
cagcctacctcagtattca

SEQ ID NO: 67523 - DNA, 19 bp, Homo sapiens
  siRNA target sequence for ZNF426 (NM_024106.1,1308-1326).
ctcgggccttagtatgcat

SEQ ID NO: 67524 - DNA, 19 bp, Homo sapiens
  siRNA target sequence for ZNF426 (NM_024106.1,1518-1536).
ggcctgtgagtgtaagata

SEQ ID NO: 67525 - DNA, 19 bp, Homo sapiens
  siRNA target sequence for ZNF426 (NM_024106.1,1519-1537).
gcctgtgagtgtaagatat

SEQ ID NO: 67526 - DNA, 19 bp, Homo sapiens
  siRNA target sequence for ZNF426 (NM_024106.1,1552-1570).
gggtatccctcatgtctta

SEQ ID NO: 67527 - DNA, 19 bp, Homo sapiens
  siRNA target sequence for ZNF426 (NM_024106.1,1553-1571).
ggtatccctcatgtcttaa

SEQ ID NO: 67528 - DNA, 19 bp, Homo sapiens
  siRNA target sequence for ZNF426 (NM_024106.1,1554-1572).
gtatccctcatgtcttaat

SEQ ID NO: 67529 - DNA, 19 bp, Homo sapiens
  siRNA target sequence for ZNF426 (NM_024106.1,1638-1656).
ctattccacccaccttaaa

SEQ ID NO: 67530 - DNA, 19 bp, Homo sapiens
  siRNA target sequence for ZNF454 (NM_182594.1,441-459).
gacccaaaccagatacgtt

SEQ ID NO: 67531 - DNA, 19 bp, Homo sapiens
  siRNA target sequence for ZNF454 (NM_182594.1,516-534).
gtcttgactggatgactat

SEQ ID NO: 67532 - DNA, 19 bp, Homo sapiens
  siRNA target sequence for ZNF454 (NM_182594.1,731-749).
gaatccgggagcactatga

SEQ ID NO: 67533 - DNA, 19 bp, Homo sapiens
  siRNA target sequence for ZNF454 (NM_182594.1,779-797).
ggatttcaacctagcaaaa

SEQ ID NO: 67534 - DNA, 19 bp, Homo sapiens
  siRNA target sequence for ZNF454 (NM_182594.1,827-845).
gtcttctctaagagttcaa

SEQ ID NO: 67535 - DNA, 19 bp, Homo sapiens
  siRNA target sequence for ZNF454 (NM_182594.1,832-850).
ctctaagagttcaactctt

SEQ ID NO: 67536 - DNA, 19 bp, Homo sapiens
  siRNA target sequence for ZNF454 (NM_182594.1,838-856).
gagttcaactcttaataaa

SEQ ID NO: 67537 - DNA, 19 bp, Homo sapiens
  siRNA target sequence for ZNF454 (NM_182594.1,952-970).
gagtacgcaccttatccat

SEQ ID NO: 67538 - DNA, 19 bp, Homo sapiens
  siRNA target sequence for ZNF454 (NM_182594.1,1044-1062).
cacttacgtaccatcagaa

SEQ ID NO: 67539 - DNA, 19 bp, Homo sapiens
  siRNA target sequence for ZNF471 (NM_020813.1,230-248).
cctgctcagaagcgtttat

SEQ ID NO: 67540 - DNA, 19 bp, Homo sapiens
  siRNA target sequence for ZNF471 (NM_020813.1,233-251).
gctcagaagcgtttataca

SEQ ID NO: 67541 - DNA, 19 bp, Homo sapiens
  siRNA target sequence for ZNF471 (NM_020813.1,243-261).
gtttatacaggagtatgat

SEQ ID NO: 67542 - DNA, 19 bp, Homo sapiens
  siRNA target sequence for ZNF471 (NM_020813.1,385-403).
ctcagattgggaatctata

SEQ ID NO: 67543 - DNA, 19 bp, Homo sapiens
  siRNA target sequence for ZNF471 (NM_020813.1,387-405).
cagattgggaatctatata

SEQ ID NO: 67544 - DNA, 19 bp, Homo sapiens
  siRNA target sequence for ZNF471 (NM_020813.1,427-445).
gaagcagttcatgtatgat

SEQ ID NO: 67545 - DNA, 19 bp, Homo sapiens
  siRNA target sequence for ZNF471 (NM_020813.1,538-556).
gggaagtcatgagatgttt

SEQ ID NO: 67546 - DNA, 19 bp, Homo sapiens
  siRNA target sequence for ZNF471 (NM_020813.1,543-561).
gtcatgagatgtttagcaa

SEQ ID NO: 67547 - DNA, 19 bp, Homo sapiens
  siRNA target sequence for ZNF471 (NM_020813.1,637-655).
ccatctggaaaacatagaa

SEQ ID NO: 67548 - DNA, 19 bp, Homo sapiens
  siRNA target sequence for ZNF471 (NM_020813.1,1114-1132).
cagtgatggctcgtctttt

SEQ ID NO: 67549 - DNA, 19 bp, Homo sapiens
  siRNA target sequence for ZNF471 (NM_020813.1,1221-1239).
gtcactggaggagttatca

SEQ ID NO: 67550 - DNA, 19 bp, Homo sapiens
  siRNA target sequence for ZNF471 (NM_020813.1,1225-1243).
ctggaggagttatcatact

SEQ ID NO: 67551 - DNA, 19 bp, Homo sapiens
  siRNA target sequence for ZNF471 (NM_020813.1,1541-1559).
cagaatgtacaccttgtta

SEQ ID NO: 67552 - DNA, 19 bp, Homo sapiens
  siRNA target sequence for ZNF471 (NM_020813.1,1543-1561).
gaatgtacaccttgttagt

SEQ ID NO: 67553 - DNA, 19 bp, Homo sapiens
  siRNA target sequence for ZNF471 (NM_020813.1,1547-1565).
gtacaccttgttagtcatt

SEQ ID NO: 67554 - DNA, 19 bp, Homo sapiens
  siRNA target sequence for ZNF471 (NM_020813.1,1550-1568).
caccttgttagtcatttga

SEQ ID NO: 67555 - DNA, 19 bp, Homo sapiens
  siRNA target sequence for ZNF471 (NM_020813.1,1916-1934).
ggccaaaggccctatcagt

SEQ ID NO: 67556 - DNA, 19 bp, Homo sapiens
  siRNA target sequence for ZNF471 (NM_020813.1,1951-1969).
ggcgttcagaagaaagtta

SEQ ID NO: 67557 - DNA, 19 bp, Homo sapiens
  siRNA target sequence for ZNF471 (NM_020813.1,1952-1970).
gcgttcagaagaaagttat

SEQ ID NO: 67558 - DNA, 19 bp, Homo sapiens
  siRNA target sequence for ZNF514 (NM_032788.1,488-506).
cattctgggccttctagta

SEQ ID NO: 67559 - DNA, 19 bp, Homo sapiens
  siRNA target sequence for ZNF514 (NM_032788.1,494-512).
gggccttctagtatccaaa

SEQ ID NO: 67560 - DNA, 19 bp, Homo sapiens
  siRNA target sequence for ZNF514 (NM_032788.1,504-522).
gtatccaaaccatatgtga

SEQ ID NO: 67561 - DNA, 19 bp, Homo sapiens
  siRNA target sequence for ZNF514 (NM_032788.1,607-625).
ctaaatccaaggaatcaat

SEQ ID NO: 67562 - DNA, 19 bp, Homo sapiens
  siRNA target sequence for ZNF514 (NM_032788.1,696-714).
ctgcagttctcgaagttga

SEQ ID NO: 67563 - DNA, 19 bp, Homo sapiens
  siRNA target sequence for ZNF514 (NM_032788.1,698-716).
gcagttctcgaagttgaaa

SEQ ID NO: 67564 - DNA, 19 bp, Homo sapiens
  siRNA target sequence for ZNF514 (NM_032788.1,727-745).
gttgtgatggccagttaga

SEQ ID NO: 67565 - DNA, 19 bp, Homo sapiens
  siRNA target sequence for ZNF514 (NM_032788.1,730-748).
gtgatggccagttagagat

SEQ ID NO: 67566 - DNA, 19 bp, Homo sapiens
  siRNA target sequence for ZNF514 (NM_032788.1,776-794).
gaaacaaatgtcaaccatt

SEQ ID NO: 67567 - DNA, 19 bp, Homo sapiens
  siRNA target sequence for ZNF514 (NM_032788.1,785-803).
gtcaaccattcacaaatct

SEQ ID NO: 67568 - DNA, 19 bp, Homo sapiens
  siRNA target sequence for ZNF514 (NM_032788.1,822-840).
gattataaatggaatggat

SEQ ID NO: 67569 - DNA, 19 bp, Homo sapiens
  siRNA target sequence for ZNF514 (NM_032788.1,845-863).
gagaagcttaggtttaaga

SEQ ID NO: 67570 - DNA, 19 bp, Homo sapiens
  siRNA target sequence for ZNF514 (NM_032788.1,862-880).
gatcagtccttgttaacca

SEQ ID NO: 67571 - DNA, 19 bp, Homo sapiens
  siRNA target sequence for ZNF514 (NM_032788.1,893-911).
catgggagaaggatcttat

SEQ ID NO: 67572 - DNA, 19 bp, Homo sapiens
  siRNA target sequence for ZNF514 (NM_032788.1,968-986).
cccagaaaagaaatcttgt

SEQ ID NO: 67573 - DNA, 19 bp, Homo sapiens
  siRNA target sequence for ZNF75A (NM_153028.1,662-680).
ggatagtgccggaaaatct

SEQ ID NO: 67574 - DNA, 19 bp, Homo sapiens
  siRNA target sequence for ZNF75A (NM_153028.1,679-697).
ctcctacagggttaaagct

SEQ ID NO: 67575 - DNA, 19 bp, Homo sapiens
  siRNA target sequence for ZNF75A (NM_153028.1,753-771).
gcatcagcaggcgtcatat

SEQ ID NO: 67576 - DNA, 19 bp, Homo sapiens
  siRNA target sequence for ZNF75A (NM_153028.1,757-775).
cagcaggcgtcatatcaaa

SEQ ID NO: 67577 - DNA, 19 bp, Homo sapiens
  siRNA target sequence for ZNF75A (NM_153028.1,759-777).
gcaggcgtcatatcaaaaa

SEQ ID NO: 67578 - DNA, 19 bp, Homo sapiens
  siRNA target sequence for ZNF75A (NM_153028.1,760-778).
caggcgtcatatcaaaaaa

SEQ ID NO: 67579 - DNA, 19 bp, Homo sapiens
  siRNA target sequence for ZNF75A (NM_153028.1,786-804).
gtaaaagttccccagaaaa

SEQ ID NO: 67580 - DNA, 19 bp, Homo sapiens
  siRNA target sequence for ZNF75A (NM_153028.1,905-923).
gctgctcaaacttatggat

SEQ ID NO: 67581 - DNA, 19 bp, Homo sapiens
  siRNA target sequence for ZNF75A (NM_153028.1,920-938).
ggatcgtcacaagaaagat

SEQ ID NO: 67582 - DNA, 19 bp, Homo sapiens
  siRNA target sequence for ZNF75A (NM_153028.1,1055-1073).
gtgtgataagaggtttaga

SEQ ID NO: 67583 - DNA, 19 bp, Homo sapiens
  siRNA target sequence for ZNF77 (NM_021217.1,210-228).
cttgcctccttggattgtt

SEQ ID NO: 67584 - DNA, 19 bp, Homo sapiens
  siRNA target sequence for ZNF77 (NM_021217.1,213-231).
gcctccttggattgttaca

SEQ ID NO: 67585 - DNA, 19 bp, Homo sapiens
  siRNA target sequence for ZNF77 (NM_021217.1,221-239).
ggattgttacatttatgtt

SEQ ID NO: 67586 - DNA, 19 bp, Homo sapiens
  siRNA target sequence for ZNF77 (NM_021217.1,222-240).
gattgttacatttatgtta

SEQ ID NO: 67587 - DNA, 19 bp, Homo sapiens
  siRNA target sequence for ZNF77 (NM_021217.1,269-287).
cgtttttgggaatggaata

SEQ ID NO: 67588 - DNA, 19 bp, Homo sapiens
  siRNA target sequence for ZNF77 (NM_021217.1,493-511).
gttaccctaccgaagctaa

SEQ ID NO: 67589 - DNA, 19 bp, Homo sapiens
  siRNA target sequence for ZNF77 (NM_021217.1,573-591).
cagagaccgtgtaaggaat

SEQ ID NO: 67590 - DNA, 19 bp, Homo sapiens
  siRNA target sequence for ZNF77 (NM_021217.1,679-697).
ggacagcatctgtgacata

SEQ ID NO: 67591 - DNA, 19 bp, Homo sapiens
  siRNA target sequence for ZNF77 (NM_021217.1,773-791).
caggggacatgtgaatagt

SEQ ID NO: 67592 - DNA, 19 bp, Homo sapiens
  siRNA target sequence for ZNF77 (NM_021217.1,775-793).
ggggacatgtgaatagtca

SEQ ID NO: 67593 - DNA, 19 bp, Homo sapiens
  siRNA target sequence for ZNF77 (NM_021217.1,1059-1077).
ccctgtcagtgtaaacatt

SEQ ID NO: 67594 - DNA, 19 bp, Homo sapiens
  siRNA target sequence for ZNF77 (NM_021217.1,1081-1099).
gaaaagcgttcacttgtta

SEQ ID NO: 67595 - DNA, 19 bp, Homo sapiens
  siRNA target sequence for ZNF77 (NM_021217.1,1191-1209).
ctgcgagcacacatgagaa

SEQ ID NO: 67596 - DNA, 19 bp, Homo sapiens
  siRNA target sequence for ZNF77 (NM_021217.1,1259-1277).
cggatgtcccacttacttt

SEQ ID NO: 67597 - DNA, 19 bp, Homo sapiens
  siRNA target sequence for ZNF77 (NM_021217.1,1260-1278).
ggatgtcccacttacttta

SEQ ID NO: 67598 - DNA, 19 bp, Homo sapiens
  siRNA target sequence for ZNF77 (NM_021217.1,1268-1286).
cacttactttagaagacat

SEQ ID NO: 67599 - DNA, 19 bp, Homo sapiens
  siRNA target sequence for ZNF77 (NM_021217.1,1511-1529).
cagccacgctcagtacttt

SEQ ID NO: 67600 - DNA, 19 bp, Homo sapiens
  siRNA target sequence for ZNF77 (NM_021217.1,1514-1532).
ccacgctcagtactttcaa

SEQ ID NO: 67601 - DNA, 19 bp, Homo sapiens
  siRNA target sequence for ZNF77 (NM_021217.1,1515-1533).
cacgctcagtactttcaaa

SEQ ID NO: 67602 - DNA, 19 bp, Homo sapiens
  siRNA target sequence for ZNF92 (NM_007139.2,352-370).
gctaagaaaagaccataaa

SEQ ID NO: 67603 - DNA, 19 bp, Homo sapiens
  siRNA target sequence for ZNF92 (NM_007139.2,432-450).
ctactgacagcaagatatt

SEQ ID NO: 67604 - DNA, 19 bp, Homo sapiens
  siRNA target sequence for ZNF92 (NM_007139.2,902-920).
cagttctcgattcttaata

SEQ ID NO: 67605 - DNA, 19 bp, Homo sapiens
  siRNA target sequence for ZNF92 (NM_007139.2,904-922).
gttctcgattcttaataaa

SEQ ID NO: 67606 - DNA, 19 bp, Homo sapiens
  siRNA target sequence for 13CDNA73 (NM_023037.1,518-536).
ggcttctttgagatcagta

SEQ ID NO: 67607 - DNA, 19 bp, Homo sapiens
  siRNA target sequence for 13CDNA73 (NM_023037.1,523-541).
ctttgagatcagtatcaaa

SEQ ID NO: 67608 - DNA, 19 bp, Homo sapiens
  siRNA target sequence for 13CDNA73 (NM_023037.1,527-545).
gagatcagtatcaaatatt

SEQ ID NO: 67609 - DNA, 19 bp, Homo sapiens
  siRNA target sequence for 13CDNA73 (NM_023037.1,573-591).
ccgttggcaacggttacat

SEQ ID NO: 67610 - DNA, 19 bp, Homo sapiens
  siRNA target sequence for 13CDNA73 (NM_023037.1,575-593).
gttggcaacggttacatca

SEQ ID NO: 67611 - DNA, 19 bp, Homo sapiens
  siRNA target sequence for 13CDNA73 (NM_023037.1,664-682).
ggacccagacagtaaacca

SEQ ID NO: 67612 - DNA, 19 bp, Homo sapiens
  siRNA target sequence for 13CDNA73 (NM_023037.1,728-746).
gctgaacgcaagattcgta

SEQ ID NO: 67613 - DNA, 19 bp, Homo sapiens
  siRNA target sequence for 13CDNA73 (NM_023037.1,729-747).
ctgaacgcaagattcgtat

SEQ ID NO: 67614 - DNA, 19 bp, Homo sapiens
  siRNA target sequence for 13CDNA73 (NM_023037.1,734-752).
cgcaagattcgtatcatta

SEQ ID NO: 67615 - DNA, 19 bp, Homo sapiens
  siRNA target sequence for 13CDNA73 (NM_023037.1,735-753).
gcaagattcgtatcattat

SEQ ID NO: 67616 - DNA, 19 bp, Homo sapiens
  siRNA target sequence for 13CDNA73 (NM_023037.1,831-849).
caatgagctccctttctga

SEQ ID NO: 67617 - DNA, 19 bp, Homo sapiens
  siRNA target sequence for 13CDNA73 (NM_023037.1,861-879).
cttccattctacgtacatt

SEQ ID NO: 67618 - DNA, 19 bp, Homo sapiens
  siRNA target sequence for 13CDNA73 (NM_023037.1,907-925).
cattgaggatgaatcacat

SEQ ID NO: 67619 - DNA, 19 bp, Homo sapiens
  siRNA target sequence for 13CDNA73 (NM_023037.1,911-929).
gaggatgaatcacatgaat

SEQ ID NO: 67620 - DNA, 19 bp, Homo sapiens
  siRNA target sequence for 13CDNA73 (NM_023037.1,995-1013).
cgggacctcgccattgatt

SEQ ID NO: 67621 - DNA, 19 bp, Homo sapiens
  siRNA target sequence for 13CDNA73 (NM_023037.1,997-1015).
ggacctcgccattgatttt

SEQ ID NO: 67622 - DNA, 19 bp, Homo sapiens
  siRNA target sequence for 13CDNA73 (NM_023037.1,998-1016).
gacctcgccattgatttta

SEQ ID NO: 67623 - DNA, 19 bp, Homo sapiens
  siRNA target sequence for 13CDNA73 (NM_023037.1,1000-1018).
cctcgccattgattttatt

SEQ ID NO: 67624 - DNA, 19 bp, Homo sapiens
  siRNA target sequence for 13CDNA73 (NM_023037.1,1028-1046).
gtattaatagaagttttga

SEQ ID NO: 67625 - DNA, 19 bp, Homo sapiens
  siRNA target sequence for 13CDNA73 (NM_023037.1,1140-1158).
gtcccaacactggcaatat

SEQ ID NO: 67626 - DNA, 19 bp, Homo sapiens
  siRNA target sequence for 13CDNA73 (NM_023037.1,1218-1236).
ctgctgtaaagaagaaatt

SEQ ID NO: 67627 - DNA, 19 bp, Homo sapiens
  siRNA target sequence for 13CDNA73 (NM_023037.1,1240-1258).
ggcggagctaaaagaatta

SEQ ID NO: 67628 - DNA, 19 bp, Homo sapiens
  siRNA target sequence for 13CDNA73 (NM_023037.1,1283-1301).
gtggttcaaagcattatca

SEQ ID NO: 67629 - DNA, 19 bp, Homo sapiens
  siRNA target sequence for 13CDNA73 (NM_023037.1,1293-1311).
gcattatcagcttaataat

SEQ ID NO: 67630 - DNA, 19 bp, Homo sapiens
  siRNA target sequence for 13CDNA73 (NM_023037.1,1314-1332).
gcatgaaattctttcgaat

SEQ ID NO: 67631 - DNA, 19 bp, Homo sapiens
  siRNA target sequence for 13CDNA73 (NM_023037.1,1324-1342).
ctttcgaattaagatgtat

SEQ ID NO: 67632 - DNA, 19 bp, Homo sapiens
  siRNA target sequence for 13CDNA73 (NM_023037.1,1358-1376).
gaggcctctcttcagttta

SEQ ID NO: 67633 - DNA, 19 bp, Homo sapiens
  siRNA target sequence for 13CDNA73 (NM_023037.1,1379-1397).
caggaatgtgcacattact

SEQ ID NO: 67634 - DNA, 19 bp, Homo sapiens
  siRNA target sequence for 13CDNA73 (NM_023037.1,1431-1449).
ccttggctgggctttttgt

SEQ ID NO: 67635 - DNA, 19 bp, Homo sapiens
  siRNA target sequence for 13CDNA73 (NM_023037.1,1435-1453).
ggctgggctttttgttgaa

SEQ ID NO: 67636 - DNA, 19 bp, Homo sapiens
  siRNA target sequence for 13CDNA73 (NM_023037.1,1496-1514).
gttccctgccttagaaatt

SEQ ID NO: 67637 - DNA, 19 bp, Homo sapiens
  siRNA target sequence for 13CDNA73 (NM_023037.1,1517-1535).
gtggaaagcctgtatgaca

SEQ ID NO: 67638 - DNA, 19 bp, Homo sapiens
  siRNA target sequence for 13CDNA73 (NM_023037.1,1537-1555).
cacgctggaactttcttct

SEQ ID NO: 67639 - DNA, 19 bp, Homo sapiens
  siRNA target sequence for 13CDNA73 (NM_023037.1,1554-1572).
ctcgaaagaagcattcctt

SEQ ID NO: 67640 - DNA, 19 bp, Homo sapiens
  siRNA target sequence for 13CDNA73 (NM_023037.1,1628-1646).
ctgaacaggtggcacattt

SEQ ID NO: 67641 - DNA, 19 bp, Homo sapiens
  siRNA target sequence for 13CDNA73 (NM_023037.1,1657-1675).
ctgcttgtccaaccttaaa

SEQ ID NO: 67642 - DNA, 19 bp, Homo sapiens
  siRNA target sequence for 13CDNA73 (NM_023037.1,1731-1749).
gggtttacatgattcgaat

SEQ ID NO: 67643 - DNA, 19 bp, Homo sapiens
  siRNA target sequence for 13CDNA73 (NM_023037.1,1732-1750).
ggtttacatgattcgaatt

SEQ ID NO: 67644 - DNA, 19 bp, Homo sapiens
  siRNA target sequence for 13CDNA73 (NM_023037.1,1770-1788).
ctactcagagccgacttat

SEQ ID NO: 67645 - DNA, 19 bp, Homo sapiens
  siRNA target sequence for 13CDNA73 (NM_023037.1,1775-1793).
cagagccgacttataacca

SEQ ID NO: 67646 - DNA, 19 bp, Homo sapiens
  siRNA target sequence for 13CDNA73 (NM_023037.1,1781-1799).
cgacttataaccatcatca

SEQ ID NO: 67647 - DNA, 19 bp, Homo sapiens
  siRNA target sequence for 13CDNA73 (NM_023037.1,1841-1859).
gacatgcctctgaacatct

SEQ ID NO: 67648 - DNA, 19 bp, Homo sapiens
  siRNA target sequence for 13CDNA73 (NM_023037.1,1879-1897).
cattgcccaggaacgttta

SEQ ID NO: 67649 - DNA, 19 bp, Homo sapiens
  siRNA target sequence for 13CDNA73 (NM_023037.1,1883-1901).
gcccaggaacgtttagatt

SEQ ID NO: 67650 - DNA, 19 bp, Homo sapiens
  siRNA target sequence for 13CDNA73 (NM_023037.1,2078-2096).
ggaaacacgttaagagtaa

SEQ ID NO: 67651 - DNA, 19 bp, Homo sapiens
  siRNA target sequence for 13CDNA73 (NM_023037.1,2079-2097).
gaaacacgttaagagtaaa

SEQ ID NO: 67652 - DNA, 19 bp, Homo sapiens
  siRNA target sequence for 13CDNA73 (NM_023037.1,2103-2121).
catatttgagtaaaacact

SEQ ID NO: 67653 - DNA, 19 bp, Homo sapiens
  siRNA target sequence for 13CDNA73 (NM_023037.1,2110-2128).
gagtaaaacactaactgaa

SEQ ID NO: 67654 - DNA, 19 bp, Homo sapiens
  siRNA target sequence for 13CDNA73 (NM_023037.1,2147-2165).
ggcatgtccttatattact

SEQ ID NO: 67655 - DNA, 19 bp, Homo sapiens
  siRNA target sequence for 13CDNA73 (NM_023037.1,2164-2182).
ctctcaagtacgaaaagct

SEQ ID NO: 67656 - DNA, 19 bp, Homo sapiens
  siRNA target sequence for 13CDNA73 (NM_023037.1,2200-2218).
gcaccttgataaagaagta

SEQ ID NO: 67657 - DNA, 19 bp, Homo sapiens
  siRNA target sequence for 13CDNA73 (NM_023037.1,2213-2231).
gaagtaggaaggtgtatga

SEQ ID NO: 67658 - DNA, 19 bp, Homo sapiens
  siRNA target sequence for 13CDNA73 (NM_023037.1,2353-2371).
gatgtcaaaacttgaactt

SEQ ID NO: 67659 - DNA, 19 bp, Homo sapiens
  siRNA target sequence for 13CDNA73 (NM_023037.1,2356-2374).
gtcaaaacttgaacttatt

SEQ ID NO: 67660 - DNA, 19 bp, Homo sapiens
  siRNA target sequence for 13CDNA73 (NM_023037.1,2358-2376).
caaaacttgaacttattga

SEQ ID NO: 67661 - DNA, 19 bp, Homo sapiens
  siRNA target sequence for 13CDNA73 (NM_023037.1,2383-2401).
ggctaggctctctattcat

SEQ ID NO: 67662 - DNA, 19 bp, Homo sapiens
  siRNA target sequence for 13CDNA73 (NM_023037.1,2384-2402).
gctaggctctctattcata

SEQ ID NO: 67663 - DNA, 19 bp, Homo sapiens
  siRNA target sequence for 13CDNA73 (NM_023037.1,2385-2403).
ctaggctctctattcatat

SEQ ID NO: 67664 - DNA, 19 bp, Homo sapiens
  siRNA target sequence for 13CDNA73 (NM_023037.1,2436-2454).
ctcttcagggtttacttgt

SEQ ID NO: 67665 - DNA, 19 bp, Homo sapiens
  siRNA target sequence for 13CDNA73 (NM_023037.1,2507-2525).
ctccgggaagtaaatgata

SEQ ID NO: 67666 - DNA, 19 bp, Homo sapiens
  siRNA target sequence for 13CDNA73 (NM_023037.1,2511-2529).
gggaagtaaatgatatgca

SEQ ID NO: 67667 - DNA, 19 bp, Homo sapiens
  siRNA target sequence for 13CDNA73 (NM_023037.1,2512-2530).
ggaagtaaatgatatgcat

SEQ ID NO: 67668 - DNA, 19 bp, Homo sapiens
  siRNA target sequence for 13CDNA73 (NM_023037.1,2572-2590).
gctcacccagtggaaacta

SEQ ID NO: 67669 - DNA, 19 bp, Homo sapiens
  siRNA target sequence for 13CDNA73 (NM_023037.1,2624-2642).
gccaacaaaatcagaaatt

SEQ ID NO: 67670 - DNA, 19 bp, Homo sapiens
  siRNA target sequence for 13CDNA73 (NM_023037.1,2713-2731).
cgctgtagaaggttttgct

SEQ ID NO: 67671 - DNA, 19 bp, Homo sapiens
  siRNA target sequence for 13CDNA73 (NM_023037.1,2765-2783).
cgcaaactgtccgttttaa

SEQ ID NO: 67672 - DNA, 19 bp, Homo sapiens
  siRNA target sequence for 13CDNA73 (NM_023037.1,2766-2784).
gcaaactgtccgttttaat

SEQ ID NO: 67673 - DNA, 19 bp, Homo sapiens
  siRNA target sequence for 13CDNA73 (NM_023037.1,2767-2785).
caaactgtccgttttaata

SEQ ID NO: 67674 - DNA, 19 bp, Homo sapiens
  siRNA target sequence for 13CDNA73 (NM_023037.1,2791-2809).
ggaaattcgagcgttgttt

SEQ ID NO: 67675 - DNA, 19 bp, Homo sapiens
  siRNA target sequence for 13CDNA73 (NM_023037.1,2836-2854).
cgacaggccgatgattgat

SEQ ID NO: 67676 - DNA, 19 bp, Homo sapiens
  siRNA target sequence for 13CDNA73 (NM_023037.1,2855-2873).
gtcatggatcagctaagtt

SEQ ID NO: 67677 - DNA, 19 bp, Homo sapiens
  siRNA target sequence for 13CDNA73 (NM_023037.1,2857-2875).
catggatcagctaagttct

SEQ ID NO: 67678 - DNA, 19 bp, Homo sapiens
  siRNA target sequence for 13CDNA73 (NM_023037.1,2977-2995).
cctggtcaatagccattat

SEQ ID NO: 67679 - DNA, 19 bp, Homo sapiens
  siRNA target sequence for 13CDNA73 (NM_023037.1,2980-2998).
ggtcaatagccattatgat

SEQ ID NO: 67680 - DNA, 19 bp, Homo sapiens
  siRNA target sequence for 13CDNA73 (NM_023037.1,3008-3026).
ccttcccatgtctggatat

SEQ ID NO: 67681 - DNA, 19 bp, Homo sapiens
  siRNA target sequence for 13CDNA73 (NM_023037.1,3161-3179).
cctctggtggacccaaata

SEQ ID NO: 67682 - DNA, 19 bp, Homo sapiens
  siRNA target sequence for 13CDNA73 (NM_023037.1,3210-3228).
ccggcagcggagacaacta

SEQ ID NO: 67683 - DNA, 19 bp, Homo sapiens
  siRNA target sequence for 13CDNA73 (NM_023037.1,3213-3231).
gcagcggagacaactatgt

SEQ ID NO: 67684 - DNA, 19 bp, Homo sapiens
  siRNA target sequence for 13CDNA73 (NM_023037.1,3214-3232).
cagcggagacaactatgtt

SEQ ID NO: 67685 - DNA, 19 bp, Homo sapiens
  siRNA target sequence for 13CDNA73 (NM_023037.1,3217-3235).
cggagacaactatgttact

SEQ ID NO: 67686 - DNA, 19 bp, Homo sapiens
  siRNA target sequence for 13CDNA73 (NM_023037.1,3230-3248).
gttactttgtggagaaatt

SEQ ID NO: 67687 - DNA, 19 bp, Homo sapiens
  siRNA target sequence for 13CDNA73 (NM_023037.1,3238-3256).
gtggagaaattacctaatt

SEQ ID NO: 67688 - DNA, 19 bp, Homo sapiens
  siRNA target sequence for 13CDNA73 (NM_023037.1,3269-3287).
gttgcaaaacccagtatta

SEQ ID NO: 67689 - DNA, 19 bp, Homo sapiens
  siRNA target sequence for 13CDNA73 (NM_023037.1,3381-3399).
catcggtgggagttctgtt

SEQ ID NO: 67690 - DNA, 19 bp, Homo sapiens
  siRNA target sequence for 13CDNA73 (NM_023037.1,3384-3402).
cggtgggagttctgttaaa

SEQ ID NO: 67691 - DNA, 19 bp, Homo sapiens
  siRNA target sequence for 13CDNA73 (NM_023037.1,3439-3457).
gatcacagagtccttagtt

SEQ ID NO: 67692 - DNA, 19 bp, Homo sapiens
  siRNA target sequence for 13CDNA73 (NM_023037.1,3446-3464).
gagtccttagttttaggat

SEQ ID NO: 67693 - DNA, 19 bp, Homo sapiens
  siRNA target sequence for 13CDNA73 (NM_023037.1,3448-3466).
gtccttagttttaggattt

SEQ ID NO: 67694 - DNA, 19 bp, Homo sapiens
  siRNA target sequence for 13CDNA73 (NM_023037.1,3451-3469).
cttagttttaggatttgga

SEQ ID NO: 67695 - DNA, 19 bp, Homo sapiens
  siRNA target sequence for 13CDNA73 (NM_023037.1,3480-3498).
cccttgttttcagagaatt

SEQ ID NO: 67696 - DNA, 19 bp, Homo sapiens
  siRNA target sequence for 13CDNA73 (NM_023037.1,3503-3521).
gaagaacttcatccattaa

SEQ ID NO: 67697 - DNA, 19 bp, Homo sapiens
  siRNA target sequence for 13CDNA73 (NM_023037.1,3506-3524).
gaacttcatccattaatga

SEQ ID NO: 67698 - DNA, 19 bp, Homo sapiens
  siRNA target sequence for 13CDNA73 (NM_023037.1,3564-3582).
gagaacggcgagacttgtt

SEQ ID NO: 67699 - DNA, 19 bp, Homo sapiens
  siRNA target sequence for 13CDNA73 (NM_023037.1,3566-3584).
gaacggcgagacttgttaa

SEQ ID NO: 67700 - DNA, 19 bp, Homo sapiens
  siRNA target sequence for 13CDNA73 (NM_023037.1,3577-3595).
cttgttaaggctacaacta

SEQ ID NO: 67701 - DNA, 19 bp, Homo sapiens
  siRNA target sequence for 13CDNA73 (NM_023037.1,3580-3598).
gttaaggctacaactactt

SEQ ID NO: 67702 - DNA, 19 bp, Homo sapiens
  siRNA target sequence for 13CDNA73 (NM_023037.1,3585-3603).
ggctacaactacttcgaat

SEQ ID NO: 67703 - DNA, 19 bp, Homo sapiens
  siRNA target sequence for 13CDNA73 (NM_023037.1,3586-3604).
gctacaactacttcgaatt

SEQ ID NO: 67704 - DNA, 19 bp, Homo sapiens
  siRNA target sequence for 13CDNA73 (NM_023037.1,3617-3635).
gctgatgctggtgtaataa

SEQ ID NO: 67705 - DNA, 19 bp, Homo sapiens
  siRNA target sequence for 13CDNA73 (NM_023037.1,3654-3672).
ccctagagcgggatacttt

SEQ ID NO: 67706 - DNA, 19 bp, Homo sapiens
  siRNA target sequence for 13CDNA73 (NM_023037.1,3655-3673).
cctagagcgggatacttta

SEQ ID NO: 67707 - DNA, 19 bp, Homo sapiens
  siRNA target sequence for 13CDNA73 (NM_023037.1,3783-3801).
caatggtggccaacttgat

SEQ ID NO: 67708 - DNA, 19 bp, Homo sapiens
  siRNA target sequence for 13CDNA73 (NM_023037.1,3856-3874).
gcaccaccttttcatctta

SEQ ID NO: 67709 - DNA, 19 bp, Homo sapiens
  siRNA target sequence for 13CDNA73 (NM_023037.1,3891-3909).
gacccttcagcattatgtt

SEQ ID NO: 67710 - DNA, 19 bp, Homo sapiens
  siRNA target sequence for 13CDNA73 (NM_023037.1,3930-3948).
gtgacagaaatcatcagat

SEQ ID NO: 67711 - DNA, 19 bp, Homo sapiens
  siRNA target sequence for 13CDNA73 (NM_023037.1,3932-3950).
gacagaaatcatcagatta

SEQ ID NO: 67712 - DNA, 19 bp, Homo sapiens
  siRNA target sequence for 13CDNA73 (NM_023037.1,3934-3952).
cagaaatcatcagattaca

SEQ ID NO: 67713 - DNA, 19 bp, Homo sapiens
  siRNA target sequence for 13CDNA73 (NM_023037.1,3944-3962).
cagattacaagatatcagt

SEQ ID NO: 67714 - DNA, 19 bp, Homo sapiens
  siRNA target sequence for 13CDNA73 (NM_023037.1,3961-3979).
gtattgtgcattaaaagca

SEQ ID NO: 67715 - DNA, 19 bp, Homo sapiens
  siRNA target sequence for 13CDNA73 (NM_023037.1,4002-4020).
gccctgtctttgacaatgt

SEQ ID NO: 67716 - DNA, 19 bp, Homo sapiens
  siRNA target sequence for 13CDNA73 (NM_023037.1,4034-4052).
gatggctacctatataaat

SEQ ID NO: 67717 - DNA, 19 bp, Homo sapiens
  siRNA target sequence for 13CDNA73 (NM_023037.1,4069-4087).
ggcttgtcaagatttacga

SEQ ID NO: 67718 - DNA, 19 bp, Homo sapiens
  siRNA target sequence for 13CDNA73 (NM_023037.1,4101-4119).
gctgcgaagttgttgtctt

SEQ ID NO: 67719 - DNA, 19 bp, Homo sapiens
  siRNA target sequence for 13CDNA73 (NM_023037.1,4115-4133).
gtcttgctactggaactta

SEQ ID NO: 67720 - DNA, 19 bp, Homo sapiens
  siRNA target sequence for 13CDNA73 (NM_023037.1,4117-4135).
cttgctactggaacttaat

SEQ ID NO: 67721 - DNA, 19 bp, Homo sapiens
  siRNA target sequence for 13CDNA73 (NM_023037.1,4120-4138).
gctactggaacttaatcct

SEQ ID NO: 67722 - DNA, 19 bp, Homo sapiens
  siRNA target sequence for 13CDNA73 (NM_023037.1,4251-4269).
ccttcgacatagtgacatt

SEQ ID NO: 67723 - DNA, 19 bp, Homo sapiens
  siRNA target sequence for 13CDNA73 (NM_023037.1,4255-4273).
cgacatagtgacattgtta

SEQ ID NO: 67724 - DNA, 19 bp, Homo sapiens
  siRNA target sequence for 13CDNA73 (NM_023037.1,4392-4410).
gaccgggaagtattctcta

SEQ ID NO: 67725 - DNA, 19 bp, Homo sapiens
  siRNA target sequence for 13CDNA73 (NM_023037.1,4552-4570).
gccagatcatgcttaccta

SEQ ID NO: 67726 - DNA, 19 bp, Homo sapiens
  siRNA target sequence for 13CDNA73 (NM_023037.1,4728-4746).
cgtcactggtcctgaacaa

SEQ ID NO: 67727 - DNA, 19 bp, Homo sapiens
  siRNA target sequence for 13CDNA73 (NM_023037.1,4739-4757).
ctgaacaacctcatgtaca

SEQ ID NO: 67728 - DNA, 19 bp, Homo sapiens
  siRNA target sequence for 13CDNA73 (NM_023037.1,4753-4771).
gtacatgacggccaagtat

SEQ ID NO: 67729 - DNA, 19 bp, Homo sapiens
  siRNA target sequence for 13CDNA73 (NM_023037.1,4814-4832).
gctttagccaacaatgaga

SEQ ID NO: 67730 - DNA, 19 bp, Homo sapiens
  siRNA target sequence for 13CDNA73 (NM_023037.1,4899-4917).
cagttctcctaccctatat

SEQ ID NO: 67731 - DNA, 19 bp, Homo sapiens
  siRNA target sequence for 13CDNA73 (NM_023037.1,4942-4960).
ccgtaacaacaccattcaa

SEQ ID NO: 67732 - DNA, 19 bp, Homo sapiens
  siRNA target sequence for 13CDNA73 (NM_023037.1,4943-4961).
cgtaacaacaccattcaaa

SEQ ID NO: 67733 - DNA, 19 bp, Homo sapiens
  siRNA target sequence for 13CDNA73 (NM_023037.1,5089-5107).
cacctctagcagcaataca

SEQ ID NO: 67734 - DNA, 19 bp, Homo sapiens
  siRNA target sequence for 13CDNA73 (NM_023037.1,5138-5156).
gctgaggagaacaagatat

SEQ ID NO: 67735 - DNA, 19 bp, Homo sapiens
  siRNA target sequence for 13CDNA73 (NM_023037.1,5166-5184).
ctgatgaaaggtttagtaa

SEQ ID NO: 67736 - DNA, 19 bp, Homo sapiens
  siRNA target sequence for 13CDNA73 (NM_023037.1,5202-5220).
ctcgcctcgagtcaagata

SEQ ID NO: 67737 - DNA, 19 bp, Homo sapiens
  siRNA target sequence for 13CDNA73 (NM_023037.1,5204-5222).
cgcctcgagtcaagataca

SEQ ID NO: 67738 - DNA, 19 bp, Homo sapiens
  siRNA target sequence for 13CDNA73 (NM_023037.1,5210-5228).
gagtcaagatacagcaata

SEQ ID NO: 67739 - DNA, 19 bp, Homo sapiens
  siRNA target sequence for 13CDNA73 (NM_023037.1,5237-5255).
ggatcctacgatgaagata

SEQ ID NO: 67740 - DNA, 19 bp, Homo sapiens
  siRNA target sequence for 13CDNA73 (NM_023037.1,5280-5298).
cgggctggttgctgactat

SEQ ID NO: 67741 - DNA, 19 bp, Homo sapiens
  siRNA target sequence for 13CDNA73 (NM_023037.1,5281-5299).
gggctggttgctgactatt

SEQ ID NO: 67742 - DNA, 19 bp, Homo sapiens
  siRNA target sequence for 13CDNA73 (NM_023037.1,5284-5302).
ctggttgctgactattaca

SEQ ID NO: 67743 - DNA, 19 bp, Homo sapiens
  siRNA target sequence for 13CDNA73 (NM_023037.1,5323-5341).
cttaccgatgccttgtact

SEQ ID NO: 67744 - DNA, 19 bp, Homo sapiens
  siRNA target sequence for 13CDNA73 (NM_023037.1,5400-5418).
cactccacaggtgcaatat

SEQ ID NO: 67745 - DNA, 19 bp, Homo sapiens
  siRNA target sequence for 13CDNA73 (NM_023037.1,5404-5422).
ccacaggtgcaatattgct

SEQ ID NO: 67746 - DNA, 19 bp, Homo sapiens
  siRNA target sequence for 13CDNA73 (NM_023037.1,5472-5490).
gggcgcttcatctaccatt

SEQ ID NO: 67747 - DNA, 19 bp, Homo sapiens
  siRNA target sequence for 13CDNA73 (NM_023037.1,5473-5491).
ggcgcttcatctaccatta

SEQ ID NO: 67748 - DNA, 19 bp, Homo sapiens
  siRNA target sequence for 13CDNA73 (NM_023037.1,5474-5492).
gcgcttcatctaccattat

SEQ ID NO: 67749 - DNA, 19 bp, Homo sapiens
  siRNA target sequence for 13CDNA73 (NM_023037.1,5475-5493).
cgcttcatctaccattatt

SEQ ID NO: 67750 - DNA, 19 bp, Homo sapiens
  siRNA target sequence for 13CDNA73 (NM_023037.1,5476-5494).
gcttcatctaccattatta

SEQ ID NO: 67751 - DNA, 19 bp, Homo sapiens
  siRNA target sequence for 13CDNA73 (NM_023037.1,5582-5600).
ctctcttgcaacagcaatt

SEQ ID NO: 67752 - DNA, 19 bp, Homo sapiens
  siRNA target sequence for 13CDNA73 (NM_023037.1,5638-5656).
gatgggtgaagctaagact

SEQ ID NO: 67753 - DNA, 19 bp, Homo sapiens
  siRNA target sequence for 13CDNA73 (NM_023037.1,5670-5688).
cagcctaccaacctgaata

SEQ ID NO: 67754 - DNA, 19 bp, Homo sapiens
  siRNA target sequence for 13CDNA73 (NM_023037.1,5678-5696).
caacctgaatatctctata

SEQ ID NO: 67755 - DNA, 19 bp, Homo sapiens
  siRNA target sequence for 13CDNA73 (NM_023037.1,5890-5908).
cacgaccagggcatttggt

SEQ ID NO: 67756 - DNA, 19 bp, Homo sapiens
  siRNA target sequence for 13CDNA73 (NM_023037.1,5910-5928).
cactttggtgccatgaaga

SEQ ID NO: 67757 - DNA, 19 bp, Homo sapiens
  siRNA target sequence for 13CDNA73 (NM_023037.1,5958-5976).
gtgctgaacagctcactaa

SEQ ID NO: 67758 - DNA, 19 bp, Homo sapiens
  siRNA target sequence for 13CDNA73 (NM_023037.1,5961-5979).
ctgaacagctcactaattt

SEQ ID NO: 67759 - DNA, 19 bp, Homo sapiens
  siRNA target sequence for 13CDNA73 (NM_023037.1,5985-6003).
gtcacgttgtatctgtatt

SEQ ID NO: 67760 - DNA, 19 bp, Homo sapiens
  siRNA target sequence for 13CDNA73 (NM_023037.1,5987-6005).
cacgttgtatctgtattta

SEQ ID NO: 67761 - DNA, 19 bp, Homo sapiens
  siRNA target sequence for 13CDNA73 (NM_023037.1,6034-6052).
gcaccagttgagtgaagtt

SEQ ID NO: 67762 - DNA, 19 bp, Homo sapiens
  siRNA target sequence for 13CDNA73 (NM_023037.1,6065-6083).
gccctcgcaagctcttcaa

SEQ ID NO: 67763 - DNA, 19 bp, Homo sapiens
  siRNA target sequence for 13CDNA73 (NM_023037.1,6095-6113).
ggtcggtccttccagatat

SEQ ID NO: 67764 - DNA, 19 bp, Homo sapiens
  siRNA target sequence for 13CDNA73 (NM_023037.1,6096-6114).
gtcggtccttccagatatt

SEQ ID NO: 67765 - DNA, 19 bp, Homo sapiens
  siRNA target sequence for 13CDNA73 (NM_023037.1,6138-6156).
cagcacatgccttatctga

SEQ ID NO: 67766 - DNA, 19 bp, Homo sapiens
  siRNA target sequence for 13CDNA73 (NM_023037.1,6175-6193).
ggaggtgataggagaacat

SEQ ID NO: 67767 - DNA, 19 bp, Homo sapiens
  siRNA target sequence for 13CDNA73 (NM_023037.1,6200-6218).
gagattcagggttatgtaa

SEQ ID NO: 67768 - DNA, 19 bp, Homo sapiens
  siRNA target sequence for 13CDNA73 (NM_023037.1,6239-6257).
gaggcggctgtggataact

SEQ ID NO: 67769 - DNA, 19 bp, Homo sapiens
  siRNA target sequence for 13CDNA73 (NM_023037.1,6277-6295).
cagtgacctcctaactgta

SEQ ID NO: 67770 - DNA, 19 bp, Homo sapiens
  siRNA target sequence for 13CDNA73 (NM_023037.1,6279-6297).
gtgacctcctaactgtatt

SEQ ID NO: 67771 - DNA, 19 bp, Homo sapiens
  siRNA target sequence for 13CDNA73 (NM_023037.1,6281-6299).
gacctcctaactgtattgt

SEQ ID NO: 67772 - DNA, 19 bp, Homo sapiens
  siRNA target sequence for 13CDNA73 (NM_023037.1,6325-6343).
ctccagcagtaaactaaca

SEQ ID NO: 67773 - DNA, 19 bp, Homo sapiens
  siRNA target sequence for 13CDNA73 (NM_023037.1,6360-6378).
caggacaactaaacatgaa

SEQ ID NO: 67774 - DNA, 19 bp, Homo sapiens
  siRNA target sequence for 13CDNA73 (NM_023037.1,6579-6597).
cggacccatcccacataaa

SEQ ID NO: 67775 - DNA, 19 bp, Homo sapiens
  siRNA target sequence for 13CDNA73 (NM_023037.1,6641-6659).
gccttgatggagtctgatt

SEQ ID NO: 67776 - DNA, 19 bp, Homo sapiens
  siRNA target sequence for 13CDNA73 (NM_023037.1,6696-6714).
gcagactactggcacatat

SEQ ID NO: 67777 - DNA, 19 bp, Homo sapiens
  siRNA target sequence for 13CDNA73 (NM_023037.1,6708-6726).
cacatatgccactcgataa

SEQ ID NO: 67778 - DNA, 19 bp, Homo sapiens
  siRNA target sequence for 13CDNA73 (NM_023037.1,6736-6754).
ccgagaaaagcttgagaaa

SEQ ID NO: 67779 - DNA, 19 bp, Homo sapiens
  siRNA target sequence for 13CDNA73 (NM_023037.1,6985-7003).
ggatatagccgaaaggatt

SEQ ID NO: 67780 - DNA, 19 bp, Homo sapiens
  siRNA target sequence for 13CDNA73 (NM_023037.1,7022-7040).
gagaagaaccccaaacttt

SEQ ID NO: 67781 - DNA, 19 bp, Homo sapiens
  siRNA target sequence for 13CDNA73 (NM_023037.1,7030-7048).
ccccaaactttcaaatctt

SEQ ID NO: 67782 - DNA, 19 bp, Homo sapiens
  siRNA target sequence for 13CDNA73 (NM_023037.1,7055-7073).
gtcatgactctttataaaa

SEQ ID NO: 67783 - DNA, 19 bp, Homo sapiens
  siRNA target sequence for 13CDNA73 (NM_023037.1,7095-7113).
gtgccacgtgggtcaatgt

SEQ ID NO: 67784 - DNA, 19 bp, Homo sapiens
  siRNA target sequence for 13CDNA73 (NM_023037.1,7133-7151).
gaagcatatgctgacatta

SEQ ID NO: 67785 - DNA, 19 bp, Homo sapiens
  siRNA target sequence for 13CDNA73 (NM_023037.1,7136-7154).
gcatatgctgacattacct

SEQ ID NO: 67786 - DNA, 19 bp, Homo sapiens
  siRNA target sequence for 13CDNA73 (NM_023037.1,7147-7165).
cattaccttgaatatggtt

SEQ ID NO: 67787 - DNA, 19 bp, Homo sapiens
  siRNA target sequence for 13CDNA73 (NM_023037.1,7292-7310).
gttctgaagacaattgaaa

SEQ ID NO: 67788 - DNA, 19 bp, Homo sapiens
  siRNA target sequence for 13CDNA73 (NM_023037.1,7335-7353).
gagaagctctgaatatctt

SEQ ID NO: 67789 - DNA, 19 bp, Homo sapiens
  siRNA target sequence for 13CDNA73 (NM_023037.1,7370-7388).
cggtcagccagccttgttt

SEQ ID NO: 67790 - DNA, 19 bp, Homo sapiens
  siRNA target sequence for 13CDNA73 (NM_023037.1,7372-7390).
gtcagccagccttgtttta

SEQ ID NO: 67791 - DNA, 19 bp, Homo sapiens
  siRNA target sequence for 13CDNA73 (NM_023037.1,7407-7425).
gtgacctctcaaaaataga

SEQ ID NO: 67792 - DNA, 19 bp, Homo sapiens
  siRNA target sequence for 13CDNA73 (NM_023037.1,7475-7493).
ctggacttccacttcgata

SEQ ID NO: 67793 - DNA, 19 bp, Homo sapiens
  siRNA target sequence for 13CDNA73 (NM_023037.1,7477-7495).
ggacttccacttcgatatt

SEQ ID NO: 67794 - DNA, 19 bp, Homo sapiens
  siRNA target sequence for 13CDNA73 (NM_023037.1,7510-7528).
catcgggaggcggtatgat

SEQ ID NO: 67795 - DNA, 19 bp, Homo sapiens
  siRNA target sequence for 13CDNA73 (NM_023037.1,7577-7595).
gtcacccggagcacatctt

SEQ ID NO: 67796 - DNA, 19 bp, Homo sapiens
  siRNA target sequence for 13CDNA73 (NM_023037.1,7704-7722).
gtggccaagaagtaggatt

SEQ ID NO: 67797 - DNA, 19 bp, Homo sapiens
  siRNA target sequence for 13CDNA73 (NM_023037.1,7712-7730).
gaagtaggattgagcaaaa

SEQ ID NO: 67798 - DNA, 19 bp, Homo sapiens
  siRNA target sequence for 13CDNA73 (NM_023037.1,7778-7796).
caccagacaagcttggtat

SEQ ID NO: 67799 - DNA, 19 bp, Homo sapiens
  siRNA target sequence for 13CDNA73 (NM_023037.1,7783-7801).
gacaagcttggtatcttct

SEQ ID NO: 67800 - DNA, 19 bp, Homo sapiens
  siRNA target sequence for 13CDNA73 (NM_023037.1,7843-7861).
cagcgagcagcagtttaga

SEQ ID NO: 67801 - DNA, 19 bp, Homo sapiens
  siRNA target sequence for 13CDNA73 (NM_023037.1,7845-7863).
gcgagcagcagtttagagt

SEQ ID NO: 67802 - DNA, 19 bp, Homo sapiens
  siRNA target sequence for 13CDNA73 (NM_023037.1,8013-8031).
gcactcctagcctgaataa

SEQ ID NO: 67803 - DNA, 19 bp, Homo sapiens
  siRNA target sequence for 13CDNA73 (NM_023037.1,8014-8032).
cactcctagcctgaataaa

SEQ ID NO: 67804 - DNA, 19 bp, Homo sapiens
  siRNA target sequence for 13CDNA73 (NM_023037.1,8042-8060).
gaggactccgatgaatcat

SEQ ID NO: 67805 - DNA, 19 bp, Homo sapiens
  siRNA target sequence for 13CDNA73 (NM_023037.1,8096-8114).
gagcactcagacctaatca

SEQ ID NO: 67806 - DNA, 19 bp, Homo sapiens
  siRNA target sequence for 13CDNA73 (NM_023037.1,8099-8117).
cactcagacctaatcatga

SEQ ID NO: 67807 - DNA, 19 bp, Homo sapiens
  siRNA target sequence for 13CDNA73 (NM_023037.1,8206-8224).
cagaatgtccagctttgat

SEQ ID NO: 67808 - DNA, 19 bp, Homo sapiens
  siRNA target sequence for 13CDNA73 (NM_023037.1,8225-8243).
gcttccttgcctgatatga

SEQ ID NO: 67809 - DNA, 19 bp, Homo sapiens
  siRNA target sequence for 13CDNA73 (NM_023037.1,8229-8247).
ccttgcctgatatgaataa

SEQ ID NO: 67810 - DNA, 19 bp, Homo sapiens
  siRNA target sequence for 13CDNA73 (NM_023037.1,8304-8322).
ccgtgcatgaggatgatct

SEQ ID NO: 67811 - DNA, 19 bp, Homo sapiens
  siRNA target sequence for 13CDNA73 (NM_023037.1,8305-8323).
cgtgcatgaggatgatctt

SEQ ID NO: 67812 - DNA, 19 bp, Homo sapiens
  siRNA target sequence for 13CDNA73 (NM_023037.1,8308-8326).
gcatgaggatgatctttct

SEQ ID NO: 67813 - DNA, 19 bp, Homo sapiens
  siRNA target sequence for 13CDNA73 (NM_023037.1,8312-8330).
gaggatgatctttctagtt

SEQ ID NO: 67814 - DNA, 19 bp, Homo sapiens
  siRNA target sequence for 13CDNA73 (NM_023037.1,8325-8343).
ctagttccatcaatgaact

SEQ ID NO: 67815 - DNA, 19 bp, Homo sapiens
  siRNA target sequence for 13CDNA73 (NM_023037.1,8411-8429).
cgggcactggaccagttta

SEQ ID NO: 67816 - DNA, 19 bp, Homo sapiens
  siRNA target sequence for 13CDNA73 (NM_023037.1,8550-8568).
gccacatcaaccagcttat

SEQ ID NO: 67817 - DNA, 19 bp, Homo sapiens
  siRNA target sequence for 13CDNA73 (NM_023037.1,8552-8570).
cacatcaaccagcttatgt

SEQ ID NO: 67818 - DNA, 19 bp, Homo sapiens
  siRNA target sequence for 13CDNA73 (NM_023037.1,8592-8610).
ctgtgtatacatttcatgt

SEQ ID NO: 67819 - DNA, 19 bp, Homo sapiens
  siRNA target sequence for 13CDNA73 (NM_023037.1,8614-8632).
ctcctccttgtttaagaat

SEQ ID NO: 67820 - DNA, 19 bp, Homo sapiens
  siRNA target sequence for 13CDNA73 (NM_023037.1,8616-8634).
cctccttgtttaagaatat

SEQ ID NO: 67821 - DNA, 19 bp, Homo sapiens
  siRNA target sequence for 13CDNA73 (NM_023037.1,8670-8688).
ccagttaccttggagataa

SEQ ID NO: 67822 - DNA, 19 bp, Homo sapiens
  siRNA target sequence for 13CDNA73 (NM_023037.1,8673-8691).
gttaccttggagataacct

SEQ ID NO: 67823 - DNA, 19 bp, Homo sapiens
  siRNA target sequence for 13CDNA73 (NM_023037.1,8692-8710).
ccggggaatcggatccaaa

SEQ ID NO: 67824 - DNA, 19 bp, Homo sapiens
  siRNA target sequence for 13CDNA73 (NM_023037.1,8693-8711).
cggggaatcggatccaaat

SEQ ID NO: 67825 - DNA, 19 bp, Homo sapiens
  siRNA target sequence for 13CDNA73 (NM_023037.1,8697-8715).
gaatcggatccaaatttgt

SEQ ID NO: 67826 - DNA, 19 bp, Homo sapiens
  siRNA target sequence for 13CDNA73 (NM_023037.1,8734-8752).
cacctcctgctctgaatgt

SEQ ID NO: 67827 - DNA, 19 bp, Homo sapiens
  siRNA target sequence for 13CDNA73 (NM_023037.1,8771-8789).
gccgagactctcctttcat

SEQ ID NO: 67828 - DNA, 19 bp, Homo sapiens
  siRNA target sequence for 13CDNA73 (NM_023037.1,8773-8791).
cgagactctcctttcatgt

SEQ ID NO: 67829 - DNA, 19 bp, Homo sapiens
  siRNA target sequence for 13CDNA73 (NM_023037.1,8877-8895).
cttggcttgcaaattgtaa

SEQ ID NO: 67830 - DNA, 19 bp, Homo sapiens
  siRNA target sequence for 13CDNA73 (NM_023037.1,8942-8960).
ccaggggactccgaagaaa

SEQ ID NO: 67831 - DNA, 19 bp, Homo sapiens
  siRNA target sequence for 13CDNA73 (NM_023037.1,8943-8961).
caggggactccgaagaaaa

SEQ ID NO: 67832 - DNA, 19 bp, Homo sapiens
  siRNA target sequence for 13CDNA73 (NM_023037.1,8947-8965).
ggactccgaagaaaagcaa

SEQ ID NO: 67833 - DNA, 19 bp, Homo sapiens
  siRNA target sequence for 13CDNA73 (NM_023037.1,8948-8966).
gactccgaagaaaagcaat

SEQ ID NO: 67834 - DNA, 19 bp, Homo sapiens
  siRNA target sequence for 13CDNA73 (NM_023037.1,8952-8970).
ccgaagaaaagcaattgga

SEQ ID NO: 67835 - DNA, 19 bp, Homo sapiens
  siRNA target sequence for 13CDNA73 (NM_023037.1,8953-8971).
cgaagaaaagcaattggaa

SEQ ID NO: 67836 - DNA, 19 bp, Homo sapiens
  siRNA target sequence for 13CDNA73 (NM_023037.1,8968-8986).
ggaactgtgtcagagatta

SEQ ID NO: 67837 - DNA, 19 bp, Homo sapiens
  siRNA target sequence for 13CDNA73 (NM_023037.1,8969-8987).
gaactgtgtcagagattat

SEQ ID NO: 67838 - DNA, 19 bp, Homo sapiens
  siRNA target sequence for 13CDNA73 (NM_023037.1,8976-8994).
gtcagagattatataagct

SEQ ID NO: 67839 - DNA, 19 bp, Homo sapiens
  siRNA target sequence for 13CDNA73 (NM_023037.1,9092-9110).
gaactgagtgacctaaaga

SEQ ID NO: 67840 - DNA, 19 bp, Homo sapiens
  siRNA target sequence for 13CDNA73 (NM_023037.1,9322-9340).
ggtccagacactactgaat

SEQ ID NO: 67841 - DNA, 19 bp, Homo sapiens
  siRNA target sequence for 13CDNA73 (NM_023037.1,9323-9341).
gtccagacactactgaata

SEQ ID NO: 67842 - DNA, 19 bp, Homo sapiens
  siRNA target sequence for 13CDNA73 (NM_023037.1,9364-9382).
gggacagacgggtacttat

SEQ ID NO: 67843 - DNA, 19 bp, Homo sapiens
  siRNA target sequence for 13CDNA73 (NM_023037.1,9481-9499).
ccgagtcctcactactttt

SEQ ID NO: 67844 - DNA, 19 bp, Homo sapiens
  siRNA target sequence for AAK1 (NM_014911.2,534-552).
gcggaaggtggatttgcta

SEQ ID NO: 67845 - DNA, 19 bp, Homo sapiens
  siRNA target sequence for AAK1 (NM_014911.2,535-553).
cggaaggtggatttgctat

SEQ ID NO: 67846 - DNA, 19 bp, Homo sapiens
  siRNA target sequence for AAK1 (NM_014911.2,536-554).
ggaaggtggatttgctatt

SEQ ID NO: 67847 - DNA, 19 bp, Homo sapiens
  siRNA target sequence for AAK1 (NM_014911.2,592-610).
ccttgaaacgcatgtttgt

SEQ ID NO: 67848 - DNA, 19 bp, Homo sapiens
  siRNA target sequence for AAK1 (NM_014911.2,651-669).
cagataatgagggatcttt

SEQ ID NO: 67849 - DNA, 19 bp, Homo sapiens
  siRNA target sequence for AAK1 (NM_014911.2,670-688).
cagggcacaagaatattgt

SEQ ID NO: 67850 - DNA, 19 bp, Homo sapiens
  siRNA target sequence for AAK1 (NM_014911.2,689-707).
gggttacattgattctagt

SEQ ID NO: 67851 - DNA, 19 bp, Homo sapiens
  siRNA target sequence for AAK1 (NM_014911.2,690-708).
ggttacattgattctagta

SEQ ID NO: 67852 - DNA, 19 bp, Homo sapiens
  siRNA target sequence for AAK1 (NM_014911.2,716-734).
cgtgagtagcggtgatgta

SEQ ID NO: 67853 - DNA, 19 bp, Homo sapiens
  siRNA target sequence for AAK1 (NM_014911.2,717-735).
gtgagtagcggtgatgtat

SEQ ID NO: 67854 - DNA, 19 bp, Homo sapiens
  siRNA target sequence for AAK1 (NM_014911.2,736-754).
gggaagtgctcattctgat

SEQ ID NO: 67855 - DNA, 19 bp, Homo sapiens
  siRNA target sequence for AAK1 (NM_014911.2,766-784).
gaggtggccaggtggtaaa

SEQ ID NO: 67856 - DNA, 19 bp, Homo sapiens
  siRNA target sequence for AAK1 (NM_014911.2,769-787).
gtggccaggtggtaaacct

SEQ ID NO: 67857 - DNA, 19 bp, Homo sapiens
  siRNA target sequence for AAK1 (NM_014911.2,800-818).
cctgcaaacaggctttaca

SEQ ID NO: 67858 - DNA, 19 bp, Homo sapiens
  siRNA target sequence for AAK1 (NM_014911.2,876-894).
cagtgcaaaactcctatta

SEQ ID NO: 67859 - DNA, 19 bp, Homo sapiens
  siRNA target sequence for AAK1 (NM_014911.2,963-981).
ggaagcgccaccaacaaat

SEQ ID NO: 67860 - DNA, 19 bp, Homo sapiens
  siRNA target sequence for AAK1 (NM_014911.2,1048-1066).
cctatcgagcaccagaaat

SEQ ID NO: 67861 - DNA, 19 bp, Homo sapiens
  siRNA target sequence for AAK1 (NM_014911.2,1094-1112).
cactacgaaggcagacatt

SEQ ID NO: 67862 - DNA, 19 bp, Homo sapiens
  siRNA target sequence for AAK1 (NM_014911.2,1114-1132).
gggctcttggatgtttgtt

SEQ ID NO: 67863 - DNA, 19 bp, Homo sapiens
  siRNA target sequence for AAK1 (NM_014911.2,1116-1134).
gctcttggatgtttgttgt

SEQ ID NO: 67864 - DNA, 19 bp, Homo sapiens
  siRNA target sequence for AAK1 (NM_014911.2,1171-1189).
gtcaggtggcaatttgtga

SEQ ID NO: 67865 - DNA, 19 bp, Homo sapiens
  siRNA target sequence for AAK1 (NM_014911.2,1206-1224).
cctgataattctcgatatt

SEQ ID NO: 67866 - DNA, 19 bp, Homo sapiens
  siRNA target sequence for AAK1 (NM_014911.2,1216-1234).
ctcgatattctcaagacat

SEQ ID NO: 67867 - DNA, 19 bp, Homo sapiens
  siRNA target sequence for AAK1 (NM_014911.2,1235-1253).
gcactgcctaattaggtat

SEQ ID NO: 67868 - DNA, 19 bp, Homo sapiens
  siRNA target sequence for AAK1 (NM_014911.2,1240-1258).
gcctaattaggtatatgtt

SEQ ID NO: 67869 - DNA, 19 bp, Homo sapiens
  siRNA target sequence for AAK1 (NM_014911.2,1272-1290).
gacaaaaggccggatattt

SEQ ID NO: 67870 - DNA, 19 bp, Homo sapiens
  siRNA target sequence for AAK1 (NM_014911.2,1300-1318).
cctacttctcatttaagct

SEQ ID NO: 67871 - DNA, 19 bp, Homo sapiens
  siRNA target sequence for AAK1 (NM_014911.2,1333-1351).
gcccaattccaaatgtaca

SEQ ID NO: 67872 - DNA, 19 bp, Homo sapiens
  siRNA target sequence for AAK1 (NM_014911.2,1616-1634).
cagtgttccccaaccaaaa

SEQ ID NO: 67873 - DNA, 19 bp, Homo sapiens
  siRNA target sequence for AAK1 (NM_014911.2,1827-1845).
cagccggcaggcacgtttt

SEQ ID NO: 67874 - DNA, 19 bp, Homo sapiens
  siRNA target sequence for AAK1 (NM_014911.2,1831-1849).
cggcaggcacgttttacca

SEQ ID NO: 67875 - DNA, 19 bp, Homo sapiens
  siRNA target sequence for AAK1 (NM_014911.2,1953-1971).
cagctaatgcagaatttct

SEQ ID NO: 67876 - DNA, 19 bp, Homo sapiens
  siRNA target sequence for AAK1 (NM_014911.2,2153-2171).
gattcaagccccagtaaga

SEQ ID NO: 67877 - DNA, 19 bp, Homo sapiens
  siRNA target sequence for AAK1 (NM_014911.2,2206-2224).
ccgtccaggggcagaaagt

SEQ ID NO: 67878 - DNA, 19 bp, Homo sapiens
  siRNA target sequence for AAK1 (NM_014911.2,2207-2225).
cgtccaggggcagaaagtt

SEQ ID NO: 67879 - DNA, 19 bp, Homo sapiens
  siRNA target sequence for AAK1 (NM_014911.2,2313-2331).
ggggtccctgccagcaaat

SEQ ID NO: 67880 - DNA, 19 bp, Homo sapiens
  siRNA target sequence for AAK1 (NM_014911.2,2358-2376).
gctgaggccagtctcaata

SEQ ID NO: 67881 - DNA, 19 bp, Homo sapiens
  siRNA target sequence for AAK1 (NM_014911.2,2359-2377).
ctgaggccagtctcaataa

SEQ ID NO: 67882 - DNA, 19 bp, Homo sapiens
  siRNA target sequence for AAK1 (NM_014911.2,2361-2379).
gaggccagtctcaataagt

SEQ ID NO: 67883 - DNA, 19 bp, Homo sapiens
  siRNA target sequence for AAK1 (NM_014911.2,2412-2430).
cctcggacctctcaacaaa

SEQ ID NO: 67884 - DNA, 19 bp, Homo sapiens
  siRNA target sequence for AAK1 (NM_014911.2,2413-2431).
ctcggacctctcaacaaaa

SEQ ID NO: 67885 - DNA, 19 bp, Homo sapiens
  siRNA target sequence for AAK1 (NM_014911.2,2416-2434).
ggacctctcaacaaaacgt

SEQ ID NO: 67886 - DNA, 19 bp, Homo sapiens
  siRNA target sequence for AAK1 (NM_014911.2,2417-2435).
gacctctcaacaaaacgtt

SEQ ID NO: 67887 - DNA, 19 bp, Homo sapiens
  siRNA target sequence for AAK1 (NM_014911.2,2432-2450).
cgtttataatccttcagaa

SEQ ID NO: 67888 - DNA, 19 bp, Homo sapiens
  siRNA target sequence for AAK1 (NM_014911.2,2458-2476).
cgtggaatccctttgatga

SEQ ID NO: 67889 - DNA, 19 bp, Homo sapiens
  siRNA target sequence for AAK1 (NM_014911.2,2599-2617).
caacccaaggtgatgcttt

SEQ ID NO: 67890 - DNA, 19 bp, Homo sapiens
  siRNA target sequence for AAK1 (NM_014911.2,2604-2622).
caaggtgatgcttttgcta

SEQ ID NO: 67891 - DNA, 19 bp, Homo sapiens
  siRNA target sequence for AAK1 (NM_014911.2,2698-2716).
gcgtgtctgatcctttcat

SEQ ID NO: 67892 - DNA, 19 bp, Homo sapiens
  siRNA target sequence for AAK1 (NM_014911.2,2835-2853).
gctgtaattggtaaagtca

SEQ ID NO: 67893 - DNA, 19 bp, Homo sapiens
  siRNA target sequence for AAK1 (NM_014911.2,2836-2854).
ctgtaattggtaaagtcat

SEQ ID NO: 67894 - DNA, 19 bp, Homo sapiens
  siRNA target sequence for AAK1 (NM_014911.2,2866-2884).
cttcagtcatgcatgatat

SEQ ID NO: 67895 - DNA, 19 bp, Homo sapiens
  siRNA target sequence for AAK1 (NM_014911.2,2885-2903).
gtgtgcctgtttcaagaat

SEQ ID NO: 67896 - DNA, 19 bp, Homo sapiens
  siRNA target sequence for AAK1 (NM_014911.2,2906-2924).
caagtacctagttaaccaa

SEQ ID NO: 67897 - DNA, 19 bp, Homo sapiens
  siRNA target sequence for AARSL (NM_020745.1,207-225).
cgaccccagtttgcttttt

SEQ ID NO: 67898 - DNA, 19 bp, Homo sapiens
  siRNA target sequence for AARSL (NM_020745.1,370-388).
cgagacctttcccatcata

SEQ ID NO: 67899 - DNA, 19 bp, Homo sapiens
  siRNA target sequence for AARSL (NM_020745.1,415-433).
gcctttgggggtgaatatt

SEQ ID NO: 67900 - DNA, 19 bp, Homo sapiens
  siRNA target sequence for AARSL (NM_020745.1,593-611).
ctagccgtgtgctttcctt

SEQ ID NO: 67901 - DNA, 19 bp, Homo sapiens
  siRNA target sequence for AARSL (NM_020745.1,1242-1260).
gcggggtaggcggatcatt

SEQ ID NO: 67902 - DNA, 19 bp, Homo sapiens
  siRNA target sequence for AARSL (NM_020745.1,1244-1262).
ggggtaggcggatcattga

SEQ ID NO: 67903 - DNA, 19 bp, Homo sapiens
  siRNA target sequence for AARSL (NM_020745.1,1245-1263).
gggtaggcggatcattgat

SEQ ID NO: 67904 - DNA, 19 bp, Homo sapiens
  siRNA target sequence for AARSL (NM_020745.1,1279-1297).
ctggggccttcagatatgt

SEQ ID NO: 67905 - DNA, 19 bp, Homo sapiens
  siRNA target sequence for AARSL (NM_020745.1,1534-1552).
gacgacagccccaagtaca

SEQ ID NO: 67906 - DNA, 19 bp, Homo sapiens
  siRNA target sequence for AARSL (NM_020745.1,1537-1555).
gacagccccaagtacaact

SEQ ID NO: 67907 - DNA, 19 bp, Homo sapiens
  siRNA target sequence for AARSL (NM_020745.1,1563-1581).
gcgacccagcggaagttat

SEQ ID NO: 67908 - DNA, 19 bp, Homo sapiens
  siRNA target sequence for AARSL (NM_020745.1,1565-1583).
gacccagcggaagttatga

SEQ ID NO: 67909 - DNA, 19 bp, Homo sapiens
  siRNA target sequence for AARSL (NM_020745.1,1567-1585).
cccagcggaagttatgagt

SEQ ID NO: 67910 - DNA, 19 bp, Homo sapiens
  siRNA target sequence for AARSL (NM_020745.1,1568-1586).
ccagcggaagttatgagtt

SEQ ID NO: 67911 - DNA, 19 bp, Homo sapiens
  siRNA target sequence for AARSL (NM_020745.1,1882-1900).
ggctgcatggcgaagcata

SEQ ID NO: 67912 - DNA, 19 bp, Homo sapiens
  siRNA target sequence for AARSL (NM_020745.1,2135-2153).
gctctctggatgaggttta

SEQ ID NO: 67913 - DNA, 19 bp, Homo sapiens
  siRNA target sequence for AARSL (NM_020745.1,2162-2180).
ctgtgcgggtggtatcagt

SEQ ID NO: 67914 - DNA, 19 bp, Homo sapiens
  siRNA target sequence for AARSL (NM_020745.1,2254-2272).
gggacgcacctgttacgta

SEQ ID NO: 67915 - DNA, 19 bp, Homo sapiens
  siRNA target sequence for AARSL (NM_020745.1,2279-2297).
ctgtaggggacctggttat

SEQ ID NO: 67916 - DNA, 19 bp, Homo sapiens
  siRNA target sequence for AARSL (NM_020745.1,2281-2299).
gtaggggacctggttatca

SEQ ID NO: 67917 - DNA, 19 bp, Homo sapiens
  siRNA target sequence for AARSL (NM_020745.1,2469-2487).
ggacataggacgactcatt

SEQ ID NO: 67918 - DNA, 19 bp, Homo sapiens
  siRNA target sequence for AARSL (NM_020745.1,2472-2490).
cataggacgactcattgaa

SEQ ID NO: 67919 - DNA, 19 bp, Homo sapiens
  siRNA target sequence for AARSL (NM_020745.1,2576-2594).
ccatccgtaagctgcaaat

SEQ ID NO: 67920 - DNA, 19 bp, Homo sapiens
  siRNA target sequence for AARSL (NM_020745.1,2637-2655).
ctcgaaggggcctctgatt

SEQ ID NO: 67921 - DNA, 19 bp, Homo sapiens
  siRNA target sequence for AARSL (NM_020745.1,2639-2657).
cgaaggggcctctgattgt

SEQ ID NO: 67922 - DNA, 19 bp, Homo sapiens
  siRNA target sequence for AARSL (NM_020745.1,2913-2931).
ggaagctgccctcagtata

SEQ ID NO: 67923 - DNA, 19 bp, Homo sapiens
  siRNA target sequence for AARSL (NM_020745.1,2925-2943).
cagtatagcccaaacctat

SEQ ID NO: 67924 - DNA, 19 bp, Homo sapiens
  siRNA target sequence for ABCA1 (NM_005502.2,398-416).
gtggcctggcctctattta

SEQ ID NO: 67925 - DNA, 19 bp, Homo sapiens
  siRNA target sequence for ABCA1 (NM_005502.2,445-463).
gagctacccaccctatgaa

SEQ ID NO: 67926 - DNA, 19 bp, Homo sapiens
  siRNA target sequence for ABCA1 (NM_005502.2,453-471).
caccctatgaacaacatga

SEQ ID NO: 67927 - DNA, 19 bp, Homo sapiens
  siRNA target sequence for ABCA1 (NM_005502.2,496-514).
gccctctgcaggaacactt

SEQ ID NO: 67928 - DNA, 19 bp, Homo sapiens
  siRNA target sequence for ABCA1 (NM_005502.2,520-538).
ggttcaggggattatctgt

SEQ ID NO: 67929 - DNA, 19 bp, Homo sapiens
  siRNA target sequence for ABCA1 (NM_005502.2,585-603).
ccggagttgttggaaactt

SEQ ID NO: 67930 - DNA, 19 bp, Homo sapiens
  siRNA target sequence for ABCA1 (NM_005502.2,590-608).
gttgttggaaactttaaca

SEQ ID NO: 67931 - DNA, 19 bp, Homo sapiens
  siRNA target sequence for ABCA1 (NM_005502.2,638-656).
gctcggaggcttcttttat

SEQ ID NO: 67932 - DNA, 19 bp, Homo sapiens
  siRNA target sequence for ABCA1 (NM_005502.2,641-659).
cggaggcttcttttataca

SEQ ID NO: 67933 - DNA, 19 bp, Homo sapiens
  siRNA target sequence for ABCA1 (NM_005502.2,679-697).
gaaggacatgcgcaaagtt

SEQ ID NO: 67934 - DNA, 19 bp, Homo sapiens
  siRNA target sequence for ABCA1 (NM_005502.2,732-750).
caaacttgaagcttcaaga

SEQ ID NO: 67935 - DNA, 19 bp, Homo sapiens
  siRNA target sequence for ABCA1 (NM_005502.2,842-860).
gtcattctccacaaggtat

SEQ ID NO: 67936 - DNA, 19 bp, Homo sapiens
  siRNA target sequence for ABCA1 (NM_005502.2,865-883).
gcaaggctaccagttacat

SEQ ID NO: 67937 - DNA, 19 bp, Homo sapiens
  siRNA target sequence for ABCA1 (NM_005502.2,866-884).
caaggctaccagttacatt

SEQ ID NO: 67938 - DNA, 19 bp, Homo sapiens
  siRNA target sequence for ABCA1 (NM_005502.2,869-887).
ggctaccagttacatttga

SEQ ID NO: 67939 - DNA, 19 bp, Homo sapiens
  siRNA target sequence for ABCA1 (NM_005502.2,929-947).
cttggtgaccaagaagttt

SEQ ID NO: 67940 - DNA, 19 bp, Homo sapiens
  siRNA target sequence for ABCA1 (NM_005502.2,1024-1042).
gccaatcctgagaacacta

SEQ ID NO: 67941 - DNA, 19 bp, Homo sapiens
  siRNA target sequence for ABCA1 (NM_005502.2,1025-1043).
ccaatcctgagaacactaa

SEQ ID NO: 67942 - DNA, 19 bp, Homo sapiens
  siRNA target sequence for ABCA1 (NM_005502.2,1030-1048).
cctgagaacactaaactct

SEQ ID NO: 67943 - DNA, 19 bp, Homo sapiens
  siRNA target sequence for ABCA1 (NM_005502.2,1216-1234).
ccaggctgtgtctcgtatt

SEQ ID NO: 67944 - DNA, 19 bp, Homo sapiens
  siRNA target sequence for ABCA1 (NM_005502.2,1220-1238).
gctgtgtctcgtattgtct

SEQ ID NO: 67945 - DNA, 19 bp, Homo sapiens
  siRNA target sequence for ABCA1 (NM_005502.2,1340-1358).
gctgaaaccttctatgaca

SEQ ID NO: 67946 - DNA, 19 bp, Homo sapiens
  siRNA target sequence for ABCA1 (NM_005502.2,1341-1359).
ctgaaaccttctatgacaa

SEQ ID NO: 67947 - DNA, 19 bp, Homo sapiens
  siRNA target sequence for ABCA1 (NM_005502.2,1370-1388).
ccttactgcaatgatttga

SEQ ID NO: 67948 - DNA, 19 bp, Homo sapiens
  siRNA target sequence for ABCA1 (NM_005502.2,1407-1425).
gtcctctttcccgcattat

SEQ ID NO: 67949 - DNA, 19 bp, Homo sapiens
  siRNA target sequence for ABCA1 (NM_005502.2,1409-1427).
cctctttcccgcattatct

SEQ ID NO: 67950 - DNA, 19 bp, Homo sapiens
  siRNA target sequence for ABCA1 (NM_005502.2,1666-1684).
gcagttggatggcttagat

SEQ ID NO: 67951 - DNA, 19 bp, Homo sapiens
  siRNA target sequence for ABCA1 (NM_005502.2,1729-1747).
ggatgtccagtccagtaat

SEQ ID NO: 67952 - DNA, 19 bp, Homo sapiens
  siRNA target sequence for ABCA1 (NM_005502.2,1733-1751).
gtccagtccagtaatggtt

SEQ ID NO: 67953 - DNA, 19 bp, Homo sapiens
  siRNA target sequence for ABCA1 (NM_005502.2,1790-1808).
caggcaatccggaccatat

SEQ ID NO: 67954 - DNA, 19 bp, Homo sapiens
  siRNA target sequence for ABCA1 (NM_005502.2,1862-1880).
gtctggctcatcaacaagt

SEQ ID NO: 67955 - DNA, 19 bp, Homo sapiens
  siRNA target sequence for ABCA1 (NM_005502.2,1958-1976).
ccccatcatgtcaagtaca

SEQ ID NO: 67956 - DNA, 19 bp, Homo sapiens
  siRNA target sequence for ABCA1 (NM_005502.2,1981-1999).
ccgaatggacattgacaat

SEQ ID NO: 67957 - DNA, 19 bp, Homo sapiens
  siRNA target sequence for ABCA1 (NM_005502.2,2137-2155).
gacgggcaccgagaagaaa

SEQ ID NO: 67958 - DNA, 19 bp, Homo sapiens
  siRNA target sequence for ABCA1 (NM_005502.2,2140-2158).
gggcaccgagaagaaaact

SEQ ID NO: 67959 - DNA, 19 bp, Homo sapiens
  siRNA target sequence for ABCA1 (NM_005502.2,2187-2205).
cctgttacgttgatgacat

SEQ ID NO: 67960 - DNA, 19 bp, Homo sapiens
  siRNA target sequence for ABCA1 (NM_005502.2,2190-2208).
gttacgttgatgacatctt

SEQ ID NO: 67961 - DNA, 19 bp, Homo sapiens
  siRNA target sequence for ABCA1 (NM_005502.2,2226-2244).
ggtcaatgcccctcttcat

SEQ ID NO: 67962 - DNA, 19 bp, Homo sapiens
  siRNA target sequence for ABCA1 (NM_005502.2,2359-2377).
gtttagctggttcattagt

SEQ ID NO: 67963 - DNA, 19 bp, Homo sapiens
  siRNA target sequence for ABCA1 (NM_005502.2,2417-2435).
gtcatcctgaagttaggaa

SEQ ID NO: 67964 - DNA, 19 bp, Homo sapiens
  siRNA target sequence for ABCA1 (NM_005502.2,2821-2839).
ggtgatgacctggtacatt

SEQ ID NO: 67965 - DNA, 19 bp, Homo sapiens
  siRNA target sequence for ABCA1 (NM_005502.2,2907-2925).
ggtttggcgaggaaagtga

SEQ ID NO: 67966 - DNA, 19 bp, Homo sapiens
  siRNA target sequence for ABCA1 (NM_005502.2,2913-2931).
gcgaggaaagtgatgagaa

SEQ ID NO: 67967 - DNA, 19 bp, Homo sapiens
  siRNA target sequence for ABCA1 (NM_005502.2,2942-2960).
ggttccaaccagaagagaa

SEQ ID NO: 67968 - DNA, 19 bp, Homo sapiens
  siRNA target sequence for ABCA1 (NM_005502.2,2943-2961).
gttccaaccagaagagaat

SEQ ID NO: 67969 - DNA, 19 bp, Homo sapiens
  siRNA target sequence for ABCA1 (NM_005502.2,3062-3080).
gatggcctggcactgaatt

SEQ ID NO: 67970 - DNA, 19 bp, Homo sapiens
  siRNA target sequence for ABCA1 (NM_005502.2,3240-3258).
gggtctgtccccagcataa

SEQ ID NO: 67971 - DNA, 19 bp, Homo sapiens
  siRNA target sequence for ABCA1 (NM_005502.2,3298-3316).
gttctatgcccgcttgaaa

SEQ ID NO: 67972 - DNA, 19 bp, Homo sapiens
  siRNA target sequence for ABCA1 (NM_005502.2,3450-3468).
cctttgtcgggggatctaa

SEQ ID NO: 67973 - DNA, 19 bp, Homo sapiens
  siRNA target sequence for ABCA1 (NM_005502.2,3459-3477).
ggggatctaaggttgtcat

SEQ ID NO: 67974 - DNA, 19 bp, Homo sapiens
  siRNA target sequence for ABCA1 (NM_005502.2,3548-3566).
cgacaaggccgcaccatta

SEQ ID NO: 67975 - DNA, 19 bp, Homo sapiens
  siRNA target sequence for ABCA1 (NM_005502.2,3549-3567).
gacaaggccgcaccattat

SEQ ID NO: 67976 - DNA, 19 bp, Homo sapiens
  siRNA target sequence for ABCA1 (NM_005502.2,3554-3572).
ggccgcaccattattctct

SEQ ID NO: 67977 - DNA, 19 bp, Homo sapiens
  siRNA target sequence for ABCA1 (NM_005502.2,3694-3712).
cctgaccttggtcaagaaa

SEQ ID NO: 67978 - DNA, 19 bp, Homo sapiens
  siRNA target sequence for ABCA1 (NM_005502.2,3747-3765).
gtagtagcactgtgtcata

SEQ ID NO: 67979 - DNA, 19 bp, Homo sapiens
  siRNA target sequence for ABCA1 (NM_005502.2,3928-3946).
ctatgtgctgccatatgaa

SEQ ID NO: 67980 - DNA, 19 bp, Homo sapiens
  siRNA target sequence for ABCA1 (NM_005502.2,3960-3978).
gagcctttgtggaactctt

SEQ ID NO: 67981 - DNA, 19 bp, Homo sapiens
  siRNA target sequence for ABCA1 (NM_005502.2,3963-3981).
cctttgtggaactctttca

SEQ ID NO: 67982 - DNA, 19 bp, Homo sapiens
  siRNA target sequence for ABCA1 (NM_005502.2,4036-4054).
gacgaccctggaagaaata

SEQ ID NO: 67983 - DNA, 19 bp, Homo sapiens
  siRNA target sequence for ABCA1 (NM_005502.2,4041-4059).
ccctggaagaaatattcct

SEQ ID NO: 67984 - DNA, 19 bp, Homo sapiens
  siRNA target sequence for ABCA1 (NM_005502.2,4161-4179).
gcccgttcactgaagatga

SEQ ID NO: 67985 - DNA, 19 bp, Homo sapiens
  siRNA target sequence for ABCA1 (NM_005502.2,4191-4209).
caaatgattctgacataga

SEQ ID NO: 67986 - DNA, 19 bp, Homo sapiens
  siRNA target sequence for ABCA1 (NM_005502.2,4295-4313).
cagtttgtggcccttttgt

SEQ ID NO: 67987 - DNA, 19 bp, Homo sapiens
  siRNA target sequence for ABCA1 (NM_005502.2,4335-4353).
gacggagtcggaaaggatt

SEQ ID NO: 67988 - DNA, 19 bp, Homo sapiens
  siRNA target sequence for ABCA1 (NM_005502.2,4458-4476).
ggatgtacaacgaacagta

SEQ ID NO: 67989 - DNA, 19 bp, Homo sapiens
  siRNA target sequence for ABCA1 (NM_005502.2,4465-4483).
caacgaacagtacacattt

SEQ ID NO: 67990 - DNA, 19 bp, Homo sapiens
  siRNA target sequence for ABCA1 (NM_005502.2,4469-4487).
gaacagtacacatttgtca

SEQ ID NO: 67991 - DNA, 19 bp, Homo sapiens
  siRNA target sequence for ABCA1 (NM_005502.2,4707-4725).
gtagcagcgacaaaatcaa

SEQ ID NO: 67992 - DNA, 19 bp, Homo sapiens
  siRNA target sequence for ABCA1 (NM_005502.2,4713-4731).
gcgacaaaatcaagaagat

SEQ ID NO: 67993 - DNA, 19 bp, Homo sapiens
  siRNA target sequence for ABCA1 (NM_005502.2,4810-4828).
cctgacaggaagaaacatt

SEQ ID NO: 67994 - DNA, 19 bp, Homo sapiens
  siRNA target sequence for ABCA1 (NM_005502.2,4821-4839).
gaaacatttcggattatct

SEQ ID NO: 67995 - DNA, 19 bp, Homo sapiens
  siRNA target sequence for ABCA1 (NM_005502.2,4846-4864).
gacgtatgtgcagatcata

SEQ ID NO: 67996 - DNA, 19 bp, Homo sapiens
  siRNA target sequence for ABCA1 (NM_005502.2,4885-4903).
gatctgggtgaatgagttt

SEQ ID NO: 67997 - DNA, 19 bp, Homo sapiens
  siRNA target sequence for ABCA1 (NM_005502.2,4891-4909).
ggtgaatgagtttaggtat

SEQ ID NO: 67998 - DNA, 19 bp, Homo sapiens
  siRNA target sequence for ABCA1 (NM_005502.2,4949-4967).
cctccgagtcaagaagtta

SEQ ID NO: 67999 - DNA, 19 bp, Homo sapiens
  siRNA target sequence for ABCA1 (NM_005502.2,4950-4968).
ctccgagtcaagaagttaa

SEQ ID NO: 68000 - DNA, 19 bp, Homo sapiens
  siRNA target sequence for ABCA1 (NM_005502.2,4953-4971).
cgagtcaagaagttaatga

SEQ ID NO: 68001 - DNA, 19 bp, Homo sapiens
  siRNA target sequence for ABCA1 (NM_005502.2,5014-5032).
cagttctgcagatcgattt

SEQ ID NO: 68002 - DNA, 19 bp, Homo sapiens
  siRNA target sequence for ABCA1 (NM_005502.2,5019-5037).
ctgcagatcgatttctcaa

SEQ ID NO: 68003 - DNA, 19 bp, Homo sapiens
  siRNA target sequence for ABCA1 (NM_005502.2,5035-5053).
caacagcttgggaagattt

SEQ ID NO: 68004 - DNA, 19 bp, Homo sapiens
  siRNA target sequence for ABCA1 (NM_005502.2,5179-5197).
gaaccctagccattatgga

SEQ ID NO: 68005 - DNA, 19 bp, Homo sapiens
  siRNA target sequence for ABCA1 (NM_005502.2,5183-5201).
cctagccattatggaatta

SEQ ID NO: 68006 - DNA, 19 bp, Homo sapiens
  siRNA target sequence for ABCA1 (NM_005502.2,5284-5302).
gtccatctgtgtcatcttt

SEQ ID NO: 68007 - DNA, 19 bp, Homo sapiens
  siRNA target sequence for ABCA1 (NM_005502.2,5319-5337).
cagccagctttgtcgtatt

SEQ ID NO: 68008 - DNA, 19 bp, Homo sapiens
  siRNA target sequence for ABCA1 (NM_005502.2,5322-5340).
ccagctttgtcgtattcct

SEQ ID NO: 68009 - DNA, 19 bp, Homo sapiens
  siRNA target sequence for ABCA1 (NM_005502.2,5388-5406).
gagtgaagcctgtcatcta

SEQ ID NO: 68010 - DNA, 19 bp, Homo sapiens
  siRNA target sequence for ABCA1 (NM_005502.2,5401-5419).
catctactggctctctaat

SEQ ID NO: 68011 - DNA, 19 bp, Homo sapiens
  siRNA target sequence for ABCA1 (NM_005502.2,5404-5422).
ctactggctctctaatttt

SEQ ID NO: 68012 - DNA, 19 bp, Homo sapiens
  siRNA target sequence for ABCA1 (NM_005502.2,5423-5441).
gtctgggatatgtgcaatt

SEQ ID NO: 68013 - DNA, 19 bp, Homo sapiens
  siRNA target sequence for ABCA1 (NM_005502.2,5427-5445).
gggatatgtgcaattacgt

SEQ ID NO: 68014 - DNA, 19 bp, Homo sapiens
  siRNA target sequence for ABCA1 (NM_005502.2,5520-5538).
ctgtgctagcccttctact

SEQ ID NO: 68015 - DNA, 19 bp, Homo sapiens
  siRNA target sequence for ABCA1 (NM_005502.2,5678-5696).
gagctgttcaccgacaata

SEQ ID NO: 68016 - DNA, 19 bp, Homo sapiens
  siRNA target sequence for ABCA1 (NM_005502.2,5689-5707).
cgacaataagctgaataat

SEQ ID NO: 68017 - DNA, 19 bp, Homo sapiens
  siRNA target sequence for ABCA1 (NM_005502.2,5720-5738).
ctgaagtccgtgttcttga

SEQ ID NO: 68018 - DNA, 19 bp, Homo sapiens
  siRNA target sequence for ABCA1 (NM_005502.2,5828-5846).
cgctttgtgtcaccattat

SEQ ID NO: 68019 - DNA, 19 bp, Homo sapiens
  siRNA target sequence for ABCA1 (NM_005502.2,5918-5936).
ctgatccagtacagattct

SEQ ID NO: 68020 - DNA, 19 bp, Homo sapiens
  siRNA target sequence for ABCA1 (NM_005502.2,5965-5983).
gctatctcctctgaatgat

SEQ ID NO: 68021 - DNA, 19 bp, Homo sapiens
  siRNA target sequence for ABCA1 (NM_005502.2,6001-6019).
gcgggaaagacagagaatt

SEQ ID NO: 68022 - DNA, 19 bp, Homo sapiens
  siRNA target sequence for ABCA1 (NM_005502.2,6058-6076).
ggagttgacgaagatatat

SEQ ID NO: 68023 - DNA, 19 bp, Homo sapiens
  siRNA target sequence for ABCA1 (NM_005502.2,6059-6077).
gagttgacgaagatatata

SEQ ID NO: 68024 - DNA, 19 bp, Homo sapiens
  siRNA target sequence for ABCA1 (NM_005502.2,6061-6079).
gttgacgaagatatataga

SEQ ID NO: 68025 - DNA, 19 bp, Homo sapiens
  siRNA target sequence for ABCA1 (NM_005502.2,6232-6250).
caaaaatagtatcttatca

SEQ ID NO: 68026 - DNA, 19 bp, Homo sapiens
  siRNA target sequence for ABCA1 (NM_005502.2,6324-6342).
gagaacacgtggagttctt

SEQ ID NO: 68027 - DNA, 19 bp, Homo sapiens
  siRNA target sequence for ABCA1 (NM_005502.2,6415-6433).
cgtgaagtatggagaaaaa

SEQ ID NO: 68028 - DNA, 19 bp, Homo sapiens
  siRNA target sequence for ABCA1 (NM_005502.2,6416-6434).
gtgaagtatggagaaaaat

SEQ ID NO: 68029 - DNA, 19 bp, Homo sapiens
  siRNA target sequence for ABCA1 (NM_005502.2,6474-6492).
ctacagccatggctttgat

SEQ ID NO: 68030 - DNA, 19 bp, Homo sapiens
  siRNA target sequence for ABCA1 (NM_005502.2,6570-6588).
gtgccctaagtgttgtcaa

SEQ ID NO: 68031 - DNA, 19 bp, Homo sapiens
  siRNA target sequence for ABCA1 (NM_005502.2,6602-6620).
gtagtgcttacatctcata

SEQ ID NO: 68032 - DNA, 19 bp, Homo sapiens
  siRNA target sequence for ABCA1 (NM_005502.2,6645-6663).
gcactaggatggcaatcat

SEQ ID NO: 68033 - DNA, 19 bp, Homo sapiens
  siRNA target sequence for ABCA1 (NM_005502.2,6690-6708).
gcagtgtccagcatctaaa

SEQ ID NO: 68034 - DNA, 19 bp, Homo sapiens
  siRNA target sequence for ABCA1 (NM_005502.2,6695-6713).
gtccagcatctaaaaaata

SEQ ID NO: 68035 - DNA, 19 bp, Homo sapiens
  siRNA target sequence for ABCA1 (NM_005502.2,6698-6716).
cagcatctaaaaaataggt

SEQ ID NO: 68036 - DNA, 19 bp, Homo sapiens
  siRNA target sequence for ABCA1 (NM_005502.2,6831-6849).
ggaacatgctacaatacca

SEQ ID NO: 68037 - DNA, 19 bp, Homo sapiens
  siRNA target sequence for ABCA1 (NM_005502.2,6847-6865).
ccagcttccatcttcatta

SEQ ID NO: 68038 - DNA, 19 bp, Homo sapiens
  siRNA target sequence for ABCA1 (NM_005502.2,6976-6994).
caaggaccaaagtgatgat

SEQ ID NO: 68039 - DNA, 19 bp, Homo sapiens
  siRNA target sequence for ABCA1 (NM_005502.2,6987-7005).
gtgatgatgaccacttaaa

SEQ ID NO: 68040 - DNA, 19 bp, Homo sapiens
  siRNA target sequence for ABCA1 (NM_005502.2,7000-7018).
cttaaaagacctctcatta

SEQ ID NO: 68041 - DNA, 19 bp, Homo sapiens
  siRNA target sequence for ABCA10 (NM_080282.2,945-963).
gaccatggatatagaactt

SEQ ID NO: 68042 - DNA, 19 bp, Homo sapiens
  siRNA target sequence for ABCA10 (NM_080282.2,984-1002).
ggtgggagttatatttagt

SEQ ID NO: 68043 - DNA, 19 bp, Homo sapiens
  siRNA target sequence for ABCA10 (NM_080282.2,987-1005).
gggagttatatttagtgat

SEQ ID NO: 68044 - DNA, 19 bp, Homo sapiens
  siRNA target sequence for ABCA10 (NM_080282.2,988-1006).
ggagttatatttagtgata

SEQ ID NO: 68045 - DNA, 19 bp, Homo sapiens
  siRNA target sequence for ABCA10 (NM_080282.2,1011-1029).
ctcatatcgcctgaagttt

SEQ ID NO: 68046 - DNA, 19 bp, Homo sapiens
  siRNA target sequence for ABCA10 (NM_080282.2,1013-1031).
catatcgcctgaagtttaa

SEQ ID NO: 68047 - DNA, 19 bp, Homo sapiens
  siRNA target sequence for ABCA10 (NM_080282.2,1026-1044).
gtttaattggggatataga

SEQ ID NO: 68048 - DNA, 19 bp, Homo sapiens
  siRNA target sequence for ABCA10 (NM_080282.2,1037-1055).
gatatagaatcccagttat

SEQ ID NO: 68049 - DNA, 19 bp, Homo sapiens
  siRNA target sequence for ABCA10 (NM_080282.2,1095-1113).
gcatggtgaaattttttgt

SEQ ID NO: 68050 - DNA, 19 bp, Homo sapiens
  siRNA target sequence for ABCA10 (NM_080282.2,1099-1117).
ggtgaaattttttgttact

SEQ ID NO: 68051 - DNA, 19 bp, Homo sapiens
  siRNA target sequence for ABCA10 (NM_080282.2,1128-1146).
ctggctaaaagggtttgta

SEQ ID NO: 68052 - DNA, 19 bp, Homo sapiens
  siRNA target sequence for ABCA10 (NM_080282.2,1212-1230).
gttgacatcagttattgga

SEQ ID NO: 68053 - DNA, 19 bp, Homo sapiens
  siRNA target sequence for ABCA10 (NM_080282.2,1420-1438).
ggattgacatacatttgct

SEQ ID NO: 68054 - DNA, 19 bp, Homo sapiens
  siRNA target sequence for ABCA10 (NM_080282.2,1421-1439).
gattgacatacatttgctt

SEQ ID NO: 68055 - DNA, 19 bp, Homo sapiens
  siRNA target sequence for ABCA10 (NM_080282.2,1481-1499).
caatcccaattgtatttca

SEQ ID NO: 68056 - DNA, 19 bp, Homo sapiens
  siRNA target sequence for ABCA10 (NM_080282.2,1485-1503).
cccaattgtatttcatact

SEQ ID NO: 68057 - DNA, 19 bp, Homo sapiens
  siRNA target sequence for ABCA10 (NM_080282.2,1521-1539).
cacactctatagcttatat

SEQ ID NO: 68058 - DNA, 19 bp, Homo sapiens
  siRNA target sequence for ABCA10 (NM_080282.2,1599-1617).
cgctggtttggctggattt

SEQ ID NO: 68059 - DNA, 19 bp, Homo sapiens
  siRNA target sequence for ABCA10 (NM_080282.2,1650-1668).
cactgtgttatatagacaa

SEQ ID NO: 68060 - DNA, 19 bp, Homo sapiens
  siRNA target sequence for ABCA10 (NM_080282.2,1683-1701).
gggatgggtattaagtctt

SEQ ID NO: 68061 - DNA, 19 bp, Homo sapiens
  siRNA target sequence for ABCA10 (NM_080282.2,1727-1745).
gaatggcccaggttacaca

SEQ ID NO: 68062 - DNA, 19 bp, Homo sapiens
  siRNA target sequence for ABCA10 (NM_080282.2,1737-1755).
ggttacacacctggataat

SEQ ID NO: 68063 - DNA, 19 bp, Homo sapiens
  siRNA target sequence for ABCA10 (NM_080282.2,1738-1756).
gttacacacctggataatt

SEQ ID NO: 68064 - DNA, 19 bp, Homo sapiens
  siRNA target sequence for ABCA10 (NM_080282.2,1783-1801).
ccctctggggattcataca

SEQ ID NO: 68065 - DNA, 19 bp, Homo sapiens
  siRNA target sequence for ABCA10 (NM_080282.2,1784-1802).
cctctggggattcatacaa

SEQ ID NO: 68066 - DNA, 19 bp, Homo sapiens
  siRNA target sequence for ABCA10 (NM_080282.2,1834-1852).
gatactcttttctatttga

SEQ ID NO: 68067 - DNA, 19 bp, Homo sapiens
  siRNA target sequence for ABCA10 (NM_080282.2,1872-1890).
gcgagttttacctgataaa

SEQ ID NO: 68068 - DNA, 19 bp, Homo sapiens
  siRNA target sequence for ABCA10 (NM_080282.2,1874-1892).
gagttttacctgataaaga

SEQ ID NO: 68069 - DNA, 19 bp, Homo sapiens
  siRNA target sequence for ABCA10 (NM_080282.2,1938-1956).
gtccaaacatcaaaatact

SEQ ID NO: 68070 - DNA, 19 bp, Homo sapiens
  siRNA target sequence for ABCA10 (NM_080282.2,2110-2128).
caaggcatattttttgaca

SEQ ID NO: 68071 - DNA, 19 bp, Homo sapiens
  siRNA target sequence for ABCA10 (NM_080282.2,2224-2242).
ggatcagccactatttata

SEQ ID NO: 68072 - DNA, 19 bp, Homo sapiens
  siRNA target sequence for ABCA10 (NM_080282.2,2431-2449).
caaagcattcaagacatta

SEQ ID NO: 68073 - DNA, 19 bp, Homo sapiens
  siRNA target sequence for ABCA10 (NM_080282.2,2520-2538).
ggttttgctgctagatgaa

SEQ ID NO: 68074 - DNA, 19 bp, Homo sapiens
  siRNA target sequence for ABCA10 (NM_080282.2,2582-2600).
gcctcctgaaggagcataa

SEQ ID NO: 68075 - DNA, 19 bp, Homo sapiens
  siRNA target sequence for ABCA10 (NM_080282.2,2583-2601).
cctcctgaaggagcataaa

SEQ ID NO: 68076 - DNA, 19 bp, Homo sapiens
  siRNA target sequence for ABCA10 (NM_080282.2,2586-2604).
cctgaaggagcataaagta

SEQ ID NO: 68077 - DNA, 19 bp, Homo sapiens
  siRNA target sequence for ABCA10 (NM_080282.2,2608-2626).
cgacttatcctcttcagta

SEQ ID NO: 68078 - DNA, 19 bp, Homo sapiens
  siRNA target sequence for ABCA10 (NM_080282.2,2696-2714).
gtgcaggatcatctttgtt

SEQ ID NO: 68079 - DNA, 19 bp, Homo sapiens
  siRNA target sequence for ABCA10 (NM_080282.2,2918-2936).
ctgaccagggcataaggaa

SEQ ID NO: 68080 - DNA, 19 bp, Homo sapiens
  siRNA target sequence for ABCA10 (NM_080282.2,2920-2938).
gaccagggcataaggaatt

SEQ ID NO: 68081 - DNA, 19 bp, Homo sapiens
  siRNA target sequence for ABCA10 (NM_080282.2,2922-2940).
ccagggcataaggaattat

SEQ ID NO: 68082 - DNA, 19 bp, Homo sapiens
  siRNA target sequence for ABCA10 (NM_080282.2,2925-2943).
gggcataaggaattatgct

SEQ ID NO: 68083 - DNA, 19 bp, Homo sapiens
  siRNA target sequence for ABCA10 (NM_080282.2,2948-2966).
cagtgacatctctgaatga

SEQ ID NO: 68084 - DNA, 19 bp, Homo sapiens
  siRNA target sequence for ABCA10 (NM_080282.2,3128-3146).
ctctctggagacgacaaat

SEQ ID NO: 68085 - DNA, 19 bp, Homo sapiens
  siRNA target sequence for ABCA10 (NM_080282.2,3130-3148).
ctctggagacgacaaatct

SEQ ID NO: 68086 - DNA, 19 bp, Homo sapiens
  siRNA target sequence for ABCA10 (NM_080282.2,3156-3174).
ggcaacacttcgcttctta

SEQ ID NO: 68087 - DNA, 19 bp, Homo sapiens
  siRNA target sequence for ABCA10 (NM_080282.2,3187-3205).
gaaaggagagctcttttgt

SEQ ID NO: 68088 - DNA, 19 bp, Homo sapiens
  siRNA target sequence for ABCA10 (NM_080282.2,3210-3228).
gttactagtacttggaatt

SEQ ID NO: 68089 - DNA, 19 bp, Homo sapiens
  siRNA target sequence for ABCA10 (NM_080282.2,3268-3286).
gtaactcgtgaaactcatt

SEQ ID NO: 68090 - DNA, 19 bp, Homo sapiens
  siRNA target sequence for ABCA10 (NM_080282.2,3292-3310).
gagttttcacccagtatgt

SEQ ID NO: 68091 - DNA, 19 bp, Homo sapiens
  siRNA target sequence for ABCA10 (NM_080282.2,3294-3312).
gttttcacccagtatgtat

SEQ ID NO: 68092 - DNA, 19 bp, Homo sapiens
  siRNA target sequence for ABCA10 (NM_080282.2,3350-3368).
ccagcctgttaatcgttaa

SEQ ID NO: 68093 - DNA, 19 bp, Homo sapiens
  siRNA target sequence for ABCA10 (NM_080282.2,3351-3369).
cagcctgttaatcgttaat

SEQ ID NO: 68094 - DNA, 19 bp, Homo sapiens
  siRNA target sequence for ABCA10 (NM_080282.2,3354-3372).
cctgttaatcgttaataat

SEQ ID NO: 68095 - DNA, 19 bp, Homo sapiens
  siRNA target sequence for ABCA10 (NM_080282.2,3355-3373).
ctgttaatcgttaataata

SEQ ID NO: 68096 - DNA, 19 bp, Homo sapiens
  siRNA target sequence for ABCA10 (NM_080282.2,3357-3375).
gttaatcgttaataataca

SEQ ID NO: 68097 - DNA, 19 bp, Homo sapiens
  siRNA target sequence for ABCA10 (NM_080282.2,3408-3426).
gaagtgtcaggatatagtt

SEQ ID NO: 68098 - DNA, 19 bp, Homo sapiens
  siRNA target sequence for ABCA10 (NM_080282.2,3413-3431).
gtcaggatatagttttgga

SEQ ID NO: 68099 - DNA, 19 bp, Homo sapiens
  siRNA target sequence for ABCA10 (NM_080282.2,3497-3515).
ctggtgaccagaaggatta

SEQ ID NO: 68100 - DNA, 19 bp, Homo sapiens
  siRNA target sequence for ABCA10 (NM_080282.2,3611-3629).
cggagcttattcaaatgga

SEQ ID NO: 68101 - DNA, 19 bp, Homo sapiens
  siRNA target sequence for ABCA10 (NM_080282.2,3638-3656).
cattttctcgtgatgacat

SEQ ID NO: 68102 - DNA, 19 bp, Homo sapiens
  siRNA target sequence for ABCA10 (NM_080282.2,3660-3678).
gctggatcttggttttata

SEQ ID NO: 68103 - DNA, 19 bp, Homo sapiens
  siRNA target sequence for ABCA10 (NM_080282.2,3663-3681).
ggatcttggttttatagat

SEQ ID NO: 68104 - DNA, 19 bp, Homo sapiens
  siRNA target sequence for ABCA10 (NM_080282.2,3679-3697).
gatgggtccatatttttgt

SEQ ID NO: 68105 - DNA, 19 bp, Homo sapiens
  siRNA target sequence for ABCA10 (NM_080282.2,3735-3753).
gagcagcatcagcgattat

SEQ ID NO: 68106 - DNA, 19 bp, Homo sapiens
  siRNA target sequence for ABCA10 (NM_080282.2,3763-3781).
gttcaatcccagttatgga

SEQ ID NO: 68107 - DNA, 19 bp, Homo sapiens
  siRNA target sequence for ABCA10 (NM_080282.2,3826-3844).
gtggacattccattatact

SEQ ID NO: 68108 - DNA, 19 bp, Homo sapiens
  siRNA target sequence for ABCA10 (NM_080282.2,3829-3847).
gacattccattatacttct

SEQ ID NO: 68109 - DNA, 19 bp, Homo sapiens
  siRNA target sequence for ABCA10 (NM_080282.2,3836-3854).
cattatacttcttgattct

SEQ ID NO: 68110 - DNA, 19 bp, Homo sapiens
  siRNA target sequence for ABCA10 (NM_080282.2,3908-3926).
gggaactcatgtttgtttt

SEQ ID NO: 68111 - DNA, 19 bp, Homo sapiens
  siRNA target sequence for ABCA10 (NM_080282.2,3922-3940).
gttttggtggtatgcataa

SEQ ID NO: 68112 - DNA, 19 bp, Homo sapiens
  siRNA target sequence for ABCA10 (NM_080282.2,3927-3945).
ggtggtatgcataattggt

SEQ ID NO: 68113 - DNA, 19 bp, Homo sapiens
  siRNA target sequence for ABCA10 (NM_080282.2,3928-3946).
gtggtatgcataattggtt

SEQ ID NO: 68114 - DNA, 19 bp, Homo sapiens
  siRNA target sequence for ABCA10 (NM_080282.2,3947-3965).
gtgcagtttctcttatatt

SEQ ID NO: 68115 - DNA, 19 bp, Homo sapiens
  siRNA target sequence for ABCA10 (NM_080282.2,3967-3985).
ctcacatatgtgctttcat

SEQ ID NO: 68116 - DNA, 19 bp, Homo sapiens
  siRNA target sequence for ABCA10 (NM_080282.2,4130-4148).
ctttgctggggtatgtcat

SEQ ID NO: 68117 - DNA, 19 bp, Homo sapiens
  siRNA target sequence for ABCA10 (NM_080282.2,4135-4153).
ctggggtatgtcatgttat

SEQ ID NO: 68118 - DNA, 19 bp, Homo sapiens
  siRNA target sequence for ABCA10 (NM_080282.2,4139-4157).
ggtatgtcatgttattgat

SEQ ID NO: 68119 - DNA, 19 bp, Homo sapiens
  siRNA target sequence for ABCA10 (NM_080282.2,4187-4205).
gtctggacaatagaataaa

SEQ ID NO: 68120 - DNA, 19 bp, Homo sapiens
  siRNA target sequence for ABCA10 (NM_080282.2,5333-5351).
gggcctttttcaagttaga

SEQ ID NO: 68121 - DNA, 19 bp, Homo sapiens
  siRNA target sequence for ABCA10 (NM_080282.2,5343-5361).
caagttagaggcgatgaaa

SEQ ID NO: 68122 - DNA, 19 bp, Homo sapiens
  siRNA target sequence for ABCA12 (NM_015657.3,226-244).
gatgatggacagaccttat

SEQ ID NO: 68123 - DNA, 19 bp, Homo sapiens
  siRNA target sequence for ABCA12 (NM_015657.3,399-417).
cctgcagtccacaatacga

SEQ ID NO: 68124 - DNA, 19 bp, Homo sapiens
  siRNA target sequence for ABCA12 (NM_015657.3,400-418).
ctgcagtccacaatacgat

SEQ ID NO: 68125 - DNA, 19 bp, Homo sapiens
  siRNA target sequence for ABCA12 (NM_015657.3,403-421).
cagtccacaatacgattta

SEQ ID NO: 68126 - DNA, 19 bp, Homo sapiens
  siRNA target sequence for ABCA12 (NM_015657.3,469-487).
gttcctgaagtcctaaaat

SEQ ID NO: 68127 - DNA, 19 bp, Homo sapiens
  siRNA target sequence for ABCA12 (NM_015657.3,506-524).
gaaacttgaccgaacttct

SEQ ID NO: 68128 - DNA, 19 bp, Homo sapiens
  siRNA target sequence for ABCA12 (NM_015657.3,513-531).
gaccgaacttctttgtgaa

SEQ ID NO: 68129 - DNA, 19 bp, Homo sapiens
  siRNA target sequence for ABCA12 (NM_015657.3,516-534).
cgaacttctttgtgaatct

SEQ ID NO: 68130 - DNA, 19 bp, Homo sapiens
  siRNA target sequence for ABCA12 (NM_015657.3,588-606).
gagcctgtgtgaagaaagt

SEQ ID NO: 68131 - DNA, 19 bp, Homo sapiens
  siRNA target sequence for ABCA12 (NM_015657.3,662-680).
gcttactgtaccatgacaa

SEQ ID NO: 68132 - DNA, 19 bp, Homo sapiens
  siRNA target sequence for ABCA12 (NM_015657.3,682-700).
gtcatatctaaaaaagtga

SEQ ID NO: 68133 - DNA, 19 bp, Homo sapiens
  siRNA target sequence for ABCA12 (NM_015657.3,783-801).
ggaaaatatcactcagtta

SEQ ID NO: 68134 - DNA, 19 bp, Homo sapiens
  siRNA target sequence for ABCA12 (NM_015657.3,798-816).
gttaataccgatcatagaa

SEQ ID NO: 68135 - DNA, 19 bp, Homo sapiens
  siRNA target sequence for ABCA12 (NM_015657.3,817-835).
gccatgctgcatgtcaata

SEQ ID NO: 68136 - DNA, 19 bp, Homo sapiens
  siRNA target sequence for ABCA12 (NM_015657.3,822-840).
gctgcatgtcaataacagt

SEQ ID NO: 68137 - DNA, 19 bp, Homo sapiens
  siRNA target sequence for ABCA12 (NM_015657.3,858-876).
gccaggtcagttactagaa

SEQ ID NO: 68138 - DNA, 19 bp, Homo sapiens
  siRNA target sequence for ABCA12 (NM_015657.3,859-877).
ccaggtcagttactagaaa

SEQ ID NO: 68139 - DNA, 19 bp, Homo sapiens
  siRNA target sequence for ABCA12 (NM_015657.3,860-878).
caggtcagttactagaaat

SEQ ID NO: 68140 - DNA, 19 bp, Homo sapiens
  siRNA target sequence for ABCA12 (NM_015657.3,960-978).
cattcccatccctgataat

SEQ ID NO: 68141 - DNA, 19 bp, Homo sapiens
  siRNA target sequence for ABCA12 (NM_015657.3,980-998).
gagctgagattatttctca

SEQ ID NO: 68142 - DNA, 19 bp, Homo sapiens
  siRNA target sequence for ABCA12 (NM_015657.3,1008-1026).
gctgcattcctgtgatact

SEQ ID NO: 68143 - DNA, 19 bp, Homo sapiens
  siRNA target sequence for ABCA12 (NM_015657.3,1011-1029).
gcattcctgtgatactaat

SEQ ID NO: 68144 - DNA, 19 bp, Homo sapiens
  siRNA target sequence for ABCA12 (NM_015657.3,1012-1030).
cattcctgtgatactaata

SEQ ID NO: 68145 - DNA, 19 bp, Homo sapiens
  siRNA target sequence for ABCA12 (NM_015657.3,1032-1050).
caccactcccaaactagaa

SEQ ID NO: 68146 - DNA, 19 bp, Homo sapiens
  siRNA target sequence for ABCA12 (NM_015657.3,1035-1053).
cactcccaaactagaagat

SEQ ID NO: 68147 - DNA, 19 bp, Homo sapiens
  siRNA target sequence for ABCA12 (NM_015657.3,1123-1141).
cttctgcactacttaaaca

SEQ ID NO: 68148 - DNA, 19 bp, Homo sapiens
  siRNA target sequence for ABCA12 (NM_015657.3,1164-1182).
gtttttcccgaggaaagat

SEQ ID NO: 68149 - DNA, 19 bp, Homo sapiens
  siRNA target sequence for ABCA12 (NM_015657.3,1183-1201).
caaaagccagtagaaaaga

SEQ ID NO: 68150 - DNA, 19 bp, Homo sapiens
  siRNA target sequence for ABCA12 (NM_015657.3,1206-1224).
ggagctcttcataagacta

SEQ ID NO: 68151 - DNA, 19 bp, Homo sapiens
  siRNA target sequence for ABCA12 (NM_015657.3,1207-1225).
gagctcttcataagactaa

SEQ ID NO: 68152 - DNA, 19 bp, Homo sapiens
  siRNA target sequence for ABCA12 (NM_015657.3,1220-1238).
gactaaaagagattctcaa

SEQ ID NO: 68153 - DNA, 19 bp, Homo sapiens
  siRNA target sequence for ABCA12 (NM_015657.3,1256-1274).
cacatccgctgctagacaa

SEQ ID NO: 68154 - DNA, 19 bp, Homo sapiens
  siRNA target sequence for ABCA12 (NM_015657.3,1258-1276).
catccgctgctagacaaaa

SEQ ID NO: 68155 - DNA, 19 bp, Homo sapiens
  siRNA target sequence for ABCA12 (NM_015657.3,1261-1279).
ccgctgctagacaaaatga

SEQ ID NO: 68156 - DNA, 19 bp, Homo sapiens
  siRNA target sequence for ABCA12 (NM_015657.3,1280-1298).
gatccctgaagcaaatgca

SEQ ID NO: 68157 - DNA, 19 bp, Homo sapiens
  siRNA target sequence for ABCA12 (NM_015657.3,1303-1321).
cccagaagtgttccattaa

SEQ ID NO: 68158 - DNA, 19 bp, Homo sapiens
  siRNA target sequence for ABCA12 (NM_015657.3,1305-1323).
cagaagtgttccattaaca

SEQ ID NO: 68159 - DNA, 19 bp, Homo sapiens
  siRNA target sequence for ABCA12 (NM_015657.3,1307-1325).
gaagtgttccattaacaca

SEQ ID NO: 68160 - DNA, 19 bp, Homo sapiens
  siRNA target sequence for ABCA12 (NM_015657.3,1316-1334).
cattaacacaggcaatgta

SEQ ID NO: 68161 - DNA, 19 bp, Homo sapiens
  siRNA target sequence for ABCA12 (NM_015657.3,1353-1371).
cacaccacaaggatcattt

SEQ ID NO: 68162 - DNA, 19 bp, Homo sapiens
  siRNA target sequence for ABCA12 (NM_015657.3,1380-1398).
ctcccaagcattatgttct

SEQ ID NO: 68163 - DNA, 19 bp, Homo sapiens
  siRNA target sequence for ABCA12 (NM_015657.3,1383-1401).
ccaagcattatgttctcaa

SEQ ID NO: 68164 - DNA, 19 bp, Homo sapiens
  siRNA target sequence for ABCA12 (NM_015657.3,1388-1406).
cattatgttctcaaggaat

SEQ ID NO: 68165 - DNA, 19 bp, Homo sapiens
  siRNA target sequence for ABCA12 (NM_015657.3,1402-1420).
ggaattaccactgaatatt

SEQ ID NO: 68166 - DNA, 19 bp, Homo sapiens
  siRNA target sequence for ABCA12 (NM_015657.3,1457-1475).
gcaaccacaccaaggattt

SEQ ID NO: 68167 - DNA, 19 bp, Homo sapiens
  siRNA target sequence for ABCA12 (NM_015657.3,1498-1516).
gagcaaattgcttcaaaat

SEQ ID NO: 68168 - DNA, 19 bp, Homo sapiens
  siRNA target sequence for ABCA12 (NM_015657.3,1527-1545).
cataaattccacaccattt

SEQ ID NO: 68169 - DNA, 19 bp, Homo sapiens
  siRNA target sequence for ABCA12 (NM_015657.3,1579-1597).
cccgctggacctgtgattt

SEQ ID NO: 68170 - DNA, 19 bp, Homo sapiens
  siRNA target sequence for ABCA12 (NM_015657.3,1591-1609).
gtgatttgggctttcttga

SEQ ID NO: 68171 - DNA, 19 bp, Homo sapiens
  siRNA target sequence for ABCA12 (NM_015657.3,1598-1616).
gggctttcttgaaacctat

SEQ ID NO: 68172 - DNA, 19 bp, Homo sapiens
  siRNA target sequence for ABCA12 (NM_015657.3,1613-1631).
ctatgttgttgggaagaat

SEQ ID NO: 68173 - DNA, 19 bp, Homo sapiens
  siRNA target sequence for ABCA12 (NM_015657.3,1643-1661).
catataacccagtcacaaa

SEQ ID NO: 68174 - DNA, 19 bp, Homo sapiens
  siRNA target sequence for ABCA12 (NM_015657.3,1671-1689).
ggaaaagtccaatgtaact

SEQ ID NO: 68175 - DNA, 19 bp, Homo sapiens
  siRNA target sequence for ABCA12 (NM_015657.3,1692-1710).
gagacagctggcggaatta

SEQ ID NO: 68176 - DNA, 19 bp, Homo sapiens
  siRNA target sequence for ABCA12 (NM_015657.3,1698-1716).
gctggcggaattaagagaa

SEQ ID NO: 68177 - DNA, 19 bp, Homo sapiens
  siRNA target sequence for ABCA12 (NM_015657.3,1699-1717).
ctggcggaattaagagaaa

SEQ ID NO: 68178 - DNA, 19 bp, Homo sapiens
  siRNA target sequence for ABCA12 (NM_015657.3,1701-1719).
ggcggaattaagagaaaaa

SEQ ID NO: 68179 - DNA, 19 bp, Homo sapiens
  siRNA target sequence for ABCA12 (NM_015657.3,1735-1753).
gataagtcgccacttttca

SEQ ID NO: 68180 - DNA, 19 bp, Homo sapiens
  siRNA target sequence for ABCA12 (NM_015657.3,1819-1837).
gtgcaagtttttgtaaagt

SEQ ID NO: 68181 - DNA, 19 bp, Homo sapiens
  siRNA target sequence for ABCA12 (NM_015657.3,1845-1863).
gggactcgatgctgttgaa

SEQ ID NO: 68182 - DNA, 19 bp, Homo sapiens
  siRNA target sequence for ABCA12 (NM_015657.3,1847-1865).
gactcgatgctgttgaact

SEQ ID NO: 68183 - DNA, 19 bp, Homo sapiens
  siRNA target sequence for ABCA12 (NM_015657.3,1849-1867).
ctcgatgctgttgaactat

SEQ ID NO: 68184 - DNA, 19 bp, Homo sapiens
  siRNA target sequence for ABCA12 (NM_015657.3,1926-1944).
catcgatcagcttaacaca

SEQ ID NO: 68185 - DNA, 19 bp, Homo sapiens
  siRNA target sequence for ABCA12 (NM_015657.3,1930-1948).
gatcagcttaacacactat

SEQ ID NO: 68186 - DNA, 19 bp, Homo sapiens
  siRNA target sequence for ABCA12 (NM_015657.3,2031-2049).
ggctaaaaggctctacaaa

SEQ ID NO: 68187 - DNA, 19 bp, Homo sapiens
  siRNA target sequence for ABCA12 (NM_015657.3,2032-2050).
gctaaaaggctctacaaaa

SEQ ID NO: 68188 - DNA, 19 bp, Homo sapiens
  siRNA target sequence for ABCA12 (NM_015657.3,2055-2073).
cgaactctttggaagtgtt

SEQ ID NO: 68189 - DNA, 19 bp, Homo sapiens
  siRNA target sequence for ABCA12 (NM_015657.3,2056-2074).
gaactctttggaagtgtta

SEQ ID NO: 68190 - DNA, 19 bp, Homo sapiens
  siRNA target sequence for ABCA12 (NM_015657.3,2111-2129).
gctatgactctggaaatgt

SEQ ID NO: 68191 - DNA, 19 bp, Homo sapiens
  siRNA target sequence for ABCA12 (NM_015657.3,2140-2158).
cctgtcataaaatatacca

SEQ ID NO: 68192 - DNA, 19 bp, Homo sapiens
  siRNA target sequence for ABCA12 (NM_015657.3,2214-2232).
ggctccagggccacacaat

SEQ ID NO: 68193 - DNA, 19 bp, Homo sapiens
  siRNA target sequence for ABCA12 (NM_015657.3,2215-2233).
gctccagggccacacaatt

SEQ ID NO: 68194 - DNA, 19 bp, Homo sapiens
  siRNA target sequence for ABCA12 (NM_015657.3,2253-2271).
ctatggcagggcttttatt

SEQ ID NO: 68195 - DNA, 19 bp, Homo sapiens
  siRNA target sequence for ABCA12 (NM_015657.3,2322-2340).
gaactcccaggaaatagca

SEQ ID NO: 68196 - DNA, 19 bp, Homo sapiens
  siRNA target sequence for ABCA12 (NM_015657.3,2360-2378).
cttatccctgcttcatgaa

SEQ ID NO: 68197 - DNA, 19 bp, Homo sapiens
  siRNA target sequence for ABCA12 (NM_015657.3,2389-2407).
ctaaccagtgtctcttatt

SEQ ID NO: 68198 - DNA, 19 bp, Homo sapiens
  siRNA target sequence for ABCA12 (NM_015657.3,2408-2426).
ctcttccaattgtgcttat

SEQ ID NO: 68199 - DNA, 19 bp, Homo sapiens
  siRNA target sequence for ABCA12 (NM_015657.3,2428-2446).
gttgcctgggttgtattta

SEQ ID NO: 68200 - DNA, 19 bp, Homo sapiens
  siRNA target sequence for ABCA12 (NM_015657.3,2433-2451).
ctgggttgtatttatagct

SEQ ID NO: 68201 - DNA, 19 bp, Homo sapiens
  siRNA target sequence for ABCA12 (NM_015657.3,2583-2601).
cgtgatcctcatcattata

SEQ ID NO: 68202 - DNA, 19 bp, Homo sapiens
  siRNA target sequence for ABCA12 (NM_015657.3,2592-2610).
catcattatactcaagttt

SEQ ID NO: 68203 - DNA, 19 bp, Homo sapiens
  siRNA target sequence for ABCA12 (NM_015657.3,2604-2622).
caagtttggcaatattctt

SEQ ID NO: 68204 - DNA, 19 bp, Homo sapiens
  siRNA target sequence for ABCA12 (NM_015657.3,2685-2703).
catgagctatcttatcagt

SEQ ID NO: 68205 - DNA, 19 bp, Homo sapiens
  siRNA target sequence for ABCA12 (NM_015657.3,2695-2713).
cttatcagtgtcttcttca

SEQ ID NO: 68206 - DNA, 19 bp, Homo sapiens
  siRNA target sequence for ABCA12 (NM_015657.3,2785-2803).
gttacagtggagaatgagt

SEQ ID NO: 68207 - DNA, 19 bp, Homo sapiens
  siRNA target sequence for ABCA12 (NM_015657.3,2802-2820).
gttgagctatgtattgaaa

SEQ ID NO: 68208 - DNA, 19 bp, Homo sapiens
  siRNA target sequence for ABCA12 (NM_015657.3,2961-2979).
gctgtgctgtctaatccta

SEQ ID NO: 68209 - DNA, 19 bp, Homo sapiens
  siRNA target sequence for ABCA12 (NM_015657.3,2976-2994).
cctagctgactctttcatt

SEQ ID NO: 68210 - DNA, 19 bp, Homo sapiens
  siRNA target sequence for ABCA12 (NM_015657.3,3011-3029).
ggtatgtcaggaatgtctt

SEQ ID NO: 68211 - DNA, 19 bp, Homo sapiens
  siRNA target sequence for ABCA12 (NM_015657.3,3052-3070).
gctccctggtattttccaa

SEQ ID NO: 68212 - DNA, 19 bp, Homo sapiens
  siRNA target sequence for ABCA12 (NM_015657.3,3053-3071).
ctccctggtattttccaat

SEQ ID NO: 68213 - DNA, 19 bp, Homo sapiens
  siRNA target sequence for ABCA12 (NM_015657.3,3129-3147).
caatggcctcatgtttact

SEQ ID NO: 68214 - DNA, 19 bp, Homo sapiens
  siRNA target sequence for ABCA12 (NM_015657.3,3133-3151).
ggcctcatgtttactaaca

SEQ ID NO: 68215 - DNA, 19 bp, Homo sapiens
  siRNA target sequence for ABCA12 (NM_015657.3,3207-3225).
catcgagcctgaacctaaa

SEQ ID NO: 68216 - DNA, 19 bp, Homo sapiens
  siRNA target sequence for ABCA12 (NM_015657.3,3210-3228).
cgagcctgaacctaaagat

SEQ ID NO: 68217 - DNA, 19 bp, Homo sapiens
  siRNA target sequence for ABCA12 (NM_015657.3,3247-3265).
ctgcatggggtcacaaaga

SEQ ID NO: 68218 - DNA, 19 bp, Homo sapiens
  siRNA target sequence for ABCA12 (NM_015657.3,3250-3268).
catggggtcacaaagatct

SEQ ID NO: 68219 - DNA, 19 bp, Homo sapiens
  siRNA target sequence for ABCA12 (NM_015657.3,3264-3282).
gatctatggctcaaaagtt

SEQ ID NO: 68220 - DNA, 19 bp, Homo sapiens
  siRNA target sequence for ABCA12 (NM_015657.3,3313-3331).
gaagggcatattacttcat

SEQ ID NO: 68221 - DNA, 19 bp, Homo sapiens
  siRNA target sequence for ABCA12 (NM_015657.3,3394-3412).
gcctcagcaggcaccattt

SEQ ID NO: 68222 - DNA, 19 bp, Homo sapiens
  siRNA target sequence for ABCA12 (NM_015657.3,3400-3418).
gcaggcaccatttttgtat

SEQ ID NO: 68223 - DNA, 19 bp, Homo sapiens
  siRNA target sequence for ABCA12 (NM_015657.3,3445-3463).
cacacggtacggaagaaca

SEQ ID NO: 68224 - DNA, 19 bp, Homo sapiens
  siRNA target sequence for ABCA12 (NM_015657.3,3478-3496).
cagcacgacgtcttgttca

SEQ ID NO: 68225 - DNA, 19 bp, Homo sapiens
  siRNA target sequence for ABCA12 (NM_015657.3,3481-3499).
cacgacgtcttgttcagtt

SEQ ID NO: 68226 - DNA, 19 bp, Homo sapiens
  siRNA target sequence for ABCA12 (NM_015657.3,3513-3531).
ggagcaccttctcctatat

SEQ ID NO: 68227 - DNA, 19 bp, Homo sapiens
  siRNA target sequence for ABCA12 (NM_015657.3,3516-3534).
gcaccttctcctatatggt

SEQ ID NO: 68228 - DNA, 19 bp, Homo sapiens
  siRNA target sequence for ABCA12 (NM_015657.3,3544-3562).
gttcctcactggactaaaa

SEQ ID NO: 68229 - DNA, 19 bp, Homo sapiens
  siRNA target sequence for ABCA12 (NM_015657.3,3565-3583).
cagctccacgaggaagtaa

SEQ ID NO: 68230 - DNA, 19 bp, Homo sapiens
  siRNA target sequence for ABCA12 (NM_015657.3,3567-3585).
gctccacgaggaagtaaaa

SEQ ID NO: 68231 - DNA, 19 bp, Homo sapiens
  siRNA target sequence for ABCA12 (NM_015657.3,3568-3586).
ctccacgaggaagtaaaaa

SEQ ID NO: 68232 - DNA, 19 bp, Homo sapiens
  siRNA target sequence for ABCA12 (NM_015657.3,3660-3678).
gaagttatctatatccata

SEQ ID NO: 68233 - DNA, 19 bp, Homo sapiens
  siRNA target sequence for ABCA12 (NM_015657.3,3737-3755).
catgttctcgccgaagtat

SEQ ID NO: 68234 - DNA, 19 bp, Homo sapiens
  siRNA target sequence for ABCA12 (NM_015657.3,3748-3766).
cgaagtatatgggatgtta

SEQ ID NO: 68235 - DNA, 19 bp, Homo sapiens
  siRNA target sequence for ABCA12 (NM_015657.3,3763-3781).
gttatatccaagaacaaaa

SEQ ID NO: 68236 - DNA, 19 bp, Homo sapiens
  siRNA target sequence for ABCA12 (NM_015657.3,4023-4041).
ctacctcaaggaggatatt

SEQ ID NO: 68237 - DNA, 19 bp, Homo sapiens
  siRNA target sequence for ABCA12 (NM_015657.3,4043-4061).
ggggagagcttgtttatgt

SEQ ID NO: 68238 - DNA, 19 bp, Homo sapiens
  siRNA target sequence for ABCA12 (NM_015657.3,4069-4087).
ccattcagcaccaaagtct

SEQ ID NO: 68239 - DNA, 19 bp, Homo sapiens
  siRNA target sequence for ABCA12 (NM_015657.3,4146-4164).
cgggtgctacggcatttca

SEQ ID NO: 68240 - DNA, 19 bp, Homo sapiens
  siRNA target sequence for ABCA12 (NM_015657.3,4148-4166).
ggtgctacggcatttcaga

SEQ ID NO: 68241 - DNA, 19 bp, Homo sapiens
  siRNA target sequence for ABCA12 (NM_015657.3,4149-4167).
gtgctacggcatttcagat

SEQ ID NO: 68242 - DNA, 19 bp, Homo sapiens
  siRNA target sequence for ABCA12 (NM_015657.3,4227-4245).
gagtcttgagcacttaaca

SEQ ID NO: 68243 - DNA, 19 bp, Homo sapiens
  siRNA target sequence for ABCA12 (NM_015657.3,4281-4299).
ctcaactcctgacgattta

SEQ ID NO: 68244 - DNA, 19 bp, Homo sapiens
  siRNA target sequence for ABCA12 (NM_015657.3,4518-4536).
caacagttatccagagatt

SEQ ID NO: 68245 - DNA, 19 bp, Homo sapiens
  siRNA target sequence for ABCA12 (NM_015657.3,4523-4541).
gttatccagagattcagat

SEQ ID NO: 68246 - DNA, 19 bp, Homo sapiens
  siRNA target sequence for ABCA12 (NM_015657.3,4542-4560).
ctccccctctctttatggt

SEQ ID NO: 68247 - DNA, 19 bp, Homo sapiens
  siRNA target sequence for ABCA12 (NM_015657.3,4566-4584).
cgaacagacagccttctat

SEQ ID NO: 68248 - DNA, 19 bp, Homo sapiens
  siRNA target sequence for ABCA12 (NM_015657.3,4572-4590).
gacagccttctatgctaat

SEQ ID NO: 68249 - DNA, 19 bp, Homo sapiens
  siRNA target sequence for ABCA12 (NM_015657.3,4574-4592).
cagccttctatgctaatta

SEQ ID NO: 68250 - DNA, 19 bp, Homo sapiens
  siRNA target sequence for ABCA12 (NM_015657.3,4577-4595).
ccttctatgctaattatca

SEQ ID NO: 68251 - DNA, 19 bp, Homo sapiens
  siRNA target sequence for ABCA12 (NM_015657.3,4715-4733).
gtggagaacccatcactaa

SEQ ID NO: 68252 - DNA, 19 bp, Homo sapiens
  siRNA target sequence for ABCA12 (NM_015657.3,4717-4735).
ggagaacccatcactaatt

SEQ ID NO: 68253 - DNA, 19 bp, Homo sapiens
  siRNA target sequence for ABCA12 (NM_015657.3,4718-4736).
gagaacccatcactaattt

SEQ ID NO: 68254 - DNA, 19 bp, Homo sapiens
  siRNA target sequence for ABCA12 (NM_015657.3,4762-4780).
gtccaggaatgtcctaaat

SEQ ID NO: 68255 - DNA, 19 bp, Homo sapiens
  siRNA target sequence for ABCA12 (NM_015657.3,4764-4782).
ccaggaatgtcctaaattt

SEQ ID NO: 68256 - DNA, 19 bp, Homo sapiens
  siRNA target sequence for ABCA12 (NM_015657.3,4791-4809).
cccaccgcacagaagaact

SEQ ID NO: 68257 - DNA, 19 bp, Homo sapiens
  siRNA target sequence for ABCA12 (NM_015657.3,4795-4813).
ccgcacagaagaacttact

SEQ ID NO: 68258 - DNA, 19 bp, Homo sapiens
  siRNA target sequence for ABCA12 (NM_015657.3,4808-4826).
cttactcatcccaggtaat

SEQ ID NO: 68259 - DNA, 19 bp, Homo sapiens
  siRNA target sequence for ABCA12 (NM_015657.3,4841-4859).
ggcaacgagtggaaaatta

SEQ ID NO: 68260 - DNA, 19 bp, Homo sapiens
  siRNA target sequence for ABCA12 (NM_015657.3,4842-4860).
gcaacgagtggaaaattat

SEQ ID NO: 68261 - DNA, 19 bp, Homo sapiens
  siRNA target sequence for ABCA12 (NM_015657.3,4846-4864).
cgagtggaaaattatctta

SEQ ID NO: 68262 - DNA, 19 bp, Homo sapiens
  siRNA target sequence for ABCA12 (NM_015657.3,4879-4897).
gagtttgtccaaaaaagat

SEQ ID NO: 68263 - DNA, 19 bp, Homo sapiens
  siRNA target sequence for ABCA12 (NM_015657.3,4928-4946).
caaaagaccttcgttttga

SEQ ID NO: 68264 - DNA, 19 bp, Homo sapiens
  siRNA target sequence for ABCA12 (NM_015657.3,4933-4951).
gaccttcgttttgatataa

SEQ ID NO: 68265 - DNA, 19 bp, Homo sapiens
  siRNA target sequence for ABCA12 (NM_015657.3,5047-5065).
cttctgcgagttaacatgt

SEQ ID NO: 68266 - DNA, 19 bp, Homo sapiens
  siRNA target sequence for ABCA12 (NM_015657.3,5050-5068).
ctgcgagttaacatgtcaa

SEQ ID NO: 68267 - DNA, 19 bp, Homo sapiens
  siRNA target sequence for ABCA12 (NM_015657.3,5053-5071).
cgagttaacatgtcaaaat

SEQ ID NO: 68268 - DNA, 19 bp, Homo sapiens
  siRNA target sequence for ABCA12 (NM_015657.3,5080-5098).
gcccgacatggcatcatca

SEQ ID NO: 68269 - DNA, 19 bp, Homo sapiens
  siRNA target sequence for ABCA12 (NM_015657.3,5081-5099).
cccgacatggcatcatcat

SEQ ID NO: 68270 - DNA, 19 bp, Homo sapiens
  siRNA target sequence for ABCA12 (NM_015657.3,5100-5118).
gtatagccatccttatcca

SEQ ID NO: 68271 - DNA, 19 bp, Homo sapiens
  siRNA target sequence for ABCA12 (NM_015657.3,5144-5162).
caatcagcagtttaatcga

SEQ ID NO: 68272 - DNA, 19 bp, Homo sapiens
  siRNA target sequence for ABCA12 (NM_015657.3,5150-5168).
gcagtttaatcgatatttt

SEQ ID NO: 68273 - DNA, 19 bp, Homo sapiens
  siRNA target sequence for ABCA12 (NM_015657.3,5227-5245).
gttgtaagggaacatcaaa

SEQ ID NO: 68274 - DNA, 19 bp, Homo sapiens
  siRNA target sequence for ABCA12 (NM_015657.3,5291-5309).
gctactgggtaacaaactt

SEQ ID NO: 68275 - DNA, 19 bp, Homo sapiens
  siRNA target sequence for ABCA12 (NM_015657.3,5335-5353).
gtgcctgtagcgttttcaa

SEQ ID NO: 68276 - DNA, 19 bp, Homo sapiens
  siRNA target sequence for ABCA12 (NM_015657.3,5341-5359).
gtagcgttttcaattggta

SEQ ID NO: 68277 - DNA, 19 bp, Homo sapiens
  siRNA target sequence for ABCA12 (NM_015657.3,5345-5363).
cgttttcaattggtatcat

SEQ ID NO: 68278 - DNA, 19 bp, Homo sapiens
  siRNA target sequence for ABCA12 (NM_015657.3,5356-5374).
ggtatcattgcgattttca

SEQ ID NO: 68279 - DNA, 19 bp, Homo sapiens
  siRNA target sequence for ABCA12 (NM_015657.3,5400-5418).
caacctaggcgctgtatct

SEQ ID NO: 68280 - DNA, 19 bp, Homo sapiens
  siRNA target sequence for ABCA12 (NM_015657.3,5428-5446).
ctcctgtttgggtatgcaa

SEQ ID NO: 68281 - DNA, 19 bp, Homo sapiens
  siRNA target sequence for ABCA12 (NM_015657.3,5433-5451).
gtttgggtatgcaacattt

SEQ ID NO: 68282 - DNA, 19 bp, Homo sapiens
  siRNA target sequence for ABCA12 (NM_015657.3,5437-5455).
gggtatgcaacattttcct

SEQ ID NO: 68283 - DNA, 19 bp, Homo sapiens
  siRNA target sequence for ABCA12 (NM_015657.3,5556-5574).
gtcagtggtatactttctt

SEQ ID NO: 68284 - DNA, 19 bp, Homo sapiens
  siRNA target sequence for ABCA12 (NM_015657.3,5577-5595).
caaggaaaagcctaatgat

SEQ ID NO: 68285 - DNA, 19 bp, Homo sapiens
  siRNA target sequence for ABCA12 (NM_015657.3,5586-5604).
gcctaatgatccgacttta

SEQ ID NO: 68286 - DNA, 19 bp, Homo sapiens
  siRNA target sequence for ABCA12 (NM_015657.3,5588-5606).
ctaatgatccgactttaga

SEQ ID NO: 68287 - DNA, 19 bp, Homo sapiens
  siRNA target sequence for ABCA12 (NM_015657.3,5663-5681).
gctacggtttgattgaact

SEQ ID NO: 68288 - DNA, 19 bp, Homo sapiens
  siRNA target sequence for ABCA12 (NM_015657.3,5664-5682).
ctacggtttgattgaactt

SEQ ID NO: 68289 - DNA, 19 bp, Homo sapiens
  siRNA target sequence for ABCA12 (NM_015657.3,5694-5712).
gtcggtcctagacttctta

SEQ ID NO: 68290 - DNA, 19 bp, Homo sapiens
  siRNA target sequence for ABCA12 (NM_015657.3,5696-5714).
cggtcctagacttcttaaa

SEQ ID NO: 68291 - DNA, 19 bp, Homo sapiens
  siRNA target sequence for ABCA12 (NM_015657.3,5697-5715).
ggtcctagacttcttaaaa

SEQ ID NO: 68292 - DNA, 19 bp, Homo sapiens
  siRNA target sequence for ABCA12 (NM_015657.3,5700-5718).
cctagacttcttaaaagca

SEQ ID NO: 68293 - DNA, 19 bp, Homo sapiens
  siRNA target sequence for ABCA12 (NM_015657.3,5701-5719).
ctagacttcttaaaagcat

SEQ ID NO: 68294 - DNA, 19 bp, Homo sapiens
  siRNA target sequence for ABCA12 (NM_015657.3,5810-5828).
ccttgcgactcttaatcaa

SEQ ID NO: 68295 - DNA, 19 bp, Homo sapiens
  siRNA target sequence for ABCA12 (NM_015657.3,5815-5833).
cgactcttaatcaacgaat

SEQ ID NO: 68296 - DNA, 19 bp, Homo sapiens
  siRNA target sequence for ABCA12 (NM_015657.3,5914-5932).
gtgcgggctgagagattaa

SEQ ID NO: 68297 - DNA, 19 bp, Homo sapiens
  siRNA target sequence for ABCA12 (NM_015657.3,5916-5934).
gcgggctgagagattaaga

SEQ ID NO: 68298 - DNA, 19 bp, Homo sapiens
  siRNA target sequence for ABCA12 (NM_015657.3,5919-5937).
ggctgagagattaagagtt

SEQ ID NO: 68299 - DNA, 19 bp, Homo sapiens
  siRNA target sequence for ABCA12 (NM_015657.3,5942-5960).
gtggtgcagctgaatttga

SEQ ID NO: 68300 - DNA, 19 bp, Homo sapiens
  siRNA target sequence for ABCA12 (NM_015657.3,5944-5962).
ggtgcagctgaatttgact

SEQ ID NO: 68301 - DNA, 19 bp, Homo sapiens
  siRNA target sequence for ABCA12 (NM_015657.3,5959-5977).
gacttggtccaactttatt

SEQ ID NO: 68302 - DNA, 19 bp, Homo sapiens
  siRNA target sequence for ABCA12 (NM_015657.3,5984-6002).
caaagacctaccaacttat

SEQ ID NO: 68303 - DNA, 19 bp, Homo sapiens
  siRNA target sequence for ABCA12 (NM_015657.3,6085-6103).
gcaggaaagaccactatat

SEQ ID NO: 68304 - DNA, 19 bp, Homo sapiens
  siRNA target sequence for ABCA12 (NM_015657.3,6088-6106).
ggaaagaccactatattca

SEQ ID NO: 68305 - DNA, 19 bp, Homo sapiens
  siRNA target sequence for ABCA12 (NM_015657.3,6273-6291).
cagggtacatggaattcca

SEQ ID NO: 68306 - DNA, 19 bp, Homo sapiens
  siRNA target sequence for ABCA12 (NM_015657.3,6412-6430).
gccttgatagggaaacctt

SEQ ID NO: 68307 - DNA, 19 bp, Homo sapiens
  siRNA target sequence for ABCA12 (NM_015657.3,6422-6440).
ggaaaccttccattctact

SEQ ID NO: 68308 - DNA, 19 bp, Homo sapiens
  siRNA target sequence for ABCA12 (NM_015657.3,6481-6499).
cggcacctctggaagatca

SEQ ID NO: 68309 - DNA, 19 bp, Homo sapiens
  siRNA target sequence for ABCA12 (NM_015657.3,6583-6601).
gccattatggtgaatggaa

SEQ ID NO: 68310 - DNA, 19 bp, Homo sapiens
  siRNA target sequence for ABCA12 (NM_015657.3,6584-6602).
ccattatggtgaatggaaa

SEQ ID NO: 68311 - DNA, 19 bp, Homo sapiens
  siRNA target sequence for ABCA12 (NM_015657.3,6591-6609).
ggtgaatggaaagtttcaa

SEQ ID NO: 68312 - DNA, 19 bp, Homo sapiens
  siRNA target sequence for ABCA12 (NM_015657.3,6592-6610).
gtgaatggaaagtttcaat

SEQ ID NO: 68313 - DNA, 19 bp, Homo sapiens
  siRNA target sequence for ABCA12 (NM_015657.3,6639-6657).
caggtttggacgaggattt

SEQ ID NO: 68314 - DNA, 19 bp, Homo sapiens
  siRNA target sequence for ABCA12 (NM_015657.3,6650-6668).
gaggatttactgtcaaagt

SEQ ID NO: 68315 - DNA, 19 bp, Homo sapiens
  siRNA target sequence for ABCA12 (NM_015657.3,6653-6671).
gatttactgtcaaagttca

SEQ ID NO: 68316 - DNA, 19 bp, Homo sapiens
  siRNA target sequence for ABCA12 (NM_015657.3,6661-6679).
gtcaaagttcacttgaaga

SEQ ID NO: 68317 - DNA, 19 bp, Homo sapiens
  siRNA target sequence for ABCA12 (NM_015657.3,6721-6739).
ctgcactttccaaaaacat

SEQ ID NO: 68318 - DNA, 19 bp, Homo sapiens
  siRNA target sequence for ABCA12 (NM_015657.3,6791-6809).
caggaggagtcgcaaacat

SEQ ID NO: 68319 - DNA, 19 bp, Homo sapiens
  siRNA target sequence for ABCA12 (NM_015657.3,6797-6815).
gagtcgcaaacatttttga

SEQ ID NO: 68320 - DNA, 19 bp, Homo sapiens
  siRNA target sequence for ABCA12 (NM_015657.3,6907-6925).
gaccagaagtcctatgaaa

SEQ ID NO: 68321 - DNA, 19 bp, Homo sapiens
  siRNA target sequence for ABCA12 (NM_015657.3,6909-6927).
ccagaagtcctatgaaact

SEQ ID NO: 68322 - DNA, 19 bp, Homo sapiens
  siRNA target sequence for ABCA12 (NM_015657.3,6939-6957).
cagccaaggttccactata

SEQ ID NO: 68323 - DNA, 19 bp, Homo sapiens
  siRNA target sequence for ABCA12 (NM_015657.3,6942-6960).
ccaaggttccactataagt

SEQ ID NO: 68324 - DNA, 19 bp, Homo sapiens
  siRNA target sequence for ABCA12 (NM_173076.2,310-328).
cttatggccagtcattatt

SEQ ID NO: 68325 - DNA, 19 bp, Homo sapiens
  siRNA target sequence for ABCA12 (NM_173076.2,315-333).
ggccagtcattattttcat

SEQ ID NO: 68326 - DNA, 19 bp, Homo sapiens
  siRNA target sequence for ABCA12 (NM_173076.2,316-334).
gccagtcattattttcata

SEQ ID NO: 68327 - DNA, 19 bp, Homo sapiens
  siRNA target sequence for ABCA12 (NM_173076.2,369-387).
ctgcaaaaccaacttgtta

SEQ ID NO: 68328 - DNA, 19 bp, Homo sapiens
  siRNA target sequence for ABCA12 (NM_173076.2,388-406).
cctcgcacctcgaaacctt

SEQ ID NO: 68329 - DNA, 19 bp, Homo sapiens
  siRNA target sequence for ABCA12 (NM_173076.2,518-536).
gatgcactatttaaagaca

SEQ ID NO: 68330 - DNA, 19 bp, Homo sapiens
  siRNA target sequence for ABCA12 (NM_173076.2,555-573).
catccaacctggataagga

SEQ ID NO: 68331 - DNA, 19 bp, Homo sapiens
  siRNA target sequence for ABCA12 (NM_173076.2,566-584).
gataaggacagcagtttat

SEQ ID NO: 68332 - DNA, 19 bp, Homo sapiens
  siRNA target sequence for ABCA12 (NM_173076.2,661-679).
ggaaatccccggaacatat

SEQ ID NO: 68333 - DNA, 19 bp, Homo sapiens
  siRNA target sequence for ABCA12 (NM_173076.2,662-680).
gaaatccccggaacatata

SEQ ID NO: 68334 - DNA, 19 bp, Homo sapiens
  siRNA target sequence for ABCA12 (NM_173076.2,669-687).
ccggaacatatactttcaa

SEQ ID NO: 68335 - DNA, 19 bp, Homo sapiens
  siRNA target sequence for ABCA12 (NM_173076.2,717-735).
gcttggaaaagctgttaaa

SEQ ID NO: 68336 - DNA, 19 bp, Homo sapiens
  siRNA target sequence for ABCA12 (NM_173076.2,755-773).
gatatacgaagagaactat

SEQ ID NO: 68337 - DNA, 19 bp, Homo sapiens
  siRNA target sequence for ABCA12 (NM_173076.2,778-796).
cagctattcaggatacatt

SEQ ID NO: 68338 - DNA, 19 bp, Homo sapiens
  siRNA target sequence for ABCA12 (NM_173076.2,780-798).
gctattcaggatacattgt

SEQ ID NO: 68339 - DNA, 19 bp, Homo sapiens
  siRNA target sequence for ABCA12 (NM_173076.2,808-826).
cttctcttggacctttcta

SEQ ID NO: 68340 - DNA, 19 bp, Homo sapiens
  siRNA target sequence for ABCA12 (NM_173076.2,858-876).
ctaacatgacccttttaga

SEQ ID NO: 68341 - DNA, 19 bp, Homo sapiens
  siRNA target sequence for ABCA12 (NM_173076.2,927-945).
ccaacaatcagaagatagt

SEQ ID NO: 68342 - DNA, 19 bp, Homo sapiens
  siRNA target sequence for ABCA12 (NM_173076.2,1008-1026).
ggcagcttctgtctagttt

SEQ ID NO: 68343 - DNA, 19 bp, Homo sapiens
  siRNA target sequence for ABCA12 (NM_173076.2,1013-1031).
cttctgtctagttttccaa

SEQ ID NO: 68344 - DNA, 19 bp, Homo sapiens
  siRNA target sequence for ABCA12 (NM_173076.2,1040-1058).
cagaatgacacatcactaa

SEQ ID NO: 68345 - DNA, 19 bp, Homo sapiens
  siRNA target sequence for ABCA12 (NM_173076.2,1048-1066).
cacatcactaagcaatcta

SEQ ID NO: 68346 - DNA, 19 bp, Homo sapiens
  siRNA target sequence for ABCA12 (NM_173076.2,1050-1068).
catcactaagcaatctatt

SEQ ID NO: 68347 - DNA, 19 bp, Homo sapiens
  siRNA target sequence for ABCA12 (NM_173076.2,1060-1078).
caatctatttgatgttctt

SEQ ID NO: 68348 - DNA, 19 bp, Homo sapiens
  siRNA target sequence for ABCA12 (NM_173076.2,1102-1120).
ggttgtgcagaaggtttat

SEQ ID NO: 68349 - DNA, 19 bp, Homo sapiens
  siRNA target sequence for ABCA12 (NM_173076.2,1114-1132).
ggtttatccacgttttgca

SEQ ID NO: 68350 - DNA, 19 bp, Homo sapiens
  siRNA target sequence for ABCA12 (NM_173076.2,1115-1133).
gtttatccacgttttgcaa

SEQ ID NO: 68351 - DNA, 19 bp, Homo sapiens
  siRNA target sequence for ABCA12 (NM_173076.2,1152-1170).
ccctccagaagtctgttaa

SEQ ID NO: 68352 - DNA, 19 bp, Homo sapiens
  siRNA target sequence for ABCA13 (NM_152701.2,53-71).
gccctgctgtggaagaatt

SEQ ID NO: 68353 - DNA, 19 bp, Homo sapiens
  siRNA target sequence for ABCA13 (NM_152701.2,88-106).
gaacccggtccttttcctt

SEQ ID NO: 68354 - DNA, 19 bp, Homo sapiens
  siRNA target sequence for ABCA13 (NM_152701.2,120-138).
ggccttgtatcctgtttgt

SEQ ID NO: 68355 - DNA, 19 bp, Homo sapiens
  siRNA target sequence for ABCA13 (NM_152701.2,121-139).
gccttgtatcctgtttgta

SEQ ID NO: 68356 - DNA, 19 bp, Homo sapiens
  siRNA target sequence for ABCA13 (NM_152701.2,172-190).
cagatacagagacatttgt

SEQ ID NO: 68357 - DNA, 19 bp, Homo sapiens
  siRNA target sequence for ABCA13 (NM_152701.2,222-240).
gtgttatcccctttgttca

SEQ ID NO: 68358 - DNA, 19 bp, Homo sapiens
  siRNA target sequence for ABCA13 (NM_152701.2,290-308).
gggtcaatggagcatcatt

SEQ ID NO: 68359 - DNA, 19 bp, Homo sapiens
  siRNA target sequence for ABCA13 (NM_152701.2,302-320).
catcattttcgtttgtcta

SEQ ID NO: 68360 - DNA, 19 bp, Homo sapiens
  siRNA target sequence for ABCA13 (NM_152701.2,311-329).
cgtttgtctaggttccaaa

SEQ ID NO: 68361 - DNA, 19 bp, Homo sapiens
  siRNA target sequence for ABCA13 (NM_152701.2,361-379).
ggcctttttaaaagagata

SEQ ID NO: 68362 - DNA, 19 bp, Homo sapiens
  siRNA target sequence for ABCA13 (NM_152701.2,461-479).
ccagattcttcttatggtt

SEQ ID NO: 68363 - DNA, 19 bp, Homo sapiens
  siRNA target sequence for ABCA13 (NM_152701.2,550-568).
gcctcatatctgggatttt

SEQ ID NO: 68364 - DNA, 19 bp, Homo sapiens
  siRNA target sequence for ABCA13 (NM_152701.2,561-579).
gggattttctacttttact

SEQ ID NO: 68365 - DNA, 19 bp, Homo sapiens
  siRNA target sequence for ABCA13 (NM_152701.2,712-730).
ccaggtttctgaacttgta

SEQ ID NO: 68366 - DNA, 19 bp, Homo sapiens
  siRNA target sequence for ABCA13 (NM_152701.2,728-746).
gtactgaatgtgaccattt

SEQ ID NO: 68367 - DNA, 19 bp, Homo sapiens
  siRNA target sequence for ABCA13 (NM_152701.2,741-759).
ccatttcgacactgacatt

SEQ ID NO: 68368 - DNA, 19 bp, Homo sapiens
  siRNA target sequence for ABCA13 (NM_152701.2,780-798).
cagtcaccgagccagttta

SEQ ID NO: 68369 - DNA, 19 bp, Homo sapiens
  siRNA target sequence for ABCA13 (NM_152701.2,831-849).
cacagaaagtccagtatga

SEQ ID NO: 68370 - DNA, 19 bp, Homo sapiens
  siRNA target sequence for ABCA13 (NM_152701.2,839-857).
gtccagtatgatctcaaat

SEQ ID NO: 68371 - DNA, 19 bp, Homo sapiens
  siRNA target sequence for ABCA13 (NM_152701.2,887-905).
gaacagatcctgaactctt

SEQ ID NO: 68372 - DNA, 19 bp, Homo sapiens
  siRNA target sequence for ABCA13 (NM_152701.2,953-971).
gtgtgttcagtcttgtcta

SEQ ID NO: 68373 - DNA, 19 bp, Homo sapiens
  siRNA target sequence for ABCA13 (NM_152701.2,1078-1096).
ctaccaacaggtgtttgtt

SEQ ID NO: 68374 - DNA, 19 bp, Homo sapiens
  siRNA target sequence for ABCA13 (NM_152701.2,1156-1174).
ggctctcaggaatcagttt

SEQ ID NO: 68375 - DNA, 19 bp, Homo sapiens
  siRNA target sequence for ABCA13 (NM_152701.2,1158-1176).
ctctcaggaatcagtttga

SEQ ID NO: 68376 - DNA, 19 bp, Homo sapiens
  siRNA target sequence for ABCA13 (NM_152701.2,1164-1182).
ggaatcagtttgaagaaga

SEQ ID NO: 68377 - DNA, 19 bp, Homo sapiens
  siRNA target sequence for ABCA13 (NM_152701.2,1250-1268).
gcagatggcccaaaagata

SEQ ID NO: 68378 - DNA, 19 bp, Homo sapiens
  siRNA target sequence for ABCA13 (NM_152701.2,1251-1269).
cagatggcccaaaagataa

SEQ ID NO: 68379 - DNA, 19 bp, Homo sapiens
  siRNA target sequence for ABCA13 (NM_152701.2,1341-1359).
cggcactgaagagatttct

SEQ ID NO: 68380 - DNA, 19 bp, Homo sapiens
  siRNA target sequence for ABCA13 (NM_152701.2,1386-1404).
cgatagctcagaatttaca

SEQ ID NO: 68381 - DNA, 19 bp, Homo sapiens
  siRNA target sequence for ABCA13 (NM_152701.2,1387-1405).
gatagctcagaatttacat

SEQ ID NO: 68382 - DNA, 19 bp, Homo sapiens
  siRNA target sequence for ABCA13 (NM_152701.2,1429-1447).
cctggagacatcagctaat

SEQ ID NO: 68383 - DNA, 19 bp, Homo sapiens
  siRNA target sequence for ABCA13 (NM_152701.2,1458-1476).
ggtttgaacttaaccaatt

SEQ ID NO: 68384 - DNA, 19 bp, Homo sapiens
  siRNA target sequence for ABCA13 (NM_152701.2,1540-1558).
cccgaatggtcgtttctct

SEQ ID NO: 68385 - DNA, 19 bp, Homo sapiens
  siRNA target sequence for ABCA13 (NM_152701.2,1610-1628).
cagggactgttgtgctatt

SEQ ID NO: 68386 - DNA, 19 bp, Homo sapiens
  siRNA target sequence for ABCA13 (NM_152701.2,1612-1630).
gggactgttgtgctattgt

SEQ ID NO: 68387 - DNA, 19 bp, Homo sapiens
  siRNA target sequence for ABCA13 (NM_152701.2,1613-1631).
ggactgttgtgctattgta

SEQ ID NO: 68388 - DNA, 19 bp, Homo sapiens
  siRNA target sequence for ABCA13 (NM_152701.2,1636-1654).
ctctgagacgagtgtttta

SEQ ID NO: 68389 - DNA, 19 bp, Homo sapiens
  siRNA target sequence for ABCA13 (NM_152701.2,1638-1656).
ctgagacgagtgttttaaa

SEQ ID NO: 68390 - DNA, 19 bp, Homo sapiens
  siRNA target sequence for ABCA13 (NM_152701.2,1640-1658).
gagacgagtgttttaaaca

SEQ ID NO: 68391 - DNA, 19 bp, Homo sapiens
  siRNA target sequence for ABCA13 (NM_152701.2,1676-1694).
gaggatgctgatcgtattt

SEQ ID NO: 68392 - DNA, 19 bp, Homo sapiens
  siRNA target sequence for ABCA13 (NM_152701.2,1876-1894).
gcttgtctccacagtgata

SEQ ID NO: 68393 - DNA, 19 bp, Homo sapiens
  siRNA target sequence for ABCA13 (NM_152701.2,1924-1942).
cctggaacaagcatattat

SEQ ID NO: 68394 - DNA, 19 bp, Homo sapiens
  siRNA target sequence for ABCA13 (NM_152701.2,1925-1943).
ctggaacaagcatattatt

SEQ ID NO: 68395 - DNA, 19 bp, Homo sapiens
  siRNA target sequence for ABCA13 (NM_152701.2,1977-1995).
gcgaagtggcccaatatgt

SEQ ID NO: 68396 - DNA, 19 bp, Homo sapiens
  siRNA target sequence for ABCA13 (NM_152701.2,1978-1996).
cgaagtggcccaatatgta

SEQ ID NO: 68397 - DNA, 19 bp, Homo sapiens
  siRNA target sequence for ABCA13 (NM_152701.2,2010-2028).
gtttccagaacagactatt

SEQ ID NO: 68398 - DNA, 19 bp, Homo sapiens
  siRNA target sequence for ABCA13 (NM_152701.2,2122-2140).
gtctccaacagcttccata

SEQ ID NO: 68399 - DNA, 19 bp, Homo sapiens
  siRNA target sequence for ABCA13 (NM_152701.2,2143-2161).
cagggctttaaatttcaca

SEQ ID NO: 68400 - DNA, 19 bp, Homo sapiens
  siRNA target sequence for ABCA13 (NM_152701.2,2145-2163).
gggctttaaatttcacaaa

SEQ ID NO: 68401 - DNA, 19 bp, Homo sapiens
  siRNA target sequence for ABCA13 (NM_152701.2,2196-2214).
cccttgaggatgaacaaat

SEQ ID NO: 68402 - DNA, 19 bp, Homo sapiens
  siRNA target sequence for ABCA13 (NM_152701.2,2416-2434).
caacgaagtgatttggaaa

SEQ ID NO: 68403 - DNA, 19 bp, Homo sapiens
  siRNA target sequence for ABCA13 (NM_152701.2,2444-2462).
ctcggaagtcactggataa

SEQ ID NO: 68404 - DNA, 19 bp, Homo sapiens
  siRNA target sequence for ABCA13 (NM_152701.2,2458-2476).
gataaggaaggaaccaaaa

SEQ ID NO: 68405 - DNA, 19 bp, Homo sapiens
  siRNA target sequence for ABCA13 (NM_152701.2,2464-2482).
gaaggaaccaaaaaatctt

SEQ ID NO: 68406 - DNA, 19 bp, Homo sapiens
  siRNA target sequence for ABCA13 (NM_152701.2,2538-2556).
gggcctatggcatttcaaa

SEQ ID NO: 68407 - DNA, 19 bp, Homo sapiens
  siRNA target sequence for ABCA13 (NM_152701.2,2567-2585).
gctaaattggaaaacttct

SEQ ID NO: 68408 - DNA, 19 bp, Homo sapiens
  siRNA target sequence for ABCA13 (NM_152701.2,2568-2586).
ctaaattggaaaacttctt

SEQ ID NO: 68409 - DNA, 19 bp, Homo sapiens
  siRNA target sequence for ABCA13 (NM_152701.2,2618-2636).
gagattctgagtacaagtt

SEQ ID NO: 68410 - DNA, 19 bp, Homo sapiens
  siRNA target sequence for ABCA13 (NM_152701.2,2624-2642).
ctgagtacaagttttaact

SEQ ID NO: 68411 - DNA, 19 bp, Homo sapiens
  siRNA target sequence for ABCA13 (NM_152701.2,2657-2675).
cattcagattggcctaaat

SEQ ID NO: 68412 - DNA, 19 bp, Homo sapiens
  siRNA target sequence for ABCA13 (NM_152701.2,2689-2707).
catagattttgtacgttta

SEQ ID NO: 68413 - DNA, 19 bp, Homo sapiens
  siRNA target sequence for ABCA13 (NM_152701.2,2703-2721).
gtttaagtgaggctataat

SEQ ID NO: 68414 - DNA, 19 bp, Homo sapiens
  siRNA target sequence for ABCA13 (NM_152701.2,2898-2916).
cagctttacttctgcaaat

SEQ ID NO: 68415 - DNA, 19 bp, Homo sapiens
  siRNA target sequence for ABCA13 (NM_152701.2,2901-2919).
ctttacttctgcaaattta

SEQ ID NO: 68416 - DNA, 19 bp, Homo sapiens
  siRNA target sequence for ABCA13 (NM_152701.2,2932-2950).
ccgatatatttatgaatta

SEQ ID NO: 68417 - DNA, 19 bp, Homo sapiens
  siRNA target sequence for ABCA13 (NM_152701.2,2933-2951).
cgatatatttatgaattat

SEQ ID NO: 68418 - DNA, 19 bp, Homo sapiens
  siRNA target sequence for ABCA13 (NM_152701.2,2967-2985).
gaggctcttcgttgacttt

SEQ ID NO: 68419 - DNA, 19 bp, Homo sapiens
  siRNA target sequence for ABCA13 (NM_152701.2,2976-2994).
cgttgactttccttacaca

SEQ ID NO: 68420 - DNA, 19 bp, Homo sapiens
  siRNA target sequence for ABCA13 (NM_152701.2,2977-2995).
gttgactttccttacacaa

SEQ ID NO: 68421 - DNA, 19 bp, Homo sapiens
  siRNA target sequence for ABCA13 (NM_152701.2,3080-3098).
gaggttcttgggggaattt

SEQ ID NO: 68422 - DNA, 19 bp, Homo sapiens
  siRNA target sequence for ABCA13 (NM_152701.2,3082-3100).
ggttcttgggggaatttct

SEQ ID NO: 68423 - DNA, 19 bp, Homo sapiens
  siRNA target sequence for ABCA13 (NM_152701.2,3091-3109).
gggaatttctaatgtatct

SEQ ID NO: 68424 - DNA, 19 bp, Homo sapiens
  siRNA target sequence for ABCA13 (NM_152701.2,3108-3126).
cttactgtcagcaattgct

SEQ ID NO: 68425 - DNA, 19 bp, Homo sapiens
  siRNA target sequence for ABCA13 (NM_152701.2,3155-3173).
gcccaatccttcatgtcta

SEQ ID NO: 68426 - DNA, 19 bp, Homo sapiens
  siRNA target sequence for ABCA13 (NM_152701.2,3191-3209).
gaagtgatccacactactt

SEQ ID NO: 68427 - DNA, 19 bp, Homo sapiens
  siRNA target sequence for ABCA13 (NM_152701.2,3207-3225).
ctttgacaggcctcaaaca

SEQ ID NO: 68428 - DNA, 19 bp, Homo sapiens
  siRNA target sequence for ABCA13 (NM_152701.2,3218-3236).
ctcaaacagctgctcataa

SEQ ID NO: 68429 - DNA, 19 bp, Homo sapiens
  siRNA target sequence for ABCA13 (NM_152701.2,3220-3238).
caaacagctgctcataatt

SEQ ID NO: 68430 - DNA, 19 bp, Homo sapiens
  siRNA target sequence for ABCA13 (NM_152701.2,3226-3244).
gctgctcataattgatgaa

SEQ ID NO: 68431 - DNA, 19 bp, Homo sapiens
  siRNA target sequence for ABCA13 (NM_152701.2,3239-3257).
gatgaagattttcgtattt

SEQ ID NO: 68432 - DNA, 19 bp, Homo sapiens
  siRNA target sequence for ABCA13 (NM_152701.2,3296-3314).
gtagaagacctattggata

SEQ ID NO: 68433 - DNA, 19 bp, Homo sapiens
  siRNA target sequence for ABCA13 (NM_152701.2,3299-3317).
gaagacctattggataata

SEQ ID NO: 68434 - DNA, 19 bp, Homo sapiens
  siRNA target sequence for ABCA13 (NM_152701.2,3310-3328).
ggataataaatgcttgatt

SEQ ID NO: 68435 - DNA, 19 bp, Homo sapiens
  siRNA target sequence for ABCA13 (NM_152701.2,3321-3339).
gcttgatttcggacaataa

SEQ ID NO: 68436 - DNA, 19 bp, Homo sapiens
  siRNA target sequence for ABCA13 (NM_152701.2,3343-3361).
catttcttccgtaaattat

SEQ ID NO: 68437 - DNA, 19 bp, Homo sapiens
  siRNA target sequence for ABCA13 (NM_152701.2,3369-3387).
gtgaggagtcttcatttgt

SEQ ID NO: 68438 - DNA, 19 bp, Homo sapiens
  siRNA target sequence for ABCA13 (NM_152701.2,3430-3448).
cagtgtgttcaacaagttt

SEQ ID NO: 68439 - DNA, 19 bp, Homo sapiens
  siRNA target sequence for ABCA13 (NM_152701.2,3432-3450).
gtgtgttcaacaagtttat

SEQ ID NO: 68440 - DNA, 19 bp, Homo sapiens
  siRNA target sequence for ABCA13 (NM_152701.2,3479-3497).
caaatgtggactgaaatct

SEQ ID NO: 68441 - DNA, 19 bp, Homo sapiens
  siRNA target sequence for ABCA13 (NM_152701.2,3496-3514).
ctgggaaaccatatctcaa

SEQ ID NO: 68442 - DNA, 19 bp, Homo sapiens
  siRNA target sequence for ABCA13 (NM_152701.2,3499-3517).
ggaaaccatatctcaatta

SEQ ID NO: 68443 - DNA, 19 bp, Homo sapiens
  siRNA target sequence for ABCA13 (NM_152701.2,3568-3586).
gcttttggatgaattggaa

SEQ ID NO: 68444 - DNA, 19 bp, Homo sapiens
  siRNA target sequence for ABCA13 (NM_152701.2,3590-3608).
gatgtgaaagtctctaaaa

SEQ ID NO: 68445 - DNA, 19 bp, Homo sapiens
  siRNA target sequence for ABCA13 (NM_152701.2,3593-3611).
gtgaaagtctctaaaagct

SEQ ID NO: 68446 - DNA, 19 bp, Homo sapiens
  siRNA target sequence for ABCA13 (NM_152701.2,3638-3656).
gttgctagactcatattaa

SEQ ID NO: 68447 - DNA, 19 bp, Homo sapiens
  siRNA target sequence for ABCA13 (NM_152701.2,3641-3659).
gctagactcatattaaatt

SEQ ID NO: 68448 - DNA, 19 bp, Homo sapiens
  siRNA target sequence for ABCA13 (NM_152701.2,3730-3748).
ggtagctttaggtaatgca

SEQ ID NO: 68449 - DNA, 19 bp, Homo sapiens
  siRNA target sequence for ABCA13 (NM_152701.2,3735-3753).
ctttaggtaatgcattagt

SEQ ID NO: 68450 - DNA, 19 bp, Homo sapiens
  siRNA target sequence for ABCA13 (NM_152701.2,3741-3759).
gtaatgcattagtttcagt

SEQ ID NO: 68451 - DNA, 19 bp, Homo sapiens
  siRNA target sequence for ABCA13 (NM_152701.2,3756-3774).
cagtaaaaaaacttaactt

SEQ ID NO: 68452 - DNA, 19 bp, Homo sapiens
  siRNA target sequence for ABCA13 (NM_152701.2,3836-3854).
ccattcaacgaaagtacaa

SEQ ID NO: 68453 - DNA, 19 bp, Homo sapiens
  siRNA target sequence for ABCA13 (NM_152701.2,3900-3918).
gcagtacctcagaatatat

SEQ ID NO: 68454 - DNA, 19 bp, Homo sapiens
  siRNA target sequence for ABCA13 (NM_152701.2,3920-3938).
gtcagaaatctagattcaa

SEQ ID NO: 68455 - DNA, 19 bp, Homo sapiens
  siRNA target sequence for ABCA13 (NM_152701.2,3929-3947).
ctagattcaataaatgact

SEQ ID NO: 68456 - DNA, 19 bp, Homo sapiens
  siRNA target sequence for ABCA13 (NM_152701.2,3999-4017).
ctgagctaagagaagcaat

SEQ ID NO: 68457 - DNA, 19 bp, Homo sapiens
  siRNA target sequence for ABCA13 (NM_152701.2,4003-4021).
gctaagagaagcaatagta

SEQ ID NO: 68458 - DNA, 19 bp, Homo sapiens
  siRNA target sequence for ABCA13 (NM_152701.2,4008-4026).
gagaagcaatagtatttct

SEQ ID NO: 68459 - DNA, 19 bp, Homo sapiens
  siRNA target sequence for ABCA13 (NM_152701.2,4038-4056).
cacatgatcgagatttgtt

SEQ ID NO: 68460 - DNA, 19 bp, Homo sapiens
  siRNA target sequence for ABCA13 (NM_152701.2,4132-4150).
gaggatgttacgtattcta

SEQ ID NO: 68461 - DNA, 19 bp, Homo sapiens
  siRNA target sequence for ABCA13 (NM_152701.2,4134-4152).
ggatgttacgtattctaga

SEQ ID NO: 68462 - DNA, 19 bp, Homo sapiens
  siRNA target sequence for ABCA13 (NM_152701.2,4142-4160).
cgtattctagacacgttaa

SEQ ID NO: 68463 - DNA, 19 bp, Homo sapiens
  siRNA target sequence for ABCA13 (NM_152701.2,4143-4161).
gtattctagacacgttaaa

SEQ ID NO: 68464 - DNA, 19 bp, Homo sapiens
  siRNA target sequence for ABCA13 (NM_152701.2,4148-4166).
ctagacacgttaaattcca

SEQ ID NO: 68465 - DNA, 19 bp, Homo sapiens
  siRNA target sequence for ABCA13 (NM_152701.2,4206-4224).
gcattgtatggttagatgt

SEQ ID NO: 68466 - DNA, 19 bp, Homo sapiens
  siRNA target sequence for ABCA13 (NM_152701.2,4211-4229).
gtatggttagatgtcataa

SEQ ID NO: 68467 - DNA, 19 bp, Homo sapiens
  siRNA target sequence for ABCA13 (NM_152701.2,4216-4234).
gttagatgtcataaaccat

SEQ ID NO: 68468 - DNA, 19 bp, Homo sapiens
  siRNA target sequence for ABCA13 (NM_152701.2,4220-4238).
gatgtcataaaccatttgt

SEQ ID NO: 68469 - DNA, 19 bp, Homo sapiens
  siRNA target sequence for ABCA13 (NM_152701.2,4243-4261).
gttgtctaactccagtttt

SEQ ID NO: 68470 - DNA, 19 bp, Homo sapiens
  siRNA target sequence for ABCA13 (NM_152701.2,4248-4266).
ctaactccagtttttcaca

SEQ ID NO: 68471 - DNA, 19 bp, Homo sapiens
  siRNA target sequence for ABCA13 (NM_152701.2,4288-4306).
ggggaatttcagagatata

SEQ ID NO: 68472 - DNA, 19 bp, Homo sapiens
  siRNA target sequence for ABCA13 (NM_152701.2,4337-4355).
gtaacttgggtgttaaata

SEQ ID NO: 68473 - DNA, 19 bp, Homo sapiens
  siRNA target sequence for ABCA13 (NM_152701.2,4388-4406).
catataaattgtgtcaata

SEQ ID NO: 68474 - DNA, 19 bp, Homo sapiens
  siRNA target sequence for ABCA13 (NM_152701.2,4433-4451).
ctaaatattgtacttacta

SEQ ID NO: 68475 - DNA, 19 bp, Homo sapiens
  siRNA target sequence for ABCA13 (NM_152701.2,4445-4463).
cttactacagtctttgaaa

SEQ ID NO: 68476 - DNA, 19 bp, Homo sapiens
  siRNA target sequence for ABCA13 (NM_152701.2,4508-4526).
gattccacaaagcaagtaa

SEQ ID NO: 68477 - DNA, 19 bp, Homo sapiens
  siRNA target sequence for ABCA13 (NM_152701.2,4523-4541).
gtaaggatgagtatcaaca

SEQ ID NO: 68478 - DNA, 19 bp, Homo sapiens
  siRNA target sequence for ABCA13 (NM_152701.2,4531-4549).
gagtatcaacaacttaaca

SEQ ID NO: 68479 - DNA, 19 bp, Homo sapiens
  siRNA target sequence for ABCA13 (NM_152701.2,4565-4583).
gcatctcagtccaattgga

SEQ ID NO: 68480 - DNA, 19 bp, Homo sapiens
  siRNA target sequence for ABCA13 (NM_152701.2,4571-4589).
cagtccaattggagatatt

SEQ ID NO: 68481 - DNA, 19 bp, Homo sapiens
  siRNA target sequence for ABCA13 (NM_152701.2,4582-4600).
gagatattttactgaatta

SEQ ID NO: 68482 - DNA, 19 bp, Homo sapiens
  siRNA target sequence for ABCA13 (NM_152701.2,4634-4652).
cctaatcagtttcaaaata

SEQ ID NO: 68483 - DNA, 19 bp, Homo sapiens
  siRNA target sequence for ABCA13 (NM_152701.2,4694-4712).
cttgtaaaaggtatttact

SEQ ID NO: 68484 - DNA, 19 bp, Homo sapiens
  siRNA target sequence for ABCA13 (NM_152701.2,4697-4715).
gtaaaaggtatttacttta

SEQ ID NO: 68485 - DNA, 19 bp, Homo sapiens
  siRNA target sequence for ABCA13 (NM_152701.2,4770-4788).
ccaccagtccaaaagaaaa

SEQ ID NO: 68486 - DNA, 19 bp, Homo sapiens
  siRNA target sequence for ABCA13 (NM_152701.2,4798-4816).
cagtgtaggcaattccatt

SEQ ID NO: 68487 - DNA, 19 bp, Homo sapiens
  siRNA target sequence for ABCA13 (NM_152701.2,4805-4823).
ggcaattccatttatcact

SEQ ID NO: 68488 - DNA, 19 bp, Homo sapiens
  siRNA target sequence for ABCA13 (NM_152701.2,4807-4825).
caattccatttatcactta

SEQ ID NO: 68489 - DNA, 19 bp, Homo sapiens
  siRNA target sequence for ABCA13 (NM_152701.2,4834-4852).
ccttgccttcagcttatct

SEQ ID NO: 68490 - DNA, 19 bp, Homo sapiens
  siRNA target sequence for ABCA13 (NM_152701.2,4934-4952).
gatgtgttcaactccttaa

SEQ ID NO: 68491 - DNA, 19 bp, Homo sapiens
  siRNA target sequence for ABCA13 (NM_152701.2,4948-4966).
cttaatgcctgtagttcat

SEQ ID NO: 68492 - DNA, 19 bp, Homo sapiens
  siRNA target sequence for ABCA13 (NM_152701.2,4977-4995).
cacaaaatgcaggttatat

SEQ ID NO: 68493 - DNA, 19 bp, Homo sapiens
  siRNA target sequence for ABCA13 (NM_152701.2,5000-5018).
gctttgaagaaggtaactt

SEQ ID NO: 68494 - DNA, 19 bp, Homo sapiens
  siRNA target sequence for ABCA13 (NM_152701.2,5021-5039).
gtcatgcgtacccttaaga

SEQ ID NO: 68495 - DNA, 19 bp, Homo sapiens
  siRNA target sequence for ABCA13 (NM_152701.2,5041-5059).
ggcagacatagacctttta

SEQ ID NO: 68496 - DNA, 19 bp, Homo sapiens
  siRNA target sequence for ABCA13 (NM_152701.2,5043-5061).
cagacatagaccttttagt

SEQ ID NO: 68497 - DNA, 19 bp, Homo sapiens
  siRNA target sequence for ABCA13 (NM_152701.2,5068-5086).
gcttgaacaagttagtgta

SEQ ID NO: 68498 - DNA, 19 bp, Homo sapiens
  siRNA target sequence for ABCA13 (NM_152701.2,5075-5093).
caagttagtgtaaacctaa

SEQ ID NO: 68499 - DNA, 19 bp, Homo sapiens
  siRNA target sequence for ABCA13 (NM_152701.2,5082-5100).
gtgtaaacctaatggattt

SEQ ID NO: 68500 - DNA, 19 bp, Homo sapiens
  siRNA target sequence for ABCA13 (NM_152701.2,5129-5147).
ggcaatttagtggtcaatt

SEQ ID NO: 68501 - DNA, 19 bp, Homo sapiens
  siRNA target sequence for ABCA13 (NM_152701.2,5174-5192).
gcagacagctcacattctt

SEQ ID NO: 68502 - DNA, 19 bp, Homo sapiens
  siRNA target sequence for ABCA13 (NM_152701.2,5184-5202).
cacattcttggaatgttaa

SEQ ID NO: 68503 - DNA, 19 bp, Homo sapiens
  siRNA target sequence for ABCA13 (NM_152701.2,5218-5236).
ctcacgcctgtttcctaaa

SEQ ID NO: 68504 - DNA, 19 bp, Homo sapiens
  siRNA target sequence for ABCA13 (NM_152701.2,5300-5318).
ggagtacctggtaaaaaca

SEQ ID NO: 68505 - DNA, 19 bp, Homo sapiens
  siRNA target sequence for ABCA13 (NM_152701.2,5301-5319).
gagtacctggtaaaaacat

SEQ ID NO: 68506 - DNA, 19 bp, Homo sapiens
  siRNA target sequence for ABCA13 (NM_152701.2,5303-5321).
gtacctggtaaaaacatca

SEQ ID NO: 68507 - DNA, 19 bp, Homo sapiens
  siRNA target sequence for ABCA13 (NM_152701.2,5356-5374).
ccttcatggcataaccatt

SEQ ID NO: 68508 - DNA, 19 bp, Homo sapiens
  siRNA target sequence for ABCA13 (NM_152701.2,5357-5375).
cttcatggcataaccattt

SEQ ID NO: 68509 - DNA, 19 bp, Homo sapiens
  siRNA target sequence for ABCA13 (NM_152701.2,5360-5378).
catggcataaccatttcaa

SEQ ID NO: 68510 - DNA, 19 bp, Homo sapiens
  siRNA target sequence for ABCA13 (NM_152701.2,5390-5408).
gaagacttcgcaattgtga

SEQ ID NO: 68511 - DNA, 19 bp, Homo sapiens
  siRNA target sequence for ABCA13 (NM_152701.2,5395-5413).
cttcgcaattgtgataaaa

SEQ ID NO: 68512 - DNA, 19 bp, Homo sapiens
  siRNA target sequence for ABCA13 (NM_152701.2,5417-5435).
cttttggatacaattgaat

SEQ ID NO: 68513 - DNA, 19 bp, Homo sapiens
  siRNA target sequence for ABCA13 (NM_152701.2,5422-5440).
ggatacaattgaattagta

SEQ ID NO: 68514 - DNA, 19 bp, Homo sapiens
  siRNA target sequence for ABCA13 (NM_152701.2,5423-5441).
gatacaattgaattagtat

SEQ ID NO: 68515 - DNA, 19 bp, Homo sapiens
  siRNA target sequence for ABCA13 (NM_152701.2,5444-5462).
gataagccagatattattt

SEQ ID NO: 68516 - DNA, 19 bp, Homo sapiens
  siRNA target sequence for ABCA13 (NM_152701.2,5493-5511).
ggtgctggaatcacacaaa

SEQ ID NO: 68517 - DNA, 19 bp, Homo sapiens
  siRNA target sequence for ABCA13 (NM_152701.2,5497-5515).
ctggaatcacacaaattct

SEQ ID NO: 68518 - DNA, 19 bp, Homo sapiens
  siRNA target sequence for ABCA13 (NM_152701.2,5516-5534).
ggatttcggcagaattcaa

SEQ ID NO: 68519 - DNA, 19 bp, Homo sapiens
  siRNA target sequence for ABCA13 (NM_152701.2,5517-5535).
gatttcggcagaattcaaa

SEQ ID NO: 68520 - DNA, 19 bp, Homo sapiens
  siRNA target sequence for ABCA13 (NM_152701.2,5523-5541).
ggcagaattcaaagataga

SEQ ID NO: 68521 - DNA, 19 bp, Homo sapiens
  siRNA target sequence for ABCA13 (NM_152701.2,5583-5601).
gcaaagtggccagtatact

SEQ ID NO: 68522 - DNA, 19 bp, Homo sapiens
  siRNA target sequence for ABCA13 (NM_152701.2,5584-5602).
caaagtggccagtatactt

SEQ ID NO: 68523 - DNA, 19 bp, Homo sapiens
  siRNA target sequence for ABCA13 (NM_152701.2,5591-5609).
gccagtatacttgatcatt

SEQ ID NO: 68524 - DNA, 19 bp, Homo sapiens
  siRNA target sequence for ABCA13 (NM_152701.2,5656-5674).
ctcccgaatggaaataact

SEQ ID NO: 68525 - DNA, 19 bp, Homo sapiens
  siRNA target sequence for ABCA13 (NM_152701.2,5688-5706).
gcataattcatgaattagt

SEQ ID NO: 68526 - DNA, 19 bp, Homo sapiens
  siRNA target sequence for ABCA13 (NM_152701.2,5736-5754).
ctgaagtcttccatgttaa

SEQ ID NO: 68527 - DNA, 19 bp, Homo sapiens
  siRNA target sequence for ABCA13 (NM_152701.2,5738-5756).
gaagtcttccatgttaaca

SEQ ID NO: 68528 - DNA, 19 bp, Homo sapiens
  siRNA target sequence for ABCA13 (NM_152701.2,5803-5821).
gtttgtcccaccttcaata

SEQ ID NO: 68529 - DNA, 19 bp, Homo sapiens
  siRNA target sequence for ABCA13 (NM_152701.2,5809-5827).
cccaccttcaataaatcaa

SEQ ID NO: 68530 - DNA, 19 bp, Homo sapiens
  siRNA target sequence for ABCA13 (NM_152701.2,5813-5831).
ccttcaataaatcaaacta

SEQ ID NO: 68531 - DNA, 19 bp, Homo sapiens
  siRNA target sequence for ABCA13 (NM_152701.2,5851-5869).
ctgtcctagtggttccata

SEQ ID NO: 68532 - DNA, 19 bp, Homo sapiens
  siRNA target sequence for ABCA13 (NM_152701.2,5853-5871).
gtcctagtggttccataaa

SEQ ID NO: 68533 - DNA, 19 bp, Homo sapiens
  siRNA target sequence for ABCA13 (NM_152701.2,5856-5874).
ctagtggttccataaagca

SEQ ID NO: 68534 - DNA, 19 bp, Homo sapiens
  siRNA target sequence for ABCA13 (NM_152701.2,5945-5963).
cttgacaaactaagtagtt

SEQ ID NO: 68535 - DNA, 19 bp, Homo sapiens
  siRNA target sequence for ABCA13 (NM_152701.2,5961-5979).
gtttaaacaagatccttaa

SEQ ID NO: 68536 - DNA, 19 bp, Homo sapiens
  siRNA target sequence for ABCA13 (NM_152701.2,6081-6099).
cgcataatctactctcttt

SEQ ID NO: 68537 - DNA, 19 bp, Homo sapiens
  siRNA target sequence for ABCA13 (NM_152701.2,6082-6100).
gcataatctactctcttta

SEQ ID NO: 68538 - DNA, 19 bp, Homo sapiens
  siRNA target sequence for ABCA13 (NM_152701.2,6132-6150).
gtagcagtttagaagcatt

SEQ ID NO: 68539 - DNA, 19 bp, Homo sapiens
  siRNA target sequence for ABCA13 (NM_152701.2,6201-6219).
ggcccaagtttcaacaaat

SEQ ID NO: 68540 - DNA, 19 bp, Homo sapiens
  siRNA target sequence for ABCA13 (NM_152701.2,6208-6226).
gtttcaacaaatcatgaaa

SEQ ID NO: 68541 - DNA, 19 bp, Homo sapiens
  siRNA target sequence for ABCA13 (NM_152701.2,6227-6245).
gacctaacccaagatttta

SEQ ID NO: 68542 - DNA, 19 bp, Homo sapiens
  siRNA target sequence for ABCA13 (NM_152701.2,6229-6247).
cctaacccaagattttaga

SEQ ID NO: 68543 - DNA, 19 bp, Homo sapiens
  siRNA target sequence for ABCA13 (NM_152701.2,6302-6320).
gctcttcaaaagataactt

SEQ ID NO: 68544 - DNA, 19 bp, Homo sapiens
  siRNA target sequence for ABCA13 (NM_152701.2,6357-6375).
cgtcattgaagacattaga

SEQ ID NO: 68545 - DNA, 19 bp, Homo sapiens
  siRNA target sequence for ABCA13 (NM_152701.2,6431-6449).
gaggattactccagaatga

SEQ ID NO: 68546 - DNA, 19 bp, Homo sapiens
  siRNA target sequence for ABCA13 (NM_152701.2,6433-6451).
ggattactccagaatgata

SEQ ID NO: 68547 - DNA, 19 bp, Homo sapiens
  siRNA target sequence for ABCA13 (NM_152701.2,6441-6459).
ccagaatgatagaaacatt

SEQ ID NO: 68548 - DNA, 19 bp, Homo sapiens
  siRNA target sequence for ABCA13 (NM_152701.2,6472-6490).
gaccaatgagagttcaact

SEQ ID NO: 68549 - DNA, 19 bp, Homo sapiens
  siRNA target sequence for ABCA13 (NM_152701.2,6475-6493).
caatgagagttcaactgaa

SEQ ID NO: 68550 - DNA, 19 bp, Homo sapiens
  siRNA target sequence for ABCA13 (NM_152701.2,6481-6499).
gagttcaactgaagatata

SEQ ID NO: 68551 - DNA, 19 bp, Homo sapiens
  siRNA target sequence for ABCA13 (NM_152701.2,6500-6518).
gctttgttagccaaagcta

SEQ ID NO: 68552 - DNA, 19 bp, Homo sapiens
  siRNA target sequence for ABCA13 (NM_152701.2,6555-6573).
gagcaggcaattttgatgt

SEQ ID NO: 68553 - DNA, 19 bp, Homo sapiens
  siRNA target sequence for ABCA13 (NM_152701.2,6641-6659).
gaaaacatcctaattaatt

SEQ ID NO: 68554 - DNA, 19 bp, Homo sapiens
  siRNA target sequence for ABCA13 (NM_152701.2,6710-6728).
gatactgaccttcaaataa

SEQ ID NO: 68555 - DNA, 19 bp, Homo sapiens
  siRNA target sequence for ABCA13 (NM_152701.2,6714-6732).
ctgaccttcaaataatgaa

SEQ ID NO: 68556 - DNA, 19 bp, Homo sapiens
  siRNA target sequence for ABCA13 (NM_152701.2,6754-6772).
ccatatgcagtcagaaact

SEQ ID NO: 68557 - DNA, 19 bp, Homo sapiens
  siRNA target sequence for ABCA13 (NM_152701.2,6755-6773).
catatgcagtcagaaacta

SEQ ID NO: 68558 - DNA, 19 bp, Homo sapiens
  siRNA target sequence for ABCA13 (NM_152701.2,6790-6808).
ctctctgagaagcatagta

SEQ ID NO: 68559 - DNA, 19 bp, Homo sapiens
  siRNA target sequence for ABCA13 (NM_152701.2,6792-6810).
ctctgagaagcatagtaga

SEQ ID NO: 68560 - DNA, 19 bp, Homo sapiens
  siRNA target sequence for ABCA13 (NM_152701.2,6794-6812).
ctgagaagcatagtagatt

SEQ ID NO: 68561 - DNA, 19 bp, Homo sapiens
  siRNA target sequence for ABCA13 (NM_152701.2,7039-7057).
cctaatgaaaagttcattt

SEQ ID NO: 68562 - DNA, 19 bp, Homo sapiens
  siRNA target sequence for ABCA13 (NM_152701.2,7185-7203).
cagtggtgagtcagttgtt

SEQ ID NO: 68563 - DNA, 19 bp, Homo sapiens
  siRNA target sequence for ABCA13 (NM_152701.2,7267-7285).
ccttgtaagagaatgttca

SEQ ID NO: 68564 - DNA, 19 bp, Homo sapiens
  siRNA target sequence for ABCA13 (NM_152701.2,7268-7286).
cttgtaagagaatgttcaa

SEQ ID NO: 68565 - DNA, 19 bp, Homo sapiens
  siRNA target sequence for ABCA13 (NM_152701.2,7356-7374).
ccctccaagaagttatact

SEQ ID NO: 68566 - DNA, 19 bp, Homo sapiens
  siRNA target sequence for ABCA13 (NM_152701.2,7367-7385).
gttatacttgctaatctaa

SEQ ID NO: 68567 - DNA, 19 bp, Homo sapiens
  siRNA target sequence for ABCA13 (NM_152701.2,7377-7395).
ctaatctaacggatttgct

SEQ ID NO: 68568 - DNA, 19 bp, Homo sapiens
  siRNA target sequence for ABCA13 (NM_152701.2,7578-7596).
caatggactccattgtgaa

SEQ ID NO: 68569 - DNA, 19 bp, Homo sapiens
  siRNA target sequence for ABCA13 (NM_152701.2,7652-7670).
cattttatctccaatacca

SEQ ID NO: 68570 - DNA, 19 bp, Homo sapiens
  siRNA target sequence for ABCA13 (NM_152701.2,7668-7686).
ccaaggacagtgtgaaatt

SEQ ID NO: 68571 - DNA, 19 bp, Homo sapiens
  siRNA target sequence for ABCA13 (NM_152701.2,7672-7690).
ggacagtgtgaaattcttt

SEQ ID NO: 68572 - DNA, 19 bp, Homo sapiens
  siRNA target sequence for ABCA13 (NM_152701.2,7705-7723).
catcatgcaacaaagtgtt

SEQ ID NO: 68573 - DNA, 19 bp, Homo sapiens
  siRNA target sequence for ABCA13 (NM_152701.2,7828-7846).
gattggggtagaaccttat

SEQ ID NO: 68574 - DNA, 19 bp, Homo sapiens
  siRNA target sequence for ABCA13 (NM_152701.2,7835-7853).
gtagaaccttatatatcat

SEQ ID NO: 68575 - DNA, 19 bp, Homo sapiens
  siRNA target sequence for ABCA13 (NM_152701.2,7838-7856).
gaaccttatatatcatcaa

SEQ ID NO: 68576 - DNA, 19 bp, Homo sapiens
  siRNA target sequence for ABCA13 (NM_152701.2,7870-7888).
cagtatgtcacctagcata

SEQ ID NO: 68577 - DNA, 19 bp, Homo sapiens
  siRNA target sequence for ABCA13 (NM_152701.2,7880-7898).
cctagcatactctcatata

SEQ ID NO: 68578 - DNA, 19 bp, Homo sapiens
  siRNA target sequence for ABCA13 (NM_152701.2,7884-7902).
gcatactctcatatatgaa

SEQ ID NO: 68579 - DNA, 19 bp, Homo sapiens
  siRNA target sequence for ABCA13 (NM_152701.2,7889-7907).
ctctcatatatgaaccaat

SEQ ID NO: 68580 - DNA, 19 bp, Homo sapiens
  siRNA target sequence for ABCA13 (NM_152701.2,7893-7911).
catatatgaaccaatctaa

SEQ ID NO: 68581 - DNA, 19 bp, Homo sapiens
  siRNA target sequence for ABCA13 (NM_152701.2,7983-8001).
ggagtcttgcggtagcatt

SEQ ID NO: 68582 - DNA, 19 bp, Homo sapiens
  siRNA target sequence for ABCA13 (NM_152701.2,7986-8004).
gtcttgcggtagcatttaa

SEQ ID NO: 68583 - DNA, 19 bp, Homo sapiens
  siRNA target sequence for ABCA13 (NM_152701.2,7988-8006).
cttgcggtagcatttaaca

SEQ ID NO: 68584 - DNA, 19 bp, Homo sapiens
  siRNA target sequence for ABCA13 (NM_152701.2,7992-8010).
cggtagcatttaacaatga

SEQ ID NO: 68585 - DNA, 19 bp, Homo sapiens
  siRNA target sequence for ABCA13 (NM_152701.2,8025-8043).
ctatggattctgtcaactt

SEQ ID NO: 68586 - DNA, 19 bp, Homo sapiens
  siRNA target sequence for ABCA13 (NM_152701.2,8036-8054).
gtcaacttacgggaagaaa

SEQ ID NO: 68587 - DNA, 19 bp, Homo sapiens
  siRNA target sequence for ABCA13 (NM_152701.2,8059-8077).
gggttgcttagttcctata

SEQ ID NO: 68588 - DNA, 19 bp, Homo sapiens
  siRNA target sequence for ABCA13 (NM_152701.2,8060-8078).
ggttgcttagttcctataa

SEQ ID NO: 68589 - DNA, 19 bp, Homo sapiens
  siRNA target sequence for ABCA13 (NM_152701.2,8101-8119).
cttcttataccctaatcca

SEQ ID NO: 68590 - DNA, 19 bp, Homo sapiens
  siRNA target sequence for ABCA13 (NM_152701.2,8104-8122).
cttataccctaatccaatt

SEQ ID NO: 68591 - DNA, 19 bp, Homo sapiens
  siRNA target sequence for ABCA13 (NM_152701.2,8129-8147).
catagtggccctcaagata

SEQ ID NO: 68592 - DNA, 19 bp, Homo sapiens
  siRNA target sequence for ABCA13 (NM_152701.2,8135-8153).
ggccctcaagatataaaat

SEQ ID NO: 68593 - DNA, 19 bp, Homo sapiens
  siRNA target sequence for ABCA13 (NM_152701.2,8171-8189).
gtgatcccttttttggata

SEQ ID NO: 68594 - DNA, 19 bp, Homo sapiens
  siRNA target sequence for ABCA13 (NM_152701.2,8173-8191).
gatcccttttttggataaa

SEQ ID NO: 68595 - DNA, 19 bp, Homo sapiens
  siRNA target sequence for ABCA13 (NM_152701.2,8208-8226).
gcacagaaataggatcttt

SEQ ID NO: 68596 - DNA, 19 bp, Homo sapiens
  siRNA target sequence for ABCA13 (NM_152701.2,8294-8312).
gtttctaatgtgttgatga

SEQ ID NO: 68597 - DNA, 19 bp, Homo sapiens
  siRNA target sequence for ABCA13 (NM_152701.2,8319-8337).
ctcagcatccaaataacct

SEQ ID NO: 68598 - DNA, 19 bp, Homo sapiens
  siRNA target sequence for ABCA13 (NM_152701.2,8321-8339).
cagcatccaaataaccttt

SEQ ID NO: 68599 - DNA, 19 bp, Homo sapiens
  siRNA target sequence for ABCA13 (NM_152701.2,8341-8359).
gaaaaccatagaaacagtt

SEQ ID NO: 68600 - DNA, 19 bp, Homo sapiens
  siRNA target sequence for ABCA13 (NM_152701.2,8363-8381).
gaggcctccagtggaatta

SEQ ID NO: 68601 - DNA, 19 bp, Homo sapiens
  siRNA target sequence for ABCA13 (NM_152701.2,8376-8394).
gaattaaaagtgactatga

SEQ ID NO: 68602 - DNA, 19 bp, Homo sapiens
  siRNA target sequence for ABCA13 (NM_152701.2,8387-8405).
gactatgaaggtgatttga

SEQ ID NO: 68603 - DNA, 19 bp, Homo sapiens
  siRNA target sequence for ABCA13 (NM_152701.2,8440-8458).
gaatataactcatcatcaa

SEQ ID NO: 68604 - DNA, 19 bp, Homo sapiens
  siRNA target sequence for ABCA13 (NM_152701.2,8448-8466).
ctcatcatcaacttgaaaa

SEQ ID NO: 68605 - DNA, 19 bp, Homo sapiens
  siRNA target sequence for ABCA13 (NM_152701.2,8468-8486).
gcaatccataatgttttaa

SEQ ID NO: 68606 - DNA, 19 bp, Homo sapiens
  siRNA target sequence for ABCA13 (NM_152701.2,8524-8542).
caactctgaatggataact

SEQ ID NO: 68607 - DNA, 19 bp, Homo sapiens
  siRNA target sequence for ABCA13 (NM_152701.2,8541-8559).
cttccacaagaactttgtt

SEQ ID NO: 68608 - DNA, 19 bp, Homo sapiens
  siRNA target sequence for ABCA13 (NM_152701.2,8644-8662).
gattgactttccttatagt

SEQ ID NO: 68609 - DNA, 19 bp, Homo sapiens
  siRNA target sequence for ABCA13 (NM_152701.2,8654-8672).
ccttatagtttcaaaccat

SEQ ID NO: 68610 - DNA, 19 bp, Homo sapiens
  siRNA target sequence for ABCA13 (NM_152701.2,8692-8710).
cctgggaggattatttgta

SEQ ID NO: 68611 - DNA, 19 bp, Homo sapiens
  siRNA target sequence for ABCA13 (NM_152701.2,8693-8711).
ctgggaggattatttgtat

SEQ ID NO: 68612 - DNA, 19 bp, Homo sapiens
  siRNA target sequence for ABCA13 (NM_152701.2,8734-8752).
cccactaacagatcaaagt

SEQ ID NO: 68613 - DNA, 19 bp, Homo sapiens
  siRNA target sequence for ABCA13 (NM_152701.2,8736-8754).
cactaacagatcaaagtgt

SEQ ID NO: 68614 - DNA, 19 bp, Homo sapiens
  siRNA target sequence for ABCA13 (NM_152701.2,8742-8760).
cagatcaaagtgttgttga

SEQ ID NO: 68615 - DNA, 19 bp, Homo sapiens
  siRNA target sequence for ABCA13 (NM_152701.2,8918-8936).
gggataaggcatctcattt

SEQ ID NO: 68616 - DNA, 19 bp, Homo sapiens
  siRNA target sequence for ABCA13 (NM_152701.2,8919-8937).
ggataaggcatctcatttt

SEQ ID NO: 68617 - DNA, 19 bp, Homo sapiens
  siRNA target sequence for ABCA13 (NM_152701.2,8943-8961).
ctatacaaggggtcacttt

SEQ ID NO: 68618 - DNA, 19 bp, Homo sapiens
  siRNA target sequence for ABCA13 (NM_152701.2,9000-9018).
cctcgccgaatcagctaaa

SEQ ID NO: 68619 - DNA, 19 bp, Homo sapiens
  siRNA target sequence for ABCA13 (NM_152701.2,9001-9019).
ctcgccgaatcagctaaat

SEQ ID NO: 68620 - DNA, 19 bp, Homo sapiens
  siRNA target sequence for ABCA13 (NM_152701.2,9004-9022).
gccgaatcagctaaattgt

SEQ ID NO: 68621 - DNA, 19 bp, Homo sapiens
  siRNA target sequence for ABCA13 (NM_152701.2,9006-9024).
cgaatcagctaaattgtga

SEQ ID NO: 68622 - DNA, 19 bp, Homo sapiens
  siRNA target sequence for ABCA13 (NM_152701.2,9007-9025).
gaatcagctaaattgtgaa

SEQ ID NO: 68623 - DNA, 19 bp, Homo sapiens
  siRNA target sequence for ABCA13 (NM_152701.2,9125-9143).
gtgcagcagcacttgtaca

SEQ ID NO: 68624 - DNA, 19 bp, Homo sapiens
  siRNA target sequence for ABCA13 (NM_152701.2,9213-9231).
cagtaactgaggatgtaaa

SEQ ID NO: 68625 - DNA, 19 bp, Homo sapiens
  siRNA target sequence for ABCA13 (NM_152701.2,9304-9322).
gactatccatagcattcta

SEQ ID NO: 68626 - DNA, 19 bp, Homo sapiens
  siRNA target sequence for ABCA13 (NM_152701.2,9465-9483).
gcctgccagggtcaaaagt

SEQ ID NO: 68627 - DNA, 19 bp, Homo sapiens
  siRNA target sequence for ABCA13 (NM_152701.2,9469-9487).
gccagggtcaaaagtgtat

SEQ ID NO: 68628 - DNA, 19 bp, Homo sapiens
  siRNA target sequence for ABCA13 (NM_152701.2,9518-9536).
gatgtgcgagctttcattt

SEQ ID NO: 68629 - DNA, 19 bp, Homo sapiens
  siRNA target sequence for ABCA13 (NM_152701.2,9547-9565).
gatgccttctgaagcaaat

SEQ ID NO: 68630 - DNA, 19 bp, Homo sapiens
  siRNA target sequence for ABCA13 (NM_152701.2,9640-9658).
gtatcttcctgagtttctt

SEQ ID NO: 68631 - DNA, 19 bp, Homo sapiens
  siRNA target sequence for ABCA13 (NM_152701.2,9724-9742).
ggccagaagttcagctttt

SEQ ID NO: 68632 - DNA, 19 bp, Homo sapiens
  siRNA target sequence for ABCA13 (NM_152701.2,9774-9792).
gcaaggaccaagcatcatt

SEQ ID NO: 68633 - DNA, 19 bp, Homo sapiens
  siRNA target sequence for ABCA13 (NM_152701.2,9779-9797).
gaccaagcatcattcctta

SEQ ID NO: 68634 - DNA, 19 bp, Homo sapiens
  siRNA target sequence for ABCA13 (NM_152701.2,9789-9807).
cattccttagcgattctaa

SEQ ID NO: 68635 - DNA, 19 bp, Homo sapiens
  siRNA target sequence for ABCA13 (NM_152701.2,9825-9843).
ccagagttaaggaactctt

SEQ ID NO: 68636 - DNA, 19 bp, Homo sapiens
  siRNA target sequence for ABCA13 (NM_152701.2,9878-9896).
gattcaacaccgttttgct

SEQ ID NO: 68637 - DNA, 19 bp, Homo sapiens
  siRNA target sequence for ABCA13 (NM_152701.2,9887-9905).
ccgttttgcttgaagcttt

SEQ ID NO: 68638 - DNA, 19 bp, Homo sapiens
  siRNA target sequence for ABCA13 (NM_152701.2,9888-9906).
cgttttgcttgaagcttta

SEQ ID NO: 68639 - DNA, 19 bp, Homo sapiens
  siRNA target sequence for ABCA13 (NM_152701.2,9901-9919).
gctttatcaggaaattcta

SEQ ID NO: 68640 - DNA, 19 bp, Homo sapiens
  siRNA target sequence for ABCA13 (NM_152701.2,9940-9958).
ggtgtggaccttcctaaaa

SEQ ID NO: 68641 - DNA, 19 bp, Homo sapiens
  siRNA target sequence for ABCA13 (NM_152701.2,9959-9977).
cccatattgcatggaaaaa

SEQ ID NO: 68642 - DNA, 19 bp, Homo sapiens
  siRNA target sequence for ABCA13 (NM_152701.2,10164-10182).
gaaactttgtagaaaacca

SEQ ID NO: 68643 - DNA, 19 bp, Homo sapiens
  siRNA target sequence for ABCA13 (NM_152701.2,10209-10227).
ctgaaaaactccagacata

SEQ ID NO: 68644 - DNA, 19 bp, Homo sapiens
  siRNA target sequence for ABCA13 (NM_152701.2,10240-10258).
ggatgagatgtttaaccat

SEQ ID NO: 68645 - DNA, 19 bp, Homo sapiens
  siRNA target sequence for ABCA13 (NM_152701.2,10266-10284).
ctggacgcttccgtttctt

SEQ ID NO: 68646 - DNA, 19 bp, Homo sapiens
  siRNA target sequence for ABCA13 (NM_152701.2,10396-10414).
cttcttggccagtatcatt

SEQ ID NO: 68647 - DNA, 19 bp, Homo sapiens
  siRNA target sequence for ABCA13 (NM_152701.2,10411-10429).
cattttcagcaattcctta

SEQ ID NO: 68648 - DNA, 19 bp, Homo sapiens
  siRNA target sequence for ABCA13 (NM_152701.2,10425-10443).
ccttattcgacaagaactt

SEQ ID NO: 68649 - DNA, 19 bp, Homo sapiens
  siRNA target sequence for ABCA13 (NM_152701.2,10444-10462).
cagatcagagtctgtcaaa

SEQ ID NO: 68650 - DNA, 19 bp, Homo sapiens
  siRNA target sequence for ABCA13 (NM_152701.2,10485-10503).
caatccggaccaatgtgtt

SEQ ID NO: 68651 - DNA, 19 bp, Homo sapiens
  siRNA target sequence for ABCA13 (NM_152701.2,10565-10583).
ccagctgatgggttcaaat

SEQ ID NO: 68652 - DNA, 19 bp, Homo sapiens
  siRNA target sequence for ABCA13 (NM_152701.2,10566-10584).
cagctgatgggttcaaata

SEQ ID NO: 68653 - DNA, 19 bp, Homo sapiens
  siRNA target sequence for ABCA13 (NM_152701.2,10568-10586).
gctgatgggttcaaatata

SEQ ID NO: 68654 - DNA, 19 bp, Homo sapiens
  siRNA target sequence for ABCA13 (NM_152701.2,10569-10587).
ctgatgggttcaaatataa

SEQ ID NO: 68655 - DNA, 19 bp, Homo sapiens
  siRNA target sequence for ABCA13 (NM_152701.2,10599-10617).
ccccactgcaagacatgat

SEQ ID NO: 68656 - DNA, 19 bp, Homo sapiens
  siRNA target sequence for ABCA13 (NM_152701.2,10604-10622).
ctgcaagacatgatcgaaa

SEQ ID NO: 68657 - DNA, 19 bp, Homo sapiens
  siRNA target sequence for ABCA13 (NM_152701.2,10615-10633).
gatcgaaagagccatcatt

SEQ ID NO: 68658 - DNA, 19 bp, Homo sapiens
  siRNA target sequence for ABCA13 (NM_152701.2,10698-10716).
gccataccagcgacctatt

SEQ ID NO: 68659 - DNA, 19 bp, Homo sapiens
  siRNA target sequence for ABCA13 (NM_152701.2,10707-10725).
gcgacctattcctgaacaa

SEQ ID NO: 68660 - DNA, 19 bp, Homo sapiens
  siRNA target sequence for ABCA13 (NM_152701.2,10778-10796).
gccagcatggtcagaaagt

SEQ ID NO: 68661 - DNA, 19 bp, Homo sapiens
  siRNA target sequence for ABCA13 (NM_152701.2,10779-10797).
ccagcatggtcagaaagtt

SEQ ID NO: 68662 - DNA, 19 bp, Homo sapiens
  siRNA target sequence for ABCA13 (NM_152701.2,10921-10939).
ggccatcgttctgaaaaca

SEQ ID NO: 68663 - DNA, 19 bp, Homo sapiens
  siRNA target sequence for ABCA13 (NM_152701.2,10922-10940).
gccatcgttctgaaaacaa

SEQ ID NO: 68664 - DNA, 19 bp, Homo sapiens
  siRNA target sequence for ABCA13 (NM_152701.2,10952-10970).
gcacacagcaataccttta

SEQ ID NO: 68665 - DNA, 19 bp, Homo sapiens
  siRNA target sequence for ABCA13 (NM_152701.2,11020-11038).
ctacctcttgagtgcattt

SEQ ID NO: 68666 - DNA, 19 bp, Homo sapiens
  siRNA target sequence for ABCA13 (NM_152701.2,11091-11109).
gctttctgccctacatagt

SEQ ID NO: 68667 - DNA, 19 bp, Homo sapiens
  siRNA target sequence for ABCA13 (NM_152701.2,11096-11114).
ctgccctacatagttctat

SEQ ID NO: 68668 - DNA, 19 bp, Homo sapiens
  siRNA target sequence for ABCA13 (NM_152701.2,11100-11118).
cctacatagttctattggt

SEQ ID NO: 68669 - DNA, 19 bp, Homo sapiens
  siRNA target sequence for ABCA13 (NM_152701.2,11101-11119).
ctacatagttctattggtt

SEQ ID NO: 68670 - DNA, 19 bp, Homo sapiens
  siRNA target sequence for ABCA13 (NM_152701.2,11120-11138).
ctacataaccaattaagtt

SEQ ID NO: 68671 - DNA, 19 bp, Homo sapiens
  siRNA target sequence for ABCA13 (NM_152701.2,11183-11201).
ggacaaggggtatttttta

SEQ ID NO: 68672 - DNA, 19 bp, Homo sapiens
  siRNA target sequence for ABCA13 (NM_152701.2,11219-11237).
caagagacagggattcaat

SEQ ID NO: 68673 - DNA, 19 bp, Homo sapiens
  siRNA target sequence for ABCA13 (NM_152701.2,11261-11279).
gaacaagggggcatgacat

SEQ ID NO: 68674 - DNA, 19 bp, Homo sapiens
  siRNA target sequence for ABCA13 (NM_152701.2,11287-11305).
ggtttgctggatgattctt

SEQ ID NO: 68675 - DNA, 19 bp, Homo sapiens
  siRNA target sequence for ABCA13 (NM_152701.2,11288-11306).
gtttgctggatgattcttt

SEQ ID NO: 68676 - DNA, 19 bp, Homo sapiens
  siRNA target sequence for ABCA13 (NM_152701.2,11337-11355).
ggtacttgagcaacttgat

SEQ ID NO: 68677 - DNA, 19 bp, Homo sapiens
  siRNA target sequence for ABCA13 (NM_152701.2,11338-11356).
gtacttgagcaacttgatt

SEQ ID NO: 68678 - DNA, 19 bp, Homo sapiens
  siRNA target sequence for ABCA13 (NM_152701.2,11392-11410).
cccctttactgcctcatat

SEQ ID NO: 68679 - DNA, 19 bp, Homo sapiens
  siRNA target sequence for ABCA13 (NM_152701.2,11432-11450).
gtggagaaaaggcaatact

SEQ ID NO: 68680 - DNA, 19 bp, Homo sapiens
  siRNA target sequence for ABCA13 (NM_152701.2,11443-11461).
gcaatactttctaagttct

SEQ ID NO: 68681 - DNA, 19 bp, Homo sapiens
  siRNA target sequence for ABCA13 (NM_152701.2,11444-11462).
caatactttctaagttcta

SEQ ID NO: 68682 - DNA, 19 bp, Homo sapiens
  siRNA target sequence for ABCA13 (NM_152701.2,11460-11478).
ctagtctgttcttcttcaa

SEQ ID NO: 68683 - DNA, 19 bp, Homo sapiens
  siRNA target sequence for ABCA13 (NM_152701.2,11660-11678).
gccgggaaaaccactatca

SEQ ID NO: 68684 - DNA, 19 bp, Homo sapiens
  siRNA target sequence for ABCA13 (NM_152701.2,11661-11679).
ccgggaaaaccactatcat

SEQ ID NO: 68685 - DNA, 19 bp, Homo sapiens
  siRNA target sequence for ABCA13 (NM_152701.2,11662-11680).
cgggaaaaccactatcata

SEQ ID NO: 68686 - DNA, 19 bp, Homo sapiens
  siRNA target sequence for ABCA13 (NM_152701.2,11813-11831).
ctcaccgtccgggaacatt

SEQ ID NO: 68687 - DNA, 19 bp, Homo sapiens
  siRNA target sequence for ABCA13 (NM_152701.2,12092-12110).
gaaggtcgtacgatcatct

SEQ ID NO: 68688 - DNA, 19 bp, Homo sapiens
  siRNA target sequence for ABCA13 (NM_152701.2,12095-12113).
ggtcgtacgatcatcttca

SEQ ID NO: 68689 - DNA, 19 bp, Homo sapiens
  siRNA target sequence for ABCA13 (NM_152701.2,12098-12116).
cgtacgatcatcttcacaa

SEQ ID NO: 68690 - DNA, 19 bp, Homo sapiens
  siRNA target sequence for ABCA13 (NM_152701.2,12244-12262).
cacgaggcagccttctgtt

SEQ ID NO: 68691 - DNA, 19 bp, Homo sapiens
  siRNA target sequence for ABCA13 (NM_152701.2,12294-12312).
gtgttacatccctgataaa

SEQ ID NO: 68692 - DNA, 19 bp, Homo sapiens
  siRNA target sequence for ABCA13 (NM_152701.2,12307-12325).
gataaagatctatattcca

SEQ ID NO: 68693 - DNA, 19 bp, Homo sapiens
  siRNA target sequence for ABCA13 (NM_152701.2,12359-12377).
ctgacctacaccattccaa

SEQ ID NO: 68694 - DNA, 19 bp, Homo sapiens
  siRNA target sequence for ABCA13 (NM_152701.2,12482-12500).
gaggtgtttttgatgcttt

SEQ ID NO: 68695 - DNA, 19 bp, Homo sapiens
  siRNA target sequence for ABCA13 (NM_152701.2,12795-12813).
gactcacacctggacatta

SEQ ID NO: 68696 - DNA, 19 bp, Homo sapiens
  siRNA target sequence for ABCA13 (NM_152701.2,12880-12898).
gcggaagtttagagatcaa

SEQ ID NO: 68697 - DNA, 19 bp, Homo sapiens
  siRNA target sequence for ABCA13 (NM_152701.2,12922-12940).
cccacgccagaagaattct

SEQ ID NO: 68698 - DNA, 19 bp, Homo sapiens
  siRNA target sequence for ABCA13 (NM_152701.2,12971-12989).
ccagaattccaggattcat

SEQ ID NO: 68699 - DNA, 19 bp, Homo sapiens
  siRNA target sequence for ABCA13 (NM_152701.2,12997-13015).
cctgaagtgtccaaataga

SEQ ID NO: 68700 - DNA, 19 bp, Homo sapiens
  siRNA target sequence for ABCA13 (NM_152701.2,13000-13018).
gaagtgtccaaatagaagt

SEQ ID NO: 68701 - DNA, 19 bp, Homo sapiens
  siRNA target sequence for ABCA13 (NM_152701.2,13048-13066).
gggccacacactgttgaat

SEQ ID NO: 68702 - DNA, 19 bp, Homo sapiens
  siRNA target sequence for ABCA13 (NM_152701.2,13050-13068).
gccacacactgttgaatct

SEQ ID NO: 68703 - DNA, 19 bp, Homo sapiens
  siRNA target sequence for ABCA13 (NM_152701.2,13063-13081).
gaatctctcaggcttcaat

SEQ ID NO: 68704 - DNA, 19 bp, Homo sapiens
  siRNA target sequence for ABCA13 (NM_152701.2,13096-13114).
gctggcaccatctgaaaaa

SEQ ID NO: 68705 - DNA, 19 bp, Homo sapiens
  siRNA target sequence for ABCA13 (NM_152701.2,13120-13138).
gcttggaggttggtctttt

SEQ ID NO: 68706 - DNA, 19 bp, Homo sapiens
  siRNA target sequence for ABCA13 (NM_152701.2,13125-13143).
gaggttggtcttttggatt

SEQ ID NO: 68707 - DNA, 19 bp, Homo sapiens
  siRNA target sequence for ABCA13 (NM_152701.2,13166-13184).
ggtgcaaatggaaacatat

SEQ ID NO: 68708 - DNA, 19 bp, Homo sapiens
  siRNA target sequence for ABCA13 (NM_152701.2,13199-13217).
ctggcaaaggtgtggtata

SEQ ID NO: 68709 - DNA, 19 bp, Homo sapiens
  siRNA target sequence for ABCA13 (NM_152701.2,13236-13254).
ccctaccttcctacttaaa

SEQ ID NO: 68710 - DNA, 19 bp, Homo sapiens
  siRNA target sequence for ABCA13 (NM_152701.2,13256-13274).
catctaaacaaccttattt

SEQ ID NO: 68711 - DNA, 19 bp, Homo sapiens
  siRNA target sequence for ABCA13 (NM_152701.2,13308-13326).
gacaatacggaataacact

SEQ ID NO: 68712 - DNA, 19 bp, Homo sapiens
  siRNA target sequence for ABCA13 (NM_152701.2,13327-13345).
ctacagccacccatatgga

SEQ ID NO: 68713 - DNA, 19 bp, Homo sapiens
  siRNA target sequence for ABCA13 (NM_152701.2,13524-13542).
ggttcacaaacttcctata

SEQ ID NO: 68714 - DNA, 19 bp, Homo sapiens
  siRNA target sequence for ABCA13 (NM_152701.2,13525-13543).
gttcacaaacttcctatat

SEQ ID NO: 68715 - DNA, 19 bp, Homo sapiens
  siRNA target sequence for ABCA13 (NM_152701.2,13573-13591).
cctgtgtgttgccgttatt

SEQ ID NO: 68716 - DNA, 19 bp, Homo sapiens
  siRNA target sequence for ABCA13 (NM_152701.2,13654-13672).
gtcacttttcggatatgca

SEQ ID NO: 68717 - DNA, 19 bp, Homo sapiens
  siRNA target sequence for ABCA13 (NM_152701.2,13713-13731).
gttcggacgtggctttcat

SEQ ID NO: 68718 - DNA, 19 bp, Homo sapiens
  siRNA target sequence for ABCA13 (NM_152701.2,13739-13757).
gtctcactaaacttcatct

SEQ ID NO: 68719 - DNA, 19 bp, Homo sapiens
  siRNA target sequence for ABCA13 (NM_152701.2,13767-13785).
gtaccatgctcataaccat

SEQ ID NO: 68720 - DNA, 19 bp, Homo sapiens
  siRNA target sequence for ABCA13 (NM_152701.2,13793-13811).
cggttgctagccatcatct

SEQ ID NO: 68721 - DNA, 19 bp, Homo sapiens
  siRNA target sequence for ABCA13 (NM_152701.2,13844-13862).
gtcctcaagtgggtcttta

SEQ ID NO: 68722 - DNA, 19 bp, Homo sapiens
  siRNA target sequence for ABCA13 (NM_152701.2,13847-13865).
ctcaagtgggtctttacta

SEQ ID NO: 68723 - DNA, 19 bp, Homo sapiens
  siRNA target sequence for ABCA13 (NM_152701.2,13849-13867).
caagtgggtctttactatt

SEQ ID NO: 68724 - DNA, 19 bp, Homo sapiens
  siRNA target sequence for ABCA13 (NM_152701.2,13855-13873).
ggtctttactatttttcct

SEQ ID NO: 68725 - DNA, 19 bp, Homo sapiens
  siRNA target sequence for ABCA13 (NM_152701.2,13887-13905).
gtcaaggactggtagaact

SEQ ID NO: 68726 - DNA, 19 bp, Homo sapiens
  siRNA target sequence for ABCA13 (NM_152701.2,13897-13915).
ggtagaactctgctataat

SEQ ID NO: 68727 - DNA, 19 bp, Homo sapiens
  siRNA target sequence for ABCA13 (NM_152701.2,13906-13924).
ctgctataatcagatcaaa

SEQ ID NO: 68728 - DNA, 19 bp, Homo sapiens
  siRNA target sequence for ABCA13 (NM_152701.2,13908-13926).
gctataatcagatcaaata

SEQ ID NO: 68729 - DNA, 19 bp, Homo sapiens
  siRNA target sequence for ABCA13 (NM_152701.2,13936-13954).
ccacaacttcggcattgat

SEQ ID NO: 68730 - DNA, 19 bp, Homo sapiens
  siRNA target sequence for ABCA13 (NM_152701.2,13937-13955).
cacaacttcggcattgatt

SEQ ID NO: 68731 - DNA, 19 bp, Homo sapiens
  siRNA target sequence for ABCA13 (NM_152701.2,13942-13960).
cttcggcattgattcctat

SEQ ID NO: 68732 - DNA, 19 bp, Homo sapiens
  siRNA target sequence for ABCA13 (NM_152701.2,13946-13964).
ggcattgattcctatgtga

SEQ ID NO: 68733 - DNA, 19 bp, Homo sapiens
  siRNA target sequence for ABCA13 (NM_152701.2,13968-13986).
cctttgagatgaactttct

SEQ ID NO: 68734 - DNA, 19 bp, Homo sapiens
  siRNA target sequence for ABCA13 (NM_152701.2,14011-14029).
ctcgcagggcacagtactt

SEQ ID NO: 68735 - DNA, 19 bp, Homo sapiens
  siRNA target sequence for ABCA13 (NM_152701.2,14096-14114).
ggcacagtcaaatcttcta

SEQ ID NO: 68736 - DNA, 19 bp, Homo sapiens
  siRNA target sequence for ABCA13 (NM_152701.2,14097-14115).
gcacagtcaaatcttctaa

SEQ ID NO: 68737 - DNA, 19 bp, Homo sapiens
  siRNA target sequence for ABCA13 (NM_152701.2,14160-14178).
ggaccaatggagacattct

SEQ ID NO: 68738 - DNA, 19 bp, Homo sapiens
  siRNA target sequence for ABCA13 (NM_152701.2,14171-14189).
gacattcttgtgttataca

SEQ ID NO: 68739 - DNA, 19 bp, Homo sapiens
  siRNA target sequence for ABCA13 (NM_152701.2,14180-14198).
gtgttatacaaccttagta

SEQ ID NO: 68740 - DNA, 19 bp, Homo sapiens
  siRNA target sequence for ABCA13 (NM_152701.2,14191-14209).
ccttagtaaacattatcga

SEQ ID NO: 68741 - DNA, 19 bp, Homo sapiens
  siRNA target sequence for ABCA13 (NM_152701.2,14207-14225).
cgacgctttttccagaata

SEQ ID NO: 68742 - DNA, 19 bp, Homo sapiens
  siRNA target sequence for ABCA13 (NM_152701.2,14208-14226).
gacgctttttccagaatat

SEQ ID NO: 68743 - DNA, 19 bp, Homo sapiens
  siRNA target sequence for ABCA13 (NM_152701.2,14466-14484).
ctggttgggaacatctcta

SEQ ID NO: 68744 - DNA, 19 bp, Homo sapiens
  siRNA target sequence for ABCA13 (NM_152701.2,14482-14500).
ctattattactgtagctta

SEQ ID NO: 68745 - DNA, 19 bp, Homo sapiens
  siRNA target sequence for ABCA13 (NM_152701.2,14702-14720).
cggtacctgtggcaaacaa

SEQ ID NO: 68746 - DNA, 19 bp, Homo sapiens
  siRNA target sequence for ABCA13 (NM_152701.2,14703-14721).
ggtacctgtggcaaacaat

SEQ ID NO: 68747 - DNA, 19 bp, Homo sapiens
  siRNA target sequence for ABCA13 (NM_152701.2,14793-14811).
gcacaagactggccataat

SEQ ID NO: 68748 - DNA, 19 bp, Homo sapiens
  siRNA target sequence for ABCA13 (NM_152701.2,14813-14831).
gttaacggcagcttcaaat

SEQ ID NO: 68749 - DNA, 19 bp, Homo sapiens
  siRNA target sequence for ABCA13 (NM_152701.2,14898-14916).
gtaaggaagcaaatcaaca

SEQ ID NO: 68750 - DNA, 19 bp, Homo sapiens
  siRNA target sequence for ABCA13 (NM_152701.2,14930-14948).
gaccacttgaagctttatt

SEQ ID NO: 68751 - DNA, 19 bp, Homo sapiens
  siRNA target sequence for ABCA13 (NM_152701.2,14932-14950).
ccacttgaagctttatttt

SEQ ID NO: 68752 - DNA, 19 bp, Homo sapiens
  siRNA target sequence for ABCA13 (NM_152701.2,14975-14993).
cacctgaatttattagaat

SEQ ID NO: 68753 - DNA, 19 bp, Homo sapiens
  siRNA target sequence for ABCA13 (NM_152701.2,15015-15033).
gatgcctagctgacttgtt

SEQ ID NO: 68754 - DNA, 19 bp, Homo sapiens
  siRNA target sequence for ABCA13 (NM_152701.2,15018-15036).
gcctagctgacttgttcaa

SEQ ID NO: 68755 - DNA, 19 bp, Homo sapiens
  siRNA target sequence for ABCA13 (NM_152701.2,15019-15037).
cctagctgacttgttcaaa

SEQ ID NO: 68756 - DNA, 19 bp, Homo sapiens
  siRNA target sequence for ABCA13 (NM_152701.2,15073-15091).
gcattattccattaaccaa

SEQ ID NO: 68757 - DNA, 19 bp, Homo sapiens
  siRNA target sequence for ABCA13 (NM_152701.2,15126-15144).
ctgagcagcagcaaactct

SEQ ID NO: 68758 - DNA, 19 bp, Homo sapiens
  siRNA target sequence for ABCA13 (NM_152701.2,15130-15148).
gcagcagcaaactctacaa

SEQ ID NO: 68759 - DNA, 19 bp, Homo sapiens
  siRNA target sequence for ABCA13 (NM_152701.2,15133-15151).
gcagcaaactctacaatct

SEQ ID NO: 68760 - DNA, 19 bp, Homo sapiens
  siRNA target sequence for ABCA13 (NM_152701.2,15134-15152).
cagcaaactctacaatcta

SEQ ID NO: 68761 - DNA, 19 bp, Homo sapiens
  siRNA target sequence for ABCA13 (NM_152701.2,15136-15154).
gcaaactctacaatctact

SEQ ID NO: 68762 - DNA, 19 bp, Homo sapiens
  siRNA target sequence for ABCA2 (NM_001606.2,221-239).
ctggccttcgagatcttca

SEQ ID NO: 68763 - DNA, 19 bp, Homo sapiens
  siRNA target sequence for ABCA2 (NM_001606.2,638-656).
cgtttcctgacgcaaaact

SEQ ID NO: 68764 - DNA, 19 bp, Homo sapiens
  siRNA target sequence for ABCA2 (NM_001606.2,639-657).
gtttcctgacgcaaaactt

SEQ ID NO: 68765 - DNA, 19 bp, Homo sapiens
  siRNA target sequence for ABCA2 (NM_001606.2,1512-1530).
ccagcaaccccaaaatcct

SEQ ID NO: 68766 - DNA, 19 bp, Homo sapiens
  siRNA target sequence for ABCA2 (NM_001606.2,1597-1615).
gggcaacgtgactcactat

SEQ ID NO: 68767 - DNA, 19 bp, Homo sapiens
  siRNA target sequence for ABCA2 (NM_001606.2,1845-1863).
gcggctggatccagttcat

SEQ ID NO: 68768 - DNA, 19 bp, Homo sapiens
  siRNA target sequence for ABCA2 (NM_001606.2,1847-1865).
ggctggatccagttcatgt

SEQ ID NO: 68769 - DNA, 19 bp, Homo sapiens
  siRNA target sequence for ABCA2 (NM_001606.2,1943-1961).
caggacaacgtcactgttt

SEQ ID NO: 68770 - DNA, 19 bp, Homo sapiens
  siRNA target sequence for ABCA2 (NM_001606.2,1945-1963).
ggacaacgtcactgttttt

SEQ ID NO: 68771 - DNA, 19 bp, Homo sapiens
  siRNA target sequence for ABCA2 (NM_001606.2,2006-2024).
cctcacgtgcactacaaga

SEQ ID NO: 68772 - DNA, 19 bp, Homo sapiens
  siRNA target sequence for ABCA2 (NM_001606.2,2040-2058).
gcttcaccgagaaaaccaa

SEQ ID NO: 68773 - DNA, 19 bp, Homo sapiens
  siRNA target sequence for ABCA2 (NM_001606.2,2155-2173).
cgccatcatcgacactttt

SEQ ID NO: 68774 - DNA, 19 bp, Homo sapiens
  siRNA target sequence for ABCA2 (NM_001606.2,2229-2247).
gctacacacgcgatgactt

SEQ ID NO: 68775 - DNA, 19 bp, Homo sapiens
  siRNA target sequence for ABCA2 (NM_001606.2,2622-2640).
gctacgtgccctacatgta

SEQ ID NO: 68776 - DNA, 19 bp, Homo sapiens
  siRNA target sequence for ABCA2 (NM_001606.2,2654-2672).
gaggaggtggcgcatgata

SEQ ID NO: 68777 - DNA, 19 bp, Homo sapiens
  siRNA target sequence for ABCA2 (NM_001606.2,2657-2675).
gaggtggcgcatgataaga

SEQ ID NO: 68778 - DNA, 19 bp, Homo sapiens
  siRNA target sequence for ABCA2 (NM_001606.2,2660-2678).
gtggcgcatgataagatca

SEQ ID NO: 68779 - DNA, 19 bp, Homo sapiens
  siRNA target sequence for ABCA2 (NM_001606.2,2727-2745).
gtctgggctctaagtactt

SEQ ID NO: 68780 - DNA, 19 bp, Homo sapiens
  siRNA target sequence for ABCA2 (NM_001606.2,2807-2825).
gagggggacgacttcaact

SEQ ID NO: 68781 - DNA, 19 bp, Homo sapiens
  siRNA target sequence for ABCA2 (NM_001606.2,3119-3137).
gtctgcgtggacaaactca

SEQ ID NO: 68782 - DNA, 19 bp, Homo sapiens
  siRNA target sequence for ABCA2 (NM_001606.2,4086-4104).
cgaccctggaggaagtgtt

SEQ ID NO: 68783 - DNA, 19 bp, Homo sapiens
  siRNA target sequence for ABCA2 (NM_001606.2,4357-4375).
cccacaggacccagacaat

SEQ ID NO: 68784 - DNA, 19 bp, Homo sapiens
  siRNA target sequence for ABCA2 (NM_001606.2,4646-4664).
cagccccgtggcaatttca

SEQ ID NO: 68785 - DNA, 19 bp, Homo sapiens
  siRNA target sequence for ABCA2 (NM_001606.2,4896-4914).
ggctgccactgtccaattt

SEQ ID NO: 68786 - DNA, 19 bp, Homo sapiens
  siRNA target sequence for ABCA2 (NM_001606.2,5001-5019).
ccaccgctgggccagaaat

SEQ ID NO: 68787 - DNA, 19 bp, Homo sapiens
  siRNA target sequence for ABCA2 (NM_001606.2,5234-5252).
ggggccatcacctttggaa

SEQ ID NO: 68788 - DNA, 19 bp, Homo sapiens
  siRNA target sequence for ABCA2 (NM_001606.2,5328-5346).
ctgcccaggttttctacaa

SEQ ID NO: 68789 - DNA, 19 bp, Homo sapiens
  siRNA target sequence for ABCA2 (NM_001606.2,5330-5348).
gcccaggttttctacaaca

SEQ ID NO: 68790 - DNA, 19 bp, Homo sapiens
  siRNA target sequence for ABCA2 (NM_001606.2,6052-6070).
cgagtactacgccaagatt

SEQ ID NO: 68791 - DNA, 19 bp, Homo sapiens
  siRNA target sequence for ABCA2 (NM_001606.2,6071-6089).
ggccagtttgacaagatga

SEQ ID NO: 68792 - DNA, 19 bp, Homo sapiens
  siRNA target sequence for ABCA2 (NM_001606.2,6096-6114).
cgttcgagtgggacattgt

SEQ ID NO: 68793 - DNA, 19 bp, Homo sapiens
  siRNA target sequence for ABCA2 (NM_001606.2,6168-6186).
ccatcatgtgccagtacaa

SEQ ID NO: 68794 - DNA, 19 bp, Homo sapiens
  siRNA target sequence for ABCA2 (NM_001606.2,6278-6296).
ggagacgccgacaatgaca

SEQ ID NO: 68795 - DNA, 19 bp, Homo sapiens
  siRNA target sequence for ABCA2 (NM_001606.2,6279-6297).
gagacgccgacaatgacat

SEQ ID NO: 68796 - DNA, 19 bp, Homo sapiens
  siRNA target sequence for ABCA2 (NM_001606.2,6325-6343).
ctacaagtcccggaagatt

SEQ ID NO: 68797 - DNA, 19 bp, Homo sapiens
  siRNA target sequence for ABCA2 (NM_001606.2,6756-6774).
ggtacccagccttcatctt

SEQ ID NO: 68798 - DNA, 19 bp, Homo sapiens
  siRNA target sequence for ABCA2 (NM_001606.2,7213-7231).
caatgtgttcgtgaacttt

SEQ ID NO: 68799 - DNA, 19 bp, Homo sapiens
  siRNA target sequence for ABCA3 (NM_001089.1,587-605).
ctcctctggaagaactaca

SEQ ID NO: 68800 - DNA, 19 bp, Homo sapiens
  siRNA target sequence for ABCA3 (NM_001089.1,681-699).
ggctccgcttgaagattca

SEQ ID NO: 68801 - DNA, 19 bp, Homo sapiens
  siRNA target sequence for ABCA3 (NM_001089.1,683-701).
ctccgcttgaagattcagt

SEQ ID NO: 68802 - DNA, 19 bp, Homo sapiens
  siRNA target sequence for ABCA3 (NM_001089.1,891-909).
cctccgagaaggactttga

SEQ ID NO: 68803 - DNA, 19 bp, Homo sapiens
  siRNA target sequence for ABCA3 (NM_001089.1,902-920).
gactttgaggactacatta

SEQ ID NO: 68804 - DNA, 19 bp, Homo sapiens
  siRNA target sequence for ABCA3 (NM_001089.1,995-1013).
ctgccgctggcggtgaaat

SEQ ID NO: 68805 - DNA, 19 bp, Homo sapiens
  siRNA target sequence for ABCA3 (NM_001089.1,997-1015).
gccgctggcggtgaaatat

SEQ ID NO: 68806 - DNA, 19 bp, Homo sapiens
  siRNA target sequence for ABCA3 (NM_001089.1,1016-1034).
cacctacggttcagttaca

SEQ ID NO: 68807 - DNA, 19 bp, Homo sapiens
  siRNA target sequence for ABCA3 (NM_001089.1,1029-1047).
gttacacacggagaaatta

SEQ ID NO: 68808 - DNA, 19 bp, Homo sapiens
  siRNA target sequence for ABCA3 (NM_001089.1,1065-1083).
gctcctttttcctgaaaga

SEQ ID NO: 68809 - DNA, 19 bp, Homo sapiens
  siRNA target sequence for ABCA3 (NM_001089.1,1088-1106).
gaaggctggcacactactt

SEQ ID NO: 68810 - DNA, 19 bp, Homo sapiens
  siRNA target sequence for ABCA3 (NM_001089.1,1271-1289).
ctgacggtgaccatcaaga

SEQ ID NO: 68811 - DNA, 19 bp, Homo sapiens
  siRNA target sequence for ABCA3 (NM_001089.1,1816-1834).
ccagctcattgggaaattt

SEQ ID NO: 68812 - DNA, 19 bp, Homo sapiens
  siRNA target sequence for ABCA3 (NM_001089.1,2101-2119).
cagaaacgagtactttgaa

SEQ ID NO: 68813 - DNA, 19 bp, Homo sapiens
  siRNA target sequence for ABCA3 (NM_001089.1,2290-2308).
catgctcacaggtctcttt

SEQ ID NO: 68814 - DNA, 19 bp, Homo sapiens
  siRNA target sequence for ABCA3 (NM_001089.1,2316-2334).
ccagtggacgggcatacat

SEQ ID NO: 68815 - DNA, 19 bp, Homo sapiens
  siRNA target sequence for ABCA3 (NM_001089.1,2332-2350).
catcagcgggtatgaaatt

SEQ ID NO: 68816 - DNA, 19 bp, Homo sapiens
  siRNA target sequence for ABCA3 (NM_001089.1,2426-2444).
gtcgcagagcacctttatt

SEQ ID NO: 68817 - DNA, 19 bp, Homo sapiens
  siRNA target sequence for ABCA3 (NM_001089.1,2661-2679).
gggccatctgggatcttct

SEQ ID NO: 68818 - DNA, 19 bp, Homo sapiens
  siRNA target sequence for ABCA3 (NM_001089.1,2962-2980).
gagcacgcacaggtttgaa

SEQ ID NO: 68819 - DNA, 19 bp, Homo sapiens
  siRNA target sequence for ABCA3 (NM_001089.1,3318-3336).
ggcgcgagtggaaaatggt

SEQ ID NO: 68820 - DNA, 19 bp, Homo sapiens
  siRNA target sequence for ABCA3 (NM_001089.1,3502-3520).
gctgtcagagcatctgaaa

SEQ ID NO: 68821 - DNA, 19 bp, Homo sapiens
  siRNA target sequence for ABCA3 (NM_001089.1,3668-3686).
gtcgtcaacgccttgttca

SEQ ID NO: 68822 - DNA, 19 bp, Homo sapiens
  siRNA target sequence for ABCA3 (NM_001089.1,3965-3983).
gtccacgtggccagtttct

SEQ ID NO: 68823 - DNA, 19 bp, Homo sapiens
  siRNA target sequence for ABCA3 (NM_001089.1,4252-4270).
gcgcatcccagctgtaaaa

SEQ ID NO: 68824 - DNA, 19 bp, Homo sapiens
  siRNA target sequence for ABCA3 (NM_001089.1,4344-4362).
gcagtttctacgagaacta

SEQ ID NO: 68825 - DNA, 19 bp, Homo sapiens
  siRNA target sequence for ABCA3 (NM_001089.1,4429-4447).
gtaccaggagaacttctat

SEQ ID NO: 68826 - DNA, 19 bp, Homo sapiens
  siRNA target sequence for ABCA3 (NM_001089.1,4584-4602).
ggcggacactgacagaatt

SEQ ID NO: 68827 - DNA, 19 bp, Homo sapiens
  siRNA target sequence for ABCA3 (NM_001089.1,4688-4706).
ctccacacacctctgatta

SEQ ID NO: 68828 - DNA, 19 bp, Homo sapiens
  siRNA target sequence for ABCA3 (NM_001089.1,4691-4709).
cacacacctctgattatca

SEQ ID NO: 68829 - DNA, 19 bp, Homo sapiens
  siRNA target sequence for ABCA3 (NM_001089.1,5528-5546).
ctcagctgggcgaaggttt

SEQ ID NO: 68830 - DNA, 19 bp, Homo sapiens
  siRNA target sequence for ABCA3 (NM_001089.1,5538-5556).
cgaaggttttcggtattct

SEQ ID NO: 68831 - DNA, 19 bp, Homo sapiens
  siRNA target sequence for ABCA4 (NM_000350.1,86-104).
gcttcgtgagacagataca

SEQ ID NO: 68832 - DNA, 19 bp, Homo sapiens
  siRNA target sequence for ABCA4 (NM_000350.1,130-148).
ctgcggaaaaggcaaaaga

SEQ ID NO: 68833 - DNA, 19 bp, Homo sapiens
  siRNA target sequence for ABCA4 (NM_000350.1,166-184).
ctcgtgtggcctttatctt

SEQ ID NO: 68834 - DNA, 19 bp, Homo sapiens
  siRNA target sequence for ABCA4 (NM_000350.1,195-213).
cttgatctggttaaggaat

SEQ ID NO: 68835 - DNA, 19 bp, Homo sapiens
  siRNA target sequence for ABCA4 (NM_000350.1,312-330).
gaacaatccctgttttcaa

SEQ ID NO: 68836 - DNA, 19 bp, Homo sapiens
  siRNA target sequence for ABCA4 (NM_000350.1,355-373).
ggaattgtgtcaaactata

SEQ ID NO: 68837 - DNA, 19 bp, Homo sapiens
  siRNA target sequence for ABCA4 (NM_000350.1,381-399).
catcttggcaagggtatat

SEQ ID NO: 68838 - DNA, 19 bp, Homo sapiens
  siRNA target sequence for ABCA4 (NM_000350.1,384-402).
cttggcaagggtatatcga

SEQ ID NO: 68839 - DNA, 19 bp, Homo sapiens
  siRNA target sequence for ABCA4 (NM_000350.1,389-407).
caagggtatatcgagattt

SEQ ID NO: 68840 - DNA, 19 bp, Homo sapiens
  siRNA target sequence for ABCA4 (NM_000350.1,392-410).
gggtatatcgagattttca

SEQ ID NO: 68841 - DNA, 19 bp, Homo sapiens
  siRNA target sequence for ABCA4 (NM_000350.1,393-411).
ggtatatcgagattttcaa

SEQ ID NO: 68842 - DNA, 19 bp, Homo sapiens
  siRNA target sequence for ABCA4 (NM_000350.1,500-518).
ggactcacccggagagaat

SEQ ID NO: 68843 - DNA, 19 bp, Homo sapiens
  siRNA target sequence for ABCA4 (NM_000350.1,520-538).
gcaggaagaggaatacgaa

SEQ ID NO: 68844 - DNA, 19 bp, Homo sapiens
  siRNA target sequence for ABCA4 (NM_000350.1,521-539).
caggaagaggaatacgaat

SEQ ID NO: 68845 - DNA, 19 bp, Homo sapiens
  siRNA target sequence for ABCA4 (NM_000350.1,523-541).
ggaagaggaatacgaataa

SEQ ID NO: 68846 - DNA, 19 bp, Homo sapiens
  siRNA target sequence for ABCA4 (NM_000350.1,535-553).
cgaataagggatatcttga

SEQ ID NO: 68847 - DNA, 19 bp, Homo sapiens
  siRNA target sequence for ABCA4 (NM_000350.1,542-560).
gggatatcttgaaagatga

SEQ ID NO: 68848 - DNA, 19 bp, Homo sapiens
  siRNA target sequence for ABCA4 (NM_000350.1,568-586).
ctgacactatttctcatta

SEQ ID NO: 68849 - DNA, 19 bp, Homo sapiens
  siRNA target sequence for ABCA4 (NM_000350.1,786-804).
caccctacagtggatagaa

SEQ ID NO: 68850 - DNA, 19 bp, Homo sapiens
  siRNA target sequence for ABCA4 (NM_000350.1,798-816).
gatagaagacactctgtat

SEQ ID NO: 68851 - DNA, 19 bp, Homo sapiens
  siRNA target sequence for ABCA4 (NM_000350.1,869-887).
gccgttctcaaggtatcaa

SEQ ID NO: 68852 - DNA, 19 bp, Homo sapiens
  siRNA target sequence for ABCA4 (NM_000350.1,872-890).
gttctcaaggtatcaatct

SEQ ID NO: 68853 - DNA, 19 bp, Homo sapiens
  siRNA target sequence for ABCA4 (NM_000350.1,891-909).
gagatcttggggaggaata

SEQ ID NO: 68854 - DNA, 19 bp, Homo sapiens
  siRNA target sequence for ABCA4 (NM_000350.1,899-917).
ggggaggaatattatctga

SEQ ID NO: 68855 - DNA, 19 bp, Homo sapiens
  siRNA target sequence for ABCA4 (NM_000350.1,914-932).
ctgatatgtcaccaagaat

SEQ ID NO: 68856 - DNA, 19 bp, Homo sapiens
  siRNA target sequence for ABCA4 (NM_000350.1,926-944).
caagaattcaagagtttat

SEQ ID NO: 68857 - DNA, 19 bp, Homo sapiens
  siRNA target sequence for ABCA4 (NM_000350.1,1004-1022).
gtccagagacctttacaaa

SEQ ID NO: 68858 - DNA, 19 bp, Homo sapiens
  siRNA target sequence for ABCA4 (NM_000350.1,1142-1160).
caaggaaggatcctatcta

SEQ ID NO: 68859 - DNA, 19 bp, Homo sapiens
  siRNA target sequence for ABCA4 (NM_000350.1,1146-1164).
gaaggatcctatctattct

SEQ ID NO: 68860 - DNA, 19 bp, Homo sapiens
  siRNA target sequence for ABCA4 (NM_000350.1,1149-1167).
ggatcctatctattcttat

SEQ ID NO: 68861 - DNA, 19 bp, Homo sapiens
  siRNA target sequence for ABCA4 (NM_000350.1,1297-1315).
gcagcacgaaggatactga

SEQ ID NO: 68862 - DNA, 19 bp, Homo sapiens
  siRNA target sequence for ABCA4 (NM_000350.1,1301-1319).
cacgaaggatactgaagaa

SEQ ID NO: 68863 - DNA, 19 bp, Homo sapiens
  siRNA target sequence for ABCA4 (NM_000350.1,1312-1330).
ctgaagaatgccaactcaa

SEQ ID NO: 68864 - DNA, 19 bp, Homo sapiens
  siRNA target sequence for ABCA4 (NM_000350.1,1322-1340).
ccaactcaacttttgaaga

SEQ ID NO: 68865 - DNA, 19 bp, Homo sapiens
  siRNA target sequence for ABCA4 (NM_000350.1,1444-1462).
ctggggaacccaacagtaa

SEQ ID NO: 68866 - DNA, 19 bp, Homo sapiens
  siRNA target sequence for ABCA4 (NM_000350.1,1446-1464).
ggggaacccaacagtaaaa

SEQ ID NO: 68867 - DNA, 19 bp, Homo sapiens
  siRNA target sequence for ABCA4 (NM_000350.1,1452-1470).
cccaacagtaaaagacttt

SEQ ID NO: 68868 - DNA, 19 bp, Homo sapiens
  siRNA target sequence for ABCA4 (NM_000350.1,1572-1590).
cgactggagggacatattt

SEQ ID NO: 68869 - DNA, 19 bp, Homo sapiens
  siRNA target sequence for ABCA4 (NM_000350.1,1607-1625).
ccctccgcctggtcaatca

SEQ ID NO: 68870 - DNA, 19 bp, Homo sapiens
  siRNA target sequence for ABCA4 (NM_000350.1,1608-1626).
cctccgcctggtcaatcaa

SEQ ID NO: 68871 - DNA, 19 bp, Homo sapiens
  siRNA target sequence for ABCA4 (NM_000350.1,1609-1627).
ctccgcctggtcaatcaat

SEQ ID NO: 68872 - DNA, 19 bp, Homo sapiens
  siRNA target sequence for ABCA4 (NM_000350.1,1613-1631).
gcctggtcaatcaatacct

SEQ ID NO: 68873 - DNA, 19 bp, Homo sapiens
  siRNA target sequence for ABCA4 (NM_000350.1,1641-1659).
ggtcctggataagtttgaa

SEQ ID NO: 68874 - DNA, 19 bp, Homo sapiens
  siRNA target sequence for ABCA4 (NM_000350.1,1661-1679).
gctacaatgatgaaactca

SEQ ID NO: 68875 - DNA, 19 bp, Homo sapiens
  siRNA target sequence for ABCA4 (NM_000350.1,1734-1752).
ggtattccctgacatgtat

SEQ ID NO: 68876 - DNA, 19 bp, Homo sapiens
  siRNA target sequence for ABCA4 (NM_000350.1,1774-1792).
ccccacgtgaagtataaga

SEQ ID NO: 68877 - DNA, 19 bp, Homo sapiens
  siRNA target sequence for ABCA4 (NM_000350.1,1775-1793).
cccacgtgaagtataagat

SEQ ID NO: 68878 - DNA, 19 bp, Homo sapiens
  siRNA target sequence for ABCA4 (NM_000350.1,1809-1827).
cgtggtggagaaaaccaat

SEQ ID NO: 68879 - DNA, 19 bp, Homo sapiens
  siRNA target sequence for ABCA4 (NM_000350.1,1876-1894).
gaagatttccggtacatct

SEQ ID NO: 68880 - DNA, 19 bp, Homo sapiens
  siRNA target sequence for ABCA4 (NM_000350.1,1924-1942).
gttgaacaggggatcacaa

SEQ ID NO: 68881 - DNA, 19 bp, Homo sapiens
  siRNA target sequence for ABCA4 (NM_000350.1,1958-1976).
cggaggctccagttggaat

SEQ ID NO: 68882 - DNA, 19 bp, Homo sapiens
  siRNA target sequence for ABCA4 (NM_000350.1,2221-2239).
ctcctgacgatattcatca

SEQ ID NO: 68883 - DNA, 19 bp, Homo sapiens
  siRNA target sequence for ABCA4 (NM_000350.1,2369-2387).
cctgtagtggtgtcatcta

SEQ ID NO: 68884 - DNA, 19 bp, Homo sapiens
  siRNA target sequence for ABCA4 (NM_000350.1,2370-2388).
ctgtagtggtgtcatctat

SEQ ID NO: 68885 - DNA, 19 bp, Homo sapiens
  siRNA target sequence for ABCA4 (NM_000350.1,2372-2390).
gtagtggtgtcatctattt

SEQ ID NO: 68886 - DNA, 19 bp, Homo sapiens
  siRNA target sequence for ABCA4 (NM_000350.1,2502-2520).
gtacctggttcgctttgaa

SEQ ID NO: 68887 - DNA, 19 bp, Homo sapiens
  siRNA target sequence for ABCA4 (NM_000350.1,2564-2582).
ccacggaaggggacgaatt

SEQ ID NO: 68888 - DNA, 19 bp, Homo sapiens
  siRNA target sequence for ABCA4 (NM_000350.1,2861-2879).
ctggggtatgcgtgaagaa

SEQ ID NO: 68889 - DNA, 19 bp, Homo sapiens
  siRNA target sequence for ABCA4 (NM_000350.1,2864-2882).
gggtatgcgtgaagaatct

SEQ ID NO: 68890 - DNA, 19 bp, Homo sapiens
  siRNA target sequence for ABCA4 (NM_000350.1,3143-3161).
ctgagcacatgctgttcta

SEQ ID NO: 68891 - DNA, 19 bp, Homo sapiens
  siRNA target sequence for ABCA4 (NM_000350.1,3511-3529).
ccactcttcctgaagaact

SEQ ID NO: 68892 - DNA, 19 bp, Homo sapiens
  siRNA target sequence for ABCA4 (NM_000350.1,3535-3553).
ggcacaggcttgtacttaa

SEQ ID NO: 68893 - DNA, 19 bp, Homo sapiens
  siRNA target sequence for ABCA4 (NM_000350.1,3554-3572).
ccttggtgcgcaagatgaa

SEQ ID NO: 68894 - DNA, 19 bp, Homo sapiens
  siRNA target sequence for ABCA4 (NM_000350.1,3555-3573).
cttggtgcgcaagatgaaa

SEQ ID NO: 68895 - DNA, 19 bp, Homo sapiens
  siRNA target sequence for ABCA4 (NM_000350.1,3679-3697).
gtcctggatggggatgtaa

SEQ ID NO: 68896 - DNA, 19 bp, Homo sapiens
  siRNA target sequence for ABCA4 (NM_000350.1,3681-3699).
cctggatggggatgtaaat

SEQ ID NO: 68897 - DNA, 19 bp, Homo sapiens
  siRNA target sequence for ABCA4 (NM_000350.1,3752-3770).
gcattggtcaagaacttat

SEQ ID NO: 68898 - DNA, 19 bp, Homo sapiens
  siRNA target sequence for ABCA4 (NM_000350.1,3775-3793).
cttcttccaaataagaact

SEQ ID NO: 68899 - DNA, 19 bp, Homo sapiens
  siRNA target sequence for ABCA4 (NM_000350.1,3792-3810).
cttcaagcacagagcatat

SEQ ID NO: 68900 - DNA, 19 bp, Homo sapiens
  siRNA target sequence for ABCA4 (NM_000350.1,3881-3899).
ctcccctggaagagatttt

SEQ ID NO: 68901 - DNA, 19 bp, Homo sapiens
  siRNA target sequence for ABCA4 (NM_000350.1,4212-4230).
cgtgctcccggctaccttt

SEQ ID NO: 68902 - DNA, 19 bp, Homo sapiens
  siRNA target sequence for ABCA4 (NM_000350.1,4239-4257).
ggctctgatgctttctatt

SEQ ID NO: 68903 - DNA, 19 bp, Homo sapiens
  siRNA target sequence for ABCA4 (NM_000350.1,4241-4259).
ctctgatgctttctattgt

SEQ ID NO: 68904 - DNA, 19 bp, Homo sapiens
  siRNA target sequence for ABCA4 (NM_000350.1,4372-4390).
gcagacgtcctcctgaata

SEQ ID NO: 68905 - DNA, 19 bp, Homo sapiens
  siRNA target sequence for ABCA4 (NM_000350.1,4629-4647).
gcgcagcacggaaattcta

SEQ ID NO: 68906 - DNA, 19 bp, Homo sapiens
  siRNA target sequence for ABCA4 (NM_000350.1,4631-4649).
gcagcacggaaattctaca

SEQ ID NO: 68907 - DNA, 19 bp, Homo sapiens
  siRNA target sequence for ABCA4 (NM_000350.1,4632-4650).
cagcacggaaattctacaa

SEQ ID NO: 68908 - DNA, 19 bp, Homo sapiens
  siRNA target sequence for ABCA4 (NM_000350.1,4634-4652).
gcacggaaattctacaaga

SEQ ID NO: 68909 - DNA, 19 bp, Homo sapiens
  siRNA target sequence for ABCA4 (NM_000350.1,4654-4672).
ctgacggacaggaacatct

SEQ ID NO: 68910 - DNA, 19 bp, Homo sapiens
  siRNA target sequence for ABCA4 (NM_000350.1,4671-4689).
ctccgacttcttggtaaaa

SEQ ID NO: 68911 - DNA, 19 bp, Homo sapiens
  siRNA target sequence for ABCA4 (NM_000350.1,4692-4710).
gtatcctgctcttataaga

SEQ ID NO: 68912 - DNA, 19 bp, Homo sapiens
  siRNA target sequence for ABCA4 (NM_000350.1,4724-4742).
gcaaattctgggtcaatga

SEQ ID NO: 68913 - DNA, 19 bp, Homo sapiens
  siRNA target sequence for ABCA4 (NM_000350.1,4794-4812).
cacgggggaagcacttgtt

SEQ ID NO: 68914 - DNA, 19 bp, Homo sapiens
  siRNA target sequence for ABCA4 (NM_000350.1,4804-4822).
gcacttgttgggtttttaa

SEQ ID NO: 68915 - DNA, 19 bp, Homo sapiens
  siRNA target sequence for ABCA4 (NM_000350.1,4827-4845).
ccttggccggatcatgaat

SEQ ID NO: 68916 - DNA, 19 bp, Homo sapiens
  siRNA target sequence for ABCA4 (NM_000350.1,4831-4849).
ggccggatcatgaatgtga

SEQ ID NO: 68917 - DNA, 19 bp, Homo sapiens
  siRNA target sequence for ABCA4 (NM_000350.1,4863-4881).
cactagagaggcctctaaa

SEQ ID NO: 68918 - DNA, 19 bp, Homo sapiens
  siRNA target sequence for ABCA4 (NM_000350.1,4872-4890).
ggcctctaaagaaatacct

SEQ ID NO: 68919 - DNA, 19 bp, Homo sapiens
  siRNA target sequence for ABCA4 (NM_000350.1,4882-4900).
gaaatacctgatttcctta

SEQ ID NO: 68920 - DNA, 19 bp, Homo sapiens
  siRNA target sequence for ABCA4 (NM_000350.1,4957-4975).
gccctggtcagctttctca

SEQ ID NO: 68921 - DNA, 19 bp, Homo sapiens
  siRNA target sequence for ABCA4 (NM_000350.1,4959-4977).
cctggtcagctttctcaat

SEQ ID NO: 68922 - DNA, 19 bp, Homo sapiens
  siRNA target sequence for ABCA4 (NM_000350.1,4980-4998).
ggcccacaacgccatctta

SEQ ID NO: 68923 - DNA, 19 bp, Homo sapiens
  siRNA target sequence for ABCA4 (NM_000350.1,5024-5042).
gccccgaggagtatggaat

SEQ ID NO: 68924 - DNA, 19 bp, Homo sapiens
  siRNA target sequence for ABCA4 (NM_000350.1,5079-5097).
gcagctctcagagattaca

SEQ ID NO: 68925 - DNA, 19 bp, Homo sapiens
  siRNA target sequence for ABCA4 (NM_000350.1,5125-5143).
gttgccatctgcgtgattt

SEQ ID NO: 68926 - DNA, 19 bp, Homo sapiens
  siRNA target sequence for ABCA4 (NM_000350.1,5128-5146).
gccatctgcgtgattttct

SEQ ID NO: 68927 - DNA, 19 bp, Homo sapiens
  siRNA target sequence for ABCA4 (NM_000350.1,5191-5209).
gagcgggtgaacaaatcca

SEQ ID NO: 68928 - DNA, 19 bp, Homo sapiens
  siRNA target sequence for ABCA4 (NM_000350.1,5211-5229).
gcacctccagtttatcagt

SEQ ID NO: 68929 - DNA, 19 bp, Homo sapiens
  siRNA target sequence for ABCA4 (NM_000350.1,5398-5416).
gcggtcattcccatgatgt

SEQ ID NO: 68930 - DNA, 19 bp, Homo sapiens
  siRNA target sequence for ABCA4 (NM_000350.1,5399-5417).
cggtcattcccatgatgta

SEQ ID NO: 68931 - DNA, 19 bp, Homo sapiens
  siRNA target sequence for ABCA4 (NM_000350.1,5420-5438).
cagcatccttcctgtttga

SEQ ID NO: 68932 - DNA, 19 bp, Homo sapiens
  siRNA target sequence for ABCA4 (NM_000350.1,5468-5486).
cttgtgctaatctgttcat

SEQ ID NO: 68933 - DNA, 19 bp, Homo sapiens
  siRNA target sequence for ABCA4 (NM_000350.1,5490-5508).
catcaacagcagtgctatt

SEQ ID NO: 68934 - DNA, 19 bp, Homo sapiens
  siRNA target sequence for ABCA4 (NM_000350.1,5781-5799).
cttcctctcccaatggatt

SEQ ID NO: 68935 - DNA, 19 bp, Homo sapiens
  siRNA target sequence for ABCA4 (NM_000350.1,5842-5860).
gtggctgaagaaagacaaa

SEQ ID NO: 68936 - DNA, 19 bp, Homo sapiens
  siRNA target sequence for ABCA4 (NM_000350.1,5889-5907).
catcttaaggctacatgaa

SEQ ID NO: 68937 - DNA, 19 bp, Homo sapiens
  siRNA target sequence for ABCA4 (NM_000350.1,5897-5915).
ggctacatgaactaaccaa

SEQ ID NO: 68938 - DNA, 19 bp, Homo sapiens
  siRNA target sequence for ABCA4 (NM_000350.1,6000-6018).
gaatggtgccggcaaaaca

SEQ ID NO: 68939 - DNA, 19 bp, Homo sapiens
  siRNA target sequence for ABCA4 (NM_000350.1,6071-6089).
ccgtagcaggcaagagtat

SEQ ID NO: 68940 - DNA, 19 bp, Homo sapiens
  siRNA target sequence for ABCA4 (NM_000350.1,6072-6090).
cgtagcaggcaagagtatt

SEQ ID NO: 68941 - DNA, 19 bp, Homo sapiens
  siRNA target sequence for ABCA4 (NM_000350.1,6073-6091).
gtagcaggcaagagtattt

SEQ ID NO: 68942 - DNA, 19 bp, Homo sapiens
  siRNA target sequence for ABCA4 (NM_000350.1,6079-6097).
ggcaagagtattttaacca

SEQ ID NO: 68943 - DNA, 19 bp, Homo sapiens
  siRNA target sequence for ABCA4 (NM_000350.1,6080-6098).
gcaagagtattttaaccaa

SEQ ID NO: 68944 - DNA, 19 bp, Homo sapiens
  siRNA target sequence for ABCA4 (NM_000350.1,6081-6099).
caagagtattttaaccaat

SEQ ID NO: 68945 - DNA, 19 bp, Homo sapiens
  siRNA target sequence for ABCA4 (NM_000350.1,6084-6102).
gagtattttaaccaatatt

SEQ ID NO: 68946 - DNA, 19 bp, Homo sapiens
  siRNA target sequence for ABCA4 (NM_000350.1,6167-6185).
gacgagaacatctttacct

SEQ ID NO: 68947 - DNA, 19 bp, Homo sapiens
  siRNA target sequence for ABCA4 (NM_000350.1,6228-6246).
ggttgcaaactggagtatt

SEQ ID NO: 68948 - DNA, 19 bp, Homo sapiens
  siRNA target sequence for ABCA4 (NM_000350.1,6229-6247).
gttgcaaactggagtatta

SEQ ID NO: 68949 - DNA, 19 bp, Homo sapiens
  siRNA target sequence for ABCA4 (NM_000350.1,6571-6589).
ggctatatcgtcacaatga

SEQ ID NO: 68950 - DNA, 19 bp, Homo sapiens
  siRNA target sequence for ABCA4 (NM_000350.1,6572-6590).
gctatatcgtcacaatgaa

SEQ ID NO: 68951 - DNA, 19 bp, Homo sapiens
  siRNA target sequence for ABCA5 (NM_018672.2,1259-1277).
ccagaacacttctactgaa

SEQ ID NO: 68952 - DNA, 19 bp, Homo sapiens
  siRNA target sequence for ABCA5 (NM_018672.2,1352-1370).
ggttaatattaattagcat

SEQ ID NO: 68953 - DNA, 19 bp, Homo sapiens
  siRNA target sequence for ABCA5 (NM_018672.2,1367-1385).
gcatgatgcatccaaataa

SEQ ID NO: 68954 - DNA, 19 bp, Homo sapiens
  siRNA target sequence for ABCA5 (NM_018672.2,1374-1392).
gcatccaaataagaaatat

SEQ ID NO: 68955 - DNA, 19 bp, Homo sapiens
  siRNA target sequence for ABCA5 (NM_018672.2,1401-1419).
gcctaatatagaactcaat

SEQ ID NO: 68956 - DNA, 19 bp, Homo sapiens
  siRNA target sequence for ABCA5 (NM_018672.2,1425-1443).
ggacaagtttactctttct

SEQ ID NO: 68957 - DNA, 19 bp, Homo sapiens
  siRNA target sequence for ABCA5 (NM_018672.2,1426-1444).
gacaagtttactctttcta

SEQ ID NO: 68958 - DNA, 19 bp, Homo sapiens
  siRNA target sequence for ABCA5 (NM_018672.2,1428-1446).
caagtttactctttctaat

SEQ ID NO: 68959 - DNA, 19 bp, Homo sapiens
  siRNA target sequence for ABCA5 (NM_018672.2,1457-1475).
gatatactccagtgactaa

SEQ ID NO: 68960 - DNA, 19 bp, Homo sapiens
  siRNA target sequence for ABCA5 (NM_018672.2,1465-1483).
ccagtgactaatattacaa

SEQ ID NO: 68961 - DNA, 19 bp, Homo sapiens
  siRNA target sequence for ABCA5 (NM_018672.2,1497-1515).
gaaagtgtctactgatcat

SEQ ID NO: 68962 - DNA, 19 bp, Homo sapiens
  siRNA target sequence for ABCA5 (NM_018672.2,1580-1598).
ctaagccgagcaactttgt

SEQ ID NO: 68963 - DNA, 19 bp, Homo sapiens
  siRNA target sequence for ABCA5 (NM_018672.2,1617-1635).
ctccatgtcctatgaactt

SEQ ID NO: 68964 - DNA, 19 bp, Homo sapiens
  siRNA target sequence for ABCA5 (NM_018672.2,1625-1643).
cctatgaacttcgtttttt

SEQ ID NO: 68965 - DNA, 19 bp, Homo sapiens
  siRNA target sequence for ABCA5 (NM_018672.2,1648-1666).
gatatgattccagtatctt

SEQ ID NO: 68966 - DNA, 19 bp, Homo sapiens
  siRNA target sequence for ABCA5 (NM_018672.2,1687-1705).
gctggctgttcaaaatcat

SEQ ID NO: 68967 - DNA, 19 bp, Homo sapiens
  siRNA target sequence for ABCA5 (NM_018672.2,1728-1746).
ctcaggtttcacagtttta

SEQ ID NO: 68968 - DNA, 19 bp, Homo sapiens
  siRNA target sequence for ABCA5 (NM_018672.2,1754-1772).
ccatagatgctgccattat

SEQ ID NO: 68969 - DNA, 19 bp, Homo sapiens
  siRNA target sequence for ABCA5 (NM_018672.2,1835-1853).
gagaaactgctgttgtaga

SEQ ID NO: 68970 - DNA, 19 bp, Homo sapiens
  siRNA target sequence for ABCA5 (NM_018672.2,1862-1880).
cctttccccgaggagtaat

SEQ ID NO: 68971 - DNA, 19 bp, Homo sapiens
  siRNA target sequence for ABCA5 (NM_018672.2,1868-1886).
cccgaggagtaattttaat

SEQ ID NO: 68972 - DNA, 19 bp, Homo sapiens
  siRNA target sequence for ABCA5 (NM_018672.2,1870-1888).
cgaggagtaattttaatat

SEQ ID NO: 68973 - DNA, 19 bp, Homo sapiens
  siRNA target sequence for ABCA5 (NM_018672.2,2008-2026).
ctttcctgggttcttctat

SEQ ID NO: 68974 - DNA, 19 bp, Homo sapiens
  siRNA target sequence for ABCA5 (NM_018672.2,2017-2035).
gttcttctatatacaagtt

SEQ ID NO: 68975 - DNA, 19 bp, Homo sapiens
  siRNA target sequence for ABCA5 (NM_018672.2,2072-2090).
cgacagcttctttgttatt

SEQ ID NO: 68976 - DNA, 19 bp, Homo sapiens
  siRNA target sequence for ABCA5 (NM_018672.2,2095-2113).
caaagtagcagcattgtga

SEQ ID NO: 68977 - DNA, 19 bp, Homo sapiens
  siRNA target sequence for ABCA5 (NM_018672.2,2130-2148).
cctttatggattatcatct

SEQ ID NO: 68978 - DNA, 19 bp, Homo sapiens
  siRNA target sequence for ABCA5 (NM_018672.2,2218-2236).
gttactgtggcttttggat

SEQ ID NO: 68979 - DNA, 19 bp, Homo sapiens
  siRNA target sequence for ABCA5 (NM_018672.2,2233-2251).
ggatttattggccttatga

SEQ ID NO: 68980 - DNA, 19 bp, Homo sapiens
  siRNA target sequence for ABCA5 (NM_018672.2,2250-2268).
gataatcctcatagaaagt

SEQ ID NO: 68981 - DNA, 19 bp, Homo sapiens
  siRNA target sequence for ABCA5 (NM_018672.2,2263-2281).
gaaagttttcccaaatcgt

SEQ ID NO: 68982 - DNA, 19 bp, Homo sapiens
  siRNA target sequence for ABCA5 (NM_018672.2,2299-2317).
cctttctgtcactgtactt

SEQ ID NO: 68983 - DNA, 19 bp, Homo sapiens
  siRNA target sequence for ABCA5 (NM_018672.2,2337-2355).
ggtcatgcatttagaagat

SEQ ID NO: 68984 - DNA, 19 bp, Homo sapiens
  siRNA target sequence for ABCA5 (NM_018672.2,2385-2403).
gactgcaggcccatatcct

SEQ ID NO: 68985 - DNA, 19 bp, Homo sapiens
  siRNA target sequence for ABCA5 (NM_018672.2,2390-2408).
caggcccatatcctctaat

SEQ ID NO: 68986 - DNA, 19 bp, Homo sapiens
  siRNA target sequence for ABCA5 (NM_018672.2,2392-2410).
ggcccatatcctctaatta

SEQ ID NO: 68987 - DNA, 19 bp, Homo sapiens
  siRNA target sequence for ABCA5 (NM_018672.2,2421-2439).
catgctcacacttaatagt

SEQ ID NO: 68988 - DNA, 19 bp, Homo sapiens
  siRNA target sequence for ABCA5 (NM_018672.2,2424-2442).
gctcacacttaatagtata

SEQ ID NO: 68989 - DNA, 19 bp, Homo sapiens
  siRNA target sequence for ABCA5 (NM_018672.2,2425-2443).
ctcacacttaatagtatat

SEQ ID NO: 68990 - DNA, 19 bp, Homo sapiens
  siRNA target sequence for ABCA5 (NM_018672.2,2457-2475).
ggctgtctatcttgatcaa

SEQ ID NO: 68991 - DNA, 19 bp, Homo sapiens
  siRNA target sequence for ABCA5 (NM_018672.2,2459-2477).
ctgtctatcttgatcaagt

SEQ ID NO: 68992 - DNA, 19 bp, Homo sapiens
  siRNA target sequence for ABCA5 (NM_018672.2,2463-2481).
ctatcttgatcaagtcatt

SEQ ID NO: 68993 - DNA, 19 bp, Homo sapiens
  siRNA target sequence for ABCA5 (NM_018672.2,2494-2512).
ggcttacggagatcatctt

SEQ ID NO: 68994 - DNA, 19 bp, Homo sapiens
  siRNA target sequence for ABCA5 (NM_018672.2,2495-2513).
gcttacggagatcatcttt

SEQ ID NO: 68995 - DNA, 19 bp, Homo sapiens
  siRNA target sequence for ABCA5 (NM_018672.2,2521-2539).
ctgaagccttcatattggt

SEQ ID NO: 68996 - DNA, 19 bp, Homo sapiens
  siRNA target sequence for ABCA5 (NM_018672.2,2565-2583).
gttatcagagggcaatgtt

SEQ ID NO: 68997 - DNA, 19 bp, Homo sapiens
  siRNA target sequence for ABCA5 (NM_018672.2,2572-2590).
gagggcaatgttaatggaa

SEQ ID NO: 68998 - DNA, 19 bp, Homo sapiens
  siRNA target sequence for ABCA5 (NM_018672.2,2616-2634).
gccagtttcttcagaattt

SEQ ID NO: 68999 - DNA, 19 bp, Homo sapiens
  siRNA target sequence for ABCA5 (NM_018672.2,2649-2667).
cataagaattagtggtatt

SEQ ID NO: 69000 - DNA, 19 bp, Homo sapiens
  siRNA target sequence for ABCA5 (NM_018672.2,2654-2672).
gaattagtggtattcagaa

SEQ ID NO: 69001 - DNA, 19 bp, Homo sapiens
  siRNA target sequence for ABCA5 (NM_018672.2,2727-2745).
catatatgagggtcagatt

SEQ ID NO: 69002 - DNA, 19 bp, Homo sapiens
  siRNA target sequence for ABCA5 (NM_018672.2,2767-2785).
ggaacaggaaagagtacat

SEQ ID NO: 69003 - DNA, 19 bp, Homo sapiens
  siRNA target sequence for ABCA5 (NM_018672.2,2819-2837).
ctgatgggtttgcatctat

SEQ ID NO: 69004 - DNA, 19 bp, Homo sapiens
  siRNA target sequence for ABCA5 (NM_018672.2,2821-2839).
gatgggtttgcatctatat

SEQ ID NO: 69005 - DNA, 19 bp, Homo sapiens
  siRNA target sequence for ABCA5 (NM_018672.2,2826-2844).
gtttgcatctatatatgga

SEQ ID NO: 69006 - DNA, 19 bp, Homo sapiens
  siRNA target sequence for ABCA5 (NM_018672.2,2902-2920).
ccacagttagatatacact

SEQ ID NO: 69007 - DNA, 19 bp, Homo sapiens
  siRNA target sequence for ABCA5 (NM_018672.2,2907-2925).
gttagatatacactttgat

SEQ ID NO: 69008 - DNA, 19 bp, Homo sapiens
  siRNA target sequence for ABCA5 (NM_018672.2,2931-2949).
gacagtagaagaaaattta

SEQ ID NO: 69009 - DNA, 19 bp, Homo sapiens
  siRNA target sequence for ABCA5 (NM_018672.2,2981-2999).
ccaacaatataatacaaga

SEQ ID NO: 69010 - DNA, 19 bp, Homo sapiens
  siRNA target sequence for ABCA5 (NM_018672.2,2982-3000).
caacaatataatacaagaa

SEQ ID NO: 69011 - DNA, 19 bp, Homo sapiens
  siRNA target sequence for ABCA5 (NM_018672.2,3003-3021).
gcagaaggttttactagat

SEQ ID NO: 69012 - DNA, 19 bp, Homo sapiens
  siRNA target sequence for ABCA5 (NM_018672.2,3010-3028).
gttttactagatttagaca

SEQ ID NO: 69013 - DNA, 19 bp, Homo sapiens
  siRNA target sequence for ABCA5 (NM_018672.2,3033-3051).
gactatcaaagataaccaa

SEQ ID NO: 69014 - DNA, 19 bp, Homo sapiens
  siRNA target sequence for ABCA5 (NM_018672.2,3039-3057).
caaagataaccaagctaaa

SEQ ID NO: 69015 - DNA, 19 bp, Homo sapiens
  siRNA target sequence for ABCA5 (NM_018672.2,3120-3138).
gatactgctgctagatgaa

SEQ ID NO: 69016 - DNA, 19 bp, Homo sapiens
  siRNA target sequence for ABCA5 (NM_018672.2,3156-3174).
cccctgttctcgacatatt

SEQ ID NO: 69017 - DNA, 19 bp, Homo sapiens
  siRNA target sequence for ABCA5 (NM_018672.2,3158-3176).
cctgttctcgacatattgt

SEQ ID NO: 69018 - DNA, 19 bp, Homo sapiens
  siRNA target sequence for ABCA5 (NM_018672.2,3164-3182).
ctcgacatattgtatggaa

SEQ ID NO: 69019 - DNA, 19 bp, Homo sapiens
  siRNA target sequence for ABCA5 (NM_018672.2,3342-3360).
ccgcctgagcatgtacata

SEQ ID NO: 69020 - DNA, 19 bp, Homo sapiens
  siRNA target sequence for ABCA5 (NM_018672.2,3344-3362).
gcctgagcatgtacataga

SEQ ID NO: 69021 - DNA, 19 bp, Homo sapiens
  siRNA target sequence for ABCA5 (NM_018672.2,3354-3372).
gtacatagacaaatattgt

SEQ ID NO: 69022 - DNA, 19 bp, Homo sapiens
  siRNA target sequence for ABCA5 (NM_018672.2,3422-3440).
ctttattacaacagaatga

SEQ ID NO: 69023 - DNA, 19 bp, Homo sapiens
  siRNA target sequence for ABCA5 (NM_018672.2,3439-3457).
gaccaacaacttgtgtata

SEQ ID NO: 69024 - DNA, 19 bp, Homo sapiens
  siRNA target sequence for ABCA5 (NM_018672.2,3502-3520).
gccctagacagtcattcaa

SEQ ID NO: 69025 - DNA, 19 bp, Homo sapiens
  siRNA target sequence for ABCA5 (NM_018672.2,3525-3543).
gggtgtcatttcttatggt

SEQ ID NO: 69026 - DNA, 19 bp, Homo sapiens
  siRNA target sequence for ABCA5 (NM_018672.2,3554-3572).
cgactttggaagacgtatt

SEQ ID NO: 69027 - DNA, 19 bp, Homo sapiens
  siRNA target sequence for ABCA5 (NM_018672.2,3557-3575).
ctttggaagacgtattttt

SEQ ID NO: 69028 - DNA, 19 bp, Homo sapiens
  siRNA target sequence for ABCA5 (NM_018672.2,3604-3622).
caagcagattatagtgtat

SEQ ID NO: 69029 - DNA, 19 bp, Homo sapiens
  siRNA target sequence for ABCA5 (NM_018672.2,3675-3693).
ggaacagagcttacttatt

SEQ ID NO: 69030 - DNA, 19 bp, Homo sapiens
  siRNA target sequence for ABCA5 (NM_018672.2,3681-3699).
gagcttacttattctttct

SEQ ID NO: 69031 - DNA, 19 bp, Homo sapiens
  siRNA target sequence for ABCA5 (NM_018672.2,3683-3701).
gcttacttattctttctga

SEQ ID NO: 69032 - DNA, 19 bp, Homo sapiens
  siRNA target sequence for ABCA5 (NM_018672.2,3726-3744).
catgagcctttggaaacaa

SEQ ID NO: 69033 - DNA, 19 bp, Homo sapiens
  siRNA target sequence for ABCA5 (NM_018672.2,3738-3756).
gaaacaacagatgtataca

SEQ ID NO: 69034 - DNA, 19 bp, Homo sapiens
  siRNA target sequence for ABCA5 (NM_018672.2,3750-3768).
gtatacaatagcaaagttt

SEQ ID NO: 69035 - DNA, 19 bp, Homo sapiens
  siRNA target sequence for ABCA5 (NM_018672.2,3907-3925).
ccagacttatattttctaa

SEQ ID NO: 69036 - DNA, 19 bp, Homo sapiens
  siRNA target sequence for ABCA5 (NM_018672.2,3934-3952).
gacaaaccacataaataca

SEQ ID NO: 69037 - DNA, 19 bp, Homo sapiens
  siRNA target sequence for ABCA5 (NM_018672.2,3997-4015).
gatcttattagctttttca

SEQ ID NO: 69038 - DNA, 19 bp, Homo sapiens
  siRNA target sequence for ABCA5 (NM_018672.2,4016-4034).
caagccagaacataatggt

SEQ ID NO: 69039 - DNA, 19 bp, Homo sapiens
  siRNA target sequence for ABCA5 (NM_018672.2,4033-4051).
gtgacgatgattaatgaca

SEQ ID NO: 69040 - DNA, 19 bp, Homo sapiens
  siRNA target sequence for ABCA5 (NM_018672.2,4072-4090).
ccccatagtgcggctttaa

SEQ ID NO: 69041 - DNA, 19 bp, Homo sapiens
  siRNA target sequence for ABCA5 (NM_018672.2,4073-4091).
cccatagtgcggctttaaa

SEQ ID NO: 69042 - DNA, 19 bp, Homo sapiens
  siRNA target sequence for ABCA5 (NM_018672.2,4074-4092).
ccatagtgcggctttaaat

SEQ ID NO: 69043 - DNA, 19 bp, Homo sapiens
  siRNA target sequence for ABCA5 (NM_018672.2,4079-4097).
gtgcggctttaaatgtgat

SEQ ID NO: 69044 - DNA, 19 bp, Homo sapiens
  siRNA target sequence for ABCA5 (NM_018672.2,4134-4152).
caacagtactatggtttat

SEQ ID NO: 69045 - DNA, 19 bp, Homo sapiens
  siRNA target sequence for ABCA5 (NM_018672.2,4357-4375).
cataagatcaaagcttata

SEQ ID NO: 69046 - DNA, 19 bp, Homo sapiens
  siRNA target sequence for ABCA5 (NM_018672.2,4401-4419).
gccatctgcatattggatt

SEQ ID NO: 69047 - DNA, 19 bp, Homo sapiens
  siRNA target sequence for ABCA5 (NM_018672.2,4420-4438).
ggacaagctgttgttgata

SEQ ID NO: 69048 - DNA, 19 bp, Homo sapiens
  siRNA target sequence for ABCA5 (NM_018672.2,4421-4439).
gacaagctgttgttgatat

SEQ ID NO: 69049 - DNA, 19 bp, Homo sapiens
  siRNA target sequence for ABCA5 (NM_018672.2,4475-4493).
gaagcttattggcatttca

SEQ ID NO: 69050 - DNA, 19 bp, Homo sapiens
  siRNA target sequence for ABCA5 (NM_018672.2,4478-4496).
gcttattggcatttcatta

SEQ ID NO: 69051 - DNA, 19 bp, Homo sapiens
  siRNA target sequence for ABCA5 (NM_018672.2,4628-4646).
ggtcatttatctattctgt

SEQ ID NO: 69052 - DNA, 19 bp, Homo sapiens
  siRNA target sequence for ABCA5 (NM_018672.2,4651-4669).
gcgttggcttgtattgcaa

SEQ ID NO: 69053 - DNA, 19 bp, Homo sapiens
  siRNA target sequence for ABCA5 (NM_018672.2,4652-4670).
cgttggcttgtattgcaat

SEQ ID NO: 69054 - DNA, 19 bp, Homo sapiens
  siRNA target sequence for ABCA5 (NM_018672.2,4698-4716).
cacaattgcaactattctt

SEQ ID NO: 69055 - DNA, 19 bp, Homo sapiens
  siRNA target sequence for ABCA5 (NM_018672.2,4753-4771).
cttctaggttgcctgattt

SEQ ID NO: 69056 - DNA, 19 bp, Homo sapiens
  siRNA target sequence for ABCA5 (NM_018672.2,4810-4828).
gtggacacctataatccat

SEQ ID NO: 69057 - DNA, 19 bp, Homo sapiens
  siRNA target sequence for ABCA5 (NM_018672.2,4826-4844).
catgggataggctttcagt

SEQ ID NO: 69058 - DNA, 19 bp, Homo sapiens
  siRNA target sequence for ABCA5 (NM_018672.2,4835-4853).
ggctttcagtagctgttat

SEQ ID NO: 69059 - DNA, 19 bp, Homo sapiens
  siRNA target sequence for ABCA5 (NM_018672.2,4836-4854).
gctttcagtagctgttata

SEQ ID NO: 69060 - DNA, 19 bp, Homo sapiens
  siRNA target sequence for ABCA5 (NM_018672.2,4871-4889).
gtgtactgtggattttcct

SEQ ID NO: 69061 - DNA, 19 bp, Homo sapiens
  siRNA target sequence for ABCA5 (NM_018672.2,4878-4896).
gtggattttcctcttacaa

SEQ ID NO: 69062 - DNA, 19 bp, Homo sapiens
  siRNA target sequence for ABCA5 (NM_018672.2,4953-4971).
cctttcaacgaagtctaaa

SEQ ID NO: 69063 - DNA, 19 bp, Homo sapiens
  siRNA target sequence for ABCA5 (NM_018672.2,4961-4979).
cgaagtctaaaaataggaa

SEQ ID NO: 69064 - DNA, 19 bp, Homo sapiens
  siRNA target sequence for ABCA5 (NM_018672.2,5162-5180).
caactaaatacatctcttt

SEQ ID NO: 69065 - DNA, 19 bp, Homo sapiens
  siRNA target sequence for ABCA5 (NM_018672.2,5195-5213).
gagagatcttaggactatt

SEQ ID NO: 69066 - DNA, 19 bp, Homo sapiens
  siRNA target sequence for ABCA5 (NM_018672.2,5227-5245).
gctggcaaaagcacaatta

SEQ ID NO: 69067 - DNA, 19 bp, Homo sapiens
  siRNA target sequence for ABCA5 (NM_018672.2,5273-5291).
caacttcaggccaggtatt

SEQ ID NO: 69068 - DNA, 19 bp, Homo sapiens
  siRNA target sequence for ABCA5 (NM_018672.2,5276-5294).
cttcaggccaggtattttt

SEQ ID NO: 69069 - DNA, 19 bp, Homo sapiens
  siRNA target sequence for ABCA5 (NM_018672.2,5346-5364).
gggttactgtcctcagata

SEQ ID NO: 69070 - DNA, 19 bp, Homo sapiens
  siRNA target sequence for ABCA5 (NM_018672.2,5368-5386).
cctttgtggccagatacta

SEQ ID NO: 69071 - DNA, 19 bp, Homo sapiens
  siRNA target sequence for ABCA5 (NM_018672.2,5384-5402).
ctacattgcaggaacattt

SEQ ID NO: 69072 - DNA, 19 bp, Homo sapiens
  siRNA target sequence for ABCA5 (NM_018672.2,5430-5448).
gagtgcaagtgacatgaaa

SEQ ID NO: 69073 - DNA, 19 bp, Homo sapiens
  siRNA target sequence for ABCA5 (NM_018672.2,5449-5467).
gaagtcataagtcgaataa

SEQ ID NO: 69074 - DNA, 19 bp, Homo sapiens
  siRNA target sequence for ABCA5 (NM_018672.2,5454-5472).
cataagtcgaataacacat

SEQ ID NO: 69075 - DNA, 19 bp, Homo sapiens
  siRNA target sequence for ABCA5 (NM_018672.2,5518-5536).
cctgcaggaatcaaacgaa

SEQ ID NO: 69076 - DNA, 19 bp, Homo sapiens
  siRNA target sequence for ABCA5 (NM_018672.2,5519-5537).
ctgcaggaatcaaacgaaa

SEQ ID NO: 69077 - DNA, 19 bp, Homo sapiens
  siRNA target sequence for ABCA5 (NM_018672.2,5524-5542).
ggaatcaaacgaaagttgt

SEQ ID NO: 69078 - DNA, 19 bp, Homo sapiens
  siRNA target sequence for ABCA5 (NM_018672.2,5563-5581).
gggaatcctcagattactt

SEQ ID NO: 69079 - DNA, 19 bp, Homo sapiens
  siRNA target sequence for ABCA5 (NM_018672.2,5564-5582).
ggaatcctcagattacttt

SEQ ID NO: 69080 - DNA, 19 bp, Homo sapiens
  siRNA target sequence for ABCA5 (NM_018672.2,5583-5601).
gctagatgaaccatctaca

SEQ ID NO: 69081 - DNA, 19 bp, Homo sapiens
  siRNA target sequence for ABCA5 (NM_018672.2,5638-5656).
gcaattcgaactgcattta

SEQ ID NO: 69082 - DNA, 19 bp, Homo sapiens
  siRNA target sequence for ABCA5 (NM_018672.2,5639-5657).
caattcgaactgcatttaa

SEQ ID NO: 69083 - DNA, 19 bp, Homo sapiens
  siRNA target sequence for ABCA5 (NM_018672.2,5644-5662).
cgaactgcatttaaaaaca

SEQ ID NO: 69084 - DNA, 19 bp, Homo sapiens
  siRNA target sequence for ABCA5 (NM_018672.2,5663-5681).
gaaagcgggctgctattct

SEQ ID NO: 69085 - DNA, 19 bp, Homo sapiens
  siRNA target sequence for ABCA5 (NM_018672.2,5717-5735).
gtgatcgagtagctatcat

SEQ ID NO: 69086 - DNA, 19 bp, Homo sapiens
  siRNA target sequence for ABCA5 (NM_018672.2,5739-5757).
gtctgggcagttaagatgt

SEQ ID NO: 69087 - DNA, 19 bp, Homo sapiens
  siRNA target sequence for ABCA5 (NM_018672.2,5756-5774).
gtatcggaacagtacaaca

SEQ ID NO: 69088 - DNA, 19 bp, Homo sapiens
  siRNA target sequence for ABCA5 (NM_018672.2,5760-5778).
cggaacagtacaacatcta

SEQ ID NO: 69089 - DNA, 19 bp, Homo sapiens
  siRNA target sequence for ABCA5 (NM_018672.2,5761-5779).
ggaacagtacaacatctaa

SEQ ID NO: 69090 - DNA, 19 bp, Homo sapiens
  siRNA target sequence for ABCA5 (NM_018672.2,5762-5780).
gaacagtacaacatctaaa

SEQ ID NO: 69091 - DNA, 19 bp, Homo sapiens
  siRNA target sequence for ABCA5 (NM_018672.2,5767-5785).
gtacaacatctaaagagta

SEQ ID NO: 69092 - DNA, 19 bp, Homo sapiens
  siRNA target sequence for ABCA5 (NM_018672.2,5842-5860).
gaagtagaccgccttcaaa

SEQ ID NO: 69093 - DNA, 19 bp, Homo sapiens
  siRNA target sequence for ABCA5 (NM_018672.2,5848-5866).
gaccgccttcaaagagaaa

SEQ ID NO: 69094 - DNA, 19 bp, Homo sapiens
  siRNA target sequence for ABCA5 (NM_018672.2,5887-5905).
gcaagccgtcaggaaagtt

SEQ ID NO: 69095 - DNA, 19 bp, Homo sapiens
  siRNA target sequence for ABCA5 (NM_018672.2,5892-5910).
ccgtcaggaaagtttttct

SEQ ID NO: 69096 - DNA, 19 bp, Homo sapiens
  siRNA target sequence for ABCA5 (NM_018672.2,5909-5927).
cttctattttggcttataa

SEQ ID NO: 69097 - DNA, 19 bp, Homo sapiens
  siRNA target sequence for ABCA5 (NM_018672.2,5998-6016).
gccattgaagaatatagct

SEQ ID NO: 69098 - DNA, 19 bp, Homo sapiens
  siRNA target sequence for ABCA5 (NM_018672.2,5999-6017).
ccattgaagaatatagctt

SEQ ID NO: 69099 - DNA, 19 bp, Homo sapiens
  siRNA target sequence for ABCA5 (NM_018672.2,6111-6129).
gtgggaacgaacacaagaa

SEQ ID NO: 69100 - DNA, 19 bp, Homo sapiens
  siRNA target sequence for ABCA5 (NM_018672.2,6115-6133).
gaacgaacacaagaagata

SEQ ID NO: 69101 - DNA, 19 bp, Homo sapiens
  siRNA target sequence for ABCA6 (NM_080284.2,195-213).
gcgtgtatcagcaaaccaa

SEQ ID NO: 69102 - DNA, 19 bp, Homo sapiens
  siRNA target sequence for ABCA6 (NM_080284.2,196-214).
cgtgtatcagcaaaccaaa

SEQ ID NO: 69103 - DNA, 19 bp, Homo sapiens
  siRNA target sequence for ABCA6 (NM_080284.2,271-289).
ggaatggggcctctcaata

SEQ ID NO: 69104 - DNA, 19 bp, Homo sapiens
  siRNA target sequence for ABCA6 (NM_080284.2,276-294).
ggggcctctcaatacttct

SEQ ID NO: 69105 - DNA, 19 bp, Homo sapiens
  siRNA target sequence for ABCA6 (NM_080284.2,277-295).
gggcctctcaatacttcta

SEQ ID NO: 69106 - DNA, 19 bp, Homo sapiens
  siRNA target sequence for ABCA6 (NM_080284.2,403-421).
ggttgtgtatacaccaata

SEQ ID NO: 69107 - DNA, 19 bp, Homo sapiens
  siRNA target sequence for ABCA6 (NM_080284.2,404-422).
gttgtgtatacaccaatat

SEQ ID NO: 69108 - DNA, 19 bp, Homo sapiens
  siRNA target sequence for ABCA6 (NM_080284.2,407-425).
gtgtatacaccaatatcta

SEQ ID NO: 69109 - DNA, 19 bp, Homo sapiens
  siRNA target sequence for ABCA6 (NM_080284.2,455-473).
gcacttgctcctcttttga

SEQ ID NO: 69110 - DNA, 19 bp, Homo sapiens
  siRNA target sequence for ABCA6 (NM_080284.2,485-503).
gtcattggggcaccaaata

SEQ ID NO: 69111 - DNA, 19 bp, Homo sapiens
  siRNA target sequence for ABCA6 (NM_080284.2,487-505).
cattggggcaccaaataaa

SEQ ID NO: 69112 - DNA, 19 bp, Homo sapiens
  siRNA target sequence for ABCA6 (NM_080284.2,507-525).
cacacatggacgaaatact

SEQ ID NO: 69113 - DNA, 19 bp, Homo sapiens
  siRNA target sequence for ABCA6 (NM_080284.2,540-558).
catatgctatgggaatcat

SEQ ID NO: 69114 - DNA, 19 bp, Homo sapiens
  siRNA target sequence for ABCA6 (NM_080284.2,545-563).
gctatgggaatcatcttta

SEQ ID NO: 69115 - DNA, 19 bp, Homo sapiens
  siRNA target sequence for ABCA6 (NM_080284.2,566-584).
gaaactttctcttataagt

SEQ ID NO: 69116 - DNA, 19 bp, Homo sapiens
  siRNA target sequence for ABCA6 (NM_080284.2,636-654).
ctcattgctgggatggata

SEQ ID NO: 69117 - DNA, 19 bp, Homo sapiens
  siRNA target sequence for ABCA6 (NM_080284.2,693-711).
gaggatttgtggctttaca

SEQ ID NO: 69118 - DNA, 19 bp, Homo sapiens
  siRNA target sequence for ABCA6 (NM_080284.2,703-721).
ggctttacaaacagctatt

SEQ ID NO: 69119 - DNA, 19 bp, Homo sapiens
  siRNA target sequence for ABCA6 (NM_080284.2,704-722).
gctttacaaacagctatta

SEQ ID NO: 69120 - DNA, 19 bp, Homo sapiens
  siRNA target sequence for ABCA6 (NM_080284.2,705-723).
ctttacaaacagctattaa

SEQ ID NO: 69121 - DNA, 19 bp, Homo sapiens
  siRNA target sequence for ABCA6 (NM_080284.2,717-735).
ctattaatactgccattat

SEQ ID NO: 69122 - DNA, 19 bp, Homo sapiens
  siRNA target sequence for ABCA6 (NM_080284.2,775-793).
gtcagttactgctataact

SEQ ID NO: 69123 - DNA, 19 bp, Homo sapiens
  siRNA target sequence for ABCA6 (NM_080284.2,777-795).
cagttactgctataactat

SEQ ID NO: 69124 - DNA, 19 bp, Homo sapiens
  siRNA target sequence for ABCA6 (NM_080284.2,779-797).
gttactgctataactatga

SEQ ID NO: 69125 - DNA, 19 bp, Homo sapiens
  siRNA target sequence for ABCA6 (NM_080284.2,785-803).
gctataactatgaagacat

SEQ ID NO: 69126 - DNA, 19 bp, Homo sapiens
  siRNA target sequence for ABCA6 (NM_080284.2,801-819).
cattacctttcataactaa

SEQ ID NO: 69127 - DNA, 19 bp, Homo sapiens
  siRNA target sequence for ABCA6 (NM_080284.2,863-881).
catttctccccacttgtat

SEQ ID NO: 69128 - DNA, 19 bp, Homo sapiens
  siRNA target sequence for ABCA6 (NM_080284.2,868-886).
ctccccacttgtatatttt

SEQ ID NO: 69129 - DNA, 19 bp, Homo sapiens
  siRNA target sequence for ABCA6 (NM_080284.2,891-909).
cactcaatgtaacaaaaga

SEQ ID NO: 69130 - DNA, 19 bp, Homo sapiens
  siRNA target sequence for ABCA6 (NM_080284.2,992-1010).
ggcttcatctttattattt

SEQ ID NO: 69131 - DNA, 19 bp, Homo sapiens
  siRNA target sequence for ABCA6 (NM_080284.2,1019-1037).
gttacaattatcataacat

SEQ ID NO: 69132 - DNA, 19 bp, Homo sapiens
  siRNA target sequence for ABCA6 (NM_080284.2,1035-1053).
cattcacccaaattatagt

SEQ ID NO: 69133 - DNA, 19 bp, Homo sapiens
  siRNA target sequence for ABCA6 (NM_080284.2,1344-1362).
caggagactcatatacaat

SEQ ID NO: 69134 - DNA, 19 bp, Homo sapiens
  siRNA target sequence for ABCA6 (NM_080284.2,1347-1365).
gagactcatatacaatgat

SEQ ID NO: 69135 - DNA, 19 bp, Homo sapiens
  siRNA target sequence for ABCA6 (NM_080284.2,1509-1527).
ggactaatgctaaggttat

SEQ ID NO: 69136 - DNA, 19 bp, Homo sapiens
  siRNA target sequence for ABCA6 (NM_080284.2,1512-1530).
ctaatgctaaggttattga

SEQ ID NO: 69137 - DNA, 19 bp, Homo sapiens
  siRNA target sequence for ABCA6 (NM_080284.2,1670-1688).
ggcttgctctttgacatat

SEQ ID NO: 69138 - DNA, 19 bp, Homo sapiens
  siRNA target sequence for ABCA6 (NM_080284.2,1672-1690).
cttgctctttgacatatat

SEQ ID NO: 69139 - DNA, 19 bp, Homo sapiens
  siRNA target sequence for ABCA6 (NM_080284.2,1772-1790).
ccaacagaaggatcagtta

SEQ ID NO: 69140 - DNA, 19 bp, Homo sapiens
  siRNA target sequence for ABCA6 (NM_080284.2,1776-1794).
cagaaggatcagttaccat

SEQ ID NO: 69141 - DNA, 19 bp, Homo sapiens
  siRNA target sequence for ABCA6 (NM_080284.2,1787-1805).
gttaccatctataataaaa

SEQ ID NO: 69142 - DNA, 19 bp, Homo sapiens
  siRNA target sequence for ABCA6 (NM_080284.2,1852-1870).
cgtctgtcctcaattcaat

SEQ ID NO: 69143 - DNA, 19 bp, Homo sapiens
  siRNA target sequence for ABCA6 (NM_080284.2,1855-1873).
ctgtcctcaattcaatgtt

SEQ ID NO: 69144 - DNA, 19 bp, Homo sapiens
  siRNA target sequence for ABCA6 (NM_080284.2,1857-1875).
gtcctcaattcaatgttca

SEQ ID NO: 69145 - DNA, 19 bp, Homo sapiens
  siRNA target sequence for ABCA6 (NM_080284.2,1871-1889).
gttcaatttgacatactca

SEQ ID NO: 69146 - DNA, 19 bp, Homo sapiens
  siRNA target sequence for ABCA6 (NM_080284.2,1955-1973).
gaggtacaacgaatattat

SEQ ID NO: 69147 - DNA, 19 bp, Homo sapiens
  siRNA target sequence for ABCA6 (NM_080284.2,2005-2023).
ccttgctaaacatttaagt

SEQ ID NO: 69148 - DNA, 19 bp, Homo sapiens
  siRNA target sequence for ABCA6 (NM_080284.2,2154-2172).
gtagagcagatcatgtgat

SEQ ID NO: 69149 - DNA, 19 bp, Homo sapiens
  siRNA target sequence for ABCA6 (NM_080284.2,2214-2232).
ctgatagaaaagtgatcat

SEQ ID NO: 69150 - DNA, 19 bp, Homo sapiens
  siRNA target sequence for ABCA6 (NM_080284.2,2216-2234).
gatagaaaagtgatcatgt

SEQ ID NO: 69151 - DNA, 19 bp, Homo sapiens
  siRNA target sequence for ABCA6 (NM_080284.2,2259-2277).
gttcttctatgtttttgaa

SEQ ID NO: 69152 - DNA, 19 bp, Homo sapiens
  siRNA target sequence for ABCA6 (NM_080284.2,2291-2309).
cttggatatcacctaagtt

SEQ ID NO: 69153 - DNA, 19 bp, Homo sapiens
  siRNA target sequence for ABCA6 (NM_080284.2,2484-2502).
gagtgacaggttatgacat

SEQ ID NO: 69154 - DNA, 19 bp, Homo sapiens
  siRNA target sequence for ABCA6 (NM_080284.2,2490-2508).
caggttatgacatttccat

SEQ ID NO: 69155 - DNA, 19 bp, Homo sapiens
  siRNA target sequence for ABCA6 (NM_080284.2,2500-2518).
catttccatgtcaactcta

SEQ ID NO: 69156 - DNA, 19 bp, Homo sapiens
  siRNA target sequence for ABCA6 (NM_080284.2,2537-2555).
ctggaaggacagtcaacta

SEQ ID NO: 69157 - DNA, 19 bp, Homo sapiens
  siRNA target sequence for ABCA6 (NM_080284.2,2550-2568).
caactatcgaacaagattt

SEQ ID NO: 69158 - DNA, 19 bp, Homo sapiens
  siRNA target sequence for ABCA6 (NM_080284.2,2553-2571).
ctatcgaacaagatttcga

SEQ ID NO: 69159 - DNA, 19 bp, Homo sapiens
  siRNA target sequence for ABCA6 (NM_080284.2,2569-2587).
cgaacaagtggagatgata

SEQ ID NO: 69160 - DNA, 19 bp, Homo sapiens
  siRNA target sequence for ABCA6 (NM_080284.2,2593-2611).
ctcagaaagcctcaatgaa

SEQ ID NO: 69161 - DNA, 19 bp, Homo sapiens
  siRNA target sequence for ABCA6 (NM_080284.2,2695-2713).
ggcacggctccgtttctta

SEQ ID NO: 69162 - DNA, 19 bp, Homo sapiens
  siRNA target sequence for ABCA6 (NM_080284.2,2696-2714).
gcacggctccgtttcttaa

SEQ ID NO: 69163 - DNA, 19 bp, Homo sapiens
  siRNA target sequence for ABCA6 (NM_080284.2,2697-2715).
cacggctccgtttcttaaa

SEQ ID NO: 69164 - DNA, 19 bp, Homo sapiens
  siRNA target sequence for ABCA6 (NM_080284.2,2716-2734).
gttaaaacgtcaaactaaa

SEQ ID NO: 69165 - DNA, 19 bp, Homo sapiens
  siRNA target sequence for ABCA6 (NM_080284.2,2723-2741).
cgtcaaactaaagtgttat

SEQ ID NO: 69166 - DNA, 19 bp, Homo sapiens
  siRNA target sequence for ABCA6 (NM_080284.2,2735-2753).
gtgttattgaccctattat

SEQ ID NO: 69167 - DNA, 19 bp, Homo sapiens
  siRNA target sequence for ABCA6 (NM_080284.2,2746-2764).
cctattattggtatttgga

SEQ ID NO: 69168 - DNA, 19 bp, Homo sapiens
  siRNA target sequence for ABCA6 (NM_080284.2,2767-2785).
cgcaatattccctttgatt

SEQ ID NO: 69169 - DNA, 19 bp, Homo sapiens
  siRNA target sequence for ABCA6 (NM_080284.2,2769-2787).
caatattccctttgattgt

SEQ ID NO: 69170 - DNA, 19 bp, Homo sapiens
  siRNA target sequence for ABCA6 (NM_080284.2,2821-2839).
gatcgattgggaatttaaa

SEQ ID NO: 69171 - DNA, 19 bp, Homo sapiens
  siRNA target sequence for ABCA6 (NM_080284.2,2883-2901).
cccgtaccagcctgttgat

SEQ ID NO: 69172 - DNA, 19 bp, Homo sapiens
  siRNA target sequence for ABCA6 (NM_080284.2,2885-2903).
cgtaccagcctgttgatca

SEQ ID NO: 69173 - DNA, 19 bp, Homo sapiens
  siRNA target sequence for ABCA6 (NM_080284.2,2886-2904).
gtaccagcctgttgatcat

SEQ ID NO: 69174 - DNA, 19 bp, Homo sapiens
  siRNA target sequence for ABCA6 (NM_080284.2,2892-2910).
gcctgttgatcatcaataa

SEQ ID NO: 69175 - DNA, 19 bp, Homo sapiens
  siRNA target sequence for ABCA6 (NM_080284.2,2997-3015).
gtactgatggcctctcata

SEQ ID NO: 69176 - DNA, 19 bp, Homo sapiens
  siRNA target sequence for ABCA6 (NM_080284.2,3036-3054).
ctggtaaacaaaaggatta

SEQ ID NO: 69177 - DNA, 19 bp, Homo sapiens
  siRNA target sequence for ABCA6 (NM_080284.2,3125-3143).
gggctacttcaaatgttta

SEQ ID NO: 69178 - DNA, 19 bp, Homo sapiens
  siRNA target sequence for ABCA6 (NM_080284.2,3126-3144).
ggctacttcaaatgtttaa

SEQ ID NO: 69179 - DNA, 19 bp, Homo sapiens
  siRNA target sequence for ABCA6 (NM_080284.2,3127-3145).
gctacttcaaatgtttaat

SEQ ID NO: 69180 - DNA, 19 bp, Homo sapiens
  siRNA target sequence for ABCA6 (NM_080284.2,3152-3170).
caacatattcgaattgagt

SEQ ID NO: 69181 - DNA, 19 bp, Homo sapiens
  siRNA target sequence for ABCA6 (NM_080284.2,3303-3321).
ctaagtcccagctatggat

SEQ ID NO: 69182 - DNA, 19 bp, Homo sapiens
  siRNA target sequence for ABCA6 (NM_080284.2,3430-3448).
gcagtaccttcttattaca

SEQ ID NO: 69183 - DNA, 19 bp, Homo sapiens
  siRNA target sequence for ABCA6 (NM_080284.2,3431-3449).
cagtaccttcttattacaa

SEQ ID NO: 69184 - DNA, 19 bp, Homo sapiens
  siRNA target sequence for ABCA6 (NM_080284.2,3494-3512).
gcttctcttgtcttcttca

SEQ ID NO: 69185 - DNA, 19 bp, Homo sapiens
  siRNA target sequence for ABCA6 (NM_080284.2,3604-3622).
catcactttaatcaatcat

SEQ ID NO: 69186 - DNA, 19 bp, Homo sapiens
  siRNA target sequence for ABCA6 (NM_080284.2,3609-3627).
ctttaatcaatcattttga

SEQ ID NO: 69187 - DNA, 19 bp, Homo sapiens
  siRNA target sequence for ABCA6 (NM_080284.2,3652-3670).
ggtattggttccttcatat

SEQ ID NO: 69188 - DNA, 19 bp, Homo sapiens
  siRNA target sequence for ABCA6 (NM_080284.2,3715-3733).
gcactacagagaatttcca

SEQ ID NO: 69189 - DNA, 19 bp, Homo sapiens
  siRNA target sequence for ABCA6 (NM_080284.2,3746-3764).
gaattgagtgccactgatt

SEQ ID NO: 69190 - DNA, 19 bp, Homo sapiens
  siRNA target sequence for ABCA6 (NM_080284.2,3751-3769).
gagtgccactgattttcta

SEQ ID NO: 69191 - DNA, 19 bp, Homo sapiens
  siRNA target sequence for ABCA6 (NM_080284.2,3753-3771).
gtgccactgattttctagt

SEQ ID NO: 69192 - DNA, 19 bp, Homo sapiens
  siRNA target sequence for ABCA6 (NM_080284.2,3793-3811).
gactttgctattcgttttt

SEQ ID NO: 69193 - DNA, 19 bp, Homo sapiens
  siRNA target sequence for ABCA6 (NM_080284.2,3799-3817).
gctattcgtttttgttcta

SEQ ID NO: 69194 - DNA, 19 bp, Homo sapiens
  siRNA target sequence for ABCA6 (NM_080284.2,3800-3818).
ctattcgtttttgttctaa

SEQ ID NO: 69195 - DNA, 19 bp, Homo sapiens
  siRNA target sequence for ABCA6 (NM_080284.2,3973-3991).
gaccacttcaatcttagat

SEQ ID NO: 69196 - DNA, 19 bp, Homo sapiens
  siRNA target sequence for ABCA6 (NM_080284.2,4034-4052).
gcaggccagaagaaaagtt

SEQ ID NO: 69197 - DNA, 19 bp, Homo sapiens
  siRNA target sequence for ABCA6 (NM_080284.2,4145-4163).
gctggaaaaagttcatcta

SEQ ID NO: 69198 - DNA, 19 bp, Homo sapiens
  siRNA target sequence for ABCA6 (NM_080284.2,4213-4231).
gaaaggctgcagttcagtt

SEQ ID NO: 69199 - DNA, 19 bp, Homo sapiens
  siRNA target sequence for ABCA6 (NM_080284.2,4344-4362).
ggctcgccatcgcaagatt

SEQ ID NO: 69200 - DNA, 19 bp, Homo sapiens
  siRNA target sequence for ABCA6 (NM_080284.2,4345-4363).
gctcgccatcgcaagatta

SEQ ID NO: 69201 - DNA, 19 bp, Homo sapiens
  siRNA target sequence for ABCA6 (NM_080284.2,4349-4367).
gccatcgcaagattagtga

SEQ ID NO: 69202 - DNA, 19 bp, Homo sapiens
  siRNA target sequence for ABCA6 (NM_080284.2,4359-4377).
gattagtgagtgctttcaa

SEQ ID NO: 69203 - DNA, 19 bp, Homo sapiens
  siRNA target sequence for ABCA6 (NM_080284.2,4421-4439).
ggaatcacgagaaagttgt

SEQ ID NO: 69204 - DNA, 19 bp, Homo sapiens
  siRNA target sequence for ABCA6 (NM_080284.2,4426-4444).
cacgagaaagttgtgtttt

SEQ ID NO: 69205 - DNA, 19 bp, Homo sapiens
  siRNA target sequence for ABCA6 (NM_080284.2,4689-4707).
gcaaggattacattctaga

SEQ ID NO: 69206 - DNA, 19 bp, Homo sapiens
  siRNA target sequence for ABCA6 (NM_080284.2,4787-4805).
gaaaggtattcctctttgt

SEQ ID NO: 69207 - DNA, 19 bp, Homo sapiens
  siRNA target sequence for ABCA6 (NM_080284.2,4797-4815).
cctctttgttaacctataa

SEQ ID NO: 69208 - DNA, 19 bp, Homo sapiens
  siRNA target sequence for ABCA6 (NM_080284.2,4800-4818).
ctttgttaacctataagct

SEQ ID NO: 69209 - DNA, 19 bp, Homo sapiens
  siRNA target sequence for ABCA6 (NM_080284.2,4841-4859).
ctatcacagacctttcaca

SEQ ID NO: 69210 - DNA, 19 bp, Homo sapiens
  siRNA target sequence for ABCA7 (NM_019112.2,1008-1026).
gcaccagatacacctttta

SEQ ID NO: 69211 - DNA, 19 bp, Homo sapiens
  siRNA target sequence for ABCA7 (NM_019112.2,1107-1125).
ctgggaccccggatcttca

SEQ ID NO: 69212 - DNA, 19 bp, Homo sapiens
  siRNA target sequence for ABCA7 (NM_019112.2,1494-1512).
ggccacgtgcgcatcaaaa

SEQ ID NO: 69213 - DNA, 19 bp, Homo sapiens
  siRNA target sequence for ABCA7 (NM_019112.2,1495-1513).
gccacgtgcgcatcaaaat

SEQ ID NO: 69214 - DNA, 19 bp, Homo sapiens
  siRNA target sequence for ABCA7 (NM_019112.2,1530-1548).
gtggtcacgaggaccaata

SEQ ID NO: 69215 - DNA, 19 bp, Homo sapiens
  siRNA target sequence for ABCA7 (NM_019112.2,2396-2414).
gatccctgaaccatggaat

SEQ ID NO: 69216 - DNA, 19 bp, Homo sapiens
  siRNA target sequence for ABCA7 (NM_019112.2,2403-2421).
gaaccatggaattttcctt

SEQ ID NO: 69217 - DNA, 19 bp, Homo sapiens
  siRNA target sequence for ABCA7 (NM_019112.2,2813-2831).
cgagcacgtctggttctat

SEQ ID NO: 69218 - DNA, 19 bp, Homo sapiens
  siRNA target sequence for ABCA7 (NM_019112.2,4518-4536).
caggacagtctcaagatct

SEQ ID NO: 69219 - DNA, 19 bp, Homo sapiens
  siRNA target sequence for ABCA7 (NM_019112.2,4873-4891).
gggacatgtgtaactactt

SEQ ID NO: 69220 - DNA, 19 bp, Homo sapiens
  siRNA target sequence for ABCA7 (NM_019112.2,5061-5079).
gtggtgctcacctgcataa

SEQ ID NO: 69221 - DNA, 19 bp, Homo sapiens
  siRNA target sequence for ABCA7 (NM_019112.2,5071-5089).
cctgcataaacctctttat

SEQ ID NO: 69222 - DNA, 19 bp, Homo sapiens
  siRNA target sequence for ABCA7 (NM_019112.2,5476-5494).
ccacccagggggatgtgtt

SEQ ID NO: 69223 - DNA, 19 bp, Homo sapiens
  siRNA target sequence for ABCA7 (NM_019112.2,6357-6375).
cacggcgtggaggactttt

SEQ ID NO: 69224 - DNA, 19 bp, Homo sapiens
  siRNA target sequence for ABCA7 (NM_019112.2,6399-6417).
gaggtattcttgtacttct

SEQ ID NO: 69225 - DNA, 19 bp, Homo sapiens
  siRNA target sequence for ABCA7 (NM_033308.1,34-52).
cccctagtgagtgttcaaa

SEQ ID NO: 69226 - DNA, 19 bp, Homo sapiens
  siRNA target sequence for ABCA7 (NM_033308.1,35-53).
ccctagtgagtgttcaaaa

SEQ ID NO: 69227 - DNA, 19 bp, Homo sapiens
  siRNA target sequence for ABCA7 (NM_033308.1,36-54).
cctagtgagtgttcaaaat

SEQ ID NO: 69228 - DNA, 19 bp, Homo sapiens
  siRNA target sequence for ABCA8 (NM_007168.1,153-171).
gatcagtgtgtgtcaacaa

SEQ ID NO: 69229 - DNA, 19 bp, Homo sapiens
  siRNA target sequence for ABCA8 (NM_007168.1,156-174).
cagtgtgtgtcaacaaact

SEQ ID NO: 69230 - DNA, 19 bp, Homo sapiens
  siRNA target sequence for ABCA8 (NM_007168.1,173-191).
cttgggccttattatgcaa

SEQ ID NO: 69231 - DNA, 19 bp, Homo sapiens
  siRNA target sequence for ABCA8 (NM_007168.1,178-196).
gccttattatgcaagaact

SEQ ID NO: 69232 - DNA, 19 bp, Homo sapiens
  siRNA target sequence for ABCA8 (NM_007168.1,180-198).
cttattatgcaagaacttt

SEQ ID NO: 69233 - DNA, 19 bp, Homo sapiens
  siRNA target sequence for ABCA8 (NM_007168.1,255-273).
cctactactttgtttgtat

SEQ ID NO: 69234 - DNA, 19 bp, Homo sapiens
  siRNA target sequence for ABCA8 (NM_007168.1,256-274).
ctactactttgtttgtata

SEQ ID NO: 69235 - DNA, 19 bp, Homo sapiens
  siRNA target sequence for ABCA8 (NM_007168.1,280-298).
cctcatagtcatcaagtaa

SEQ ID NO: 69236 - DNA, 19 bp, Homo sapiens
  siRNA target sequence for ABCA8 (NM_007168.1,327-345).
cctgggacgggtagataca

SEQ ID NO: 69237 - DNA, 19 bp, Homo sapiens
  siRNA target sequence for ABCA8 (NM_007168.1,386-404).
ccaacacgacccaacagat

SEQ ID NO: 69238 - DNA, 19 bp, Homo sapiens
  siRNA target sequence for ABCA8 (NM_007168.1,387-405).
caacacgacccaacagata

SEQ ID NO: 69239 - DNA, 19 bp, Homo sapiens
  siRNA target sequence for ABCA8 (NM_007168.1,428-446).
ccttcctggcaggtaaaga

SEQ ID NO: 69240 - DNA, 19 bp, Homo sapiens
  siRNA target sequence for ABCA8 (NM_007168.1,522-540).
ctttactaatacatactca

SEQ ID NO: 69241 - DNA, 19 bp, Homo sapiens
  siRNA target sequence for ABCA8 (NM_007168.1,527-545).
ctaatacatactcatatca

SEQ ID NO: 69242 - DNA, 19 bp, Homo sapiens
  siRNA target sequence for ABCA8 (NM_007168.1,533-551).
catactcatatcatttgaa

SEQ ID NO: 69243 - DNA, 19 bp, Homo sapiens
  siRNA target sequence for ABCA8 (NM_007168.1,597-615).
ccatacagctcattgttat

SEQ ID NO: 69244 - DNA, 19 bp, Homo sapiens
  siRNA target sequence for ABCA8 (NM_007168.1,604-622).
gctcattgttatgaaacaa

SEQ ID NO: 69245 - DNA, 19 bp, Homo sapiens
  siRNA target sequence for ABCA8 (NM_007168.1,784-802).
ggtcaatcaggagttataa

SEQ ID NO: 69246 - DNA, 19 bp, Homo sapiens
  siRNA target sequence for ABCA8 (NM_007168.1,791-809).
caggagttataactgattt

SEQ ID NO: 69247 - DNA, 19 bp, Homo sapiens
  siRNA target sequence for ABCA8 (NM_007168.1,987-1005).
cttggcacttgttataaga

SEQ ID NO: 69248 - DNA, 19 bp, Homo sapiens
  siRNA target sequence for ABCA8 (NM_007168.1,990-1008).
ggcacttgttataagatct

SEQ ID NO: 69249 - DNA, 19 bp, Homo sapiens
  siRNA target sequence for ABCA8 (NM_007168.1,991-1009).
gcacttgttataagatcta

SEQ ID NO: 69250 - DNA, 19 bp, Homo sapiens
  siRNA target sequence for ABCA8 (NM_007168.1,1004-1022).
gatctacccagtttatcat

SEQ ID NO: 69251 - DNA, 19 bp, Homo sapiens
  siRNA target sequence for ABCA8 (NM_007168.1,1162-1180).
gggtgtctggggttcacat

SEQ ID NO: 69252 - DNA, 19 bp, Homo sapiens
  siRNA target sequence for ABCA8 (NM_007168.1,1287-1305).
gaattctaatgcatttcct

SEQ ID NO: 69253 - DNA, 19 bp, Homo sapiens
  siRNA target sequence for ABCA8 (NM_007168.1,1310-1328).
catcggacggctcaaatct

SEQ ID NO: 69254 - DNA, 19 bp, Homo sapiens
  siRNA target sequence for ABCA8 (NM_007168.1,1313-1331).
cggacggctcaaatctcat

SEQ ID NO: 69255 - DNA, 19 bp, Homo sapiens
  siRNA target sequence for ABCA8 (NM_007168.1,1314-1332).
ggacggctcaaatctcatt

SEQ ID NO: 69256 - DNA, 19 bp, Homo sapiens
  siRNA target sequence for ABCA8 (NM_007168.1,1317-1335).
cggctcaaatctcattgta

SEQ ID NO: 69257 - DNA, 19 bp, Homo sapiens
  siRNA target sequence for ABCA8 (NM_007168.1,1327-1345).
ctcattgtagcaacaaatt

SEQ ID NO: 69258 - DNA, 19 bp, Homo sapiens
  siRNA target sequence for ABCA8 (NM_007168.1,1377-1395).
ggcattggcgatttacttt

SEQ ID NO: 69259 - DNA, 19 bp, Homo sapiens
  siRNA target sequence for ABCA8 (NM_007168.1,1379-1397).
cattggcgatttactttga

SEQ ID NO: 69260 - DNA, 19 bp, Homo sapiens
  siRNA target sequence for ABCA8 (NM_007168.1,1426-1444).
cgacgtccacctttgtttt

SEQ ID NO: 69261 - DNA, 19 bp, Homo sapiens
  siRNA target sequence for ABCA8 (NM_007168.1,1427-1445).
gacgtccacctttgttttt

SEQ ID NO: 69262 - DNA, 19 bp, Homo sapiens
  siRNA target sequence for ABCA8 (NM_007168.1,1430-1448).
gtccacctttgtttttcct

SEQ ID NO: 69263 - DNA, 19 bp, Homo sapiens
  siRNA target sequence for ABCA8 (NM_007168.1,1509-1527).
ggatgccgatccttcattt

SEQ ID NO: 69264 - DNA, 19 bp, Homo sapiens
  siRNA target sequence for ABCA8 (NM_007168.1,1514-1532).
ccgatccttcatttcatga

SEQ ID NO: 69265 - DNA, 19 bp, Homo sapiens
  siRNA target sequence for ABCA8 (NM_007168.1,1523-1541).
catttcatgactcttttga

SEQ ID NO: 69266 - DNA, 19 bp, Homo sapiens
  siRNA target sequence for ABCA8 (NM_007168.1,1760-1778).
ccatctataacaataagct

SEQ ID NO: 69267 - DNA, 19 bp, Homo sapiens
  siRNA target sequence for ABCA8 (NM_007168.1,1761-1779).
catctataacaataagctt

SEQ ID NO: 69268 - DNA, 19 bp, Homo sapiens
  siRNA target sequence for ABCA8 (NM_007168.1,1789-1807).
gctgacctagaaaatctca

SEQ ID NO: 69269 - DNA, 19 bp, Homo sapiens
  siRNA target sequence for ABCA8 (NM_007168.1,1809-1827).
caagctgaccggagtttgt

SEQ ID NO: 69270 - DNA, 19 bp, Homo sapiens
  siRNA target sequence for ABCA8 (NM_007168.1,1970-1988).
caagacaccaagtatggaa

SEQ ID NO: 69271 - DNA, 19 bp, Homo sapiens
  siRNA target sequence for ABCA8 (NM_007168.1,2014-2032).
cgcgtgatcctcttcagta

SEQ ID NO: 69272 - DNA, 19 bp, Homo sapiens
  siRNA target sequence for ABCA8 (NM_007168.1,2149-2167).
cacttaagcttgcagttaa

SEQ ID NO: 69273 - DNA, 19 bp, Homo sapiens
  siRNA target sequence for ABCA8 (NM_007168.1,2151-2169).
cttaagcttgcagttaaat

SEQ ID NO: 69274 - DNA, 19 bp, Homo sapiens
  siRNA target sequence for ABCA8 (NM_007168.1,2217-2235).
ccctgatgccaaattatca

SEQ ID NO: 69275 - DNA, 19 bp, Homo sapiens
  siRNA target sequence for ABCA8 (NM_007168.1,2234-2252).
cagccaaaagcgaaggaaa

SEQ ID NO: 69276 - DNA, 19 bp, Homo sapiens
  siRNA target sequence for ABCA8 (NM_007168.1,2318-2336).
gctatcctgacctaggaat

SEQ ID NO: 69277 - DNA, 19 bp, Homo sapiens
  siRNA target sequence for ABCA8 (NM_007168.1,2319-2337).
ctatcctgacctaggaatt

SEQ ID NO: 69278 - DNA, 19 bp, Homo sapiens
  siRNA target sequence for ABCA8 (NM_007168.1,2328-2346).
cctaggaattgagaattat

SEQ ID NO: 69279 - DNA, 19 bp, Homo sapiens
  siRNA target sequence for ABCA8 (NM_007168.1,2385-2403).
gctagaaggaaaatctaca

SEQ ID NO: 69280 - DNA, 19 bp, Homo sapiens
  siRNA target sequence for ABCA8 (NM_007168.1,2393-2411).
gaaaatctacaattaatga

SEQ ID NO: 69281 - DNA, 19 bp, Homo sapiens
  siRNA target sequence for ABCA8 (NM_007168.1,2410-2428).
gaatcggacattgctattt

SEQ ID NO: 69282 - DNA, 19 bp, Homo sapiens
  siRNA target sequence for ABCA8 (NM_007168.1,2491-2509).
ctctcttcacttaacaaga

SEQ ID NO: 69283 - DNA, 19 bp, Homo sapiens
  siRNA target sequence for ABCA8 (NM_007168.1,2536-2554).
ctctggcgacagcaaatct

SEQ ID NO: 69284 - DNA, 19 bp, Homo sapiens
  siRNA target sequence for ABCA8 (NM_007168.1,2547-2565).
gcaaatctgcgcaattgca

SEQ ID NO: 69285 - DNA, 19 bp, Homo sapiens
  siRNA target sequence for ABCA8 (NM_007168.1,2548-2566).
caaatctgcgcaattgcaa

SEQ ID NO: 69286 - DNA, 19 bp, Homo sapiens
  siRNA target sequence for ABCA8 (NM_007168.1,2563-2581).
gcaagggttcgcttgttaa

SEQ ID NO: 69287 - DNA, 19 bp, Homo sapiens
  siRNA target sequence for ABCA8 (NM_007168.1,2564-2582).
caagggttcgcttgttaaa

SEQ ID NO: 69288 - DNA, 19 bp, Homo sapiens
  siRNA target sequence for ABCA8 (NM_007168.1,2567-2585).
gggttcgcttgttaaagtt

SEQ ID NO: 69289 - DNA, 19 bp, Homo sapiens
  siRNA target sequence for ABCA8 (NM_007168.1,2644-2662).
cctcttcttgtggagtata

SEQ ID NO: 69290 - DNA, 19 bp, Homo sapiens
  siRNA target sequence for ABCA8 (NM_007168.1,2656-2674).
gagtataccatggtgaaaa

SEQ ID NO: 69291 - DNA, 19 bp, Homo sapiens
  siRNA target sequence for ABCA8 (NM_007168.1,2756-2774).
ctcaactactgatcatcaa

SEQ ID NO: 69292 - DNA, 19 bp, Homo sapiens
  siRNA target sequence for ABCA8 (NM_007168.1,2758-2776).
caactactgatcatcaata

SEQ ID NO: 69293 - DNA, 19 bp, Homo sapiens
  siRNA target sequence for ABCA8 (NM_007168.1,2890-2908).
gccatcacagtgtgttgta

SEQ ID NO: 69294 - DNA, 19 bp, Homo sapiens
  siRNA target sequence for ABCA8 (NM_007168.1,2891-2909).
ccatcacagtgtgttgtaa

SEQ ID NO: 69295 - DNA, 19 bp, Homo sapiens
  siRNA target sequence for ABCA8 (NM_007168.1,2892-2910).
catcacagtgtgttgtaat

SEQ ID NO: 69296 - DNA, 19 bp, Homo sapiens
  siRNA target sequence for ABCA8 (NM_007168.1,2944-2962).
gccaaaagattgaattgct

SEQ ID NO: 69297 - DNA, 19 bp, Homo sapiens
  siRNA target sequence for ABCA8 (NM_007168.1,2966-2984).
cagttcttatggacattgt

SEQ ID NO: 69298 - DNA, 19 bp, Homo sapiens
  siRNA target sequence for ABCA8 (NM_007168.1,2992-3010).
gggctacttggaatggtta

SEQ ID NO: 69299 - DNA, 19 bp, Homo sapiens
  siRNA target sequence for ABCA8 (NM_007168.1,2993-3011).
ggctacttggaatggttaa

SEQ ID NO: 69300 - DNA, 19 bp, Homo sapiens
  siRNA target sequence for ABCA8 (NM_007168.1,3019-3037).
gtacatatccgaactgaaa

SEQ ID NO: 69301 - DNA, 19 bp, Homo sapiens
  siRNA target sequence for ABCA8 (NM_007168.1,3022-3040).
catatccgaactgaaagaa

SEQ ID NO: 69302 - DNA, 19 bp, Homo sapiens
  siRNA target sequence for ABCA8 (NM_007168.1,3027-3045).
ccgaactgaaagaagtaca

SEQ ID NO: 69303 - DNA, 19 bp, Homo sapiens
  siRNA target sequence for ABCA8 (NM_007168.1,3028-3046).
cgaactgaaagaagtacat

SEQ ID NO: 69304 - DNA, 19 bp, Homo sapiens
  siRNA target sequence for ABCA8 (NM_007168.1,3076-3094).
ggattcctggcatatatca

SEQ ID NO: 69305 - DNA, 19 bp, Homo sapiens
  siRNA target sequence for ABCA8 (NM_007168.1,3077-3095).
gattcctggcatatatcat

SEQ ID NO: 69306 - DNA, 19 bp, Homo sapiens
  siRNA target sequence for ABCA8 (NM_007168.1,3116-3134).
cgagttgcccaccttacat

SEQ ID NO: 69307 - DNA, 19 bp, Homo sapiens
  siRNA target sequence for ABCA8 (NM_007168.1,3117-3135).
gagttgcccaccttacatt

SEQ ID NO: 69308 - DNA, 19 bp, Homo sapiens
  siRNA target sequence for ABCA8 (NM_007168.1,3146-3164).
gcatcgatgattataagaa

SEQ ID NO: 69309 - DNA, 19 bp, Homo sapiens
  siRNA target sequence for ABCA8 (NM_007168.1,3252-3270).
cttggtcttcgtttttata

SEQ ID NO: 69310 - DNA, 19 bp, Homo sapiens
  siRNA target sequence for ABCA8 (NM_007168.1,3303-3321).
catgctacttacaataatt

SEQ ID NO: 69311 - DNA, 19 bp, Homo sapiens
  siRNA target sequence for ABCA8 (NM_007168.1,3306-3324).
gctacttacaataattcat

SEQ ID NO: 69312 - DNA, 19 bp, Homo sapiens
  siRNA target sequence for ABCA8 (NM_007168.1,3307-3325).
ctacttacaataattcata

SEQ ID NO: 69313 - DNA, 19 bp, Homo sapiens
  siRNA target sequence for ABCA8 (NM_007168.1,3362-3380).
ccctcatcttcatgacata

SEQ ID NO: 69314 - DNA, 19 bp, Homo sapiens
  siRNA target sequence for ABCA8 (NM_007168.1,3381-3399).
cgtgatttccttcatcttt

SEQ ID NO: 69315 - DNA, 19 bp, Homo sapiens
  siRNA target sequence for ABCA8 (NM_007168.1,3466-3484).
gctggatttgcgttcagta

SEQ ID NO: 69316 - DNA, 19 bp, Homo sapiens
  siRNA target sequence for ABCA8 (NM_007168.1,3467-3485).
ctggatttgcgttcagtat

SEQ ID NO: 69317 - DNA, 19 bp, Homo sapiens
  siRNA target sequence for ABCA8 (NM_007168.1,3470-3488).
gatttgcgttcagtatctt

SEQ ID NO: 69318 - DNA, 19 bp, Homo sapiens
  siRNA target sequence for ABCA8 (NM_007168.1,3475-3493).
gcgttcagtatcttcgaaa

SEQ ID NO: 69319 - DNA, 19 bp, Homo sapiens
  siRNA target sequence for ABCA8 (NM_007168.1,3486-3504).
cttcgaaagtgatattcca

SEQ ID NO: 69320 - DNA, 19 bp, Homo sapiens
  siRNA target sequence for ABCA8 (NM_007168.1,3489-3507).
cgaaagtgatattccattt

SEQ ID NO: 69321 - DNA, 19 bp, Homo sapiens
  siRNA target sequence for ABCA8 (NM_007168.1,3552-3570).
gttcttatcttctcatctt

SEQ ID NO: 69322 - DNA, 19 bp, Homo sapiens
  siRNA target sequence for ABCA8 (NM_007168.1,3612-3630).
gccatttctggtattccta

SEQ ID NO: 69323 - DNA, 19 bp, Homo sapiens
  siRNA target sequence for ABCA8 (NM_007168.1,3613-3631).
ccatttctggtattcctaa

SEQ ID NO: 69324 - DNA, 19 bp, Homo sapiens
  siRNA target sequence for ABCA8 (NM_007168.1,3740-3758).
gtagtgatgtgtgtcaaaa

SEQ ID NO: 69325 - DNA, 19 bp, Homo sapiens
  siRNA target sequence for ABCA8 (NM_007168.1,3820-3838).
gccttgaattctactaatt

SEQ ID NO: 69326 - DNA, 19 bp, Homo sapiens
  siRNA target sequence for ABCA8 (NM_007168.1,3821-3839).
ccttgaattctactaattt

SEQ ID NO: 69327 - DNA, 19 bp, Homo sapiens
  siRNA target sequence for ABCA9 (NM_080283.2,336-354).
ctgggacgtgtagatagtt

SEQ ID NO: 69328 - DNA, 19 bp, Homo sapiens
  siRNA target sequence for ABCA9 (NM_080283.2,338-356).
gggacgtgtagatagtttt

SEQ ID NO: 69329 - DNA, 19 bp, Homo sapiens
  siRNA target sequence for ABCA9 (NM_080283.2,339-357).
ggacgtgtagatagtttta

SEQ ID NO: 69330 - DNA, 19 bp, Homo sapiens
  siRNA target sequence for ABCA9 (NM_080283.2,340-358).
gacgtgtagatagttttaa

SEQ ID NO: 69331 - DNA, 19 bp, Homo sapiens
  siRNA target sequence for ABCA9 (NM_080283.2,458-476).
catggggtggcctgatgaa

SEQ ID NO: 69332 - DNA, 19 bp, Homo sapiens
  siRNA target sequence for ABCA9 (NM_080283.2,461-479).
ggggtggcctgatgaaaaa

SEQ ID NO: 69333 - DNA, 19 bp, Homo sapiens
  siRNA target sequence for ABCA9 (NM_080283.2,486-504).
gatgaattggatttgaact

SEQ ID NO: 69334 - DNA, 19 bp, Homo sapiens
  siRNA target sequence for ABCA9 (NM_080283.2,489-507).
gaattggatttgaactatt

SEQ ID NO: 69335 - DNA, 19 bp, Homo sapiens
  siRNA target sequence for ABCA9 (NM_080283.2,521-539).
gagagtcatctttactgat

SEQ ID NO: 69336 - DNA, 19 bp, Homo sapiens
  siRNA target sequence for ABCA9 (NM_080283.2,541-559).
ccttctcctaccatttgaa

SEQ ID NO: 69337 - DNA, 19 bp, Homo sapiens
  siRNA target sequence for ABCA9 (NM_080283.2,560-578).
gttttcttggggacataga

SEQ ID NO: 69338 - DNA, 19 bp, Homo sapiens
  siRNA target sequence for ABCA9 (NM_080283.2,573-591).
catagaatccccatgatga

SEQ ID NO: 69339 - DNA, 19 bp, Homo sapiens
  siRNA target sequence for ABCA9 (NM_080283.2,577-595).
gaatccccatgatgaaaga

SEQ ID NO: 69340 - DNA, 19 bp, Homo sapiens
  siRNA target sequence for ABCA9 (NM_080283.2,752-770).
gtcagttactggtgtacat

SEQ ID NO: 69341 - DNA, 19 bp, Homo sapiens
  siRNA target sequence for ABCA9 (NM_080283.2,756-774).
gttactggtgtacatatga

SEQ ID NO: 69342 - DNA, 19 bp, Homo sapiens
  siRNA target sequence for ABCA9 (NM_080283.2,799-817).
gaggagttgcaactgattt

SEQ ID NO: 69343 - DNA, 19 bp, Homo sapiens
  siRNA target sequence for ABCA9 (NM_080283.2,801-819).
ggagttgcaactgattttt

SEQ ID NO: 69344 - DNA, 19 bp, Homo sapiens
  siRNA target sequence for ABCA9 (NM_080283.2,870-888).
gtcaatgttacacaagaaa

SEQ ID NO: 69345 - DNA, 19 bp, Homo sapiens
  siRNA target sequence for ABCA9 (NM_080283.2,891-909).
caatacattacgtcattga

SEQ ID NO: 69346 - DNA, 19 bp, Homo sapiens
  siRNA target sequence for ABCA9 (NM_080283.2,998-1016).
ggctcttattgtaaaatct

SEQ ID NO: 69347 - DNA, 19 bp, Homo sapiens
  siRNA target sequence for ABCA9 (NM_080283.2,1029-1047).
gtcctgactggttttgtga

SEQ ID NO: 69348 - DNA, 19 bp, Homo sapiens
  siRNA target sequence for ABCA9 (NM_080283.2,1074-1092).
ggcctgtctttgataactt

SEQ ID NO: 69349 - DNA, 19 bp, Homo sapiens
  siRNA target sequence for ABCA9 (NM_080283.2,1178-1196).
gggattcccagcattgtat

SEQ ID NO: 69350 - DNA, 19 bp, Homo sapiens
  siRNA target sequence for ABCA9 (NM_080283.2,1179-1197).
ggattcccagcattgtata

SEQ ID NO: 69351 - DNA, 19 bp, Homo sapiens
  siRNA target sequence for ABCA9 (NM_080283.2,1262-1280).
gatggcccagcttatacat

SEQ ID NO: 69352 - DNA, 19 bp, Homo sapiens
  siRNA target sequence for ABCA9 (NM_080283.2,1313-1331).
ggattcttcacaaaatcca

SEQ ID NO: 69353 - DNA, 19 bp, Homo sapiens
  siRNA target sequence for ABCA9 (NM_080283.2,1329-1347).
ccatacctcataatagcta

SEQ ID NO: 69354 - DNA, 19 bp, Homo sapiens
  siRNA target sequence for ABCA9 (NM_080283.2,1335-1353).
ctcataatagctactcttt

SEQ ID NO: 69355 - DNA, 19 bp, Homo sapiens
  siRNA target sequence for ABCA9 (NM_080283.2,1370-1388).
cacccttctgtatttggta

SEQ ID NO: 69356 - DNA, 19 bp, Homo sapiens
  siRNA target sequence for ABCA9 (NM_080283.2,1377-1395).
ctgtatttggtattgacat

SEQ ID NO: 69357 - DNA, 19 bp, Homo sapiens
  siRNA target sequence for ABCA9 (NM_080283.2,1434-1452).
cgatgttctcccttgtttt

SEQ ID NO: 69358 - DNA, 19 bp, Homo sapiens
  siRNA target sequence for ABCA9 (NM_080283.2,1462-1480).
cctgtttttggtttcaaca

SEQ ID NO: 69359 - DNA, 19 bp, Homo sapiens
  siRNA target sequence for ABCA9 (NM_080283.2,1524-1542).
gatcctacacctaatgact

SEQ ID NO: 69360 - DNA, 19 bp, Homo sapiens
  siRNA target sequence for ABCA9 (NM_080283.2,1528-1546).
ctacacctaatgactgttt

SEQ ID NO: 69361 - DNA, 19 bp, Homo sapiens
  siRNA target sequence for ABCA9 (NM_080283.2,1531-1549).
cacctaatgactgttttga

SEQ ID NO: 69362 - DNA, 19 bp, Homo sapiens
  siRNA target sequence for ABCA9 (NM_080283.2,1624-1642).
gtgagagagtagaagcttt

SEQ ID NO: 69363 - DNA, 19 bp, Homo sapiens
  siRNA target sequence for ABCA9 (NM_080283.2,1648-1666).
gtgtggtgtttgacatata

SEQ ID NO: 69364 - DNA, 19 bp, Homo sapiens
  siRNA target sequence for ABCA9 (NM_080283.2,1739-1757).
gttgtcagttccaacatca

SEQ ID NO: 69365 - DNA, 19 bp, Homo sapiens
  siRNA target sequence for ABCA9 (NM_080283.2,1764-1782).
gtcactgtctataatcaca

SEQ ID NO: 69366 - DNA, 19 bp, Homo sapiens
  siRNA target sequence for ABCA9 (NM_080283.2,1772-1790).
ctataatcacacactttca

SEQ ID NO: 69367 - DNA, 19 bp, Homo sapiens
  siRNA target sequence for ABCA9 (NM_080283.2,1844-1862).
caatgtgcaatttggattt

SEQ ID NO: 69368 - DNA, 19 bp, Homo sapiens
  siRNA target sequence for ABCA9 (NM_080283.2,1977-1995).
gacatccttgctcaaaact

SEQ ID NO: 69369 - DNA, 19 bp, Homo sapiens
  siRNA target sequence for ABCA9 (NM_080283.2,1979-1997).
catccttgctcaaaactta

SEQ ID NO: 69370 - DNA, 19 bp, Homo sapiens
  siRNA target sequence for ABCA9 (NM_080283.2,1982-2000).
ccttgctcaaaacttaagt

SEQ ID NO: 69371 - DNA, 19 bp, Homo sapiens
  siRNA target sequence for ABCA9 (NM_080283.2,2050-2068).
ctcaagttttgctattgga

SEQ ID NO: 69372 - DNA, 19 bp, Homo sapiens
  siRNA target sequence for ABCA9 (NM_080283.2,2094-2112).
ctttcaaggcaccgaatat

SEQ ID NO: 69373 - DNA, 19 bp, Homo sapiens
  siRNA target sequence for ABCA9 (NM_080283.2,2098-2116).
caaggcaccgaatatggaa

SEQ ID NO: 69374 - DNA, 19 bp, Homo sapiens
  siRNA target sequence for ABCA9 (NM_080283.2,2137-2155).
cagacagagtaattctctt

SEQ ID NO: 69375 - DNA, 19 bp, Homo sapiens
  siRNA target sequence for ABCA9 (NM_080283.2,2153-2171).
cttcagcacccagtttata

SEQ ID NO: 69376 - DNA, 19 bp, Homo sapiens
  siRNA target sequence for ABCA9 (NM_080283.2,2191-2209).
cggacaggaaggtgttcat

SEQ ID NO: 69377 - DNA, 19 bp, Homo sapiens
  siRNA target sequence for ABCA9 (NM_080283.2,2192-2210).
ggacaggaaggtgttcata

SEQ ID NO: 69378 - DNA, 19 bp, Homo sapiens
  siRNA target sequence for ABCA9 (NM_080283.2,2193-2211).
gacaggaaggtgttcatat

SEQ ID NO: 69379 - DNA, 19 bp, Homo sapiens
  siRNA target sequence for ABCA9 (NM_080283.2,2197-2215).
ggaaggtgttcatatccaa

SEQ ID NO: 69380 - DNA, 19 bp, Homo sapiens
  siRNA target sequence for ABCA9 (NM_080283.2,2198-2216).
gaaggtgttcatatccaat

SEQ ID NO: 69381 - DNA, 19 bp, Homo sapiens
  siRNA target sequence for ABCA9 (NM_080283.2,2263-2281).
ggggcataggctaccattt

SEQ ID NO: 69382 - DNA, 19 bp, Homo sapiens
  siRNA target sequence for ABCA9 (NM_080283.2,2264-2282).
gggcataggctaccattta

SEQ ID NO: 69383 - DNA, 19 bp, Homo sapiens
  siRNA target sequence for ABCA9 (NM_080283.2,2265-2283).
ggcataggctaccatttaa

SEQ ID NO: 69384 - DNA, 19 bp, Homo sapiens
  siRNA target sequence for ABCA9 (NM_080283.2,2267-2285).
cataggctaccatttaagt

SEQ ID NO: 69385 - DNA, 19 bp, Homo sapiens
  siRNA target sequence for ABCA9 (NM_080283.2,2273-2291).
ctaccatttaagtttgcat

SEQ ID NO: 69386 - DNA, 19 bp, Homo sapiens
  siRNA target sequence for ABCA9 (NM_080283.2,2302-2320).
ggtgtgatccagagagtat

SEQ ID NO: 69387 - DNA, 19 bp, Homo sapiens
  siRNA target sequence for ABCA9 (NM_080283.2,2303-2321).
gtgtgatccagagagtata

SEQ ID NO: 69388 - DNA, 19 bp, Homo sapiens
  siRNA target sequence for ABCA9 (NM_080283.2,2435-2453).
ggatcttgatagatgttct

SEQ ID NO: 69389 - DNA, 19 bp, Homo sapiens
  siRNA target sequence for ABCA9 (NM_080283.2,2527-2545).
caactattgatgaatcaga

SEQ ID NO: 69390 - DNA, 19 bp, Homo sapiens
  siRNA target sequence for ABCA9 (NM_080283.2,2627-2645).
cttccacgaaacaaggaaa

SEQ ID NO: 69391 - DNA, 19 bp, Homo sapiens
  siRNA target sequence for ABCA9 (NM_080283.2,2672-2690).
gcagcaggtctgtgcaata

SEQ ID NO: 69392 - DNA, 19 bp, Homo sapiens
  siRNA target sequence for ABCA9 (NM_080283.2,2691-2709).
gcaaaagttcgcttcctaa

SEQ ID NO: 69393 - DNA, 19 bp, Homo sapiens
  siRNA target sequence for ABCA9 (NM_080283.2,2735-2753).
gtggactatattattgctt

SEQ ID NO: 69394 - DNA, 19 bp, Homo sapiens
  siRNA target sequence for ABCA9 (NM_080283.2,2751-2769).
ctttttggtattagcttta

SEQ ID NO: 69395 - DNA, 19 bp, Homo sapiens
  siRNA target sequence for ABCA9 (NM_080283.2,2795-2813).
ctacgagtcatatcagaaa

SEQ ID NO: 69396 - DNA, 19 bp, Homo sapiens
  siRNA target sequence for ABCA9 (NM_080283.2,2884-2902).
cccatttactggtcatcaa

SEQ ID NO: 69397 - DNA, 19 bp, Homo sapiens
  siRNA target sequence for ABCA9 (NM_080283.2,2885-2903).
ccatttactggtcatcaat

SEQ ID NO: 69398 - DNA, 19 bp, Homo sapiens
  siRNA target sequence for ABCA9 (NM_080283.2,2886-2904).
catttactggtcatcaata

SEQ ID NO: 69399 - DNA, 19 bp, Homo sapiens
  siRNA target sequence for ABCA9 (NM_080283.2,2906-2924).
gacagggtcaaccattgat

SEQ ID NO: 69400 - DNA, 19 bp, Homo sapiens
  siRNA target sequence for ABCA9 (NM_080283.2,2910-2928).
gggtcaaccattgataact

SEQ ID NO: 69401 - DNA, 19 bp, Homo sapiens
  siRNA target sequence for ABCA9 (NM_080283.2,2911-2929).
ggtcaaccattgataactt

SEQ ID NO: 69402 - DNA, 19 bp, Homo sapiens
  siRNA target sequence for ABCA9 (NM_080283.2,2912-2930).
gtcaaccattgataacttt

SEQ ID NO: 69403 - DNA, 19 bp, Homo sapiens
  siRNA target sequence for ABCA9 (NM_080283.2,2944-2962).
ggcgacagaacatagctat

SEQ ID NO: 69404 - DNA, 19 bp, Homo sapiens
  siRNA target sequence for ABCA9 (NM_080283.2,2945-2963).
gcgacagaacatagctata

SEQ ID NO: 69405 - DNA, 19 bp, Homo sapiens
  siRNA target sequence for ABCA9 (NM_080283.2,3044-3062).
ggatcacagattttcaata

SEQ ID NO: 69406 - DNA, 19 bp, Homo sapiens
  siRNA target sequence for ABCA9 (NM_080283.2,3110-3128).
cattagcaatggactactt

SEQ ID NO: 69407 - DNA, 19 bp, Homo sapiens
  siRNA target sequence for ABCA9 (NM_080283.2,3116-3134).
caatggactacttggaatt

SEQ ID NO: 69408 - DNA, 19 bp, Homo sapiens
  siRNA target sequence for ABCA9 (NM_080283.2,3120-3138).
ggactacttggaattttta

SEQ ID NO: 69409 - DNA, 19 bp, Homo sapiens
  siRNA target sequence for ABCA9 (NM_080283.2,3121-3139).
gactacttggaatttttaa

SEQ ID NO: 69410 - DNA, 19 bp, Homo sapiens
  siRNA target sequence for ABCA9 (NM_080283.2,3183-3201).
gagcatatggattatgagt

SEQ ID NO: 69411 - DNA, 19 bp, Homo sapiens
  siRNA target sequence for ABCA9 (NM_080283.2,3234-3252).
ccgatggcagcctctttca

SEQ ID NO: 69412 - DNA, 19 bp, Homo sapiens
  siRNA target sequence for ABCA9 (NM_080283.2,3272-3290).
cagcattggtgactacaaa

SEQ ID NO: 69413 - DNA, 19 bp, Homo sapiens
  siRNA target sequence for ABCA9 (NM_080283.2,3421-3439).
gcccagaggagattatatt

SEQ ID NO: 69414 - DNA, 19 bp, Homo sapiens
  siRNA target sequence for ABCA9 (NM_080283.2,3422-3440).
cccagaggagattatattt

SEQ ID NO: 69415 - DNA, 19 bp, Homo sapiens
  siRNA target sequence for ABCA9 (NM_080283.2,3581-3599).
ggtcatcttctcgatagtt

SEQ ID NO: 69416 - DNA, 19 bp, Homo sapiens
  siRNA target sequence for ABCA9 (NM_080283.2,3590-3608).
ctcgatagttgctactgat

SEQ ID NO: 69417 - DNA, 19 bp, Homo sapiens
  siRNA target sequence for ABCA9 (NM_080283.2,3593-3611).
gatagttgctactgatcta

SEQ ID NO: 69418 - DNA, 19 bp, Homo sapiens
  siRNA target sequence for ABCA9 (NM_080283.2,3600-3618).
gctactgatctaaatgaat

SEQ ID NO: 69419 - DNA, 19 bp, Homo sapiens
  siRNA target sequence for ABCA9 (NM_080283.2,3601-3619).
ctactgatctaaatgaata

SEQ ID NO: 69420 - DNA, 19 bp, Homo sapiens
  siRNA target sequence for ABCA9 (NM_080283.2,3706-3724).
ctgattccatggattactt

SEQ ID NO: 69421 - DNA, 19 bp, Homo sapiens
  siRNA target sequence for ABCA9 (NM_080283.2,3726-3744).
ggagcttcagaatctgaaa

SEQ ID NO: 69422 - DNA, 19 bp, Homo sapiens
  siRNA target sequence for ABCA9 (NM_080283.2,3818-3836).
gaactgcaggaagaaacta

SEQ ID NO: 69423 - DNA, 19 bp, Homo sapiens
  siRNA target sequence for ABCA9 (NM_080283.2,3874-3892).
gcaacgctatttttccaaa

SEQ ID NO: 69424 - DNA, 19 bp, Homo sapiens
  siRNA target sequence for ABCA9 (NM_080283.2,3959-3977).
ggctgtgcgagactttgat

SEQ ID NO: 69425 - DNA, 19 bp, Homo sapiens
  siRNA target sequence for ABCA9 (NM_080283.2,4023-4041).
ggcaaaaagaaaaattgct

SEQ ID NO: 69426 - DNA, 19 bp, Homo sapiens
  siRNA target sequence for ABCA9 (NM_080283.2,4134-4152).
ggtaaaagtacaactatta

SEQ ID NO: 69427 - DNA, 19 bp, Homo sapiens
  siRNA target sequence for ABCA9 (NM_080283.2,4141-4159).
gtacaactattaagatgat

SEQ ID NO: 69428 - DNA, 19 bp, Homo sapiens
  siRNA target sequence for ABCA9 (NM_080283.2,4180-4198).
ctgcaggacaggtgatttt

SEQ ID NO: 69429 - DNA, 19 bp, Homo sapiens
  siRNA target sequence for ABCA9 (NM_080283.2,4182-4200).
gcaggacaggtgattttga

SEQ ID NO: 69430 - DNA, 19 bp, Homo sapiens
  siRNA target sequence for ABCA9 (NM_080283.2,4527-4545).
gtgattcgggccaccttta

SEQ ID NO: 69431 - DNA, 19 bp, Homo sapiens
  siRNA target sequence for ABCA9 (NM_080283.2,4820-4838).
ggatgtgcgacctttatca

SEQ ID NO: 69432 - DNA, 19 bp, Homo sapiens
  siRNA target sequence for ABCB1 (NM_000927.2,518-536).
ccaactgtcagtgtatttt

SEQ ID NO: 69433 - DNA, 19 bp, Homo sapiens
  siRNA target sequence for ABCB1 (NM_000927.2,522-540).
ctgtcagtgtattttcaat

SEQ ID NO: 69434 - DNA, 19 bp, Homo sapiens
  siRNA target sequence for ABCB1 (NM_000927.2,558-576).
ggcttgacaagttgtatat

SEQ ID NO: 69435 - DNA, 19 bp, Homo sapiens
  siRNA target sequence for ABCB1 (NM_000927.2,680-698).
gaagatctgatgtcaaaca

SEQ ID NO: 69436 - DNA, 19 bp, Homo sapiens
  siRNA target sequence for ABCB1 (NM_000927.2,683-701).
gatctgatgtcaaacatca

SEQ ID NO: 69437 - DNA, 19 bp, Homo sapiens
  siRNA target sequence for ABCB1 (NM_000927.2,691-709).
gtcaaacatcactaataga

SEQ ID NO: 69438 - DNA, 19 bp, Homo sapiens
  siRNA target sequence for ABCB1 (NM_000927.2,702-720).
ctaatagaagtgatatcaa

SEQ ID NO: 69439 - DNA, 19 bp, Homo sapiens
  siRNA target sequence for ABCB1 (NM_000927.2,722-740).
gatacagggttcttcatga

SEQ ID NO: 69440 - DNA, 19 bp, Homo sapiens
  siRNA target sequence for ABCB1 (NM_000927.2,726-744).
cagggttcttcatgaatct

SEQ ID NO: 69441 - DNA, 19 bp, Homo sapiens
  siRNA target sequence for ABCB1 (NM_000927.2,757-775).
gaccaggtatgcctattat

SEQ ID NO: 69442 - DNA, 19 bp, Homo sapiens
  siRNA target sequence for ABCB1 (NM_000927.2,759-777).
ccaggtatgcctattatta

SEQ ID NO: 69443 - DNA, 19 bp, Homo sapiens
  siRNA target sequence for ABCB1 (NM_000927.2,923-941).
gatgttggggagcttaaca

SEQ ID NO: 69444 - DNA, 19 bp, Homo sapiens
  siRNA target sequence for ABCB1 (NM_000927.2,934-952).
gcttaacacccgacttaca

SEQ ID NO: 69445 - DNA, 19 bp, Homo sapiens
  siRNA target sequence for ABCB1 (NM_000927.2,942-960).
cccgacttacagatgatgt

SEQ ID NO: 69446 - DNA, 19 bp, Homo sapiens
  siRNA target sequence for ABCB1 (NM_000927.2,1029-1047).
ctgggtttatagtaggatt

SEQ ID NO: 69447 - DNA, 19 bp, Homo sapiens
  siRNA target sequence for ABCB1 (NM_000927.2,1031-1049).
gggtttatagtaggattta

SEQ ID NO: 69448 - DNA, 19 bp, Homo sapiens
  siRNA target sequence for ABCB1 (NM_000927.2,1033-1051).
gtttatagtaggatttaca

SEQ ID NO: 69449 - DNA, 19 bp, Homo sapiens
  siRNA target sequence for ABCB1 (NM_000927.2,1117-1135).
ctgggcaaagatactatct

SEQ ID NO: 69450 - DNA, 19 bp, Homo sapiens
  siRNA target sequence for ABCB1 (NM_000927.2,1120-1138).
ggcaaagatactatcttca

SEQ ID NO: 69451 - DNA, 19 bp, Homo sapiens
  siRNA target sequence for ABCB1 (NM_000927.2,1122-1140).
caaagatactatcttcatt

SEQ ID NO: 69452 - DNA, 19 bp, Homo sapiens
  siRNA target sequence for ABCB1 (NM_000927.2,1151-1169).
gaactcttagcgtatgcaa

SEQ ID NO: 69453 - DNA, 19 bp, Homo sapiens
  siRNA target sequence for ABCB1 (NM_000927.2,1241-1259).
gaacttgaaaggtacaaca

SEQ ID NO: 69454 - DNA, 19 bp, Homo sapiens
  siRNA target sequence for ABCB1 (NM_000927.2,1244-1262).
cttgaaaggtacaacaaaa

SEQ ID NO: 69455 - DNA, 19 bp, Homo sapiens
  siRNA target sequence for ABCB1 (NM_000927.2,1251-1269).
ggtacaacaaaaatttaga

SEQ ID NO: 69456 - DNA, 19 bp, Homo sapiens
  siRNA target sequence for ABCB1 (NM_000927.2,1336-1354).
gctgatctatgcatcttat

SEQ ID NO: 69457 - DNA, 19 bp, Homo sapiens
  siRNA target sequence for ABCB1 (NM_000927.2,1339-1357).
gatctatgcatcttatgct

SEQ ID NO: 69458 - DNA, 19 bp, Homo sapiens
  siRNA target sequence for ABCB1 (NM_000927.2,1384-1402).
ggtcctctcaggggaatat

SEQ ID NO: 69459 - DNA, 19 bp, Homo sapiens
  siRNA target sequence for ABCB1 (NM_000927.2,1385-1403).
gtcctctcaggggaatatt

SEQ ID NO: 69460 - DNA, 19 bp, Homo sapiens
  siRNA target sequence for ABCB1 (NM_000927.2,1387-1405).
cctctcaggggaatattct

SEQ ID NO: 69461 - DNA, 19 bp, Homo sapiens
  siRNA target sequence for ABCB1 (NM_000927.2,1388-1406).
ctctcaggggaatattcta

SEQ ID NO: 69462 - DNA, 19 bp, Homo sapiens
  siRNA target sequence for ABCB1 (NM_000927.2,1390-1408).
ctcaggggaatattctatt

SEQ ID NO: 69463 - DNA, 19 bp, Homo sapiens
  siRNA target sequence for ABCB1 (NM_000927.2,1409-1427).
ggacaagtactcactgtat

SEQ ID NO: 69464 - DNA, 19 bp, Homo sapiens
  siRNA target sequence for ABCB1 (NM_000927.2,1467-1485).
ctccaagcattgaagcatt

SEQ ID NO: 69465 - DNA, 19 bp, Homo sapiens
  siRNA target sequence for ABCB1 (NM_000927.2,1499-1517).
ggagcagcttatgaaatct

SEQ ID NO: 69466 - DNA, 19 bp, Homo sapiens
  siRNA target sequence for ABCB1 (NM_000927.2,1502-1520).
gcagcttatgaaatcttca

SEQ ID NO: 69467 - DNA, 19 bp, Homo sapiens
  siRNA target sequence for ABCB1 (NM_000927.2,1542-1560).
gtattgacagctattcgaa

SEQ ID NO: 69468 - DNA, 19 bp, Homo sapiens
  siRNA target sequence for ABCB1 (NM_000927.2,1565-1583).
gggcacaaaccagataata

SEQ ID NO: 69469 - DNA, 19 bp, Homo sapiens
  siRNA target sequence for ABCB1 (NM_000927.2,1605-1623).
gaaatgttcacttcagtta

SEQ ID NO: 69470 - DNA, 19 bp, Homo sapiens
  siRNA target sequence for ABCB1 (NM_000927.2,1620-1638).
gttacccatctcgaaaaga

SEQ ID NO: 69471 - DNA, 19 bp, Homo sapiens
  siRNA target sequence for ABCB1 (NM_000927.2,1624-1642).
cccatctcgaaaagaagtt

SEQ ID NO: 69472 - DNA, 19 bp, Homo sapiens
  siRNA target sequence for ABCB1 (NM_000927.2,1625-1643).
ccatctcgaaaagaagtta

SEQ ID NO: 69473 - DNA, 19 bp, Homo sapiens
  siRNA target sequence for ABCB1 (NM_000927.2,1629-1647).
ctcgaaaagaagttaagat

SEQ ID NO: 69474 - DNA, 19 bp, Homo sapiens
  siRNA target sequence for ABCB1 (NM_000927.2,1765-1783).
ggggatggtcagtgttgat

SEQ ID NO: 69475 - DNA, 19 bp, Homo sapiens
  siRNA target sequence for ABCB1 (NM_000927.2,1776-1794).
gtgttgatggacaggatat

SEQ ID NO: 69476 - DNA, 19 bp, Homo sapiens
  siRNA target sequence for ABCB1 (NM_000927.2,1789-1807).
ggatattaggaccataaat

SEQ ID NO: 69477 - DNA, 19 bp, Homo sapiens
  siRNA target sequence for ABCB1 (NM_000927.2,1801-1819).
cataaatgtaaggtttcta

SEQ ID NO: 69478 - DNA, 19 bp, Homo sapiens
  siRNA target sequence for ABCB1 (NM_000927.2,1812-1830).
ggtttctacgggaaatcat

SEQ ID NO: 69479 - DNA, 19 bp, Homo sapiens
  siRNA target sequence for ABCB1 (NM_000927.2,1813-1831).
gtttctacgggaaatcatt

SEQ ID NO: 69480 - DNA, 19 bp, Homo sapiens
  siRNA target sequence for ABCB1 (NM_000927.2,1866-1884).
ccacgatagctgaaaacat

SEQ ID NO: 69481 - DNA, 19 bp, Homo sapiens
  siRNA target sequence for ABCB1 (NM_000927.2,1937-1955).
gaagccaatgcctatgact

SEQ ID NO: 69482 - DNA, 19 bp, Homo sapiens
  siRNA target sequence for ABCB1 (NM_000927.2,2173-2191).
gatagctcatcgtttgtct

SEQ ID NO: 69483 - DNA, 19 bp, Homo sapiens
  siRNA target sequence for ABCB1 (NM_000927.2,2184-2202).
gtttgtctacagttcgtaa

SEQ ID NO: 69484 - DNA, 19 bp, Homo sapiens
  siRNA target sequence for ABCB1 (NM_000927.2,2188-2206).
gtctacagttcgtaatgct

SEQ ID NO: 69485 - DNA, 19 bp, Homo sapiens
  siRNA target sequence for ABCB1 (NM_000927.2,2209-2227).
cgtcatcgctggtttcgat

SEQ ID NO: 69486 - DNA, 19 bp, Homo sapiens
  siRNA target sequence for ABCB1 (NM_000927.2,2280-2298).
gcatttacttcaaacttgt

SEQ ID NO: 69487 - DNA, 19 bp, Homo sapiens
  siRNA target sequence for ABCB1 (NM_000927.2,2333-2351).
gaaaatgcagctgatgaat

SEQ ID NO: 69488 - DNA, 19 bp, Homo sapiens
  siRNA target sequence for ABCB1 (NM_000927.2,2369-2387).
gccttggaaatgtcttcaa

SEQ ID NO: 69489 - DNA, 19 bp, Homo sapiens
  siRNA target sequence for ABCB1 (NM_000927.2,2431-2449).
gagtgtccgtggatcacaa

SEQ ID NO: 69490 - DNA, 19 bp, Homo sapiens
  siRNA target sequence for ABCB1 (NM_000927.2,2450-2468).
gcccaagacagaaagctta

SEQ ID NO: 69491 - DNA, 19 bp, Homo sapiens
  siRNA target sequence for ABCB1 (NM_000927.2,2458-2476).
cagaaagcttagtaccaaa

SEQ ID NO: 69492 - DNA, 19 bp, Homo sapiens
  siRNA target sequence for ABCB1 (NM_000927.2,2493-2511).
gtatacctccagtttcctt

SEQ ID NO: 69493 - DNA, 19 bp, Homo sapiens
  siRNA target sequence for ABCB1 (NM_000927.2,2538-2556).
ctgaatggccttattttgt

SEQ ID NO: 69494 - DNA, 19 bp, Homo sapiens
  siRNA target sequence for ABCB1 (NM_000927.2,2666-2684).
cgacagaatagtaacttgt

SEQ ID NO: 69495 - DNA, 19 bp, Homo sapiens
  siRNA target sequence for ABCB1 (NM_000927.2,2667-2685).
gacagaatagtaacttgtt

SEQ ID NO: 69496 - DNA, 19 bp, Homo sapiens
  siRNA target sequence for ABCB1 (NM_000927.2,2669-2687).
cagaatagtaacttgtttt

SEQ ID NO: 69497 - DNA, 19 bp, Homo sapiens
  siRNA target sequence for ABCB1 (NM_000927.2,2699-2717).
ctagcccttggaattattt

SEQ ID NO: 69498 - DNA, 19 bp, Homo sapiens
  siRNA target sequence for ABCB1 (NM_000927.2,2775-2793).
ccaagcggctccgatacat

SEQ ID NO: 69499 - DNA, 19 bp, Homo sapiens
  siRNA target sequence for ABCB1 (NM_000927.2,2781-2799).
ggctccgatacatggtttt

SEQ ID NO: 69500 - DNA, 19 bp, Homo sapiens
  siRNA target sequence for ABCB1 (NM_000927.2,2894-2912).
gttaaaggggctataggtt

SEQ ID NO: 69501 - DNA, 19 bp, Homo sapiens
  siRNA target sequence for ABCB1 (NM_000927.2,2922-2940).
ctgtaattacccagaatat

SEQ ID NO: 69502 - DNA, 19 bp, Homo sapiens
  siRNA target sequence for ABCB1 (NM_000927.2,2977-2995).
ctatggttggcaactaaca

SEQ ID NO: 69503 - DNA, 19 bp, Homo sapiens
  siRNA target sequence for ABCB1 (NM_000927.2,2985-3003).
ggcaactaacactgttact

SEQ ID NO: 69504 - DNA, 19 bp, Homo sapiens
  siRNA target sequence for ABCB1 (NM_000927.2,3058-3076).
gtctggacaagcactgaaa

SEQ ID NO: 69505 - DNA, 19 bp, Homo sapiens
  siRNA target sequence for ABCB1 (NM_000927.2,3063-3081).
gacaagcactgaaagataa

SEQ ID NO: 69506 - DNA, 19 bp, Homo sapiens
  siRNA target sequence for ABCB1 (NM_000927.2,3106-3124).
gatcgctactgaagcaata

SEQ ID NO: 69507 - DNA, 19 bp, Homo sapiens
  siRNA target sequence for ABCB1 (NM_000927.2,3109-3127).
cgctactgaagcaatagaa

SEQ ID NO: 69508 - DNA, 19 bp, Homo sapiens
  siRNA target sequence for ABCB1 (NM_000927.2,3130-3148).
cttccgaaccgttgtttct

SEQ ID NO: 69509 - DNA, 19 bp, Homo sapiens
  siRNA target sequence for ABCB1 (NM_000927.2,3134-3152).
cgaaccgttgtttctttga

SEQ ID NO: 69510 - DNA, 19 bp, Homo sapiens
  siRNA target sequence for ABCB1 (NM_000927.2,3194-3212).
caggtaccatacagaaact

SEQ ID NO: 69511 - DNA, 19 bp, Homo sapiens
  siRNA target sequence for ABCB1 (NM_000927.2,3196-3214).
ggtaccatacagaaactct

SEQ ID NO: 69512 - DNA, 19 bp, Homo sapiens
  siRNA target sequence for ABCB1 (NM_000927.2,3331-3349).
ctttgaggatgttctgtta

SEQ ID NO: 69513 - DNA, 19 bp, Homo sapiens
  siRNA target sequence for ABCB1 (NM_000927.2,3383-3401).
gtggggcaagtcagttcat

SEQ ID NO: 69514 - DNA, 19 bp, Homo sapiens
  siRNA target sequence for ABCB1 (NM_000927.2,3435-3453).
cagcccacatcatcatgat

SEQ ID NO: 69515 - DNA, 19 bp, Homo sapiens
  siRNA target sequence for ABCB1 (NM_000927.2,3495-3513).
gcctaatgccgaacacatt

SEQ ID NO: 69516 - DNA, 19 bp, Homo sapiens
  siRNA target sequence for ABCB1 (NM_000927.2,3504-3522).
cgaacacattggaaggaaa

SEQ ID NO: 69517 - DNA, 19 bp, Homo sapiens
  siRNA target sequence for ABCB1 (NM_000927.2,3533-3551).
ggtgaagttgtattcaact

SEQ ID NO: 69518 - DNA, 19 bp, Homo sapiens
  siRNA target sequence for ABCB1 (NM_000927.2,3706-3724).
gcttgatggcaaagaaata

SEQ ID NO: 69519 - DNA, 19 bp, Homo sapiens
  siRNA target sequence for ABCB1 (NM_000927.2,3895-3913).
cgagtcactgcctaataaa

SEQ ID NO: 69520 - DNA, 19 bp, Homo sapiens
  siRNA target sequence for ABCB1 (NM_000927.2,3896-3914).
gagtcactgcctaataaat

SEQ ID NO: 69521 - DNA, 19 bp, Homo sapiens
  siRNA target sequence for ABCB1 (NM_000927.2,3981-3999).
ctcgtgcccttgttagaca

SEQ ID NO: 69522 - DNA, 19 bp, Homo sapiens
  siRNA target sequence for ABCB1 (NM_000927.2,3992-4010).
gttagacagcctcatattt

SEQ ID NO: 69523 - DNA, 19 bp, Homo sapiens
  siRNA target sequence for ABCB10 (NM_012089.1,1099-1117).
gctagctgaggaacgtatt

SEQ ID NO: 69524 - DNA, 19 bp, Homo sapiens
  siRNA target sequence for ABCB10 (NM_012089.1,1108-1126).
ggaacgtattggaaatgta

SEQ ID NO: 69525 - DNA, 19 bp, Homo sapiens
  siRNA target sequence for ABCB10 (NM_012089.1,1109-1127).
gaacgtattggaaatgtaa

SEQ ID NO: 69526 - DNA, 19 bp, Homo sapiens
  siRNA target sequence for ABCB10 (NM_012089.1,1112-1130).
cgtattggaaatgtaagaa

SEQ ID NO: 69527 - DNA, 19 bp, Homo sapiens
  siRNA target sequence for ABCB10 (NM_012089.1,1379-1397).
ggaggtctgagctctttct

SEQ ID NO: 69528 - DNA, 19 bp, Homo sapiens
  siRNA target sequence for ABCB10 (NM_012089.1,1477-1495).
cgagggggtcatcttaaat

SEQ ID NO: 69529 - DNA, 19 bp, Homo sapiens
  siRNA target sequence for ABCB10 (NM_012089.1,1481-1499).
ggggtcatcttaaatgaga

SEQ ID NO: 69530 - DNA, 19 bp, Homo sapiens
  siRNA target sequence for ABCB10 (NM_012089.1,1482-1500).
gggtcatcttaaatgagaa

SEQ ID NO: 69531 - DNA, 19 bp, Homo sapiens
  siRNA target sequence for ABCB10 (NM_012089.1,1508-1526).
cagggtgctttggagttta

SEQ ID NO: 69532 - DNA, 19 bp, Homo sapiens
  siRNA target sequence for ABCB10 (NM_012089.1,1554-1572).
gcccagaggtgcccatatt

SEQ ID NO: 69533 - DNA, 19 bp, Homo sapiens
  siRNA target sequence for ABCB10 (NM_012089.1,1565-1583).
cccatatttcaggatttca

SEQ ID NO: 69534 - DNA, 19 bp, Homo sapiens
  siRNA target sequence for ABCB10 (NM_012089.1,1576-1594).
ggatttcagcctttccatt

SEQ ID NO: 69535 - DNA, 19 bp, Homo sapiens
  siRNA target sequence for ABCB10 (NM_012089.1,1679-1697).
cctgcttctggaactatta

SEQ ID NO: 69536 - DNA, 19 bp, Homo sapiens
  siRNA target sequence for ABCB10 (NM_012089.1,1780-1798).
gttttcttgctctattgct

SEQ ID NO: 69537 - DNA, 19 bp, Homo sapiens
  siRNA target sequence for ABCB10 (NM_012089.1,1833-1851).
ctgtgaccgctgaggaaat

SEQ ID NO: 69538 - DNA, 19 bp, Homo sapiens
  siRNA target sequence for ABCB10 (NM_012089.1,2087-2105).
ggaagaacggtgttagtta

SEQ ID NO: 69539 - DNA, 19 bp, Homo sapiens
  siRNA target sequence for ABCB10 (NM_012089.1,2088-2106).
gaagaacggtgttagttat

SEQ ID NO: 69540 - DNA, 19 bp, Homo sapiens
  siRNA target sequence for ABCB10 (NM_012089.1,2111-2129).
catcgtctgtccaccatta

SEQ ID NO: 69541 - DNA, 19 bp, Homo sapiens
  siRNA target sequence for ABCB10 (NM_012089.1,2114-2132).
cgtctgtccaccattaaga

SEQ ID NO: 69542 - DNA, 19 bp, Homo sapiens
  siRNA target sequence for ABCB10 (NM_012089.1,2207-2225).
ccaaatgggatatacagaa

SEQ ID NO: 69543 - DNA, 19 bp, Homo sapiens
  siRNA target sequence for ABCB11 (NM_003742.2,137-155).
cagtaattcttcgaagtat

SEQ ID NO: 69544 - DNA, 19 bp, Homo sapiens
  siRNA target sequence for ABCB11 (NM_003742.2,139-157).
gtaattcttcgaagtataa

SEQ ID NO: 69545 - DNA, 19 bp, Homo sapiens
  siRNA target sequence for ABCB11 (NM_003742.2,145-163).
cttcgaagtataaagaaat

SEQ ID NO: 69546 - DNA, 19 bp, Homo sapiens
  siRNA target sequence for ABCB11 (NM_003742.2,216-234).
gaaatcaaggttacaagat

SEQ ID NO: 69547 - DNA, 19 bp, Homo sapiens
  siRNA target sequence for ABCB11 (NM_003742.2,252-270).
cgttagagttggcttcttt

SEQ ID NO: 69548 - DNA, 19 bp, Homo sapiens
  siRNA target sequence for ABCB11 (NM_003742.2,259-277).
gttggcttctttcaattgt

SEQ ID NO: 69549 - DNA, 19 bp, Homo sapiens
  siRNA target sequence for ABCB11 (NM_003742.2,271-289).
caattgtttcggttttctt

SEQ ID NO: 69550 - DNA, 19 bp, Homo sapiens
  siRNA target sequence for ABCB11 (NM_003742.2,354-372).
gccaggcgtgctactcatt

SEQ ID NO: 69551 - DNA, 19 bp, Homo sapiens
  siRNA target sequence for ABCB11 (NM_003742.2,355-373).
ccaggcgtgctactcattt

SEQ ID NO: 69552 - DNA, 19 bp, Homo sapiens
  siRNA target sequence for ABCB11 (NM_003742.2,356-374).
caggcgtgctactcatttt

SEQ ID NO: 69553 - DNA, 19 bp, Homo sapiens
  siRNA target sequence for ABCB11 (NM_003742.2,367-385).
ctcatttttggcacaatga

SEQ ID NO: 69554 - DNA, 19 bp, Homo sapiens
  siRNA target sequence for ABCB11 (NM_003742.2,369-387).
catttttggcacaatgaca

SEQ ID NO: 69555 - DNA, 19 bp, Homo sapiens
  siRNA target sequence for ABCB11 (NM_003742.2,380-398).
caatgacagatgtttttat

SEQ ID NO: 69556 - DNA, 19 bp, Homo sapiens
  siRNA target sequence for ABCB11 (NM_003742.2,402-420).
ctacgacgttgagttacaa

SEQ ID NO: 69557 - DNA, 19 bp, Homo sapiens
  siRNA target sequence for ABCB11 (NM_003742.2,405-423).
cgacgttgagttacaagaa

SEQ ID NO: 69558 - DNA, 19 bp, Homo sapiens
  siRNA target sequence for ABCB11 (NM_003742.2,481-499).
ctcaaccagaacatgacaa

SEQ ID NO: 69559 - DNA, 19 bp, Homo sapiens
  siRNA target sequence for ABCB11 (NM_003742.2,528-546).
cgagagcgaaatgatcaaa

SEQ ID NO: 69560 - DNA, 19 bp, Homo sapiens
  siRNA target sequence for ABCB11 (NM_003742.2,543-561).
caaatttgccagttactat

SEQ ID NO: 69561 - DNA, 19 bp, Homo sapiens
  siRNA target sequence for ABCB11 (NM_003742.2,552-570).
cagttactatgctggaatt

SEQ ID NO: 69562 - DNA, 19 bp, Homo sapiens
  siRNA target sequence for ABCB11 (NM_003742.2,588-606).
cacaggatatattcaaata

SEQ ID NO: 69563 - DNA, 19 bp, Homo sapiens
  siRNA target sequence for ABCB11 (NM_003742.2,593-611).
gatatattcaaatatgctt

SEQ ID NO: 69564 - DNA, 19 bp, Homo sapiens
  siRNA target sequence for ABCB11 (NM_003742.2,623-641).
ccgcagctcgtcagataca

SEQ ID NO: 69565 - DNA, 19 bp, Homo sapiens
  siRNA target sequence for ABCB11 (NM_003742.2,625-643).
gcagctcgtcagatacaga

SEQ ID NO: 69566 - DNA, 19 bp, Homo sapiens
  siRNA target sequence for ABCB11 (NM_003742.2,626-644).
cagctcgtcagatacagaa

SEQ ID NO: 69567 - DNA, 19 bp, Homo sapiens
  siRNA target sequence for ABCB11 (NM_003742.2,629-647).
ctcgtcagatacagaaaat

SEQ ID NO: 69568 - DNA, 19 bp, Homo sapiens
  siRNA target sequence for ABCB11 (NM_003742.2,690-708).
gtggtttgactgcaattca

SEQ ID NO: 69569 - DNA, 19 bp, Homo sapiens
  siRNA target sequence for ABCB11 (NM_003742.2,711-729).
gggggagctgaatacaaga

SEQ ID NO: 69570 - DNA, 19 bp, Homo sapiens
  siRNA target sequence for ABCB11 (NM_003742.2,713-731).
gggagctgaatacaagatt

SEQ ID NO: 69571 - DNA, 19 bp, Homo sapiens
  siRNA target sequence for ABCB11 (NM_003742.2,842-860).
ggaaactgaccttggttat

SEQ ID NO: 69572 - DNA, 19 bp, Homo sapiens
  siRNA target sequence for ABCB11 (NM_003742.2,976-994).
gtcatttcatcaatgagaa

SEQ ID NO: 69573 - DNA, 19 bp, Homo sapiens
  siRNA target sequence for ABCB11 (NM_003742.2,1057-1075).
gcccagcgttggggaatta

SEQ ID NO: 69574 - DNA, 19 bp, Homo sapiens
  siRNA target sequence for ABCB11 (NM_003742.2,1059-1077).
ccagcgttggggaattaga

SEQ ID NO: 69575 - DNA, 19 bp, Homo sapiens
  siRNA target sequence for ABCB11 (NM_003742.2,1062-1080).
gcgttggggaattagaaaa

SEQ ID NO: 69576 - DNA, 19 bp, Homo sapiens
  siRNA target sequence for ABCB11 (NM_003742.2,1299-1317).
cagcatttttgagacaata

SEQ ID NO: 69577 - DNA, 19 bp, Homo sapiens
  siRNA target sequence for ABCB11 (NM_003742.2,1340-1358).
gcatgtcagaagatggtta

SEQ ID NO: 69578 - DNA, 19 bp, Homo sapiens
  siRNA target sequence for ABCB11 (NM_003742.2,1346-1364).
cagaagatggttacaagtt

SEQ ID NO: 69579 - DNA, 19 bp, Homo sapiens
  siRNA target sequence for ABCB11 (NM_003742.2,1355-1373).
gttacaagttggatcgaat

SEQ ID NO: 69580 - DNA, 19 bp, Homo sapiens
  siRNA target sequence for ABCB11 (NM_003742.2,1446-1464).
cctcaacatggtcattaaa

SEQ ID NO: 69581 - DNA, 19 bp, Homo sapiens
  siRNA target sequence for ABCB11 (NM_003742.2,1514-1532).
cagcactgcaactcattca

SEQ ID NO: 69582 - DNA, 19 bp, Homo sapiens
  siRNA target sequence for ABCB11 (NM_003742.2,1565-1583).
ccgtggatggccatgacat

SEQ ID NO: 69583 - DNA, 19 bp, Homo sapiens
  siRNA target sequence for ABCB11 (NM_003742.2,1566-1584).
cgtggatggccatgacatt

SEQ ID NO: 69584 - DNA, 19 bp, Homo sapiens
  siRNA target sequence for ABCB11 (NM_003742.2,1585-1603).
cgctctcttaacattcagt

SEQ ID NO: 69585 - DNA, 19 bp, Homo sapiens
  siRNA target sequence for ABCB11 (NM_003742.2,1602-1620).
gtggcttagagatcagatt

SEQ ID NO: 69586 - DNA, 19 bp, Homo sapiens
  siRNA target sequence for ABCB11 (NM_003742.2,1652-1670).
ctaccaccattgcagaaaa

SEQ ID NO: 69587 - DNA, 19 bp, Homo sapiens
  siRNA target sequence for ABCB11 (NM_003742.2,1883-1901).
cctcagctctggacaatga

SEQ ID NO: 69588 - DNA, 19 bp, Homo sapiens
  siRNA target sequence for ABCB11 (NM_003742.2,1939-1957).
cagcatgggcacacaatca

SEQ ID NO: 69589 - DNA, 19 bp, Homo sapiens
  siRNA target sequence for ABCB11 (NM_003742.2,1941-1959).
gcatgggcacacaatcatt

SEQ ID NO: 69590 - DNA, 19 bp, Homo sapiens
  siRNA target sequence for ABCB11 (NM_003742.2,1963-1981).
gttgctcatcgcttgtcta

SEQ ID NO: 69591 - DNA, 19 bp, Homo sapiens
  siRNA target sequence for ABCB11 (NM_003742.2,2001-2019).
catcattggttttgaacat

SEQ ID NO: 69592 - DNA, 19 bp, Homo sapiens
  siRNA target sequence for ABCB11 (NM_003742.2,2039-2057).
ggacccatgaagaattact

SEQ ID NO: 69593 - DNA, 19 bp, Homo sapiens
  siRNA target sequence for ABCB11 (NM_003742.2,2079-2097).
cactctagtgactttgcaa

SEQ ID NO: 69594 - DNA, 19 bp, Homo sapiens
  siRNA target sequence for ABCB11 (NM_003742.2,2103-2121).
gggaaatcaagctcttaat

SEQ ID NO: 69595 - DNA, 19 bp, Homo sapiens
  siRNA target sequence for ABCB11 (NM_003742.2,2158-2176).
cttgcgaggacctttagca

SEQ ID NO: 69596 - DNA, 19 bp, Homo sapiens
  siRNA target sequence for ABCB11 (NM_003742.2,2179-2197).
gggagctaccaggatagtt

SEQ ID NO: 69597 - DNA, 19 bp, Homo sapiens
  siRNA target sequence for ABCB11 (NM_003742.2,2180-2198).
ggagctaccaggatagttt

SEQ ID NO: 69598 - DNA, 19 bp, Homo sapiens
  siRNA target sequence for ABCB11 (NM_003742.2,2181-2199).
gagctaccaggatagttta

SEQ ID NO: 69599 - DNA, 19 bp, Homo sapiens
  siRNA target sequence for ABCB11 (NM_003742.2,2244-2262).
ggtgcacgaacctccatta

SEQ ID NO: 69600 - DNA, 19 bp, Homo sapiens
  siRNA target sequence for ABCB11 (NM_003742.2,2247-2265).
gcacgaacctccattagct

SEQ ID NO: 69601 - DNA, 19 bp, Homo sapiens
  siRNA target sequence for ABCB11 (NM_003742.2,2255-2273).
ctccattagctgttgtaga

SEQ ID NO: 69602 - DNA, 19 bp, Homo sapiens
  siRNA target sequence for ABCB11 (NM_003742.2,2258-2276).
cattagctgttgtagatca

SEQ ID NO: 69603 - DNA, 19 bp, Homo sapiens
  siRNA target sequence for ABCB11 (NM_003742.2,2263-2281).
gctgttgtagatcataagt

SEQ ID NO: 69604 - DNA, 19 bp, Homo sapiens
  siRNA target sequence for ABCB11 (NM_003742.2,2424-2442).
gacagtcacacccttgtat

SEQ ID NO: 69605 - DNA, 19 bp, Homo sapiens
  siRNA target sequence for ABCB11 (NM_003742.2,2434-2452).
cccttgtatgcctttttat

SEQ ID NO: 69606 - DNA, 19 bp, Homo sapiens
  siRNA target sequence for ABCB11 (NM_003742.2,2460-2478).
gattcttgggactttttca

SEQ ID NO: 69607 - DNA, 19 bp, Homo sapiens
  siRNA target sequence for ABCB11 (NM_003742.2,2522-2540).
gcctactttttgtagcaat

SEQ ID NO: 69608 - DNA, 19 bp, Homo sapiens
  siRNA target sequence for ABCB11 (NM_003742.2,2572-2590).
cagggatatgcctttgcta

SEQ ID NO: 69609 - DNA, 19 bp, Homo sapiens
  siRNA target sequence for ABCB11 (NM_003742.2,2594-2612).
ctggggagctcctaacaaa

SEQ ID NO: 69610 - DNA, 19 bp, Homo sapiens
  siRNA target sequence for ABCB11 (NM_003742.2,2609-2627).
caaaaaggctacgtaaatt

SEQ ID NO: 69611 - DNA, 19 bp, Homo sapiens
  siRNA target sequence for ABCB11 (NM_003742.2,2615-2633).
ggctacgtaaatttggttt

SEQ ID NO: 69612 - DNA, 19 bp, Homo sapiens
  siRNA target sequence for ABCB11 (NM_003742.2,2686-2704).
cctggagcattgacaacaa

SEQ ID NO: 69613 - DNA, 19 bp, Homo sapiens
  siRNA target sequence for ABCB11 (NM_003742.2,2745-2763).
ctctcagatcgggatgata

SEQ ID NO: 69614 - DNA, 19 bp, Homo sapiens
  siRNA target sequence for ABCB11 (NM_003742.2,2747-2765).
ctcagatcgggatgatagt

SEQ ID NO: 69615 - DNA, 19 bp, Homo sapiens
  siRNA target sequence for ABCB11 (NM_003742.2,2749-2767).
cagatcgggatgatagtca

SEQ ID NO: 69616 - DNA, 19 bp, Homo sapiens
  siRNA target sequence for ABCB11 (NM_003742.2,2751-2769).
gatcgggatgatagtcaat

SEQ ID NO: 69617 - DNA, 19 bp, Homo sapiens
  siRNA target sequence for ABCB11 (NM_003742.2,2755-2773).
gggatgatagtcaattcct

SEQ ID NO: 69618 - DNA, 19 bp, Homo sapiens
  siRNA target sequence for ABCB11 (NM_003742.2,2756-2774).
ggatgatagtcaattcctt

SEQ ID NO: 69619 - DNA, 19 bp, Homo sapiens
  siRNA target sequence for ABCB11 (NM_003742.2,2784-2802).
cactgtggccatgatcatt

SEQ ID NO: 69620 - DNA, 19 bp, Homo sapiens
  siRNA target sequence for ABCB11 (NM_003742.2,2883-2901).
caggatgttgacaggattt

SEQ ID NO: 69621 - DNA, 19 bp, Homo sapiens
  siRNA target sequence for ABCB11 (NM_003742.2,2897-2915).
gatttgcctctcgagataa

SEQ ID NO: 69622 - DNA, 19 bp, Homo sapiens
  siRNA target sequence for ABCB11 (NM_003742.2,2928-2946).
gatggtgggacagattaca

SEQ ID NO: 69623 - DNA, 19 bp, Homo sapiens
  siRNA target sequence for ABCB11 (NM_003742.2,2931-2949).
ggtgggacagattacaaat

SEQ ID NO: 69624 - DNA, 19 bp, Homo sapiens
  siRNA target sequence for ABCB11 (NM_003742.2,2934-2952).
gggacagattacaaatgaa

SEQ ID NO: 69625 - DNA, 19 bp, Homo sapiens
  siRNA target sequence for ABCB11 (NM_003742.2,2945-2963).
caaatgaagccctcagtaa

SEQ ID NO: 69626 - DNA, 19 bp, Homo sapiens
  siRNA target sequence for ABCB11 (NM_003742.2,2967-2985).
ccgcactgttgctggaatt

SEQ ID NO: 69627 - DNA, 19 bp, Homo sapiens
  siRNA target sequence for ABCB11 (NM_003742.2,2991-3009).
ggagaggcggttcattgaa

SEQ ID NO: 69628 - DNA, 19 bp, Homo sapiens
  siRNA target sequence for ABCB11 (NM_003742.2,3126-3144).
cagatatggaggttactta

SEQ ID NO: 69629 - DNA, 19 bp, Homo sapiens
  siRNA target sequence for ABCB11 (NM_003742.2,3128-3146).
gatatggaggttacttaat

SEQ ID NO: 69630 - DNA, 19 bp, Homo sapiens
  siRNA target sequence for ABCB11 (NM_003742.2,3183-3201).
ggtgatctctgcagttgta

SEQ ID NO: 69631 - DNA, 19 bp, Homo sapiens
  siRNA target sequence for ABCB11 (NM_003742.2,3220-3238).
ggaagagccttctcttaca

SEQ ID NO: 69632 - DNA, 19 bp, Homo sapiens
  siRNA target sequence for ABCB11 (NM_003742.2,3231-3249).
ctcttacaccccaagttat

SEQ ID NO: 69633 - DNA, 19 bp, Homo sapiens
  siRNA target sequence for ABCB11 (NM_003742.2,3237-3255).
caccccaagttatgcaaaa

SEQ ID NO: 69634 - DNA, 19 bp, Homo sapiens
  siRNA target sequence for ABCB11 (NM_003742.2,3240-3258).
cccaagttatgcaaaagct

SEQ ID NO: 69635 - DNA, 19 bp, Homo sapiens
  siRNA target sequence for ABCB11 (NM_003742.2,3245-3263).
gttatgcaaaagctaaaat

SEQ ID NO: 69636 - DNA, 19 bp, Homo sapiens
  siRNA target sequence for ABCB11 (NM_003742.2,3266-3284).
cagctgcacgcttttttca

SEQ ID NO: 69637 - DNA, 19 bp, Homo sapiens
  siRNA target sequence for ABCB11 (NM_003742.2,3269-3287).
ctgcacgcttttttcaact

SEQ ID NO: 69638 - DNA, 19 bp, Homo sapiens
  siRNA target sequence for ABCB11 (NM_003742.2,3294-3312).
ccgacaacccccaatcagt

SEQ ID NO: 69639 - DNA, 19 bp, Homo sapiens
  siRNA target sequence for ABCB11 (NM_003742.2,3301-3319).
cccccaatcagtgtataca

SEQ ID NO: 69640 - DNA, 19 bp, Homo sapiens
  siRNA target sequence for ABCB11 (NM_003742.2,3302-3320).
ccccaatcagtgtatacaa

SEQ ID NO: 69641 - DNA, 19 bp, Homo sapiens
  siRNA target sequence for ABCB11 (NM_003742.2,3303-3321).
cccaatcagtgtatacaat

SEQ ID NO: 69642 - DNA, 19 bp, Homo sapiens
  siRNA target sequence for ABCB11 (NM_003742.2,3395-3413).
gacctgactcgcaagttct

SEQ ID NO: 69643 - DNA, 19 bp, Homo sapiens
  siRNA target sequence for ABCB11 (NM_003742.2,3498-3516).
gctgttggaacgtttctat

SEQ ID NO: 69644 - DNA, 19 bp, Homo sapiens
  siRNA target sequence for ABCB11 (NM_003742.2,3501-3519).
gttggaacgtttctatgat

SEQ ID NO: 69645 - DNA, 19 bp, Homo sapiens
  siRNA target sequence for ABCB11 (NM_003742.2,3544-3562).
gatggtcatgacagcaaaa

SEQ ID NO: 69646 - DNA, 19 bp, Homo sapiens
  siRNA target sequence for ABCB11 (NM_003742.2,3580-3598).
ctccgctcaaacattggaa

SEQ ID NO: 69647 - DNA, 19 bp, Homo sapiens
  siRNA target sequence for ABCB11 (NM_003742.2,3582-3600).
ccgctcaaacattggaatt

SEQ ID NO: 69648 - DNA, 19 bp, Homo sapiens
  siRNA target sequence for ABCB11 (NM_003742.2,3584-3602).
gctcaaacattggaattgt

SEQ ID NO: 69649 - DNA, 19 bp, Homo sapiens
  siRNA target sequence for ABCB11 (NM_003742.2,3618-3636).
gttgtttgcctgtagcata

SEQ ID NO: 69650 - DNA, 19 bp, Homo sapiens
  siRNA target sequence for ABCB11 (NM_003742.2,3629-3647).
gtagcataatggacaatat

SEQ ID NO: 69651 - DNA, 19 bp, Homo sapiens
  siRNA target sequence for ABCB11 (NM_003742.2,3632-3650).
gcataatggacaatatcaa

SEQ ID NO: 69652 - DNA, 19 bp, Homo sapiens
  siRNA target sequence for ABCB11 (NM_003742.2,3710-3728).
ctcagctgcatgattttgt

SEQ ID NO: 69653 - DNA, 19 bp, Homo sapiens
  siRNA target sequence for ABCB11 (NM_003742.2,3732-3750).
gtcactcccagagaaatat

SEQ ID NO: 69654 - DNA, 19 bp, Homo sapiens
  siRNA target sequence for ABCB11 (NM_003742.2,3783-3801).
ctctagaggggagaaacaa

SEQ ID NO: 69655 - DNA, 19 bp, Homo sapiens
  siRNA target sequence for ABCB11 (NM_003742.2,3821-3839).
ccattgtacgagatcctaa

SEQ ID NO: 69656 - DNA, 19 bp, Homo sapiens
  siRNA target sequence for ABCB11 (NM_003742.2,3822-3840).
cattgtacgagatcctaaa

SEQ ID NO: 69657 - DNA, 19 bp, Homo sapiens
  siRNA target sequence for ABCB11 (NM_003742.2,3826-3844).
gtacgagatcctaaaatct

SEQ ID NO: 69658 - DNA, 19 bp, Homo sapiens
  siRNA target sequence for ABCB11 (NM_003742.2,3926-3944).
gtcggacctgcattgtcat

SEQ ID NO: 69659 - DNA, 19 bp, Homo sapiens
  siRNA target sequence for ABCB11 (NM_003742.2,3966-3984).
ccagaacgcggatatcatt

SEQ ID NO: 69660 - DNA, 19 bp, Homo sapiens
  siRNA target sequence for ABCB11 (NM_003742.2,4049-4067).
gagcctactacaaactagt

SEQ ID NO: 69661 - DNA, 19 bp, Homo sapiens
  siRNA target sequence for ABCB4 (NM_000443.2,1919-1937).
gcgcggagggcgactttga

SEQ ID NO: 69662 - DNA, 19 bp, Homo sapiens
  siRNA target sequence for ABCB4 (NM_000443.2,1922-1940).
cggagggcgactttgaact

SEQ ID NO: 69663 - DNA, 19 bp, Homo sapiens
  siRNA target sequence for ABCB4 (NM_000443.2,2016-2034).
ctccgattggcaggataaa

SEQ ID NO: 69664 - DNA, 19 bp, Homo sapiens
  siRNA target sequence for ABCB4 (NM_000443.2,2018-2036).
ccgattggcaggataaatt

SEQ ID NO: 69665 - DNA, 19 bp, Homo sapiens
  siRNA target sequence for ABCB4 (NM_000443.2,2020-2038).
gattggcaggataaattgt

SEQ ID NO: 69666 - DNA, 19 bp, Homo sapiens
  siRNA target sequence for ABCB4 (NM_000443.2,2078-2096).
caggtctccccctcatgat

SEQ ID NO: 69667 - DNA, 19 bp, Homo sapiens
  siRNA target sequence for ABCB4 (NM_000443.2,2081-2099).
gtctccccctcatgatgat

SEQ ID NO: 69668 - DNA, 19 bp, Homo sapiens
  siRNA target sequence for ABCB4 (NM_000443.2,2086-2104).
cccctcatgatgatagtat

SEQ ID NO: 69669 - DNA, 19 bp, Homo sapiens
  siRNA target sequence for ABCB4 (NM_000443.2,2107-2125).
ggagagatgactgacaaat

SEQ ID NO: 69670 - DNA, 19 bp, Homo sapiens
  siRNA target sequence for ABCB4 (NM_000443.2,2260-2278).
gctgcctatatacaagttt

SEQ ID NO: 69671 - DNA, 19 bp, Homo sapiens
  siRNA target sequence for ABCB4 (NM_000443.2,2263-2281).
gcctatatacaagtttcat

SEQ ID NO: 69672 - DNA, 19 bp, Homo sapiens
  siRNA target sequence for ABCB4 (NM_000443.2,2302-2320).
cgacagatcaggaaaatta

SEQ ID NO: 69673 - DNA, 19 bp, Homo sapiens
  siRNA target sequence for ABCB4 (NM_000443.2,2339-2357).
ctattctacgacaggaaat

SEQ ID NO: 69674 - DNA, 19 bp, Homo sapiens
  siRNA target sequence for ABCB4 (NM_000443.2,2377-2395).
gacaccactgaactcaata

SEQ ID NO: 69675 - DNA, 19 bp, Homo sapiens
  siRNA target sequence for ABCB4 (NM_000443.2,2391-2409).
caatacgcggctaacagat

SEQ ID NO: 69676 - DNA, 19 bp, Homo sapiens
  siRNA target sequence for ABCB4 (NM_000443.2,2417-2435).
ccaaaatcagtgaaggaat

SEQ ID NO: 69677 - DNA, 19 bp, Homo sapiens
  siRNA target sequence for ABCB4 (NM_000443.2,2461-2479).
caagcagtagccacgtttt

SEQ ID NO: 69678 - DNA, 19 bp, Homo sapiens
  siRNA target sequence for ABCB4 (NM_000443.2,2474-2492).
cgttttttgcaggattcat

SEQ ID NO: 69679 - DNA, 19 bp, Homo sapiens
  siRNA target sequence for ABCB4 (NM_000443.2,2475-2493).
gttttttgcaggattcata

SEQ ID NO: 69680 - DNA, 19 bp, Homo sapiens
  siRNA target sequence for ABCB4 (NM_000443.2,2535-2553).
ggccatcagccctattcta

SEQ ID NO: 69681 - DNA, 19 bp, Homo sapiens
  siRNA target sequence for ABCB4 (NM_000443.2,2564-2582).
cagccgtttgggcaaagat

SEQ ID NO: 69682 - DNA, 19 bp, Homo sapiens
  siRNA target sequence for ABCB4 (NM_000443.2,2588-2606).
cggcatttagtgacaaaga

SEQ ID NO: 69683 - DNA, 19 bp, Homo sapiens
  siRNA target sequence for ABCB4 (NM_000443.2,2655-2673).
ggccatcaggactgtgata

SEQ ID NO: 69684 - DNA, 19 bp, Homo sapiens
  siRNA target sequence for ABCB4 (NM_000443.2,2695-2713).
gagctggaaaggtatcaga

SEQ ID NO: 69685 - DNA, 19 bp, Homo sapiens
  siRNA target sequence for ABCB4 (NM_000443.2,2776-2794).
ggtattgccttcctgttaa

SEQ ID NO: 69686 - DNA, 19 bp, Homo sapiens
  siRNA target sequence for ABCB4 (NM_000443.2,2827-2845).
ggatccactctagtcatat

SEQ ID NO: 69687 - DNA, 19 bp, Homo sapiens
  siRNA target sequence for ABCB4 (NM_000443.2,2832-2850).
cactctagtcatatcaaaa

SEQ ID NO: 69688 - DNA, 19 bp, Homo sapiens
  siRNA target sequence for ABCB4 (NM_000443.2,2834-2852).
ctctagtcatatcaaaaga

SEQ ID NO: 69689 - DNA, 19 bp, Homo sapiens
  siRNA target sequence for ABCB4 (NM_000443.2,2915-2933).
gccaggctgccccatgtat

SEQ ID NO: 69690 - DNA, 19 bp, Homo sapiens
  siRNA target sequence for ABCB4 (NM_000443.2,2924-2942).
ccccatgtattgatgcttt

SEQ ID NO: 69691 - DNA, 19 bp, Homo sapiens
  siRNA target sequence for ABCB4 (NM_000443.2,2970-2988).
gatctttgatattattgat

SEQ ID NO: 69692 - DNA, 19 bp, Homo sapiens
  siRNA target sequence for ABCB4 (NM_000443.2,3038-3056).
gcatcaaagggaatttgga

SEQ ID NO: 69693 - DNA, 19 bp, Homo sapiens
  siRNA target sequence for ABCB4 (NM_000443.2,3057-3075).
gttcaatgatgttcacttt

SEQ ID NO: 69694 - DNA, 19 bp, Homo sapiens
  siRNA target sequence for ABCB4 (NM_000443.2,3086-3104).
ctcgagctaacgtcaagat

SEQ ID NO: 69695 - DNA, 19 bp, Homo sapiens
  siRNA target sequence for ABCB4 (NM_000443.2,3088-3106).
cgagctaacgtcaagatct

SEQ ID NO: 69696 - DNA, 19 bp, Homo sapiens
  siRNA target sequence for ABCB4 (NM_000443.2,3089-3107).
gagctaacgtcaagatctt

SEQ ID NO: 69697 - DNA, 19 bp, Homo sapiens
  siRNA target sequence for ABCB4 (NM_000443.2,3214-3232).
cctgatgagggcacaatta

SEQ ID NO: 69698 - DNA, 19 bp, Homo sapiens
  siRNA target sequence for ABCB4 (NM_000443.2,3215-3233).
ctgatgagggcacaattaa

SEQ ID NO: 69699 - DNA, 19 bp, Homo sapiens
  siRNA target sequence for ABCB4 (NM_000443.2,3217-3235).
gatgagggcacaattaaca

SEQ ID NO: 69700 - DNA, 19 bp, Homo sapiens
  siRNA target sequence for ABCB4 (NM_000443.2,3222-3240).
gggcacaattaacattgat

SEQ ID NO: 69701 - DNA, 19 bp, Homo sapiens
  siRNA target sequence for ABCB4 (NM_000443.2,3304-3322).
gagccggtgctgttttcca

SEQ ID NO: 69702 - DNA, 19 bp, Homo sapiens
  siRNA target sequence for ABCB4 (NM_000443.2,3361-3379).
gtaaccatggatgagataa

SEQ ID NO: 69703 - DNA, 19 bp, Homo sapiens
  siRNA target sequence for ABCB4 (NM_000443.2,3396-3414).
ggccaacgcctatgagttt

SEQ ID NO: 69704 - DNA, 19 bp, Homo sapiens
  siRNA target sequence for ABCB4 (NM_000443.2,3420-3438).
gaaattaccacagaaattt

SEQ ID NO: 69705 - DNA, 19 bp, Homo sapiens
  siRNA target sequence for ABCB4 (NM_000443.2,3645-3663).
gtctacggtccgaaatgca

SEQ ID NO: 69706 - DNA, 19 bp, Homo sapiens
  siRNA target sequence for ABCB4 (NM_000443.2,3677-3695).
ggtttgaggatggagtaat

SEQ ID NO: 69707 - DNA, 19 bp, Homo sapiens
  siRNA target sequence for ABCB4 (NM_000443.2,3707-3725).
gaagccacagcgaactgat

SEQ ID NO: 69708 - DNA, 19 bp, Homo sapiens
  siRNA target sequence for ABCB4 (NM_000443.2,3710-3728).
gccacagcgaactgatgaa

SEQ ID NO: 69709 - DNA, 19 bp, Homo sapiens
  siRNA target sequence for ABCB4 (NM_000443.2,3737-3755).
gggtgtacttcaaacttgt

SEQ ID NO: 69710 - DNA, 19 bp, Homo sapiens
  siRNA target sequence for ABCB4 (NM_000443.2,3778-3796).
cagatccagtcagaagaat

SEQ ID NO: 69711 - DNA, 19 bp, Homo sapiens
  siRNA target sequence for ABCB4 (NM_000443.2,3832-3850).
gccccaaatggctggaaat

SEQ ID NO: 69712 - DNA, 19 bp, Homo sapiens
  siRNA target sequence for ABCB4 (NM_000443.2,3843-3861).
ctggaaatctcgcctattt

SEQ ID NO: 69713 - DNA, 19 bp, Homo sapiens
  siRNA target sequence for ABCB4 (NM_000443.2,3853-3871).
cgcctatttaggcattcta

SEQ ID NO: 69714 - DNA, 19 bp, Homo sapiens
  siRNA target sequence for ABCB4 (NM_000443.2,3855-3873).
cctatttaggcattctact

SEQ ID NO: 69715 - DNA, 19 bp, Homo sapiens
  siRNA target sequence for ABCB4 (NM_000443.2,3926-3944).
ccgatggacttgaagcaaa

SEQ ID NO: 69716 - DNA, 19 bp, Homo sapiens
  siRNA target sequence for ABCB4 (NM_000443.2,3927-3945).
cgatggacttgaagcaaat

SEQ ID NO: 69717 - DNA, 19 bp, Homo sapiens
  siRNA target sequence for ABCB4 (NM_000443.2,4039-4057).
gggcttcagccggcatttt

SEQ ID NO: 69718 - DNA, 19 bp, Homo sapiens
  siRNA target sequence for ABCB4 (NM_000443.2,4041-4059).
gcttcagccggcattttca

SEQ ID NO: 69719 - DNA, 19 bp, Homo sapiens
  siRNA target sequence for ABCB4 (NM_000443.2,4047-4065).
gccggcattttcagtcata

SEQ ID NO: 69720 - DNA, 19 bp, Homo sapiens
  siRNA target sequence for ABCB4 (NM_000443.2,4048-4066).
ccggcattttcagtcatat

SEQ ID NO: 69721 - DNA, 19 bp, Homo sapiens
  siRNA target sequence for ABCB4 (NM_000443.2,4049-4067).
cggcattttcagtcatatt

SEQ ID NO: 69722 - DNA, 19 bp, Homo sapiens
  siRNA target sequence for ABCB4 (NM_000443.2,4051-4069).
gcattttcagtcatattct

SEQ ID NO: 69723 - DNA, 19 bp, Homo sapiens
  siRNA target sequence for ABCB4 (NM_000443.2,4070-4088).
cagagatcatagcgatttt

SEQ ID NO: 69724 - DNA, 19 bp, Homo sapiens
  siRNA target sequence for ABCB4 (NM_000443.2,4114-4132).
cagcagaagtgcaacatat

SEQ ID NO: 69725 - DNA, 19 bp, Homo sapiens
  siRNA target sequence for ABCB4 (NM_000443.2,4117-4135).
cagaagtgcaacatattct

SEQ ID NO: 69726 - DNA, 19 bp, Homo sapiens
  siRNA target sequence for ABCB4 (NM_000443.2,4231-4249).
ctgcggtcaatggctttta

SEQ ID NO: 69727 - DNA, 19 bp, Homo sapiens
  siRNA target sequence for ABCB4 (NM_000443.2,4242-4260).
ggcttttaaagcaatgcta

SEQ ID NO: 69728 - DNA, 19 bp, Homo sapiens
  siRNA target sequence for ABCB4 (NM_000443.2,4243-4261).
gcttttaaagcaatgctaa

SEQ ID NO: 69729 - DNA, 19 bp, Homo sapiens
  siRNA target sequence for ABCB4 (NM_000443.2,4296-4314).
cagtactggtgcactttct

SEQ ID NO: 69730 - DNA, 19 bp, Homo sapiens
  siRNA target sequence for ABCB4 (NM_000443.2,4396-4414).
cttggaactggtattatca

SEQ ID NO: 69731 - DNA, 19 bp, Homo sapiens
  siRNA target sequence for ABCB4 (NM_000443.2,4399-4417).
ggaactggtattatcatat

SEQ ID NO: 69732 - DNA, 19 bp, Homo sapiens
  siRNA target sequence for ABCB4 (NM_000443.2,4403-4421).
ctggtattatcatatcatt

SEQ ID NO: 69733 - DNA, 19 bp, Homo sapiens
  siRNA target sequence for ABCB4 (NM_000443.2,4434-4452).
gcagttaaccctattgcta

SEQ ID NO: 69734 - DNA, 19 bp, Homo sapiens
  siRNA target sequence for ABCB4 (NM_000443.2,4437-4455).
gttaaccctattgctatta

SEQ ID NO: 69735 - DNA, 19 bp, Homo sapiens
  siRNA target sequence for ABCB4 (NM_000443.2,4618-4636).
gaatcaatgtatgttgaaa

SEQ ID NO: 69736 - DNA, 19 bp, Homo sapiens
  siRNA target sequence for ABCB4 (NM_000443.2,4725-4743).
ctatgccggttgttttcga

SEQ ID NO: 69737 - DNA, 19 bp, Homo sapiens
  siRNA target sequence for ABCB4 (NM_000443.2,4731-4749).
cggttgttttcgatttggt

SEQ ID NO: 69738 - DNA, 19 bp, Homo sapiens
  siRNA target sequence for ABCB4 (NM_000443.2,4741-4759).
cgatttggtgcatatctca

SEQ ID NO: 69739 - DNA, 19 bp, Homo sapiens
  siRNA target sequence for ABCB4 (NM_000443.2,4742-4760).
gatttggtgcatatctcat

SEQ ID NO: 69740 - DNA, 19 bp, Homo sapiens
  siRNA target sequence for ABCB4 (NM_000443.2,4831-4849).
ctaggacatgccagttcat

SEQ ID NO: 69741 - DNA, 19 bp, Homo sapiens
  siRNA target sequence for ABCB4 (NM_000443.2,4855-4873).
ccagactatgctaaagcta

SEQ ID NO: 69742 - DNA, 19 bp, Homo sapiens
  siRNA target sequence for ABCB4 (NM_000443.2,4856-4874).
cagactatgctaaagctaa

SEQ ID NO: 69743 - DNA, 19 bp, Homo sapiens
  siRNA target sequence for ABCB4 (NM_000443.2,4880-4898).
ctgcagcccacttattcat

SEQ ID NO: 69744 - DNA, 19 bp, Homo sapiens
  siRNA target sequence for ABCB4 (NM_000443.2,4943-4961).
ggctgaagcctgataaatt

SEQ ID NO: 69745 - DNA, 19 bp, Homo sapiens
  siRNA target sequence for ABCB4 (NM_000443.2,4944-4962).
gctgaagcctgataaattt

SEQ ID NO: 69746 - DNA, 19 bp, Homo sapiens
  siRNA target sequence for ABCB4 (NM_000443.2,5217-5235).
gtctcaggagcctatccta

SEQ ID NO: 69747 - DNA, 19 bp, Homo sapiens
  siRNA target sequence for ABCB4 (NM_000443.2,5316-5334).
caaagctgccaacatacat

SEQ ID NO: 69748 - DNA, 19 bp, Homo sapiens
  siRNA target sequence for ABCB4 (NM_000443.2,5321-5339).
ctgccaacatacatccttt

SEQ ID NO: 69749 - DNA, 19 bp, Homo sapiens
  siRNA target sequence for ABCB4 (NM_000443.2,5344-5362).
gagacgttaccccacaaat

SEQ ID NO: 69750 - DNA, 19 bp, Homo sapiens
  siRNA target sequence for ABCB4 (NM_000443.2,5346-5364).
gacgttaccccacaaatat

SEQ ID NO: 69751 - DNA, 19 bp, Homo sapiens
  siRNA target sequence for ABCB4 (NM_000443.2,5348-5366).
cgttaccccacaaatatga

SEQ ID NO: 69752 - DNA, 19 bp, Homo sapiens
  siRNA target sequence for ABCB4 (NM_000443.2,5691-5709).
ggctgggacacagaactta

SEQ ID NO: 69753 - DNA, 19 bp, Homo sapiens
  siRNA target sequence for ABCB4 (NM_000443.2,5692-5710).
gctgggacacagaacttat

SEQ ID NO: 69754 - DNA, 19 bp, Homo sapiens
  siRNA target sequence for ABCB4 (NM_018849.1,5149-5167).
gtgtttgtggactttggtt

SEQ ID NO: 69755 - DNA, 19 bp, Homo sapiens
  siRNA target sequence for ABCB4 (NM_018850.1,4645-4663).
ggaccttacagggtgtttt

SEQ ID NO: 69756 - DNA, 19 bp, Homo sapiens
  siRNA target sequence for ABCB4 (NM_018850.1,4653-4671).
cagggtgttttctgcaatt

SEQ ID NO: 69757 - DNA, 19 bp, Homo sapiens
  siRNA target sequence for ABCB5 (NM_178559.3,479-497).
gaatgacatcagagcttta

SEQ ID NO: 69758 - DNA, 19 bp, Homo sapiens
  siRNA target sequence for ABCB5 (NM_178559.3,505-523).
ggcattatcgagaccatat

SEQ ID NO: 69759 - DNA, 19 bp, Homo sapiens
  siRNA target sequence for ABCB5 (NM_178559.3,506-524).
gcattatcgagaccatatt

SEQ ID NO: 69760 - DNA, 19 bp, Homo sapiens
  siRNA target sequence for ABCB5 (NM_178559.3,578-596).
caagtatggacgagatgat

SEQ ID NO: 69761 - DNA, 19 bp, Homo sapiens
  siRNA target sequence for ABCB5 (NM_178559.3,630-648).
gaagcaaatgcgtatgatt

SEQ ID NO: 69762 - DNA, 19 bp, Homo sapiens
  siRNA target sequence for ABCB5 (NM_178559.3,633-651).
gcaaatgcgtatgatttta

SEQ ID NO: 69763 - DNA, 19 bp, Homo sapiens
  siRNA target sequence for ABCB5 (NM_178559.3,739-757).
ctcgtgccttagttcgaaa

SEQ ID NO: 69764 - DNA, 19 bp, Homo sapiens
  siRNA target sequence for ABCB5 (NM_178559.3,844-862).
gcaaaggtcggactacaat

SEQ ID NO: 69765 - DNA, 19 bp, Homo sapiens
  siRNA target sequence for ABCB5 (NM_178559.3,870-888).
gcacaccgactttctacta

SEQ ID NO: 69766 - DNA, 19 bp, Homo sapiens
  siRNA target sequence for ABCB5 (NM_178559.3,871-889).
cacaccgactttctactat

SEQ ID NO: 69767 - DNA, 19 bp, Homo sapiens
  siRNA target sequence for ABCB5 (NM_178559.3,876-894).
cgactttctactattcgaa

SEQ ID NO: 69768 - DNA, 19 bp, Homo sapiens
  siRNA target sequence for ABCB5 (NM_178559.3,886-904).
ctattcgaagtgcagattt

SEQ ID NO: 69769 - DNA, 19 bp, Homo sapiens
  siRNA target sequence for ABCB5 (NM_178559.3,892-910).
gaagtgcagatttgattgt

SEQ ID NO: 69770 - DNA, 19 bp, Homo sapiens
  siRNA target sequence for ABCB5 (NM_178559.3,963-981).
gcaaaacgaggtctatatt

SEQ ID NO: 69771 - DNA, 19 bp, Homo sapiens
  siRNA target sequence for ABCB5 (NM_178559.3,964-982).
caaaacgaggtctatatta

SEQ ID NO: 69772 - DNA, 19 bp, Homo sapiens
  siRNA target sequence for ABCB5 (NM_178559.3,990-1008).
gtgatgtcacaggatatta

SEQ ID NO: 69773 - DNA, 19 bp, Homo sapiens
  siRNA target sequence for ABCB5 (NM_178559.3,1028-1046).
ggagtcaatgacatattct

SEQ ID NO: 69774 - DNA, 19 bp, Homo sapiens
  siRNA target sequence for ABCB5 (NM_178559.3,1031-1049).
gtcaatgacatattctact

SEQ ID NO: 69775 - DNA, 19 bp, Homo sapiens
  siRNA target sequence for ABCB5 (NM_178559.3,1119-1137).
gaggaatccacccaatcta

SEQ ID NO: 69776 - DNA, 19 bp, Homo sapiens
  siRNA target sequence for ABCB5 (NM_178559.3,1214-1232).
ggggacattggcttctgtt

SEQ ID NO: 69777 - DNA, 19 bp, Homo sapiens
  siRNA target sequence for ABCB5 (NM_178559.3,1219-1237).
cattggcttctgttctaaa

SEQ ID NO: 69778 - DNA, 19 bp, Homo sapiens
  siRNA target sequence for ABCB5 (NM_178559.3,1349-1367).
cgtcattttgggtgttatt

SEQ ID NO: 69779 - DNA, 19 bp, Homo sapiens
  siRNA target sequence for ABCB5 (NM_178559.3,1403-1421).
cggcagagcaggggaaatt

SEQ ID NO: 69780 - DNA, 19 bp, Homo sapiens
  siRNA target sequence for ABCB5 (NM_178559.3,1405-1423).
gcagagcaggggaaatttt

SEQ ID NO: 69781 - DNA, 19 bp, Homo sapiens
  siRNA target sequence for ABCB5 (NM_178559.3,1410-1428).
gcaggggaaattttaacga

SEQ ID NO: 69782 - DNA, 19 bp, Homo sapiens
  siRNA target sequence for ABCB5 (NM_178559.3,1416-1434).
gaaattttaacgatgagat

SEQ ID NO: 69783 - DNA, 19 bp, Homo sapiens
  siRNA target sequence for ABCB5 (NM_178559.3,1447-1465).
ccttcaaagccatgttata

SEQ ID NO: 69784 - DNA, 19 bp, Homo sapiens
  siRNA target sequence for ABCB5 (NM_178559.3,1504-1522).
caggaggcttgacaacaat

SEQ ID NO: 69785 - DNA, 19 bp, Homo sapiens
  siRNA target sequence for ABCB5 (NM_178559.3,1565-1583).
caggattggcgtcttaaca

SEQ ID NO: 69786 - DNA, 19 bp, Homo sapiens
  siRNA target sequence for ABCB5 (NM_178559.3,1567-1585).
ggattggcgtcttaacaca

SEQ ID NO: 69787 - DNA, 19 bp, Homo sapiens
  siRNA target sequence for ABCB5 (NM_178559.3,1568-1586).
gattggcgtcttaacacaa

SEQ ID NO: 69788 - DNA, 19 bp, Homo sapiens
  siRNA target sequence for ABCB5 (NM_178559.3,1582-1600).
cacaaaatgcaactaacat

SEQ ID NO: 69789 - DNA, 19 bp, Homo sapiens
  siRNA target sequence for ABCB5 (NM_178559.3,1601-1619).
gggactttcagttatcatt

SEQ ID NO: 69790 - DNA, 19 bp, Homo sapiens
  siRNA target sequence for ABCB5 (NM_178559.3,1602-1620).
ggactttcagttatcattt

SEQ ID NO: 69791 - DNA, 19 bp, Homo sapiens
  siRNA target sequence for ABCB5 (NM_178559.3,1679-1697).
cgtgacaggaatgattgaa

SEQ ID NO: 69792 - DNA, 19 bp, Homo sapiens
  siRNA target sequence for ABCB5 (NM_178559.3,1713-1731).
ggatttgccaacaaagata

SEQ ID NO: 69793 - DNA, 19 bp, Homo sapiens
  siRNA target sequence for ABCB5 (NM_178559.3,1770-1788).
gctttggagaatatacgta

SEQ ID NO: 69794 - DNA, 19 bp, Homo sapiens
  siRNA target sequence for ABCB5 (NM_178559.3,1775-1793).
ggagaatatacgtactata

SEQ ID NO: 69795 - DNA, 19 bp, Homo sapiens
  siRNA target sequence for ABCB5 (NM_178559.3,1785-1803).
cgtactatagtgtcattaa

SEQ ID NO: 69796 - DNA, 19 bp, Homo sapiens
  siRNA target sequence for ABCB5 (NM_178559.3,1880-1898).
gattattggaagctgttat

SEQ ID NO: 69797 - DNA, 19 bp, Homo sapiens
  siRNA target sequence for ABCB5 (NM_178559.3,1900-1918).
cattcagccatgcctttat

SEQ ID NO: 69798 - DNA, 19 bp, Homo sapiens
  siRNA target sequence for ABCB5 (NM_178559.3,1904-1922).
cagccatgcctttatatat

SEQ ID NO: 69799 - DNA, 19 bp, Homo sapiens
  siRNA target sequence for ABCB5 (NM_178559.3,1982-2000).
cccagagggcatgttcata

SEQ ID NO: 69800 - DNA, 19 bp, Homo sapiens
  siRNA target sequence for ABCB5 (NM_178559.3,2205-2223).
ccatgtcgcccagatgttt

SEQ ID NO: 69801 - DNA, 19 bp, Homo sapiens
  siRNA target sequence for ABCB5 (NM_178559.3,2209-2227).
gtcgcccagatgttttcat

SEQ ID NO: 69802 - DNA, 19 bp, Homo sapiens
  siRNA target sequence for ABCB5 (NM_178559.3,2233-2251).
gtggcttatccctcagtat

SEQ ID NO: 69803 - DNA, 19 bp, Homo sapiens
  siRNA target sequence for ABCB5 (NM_178559.3,2393-2411).
gtggctccgttcccaaata

SEQ ID NO: 69804 - DNA, 19 bp, Homo sapiens
  siRNA target sequence for ABCB5 (NM_178559.3,2396-2414).
gctccgttcccaaatagca

SEQ ID NO: 69805 - DNA, 19 bp, Homo sapiens
  siRNA target sequence for ABCB5 (NM_178559.3,2397-2415).
ctccgttcccaaatagcaa

SEQ ID NO: 69806 - DNA, 19 bp, Homo sapiens
  siRNA target sequence for ABCB5 (NM_178559.3,2482-2500).
gccgtgtggtgccattaga

SEQ ID NO: 69807 - DNA, 19 bp, Homo sapiens
  siRNA target sequence for ABCB5 (NM_178559.3,2483-2501).
ccgtgtggtgccattagat

SEQ ID NO: 69808 - DNA, 19 bp, Homo sapiens
  siRNA target sequence for ABCB5 (NM_178559.3,2494-2512).
cattagatgagatcaaaga

SEQ ID NO: 69809 - DNA, 19 bp, Homo sapiens
  siRNA target sequence for ABCB5 (NM_178559.3,2507-2525).
caaagaagccgcaaatgca

SEQ ID NO: 69810 - DNA, 19 bp, Homo sapiens
  siRNA target sequence for ABCB5 (NM_178559.3,2523-2541).
gcagcaaatatccattctt

SEQ ID NO: 69811 - DNA, 19 bp, Homo sapiens
  siRNA target sequence for ABCB5 (NM_178559.3,2547-2565).
gaaggtctccctgagaaat

SEQ ID NO: 69812 - DNA, 19 bp, Homo sapiens
  siRNA target sequence for ABCB5 (NM_178559.3,2550-2568).
ggtctccctgagaaataca

SEQ ID NO: 69813 - DNA, 19 bp, Homo sapiens
  siRNA target sequence for ABCB5 (NM_178559.3,2570-2588).
cacacaagttggactgaaa

SEQ ID NO: 69814 - DNA, 19 bp, Homo sapiens
  siRNA target sequence for ABCB5 (NM_178559.3,2632-2650).
caagggctcttctccaaaa

SEQ ID NO: 69815 - DNA, 19 bp, Homo sapiens
  siRNA target sequence for ABCB5 (NM_178559.3,2680-2698).
cttcagccctcgataatga

SEQ ID NO: 69816 - DNA, 19 bp, Homo sapiens
  siRNA target sequence for ABCB5 (NM_178559.3,2712-2730).
gttcagcatgcccttgata

SEQ ID NO: 69817 - DNA, 19 bp, Homo sapiens
  siRNA target sequence for ABCB5 (NM_178559.3,2852-2870).
cctgagaaatcgagacata

SEQ ID NO: 69818 - DNA, 19 bp, Homo sapiens
  siRNA target sequence for ABCB5 (NM_178559.3,2855-2873).
gagaaatcgagacatatat

SEQ ID NO: 69819 - DNA, 19 bp, Homo sapiens
  siRNA target sequence for ABCB6 (NM_005689.1,580-598).
cccactgccaagctatcta

SEQ ID NO: 69820 - DNA, 19 bp, Homo sapiens
  siRNA target sequence for ABCB6 (NM_005689.1,905-923).
cgtccccagtcctatacat

SEQ ID NO: 69821 - DNA, 19 bp, Homo sapiens
  siRNA target sequence for ABCB6 (NM_005689.1,906-924).
gtccccagtcctatacatt

SEQ ID NO: 69822 - DNA, 19 bp, Homo sapiens
  siRNA target sequence for ABCB6 (NM_005689.1,1084-1102).
ggggctcatgggtttggaa

SEQ ID NO: 69823 - DNA, 19 bp, Homo sapiens
  siRNA target sequence for ABCB6 (NM_005689.1,1100-1118).
gaacgggcactcaatgtgt

SEQ ID NO: 69824 - DNA, 19 bp, Homo sapiens
  siRNA target sequence for ABCB6 (NM_005689.1,1115-1133).
gtgttggtgcctatattct

SEQ ID NO: 69825 - DNA, 19 bp, Homo sapiens
  siRNA target sequence for ABCB6 (NM_005689.1,1200-1218).
gttacgtcttcctcaagtt

SEQ ID NO: 69826 - DNA, 19 bp, Homo sapiens
  siRNA target sequence for ABCB6 (NM_005689.1,1459-1477).
gctggccgacatcatcatt

SEQ ID NO: 69827 - DNA, 19 bp, Homo sapiens
  siRNA target sequence for ABCB6 (NM_005689.1,1512-1530).
ggtttggcctcattgtgtt

SEQ ID NO: 69828 - DNA, 19 bp, Homo sapiens
  siRNA target sequence for ABCB6 (NM_005689.1,1637-1655).
gtggactctctgctaaact

SEQ ID NO: 69829 - DNA, 19 bp, Homo sapiens
  siRNA target sequence for ABCB6 (NM_005689.1,1654-1672).
cttcgagacggtgaagtat

SEQ ID NO: 69830 - DNA, 19 bp, Homo sapiens
  siRNA target sequence for ABCB6 (NM_005689.1,1658-1676).
gagacggtgaagtattaca

SEQ ID NO: 69831 - DNA, 19 bp, Homo sapiens
  siRNA target sequence for ABCB6 (NM_005689.1,1675-1693).
caacgccgagagttacgaa

SEQ ID NO: 69832 - DNA, 19 bp, Homo sapiens
  siRNA target sequence for ABCB6 (NM_005689.1,1746-1764).
cgagcgcttcactggtttt

SEQ ID NO: 69833 - DNA, 19 bp, Homo sapiens
  siRNA target sequence for ABCB6 (NM_005689.1,1747-1765).
gagcgcttcactggtttta

SEQ ID NO: 69834 - DNA, 19 bp, Homo sapiens
  siRNA target sequence for ABCB6 (NM_005689.1,1749-1767).
gcgcttcactggttttact

SEQ ID NO: 69835 - DNA, 19 bp, Homo sapiens
  siRNA target sequence for ABCB6 (NM_005689.1,1750-1768).
cgcttcactggttttacta

SEQ ID NO: 69836 - DNA, 19 bp, Homo sapiens
  siRNA target sequence for ABCB6 (NM_005689.1,1752-1770).
cttcactggttttactaaa

SEQ ID NO: 69837 - DNA, 19 bp, Homo sapiens
  siRNA target sequence for ABCB6 (NM_005689.1,1815-1833).
ccctgctttgcgcatactt

SEQ ID NO: 69838 - DNA, 19 bp, Homo sapiens
  siRNA target sequence for ABCB6 (NM_005689.1,1816-1834).
cctgctttgcgcatacttt

SEQ ID NO: 69839 - DNA, 19 bp, Homo sapiens
  siRNA target sequence for ABCB6 (NM_005689.1,2035-2053).
gaagggccgtattgagttt

SEQ ID NO: 69840 - DNA, 19 bp, Homo sapiens
  siRNA target sequence for ABCB6 (NM_005689.1,2039-2057).
ggccgtattgagtttgaga

SEQ ID NO: 69841 - DNA, 19 bp, Homo sapiens
  siRNA target sequence for ABCB6 (NM_005689.1,2040-2058).
gccgtattgagtttgagaa

SEQ ID NO: 69842 - DNA, 19 bp, Homo sapiens
  siRNA target sequence for ABCB6 (NM_005689.1,2091-2109).
ctctgcaggacgtgtcttt

SEQ ID NO: 69843 - DNA, 19 bp, Homo sapiens
  siRNA target sequence for ABCB6 (NM_005689.1,2155-2173).
ggcagggaagagcacaatt

SEQ ID NO: 69844 - DNA, 19 bp, Homo sapiens
  siRNA target sequence for ABCB6 (NM_005689.1,2208-2226).
ctggctgcatccgaataga

SEQ ID NO: 69845 - DNA, 19 bp, Homo sapiens
  siRNA target sequence for ABCB6 (NM_005689.1,2503-2521).
caaggctccgggcatcatt

SEQ ID NO: 69846 - DNA, 19 bp, Homo sapiens
  siRNA target sequence for ABCB6 (NM_005689.1,2541-2559).
cagcgctggatacatctaa

SEQ ID NO: 69847 - DNA, 19 bp, Homo sapiens
  siRNA target sequence for ABCB7 (NM_004299.2,72-90).
gcgctgctcgcgatgcatt

SEQ ID NO: 69848 - DNA, 19 bp, Homo sapiens
  siRNA target sequence for ABCB7 (NM_004299.2,75-93).
ctgctcgcgatgcattctt

SEQ ID NO: 69849 - DNA, 19 bp, Homo sapiens
  siRNA target sequence for ABCB7 (NM_004299.2,132-150).
cggcactccgcgattctga

SEQ ID NO: 69850 - DNA, 19 bp, Homo sapiens
  siRNA target sequence for ABCB7 (NM_004299.2,133-151).
ggcactccgcgattctgat

SEQ ID NO: 69851 - DNA, 19 bp, Homo sapiens
  siRNA target sequence for ABCB7 (NM_004299.2,147-165).
ctgatccggcctttagtct

SEQ ID NO: 69852 - DNA, 19 bp, Homo sapiens
  siRNA target sequence for ABCB7 (NM_004299.2,153-171).
cggcctttagtctctgtta

SEQ ID NO: 69853 - DNA, 19 bp, Homo sapiens
  siRNA target sequence for ABCB7 (NM_004299.2,243-261).
gagtcattaaaaagtatca

SEQ ID NO: 69854 - DNA, 19 bp, Homo sapiens
  siRNA target sequence for ABCB7 (NM_004299.2,284-302).
caattcaggacagttctta

SEQ ID NO: 69855 - DNA, 19 bp, Homo sapiens
  siRNA target sequence for ABCB7 (NM_004299.2,320-338).
ccaggtatggccactgata

SEQ ID NO: 69856 - DNA, 19 bp, Homo sapiens
  siRNA target sequence for ABCB7 (NM_004299.2,323-341).
ggtatggccactgatagaa

SEQ ID NO: 69857 - DNA, 19 bp, Homo sapiens
  siRNA target sequence for ABCB7 (NM_004299.2,401-419).
gttaaaagatgttgatact

SEQ ID NO: 69858 - DNA, 19 bp, Homo sapiens
  siRNA target sequence for ABCB7 (NM_004299.2,414-432).
gatactcggaaaatcataa

SEQ ID NO: 69859 - DNA, 19 bp, Homo sapiens
  siRNA target sequence for ABCB7 (NM_004299.2,602-620).
gagtgatgcaccaaataca

SEQ ID NO: 69860 - DNA, 19 bp, Homo sapiens
  siRNA target sequence for ABCB7 (NM_004299.2,604-622).
gtgatgcaccaaatacagt

SEQ ID NO: 69861 - DNA, 19 bp, Homo sapiens
  siRNA target sequence for ABCB7 (NM_004299.2,647-665).
gattggctatggtgtatca

SEQ ID NO: 69862 - DNA, 19 bp, Homo sapiens
  siRNA target sequence for ABCB7 (NM_004299.2,669-687).
gctggagctgcttttttta

SEQ ID NO: 69863 - DNA, 19 bp, Homo sapiens
  siRNA target sequence for ABCB7 (NM_004299.2,673-691).
gagctgctttttttaacga

SEQ ID NO: 69864 - DNA, 19 bp, Homo sapiens
  siRNA target sequence for ABCB7 (NM_004299.2,711-729).
ggcaaggtagcccagaatt

SEQ ID NO: 69865 - DNA, 19 bp, Homo sapiens
  siRNA target sequence for ABCB7 (NM_004299.2,734-752).
ccgaagaatagccaaaaat

SEQ ID NO: 69866 - DNA, 19 bp, Homo sapiens
  siRNA target sequence for ABCB7 (NM_004299.2,801-819).
cagacgggagctttatcta

SEQ ID NO: 69867 - DNA, 19 bp, Homo sapiens
  siRNA target sequence for ABCB7 (NM_004299.2,811-829).
ctttatctaaggctattga

SEQ ID NO: 69868 - DNA, 19 bp, Homo sapiens
  siRNA target sequence for ABCB7 (NM_004299.2,838-856).
caaggggtatcagttttgt

SEQ ID NO: 69869 - DNA, 19 bp, Homo sapiens
  siRNA target sequence for ABCB7 (NM_004299.2,855-873).
gtcctgagtgctttggtat

SEQ ID NO: 69870 - DNA, 19 bp, Homo sapiens
  siRNA target sequence for ABCB7 (NM_004299.2,918-936).
ggtgttttgtattacaaat

SEQ ID NO: 69871 - DNA, 19 bp, Homo sapiens
  siRNA target sequence for ABCB7 (NM_004299.2,1003-1021).
cacggtggagaactagatt

SEQ ID NO: 69872 - DNA, 19 bp, Homo sapiens
  siRNA target sequence for ABCB7 (NM_004299.2,1005-1023).
cggtggagaactagattta

SEQ ID NO: 69873 - DNA, 19 bp, Homo sapiens
  siRNA target sequence for ABCB7 (NM_004299.2,1054-1072).
caggtaatgctgctataga

SEQ ID NO: 69874 - DNA, 19 bp, Homo sapiens
  siRNA target sequence for ABCB7 (NM_004299.2,1056-1074).
ggtaatgctgctatagact

SEQ ID NO: 69875 - DNA, 19 bp, Homo sapiens
  siRNA target sequence for ABCB7 (NM_004299.2,1117-1135).
gatatgaagcacagagata

SEQ ID NO: 69876 - DNA, 19 bp, Homo sapiens
  siRNA target sequence for ABCB7 (NM_004299.2,1153-1171).
cgtatgagactgcttcatt

SEQ ID NO: 69877 - DNA, 19 bp, Homo sapiens
  siRNA target sequence for ABCB7 (NM_004299.2,1196-1214).
gctgaactttggtcaaagt

SEQ ID NO: 69878 - DNA, 19 bp, Homo sapiens
  siRNA target sequence for ABCB7 (NM_004299.2,1227-1245).
gtcggtttaacagctataa

SEQ ID NO: 69879 - DNA, 19 bp, Homo sapiens
  siRNA target sequence for ABCB7 (NM_004299.2,1231-1249).
gtttaacagctataatggt

SEQ ID NO: 69880 - DNA, 19 bp, Homo sapiens
  siRNA target sequence for ABCB7 (NM_004299.2,1271-1289).
ggcaggtacccttactgtt

SEQ ID NO: 69881 - DNA, 19 bp, Homo sapiens
  siRNA target sequence for ABCB7 (NM_004299.2,1280-1298).
ccttactgttggagatcta

SEQ ID NO: 69882 - DNA, 19 bp, Homo sapiens
  siRNA target sequence for ABCB7 (NM_004299.2,1304-1322).
ggtgaatggactgcttttt

SEQ ID NO: 69883 - DNA, 19 bp, Homo sapiens
  siRNA target sequence for ABCB7 (NM_004299.2,1367-1385).
gactagacaagcactcata

SEQ ID NO: 69884 - DNA, 19 bp, Homo sapiens
  siRNA target sequence for ABCB7 (NM_004299.2,1369-1387).
ctagacaagcactcataga

SEQ ID NO: 69885 - DNA, 19 bp, Homo sapiens
  siRNA target sequence for ABCB7 (NM_004299.2,1372-1390).
gacaagcactcatagatat

SEQ ID NO: 69886 - DNA, 19 bp, Homo sapiens
  siRNA target sequence for ABCB7 (NM_004299.2,1391-1409).
gaacaccttgtttactcta

SEQ ID NO: 69887 - DNA, 19 bp, Homo sapiens
  siRNA target sequence for ABCB7 (NM_004299.2,1412-1430).
caaggtagacacccaaatt

SEQ ID NO: 69888 - DNA, 19 bp, Homo sapiens
  siRNA target sequence for ABCB7 (NM_004299.2,1415-1433).
ggtagacacccaaattaaa

SEQ ID NO: 69889 - DNA, 19 bp, Homo sapiens
  siRNA target sequence for ABCB7 (NM_004299.2,1477-1495).
ctaccgtggcctttgataa

SEQ ID NO: 69890 - DNA, 19 bp, Homo sapiens
  siRNA target sequence for ABCB7 (NM_004299.2,1523-1541).
gaaagtccttagtggaata

SEQ ID NO: 69891 - DNA, 19 bp, Homo sapiens
  siRNA target sequence for ABCB7 (NM_004299.2,1529-1547).
ccttagtggaatatccttt

SEQ ID NO: 69892 - DNA, 19 bp, Homo sapiens
  siRNA target sequence for ABCB7 (NM_004299.2,1534-1552).
gtggaatatcctttgaagt

SEQ ID NO: 69893 - DNA, 19 bp, Homo sapiens
  siRNA target sequence for ABCB7 (NM_004299.2,1604-1622).
cacaatagtgaggctatta

SEQ ID NO: 69894 - DNA, 19 bp, Homo sapiens
  siRNA target sequence for ABCB7 (NM_004299.2,1606-1624).
caatagtgaggctattatt

SEQ ID NO: 69895 - DNA, 19 bp, Homo sapiens
  siRNA target sequence for ABCB7 (NM_004299.2,1616-1634).
gctattatttcgcttctat

SEQ ID NO: 69896 - DNA, 19 bp, Homo sapiens
  siRNA target sequence for ABCB7 (NM_004299.2,1637-1655).
gcctcaaaagggtagcatt

SEQ ID NO: 69897 - DNA, 19 bp, Homo sapiens
  siRNA target sequence for ABCB7 (NM_004299.2,1663-1681).
ctggtcaaaatatacaaga

SEQ ID NO: 69898 - DNA, 19 bp, Homo sapiens
  siRNA target sequence for ABCB7 (NM_004299.2,1734-1752).
gtcctcttccataatacta

SEQ ID NO: 69899 - DNA, 19 bp, Homo sapiens
  siRNA target sequence for ABCB7 (NM_004299.2,1800-1818).
gtgtatgcagtggcaaaat

SEQ ID NO: 69900 - DNA, 19 bp, Homo sapiens
  siRNA target sequence for ABCB7 (NM_004299.2,1802-1820).
gtatgcagtggcaaaatta

SEQ ID NO: 69901 - DNA, 19 bp, Homo sapiens
  siRNA target sequence for ABCB7 (NM_004299.2,1825-1843).
gacttcatgatgcaattct

SEQ ID NO: 69902 - DNA, 19 bp, Homo sapiens
  siRNA target sequence for ABCB7 (NM_004299.2,1878-1896).
gaacgaggactcaagcttt

SEQ ID NO: 69903 - DNA, 19 bp, Homo sapiens
  siRNA target sequence for ABCB7 (NM_004299.2,1940-1958).
gaaggaccccccagtcata

SEQ ID NO: 69904 - DNA, 19 bp, Homo sapiens
  siRNA target sequence for ABCB7 (NM_004299.2,1944-1962).
gaccccccagtcatactct

SEQ ID NO: 69905 - DNA, 19 bp, Homo sapiens
  siRNA target sequence for ABCB7 (NM_004299.2,1971-1989).
gctacttcatcgttagatt

SEQ ID NO: 69906 - DNA, 19 bp, Homo sapiens
  siRNA target sequence for ABCB7 (NM_004299.2,1975-1993).
cttcatcgttagattcgat

SEQ ID NO: 69907 - DNA, 19 bp, Homo sapiens
  siRNA target sequence for ABCB7 (NM_004299.2,1981-1999).
cgttagattcgattactga

SEQ ID NO: 69908 - DNA, 19 bp, Homo sapiens
  siRNA target sequence for ABCB7 (NM_004299.2,1982-2000).
gttagattcgattactgaa

SEQ ID NO: 69909 - DNA, 19 bp, Homo sapiens
  siRNA target sequence for ABCB7 (NM_004299.2,2028-2046).
gtggtcaaacacagaactt

SEQ ID NO: 69910 - DNA, 19 bp, Homo sapiens
  siRNA target sequence for ABCB7 (NM_004299.2,2030-2048).
ggtcaaacacagaacttct

SEQ ID NO: 69911 - DNA, 19 bp, Homo sapiens
  siRNA target sequence for ABCB7 (NM_004299.2,2147-2165).
gcttgctaaccctcatagt

SEQ ID NO: 69912 - DNA, 19 bp, Homo sapiens
  siRNA target sequence for ABCB7 (NM_004299.2,2148-2166).
cttgctaaccctcatagta

SEQ ID NO: 69913 - DNA, 19 bp, Homo sapiens
  siRNA target sequence for ABCB7 (NM_004299.2,2151-2169).
gctaaccctcatagtatct

SEQ ID NO: 69914 - DNA, 19 bp, Homo sapiens
  siRNA target sequence for ABCB7 (NM_004299.2,2152-2170).
ctaaccctcatagtatcta

SEQ ID NO: 69915 - DNA, 19 bp, Homo sapiens
  siRNA target sequence for ABCB7 (NM_004299.2,2156-2174).
ccctcatagtatctattca

SEQ ID NO: 69916 - DNA, 19 bp, Homo sapiens
  siRNA target sequence for ABCB7 (NM_004299.2,2173-2191).
cagaaatgtggcatacaca

SEQ ID NO: 69917 - DNA, 19 bp, Homo sapiens
  siRNA target sequence for ABCB7 (NM_004299.2,2199-2217).
cgtgtgcagaaccatgata

SEQ ID NO: 69918 - DNA, 19 bp, Homo sapiens
  siRNA target sequence for ABCB7 (NM_004299.2,2200-2218).
gtgtgcagaaccatgataa

SEQ ID NO: 69919 - DNA, 19 bp, Homo sapiens
  siRNA target sequence for ABCB8 (NM_007188.2,133-151).
ctccgcttccagacattct

SEQ ID NO: 69920 - DNA, 19 bp, Homo sapiens
  siRNA target sequence for ABCB8 (NM_007188.2,305-323).
gccccatggtactgagtaa

SEQ ID NO: 69921 - DNA, 19 bp, Homo sapiens
  siRNA target sequence for ABCB8 (NM_007188.2,309-327).
catggtactgagtaagcat

SEQ ID NO: 69922 - DNA, 19 bp, Homo sapiens
  siRNA target sequence for ABCB8 (NM_007188.2,397-415).
gtggggtctcgctttaact

SEQ ID NO: 69923 - DNA, 19 bp, Homo sapiens
  siRNA target sequence for ABCB8 (NM_007188.2,485-503).
gtgcggcactcgtgaatgt

SEQ ID NO: 69924 - DNA, 19 bp, Homo sapiens
  siRNA target sequence for ABCB8 (NM_007188.2,488-506).
cggcactcgtgaatgtaca

SEQ ID NO: 69925 - DNA, 19 bp, Homo sapiens
  siRNA target sequence for ABCB8 (NM_007188.2,491-509).
cactcgtgaatgtacagat

SEQ ID NO: 69926 - DNA, 19 bp, Homo sapiens
  siRNA target sequence for ABCB8 (NM_007188.2,538-556).
gtcgtggccaagtacacaa

SEQ ID NO: 69927 - DNA, 19 bp, Homo sapiens
  siRNA target sequence for ABCB8 (NM_007188.2,559-577).
gaccacgtagggagtttca

SEQ ID NO: 69928 - DNA, 19 bp, Homo sapiens
  siRNA target sequence for ABCB8 (NM_007188.2,562-580).
cacgtagggagtttcatga

SEQ ID NO: 69929 - DNA, 19 bp, Homo sapiens
  siRNA target sequence for ABCB8 (NM_007188.2,737-755).
ccttctttgacgccaataa

SEQ ID NO: 69930 - DNA, 19 bp, Homo sapiens
  siRNA target sequence for ABCB8 (NM_007188.2,741-759).
ctttgacgccaataagaca

SEQ ID NO: 69931 - DNA, 19 bp, Homo sapiens
  siRNA target sequence for ABCB8 (NM_007188.2,806-824).
catccttcaagcttgtcat

SEQ ID NO: 69932 - DNA, 19 bp, Homo sapiens
  siRNA target sequence for ABCB8 (NM_007188.2,952-970).
ggctcaggcctccgaaaat

SEQ ID NO: 69933 - DNA, 19 bp, Homo sapiens
  siRNA target sequence for ABCB8 (NM_007188.2,953-971).
gctcaggcctccgaaaatt

SEQ ID NO: 69934 - DNA, 19 bp, Homo sapiens
  siRNA target sequence for ABCB8 (NM_007188.2,1183-1201).
gtcttgggtaccctattta

SEQ ID NO: 69935 - DNA, 19 bp, Homo sapiens
  siRNA target sequence for ABCB8 (NM_007188.2,1185-1203).
cttgggtaccctatttatt

SEQ ID NO: 69936 - DNA, 19 bp, Homo sapiens
  siRNA target sequence for ABCB8 (NM_007188.2,1417-1435).
ctgcgtggctccgttacat

SEQ ID NO: 69937 - DNA, 19 bp, Homo sapiens
  siRNA target sequence for ABCB8 (NM_007188.2,1419-1437).
gcgtggctccgttacattt

SEQ ID NO: 69938 - DNA, 19 bp, Homo sapiens
  siRNA target sequence for ABCB8 (NM_007188.2,1421-1439).
gtggctccgttacatttca

SEQ ID NO: 69939 - DNA, 19 bp, Homo sapiens
  siRNA target sequence for ABCB8 (NM_007188.2,1423-1441).
ggctccgttacatttcaga

SEQ ID NO: 69940 - DNA, 19 bp, Homo sapiens
  siRNA target sequence for ABCB8 (NM_007188.2,1424-1442).
gctccgttacatttcagaa

SEQ ID NO: 69941 - DNA, 19 bp, Homo sapiens
  siRNA target sequence for ABCB8 (NM_007188.2,1700-1718).
ggacgaccatcatggaaaa

SEQ ID NO: 69942 - DNA, 19 bp, Homo sapiens
  siRNA target sequence for ABCB8 (NM_007188.2,1778-1796).
cgaatgctcacgagttcat

SEQ ID NO: 69943 - DNA, 19 bp, Homo sapiens
  siRNA target sequence for ABCB8 (NM_007188.2,1994-2012).
gccgcacggtgctggtaat

SEQ ID NO: 69944 - DNA, 19 bp, Homo sapiens
  siRNA target sequence for ABCB8 (NM_007188.2,1995-2013).
ccgcacggtgctggtaatt

SEQ ID NO: 69945 - DNA, 19 bp, Homo sapiens
  siRNA target sequence for ABCB9 (NM_019624.1,323-341).
gtgactttggccttcatga

SEQ ID NO: 69946 - DNA, 19 bp, Homo sapiens
  siRNA target sequence for ABCB9 (NM_019624.1,360-378).
ccacggccatctatgtctt

SEQ ID NO: 69947 - DNA, 19 bp, Homo sapiens
  siRNA target sequence for ABCB9 (NM_019624.1,407-425).
gacatccgccacttcaaca

SEQ ID NO: 69948 - DNA, 19 bp, Homo sapiens
  siRNA target sequence for ABCB9 (NM_019624.1,941-959).
ggcatcgtcatccagaaaa

SEQ ID NO: 69949 - DNA, 19 bp, Homo sapiens
  siRNA target sequence for ABCB9 (NM_019624.1,1015-1033).
ctcatttgccgcaggtatt

SEQ ID NO: 69950 - DNA, 19 bp, Homo sapiens
  siRNA target sequence for ABCB9 (NM_019624.1,1041-1059).
gcatttttaccctcatatt

SEQ ID NO: 69951 - DNA, 19 bp, Homo sapiens
  siRNA target sequence for ABCB9 (NM_019624.1,1072-1090).
cattcgccttcgaaactgt

SEQ ID NO: 69952 - DNA, 19 bp, Homo sapiens
  siRNA target sequence for ABCB9 (NM_019624.1,1242-1260).
cgggcgtggtggtcttcat

SEQ ID NO: 69953 - DNA, 19 bp, Homo sapiens
  siRNA target sequence for ABCB9 (NM_019624.1,1245-1263).
gcgtggtggtcttcatgtt

SEQ ID NO: 69954 - DNA, 19 bp, Homo sapiens
  siRNA target sequence for ABCB9 (NM_019624.1,1514-1532).
gcagctgcctacatgtact

SEQ ID NO: 69955 - DNA, 19 bp, Homo sapiens
  siRNA target sequence for ABCB9 (NM_019624.1,1515-1533).
cagctgcctacatgtacta

SEQ ID NO: 69956 - DNA, 19 bp, Homo sapiens
  siRNA target sequence for ABCB9 (NM_019624.1,1881-1899).
gcgcctacgaccacaagta

SEQ ID NO: 69957 - DNA, 19 bp, Homo sapiens
  siRNA target sequence for ABCB9 (NM_019624.1,1884-1902).
cctacgaccacaagtactt

SEQ ID NO: 69958 - DNA, 19 bp, Homo sapiens
  siRNA target sequence for ABCB9 (NM_019624.1,1949-1967).
cgctccatcacggataaca

SEQ ID NO: 69959 - DNA, 19 bp, Homo sapiens
  siRNA target sequence for ABCB9 (NM_019624.1,1950-1968).
gctccatcacggataacat

SEQ ID NO: 69960 - DNA, 19 bp, Homo sapiens
  siRNA target sequence for ABCB9 (NM_019624.1,2193-2211).
ccgagagcgagtatctgat

SEQ ID NO: 69961 - DNA, 19 bp, Homo sapiens
  siRNA target sequence for ABCB9 (NM_019625.1,1654-1672).
gtttgtcctgggagattgt

SEQ ID NO: 69962 - DNA, 19 bp, Homo sapiens
  siRNA target sequence for ABCC1 (NM_004996.2,310-328).
cgtgtgggtgccttgtttt

SEQ ID NO: 69963 - DNA, 19 bp, Homo sapiens
  siRNA target sequence for ABCC1 (NM_004996.2,377-395).
gaccgaggctacattcaga

SEQ ID NO: 69964 - DNA, 19 bp, Homo sapiens
  siRNA target sequence for ABCC1 (NM_004996.2,399-417).
cacctctcaacaaaaccaa

SEQ ID NO: 69965 - DNA, 19 bp, Homo sapiens
  siRNA target sequence for ABCC1 (NM_004996.2,450-468).
gctgggcagacctcttcta

SEQ ID NO: 69966 - DNA, 19 bp, Homo sapiens
  siRNA target sequence for ABCC1 (NM_004996.2,456-474).
cagacctcttctactcttt

SEQ ID NO: 69967 - DNA, 19 bp, Homo sapiens
  siRNA target sequence for ABCC1 (NM_004996.2,483-501).
gaagtcggggcatattcct

SEQ ID NO: 69968 - DNA, 19 bp, Homo sapiens
  siRNA target sequence for ABCC1 (NM_004996.2,547-565).
gctgcttgctaccttttta

SEQ ID NO: 69969 - DNA, 19 bp, Homo sapiens
  siRNA target sequence for ABCC1 (NM_004996.2,602-620).
gggatcatgctcactttct

SEQ ID NO: 69970 - DNA, 19 bp, Homo sapiens
  siRNA target sequence for ABCC1 (NM_004996.2,647-665).
gccatcctgagatccaaaa

SEQ ID NO: 69971 - DNA, 19 bp, Homo sapiens
  siRNA target sequence for ABCC1 (NM_004996.2,648-666).
ccatcctgagatccaaaat

SEQ ID NO: 69972 - DNA, 19 bp, Homo sapiens
  siRNA target sequence for ABCC1 (NM_004996.2,701-719).
ctgtttcgtgacatcactt

SEQ ID NO: 69973 - DNA, 19 bp, Homo sapiens
  siRNA target sequence for ABCC1 (NM_004996.2,715-733).
cactttctacgtctacttt

SEQ ID NO: 69974 - DNA, 19 bp, Homo sapiens
  siRNA target sequence for ABCC1 (NM_004996.2,754-772).
cgtcttgtcctgtttctca

SEQ ID NO: 69975 - DNA, 19 bp, Homo sapiens
  siRNA target sequence for ABCC1 (NM_004996.2,912-930).
gtgacctctggtccttaaa

SEQ ID NO: 69976 - DNA, 19 bp, Homo sapiens
  siRNA target sequence for ABCC1 (NM_004996.2,1378-1396).
gatcaagaccgctgtcatt

SEQ ID NO: 69977 - DNA, 19 bp, Homo sapiens
  siRNA target sequence for ABCC1 (NM_004996.2,1452-1470).
cggtcggggagattgtcaa

SEQ ID NO: 69978 - DNA, 19 bp, Homo sapiens
  siRNA target sequence for ABCC1 (NM_004996.2,1509-1527).
ccacgtacattaacatgat

SEQ ID NO: 69979 - DNA, 19 bp, Homo sapiens
  siRNA target sequence for ABCC1 (NM_004996.2,1706-1724).
ctgatgaacgaaattctca

SEQ ID NO: 69980 - DNA, 19 bp, Homo sapiens
  siRNA target sequence for ABCC1 (NM_004996.2,1708-1726).
gatgaacgaaattctcaat

SEQ ID NO: 69981 - DNA, 19 bp, Homo sapiens
  siRNA target sequence for ABCC1 (NM_004996.2,1732-1750).
caaagtgctaaagctttat

SEQ ID NO: 69982 - DNA, 19 bp, Homo sapiens
  siRNA target sequence for ABCC1 (NM_004996.2,1905-1923).
ccattgacgagaacaacat

SEQ ID NO: 69983 - DNA, 19 bp, Homo sapiens
  siRNA target sequence for ABCC1 (NM_004996.2,1972-1990).
ccggtttcccctgaacatt

SEQ ID NO: 69984 - DNA, 19 bp, Homo sapiens
  siRNA target sequence for ABCC1 (NM_004996.2,1974-1992).
ggtttcccctgaacattct

SEQ ID NO: 69985 - DNA, 19 bp, Homo sapiens
  siRNA target sequence for ABCC1 (NM_004996.2,2035-2053).
caaacgcctgaggatcttt

SEQ ID NO: 69986 - DNA, 19 bp, Homo sapiens
  siRNA target sequence for ABCC1 (NM_004996.2,2039-2057).
cgcctgaggatctttctct

SEQ ID NO: 69987 - DNA, 19 bp, Homo sapiens
  siRNA target sequence for ABCC1 (NM_004996.2,2164-2182).
cgaccctcccacactgaat

SEQ ID NO: 69988 - DNA, 19 bp, Homo sapiens
  siRNA target sequence for ABCC1 (NM_004996.2,2339-2357).
gcctggattcagaatgatt

SEQ ID NO: 69989 - DNA, 19 bp, Homo sapiens
  siRNA target sequence for ABCC1 (NM_004996.2,2542-2560).
gtactccaacgctgacatt

SEQ ID NO: 69990 - DNA, 19 bp, Homo sapiens
  siRNA target sequence for ABCC1 (NM_004996.2,3080-3098).
gtgtactgggactacatga

SEQ ID NO: 69991 - DNA, 19 bp, Homo sapiens
  siRNA target sequence for ABCC1 (NM_004996.2,3161-3179).
gcgctggcttccaactatt

SEQ ID NO: 69992 - DNA, 19 bp, Homo sapiens
  siRNA target sequence for ABCC1 (NM_004996.2,3370-3388).
gtcacccatgagcttcttt

SEQ ID NO: 69993 - DNA, 19 bp, Homo sapiens
  siRNA target sequence for ABCC1 (NM_004996.2,3504-3522).
gtgcctgcatcgttatcct

SEQ ID NO: 69994 - DNA, 19 bp, Homo sapiens
  siRNA target sequence for ABCC1 (NM_004996.2,3816-3834).
gcaactgcatcgttctgtt

SEQ ID NO: 69995 - DNA, 19 bp, Homo sapiens
  siRNA target sequence for ABCC1 (NM_004996.2,3817-3835).
caactgcatcgttctgttt

SEQ ID NO: 69996 - DNA, 19 bp, Homo sapiens
  siRNA target sequence for ABCC1 (NM_004996.2,3914-3932).
gtcaccacgtacttgaact

SEQ ID NO: 69997 - DNA, 19 bp, Homo sapiens
  siRNA target sequence for ABCC1 (NM_004996.2,3938-3956).
gttcggatgtcatctgaaa

SEQ ID NO: 69998 - DNA, 19 bp, Homo sapiens
  siRNA target sequence for ABCC1 (NM_004996.2,3982-4000).
gaggctcaaggagtattca

SEQ ID NO: 69999 - DNA, 19 bp, Homo sapiens
  siRNA target sequence for ABCC1 (NM_004996.2,4073-4091).
gtggaattccggaactact

SEQ ID NO: 70000 - DNA, 19 bp, Homo sapiens
  siRNA target sequence for ABCC1 (NM_004996.2,4120-4138).
cgttctcaggcacatcaat

SEQ ID NO: 70001 - DNA, 19 bp, Homo sapiens
  siRNA target sequence for ABCC1 (NM_004996.2,4201-4219).
cctgaccctgggcttattt

SEQ ID NO: 70002 - DNA, 19 bp, Homo sapiens
  siRNA target sequence for ABCC1 (NM_004996.2,4289-4307).
gacctccgcttcaagatca

SEQ ID NO: 70003 - DNA, 19 bp, Homo sapiens
  siRNA target sequence for ABCC1 (NM_004996.2,4338-4356).
cgggttccctccgaatgaa

SEQ ID NO: 70004 - DNA, 19 bp, Homo sapiens
  siRNA target sequence for ABCC1 (NM_004996.2,4445-4463).
gacaagctagaccatgaat

SEQ ID NO: 70005 - DNA, 19 bp, Homo sapiens
  siRNA target sequence for ABCC1 (NM_004996.2,4742-4760).
cagcagagaggtcttttct

SEQ ID NO: 70006 - DNA, 19 bp, Homo sapiens
  siRNA target sequence for ABCC10 (NM_033450.2,890-908).
gctgtcacgcttttcctat

SEQ ID NO: 70007 - DNA, 19 bp, Homo sapiens
  siRNA target sequence for ABCC10 (NM_033450.2,1115-1133).
gaccatgttgggattctca

SEQ ID NO: 70008 - DNA, 19 bp, Homo sapiens
  siRNA target sequence for ABCC10 (NM_033450.2,1242-1260).
gctgtgctgcagaatcagt

SEQ ID NO: 70009 - DNA, 19 bp, Homo sapiens
  siRNA target sequence for ABCC10 (NM_033450.2,1264-1282).
ggtatgaggtatataaggt

SEQ ID NO: 70010 - DNA, 19 bp, Homo sapiens
  siRNA target sequence for ABCC10 (NM_033450.2,1265-1283).
gtatgaggtatataaggta

SEQ ID NO: 70011 - DNA, 19 bp, Homo sapiens
  siRNA target sequence for ABCC10 (NM_033450.2,1271-1289).
ggtatataaggtaacactt

SEQ ID NO: 70012 - DNA, 19 bp, Homo sapiens
  siRNA target sequence for ABCC10 (NM_033450.2,1526-1544).
gctggtacccgtcaacaaa

SEQ ID NO: 70013 - DNA, 19 bp, Homo sapiens
  siRNA target sequence for ABCC10 (NM_033450.2,1530-1548).
gtacccgtcaacaaagtga

SEQ ID NO: 70014 - DNA, 19 bp, Homo sapiens
  siRNA target sequence for ABCC10 (NM_033450.2,1630-1648).
gtggcattcgggtcatcaa

SEQ ID NO: 70015 - DNA, 19 bp, Homo sapiens
  siRNA target sequence for ABCC10 (NM_033450.2,1632-1650).
ggcattcgggtcatcaagt

SEQ ID NO: 70016 - DNA, 19 bp, Homo sapiens
  siRNA target sequence for ABCC10 (NM_033450.2,1633-1651).
gcattcgggtcatcaagtt

SEQ ID NO: 70017 - DNA, 19 bp, Homo sapiens
  siRNA target sequence for ABCC10 (NM_033450.2,1712-1730).
gcgactccgggtcatcaaa

SEQ ID NO: 70018 - DNA, 19 bp, Homo sapiens
  siRNA target sequence for ABCC10 (NM_033450.2,1713-1731).
cgactccgggtcatcaaat

SEQ ID NO: 70019 - DNA, 19 bp, Homo sapiens
  siRNA target sequence for ABCC10 (NM_033450.2,1714-1732).
gactccgggtcatcaaata

SEQ ID NO: 70020 - DNA, 19 bp, Homo sapiens
  siRNA target sequence for ABCC10 (NM_033450.2,1734-1752).
ctggatgcggcctgtgtat

SEQ ID NO: 70021 - DNA, 19 bp, Homo sapiens
  siRNA target sequence for ABCC10 (NM_033450.2,1762-1780).
ctgccctaccggttgtcat

SEQ ID NO: 70022 - DNA, 19 bp, Homo sapiens
  siRNA target sequence for ABCC10 (NM_033450.2,1773-1791).
gttgtcatctccatcgtta

SEQ ID NO: 70023 - DNA, 19 bp, Homo sapiens
  siRNA target sequence for ABCC10 (NM_033450.2,1982-2000).
ctactacagcccagattgt

SEQ ID NO: 70024 - DNA, 19 bp, Homo sapiens
  siRNA target sequence for ABCC10 (NM_033450.2,1991-2009).
cccagattgtggtagatta

SEQ ID NO: 70025 - DNA, 19 bp, Homo sapiens
  siRNA target sequence for ABCC10 (NM_033450.2,2129-2147).
cagtcatctcgaagtgaaa

SEQ ID NO: 70026 - DNA, 19 bp, Homo sapiens
  siRNA target sequence for ABCC10 (NM_033450.2,2377-2395).
cctgcgccctcaatgatga

SEQ ID NO: 70027 - DNA, 19 bp, Homo sapiens
  siRNA target sequence for ABCC10 (NM_033450.2,3081-3099).
ccgcagctgctcctctttt

SEQ ID NO: 70028 - DNA, 19 bp, Homo sapiens
  siRNA target sequence for ABCC10 (NM_033450.2,3157-3175).
cctcagacatccgtttcta

SEQ ID NO: 70029 - DNA, 19 bp, Homo sapiens
  siRNA target sequence for ABCC10 (NM_033450.2,3191-3209).
gaccattgctggtgtaaat

SEQ ID NO: 70030 - DNA, 19 bp, Homo sapiens
  siRNA target sequence for ABCC10 (NM_033450.2,3307-3325).
caccagtgactttcttcaa

SEQ ID NO: 70031 - DNA, 19 bp, Homo sapiens
  siRNA target sequence for ABCC10 (NM_033450.2,3489-3507).
ccgcctttgagcatcatgt

SEQ ID NO: 70032 - DNA, 19 bp, Homo sapiens
  siRNA target sequence for ABCC10 (NM_033450.2,3490-3508).
cgcctttgagcatcatgta

SEQ ID NO: 70033 - DNA, 19 bp, Homo sapiens
  siRNA target sequence for ABCC10 (NM_033450.2,3493-3511).
ctttgagcatcatgtacta

SEQ ID NO: 70034 - DNA, 19 bp, Homo sapiens
  siRNA target sequence for ABCC10 (NM_033450.2,3589-3607).
gccatctggccgatacctt

SEQ ID NO: 70035 - DNA, 19 bp, Homo sapiens
  siRNA target sequence for ABCC10 (NM_033450.2,4299-4317).
gacccccagggcctacata

SEQ ID NO: 70036 - DNA, 19 bp, Homo sapiens
  siRNA target sequence for ABCC10 (NM_033450.2,4353-4371).
cacctgagtgaggtgatta

SEQ ID NO: 70037 - DNA, 19 bp, Homo sapiens
  siRNA target sequence for ABCC10 (NM_033450.2,4355-4373).
cctgagtgaggtgattaca

SEQ ID NO: 70038 - DNA, 19 bp, Homo sapiens
  siRNA target sequence for ABCC10 (NM_033450.2,4475-4493).
caagatcctgtgtatcgat

SEQ ID NO: 70039 - DNA, 19 bp, Homo sapiens
  siRNA target sequence for ABCC11 (NM_032583.2,156-174).
catggtttcaggacttatt

SEQ ID NO: 70040 - DNA, 19 bp, Homo sapiens
  siRNA target sequence for ABCC11 (NM_032583.2,159-177).
ggtttcaggacttatttat

SEQ ID NO: 70041 - DNA, 19 bp, Homo sapiens
  siRNA target sequence for ABCC11 (NM_032583.2,160-178).
gtttcaggacttatttata

SEQ ID NO: 70042 - DNA, 19 bp, Homo sapiens
  siRNA target sequence for ABCC11 (NM_032583.2,252-270).
cccaccgtgggggaagtat

SEQ ID NO: 70043 - DNA, 19 bp, Homo sapiens
  siRNA target sequence for ABCC11 (NM_032583.2,384-402).
gctcatgatccaaagctta

SEQ ID NO: 70044 - DNA, 19 bp, Homo sapiens
  siRNA target sequence for ABCC11 (NM_032583.2,399-417).
cttacggagtcgcttagat

SEQ ID NO: 70045 - DNA, 19 bp, Homo sapiens
  siRNA target sequence for ABCC11 (NM_032583.2,501-519).
ctcaaggcgagggattgaa

SEQ ID NO: 70046 - DNA, 19 bp, Homo sapiens
  siRNA target sequence for ABCC11 (NM_032583.2,507-525).
gcgagggattgaaaaagct

SEQ ID NO: 70047 - DNA, 19 bp, Homo sapiens
  siRNA target sequence for ABCC11 (NM_032583.2,508-526).
cgagggattgaaaaagctt

SEQ ID NO: 70048 - DNA, 19 bp, Homo sapiens
  siRNA target sequence for ABCC11 (NM_032583.2,553-571).
cagagaacaaggttgattt

SEQ ID NO: 70049 - DNA, 19 bp, Homo sapiens
  siRNA target sequence for ABCC11 (NM_032583.2,557-575).
gaacaaggttgattttcga

SEQ ID NO: 70050 - DNA, 19 bp, Homo sapiens
  siRNA target sequence for ABCC11 (NM_032583.2,608-626).
gtgtactcgggccaatatt

SEQ ID NO: 70051 - DNA, 19 bp, Homo sapiens
  siRNA target sequence for ABCC11 (NM_032583.2,610-628).
gtactcgggccaatattga

SEQ ID NO: 70052 - DNA, 19 bp, Homo sapiens
  siRNA target sequence for ABCC11 (NM_032583.2,615-633).
cgggccaatattgattata

SEQ ID NO: 70053 - DNA, 19 bp, Homo sapiens
  siRNA target sequence for ABCC11 (NM_032583.2,619-637).
ccaatattgattataccaa

SEQ ID NO: 70054 - DNA, 19 bp, Homo sapiens
  siRNA target sequence for ABCC11 (NM_032583.2,813-831).
gctcatccaatttaagtct

SEQ ID NO: 70055 - DNA, 19 bp, Homo sapiens
  siRNA target sequence for ABCC11 (NM_032583.2,864-882).
cttcttcaccggtgatgta

SEQ ID NO: 70056 - DNA, 19 bp, Homo sapiens
  siRNA target sequence for ABCC11 (NM_032583.2,905-923).
gctatggacccctagtact

SEQ ID NO: 70057 - DNA, 19 bp, Homo sapiens
  siRNA target sequence for ABCC11 (NM_032583.2,942-960).
ggtcatctgcagcatttct

SEQ ID NO: 70058 - DNA, 19 bp, Homo sapiens
  siRNA target sequence for ABCC11 (NM_032583.2,962-980).
cctacttcattattggata

SEQ ID NO: 70059 - DNA, 19 bp, Homo sapiens
  siRNA target sequence for ABCC11 (NM_032583.2,966-984).
cttcattattggatacact

SEQ ID NO: 70060 - DNA, 19 bp, Homo sapiens
  siRNA target sequence for ABCC11 (NM_032583.2,1021-1039).
ccactggcggtattcatga

SEQ ID NO: 70061 - DNA, 19 bp, Homo sapiens
  siRNA target sequence for ABCC11 (NM_032583.2,1024-1042).
ctggcggtattcatgacaa

SEQ ID NO: 70062 - DNA, 19 bp, Homo sapiens
  siRNA target sequence for ABCC11 (NM_032583.2,1027-1045).
gcggtattcatgacaagaa

SEQ ID NO: 70063 - DNA, 19 bp, Homo sapiens
  siRNA target sequence for ABCC11 (NM_032583.2,1028-1046).
cggtattcatgacaagaat

SEQ ID NO: 70064 - DNA, 19 bp, Homo sapiens
  siRNA target sequence for ABCC11 (NM_032583.2,1229-1247).
gcctgacaagtataacctt

SEQ ID NO: 70065 - DNA, 19 bp, Homo sapiens
  siRNA target sequence for ABCC11 (NM_032583.2,1235-1253).
caagtataaccttgttcat

SEQ ID NO: 70066 - DNA, 19 bp, Homo sapiens
  siRNA target sequence for ABCC11 (NM_032583.2,1238-1256).
gtataaccttgttcatcat

SEQ ID NO: 70067 - DNA, 19 bp, Homo sapiens
  siRNA target sequence for ABCC11 (NM_032583.2,1271-1289).
cagcggtctgggttctcat

SEQ ID NO: 70068 - DNA, 19 bp, Homo sapiens
  siRNA target sequence for ABCC11 (NM_032583.2,1361-1379).
ggctgtcagtgttctttgt

SEQ ID NO: 70069 - DNA, 19 bp, Homo sapiens
  siRNA target sequence for ABCC11 (NM_032583.2,1390-1408).
gtcaaaggtctcacgaatt

SEQ ID NO: 70070 - DNA, 19 bp, Homo sapiens
  siRNA target sequence for ABCC11 (NM_032583.2,1422-1440).
gatgaggttcaagaagttt

SEQ ID NO: 70071 - DNA, 19 bp, Homo sapiens
  siRNA target sequence for ABCC11 (NM_032583.2,1490-1508).
gcaaagctctggtctttga

SEQ ID NO: 70072 - DNA, 19 bp, Homo sapiens
  siRNA target sequence for ABCC11 (NM_032583.2,1596-1614).
gatgaccaggcctagagat

SEQ ID NO: 70073 - DNA, 19 bp, Homo sapiens
  siRNA target sequence for ABCC11 (NM_032583.2,1680-1698).
gtccaaggggatgatgtta

SEQ ID NO: 70074 - DNA, 19 bp, Homo sapiens
  siRNA target sequence for ABCC11 (NM_032583.2,2157-2175).
gcagtacttagaattttgt

SEQ ID NO: 70075 - DNA, 19 bp, Homo sapiens
  siRNA target sequence for ABCC11 (NM_032583.2,2174-2192).
gtggccagatcattttgtt

SEQ ID NO: 70076 - DNA, 19 bp, Homo sapiens
  siRNA target sequence for ABCC11 (NM_032583.2,2202-2220).
gaaaatctgtgaaaatgga

SEQ ID NO: 70077 - DNA, 19 bp, Homo sapiens
  siRNA target sequence for ABCC11 (NM_032583.2,2218-2236).
ggaactcacagtgagttaa

SEQ ID NO: 70078 - DNA, 19 bp, Homo sapiens
  siRNA target sequence for ABCC11 (NM_032583.2,2517-2535).
ggtgctgatcgtcttctta

SEQ ID NO: 70079 - DNA, 19 bp, Homo sapiens
  siRNA target sequence for ABCC11 (NM_032583.2,2527-2545).
gtcttcttaacgatcttca

SEQ ID NO: 70080 - DNA, 19 bp, Homo sapiens
  siRNA target sequence for ABCC11 (NM_032583.2,2575-2593).
cagggctcggggaccaata

SEQ ID NO: 70081 - DNA, 19 bp, Homo sapiens
  siRNA target sequence for ABCC11 (NM_032583.2,2578-2596).
ggctcggggaccaatagca

SEQ ID NO: 70082 - DNA, 19 bp, Homo sapiens
  siRNA target sequence for ABCC11 (NM_032583.2,2753-2771).
ccacggccctgcacaacaa

SEQ ID NO: 70083 - DNA, 19 bp, Homo sapiens
  siRNA target sequence for ABCC11 (NM_032583.2,2792-2810).
gctgccccatgagtttctt

SEQ ID NO: 70084 - DNA, 19 bp, Homo sapiens
  siRNA target sequence for ABCC11 (NM_032583.2,2793-2811).
ctgccccatgagtttcttt

SEQ ID NO: 70085 - DNA, 19 bp, Homo sapiens
  siRNA target sequence for ABCC11 (NM_032583.2,2874-2892).
gctcttgcccatcttttca

SEQ ID NO: 70086 - DNA, 19 bp, Homo sapiens
  siRNA target sequence for ABCC11 (NM_032583.2,2954-2972).
ctccatatatcctgttaat

SEQ ID NO: 70087 - DNA, 19 bp, Homo sapiens
  siRNA target sequence for ABCC11 (NM_032583.2,2975-2993).
gagccataatcatggttat

SEQ ID NO: 70088 - DNA, 19 bp, Homo sapiens
  siRNA target sequence for ABCC11 (NM_032583.2,3054-3072).
ctatagccggtctccttta

SEQ ID NO: 70089 - DNA, 19 bp, Homo sapiens
  siRNA target sequence for ABCC11 (NM_032583.2,3160-3178).
ctgactgatgcgcagaata

SEQ ID NO: 70090 - DNA, 19 bp, Homo sapiens
  siRNA target sequence for ABCC11 (NM_032583.2,3164-3182).
ctgatgcgcagaataacta

SEQ ID NO: 70091 - DNA, 19 bp, Homo sapiens
  siRNA target sequence for ABCC11 (NM_032583.2,3218-3236).
cattgaggctggagatcat

SEQ ID NO: 70092 - DNA, 19 bp, Homo sapiens
  siRNA target sequence for ABCC11 (NM_032583.2,3291-3309).
caccccctactcctttaaa

SEQ ID NO: 70093 - DNA, 19 bp, Homo sapiens
  siRNA target sequence for ABCC11 (NM_032583.2,3293-3311).
ccccctactcctttaaagt

SEQ ID NO: 70094 - DNA, 19 bp, Homo sapiens
  siRNA target sequence for ABCC11 (NM_032583.2,3295-3313).
ccctactcctttaaagtca

SEQ ID NO: 70095 - DNA, 19 bp, Homo sapiens
  siRNA target sequence for ABCC11 (NM_032583.2,3437-3455).
cggaagctcctttacacat

SEQ ID NO: 70096 - DNA, 19 bp, Homo sapiens
  siRNA target sequence for ABCC11 (NM_032583.2,3451-3469).
cacatggaaggcacaagtt

SEQ ID NO: 70097 - DNA, 19 bp, Homo sapiens
  siRNA target sequence for ABCC11 (NM_032583.2,3663-3681).
ggcaggccggattctcatt

SEQ ID NO: 70098 - DNA, 19 bp, Homo sapiens
  siRNA target sequence for ABCC11 (NM_032583.2,3665-3683).
caggccggattctcattga

SEQ ID NO: 70099 - DNA, 19 bp, Homo sapiens
  siRNA target sequence for ABCC11 (NM_032583.2,3732-3750).
ctcagtgatccctcaagat

SEQ ID NO: 70100 - DNA, 19 bp, Homo sapiens
  siRNA target sequence for ABCC11 (NM_032583.2,3764-3782).
caggaaccatcagattcaa

SEQ ID NO: 70101 - DNA, 19 bp, Homo sapiens
  siRNA target sequence for ABCC11 (NM_032583.2,3955-3973).
cttcgcaactccaagatca

SEQ ID NO: 70102 - DNA, 19 bp, Homo sapiens
  siRNA target sequence for ABCC11 (NM_032583.2,3965-3983).
ccaagatcatccttatcga

SEQ ID NO: 70103 - DNA, 19 bp, Homo sapiens
  siRNA target sequence for ABCC11 (NM_032583.2,3966-3984).
caagatcatccttatcgat

SEQ ID NO: 70104 - DNA, 19 bp, Homo sapiens
  siRNA target sequence for ABCC11 (NM_145186.1,3848-3866).
ccaaggccatcatccttat

SEQ ID NO: 70105 - DNA, 19 bp, Homo sapiens
  siRNA target sequence for ABCC11 (NM_145186.1,3852-3870).
ggccatcatccttatcgat

SEQ ID NO: 70106 - DNA, 19 bp, Homo sapiens
  siRNA target sequence for ABCC12 (NM_033226.1,353-371).
ggtgaaggaccctacctta

SEQ ID NO: 70107 - DNA, 19 bp, Homo sapiens
  siRNA target sequence for ABCC12 (NM_033226.1,356-374).
gaaggaccctaccttatct

SEQ ID NO: 70108 - DNA, 19 bp, Homo sapiens
  siRNA target sequence for ABCC12 (NM_033226.1,405-423).
cctttgcagaaagatatga

SEQ ID NO: 70109 - DNA, 19 bp, Homo sapiens
  siRNA target sequence for ABCC12 (NM_033226.1,579-597).
ccccattgtcgacatatga

SEQ ID NO: 70110 - DNA, 19 bp, Homo sapiens
  siRNA target sequence for ABCC12 (NM_033226.1,581-599).
ccattgtcgacatatgact

SEQ ID NO: 70111 - DNA, 19 bp, Homo sapiens
  siRNA target sequence for ABCC12 (NM_033226.1,681-699).
gccacgtggtgtggaaatt

SEQ ID NO: 70112 - DNA, 19 bp, Homo sapiens
  siRNA target sequence for ABCC12 (NM_033226.1,861-879).
ccgagtttaccaaagtctt

SEQ ID NO: 70113 - DNA, 19 bp, Homo sapiens
  siRNA target sequence for ABCC12 (NM_033226.1,890-908).
cttgcctgggccatcaact

SEQ ID NO: 70114 - DNA, 19 bp, Homo sapiens
  siRNA target sequence for ABCC12 (NM_033226.1,937-955).
gctctccaccttggttttt

SEQ ID NO: 70115 - DNA, 19 bp, Homo sapiens
  siRNA target sequence for ABCC12 (NM_033226.1,965-983).
gtgtccttcaagacattga

SEQ ID NO: 70116 - DNA, 19 bp, Homo sapiens
  siRNA target sequence for ABCC12 (NM_033226.1,995-1013).
gttggcgaggtgctcaata

SEQ ID NO: 70117 - DNA, 19 bp, Homo sapiens
  siRNA target sequence for ABCC12 (NM_033226.1,999-1017).
gcgaggtgctcaatatact

SEQ ID NO: 70118 - DNA, 19 bp, Homo sapiens
  siRNA target sequence for ABCC12 (NM_033226.1,1009-1027).
caatatactgtcaagtgat

SEQ ID NO: 70119 - DNA, 19 bp, Homo sapiens
  siRNA target sequence for ABCC12 (NM_033226.1,1016-1034).
ctgtcaagtgatagctatt

SEQ ID NO: 70120 - DNA, 19 bp, Homo sapiens
  siRNA target sequence for ABCC12 (NM_033226.1,1023-1041).
gtgatagctattctttgtt

SEQ ID NO: 70121 - DNA, 19 bp, Homo sapiens
  siRNA target sequence for ABCC12 (NM_033226.1,1070-1088).
gccaccatcccgatcctaa

SEQ ID NO: 70122 - DNA, 19 bp, Homo sapiens
  siRNA target sequence for ABCC12 (NM_033226.1,1074-1092).
ccatcccgatcctaatggt

SEQ ID NO: 70123 - DNA, 19 bp, Homo sapiens
  siRNA target sequence for ABCC12 (NM_033226.1,1079-1097).
ccgatcctaatggtctttt

SEQ ID NO: 70124 - DNA, 19 bp, Homo sapiens
  siRNA target sequence for ABCC12 (NM_033226.1,1081-1099).
gatcctaatggtcttttgt

SEQ ID NO: 70125 - DNA, 19 bp, Homo sapiens
  siRNA target sequence for ABCC12 (NM_033226.1,1098-1116).
gtgcggcgtacgccttttt

SEQ ID NO: 70126 - DNA, 19 bp, Homo sapiens
  siRNA target sequence for ABCC12 (NM_033226.1,1104-1122).
cgtacgcctttttcattct

SEQ ID NO: 70127 - DNA, 19 bp, Homo sapiens
  siRNA target sequence for ABCC12 (NM_033226.1,1134-1152).
ctctcatcgggatatcagt

SEQ ID NO: 70128 - DNA, 19 bp, Homo sapiens
  siRNA target sequence for ABCC12 (NM_033226.1,1138-1156).
catcgggatatcagtgtat

SEQ ID NO: 70129 - DNA, 19 bp, Homo sapiens
  siRNA target sequence for ABCC12 (NM_033226.1,1142-1160).
gggatatcagtgtatgtca

SEQ ID NO: 70130 - DNA, 19 bp, Homo sapiens
  siRNA target sequence for ABCC12 (NM_033226.1,1143-1161).
ggatatcagtgtatgtcat

SEQ ID NO: 70131 - DNA, 19 bp, Homo sapiens
  siRNA target sequence for ABCC12 (NM_033226.1,1144-1162).
gatatcagtgtatgtcata

SEQ ID NO: 70132 - DNA, 19 bp, Homo sapiens
  siRNA target sequence for ABCC12 (NM_033226.1,1165-1183).
catacccgtccagatgttt

SEQ ID NO: 70133 - DNA, 19 bp, Homo sapiens
  siRNA target sequence for ABCC12 (NM_033226.1,1237-1255).
gcgagttcagacaatgaat

SEQ ID NO: 70134 - DNA, 19 bp, Homo sapiens
  siRNA target sequence for ABCC12 (NM_033226.1,1288-1306).
gtatgcctgggagaaatct

SEQ ID NO: 70135 - DNA, 19 bp, Homo sapiens
  siRNA target sequence for ABCC12 (NM_033226.1,1296-1314).
gggagaaatcttttaccaa

SEQ ID NO: 70136 - DNA, 19 bp, Homo sapiens
  siRNA target sequence for ABCC12 (NM_033226.1,1311-1329).
ccaacactatccaagatat

SEQ ID NO: 70137 - DNA, 19 bp, Homo sapiens
  siRNA target sequence for ABCC12 (NM_033226.1,1315-1333).
cactatccaagatataaga

SEQ ID NO: 70138 - DNA, 19 bp, Homo sapiens
  siRNA target sequence for ABCC12 (NM_033226.1,1415-1433).
gccatcgtgctgacattat

SEQ ID NO: 70139 - DNA, 19 bp, Homo sapiens
  siRNA target sequence for ABCC12 (NM_033226.1,1465-1483).
cgcacccgtggcatttagt

SEQ ID NO: 70140 - DNA, 19 bp, Homo sapiens
  siRNA target sequence for ABCC12 (NM_033226.1,1467-1485).
cacccgtggcatttagtgt

SEQ ID NO: 70141 - DNA, 19 bp, Homo sapiens
  siRNA target sequence for ABCC12 (NM_033226.1,1486-1504).
gattgccatgtttaatgta

SEQ ID NO: 70142 - DNA, 19 bp, Homo sapiens
  siRNA target sequence for ABCC12 (NM_033226.1,1490-1508).
gccatgtttaatgtaatga

SEQ ID NO: 70143 - DNA, 19 bp, Homo sapiens
  siRNA target sequence for ABCC12 (NM_033226.1,1530-1548).
ccttctccatcaaagcaat

SEQ ID NO: 70144 - DNA, 19 bp, Homo sapiens
  siRNA target sequence for ABCC12 (NM_033226.1,1655-1673).
gcaaatgccaccttgacat

SEQ ID NO: 70145 - DNA, 19 bp, Homo sapiens
  siRNA target sequence for ABCC12 (NM_033226.1,1829-1847).
gttctgcacagcataagct

SEQ ID NO: 70146 - DNA, 19 bp, Homo sapiens
  siRNA target sequence for ABCC12 (NM_033226.1,1952-1970).
gtggtggcagtcaatggaa

SEQ ID NO: 70147 - DNA, 19 bp, Homo sapiens
  siRNA target sequence for ABCC12 (NM_033226.1,1967-1985).
ggaactttggcctacgttt

SEQ ID NO: 70148 - DNA, 19 bp, Homo sapiens
  siRNA target sequence for ABCC12 (NM_033226.1,1998-2016).
ggatctttcatggaaatgt

SEQ ID NO: 70149 - DNA, 19 bp, Homo sapiens
  siRNA target sequence for ABCC12 (NM_033226.1,2015-2033).
gtgagagaaaacatactct

SEQ ID NO: 70150 - DNA, 19 bp, Homo sapiens
  siRNA target sequence for ABCC12 (NM_033226.1,2044-2062).
gtatgatcaccaaaggtat

SEQ ID NO: 70151 - DNA, 19 bp, Homo sapiens
  siRNA target sequence for ABCC12 (NM_033226.1,2327-2345).
cagctacagttcttagagt

SEQ ID NO: 70152 - DNA, 19 bp, Homo sapiens
  siRNA target sequence for ABCC12 (NM_033226.1,2335-2353).
gttcttagagtcttgtgat

SEQ ID NO: 70153 - DNA, 19 bp, Homo sapiens
  siRNA target sequence for ABCC12 (NM_033226.1,2342-2360).
gagtcttgtgatgaagtta

SEQ ID NO: 70154 - DNA, 19 bp, Homo sapiens
  siRNA target sequence for ABCC12 (NM_033226.1,2393-2411).
ggaacccacaaggagttaa

SEQ ID NO: 70155 - DNA, 19 bp, Homo sapiens
  siRNA target sequence for ABCC12 (NM_033226.1,2417-2435).
gagagagggcgctatgcaa

SEQ ID NO: 70156 - DNA, 19 bp, Homo sapiens
  siRNA target sequence for ABCC12 (NM_033226.1,2419-2437).
gagagggcgctatgcaaaa

SEQ ID NO: 70157 - DNA, 19 bp, Homo sapiens
  siRNA target sequence for ABCC12 (NM_033226.1,2421-2439).
gagggcgctatgcaaaact

SEQ ID NO: 70158 - DNA, 19 bp, Homo sapiens
  siRNA target sequence for ABCC12 (NM_033226.1,2423-2441).
gggcgctatgcaaaactga

SEQ ID NO: 70159 - DNA, 19 bp, Homo sapiens
  siRNA target sequence for ABCC12 (NM_033226.1,2424-2442).
ggcgctatgcaaaactgat

SEQ ID NO: 70160 - DNA, 19 bp, Homo sapiens
  siRNA target sequence for ABCC12 (NM_033226.1,2425-2443).
gcgctatgcaaaactgatt

SEQ ID NO: 70161 - DNA, 19 bp, Homo sapiens
  siRNA target sequence for ABCC12 (NM_033226.1,2427-2445).
gctatgcaaaactgattca

SEQ ID NO: 70162 - DNA, 19 bp, Homo sapiens
  siRNA target sequence for ABCC12 (NM_033226.1,2471-2489).
gatcctgaacacctttaca

SEQ ID NO: 70163 - DNA, 19 bp, Homo sapiens
  siRNA target sequence for ABCC12 (NM_033226.1,2534-2552).
gaggaagatgctggtataa

SEQ ID NO: 70164 - DNA, 19 bp, Homo sapiens
  siRNA target sequence for ABCC12 (NM_033226.1,2673-2691).
ccgtgacctggaaaacata

SEQ ID NO: 70165 - DNA, 19 bp, Homo sapiens
  siRNA target sequence for ABCC12 (NM_033226.1,2674-2692).
cgtgacctggaaaacatat

SEQ ID NO: 70166 - DNA, 19 bp, Homo sapiens
  siRNA target sequence for ABCC12 (NM_033226.1,2688-2706).
catatcacacgtacattaa

SEQ ID NO: 70167 - DNA, 19 bp, Homo sapiens
  siRNA target sequence for ABCC12 (NM_033226.1,2998-3016).
gcatgacacggtgtttgat

SEQ ID NO: 70168 - DNA, 19 bp, Homo sapiens
  siRNA target sequence for ABCC12 (NM_033226.1,3006-3024).
cggtgtttgataagatctt

SEQ ID NO: 70169 - DNA, 19 bp, Homo sapiens
  siRNA target sequence for ABCC12 (NM_033226.1,3022-3040).
cttaaagagcccaatgagt

SEQ ID NO: 70170 - DNA, 19 bp, Homo sapiens
  siRNA target sequence for ABCC12 (NM_033226.1,3028-3046).
gagcccaatgagtttcttt

SEQ ID NO: 70171 - DNA, 19 bp, Homo sapiens
  siRNA target sequence for ABCC12 (NM_033226.1,3056-3074).
cccactggcaggctaatga

SEQ ID NO: 70172 - DNA, 19 bp, Homo sapiens
  siRNA target sequence for ABCC12 (NM_033226.1,3057-3075).
ccactggcaggctaatgaa

SEQ ID NO: 70173 - DNA, 19 bp, Homo sapiens
  siRNA target sequence for ABCC12 (NM_033226.1,3117-3135).
cgtttcacgcagagaactt

SEQ ID NO: 70174 - DNA, 19 bp, Homo sapiens
  siRNA target sequence for ABCC12 (NM_033226.1,3218-3236).
cttgctgtaggcttcttca

SEQ ID NO: 70175 - DNA, 19 bp, Homo sapiens
  siRNA target sequence for ABCC12 (NM_033226.1,3388-3406).
cctcctctactttaactgt

SEQ ID NO: 70176 - DNA, 19 bp, Homo sapiens
  siRNA target sequence for ABCC12 (NM_033226.1,3437-3455).
gtcctcatgaacatcctta

SEQ ID NO: 70177 - DNA, 19 bp, Homo sapiens
  siRNA target sequence for ABCC12 (NM_033226.1,3516-3534).
gcctgtcattgtcatacat

SEQ ID NO: 70178 - DNA, 19 bp, Homo sapiens
  siRNA target sequence for ABCC12 (NM_033226.1,3518-3536).
ctgtcattgtcatacatca

SEQ ID NO: 70179 - DNA, 19 bp, Homo sapiens
  siRNA target sequence for ABCC12 (NM_033226.1,3579-3597).
cagagacgcaagccaaatt

SEQ ID NO: 70180 - DNA, 19 bp, Homo sapiens
  siRNA target sequence for ABCC12 (NM_033226.1,3581-3599).
gagacgcaagccaaattca

SEQ ID NO: 70181 - DNA, 19 bp, Homo sapiens
  siRNA target sequence for ABCC12 (NM_033226.1,3614-3632).
ctcagggaatacatttcga

SEQ ID NO: 70182 - DNA, 19 bp, Homo sapiens
  siRNA target sequence for ABCC12 (NM_033226.1,3648-3666).
gcactcatcccctcaaagt

SEQ ID NO: 70183 - DNA, 19 bp, Homo sapiens
  siRNA target sequence for ABCC12 (NM_033226.1,3716-3734).
gactatcagatgagataca

SEQ ID NO: 70184 - DNA, 19 bp, Homo sapiens
  siRNA target sequence for ABCC12 (NM_033226.1,3755-3773).
ctcgacagcctgaacttga

SEQ ID NO: 70185 - DNA, 19 bp, Homo sapiens
  siRNA target sequence for ABCC12 (NM_033226.1,3766-3784).
gaacttgaacatacaaagt

SEQ ID NO: 70186 - DNA, 19 bp, Homo sapiens
  siRNA target sequence for ABCC12 (NM_033226.1,3787-3805).
gcagacagtcgggattgtt

SEQ ID NO: 70187 - DNA, 19 bp, Homo sapiens
  siRNA target sequence for ABCC12 (NM_033226.1,3863-3881).
ccagccagtggcacaatct

SEQ ID NO: 70188 - DNA, 19 bp, Homo sapiens
  siRNA target sequence for ABCC12 (NM_033226.1,3971-3989).
ggtacagtaaggtacaact

SEQ ID NO: 70189 - DNA, 19 bp, Homo sapiens
  siRNA target sequence for ABCC12 (NM_033226.1,3972-3990).
gtacagtaaggtacaactt

SEQ ID NO: 70190 - DNA, 19 bp, Homo sapiens
  siRNA target sequence for ABCC12 (NM_033226.1,4151-4169).
cgagctcttctccgtaatt

SEQ ID NO: 70191 - DNA, 19 bp, Homo sapiens
  siRNA target sequence for ABCC12 (NM_033226.1,4154-4172).
gctcttctccgtaattcaa

SEQ ID NO: 70192 - DNA, 19 bp, Homo sapiens
  siRNA target sequence for ABCC12 (NM_033226.1,4164-4182).
gtaattcaaagatcattct

SEQ ID NO: 70193 - DNA, 19 bp, Homo sapiens
  siRNA target sequence for ABCC12 (NM_033226.1,4174-4192).
gatcattctccttgatgaa

SEQ ID NO: 70194 - DNA, 19 bp, Homo sapiens
  siRNA target sequence for ABCC12 (NM_033226.1,4308-4326).
gcgatcacgtcctggttat

SEQ ID NO: 70195 - DNA, 19 bp, Homo sapiens
  siRNA target sequence for ABCC12 (NM_033226.1,4313-4331).
cacgtcctggttatggaaa

SEQ ID NO: 70196 - DNA, 19 bp, Homo sapiens
  siRNA target sequence for ABCC12 (NM_033226.1,4315-4333).
cgtcctggttatggaaaat

SEQ ID NO: 70197 - DNA, 19 bp, Homo sapiens
  siRNA target sequence for ABCC12 (NM_033226.1,4386-4404).
ctgcatttgcgatgttact

SEQ ID NO: 70198 - DNA, 19 bp, Homo sapiens
  siRNA target sequence for ABCC12 (NM_033226.1,4406-4424).
gcagcagaagtcagattgt

SEQ ID NO: 70199 - DNA, 19 bp, Homo sapiens
  siRNA target sequence for ABCC12 (NM_145187.1,765-783).
ggccgacagttctcattca

SEQ ID NO: 70200 - DNA, 19 bp, Homo sapiens
  siRNA target sequence for ABCC12 (NM_145188.1,2997-3015).
cggtgtttgataagcattt

SEQ ID NO: 70201 - DNA, 19 bp, Homo sapiens
  siRNA target sequence for ABCC13 (NM_138726.2,345-363).
gcgcttgatacacagaaat

SEQ ID NO: 70202 - DNA, 19 bp, Homo sapiens
  siRNA target sequence for ABCC13 (NM_138726.2,409-427).
cctggtttagcagagtaat

SEQ ID NO: 70203 - DNA, 19 bp, Homo sapiens
  siRNA target sequence for ABCC13 (NM_138726.2,410-428).
ctggtttagcagagtaatt

SEQ ID NO: 70204 - DNA, 19 bp, Homo sapiens
  siRNA target sequence for ABCC13 (NM_138726.2,413-431).
gtttagcagagtaattact

SEQ ID NO: 70205 - DNA, 19 bp, Homo sapiens
  siRNA target sequence for ABCC13 (NM_138726.2,437-455).
ctataagagacctttggaa

SEQ ID NO: 70206 - DNA, 19 bp, Homo sapiens
  siRNA target sequence for ABCC13 (NM_138726.2,497-515).
cactgcgtgtcccatcttt

SEQ ID NO: 70207 - DNA, 19 bp, Homo sapiens
  siRNA target sequence for ABCC13 (NM_138726.2,599-617).
gaaaccatctctactctat

SEQ ID NO: 70208 - DNA, 19 bp, Homo sapiens
  siRNA target sequence for ABCC13 (NM_138726.2,603-621).
ccatctctactctatgcat

SEQ ID NO: 70209 - DNA, 19 bp, Homo sapiens
  siRNA target sequence for ABCC13 (NM_138726.2,604-622).
catctctactctatgcatt

SEQ ID NO: 70210 - DNA, 19 bp, Homo sapiens
  siRNA target sequence for ABCC13 (NM_138726.2,618-636).
gcattgtggaacaccttta

SEQ ID NO: 70211 - DNA, 19 bp, Homo sapiens
  siRNA target sequence for ABCC13 (NM_138726.2,678-696).
gatattttgtccttcacta

SEQ ID NO: 70212 - DNA, 19 bp, Homo sapiens
  siRNA target sequence for ABCC13 (NM_138726.2,689-707).
cttcactagcccactcata

SEQ ID NO: 70213 - DNA, 19 bp, Homo sapiens
  siRNA target sequence for ABCC13 (NM_138726.2,694-712).
ctagcccactcataatgaa

SEQ ID NO: 70214 - DNA, 19 bp, Homo sapiens
  siRNA target sequence for ABCC13 (NM_172024.1,713-731).
gcaaattatcattttctgt

SEQ ID NO: 70215 - DNA, 19 bp, Homo sapiens
  siRNA target sequence for ABCC13 (NM_172024.1,767-785).
ctatgcagtggcacttctt

SEQ ID NO: 70216 - DNA, 19 bp, Homo sapiens
  siRNA target sequence for ABCC13 (NM_172024.1,772-790).
cagtggcacttcttgttgt

SEQ ID NO: 70217 - DNA, 19 bp, Homo sapiens
  siRNA target sequence for ABCC13 (NM_172024.1,890-908).
ggccttacttttatcaaat

SEQ ID NO: 70218 - DNA, 19 bp, Homo sapiens
  siRNA target sequence for ABCC13 (NM_172024.1,892-910).
ccttacttttatcaaatgt

SEQ ID NO: 70219 - DNA, 19 bp, Homo sapiens
  siRNA target sequence for ABCC13 (NM_172024.1,904-922).
caaatgtttctcgacaaaa

SEQ ID NO: 70220 - DNA, 19 bp, Homo sapiens
  siRNA target sequence for ABCC13 (NM_172024.1,934-952).
gggaaattattaacttgat

SEQ ID NO: 70221 - DNA, 19 bp, Homo sapiens
  siRNA target sequence for ABCC13 (NM_172024.1,995-1013).
ggtctgccccttttcaaat

SEQ ID NO: 70222 - DNA, 19 bp, Homo sapiens
  siRNA target sequence for ABCC13 (NM_172024.1,1000-1018).
gccccttttcaaatcctaa

SEQ ID NO: 70223 - DNA, 19 bp, Homo sapiens
  siRNA target sequence for ABCC13 (NM_172024.1,1001-1019).
ccccttttcaaatcctaat

SEQ ID NO: 70224 - DNA, 19 bp, Homo sapiens
  siRNA target sequence for ABCC13 (NM_172026.1,323-341).
cttgatacacagagtaatt

SEQ ID NO: 70225 - DNA, 19 bp, Homo sapiens
  siRNA target sequence for ABCC13 (NM_172026.1,326-344).
gatacacagagtaattact

SEQ ID NO: 70226 - DNA, 19 bp, Homo sapiens
  siRNA target sequence for ABCC2 (NM_000392.1,98-116).
gcagacctgccactttgtt

SEQ ID NO: 70227 - DNA, 19 bp, Homo sapiens
  siRNA target sequence for ABCC2 (NM_000392.1,178-196).
gcttctccacgtgtataaa

SEQ ID NO: 70228 - DNA, 19 bp, Homo sapiens
  siRNA target sequence for ABCC2 (NM_000392.1,179-197).
cttctccacgtgtataaat

SEQ ID NO: 70229 - DNA, 19 bp, Homo sapiens
  siRNA target sequence for ABCC2 (NM_000392.1,214-232).
ctctaccaccaaactctat

SEQ ID NO: 70230 - DNA, 19 bp, Homo sapiens
  siRNA target sequence for ABCC2 (NM_000392.1,216-234).
ctaccaccaaactctatct

SEQ ID NO: 70231 - DNA, 19 bp, Homo sapiens
  siRNA target sequence for ABCC2 (NM_000392.1,222-240).
ccaaactctatcttgctaa

SEQ ID NO: 70232 - DNA, 19 bp, Homo sapiens
  siRNA target sequence for ABCC2 (NM_000392.1,244-262).
ggtattcgttggttttctt

SEQ ID NO: 70233 - DNA, 19 bp, Homo sapiens
  siRNA target sequence for ABCC2 (NM_000392.1,321-339).
cagtccctgctgttcgata

SEQ ID NO: 70234 - DNA, 19 bp, Homo sapiens
  siRNA target sequence for ABCC2 (NM_000392.1,323-341).
gtccctgctgttcgatata

SEQ ID NO: 70235 - DNA, 19 bp, Homo sapiens
  siRNA target sequence for ABCC2 (NM_000392.1,326-344).
cctgctgttcgatatacca

SEQ ID NO: 70236 - DNA, 19 bp, Homo sapiens
  siRNA target sequence for ABCC2 (NM_000392.1,327-345).
ctgctgttcgatataccaa

SEQ ID NO: 70237 - DNA, 19 bp, Homo sapiens
  siRNA target sequence for ABCC2 (NM_000392.1,332-350).
gttcgatataccaatccaa

SEQ ID NO: 70238 - DNA, 19 bp, Homo sapiens
  siRNA target sequence for ABCC2 (NM_000392.1,377-395).
gttttgctgatccaataca

SEQ ID NO: 70239 - DNA, 19 bp, Homo sapiens
  siRNA target sequence for ABCC2 (NM_000392.1,458-476).
ctctgtggcactttccaat

SEQ ID NO: 70240 - DNA, 19 bp, Homo sapiens
  siRNA target sequence for ABCC2 (NM_000392.1,462-480).
gtggcactttccaatttca

SEQ ID NO: 70241 - DNA, 19 bp, Homo sapiens
  siRNA target sequence for ABCC2 (NM_000392.1,505-523).
gggtgacaattctaatcta

SEQ ID NO: 70242 - DNA, 19 bp, Homo sapiens
  siRNA target sequence for ABCC2 (NM_000392.1,658-676).
ctggtatgacagcatcatt

SEQ ID NO: 70243 - DNA, 19 bp, Homo sapiens
  siRNA target sequence for ABCC2 (NM_000392.1,856-874).
gcctggcttgaacaagaat

SEQ ID NO: 70244 - DNA, 19 bp, Homo sapiens
  siRNA target sequence for ABCC2 (NM_000392.1,858-876).
ctggcttgaacaagaatca

SEQ ID NO: 70245 - DNA, 19 bp, Homo sapiens
  siRNA target sequence for ABCC2 (NM_000392.1,860-878).
ggcttgaacaagaatcaga

SEQ ID NO: 70246 - DNA, 19 bp, Homo sapiens
  siRNA target sequence for ABCC2 (NM_000392.1,974-992).
gctctgttcaaaactttct

SEQ ID NO: 70247 - DNA, 19 bp, Homo sapiens
  siRNA target sequence for ABCC2 (NM_000392.1,1019-1037).
ctgaagctagtgaatgaca

SEQ ID NO: 70248 - DNA, 19 bp, Homo sapiens
  siRNA target sequence for ABCC2 (NM_000392.1,1034-1052).
gacatcttcacgtttgtga

SEQ ID NO: 70249 - DNA, 19 bp, Homo sapiens
  siRNA target sequence for ABCC2 (NM_000392.1,1089-1107).
gtgaccgtgacacatattt

SEQ ID NO: 70250 - DNA, 19 bp, Homo sapiens
  siRNA target sequence for ABCC2 (NM_000392.1,1091-1109).
gaccgtgacacatatttgt

SEQ ID NO: 70251 - DNA, 19 bp, Homo sapiens
  siRNA target sequence for ABCC2 (NM_000392.1,1191-1209).
gcttcaagctgggtgtaaa

SEQ ID NO: 70252 - DNA, 19 bp, Homo sapiens
  siRNA target sequence for ABCC2 (NM_000392.1,1220-1238).
gctatcatggcttctgtat

SEQ ID NO: 70253 - DNA, 19 bp, Homo sapiens
  siRNA target sequence for ABCC2 (NM_000392.1,1362-1380).
ggtcaagtgttctacagat

SEQ ID NO: 70254 - DNA, 19 bp, Homo sapiens
  siRNA target sequence for ABCC2 (NM_000392.1,1368-1386).
gtgttctacagattgtctt

SEQ ID NO: 70255 - DNA, 19 bp, Homo sapiens
  siRNA target sequence for ABCC2 (NM_000392.1,1376-1394).
cagattgtcttatctatct

SEQ ID NO: 70256 - DNA, 19 bp, Homo sapiens
  siRNA target sequence for ABCC2 (NM_000392.1,1440-1458).
gggtgatggtgcttgtaat

SEQ ID NO: 70257 - DNA, 19 bp, Homo sapiens
  siRNA target sequence for ABCC2 (NM_000392.1,1460-1478).
ccaattaatgcgatactgt

SEQ ID NO: 70258 - DNA, 19 bp, Homo sapiens
  siRNA target sequence for ABCC2 (NM_000392.1,1501-1519).
ggtcaaaaatatgaagaat

SEQ ID NO: 70259 - DNA, 19 bp, Homo sapiens
  siRNA target sequence for ABCC2 (NM_000392.1,1523-1541).
gacaaacgtttaaagatca

SEQ ID NO: 70260 - DNA, 19 bp, Homo sapiens
  siRNA target sequence for ABCC2 (NM_000392.1,1596-1614).
cattcagagaccaagtaca

SEQ ID NO: 70261 - DNA, 19 bp, Homo sapiens
  siRNA target sequence for ABCC2 (NM_000392.1,1639-1657).
gaacctgctggcctttagt

SEQ ID NO: 70262 - DNA, 19 bp, Homo sapiens
  siRNA target sequence for ABCC2 (NM_000392.1,1645-1663).
gctggcctttagtcaacta

SEQ ID NO: 70263 - DNA, 19 bp, Homo sapiens
  siRNA target sequence for ABCC2 (NM_000392.1,1658-1676).
caactacagtgtgtagtaa

SEQ ID NO: 70264 - DNA, 19 bp, Homo sapiens
  siRNA target sequence for ABCC2 (NM_000392.1,1661-1679).
ctacagtgtgtagtaatat

SEQ ID NO: 70265 - DNA, 19 bp, Homo sapiens
  siRNA target sequence for ABCC2 (NM_000392.1,1736-1754).
ctggtggatagcaacaata

SEQ ID NO: 70266 - DNA, 19 bp, Homo sapiens
  siRNA target sequence for ABCC2 (NM_000392.1,1739-1757).
gtggatagcaacaatattt

SEQ ID NO: 70267 - DNA, 19 bp, Homo sapiens
  siRNA target sequence for ABCC2 (NM_000392.1,1780-1798).
ctccattaccctcttcaat

SEQ ID NO: 70268 - DNA, 19 bp, Homo sapiens
  siRNA target sequence for ABCC2 (NM_000392.1,1782-1800).
ccattaccctcttcaatat

SEQ ID NO: 70269 - DNA, 19 bp, Homo sapiens
  siRNA target sequence for ABCC2 (NM_000392.1,1866-1884).
cagagcggctagagaagta

SEQ ID NO: 70270 - DNA, 19 bp, Homo sapiens
  siRNA target sequence for ABCC2 (NM_000392.1,1920-1938).
gacatgactgcaattttga

SEQ ID NO: 70271 - DNA, 19 bp, Homo sapiens
  siRNA target sequence for ABCC2 (NM_000392.1,1992-2010).
ccacagtccgagatgtgaa

SEQ ID NO: 70272 - DNA, 19 bp, Homo sapiens
  siRNA target sequence for ABCC2 (NM_000392.1,2029-2047).
ccaacttgtggctgtgata

SEQ ID NO: 70273 - DNA, 19 bp, Homo sapiens
  siRNA target sequence for ABCC2 (NM_000392.1,2175-2193).
gcaccataaaggacaacat

SEQ ID NO: 70274 - DNA, 19 bp, Homo sapiens
  siRNA target sequence for ABCC2 (NM_000392.1,2355-2373).
gagctacctaccaaaattt

SEQ ID NO: 70275 - DNA, 19 bp, Homo sapiens
  siRNA target sequence for ABCC2 (NM_000392.1,2361-2379).
cctaccaaaatttagacat

SEQ ID NO: 70276 - DNA, 19 bp, Homo sapiens
  siRNA target sequence for ABCC2 (NM_000392.1,2365-2383).
ccaaaatttagacatctat

SEQ ID NO: 70277 - DNA, 19 bp, Homo sapiens
  siRNA target sequence for ABCC2 (NM_000392.1,2478-2496).
ctcgactcttggttacaca

SEQ ID NO: 70278 - DNA, 19 bp, Homo sapiens
  siRNA target sequence for ABCC2 (NM_000392.1,2595-2613).
gagagtttgctaagaatct

SEQ ID NO: 70279 - DNA, 19 bp, Homo sapiens
  siRNA target sequence for ABCC2 (NM_000392.1,2684-2702).
gatgactatgggctgatat

SEQ ID NO: 70280 - DNA, 19 bp, Homo sapiens
  siRNA target sequence for ABCC2 (NM_000392.1,2875-2893).
gaaaggacaaaaactaatt

SEQ ID NO: 70281 - DNA, 19 bp, Homo sapiens
  siRNA target sequence for ABCC2 (NM_000392.1,2941-2959).
ggagtacctacaagcaata

SEQ ID NO: 70282 - DNA, 19 bp, Homo sapiens
  siRNA target sequence for ABCC2 (NM_000392.1,2944-2962).
gtacctacaagcaatagga

SEQ ID NO: 70283 - DNA, 19 bp, Homo sapiens
  siRNA target sequence for ABCC2 (NM_000392.1,2951-2969).
caagcaataggattgtttt

SEQ ID NO: 70284 - DNA, 19 bp, Homo sapiens
  siRNA target sequence for ABCC2 (NM_000392.1,2954-2972).
gcaataggattgttttcga

SEQ ID NO: 70285 - DNA, 19 bp, Homo sapiens
  siRNA target sequence for ABCC2 (NM_000392.1,2987-3005).
cttgcgtttgtgatgaatt

SEQ ID NO: 70286 - DNA, 19 bp, Homo sapiens
  siRNA target sequence for ABCC2 (NM_000392.1,3045-3063).
ggaccagtgactctaaaat

SEQ ID NO: 70287 - DNA, 19 bp, Homo sapiens
  siRNA target sequence for ABCC2 (NM_000392.1,3127-3145).
gggattagcccaaggtata

SEQ ID NO: 70288 - DNA, 19 bp, Homo sapiens
  siRNA target sequence for ABCC2 (NM_000392.1,3128-3146).
ggattagcccaaggtatat

SEQ ID NO: 70289 - DNA, 19 bp, Homo sapiens
  siRNA target sequence for ABCC2 (NM_000392.1,3129-3147).
gattagcccaaggtatatt

SEQ ID NO: 70290 - DNA, 19 bp, Homo sapiens
  siRNA target sequence for ABCC2 (NM_000392.1,3134-3152).
gcccaaggtatatttgtgt

SEQ ID NO: 70291 - DNA, 19 bp, Homo sapiens
  siRNA target sequence for ABCC2 (NM_000392.1,3185-3203).
gtccatgcatcaaatatct

SEQ ID NO: 70292 - DNA, 19 bp, Homo sapiens
  siRNA target sequence for ABCC2 (NM_000392.1,3229-3247).
ccttcgagcacctatgaga

SEQ ID NO: 70293 - DNA, 19 bp, Homo sapiens
  siRNA target sequence for ABCC2 (NM_000392.1,3233-3251).
cgagcacctatgagatttt

SEQ ID NO: 70294 - DNA, 19 bp, Homo sapiens
  siRNA target sequence for ABCC2 (NM_000392.1,3234-3252).
gagcacctatgagattttt

SEQ ID NO: 70295 - DNA, 19 bp, Homo sapiens
  siRNA target sequence for ABCC2 (NM_000392.1,3237-3255).
cacctatgagattttttga

SEQ ID NO: 70296 - DNA, 19 bp, Homo sapiens
  siRNA target sequence for ABCC2 (NM_000392.1,3263-3281).
cccacaggccggattgtga

SEQ ID NO: 70297 - DNA, 19 bp, Homo sapiens
  siRNA target sequence for ABCC2 (NM_000392.1,3264-3282).
ccacaggccggattgtgaa

SEQ ID NO: 70298 - DNA, 19 bp, Homo sapiens
  siRNA target sequence for ABCC2 (NM_000392.1,3429-3447).
gcattatttatgtatctgt

SEQ ID NO: 70299 - DNA, 19 bp, Homo sapiens
  siRNA target sequence for ABCC2 (NM_000392.1,3705-3723).
ccttgatgatggttattta

SEQ ID NO: 70300 - DNA, 19 bp, Homo sapiens
  siRNA target sequence for ABCC2 (NM_000392.1,3770-3788).
gcactcaatatcacacaaa

SEQ ID NO: 70301 - DNA, 19 bp, Homo sapiens
  siRNA target sequence for ABCC2 (NM_000392.1,3805-3823).
gaggatgacatcagaaata

SEQ ID NO: 70302 - DNA, 19 bp, Homo sapiens
  siRNA target sequence for ABCC2 (NM_000392.1,3836-3854).
gtggctgttgagcgaataa

SEQ ID NO: 70303 - DNA, 19 bp, Homo sapiens
  siRNA target sequence for ABCC2 (NM_000392.1,3838-3856).
ggctgttgagcgaataact

SEQ ID NO: 70304 - DNA, 19 bp, Homo sapiens
  siRNA target sequence for ABCC2 (NM_000392.1,3848-3866).
cgaataactgagtacacaa

SEQ ID NO: 70305 - DNA, 19 bp, Homo sapiens
  siRNA target sequence for ABCC2 (NM_000392.1,3849-3867).
gaataactgagtacacaaa

SEQ ID NO: 70306 - DNA, 19 bp, Homo sapiens
  siRNA target sequence for ABCC2 (NM_000392.1,4074-4092).
gcctcttcagaatcttaga

SEQ ID NO: 70307 - DNA, 19 bp, Homo sapiens
  siRNA target sequence for ABCC2 (NM_000392.1,4097-4115).
gccggtggtcagattatca

SEQ ID NO: 70308 - DNA, 19 bp, Homo sapiens
  siRNA target sequence for ABCC2 (NM_000392.1,4098-4116).
ccggtggtcagattatcat

SEQ ID NO: 70309 - DNA, 19 bp, Homo sapiens
  siRNA target sequence for ABCC2 (NM_000392.1,4099-4117).
cggtggtcagattatcatt

SEQ ID NO: 70310 - DNA, 19 bp, Homo sapiens
  siRNA target sequence for ABCC2 (NM_000392.1,4101-4119).
gtggtcagattatcattga

SEQ ID NO: 70311 - DNA, 19 bp, Homo sapiens
  siRNA target sequence for ABCC2 (NM_000392.1,4220-4238).
ctcgaccctttcaacaact

SEQ ID NO: 70312 - DNA, 19 bp, Homo sapiens
  siRNA target sequence for ABCC2 (NM_000392.1,4273-4291).
ggctcacctcaagtctttt

SEQ ID NO: 70313 - DNA, 19 bp, Homo sapiens
  siRNA target sequence for ABCC2 (NM_000392.1,4386-4404).
ctctgcttcggaaatccaa

SEQ ID NO: 70314 - DNA, 19 bp, Homo sapiens
  siRNA target sequence for ABCC2 (NM_000392.1,4428-4446).
ctgctgcggtggatctaga

SEQ ID NO: 70315 - DNA, 19 bp, Homo sapiens
  siRNA target sequence for ABCC2 (NM_000392.1,4555-4573).
cctagacaacgggaagatt

SEQ ID NO: 70316 - DNA, 19 bp, Homo sapiens
  siRNA target sequence for ABCC2 (NM_000392.1,4556-4574).
ctagacaacgggaagatta

SEQ ID NO: 70317 - DNA, 19 bp, Homo sapiens
  siRNA target sequence for ABCC2 (NM_000392.1,4610-4628).
cctggacccttttacttta

SEQ ID NO: 70318 - DNA, 19 bp, Homo sapiens
  siRNA target sequence for ABCC2 (NM_000392.1,4640-4658).
gctggcattgagaatgtga

SEQ ID NO: 70319 - DNA, 19 bp, Homo sapiens
  siRNA target sequence for ABCC2 (NM_000392.1,4641-4659).
ctggcattgagaatgtgaa

SEQ ID NO: 70320 - DNA, 19 bp, Homo sapiens
  siRNA target sequence for ABCC3 (NM_003786.2,245-263).
cattgtcgtggctacatca

SEQ ID NO: 70321 - DNA, 19 bp, Homo sapiens
  siRNA target sequence for ABCC3 (NM_003786.2,321-339).
cctgggcggacctttttta

SEQ ID NO: 70322 - DNA, 19 bp, Homo sapiens
  siRNA target sequence for ABCC3 (NM_003786.2,427-445).
caccctgctgatacagtat

SEQ ID NO: 70323 - DNA, 19 bp, Homo sapiens
  siRNA target sequence for ABCC3 (NM_003786.2,468-486).
cttcgggggtcctcattat

SEQ ID NO: 70324 - DNA, 19 bp, Homo sapiens
  siRNA target sequence for ABCC3 (NM_003786.2,526-544).
ccgctccaagatcctttta

SEQ ID NO: 70325 - DNA, 19 bp, Homo sapiens
  siRNA target sequence for ABCC3 (NM_003786.2,1011-1029).
gtgcctgcttcaagcttat

SEQ ID NO: 70326 - DNA, 19 bp, Homo sapiens
  siRNA target sequence for ABCC3 (NM_003786.2,1068-1086).
gcatcctgatcaggtttat

SEQ ID NO: 70327 - DNA, 19 bp, Homo sapiens
  siRNA target sequence for ABCC3 (NM_003786.2,1156-1174).
gcagtcgctgatcttacaa

SEQ ID NO: 70328 - DNA, 19 bp, Homo sapiens
  siRNA target sequence for ABCC3 (NM_003786.2,1161-1179).
cgctgatcttacaacacta

SEQ ID NO: 70329 - DNA, 19 bp, Homo sapiens
  siRNA target sequence for ABCC3 (NM_003786.2,1163-1181).
ctgatcttacaacactatt

SEQ ID NO: 70330 - DNA, 19 bp, Homo sapiens
  siRNA target sequence for ABCC3 (NM_003786.2,1177-1195).
ctattaccactacatcttt

SEQ ID NO: 70331 - DNA, 19 bp, Homo sapiens
  siRNA target sequence for ABCC3 (NM_003786.2,1221-1239).
ggatcatgggtgtcatcta

SEQ ID NO: 70332 - DNA, 19 bp, Homo sapiens
  siRNA target sequence for ABCC3 (NM_003786.2,1365-1383).
cagcacccctgcagatcat

SEQ ID NO: 70333 - DNA, 19 bp, Homo sapiens
  siRNA target sequence for ABCC3 (NM_003786.2,1492-1510).
cgccttccaggtaaagcaa

SEQ ID NO: 70334 - DNA, 19 bp, Homo sapiens
  siRNA target sequence for ABCC3 (NM_003786.2,1735-1753).
gtacgtggacccaaacaat

SEQ ID NO: 70335 - DNA, 19 bp, Homo sapiens
  siRNA target sequence for ABCC3 (NM_003786.2,1784-1802).
gtgtccttgtttaatatct

SEQ ID NO: 70336 - DNA, 19 bp, Homo sapiens
  siRNA target sequence for ABCC3 (NM_003786.2,1786-1804).
gtccttgtttaatatctta

SEQ ID NO: 70337 - DNA, 19 bp, Homo sapiens
  siRNA target sequence for ABCC3 (NM_003786.2,2349-2367).
gtctggctcgagctgttta

SEQ ID NO: 70338 - DNA, 19 bp, Homo sapiens
  siRNA target sequence for ABCC3 (NM_003786.2,2351-2369).
ctggctcgagctgtttaca

SEQ ID NO: 70339 - DNA, 19 bp, Homo sapiens
  siRNA target sequence for ABCC3 (NM_003786.2,2353-2371).
ggctcgagctgtttacagt

SEQ ID NO: 70340 - DNA, 19 bp, Homo sapiens
  siRNA target sequence for ABCC3 (NM_003786.2,2608-2626).
caactttctctgcaactat

SEQ ID NO: 70341 - DNA, 19 bp, Homo sapiens
  siRNA target sequence for ABCC3 (NM_003786.2,2692-2710).
ggaggcactgctgattgaa

SEQ ID NO: 70342 - DNA, 19 bp, Homo sapiens
  siRNA target sequence for ABCC3 (NM_003786.2,2728-2746).
cacggatctgacagacaat

SEQ ID NO: 70343 - DNA, 19 bp, Homo sapiens
  siRNA target sequence for ABCC3 (NM_003786.2,2730-2748).
cggatctgacagacaatga

SEQ ID NO: 70344 - DNA, 19 bp, Homo sapiens
  siRNA target sequence for ABCC3 (NM_003786.2,2731-2749).
ggatctgacagacaatgat

SEQ ID NO: 70345 - DNA, 19 bp, Homo sapiens
  siRNA target sequence for ABCC3 (NM_003786.2,3023-3041).
gccattggagccaatgtgt

SEQ ID NO: 70346 - DNA, 19 bp, Homo sapiens
  siRNA target sequence for ABCC3 (NM_003786.2,3046-3064).
cagtgcctggacaaatgat

SEQ ID NO: 70347 - DNA, 19 bp, Homo sapiens
  siRNA target sequence for ABCC3 (NM_003786.2,3106-3124).
gggcgtctatgctgcttta

SEQ ID NO: 70348 - DNA, 19 bp, Homo sapiens
  siRNA target sequence for ABCC3 (NM_003786.2,3236-3254).
ccacagtccttctttgaca

SEQ ID NO: 70349 - DNA, 19 bp, Homo sapiens
  siRNA target sequence for ABCC3 (NM_003786.2,3332-3350).
ctcatgctgctcaattcct

SEQ ID NO: 70350 - DNA, 19 bp, Homo sapiens
  siRNA target sequence for ABCC3 (NM_003786.2,3462-3480).
ccacatcacggcaactgaa

SEQ ID NO: 70351 - DNA, 19 bp, Homo sapiens
  siRNA target sequence for ABCC3 (NM_003786.2,3506-3524).
cctatctactcccactttt

SEQ ID NO: 70352 - DNA, 19 bp, Homo sapiens
  siRNA target sequence for ABCC3 (NM_003786.2,3562-3580).
caaccgcagccgggatttt

SEQ ID NO: 70353 - DNA, 19 bp, Homo sapiens
  siRNA target sequence for ABCC3 (NM_003786.2,3567-3585).
gcagccgggattttgagat

SEQ ID NO: 70354 - DNA, 19 bp, Homo sapiens
  siRNA target sequence for ABCC3 (NM_003786.2,3572-3590).
cgggattttgagatcatca

SEQ ID NO: 70355 - DNA, 19 bp, Homo sapiens
  siRNA target sequence for ABCC3 (NM_003786.2,3581-3599).
gagatcatcagtgatacta

SEQ ID NO: 70356 - DNA, 19 bp, Homo sapiens
  siRNA target sequence for ABCC3 (NM_003786.2,3621-3639).
gctgctacccctacatcat

SEQ ID NO: 70357 - DNA, 19 bp, Homo sapiens
  siRNA target sequence for ABCC3 (NM_003786.2,3691-3709).
gctctttgctgcactattt

SEQ ID NO: 70358 - DNA, 19 bp, Homo sapiens
  siRNA target sequence for ABCC3 (NM_003786.2,3788-3806).
ctgaactggatgatacgaa

SEQ ID NO: 70359 - DNA, 19 bp, Homo sapiens
  siRNA target sequence for ABCC3 (NM_003786.2,3937-3955).
ggagttccggaattattct

SEQ ID NO: 70360 - DNA, 19 bp, Homo sapiens
  siRNA target sequence for ABCC3 (NM_003786.2,4102-4120).
gggtgaaatccgcattgat

SEQ ID NO: 70361 - DNA, 19 bp, Homo sapiens
  siRNA target sequence for ABCC3 (NM_003786.2,4399-4417).
gagccgcatcctggtttta

SEQ ID NO: 70362 - DNA, 19 bp, Homo sapiens
  siRNA target sequence for ABCC3 (NM_003786.2,4470-4488).
ccatccgcacccagtttga

SEQ ID NO: 70363 - DNA, 19 bp, Homo sapiens
  siRNA target sequence for ABCC3 (NM_003786.2,4471-4489).
catccgcacccagtttgat

SEQ ID NO: 70364 - DNA, 19 bp, Homo sapiens
  siRNA target sequence for ABCC3 (NM_003786.2,4510-4528).
cgcacaccggcttaacact

SEQ ID NO: 70365 - DNA, 19 bp, Homo sapiens
  siRNA target sequence for ABCC3 (NM_003786.2,4511-4529).
gcacaccggcttaacacta

SEQ ID NO: 70366 - DNA, 19 bp, Homo sapiens
  siRNA target sequence for ABCC3 (NM_003786.2,4512-4530).
cacaccggcttaacactat

SEQ ID NO: 70367 - DNA, 19 bp, Homo sapiens
  siRNA target sequence for ABCC3 (NM_003786.2,4566-4584).
gagtagtagctgaatttga

SEQ ID NO: 70368 - DNA, 19 bp, Homo sapiens
  siRNA target sequence for ABCC4 (NM_005845.2,196-214).
caatcccttgtttaaaatt

SEQ ID NO: 70369 - DNA, 19 bp, Homo sapiens
  siRNA target sequence for ABCC4 (NM_005845.2,216-234).
gccataaacggagattaga

SEQ ID NO: 70370 - DNA, 19 bp, Homo sapiens
  siRNA target sequence for ABCC4 (NM_005845.2,235-253).
ggaagatgatatgtattca

SEQ ID NO: 70371 - DNA, 19 bp, Homo sapiens
  siRNA target sequence for ABCC4 (NM_005845.2,343-361).
gaagccttctttaacaaga

SEQ ID NO: 70372 - DNA, 19 bp, Homo sapiens
  siRNA target sequence for ABCC4 (NM_005845.2,360-378).
gagcaatcataaagtgtta

SEQ ID NO: 70373 - DNA, 19 bp, Homo sapiens
  siRNA target sequence for ABCC4 (NM_005845.2,362-380).
gcaatcataaagtgttact

SEQ ID NO: 70374 - DNA, 19 bp, Homo sapiens
  siRNA target sequence for ABCC4 (NM_005845.2,375-393).
gttactggaaatcttattt

SEQ ID NO: 70375 - DNA, 19 bp, Homo sapiens
  siRNA target sequence for ABCC4 (NM_005845.2,379-397).
ctggaaatcttatttagtt

SEQ ID NO: 70376 - DNA, 19 bp, Homo sapiens
  siRNA target sequence for ABCC4 (NM_005845.2,400-418).
gggaatttttacgttaatt

SEQ ID NO: 70377 - DNA, 19 bp, Homo sapiens
  siRNA target sequence for ABCC4 (NM_005845.2,402-420).
gaatttttacgttaattga

SEQ ID NO: 70378 - DNA, 19 bp, Homo sapiens
  siRNA target sequence for ABCC4 (NM_005845.2,434-452).
gtaatccagcccatatttt

SEQ ID NO: 70379 - DNA, 19 bp, Homo sapiens
  siRNA target sequence for ABCC4 (NM_005845.2,527-545).
gccacggtgctgacttttt

SEQ ID NO: 70380 - DNA, 19 bp, Homo sapiens
  siRNA target sequence for ABCC4 (NM_005845.2,549-567).
cgctcattttggctatact

SEQ ID NO: 70381 - DNA, 19 bp, Homo sapiens
  siRNA target sequence for ABCC4 (NM_005845.2,559-577).
ggctatactgcatcactta

SEQ ID NO: 70382 - DNA, 19 bp, Homo sapiens
  siRNA target sequence for ABCC4 (NM_005845.2,621-639).
ccatgtgccatatgattta

SEQ ID NO: 70383 - DNA, 19 bp, Homo sapiens
  siRNA target sequence for ABCC4 (NM_005845.2,643-661).
gaaggcacttcgtcttagt

SEQ ID NO: 70384 - DNA, 19 bp, Homo sapiens
  siRNA target sequence for ABCC4 (NM_005845.2,647-665).
gcacttcgtcttagtaaca

SEQ ID NO: 70385 - DNA, 19 bp, Homo sapiens
  siRNA target sequence for ABCC4 (NM_005845.2,648-666).
cacttcgtcttagtaacat

SEQ ID NO: 70386 - DNA, 19 bp, Homo sapiens
  siRNA target sequence for ABCC4 (NM_005845.2,684-702).
ccacaggccagatagtcaa

SEQ ID NO: 70387 - DNA, 19 bp, Homo sapiens
  siRNA target sequence for ABCC4 (NM_005845.2,685-703).
cacaggccagatagtcaat

SEQ ID NO: 70388 - DNA, 19 bp, Homo sapiens
  siRNA target sequence for ABCC4 (NM_005845.2,687-705).
caggccagatagtcaatct

SEQ ID NO: 70389 - DNA, 19 bp, Homo sapiens
  siRNA target sequence for ABCC4 (NM_005845.2,700-718).
caatctgctgtccaatgat

SEQ ID NO: 70390 - DNA, 19 bp, Homo sapiens
  siRNA target sequence for ABCC4 (NM_005845.2,833-851).
gggatggcagttctaatca

SEQ ID NO: 70391 - DNA, 19 bp, Homo sapiens
  siRNA target sequence for ABCC4 (NM_005845.2,859-877).
gcccttgcaaagctgtttt

SEQ ID NO: 70392 - DNA, 19 bp, Homo sapiens
  siRNA target sequence for ABCC4 (NM_005845.2,889-907).
ctcatcactgaggagtaaa

SEQ ID NO: 70393 - DNA, 19 bp, Homo sapiens
  siRNA target sequence for ABCC4 (NM_005845.2,940-958).
catgaatgaagttataact

SEQ ID NO: 70394 - DNA, 19 bp, Homo sapiens
  siRNA target sequence for ABCC4 (NM_005845.2,950-968).
gttataactggtataagga

SEQ ID NO: 70395 - DNA, 19 bp, Homo sapiens
  siRNA target sequence for ABCC4 (NM_005845.2,979-997).
gtacgcctgggaaaagtca

SEQ ID NO: 70396 - DNA, 19 bp, Homo sapiens
  siRNA target sequence for ABCC4 (NM_005845.2,1031-1049).
gagatttccaagattctga

SEQ ID NO: 70397 - DNA, 19 bp, Homo sapiens
  siRNA target sequence for ABCC4 (NM_005845.2,1266-1284).
gaagaatccagaccttttt

SEQ ID NO: 70398 - DNA, 19 bp, Homo sapiens
  siRNA target sequence for ABCC4 (NM_005845.2,1276-1294).
gacctttttgctacttgat

SEQ ID NO: 70399 - DNA, 19 bp, Homo sapiens
  siRNA target sequence for ABCC4 (NM_005845.2,1319-1337).
ctgccgtcagatggtaaaa

SEQ ID NO: 70400 - DNA, 19 bp, Homo sapiens
  siRNA target sequence for ABCC4 (NM_005845.2,1323-1341).
cgtcagatggtaaaaagat

SEQ ID NO: 70401 - DNA, 19 bp, Homo sapiens
  siRNA target sequence for ABCC4 (NM_005845.2,1397-1415).
ctacaaggcctttccttta

SEQ ID NO: 70402 - DNA, 19 bp, Homo sapiens
  siRNA target sequence for ABCC4 (NM_005845.2,1418-1436).
gtcagacctggcgaattgt

SEQ ID NO: 70403 - DNA, 19 bp, Homo sapiens
  siRNA target sequence for ABCC4 (NM_005845.2,1573-1591).
gggaactctgaggagtaat

SEQ ID NO: 70404 - DNA, 19 bp, Homo sapiens
  siRNA target sequence for ABCC4 (NM_005845.2,1574-1592).
ggaactctgaggagtaata

SEQ ID NO: 70405 - DNA, 19 bp, Homo sapiens
  siRNA target sequence for ABCC4 (NM_005845.2,1650-1668).
ctctgaaaaaggatttaca

SEQ ID NO: 70406 - DNA, 19 bp, Homo sapiens
  siRNA target sequence for ABCC4 (NM_005845.2,1752-1770).
caagagcagtgtatcaaga

SEQ ID NO: 70407 - DNA, 19 bp, Homo sapiens
  siRNA target sequence for ABCC4 (NM_005845.2,1805-1823).
gcagtagatgcggaagtta

SEQ ID NO: 70408 - DNA, 19 bp, Homo sapiens
  siRNA target sequence for ABCC4 (NM_005845.2,1831-1849).
cttgttcgaactgtgtatt

SEQ ID NO: 70409 - DNA, 19 bp, Homo sapiens
  siRNA target sequence for ABCC4 (NM_005845.2,1834-1852).
gttcgaactgtgtatttgt

SEQ ID NO: 70410 - DNA, 19 bp, Homo sapiens
  siRNA target sequence for ABCC4 (NM_005845.2,1837-1855).
cgaactgtgtatttgtcaa

SEQ ID NO: 70411 - DNA, 19 bp, Homo sapiens
  siRNA target sequence for ABCC4 (NM_005845.2,1838-1856).
gaactgtgtatttgtcaaa

SEQ ID NO: 70412 - DNA, 19 bp, Homo sapiens
  siRNA target sequence for ABCC4 (NM_005845.2,1861-1879).
gcatgagaagatcacaatt

SEQ ID NO: 70413 - DNA, 19 bp, Homo sapiens
  siRNA target sequence for ABCC4 (NM_005845.2,1906-1924).
caaagctgcaagtcagatt

SEQ ID NO: 70414 - DNA, 19 bp, Homo sapiens
  siRNA target sequence for ABCC4 (NM_005845.2,1910-1928).
gctgcaagtcagattctga

SEQ ID NO: 70415 - DNA, 19 bp, Homo sapiens
  siRNA target sequence for ABCC4 (NM_005845.2,1911-1929).
ctgcaagtcagattctgat

SEQ ID NO: 70416 - DNA, 19 bp, Homo sapiens
  siRNA target sequence for ABCC4 (NM_005845.2,1949-1967).
gtgcagaaggggacttaca

SEQ ID NO: 70417 - DNA, 19 bp, Homo sapiens
  siRNA target sequence for ABCC4 (NM_005845.2,1951-1969).
gcagaaggggacttacact

SEQ ID NO: 70418 - DNA, 19 bp, Homo sapiens
  siRNA target sequence for ABCC4 (NM_005845.2,1976-1994).
ctaaaatctggtatagatt

SEQ ID NO: 70419 - DNA, 19 bp, Homo sapiens
  siRNA target sequence for ABCC4 (NM_005845.2,2045-2063).
ccaggaactcccacactaa

SEQ ID NO: 70420 - DNA, 19 bp, Homo sapiens
  siRNA target sequence for ABCC4 (NM_005845.2,2054-2072).
cccacactaaggaatcgta

SEQ ID NO: 70421 - DNA, 19 bp, Homo sapiens
  siRNA target sequence for ABCC4 (NM_005845.2,2089-2107).
ggtttggtctcaacaatct

SEQ ID NO: 70422 - DNA, 19 bp, Homo sapiens
  siRNA target sequence for ABCC4 (NM_005845.2,2095-2113).
gtctcaacaatcttctaga

SEQ ID NO: 70423 - DNA, 19 bp, Homo sapiens
  siRNA target sequence for ABCC4 (NM_005845.2,2204-2222).
ggttttcaggcctataaga

SEQ ID NO: 70424 - DNA, 19 bp, Homo sapiens
  siRNA target sequence for ABCC4 (NM_005845.2,2237-2255).
ggtgctcactggattgtct

SEQ ID NO: 70425 - DNA, 19 bp, Homo sapiens
  siRNA target sequence for ABCC4 (NM_005845.2,2248-2266).
gattgtcttcattttcctt

SEQ ID NO: 70426 - DNA, 19 bp, Homo sapiens
  siRNA target sequence for ABCC4 (NM_005845.2,2263-2281).
ccttattctcctaaacact

SEQ ID NO: 70427 - DNA, 19 bp, Homo sapiens
  siRNA target sequence for ABCC4 (NM_005845.2,2347-2365).
gctaaatgtcactgtaaat

SEQ ID NO: 70428 - DNA, 19 bp, Homo sapiens
  siRNA target sequence for ABCC4 (NM_005845.2,2384-2402).
gagaagctagatcttaact

SEQ ID NO: 70429 - DNA, 19 bp, Homo sapiens
  siRNA target sequence for ABCC4 (NM_005845.2,2396-2414).
cttaactggtacttaggaa

SEQ ID NO: 70430 - DNA, 19 bp, Homo sapiens
  siRNA target sequence for ABCC4 (NM_005845.2,2401-2419).
ctggtacttaggaatttat

SEQ ID NO: 70431 - DNA, 19 bp, Homo sapiens
  siRNA target sequence for ABCC4 (NM_005845.2,2430-2448).
ctgtagctaccgttctttt

SEQ ID NO: 70432 - DNA, 19 bp, Homo sapiens
  siRNA target sequence for ABCC4 (NM_005845.2,2450-2468).
ggcatagcaagatctctat

SEQ ID NO: 70433 - DNA, 19 bp, Homo sapiens
  siRNA target sequence for ABCC4 (NM_005845.2,2451-2469).
gcatagcaagatctctatt

SEQ ID NO: 70434 - DNA, 19 bp, Homo sapiens
  siRNA target sequence for ABCC4 (NM_005845.2,2456-2474).
gcaagatctctattggtat

SEQ ID NO: 70435 - DNA, 19 bp, Homo sapiens
  siRNA target sequence for ABCC4 (NM_005845.2,2457-2475).
caagatctctattggtatt

SEQ ID NO: 70436 - DNA, 19 bp, Homo sapiens
  siRNA target sequence for ABCC4 (NM_005845.2,2460-2478).
gatctctattggtattcta

SEQ ID NO: 70437 - DNA, 19 bp, Homo sapiens
  siRNA target sequence for ABCC4 (NM_005845.2,2471-2489).
gtattctacgtccttgtta

SEQ ID NO: 70438 - DNA, 19 bp, Homo sapiens
  siRNA target sequence for ABCC4 (NM_005845.2,2476-2494).
ctacgtccttgttaactct

SEQ ID NO: 70439 - DNA, 19 bp, Homo sapiens
  siRNA target sequence for ABCC4 (NM_005845.2,2507-2525).
cacaacaaaatgtttgagt

SEQ ID NO: 70440 - DNA, 19 bp, Homo sapiens
  siRNA target sequence for ABCC4 (NM_005845.2,2531-2549).
ctgaaagctccggtattat

SEQ ID NO: 70441 - DNA, 19 bp, Homo sapiens
  siRNA target sequence for ABCC4 (NM_005845.2,2540-2558).
ccggtattattctttgata

SEQ ID NO: 70442 - DNA, 19 bp, Homo sapiens
  siRNA target sequence for ABCC4 (NM_005845.2,2542-2560).
ggtattattctttgataga

SEQ ID NO: 70443 - DNA, 19 bp, Homo sapiens
  siRNA target sequence for ABCC4 (NM_005845.2,2551-2569).
ctttgatagaaatccaata

SEQ ID NO: 70444 - DNA, 19 bp, Homo sapiens
  siRNA target sequence for ABCC4 (NM_005845.2,2555-2573).
gatagaaatccaataggaa

SEQ ID NO: 70445 - DNA, 19 bp, Homo sapiens
  siRNA target sequence for ABCC4 (NM_005845.2,2620-2638).
gctgccgctgacgttttta

SEQ ID NO: 70446 - DNA, 19 bp, Homo sapiens
  siRNA target sequence for ABCC4 (NM_005845.2,2623-2641).
gccgctgacgtttttagat

SEQ ID NO: 70447 - DNA, 19 bp, Homo sapiens
  siRNA target sequence for ABCC4 (NM_005845.2,2624-2642).
ccgctgacgtttttagatt

SEQ ID NO: 70448 - DNA, 19 bp, Homo sapiens
  siRNA target sequence for ABCC4 (NM_005845.2,2625-2643).
cgctgacgtttttagattt

SEQ ID NO: 70449 - DNA, 19 bp, Homo sapiens
  siRNA target sequence for ABCC4 (NM_005845.2,2750-2768).
cggcgatattttttggaaa

SEQ ID NO: 70450 - DNA, 19 bp, Homo sapiens
  siRNA target sequence for ABCC4 (NM_005845.2,2785-2803).
gcgcctggaatctacaact

SEQ ID NO: 70451 - DNA, 19 bp, Homo sapiens
  siRNA target sequence for ABCC4 (NM_005845.2,2850-2868).
ggaccatccgggcatacaa

SEQ ID NO: 70452 - DNA, 19 bp, Homo sapiens
  siRNA target sequence for ABCC4 (NM_005845.2,2919-2937).
cagaggcttggttcttgtt

SEQ ID NO: 70453 - DNA, 19 bp, Homo sapiens
  siRNA target sequence for ABCC4 (NM_005845.2,3016-3034).
cctgattctggcaaaaact

SEQ ID NO: 70454 - DNA, 19 bp, Homo sapiens
  siRNA target sequence for ABCC4 (NM_005845.2,3097-3115).
gtggtgtgttcgacaaagt

SEQ ID NO: 70455 - DNA, 19 bp, Homo sapiens
  siRNA target sequence for ABCC4 (NM_005845.2,3114-3132).
gtgctgaagttgagaatat

SEQ ID NO: 70456 - DNA, 19 bp, Homo sapiens
  siRNA target sequence for ABCC4 (NM_005845.2,3141-3159).
cagtagaaagggtcattga

SEQ ID NO: 70457 - DNA, 19 bp, Homo sapiens
  siRNA target sequence for ABCC4 (NM_005845.2,3143-3161).
gtagaaagggtcattgaat

SEQ ID NO: 70458 - DNA, 19 bp, Homo sapiens
  siRNA target sequence for ABCC4 (NM_005845.2,3146-3164).
gaaagggtcattgaataca

SEQ ID NO: 70459 - DNA, 19 bp, Homo sapiens
  siRNA target sequence for ABCC4 (NM_005845.2,3222-3240).
cccatgaaggagtgataat

SEQ ID NO: 70460 - DNA, 19 bp, Homo sapiens
  siRNA target sequence for ABCC4 (NM_005845.2,3230-3248).
ggagtgataatctttgaca

SEQ ID NO: 70461 - DNA, 19 bp, Homo sapiens
  siRNA target sequence for ABCC4 (NM_005845.2,3231-3249).
gagtgataatctttgacaa

SEQ ID NO: 70462 - DNA, 19 bp, Homo sapiens
  siRNA target sequence for ABCC4 (NM_005845.2,3273-3291).
gtgggcctctggtactgaa

SEQ ID NO: 70463 - DNA, 19 bp, Homo sapiens
  siRNA target sequence for ABCC4 (NM_005845.2,3292-3310).
gcatctgacagcactcatt

SEQ ID NO: 70464 - DNA, 19 bp, Homo sapiens
  siRNA target sequence for ABCC4 (NM_005845.2,3298-3316).
gacagcactcattaaatca

SEQ ID NO: 70465 - DNA, 19 bp, Homo sapiens
  siRNA target sequence for ABCC4 (NM_005845.2,3300-3318).
cagcactcattaaatcaca

SEQ ID NO: 70466 - DNA, 19 bp, Homo sapiens
  siRNA target sequence for ABCC4 (NM_005845.2,3388-3406).
gtcagaacccgaaggtaaa

SEQ ID NO: 70467 - DNA, 19 bp, Homo sapiens
  siRNA target sequence for ABCC4 (NM_005845.2,3395-3413).
cccgaaggtaaaatttgga

SEQ ID NO: 70468 - DNA, 19 bp, Homo sapiens
  siRNA target sequence for ABCC4 (NM_005845.2,3396-3414).
ccgaaggtaaaatttggat

SEQ ID NO: 70469 - DNA, 19 bp, Homo sapiens
  siRNA target sequence for ABCC4 (NM_005845.2,3424-3442).
cttgacaactgaaattgga

SEQ ID NO: 70470 - DNA, 19 bp, Homo sapiens
  siRNA target sequence for ABCC4 (NM_005845.2,3440-3458).
ggacttcacgatttaagga

SEQ ID NO: 70471 - DNA, 19 bp, Homo sapiens
  siRNA target sequence for ABCC4 (NM_005845.2,3562-3580).
cttacaagaggtacaactt

SEQ ID NO: 70472 - DNA, 19 bp, Homo sapiens
  siRNA target sequence for ABCC4 (NM_005845.2,3603-3621).
ctggtaaaatggatactga

SEQ ID NO: 70473 - DNA, 19 bp, Homo sapiens
  siRNA target sequence for ABCC4 (NM_005845.2,3672-3690).
gccttgccagggcaattct

SEQ ID NO: 70474 - DNA, 19 bp, Homo sapiens
  siRNA target sequence for ABCC4 (NM_005845.2,3681-3699).
gggcaattctcaggaaaaa

SEQ ID NO: 70475 - DNA, 19 bp, Homo sapiens
  siRNA target sequence for ABCC4 (NM_005845.2,3682-3700).
ggcaattctcaggaaaaat

SEQ ID NO: 70476 - DNA, 19 bp, Homo sapiens
  siRNA target sequence for ABCC4 (NM_005845.2,3693-3711).
ggaaaaatcagatattgat

SEQ ID NO: 70477 - DNA, 19 bp, Homo sapiens
  siRNA target sequence for ABCC4 (NM_005845.2,3694-3712).
gaaaaatcagatattgatt

SEQ ID NO: 70478 - DNA, 19 bp, Homo sapiens
  siRNA target sequence for ABCC4 (NM_005845.2,3744-3762).
gaactgatgagttaataca

SEQ ID NO: 70479 - DNA, 19 bp, Homo sapiens
  siRNA target sequence for ABCC4 (NM_005845.2,3790-3808).
ctgcaccgtgctaaccatt

SEQ ID NO: 70480 - DNA, 19 bp, Homo sapiens
  siRNA target sequence for ABCC4 (NM_005845.2,3812-3830).
cacagattgaacaccatta

SEQ ID NO: 70481 - DNA, 19 bp, Homo sapiens
  siRNA target sequence for ABCC4 (NM_005845.2,3835-3853).
cagcgacaagataatggtt

SEQ ID NO: 70482 - DNA, 19 bp, Homo sapiens
  siRNA target sequence for ABCC4 (NM_005845.2,3837-3855).
gcgacaagataatggtttt

SEQ ID NO: 70483 - DNA, 19 bp, Homo sapiens
  siRNA target sequence for ABCC4 (NM_005845.2,3838-3856).
cgacaagataatggtttta

SEQ ID NO: 70484 - DNA, 19 bp, Homo sapiens
  siRNA target sequence for ABCC4 (NM_005845.2,3888-3906).
cgtatgttttgctgcaaaa

SEQ ID NO: 70485 - DNA, 19 bp, Homo sapiens
  siRNA target sequence for ABCC4 (NM_005845.2,3889-3907).
gtatgttttgctgcaaaat

SEQ ID NO: 70486 - DNA, 19 bp, Homo sapiens
  siRNA target sequence for ABCC4 (NM_005845.2,3958-3976).
cgctgccctcactgaaaca

SEQ ID NO: 70487 - DNA, 19 bp, Homo sapiens
  siRNA target sequence for ABCC4 (NM_005845.2,3978-3996).
caaaacaggtatacttcaa

SEQ ID NO: 70488 - DNA, 19 bp, Homo sapiens
  siRNA target sequence for ABCC4 (NM_005845.2,4023-4041).
ctgaccacatggttacaaa

SEQ ID NO: 70489 - DNA, 19 bp, Homo sapiens
  siRNA target sequence for ABCC4 (NM_005845.2,4025-4043).
gaccacatggttacaaaca

SEQ ID NO: 70490 - DNA, 19 bp, Homo sapiens
  siRNA target sequence for ABCC4 (NM_005845.2,4052-4070).
ggacagccctcgaccttaa

SEQ ID NO: 70491 - DNA, 19 bp, Homo sapiens
  siRNA target sequence for ABCC4 (NM_005845.2,4057-4075).
gccctcgaccttaactatt

SEQ ID NO: 70492 - DNA, 19 bp, Homo sapiens
  siRNA target sequence for ABCC4 (NM_005845.2,4058-4076).
ccctcgaccttaactattt

SEQ ID NO: 70493 - DNA, 19 bp, Homo sapiens
  siRNA target sequence for ABCC4 (NM_005845.2,4062-4080).
cgaccttaactattttcga

SEQ ID NO: 70494 - DNA, 19 bp, Homo sapiens
  siRNA target sequence for ABCC5 (NM_005688.1,131-149).
ggatatcgacataggaaaa

SEQ ID NO: 70495 - DNA, 19 bp, Homo sapiens
  siRNA target sequence for ABCC5 (NM_005688.1,164-182).
cagtcctgggtatagaagt

SEQ ID NO: 70496 - DNA, 19 bp, Homo sapiens
  siRNA target sequence for ABCC5 (NM_005688.1,212-230).
gcacagagaccgtgaagat

SEQ ID NO: 70497 - DNA, 19 bp, Homo sapiens
  siRNA target sequence for ABCC5 (NM_005688.1,293-311).
cgagggcctctctcttgat

SEQ ID NO: 70498 - DNA, 19 bp, Homo sapiens
  siRNA target sequence for ABCC5 (NM_005688.1,395-413).
catccggactacttccaaa

SEQ ID NO: 70499 - DNA, 19 bp, Homo sapiens
  siRNA target sequence for ABCC5 (NM_005688.1,554-572).
cgtgaactgcagaagacta

SEQ ID NO: 70500 - DNA, 19 bp, Homo sapiens
  siRNA target sequence for ABCC5 (NM_005688.1,768-786).
ctgcagtacagcttgttgt

SEQ ID NO: 70501 - DNA, 19 bp, Homo sapiens
  siRNA target sequence for ABCC5 (NM_005688.1,770-788).
gcagtacagcttgttgtta

SEQ ID NO: 70502 - DNA, 19 bp, Homo sapiens
  siRNA target sequence for ABCC5 (NM_005688.1,837-855).
ctgacttgggcattgaatt

SEQ ID NO: 70503 - DNA, 19 bp, Homo sapiens
  siRNA target sequence for ABCC5 (NM_005688.1,888-906).
ctaaccatggcatttaaga

SEQ ID NO: 70504 - DNA, 19 bp, Homo sapiens
  siRNA target sequence for ABCC5 (NM_005688.1,967-985).
ccaacgatgggcagagaat

SEQ ID NO: 70505 - DNA, 19 bp, Homo sapiens
  siRNA target sequence for ABCC5 (NM_005688.1,1035-1053).
gccatcttaggcatgattt

SEQ ID NO: 70506 - DNA, 19 bp, Homo sapiens
  siRNA target sequence for ABCC5 (NM_005688.1,1036-1054).
ccatcttaggcatgattta

SEQ ID NO: 70507 - DNA, 19 bp, Homo sapiens
  siRNA target sequence for ABCC5 (NM_005688.1,1037-1055).
catcttaggcatgatttat

SEQ ID NO: 70508 - DNA, 19 bp, Homo sapiens
  siRNA target sequence for ABCC5 (NM_005688.1,1044-1062).
ggcatgatttataatgtaa

SEQ ID NO: 70509 - DNA, 19 bp, Homo sapiens
  siRNA target sequence for ABCC5 (NM_005688.1,1086-1104).
ctgggatcagctgttttta

SEQ ID NO: 70510 - DNA, 19 bp, Homo sapiens
  siRNA target sequence for ABCC5 (NM_005688.1,1135-1153).
cacggctcacagcatattt

SEQ ID NO: 70511 - DNA, 19 bp, Homo sapiens
  siRNA target sequence for ABCC5 (NM_005688.1,1137-1155).
cggctcacagcatatttca

SEQ ID NO: 70512 - DNA, 19 bp, Homo sapiens
  siRNA target sequence for ABCC5 (NM_005688.1,1182-1200).
gaacgtgtccagaagatga

SEQ ID NO: 70513 - DNA, 19 bp, Homo sapiens
  siRNA target sequence for ABCC5 (NM_005688.1,1286-1304).
ggagcgtcggatattggaa

SEQ ID NO: 70514 - DNA, 19 bp, Homo sapiens
  siRNA target sequence for ABCC5 (NM_005688.1,1289-1307).
gcgtcggatattggaaaaa

SEQ ID NO: 70515 - DNA, 19 bp, Homo sapiens
  siRNA target sequence for ABCC5 (NM_005688.1,1370-1388).
ggtgaccttctctgttcat

SEQ ID NO: 70516 - DNA, 19 bp, Homo sapiens
  siRNA target sequence for ABCC5 (NM_005688.1,1544-1562).
ggaagaggttcacatgata

SEQ ID NO: 70517 - DNA, 19 bp, Homo sapiens
  siRNA target sequence for ABCC5 (NM_005688.1,1545-1563).
gaagaggttcacatgataa

SEQ ID NO: 70518 - DNA, 19 bp, Homo sapiens
  siRNA target sequence for ABCC5 (NM_005688.1,1548-1566).
gaggttcacatgataaaga

SEQ ID NO: 70519 - DNA, 19 bp, Homo sapiens
  siRNA target sequence for ABCC5 (NM_005688.1,1582-1600).
ctcacatcaagatagagat

SEQ ID NO: 70520 - DNA, 19 bp, Homo sapiens
  siRNA target sequence for ABCC5 (NM_005688.1,1954-1972).
gccagatgacgcttctaga

SEQ ID NO: 70521 - DNA, 19 bp, Homo sapiens
  siRNA target sequence for ABCC5 (NM_005688.1,1968-1986).
ctagagggcagcattgcaa

SEQ ID NO: 70522 - DNA, 19 bp, Homo sapiens
  siRNA target sequence for ABCC5 (NM_005688.1,1990-2008).
gtggaaccttcgcttatgt

SEQ ID NO: 70523 - DNA, 19 bp, Homo sapiens
  siRNA target sequence for ABCC5 (NM_005688.1,2035-2053).
ctactctgagagacaacat

SEQ ID NO: 70524 - DNA, 19 bp, Homo sapiens
  siRNA target sequence for ABCC5 (NM_005688.1,2057-2075).
gtttgggaaggaatatgat

SEQ ID NO: 70525 - DNA, 19 bp, Homo sapiens
  siRNA target sequence for ABCC5 (NM_005688.1,2073-2091).
gatgaagaaagatacaact

SEQ ID NO: 70526 - DNA, 19 bp, Homo sapiens
  siRNA target sequence for ABCC5 (NM_005688.1,2117-2135).
gcctgacctggccattctt

SEQ ID NO: 70527 - DNA, 19 bp, Homo sapiens
  siRNA target sequence for ABCC5 (NM_005688.1,2255-2273).
ccccctcagtgccttagat

SEQ ID NO: 70528 - DNA, 19 bp, Homo sapiens
  siRNA target sequence for ABCC5 (NM_005688.1,2280-2298).
gtgggcaaccacatcttca

SEQ ID NO: 70529 - DNA, 19 bp, Homo sapiens
  siRNA target sequence for ABCC5 (NM_005688.1,2282-2300).
gggcaaccacatcttcaat

SEQ ID NO: 70530 - DNA, 19 bp, Homo sapiens
  siRNA target sequence for ABCC5 (NM_005688.1,2302-2320).
gtgctatccggaaacatct

SEQ ID NO: 70531 - DNA, 19 bp, Homo sapiens
  siRNA target sequence for ABCC5 (NM_005688.1,2305-2323).
ctatccggaaacatctcaa

SEQ ID NO: 70532 - DNA, 19 bp, Homo sapiens
  siRNA target sequence for ABCC5 (NM_005688.1,2363-2381).
cctggttgactgtgatgaa

SEQ ID NO: 70533 - DNA, 19 bp, Homo sapiens
  siRNA target sequence for ABCC5 (NM_005688.1,2374-2392).
gtgatgaagtgatcttcat

SEQ ID NO: 70534 - DNA, 19 bp, Homo sapiens
  siRNA target sequence for ABCC5 (NM_005688.1,2390-2408).
catgaaagagggctgtatt

SEQ ID NO: 70535 - DNA, 19 bp, Homo sapiens
  siRNA target sequence for ABCC5 (NM_005688.1,2449-2467).
gtgactatgctaccatttt

SEQ ID NO: 70536 - DNA, 19 bp, Homo sapiens
  siRNA target sequence for ABCC5 (NM_005688.1,2495-2513).
gccagttgagatcaattca

SEQ ID NO: 70537 - DNA, 19 bp, Homo sapiens
  siRNA target sequence for ABCC5 (NM_005688.1,2496-2514).
ccagttgagatcaattcaa

SEQ ID NO: 70538 - DNA, 19 bp, Homo sapiens
  siRNA target sequence for ABCC5 (NM_005688.1,2547-2565).
caagacaagggtcctaaaa

SEQ ID NO: 70539 - DNA, 19 bp, Homo sapiens
  siRNA target sequence for ABCC5 (NM_005688.1,2644-2662).
cagtgccctggtcagtata

SEQ ID NO: 70540 - DNA, 19 bp, Homo sapiens
  siRNA target sequence for ABCC5 (NM_005688.1,2648-2666).
gccctggtcagtatatggt

SEQ ID NO: 70541 - DNA, 19 bp, Homo sapiens
  siRNA target sequence for ABCC5 (NM_005688.1,2716-2734).
cccttttcatgctgaatgt

SEQ ID NO: 70542 - DNA, 19 bp, Homo sapiens
  siRNA target sequence for ABCC5 (NM_005688.1,2717-2735).
ccttttcatgctgaatgta

SEQ ID NO: 70543 - DNA, 19 bp, Homo sapiens
  siRNA target sequence for ABCC5 (NM_005688.1,2752-2770).
gcacctggtggttgagtta

SEQ ID NO: 70544 - DNA, 19 bp, Homo sapiens
  siRNA target sequence for ABCC5 (NM_005688.1,2962-2980).
ggctgcatgacgagctttt

SEQ ID NO: 70545 - DNA, 19 bp, Homo sapiens
  siRNA target sequence for ABCC5 (NM_005688.1,2991-3009).
cttcgaagccctatgaagt

SEQ ID NO: 70546 - DNA, 19 bp, Homo sapiens
  siRNA target sequence for ABCC5 (NM_005688.1,3085-3103).
cgttccaggccgagatgtt

SEQ ID NO: 70547 - DNA, 19 bp, Homo sapiens
  siRNA target sequence for ABCC5 (NM_005688.1,3240-3258).
ctgaagcgtctggacaata

SEQ ID NO: 70548 - DNA, 19 bp, Homo sapiens
  siRNA target sequence for ABCC5 (NM_005688.1,3465-3483).
gggctgatgatcgttctta

SEQ ID NO: 70549 - DNA, 19 bp, Homo sapiens
  siRNA target sequence for ABCC5 (NM_005688.1,3466-3484).
ggctgatgatcgttcttat

SEQ ID NO: 70550 - DNA, 19 bp, Homo sapiens
  siRNA target sequence for ABCC5 (NM_005688.1,3510-3528).
gcgggtctcgccatctctt

SEQ ID NO: 70551 - DNA, 19 bp, Homo sapiens
  siRNA target sequence for ABCC5 (NM_005688.1,3511-3529).
cgggtctcgccatctctta

SEQ ID NO: 70552 - DNA, 19 bp, Homo sapiens
  siRNA target sequence for ABCC5 (NM_005688.1,3512-3530).
gggtctcgccatctcttat

SEQ ID NO: 70553 - DNA, 19 bp, Homo sapiens
  siRNA target sequence for ABCC5 (NM_005688.1,3601-3619).
cggtggagaggatcaatca

SEQ ID NO: 70554 - DNA, 19 bp, Homo sapiens
  siRNA target sequence for ABCC5 (NM_005688.1,3603-3621).
gtggagaggatcaatcact

SEQ ID NO: 70555 - DNA, 19 bp, Homo sapiens
  siRNA target sequence for ABCC5 (NM_005688.1,3608-3626).
gaggatcaatcactacatt

SEQ ID NO: 70556 - DNA, 19 bp, Homo sapiens
  siRNA target sequence for ABCC5 (NM_005688.1,3610-3628).
ggatcaatcactacattaa

SEQ ID NO: 70557 - DNA, 19 bp, Homo sapiens
  siRNA target sequence for ABCC5 (NM_005688.1,3614-3632).
caatcactacattaagact

SEQ ID NO: 70558 - DNA, 19 bp, Homo sapiens
  siRNA target sequence for ABCC5 (NM_005688.1,3645-3663).
gcacctgccagaattaaga

SEQ ID NO: 70559 - DNA, 19 bp, Homo sapiens
  siRNA target sequence for ABCC5 (NM_005688.1,3772-3790).
cgatcaaacctaaagagaa

SEQ ID NO: 70560 - DNA, 19 bp, Homo sapiens
  siRNA target sequence for ABCC5 (NM_005688.1,3918-3936).
gacctccgaagcaaactct

SEQ ID NO: 70561 - DNA, 19 bp, Homo sapiens
  siRNA target sequence for ABCC5 (NM_005688.1,3924-3942).
cgaagcaaactctctatca

SEQ ID NO: 70562 - DNA, 19 bp, Homo sapiens
  siRNA target sequence for ABCC5 (NM_005688.1,3969-3987).
ggcactgtcagatcaaatt

SEQ ID NO: 70563 - DNA, 19 bp, Homo sapiens
  siRNA target sequence for ABCC5 (NM_005688.1,4046-4064).
catgaaagaatgtattgct

SEQ ID NO: 70564 - DNA, 19 bp, Homo sapiens
  siRNA target sequence for ABCC5 (NM_005688.1,4067-4085).
gctacctctgaaacttgaa

SEQ ID NO: 70565 - DNA, 19 bp, Homo sapiens
  siRNA target sequence for ABCC5 (NM_005688.1,4068-4086).
ctacctctgaaacttgaat

SEQ ID NO: 70566 - DNA, 19 bp, Homo sapiens
  siRNA target sequence for ABCC5 (NM_005688.1,4098-4116).
gagaatggggataacttct

SEQ ID NO: 70567 - DNA, 19 bp, Homo sapiens
  siRNA target sequence for ABCC5 (NM_005688.1,4131-4149).
cagctcttgtgcatagcta

SEQ ID NO: 70568 - DNA, 19 bp, Homo sapiens
  siRNA target sequence for ABCC5 (NM_005688.1,4153-4171).
ccctgctccgccactgtaa

SEQ ID NO: 70569 - DNA, 19 bp, Homo sapiens
  siRNA target sequence for ABCC5 (NM_005688.1,4155-4173).
ctgctccgccactgtaaga

SEQ ID NO: 70570 - DNA, 19 bp, Homo sapiens
  siRNA target sequence for ABCC5 (NM_005688.1,4161-4179).
cgccactgtaagattctga

SEQ ID NO: 70571 - DNA, 19 bp, Homo sapiens
  siRNA target sequence for ABCC5 (NM_005688.1,4163-4181).
ccactgtaagattctgatt

SEQ ID NO: 70572 - DNA, 19 bp, Homo sapiens
  siRNA target sequence for ABCC5 (NM_005688.1,4164-4182).
cactgtaagattctgattt

SEQ ID NO: 70573 - DNA, 19 bp, Homo sapiens
  siRNA target sequence for ABCC5 (NM_005688.1,4238-4256).
catccgagaagcatttgca

SEQ ID NO: 70574 - DNA, 19 bp, Homo sapiens
  siRNA target sequence for ABCC5 (NM_005688.1,4299-4317).
ctaggctccgataggatta

SEQ ID NO: 70575 - DNA, 19 bp, Homo sapiens
  siRNA target sequence for ABCC5 (NM_005688.1,4303-4321).
gctccgataggattatggt

SEQ ID NO: 70576 - DNA, 19 bp, Homo sapiens
  siRNA target sequence for ABCC5 (NM_005688.1,4333-4351).
gacaggtggtggagtttga

SEQ ID NO: 70577 - DNA, 19 bp, Homo sapiens
  siRNA target sequence for ABCC6 (NM_001171.2,709-727).
ggccactgagaccaaaaga

SEQ ID NO: 70578 - DNA, 19 bp, Homo sapiens
  siRNA target sequence for ABCC6 (NM_001171.2,733-751).
ggtcgcttgggagagaaaa

SEQ ID NO: 70579 - DNA, 19 bp, Homo sapiens
  siRNA target sequence for ABCC6 (NM_001171.2,765-783).
cttgtttcccggcttgaaa

SEQ ID NO: 70580 - DNA, 19 bp, Homo sapiens
  siRNA target sequence for ABCC6 (NM_001171.2,808-826).
cagcccggaggcacaacaa

SEQ ID NO: 70581 - DNA, 19 bp, Homo sapiens
  siRNA target sequence for ABCC6 (NM_001171.2,818-836).
gcacaacaaggcaatagca

SEQ ID NO: 70582 - DNA, 19 bp, Homo sapiens
  siRNA target sequence for ABCC6 (NM_001171.2,819-837).
cacaacaaggcaatagcat

SEQ ID NO: 70583 - DNA, 19 bp, Homo sapiens
  siRNA target sequence for ABCC6 (NM_001171.2,821-839).
caacaaggcaatagcattt

SEQ ID NO: 70584 - DNA, 19 bp, Homo sapiens
  siRNA target sequence for ABCC6 (NM_001171.2,824-842).
caaggcaatagcatttaaa

SEQ ID NO: 70585 - DNA, 19 bp, Homo sapiens
  siRNA target sequence for ABCC6 (NM_001171.2,1021-1039).
gccttttcctggagtttat

SEQ ID NO: 70586 - DNA, 19 bp, Homo sapiens
  siRNA target sequence for ABCC6 (NM_001171.2,1105-1123).
gcctgcaaacgctgtttga

SEQ ID NO: 70587 - DNA, 19 bp, Homo sapiens
  siRNA target sequence for ABCC6 (NM_001171.2,1636-1654).
ccttccaagtgtctacatt

SEQ ID NO: 70588 - DNA, 19 bp, Homo sapiens
  siRNA target sequence for ABCC6 (NM_001171.2,1694-1712).
ggccgagaatgctatgaat

SEQ ID NO: 70589 - DNA, 19 bp, Homo sapiens
  siRNA target sequence for ABCC6 (NM_001171.2,1860-1878).
ggtgtcgtagactcaagtt

SEQ ID NO: 70590 - DNA, 19 bp, Homo sapiens
  siRNA target sequence for ABCC6 (NM_001171.2,1891-1909).
ctgccgggaaggattgcat

SEQ ID NO: 70591 - DNA, 19 bp, Homo sapiens
  siRNA target sequence for ABCC6 (NM_001171.2,1902-1920).
gattgcatcaccatacaca

SEQ ID NO: 70592 - DNA, 19 bp, Homo sapiens
  siRNA target sequence for ABCC6 (NM_001171.2,2183-2201).
ctggctggagagagtacta

SEQ ID NO: 70593 - DNA, 19 bp, Homo sapiens
  siRNA target sequence for ABCC6 (NM_001171.2,2186-2204).
gctggagagagtactagaa

SEQ ID NO: 70594 - DNA, 19 bp, Homo sapiens
  siRNA target sequence for ABCC6 (NM_001171.2,2241-2259).
gagggaatccacacttcaa

SEQ ID NO: 70595 - DNA, 19 bp, Homo sapiens
  siRNA target sequence for ABCC6 (NM_001171.2,2477-2495).
ccaggctgattggatcata

SEQ ID NO: 70596 - DNA, 19 bp, Homo sapiens
  siRNA target sequence for ABCC6 (NM_001171.2,2682-2700).
cgcgagaggtccatcaagt

SEQ ID NO: 70597 - DNA, 19 bp, Homo sapiens
  siRNA target sequence for ABCC6 (NM_001171.2,2714-2732).
ggaccgtaccacttcagaa

SEQ ID NO: 70598 - DNA, 19 bp, Homo sapiens
  siRNA target sequence for ABCC6 (NM_001171.2,3142-3160).
ccattggtcacctgctaaa

SEQ ID NO: 70599 - DNA, 19 bp, Homo sapiens
  siRNA target sequence for ABCC6 (NM_001171.2,3312-3330).
ctctacgctgggtttcaga

SEQ ID NO: 70600 - DNA, 19 bp, Homo sapiens
  siRNA target sequence for ABCC6 (NM_001171.2,3473-3491).
caatgctcgcgtagatgaa

SEQ ID NO: 70601 - DNA, 19 bp, Homo sapiens
  siRNA target sequence for ABCC6 (NM_001171.2,3870-3888).
cagggcgtgtccttcaaga

SEQ ID NO: 70602 - DNA, 19 bp, Homo sapiens
  siRNA target sequence for ABCC6 (NM_001171.2,4488-4506).
cagaagggcctgttttaca

SEQ ID NO: 70603 - DNA, 19 bp, Homo sapiens
  siRNA target sequence for ABCC6 (NM_001171.2,4490-4508).
gaagggcctgttttacaga

SEQ ID NO: 70604 - DNA, 19 bp, Homo sapiens
  siRNA target sequence for ABCC8 (NM_000352.2,230-248).
cgcacgtcttcctactctt

SEQ ID NO: 70605 - DNA, 19 bp, Homo sapiens
  siRNA target sequence for ABCC8 (NM_000352.2,482-500).
cctccgtggtctactatca

SEQ ID NO: 70606 - DNA, 19 bp, Homo sapiens
  siRNA target sequence for ABCC8 (NM_000352.2,485-503).
ccgtggtctactatcacaa

SEQ ID NO: 70607 - DNA, 19 bp, Homo sapiens
  siRNA target sequence for ABCC8 (NM_000352.2,698-716).
gggtgaggagatacatctt

SEQ ID NO: 70608 - DNA, 19 bp, Homo sapiens
  siRNA target sequence for ABCC8 (NM_000352.2,1141-1159).
caatttctcggggtttact

SEQ ID NO: 70609 - DNA, 19 bp, Homo sapiens
  siRNA target sequence for ABCC8 (NM_000352.2,1147-1165).
ctcggggtttactttgtct

SEQ ID NO: 70610 - DNA, 19 bp, Homo sapiens
  siRNA target sequence for ABCC8 (NM_000352.2,1295-1313).
caatacagaccaagattta

SEQ ID NO: 70611 - DNA, 19 bp, Homo sapiens
  siRNA target sequence for ABCC8 (NM_000352.2,1302-1320).
gaccaagatttacaataaa

SEQ ID NO: 70612 - DNA, 19 bp, Homo sapiens
  siRNA target sequence for ABCC8 (NM_000352.2,1469-1487).
gtgtgattctcctctacta

SEQ ID NO: 70613 - DNA, 19 bp, Homo sapiens
  siRNA target sequence for ABCC8 (NM_000352.2,1494-1512).
cggagtcagtgccttaatt

SEQ ID NO: 70614 - DNA, 19 bp, Homo sapiens
  siRNA target sequence for ABCC8 (NM_000352.2,1514-1532).
gagcagctgtcatcattct

SEQ ID NO: 70615 - DNA, 19 bp, Homo sapiens
  siRNA target sequence for ABCC8 (NM_000352.2,1582-1600).
cggagcacactggagtatt

SEQ ID NO: 70616 - DNA, 19 bp, Homo sapiens
  siRNA target sequence for ABCC8 (NM_000352.2,1586-1604).
gcacactggagtattccaa

SEQ ID NO: 70617 - DNA, 19 bp, Homo sapiens
  siRNA target sequence for ABCC8 (NM_000352.2,1587-1605).
cacactggagtattccaat

SEQ ID NO: 70618 - DNA, 19 bp, Homo sapiens
  siRNA target sequence for ABCC8 (NM_000352.2,1729-1747).
gcctttgccatctatacct

SEQ ID NO: 70619 - DNA, 19 bp, Homo sapiens
  siRNA target sequence for ABCC8 (NM_000352.2,1939-1957).
gtgagcgtgcaaaagctaa

SEQ ID NO: 70620 - DNA, 19 bp, Homo sapiens
  siRNA target sequence for ABCC8 (NM_000352.2,2186-2204).
cgtggaccccagatggaat

SEQ ID NO: 70621 - DNA, 19 bp, Homo sapiens
  siRNA target sequence for ABCC8 (NM_000352.2,2216-2234).
ccaacatcaccattcgtat

SEQ ID NO: 70622 - DNA, 19 bp, Homo sapiens
  siRNA target sequence for ABCC8 (NM_000352.2,2396-2414).
cagcgaccgacttggatat

SEQ ID NO: 70623 - DNA, 19 bp, Homo sapiens
  siRNA target sequence for ABCC8 (NM_000352.2,2398-2416).
gcgaccgacttggatatca

SEQ ID NO: 70624 - DNA, 19 bp, Homo sapiens
  siRNA target sequence for ABCC8 (NM_000352.2,2448-2466).
gaaaccatggctgctaaat

SEQ ID NO: 70625 - DNA, 19 bp, Homo sapiens
  siRNA target sequence for ABCC8 (NM_000352.2,2496-2514).
gagtcccttcaacaaacaa

SEQ ID NO: 70626 - DNA, 19 bp, Homo sapiens
  siRNA target sequence for ABCC8 (NM_000352.2,2516-2534).
ggtacaagatggtcattga

SEQ ID NO: 70627 - DNA, 19 bp, Homo sapiens
  siRNA target sequence for ABCC8 (NM_000352.2,2694-2712).
ctcagctctggatatccat

SEQ ID NO: 70628 - DNA, 19 bp, Homo sapiens
  siRNA target sequence for ABCC8 (NM_000352.2,2808-2826).
ccatgcagactggatcatt

SEQ ID NO: 70629 - DNA, 19 bp, Homo sapiens
  siRNA target sequence for ABCC8 (NM_000352.2,2882-2900).
ctgaatgccagctctttga

SEQ ID NO: 70630 - DNA, 19 bp, Homo sapiens
  siRNA target sequence for ABCC8 (NM_000352.2,3442-3460).
ctagcccccatgaggtttt

SEQ ID NO: 70631 - DNA, 19 bp, Homo sapiens
  siRNA target sequence for ABCC8 (NM_000352.2,3486-3504).
cctgaacagattttcatct

SEQ ID NO: 70632 - DNA, 19 bp, Homo sapiens
  siRNA target sequence for ABCC8 (NM_000352.2,3796-3814).
cagaagcttctcgaataca

SEQ ID NO: 70633 - DNA, 19 bp, Homo sapiens
  siRNA target sequence for ABCC8 (NM_000352.2,3798-3816).
gaagcttctcgaatacaca

SEQ ID NO: 70634 - DNA, 19 bp, Homo sapiens
  siRNA target sequence for ABCC8 (NM_000352.2,4316-4334).
cgttcgaagggcacatcat

SEQ ID NO: 70635 - DNA, 19 bp, Homo sapiens
  siRNA target sequence for ABCC8 (NM_000352.2,4421-4439).
gcggcaccatccgatttaa

SEQ ID NO: 70636 - DNA, 19 bp, Homo sapiens
  siRNA target sequence for ABCC8 (NM_000352.2,4424-4442).
gcaccatccgatttaacct

SEQ ID NO: 70637 - DNA, 19 bp, Homo sapiens
  siRNA target sequence for ABCC8 (NM_000352.2,4641-4659).
cgaggccacggcttccatt

SEQ ID NO: 70638 - DNA, 19 bp, Homo sapiens
  siRNA target sequence for ABCC8 (NM_000352.2,4660-4678).
gacatggccacggaaaaca

SEQ ID NO: 70639 - DNA, 19 bp, Homo sapiens
  siRNA target sequence for ABCC8 (NM_000352.2,4789-4807).
gccatccttgagttcgata

SEQ ID NO: 70640 - DNA, 19 bp, Homo sapiens
  siRNA target sequence for ABCC8 (NM_000352.2,4790-4808).
ccatccttgagttcgataa

SEQ ID NO: 70641 - DNA, 19 bp, Homo sapiens
  siRNA target sequence for ABCC9 (NM_005691.1,24-42).
caacatttcttcatataat

SEQ ID NO: 70642 - DNA, 19 bp, Homo sapiens
  siRNA target sequence for ABCC9 (NM_005691.1,45-63).
caacgatggtgtactacaa

SEQ ID NO: 70643 - DNA, 19 bp, Homo sapiens
  siRNA target sequence for ABCC9 (NM_005691.1,227-245).
cattcgctctcctgtttgt

SEQ ID NO: 70644 - DNA, 19 bp, Homo sapiens
  siRNA target sequence for ABCC9 (NM_005691.1,331-349).
ggattcgttgccactacaa

SEQ ID NO: 70645 - DNA, 19 bp, Homo sapiens
  siRNA target sequence for ABCC9 (NM_005691.1,344-362).
ctacaacatcgatagtgta

SEQ ID NO: 70646 - DNA, 19 bp, Homo sapiens
  siRNA target sequence for ABCC9 (NM_005691.1,347-365).
caacatcgatagtgtatta

SEQ ID NO: 70647 - DNA, 19 bp, Homo sapiens
  siRNA target sequence for ABCC9 (NM_005691.1,350-368).
catcgatagtgtattatca

SEQ ID NO: 70648 - DNA, 19 bp, Homo sapiens
  siRNA target sequence for ABCC9 (NM_005691.1,367-385).
cataatatcgaaacatcaa

SEQ ID NO: 70649 - DNA, 19 bp, Homo sapiens
  siRNA target sequence for ABCC9 (NM_005691.1,424-442).
gtaatggcctttattacaa

SEQ ID NO: 70650 - DNA, 19 bp, Homo sapiens
  siRNA target sequence for ABCC9 (NM_005691.1,469-487).
cagtctggcttggacatat

SEQ ID NO: 70651 - DNA, 19 bp, Homo sapiens
  siRNA target sequence for ABCC9 (NM_005691.1,471-489).
gtctggcttggacatatca

SEQ ID NO: 70652 - DNA, 19 bp, Homo sapiens
  siRNA target sequence for ABCC9 (NM_005691.1,565-583).
cgagtcaggagatatgtat

SEQ ID NO: 70653 - DNA, 19 bp, Homo sapiens
  siRNA target sequence for ABCC9 (NM_005691.1,566-584).
gagtcaggagatatgtatt

SEQ ID NO: 70654 - DNA, 19 bp, Homo sapiens
  siRNA target sequence for ABCC9 (NM_005691.1,568-586).
gtcaggagatatgtatttt

SEQ ID NO: 70655 - DNA, 19 bp, Homo sapiens
  siRNA target sequence for ABCC9 (NM_005691.1,693-711).
gaacacacttattatatct

SEQ ID NO: 70656 - DNA, 19 bp, Homo sapiens
  siRNA target sequence for ABCC9 (NM_005691.1,745-763).
ggaaaattgccaatagcaa

SEQ ID NO: 70657 - DNA, 19 bp, Homo sapiens
  siRNA target sequence for ABCC9 (NM_005691.1,760-778).
gcaatgagagcagtaacaa

SEQ ID NO: 70658 - DNA, 19 bp, Homo sapiens
  siRNA target sequence for ABCC9 (NM_005691.1,836-854).
caaatcggactccatctat

SEQ ID NO: 70659 - DNA, 19 bp, Homo sapiens
  siRNA target sequence for ABCC9 (NM_005691.1,851-869).
ctatatggcttgcaatgta

SEQ ID NO: 70660 - DNA, 19 bp, Homo sapiens
  siRNA target sequence for ABCC9 (NM_005691.1,880-898).
gggcgaccaattctactta

SEQ ID NO: 70661 - DNA, 19 bp, Homo sapiens
  siRNA target sequence for ABCC9 (NM_005691.1,882-900).
gcgaccaattctacttagt

SEQ ID NO: 70662 - DNA, 19 bp, Homo sapiens
  siRNA target sequence for ABCC9 (NM_005691.1,883-901).
cgaccaattctacttagta

SEQ ID NO: 70663 - DNA, 19 bp, Homo sapiens
  siRNA target sequence for ABCC9 (NM_005691.1,909-927).
ccgctatctggctgattta

SEQ ID NO: 70664 - DNA, 19 bp, Homo sapiens
  siRNA target sequence for ABCC9 (NM_005691.1,964-982).
gttcagcgtgtgaatgaaa

SEQ ID NO: 70665 - DNA, 19 bp, Homo sapiens
  siRNA target sequence for ABCC9 (NM_005691.1,987-1005).
gaatgggacaaataacaca

SEQ ID NO: 70666 - DNA, 19 bp, Homo sapiens
  siRNA target sequence for ABCC9 (NM_005691.1,1016-1034).
cagaaaccctctcatcaaa

SEQ ID NO: 70667 - DNA, 19 bp, Homo sapiens
  siRNA target sequence for ABCC9 (NM_005691.1,1022-1040).
ccctctcatcaaaggaatt

SEQ ID NO: 70668 - DNA, 19 bp, Homo sapiens
  siRNA target sequence for ABCC9 (NM_005691.1,1112-1130).
cttcctactatgtaaccat

SEQ ID NO: 70669 - DNA, 19 bp, Homo sapiens
  siRNA target sequence for ABCC9 (NM_005691.1,1190-1208).
ggctctctacgtctaactt

SEQ ID NO: 70670 - DNA, 19 bp, Homo sapiens
  siRNA target sequence for ABCC9 (NM_005691.1,1191-1209).
gctctctacgtctaactta

SEQ ID NO: 70671 - DNA, 19 bp, Homo sapiens
  siRNA target sequence for ABCC9 (NM_005691.1,1192-1210).
ctctctacgtctaacttat

SEQ ID NO: 70672 - DNA, 19 bp, Homo sapiens
  siRNA target sequence for ABCC9 (NM_005691.1,1196-1214).
ctacgtctaacttatccat

SEQ ID NO: 70673 - DNA, 19 bp, Homo sapiens
  siRNA target sequence for ABCC9 (NM_005691.1,1230-1248).
ggggcagatcaacaactta

SEQ ID NO: 70674 - DNA, 19 bp, Homo sapiens
  siRNA target sequence for ABCC9 (NM_005691.1,1232-1250).
ggcagatcaacaacttagt

SEQ ID NO: 70675 - DNA, 19 bp, Homo sapiens
  siRNA target sequence for ABCC9 (NM_005691.1,1245-1263).
cttagtcgccattgaaact

SEQ ID NO: 70676 - DNA, 19 bp, Homo sapiens
  siRNA target sequence for ABCC9 (NM_005691.1,1251-1269).
cgccattgaaactaatcaa

SEQ ID NO: 70677 - DNA, 19 bp, Homo sapiens
  siRNA target sequence for ABCC9 (NM_005691.1,1253-1271).
ccattgaaactaatcaact

SEQ ID NO: 70678 - DNA, 19 bp, Homo sapiens
  siRNA target sequence for ABCC9 (NM_005691.1,1330-1348).
ggcgtgattctgctctata

SEQ ID NO: 70679 - DNA, 19 bp, Homo sapiens
  siRNA target sequence for ABCC9 (NM_005691.1,1331-1349).
gcgtgattctgctctataa

SEQ ID NO: 70680 - DNA, 19 bp, Homo sapiens
  siRNA target sequence for ABCC9 (NM_005691.1,1332-1350).
cgtgattctgctctataat

SEQ ID NO: 70681 - DNA, 19 bp, Homo sapiens
  siRNA target sequence for ABCC9 (NM_005691.1,1333-1351).
gtgattctgctctataatt

SEQ ID NO: 70682 - DNA, 19 bp, Homo sapiens
  siRNA target sequence for ABCC9 (NM_005691.1,1393-1411).
ctccttgcgccaattcagt

SEQ ID NO: 70683 - DNA, 19 bp, Homo sapiens
  siRNA target sequence for ABCC9 (NM_005691.1,1399-1417).
gcgccaattcagtacttta

SEQ ID NO: 70684 - DNA, 19 bp, Homo sapiens
  siRNA target sequence for ABCC9 (NM_005691.1,1400-1418).
cgccaattcagtactttat

SEQ ID NO: 70685 - DNA, 19 bp, Homo sapiens
  siRNA target sequence for ABCC9 (NM_005691.1,1443-1461).
gaaaagtacacttgattat

SEQ ID NO: 70686 - DNA, 19 bp, Homo sapiens
  siRNA target sequence for ABCC9 (NM_005691.1,1501-1519).
ggcatcaaacttctaaaat

SEQ ID NO: 70687 - DNA, 19 bp, Homo sapiens
  siRNA target sequence for ABCC9 (NM_005691.1,1502-1520).
gcatcaaacttctaaaatt

SEQ ID NO: 70688 - DNA, 19 bp, Homo sapiens
  siRNA target sequence for ABCC9 (NM_005691.1,1521-1539).
gtatgcctgggaacacatt

SEQ ID NO: 70689 - DNA, 19 bp, Homo sapiens
  siRNA target sequence for ABCC9 (NM_005691.1,1576-1594).
ctatctagtctcaaaacct

SEQ ID NO: 70690 - DNA, 19 bp, Homo sapiens
  siRNA target sequence for ABCC9 (NM_005691.1,1587-1605).
caaaacctttgcactatat

SEQ ID NO: 70691 - DNA, 19 bp, Homo sapiens
  siRNA target sequence for ABCC9 (NM_005691.1,1610-1628).
cactctccatcttcatgaa

SEQ ID NO: 70692 - DNA, 19 bp, Homo sapiens
  siRNA target sequence for ABCC9 (NM_005691.1,1651-1669).
gttcttgctacatttgtga

SEQ ID NO: 70693 - DNA, 19 bp, Homo sapiens
  siRNA target sequence for ABCC9 (NM_005691.1,1682-1700).
ccagtggaaacaatctgaa

SEQ ID NO: 70694 - DNA, 19 bp, Homo sapiens
  siRNA target sequence for ABCC9 (NM_005691.1,1721-1739).
cactgtctctcttccatat

SEQ ID NO: 70695 - DNA, 19 bp, Homo sapiens
  siRNA target sequence for ABCC9 (NM_005691.1,1767-1785).
cacggtggtcagatttgca

SEQ ID NO: 70696 - DNA, 19 bp, Homo sapiens
  siRNA target sequence for ABCC9 (NM_005691.1,1865-1883).
gtgaaagttcgcttccttt

SEQ ID NO: 70697 - DNA, 19 bp, Homo sapiens
  siRNA target sequence for ABCC9 (NM_005691.1,1879-1897).
ccttttgagtcctgtaaga

SEQ ID NO: 70698 - DNA, 19 bp, Homo sapiens
  siRNA target sequence for ABCC9 (NM_005691.1,1909-1927).
gttcagccaaaaactataa

SEQ ID NO: 70699 - DNA, 19 bp, Homo sapiens
  siRNA target sequence for ABCC9 (NM_005691.1,1957-1975).
gacagctatgagcaatcaa

SEQ ID NO: 70700 - DNA, 19 bp, Homo sapiens
  siRNA target sequence for ABCC9 (NM_005691.1,2045-2063).
gcagtggtttagctacatt

SEQ ID NO: 70701 - DNA, 19 bp, Homo sapiens
  siRNA target sequence for ABCC9 (NM_005691.1,2046-2064).
cagtggtttagctacatta

SEQ ID NO: 70702 - DNA, 19 bp, Homo sapiens
  siRNA target sequence for ABCC9 (NM_005691.1,2060-2078).
cattatccaatatagatat

SEQ ID NO: 70703 - DNA, 19 bp, Homo sapiens
  siRNA target sequence for ABCC9 (NM_005691.1,2087-2105).
caacaggtcagttaaccat

SEQ ID NO: 70704 - DNA, 19 bp, Homo sapiens
  siRNA target sequence for ABCC9 (NM_005691.1,2093-2111).
gtcagttaaccatgattgt

SEQ ID NO: 70705 - DNA, 19 bp, Homo sapiens
  siRNA target sequence for ABCC9 (NM_005691.1,2352-2370).
cacagatgcctgttctctt

SEQ ID NO: 70706 - DNA, 19 bp, Homo sapiens
  siRNA target sequence for ABCC9 (NM_005691.1,2363-2381).
gttctcttcagccagatat

SEQ ID NO: 70707 - DNA, 19 bp, Homo sapiens
  siRNA target sequence for ABCC9 (NM_005691.1,2466-2484).
ggcacgagcgctgtatcaa

SEQ ID NO: 70708 - DNA, 19 bp, Homo sapiens
  siRNA target sequence for ABCC9 (NM_005691.1,2467-2485).
gcacgagcgctgtatcaaa

SEQ ID NO: 70709 - DNA, 19 bp, Homo sapiens
  siRNA target sequence for ABCC9 (NM_005691.1,2468-2486).
cacgagcgctgtatcaaaa

SEQ ID NO: 70710 - DNA, 19 bp, Homo sapiens
  siRNA target sequence for ABCC9 (NM_005691.1,2470-2488).
cgagcgctgtatcaaaaca

SEQ ID NO: 70711 - DNA, 19 bp, Homo sapiens
  siRNA target sequence for ABCC9 (NM_005691.1,2478-2496).
gtatcaaaacaccaacatt

SEQ ID NO: 70712 - DNA, 19 bp, Homo sapiens
  siRNA target sequence for ABCC9 (NM_005691.1,2533-2551).
cacttgagtgatcatttaa

SEQ ID NO: 70713 - DNA, 19 bp, Homo sapiens
  siRNA target sequence for ABCC9 (NM_005691.1,2554-2572).
caggaggggattttgaaat

SEQ ID NO: 70714 - DNA, 19 bp, Homo sapiens
  siRNA target sequence for ABCC9 (NM_005691.1,2607-2625).
gactcacaaattacagtat

SEQ ID NO: 70715 - DNA, 19 bp, Homo sapiens
  siRNA target sequence for ABCC9 (NM_005691.1,2631-2649).
gcatgctgactggatcata

SEQ ID NO: 70716 - DNA, 19 bp, Homo sapiens
  siRNA target sequence for ABCC9 (NM_005691.1,2702-2720).
ccaaagatgttgagcttta

SEQ ID NO: 70717 - DNA, 19 bp, Homo sapiens
  siRNA target sequence for ABCC9 (NM_005691.1,2809-2827).
ctccgacgggccatgtatt

SEQ ID NO: 70718 - DNA, 19 bp, Homo sapiens
  siRNA target sequence for ABCC9 (NM_005691.1,2811-2829).
ccgacgggccatgtattca

SEQ ID NO: 70719 - DNA, 19 bp, Homo sapiens
  siRNA target sequence for ABCC9 (NM_005691.1,2812-2830).
cgacgggccatgtattcaa

SEQ ID NO: 70720 - DNA, 19 bp, Homo sapiens
  siRNA target sequence for ABCC9 (NM_005691.1,2817-2835).
ggccatgtattcaagagaa

SEQ ID NO: 70721 - DNA, 19 bp, Homo sapiens
  siRNA target sequence for ABCC9 (NM_005691.1,3017-3035).
cggtcattgtagctataga

SEQ ID NO: 70722 - DNA, 19 bp, Homo sapiens
  siRNA target sequence for ABCC9 (NM_005691.1,3019-3037).
gtcattgtagctatagact

SEQ ID NO: 70723 - DNA, 19 bp, Homo sapiens
  siRNA target sequence for ABCC9 (NM_005691.1,3021-3039).
cattgtagctatagactat

SEQ ID NO: 70724 - DNA, 19 bp, Homo sapiens
  siRNA target sequence for ABCC9 (NM_005691.1,3054-3072).
gacatcggagtacagtata

SEQ ID NO: 70725 - DNA, 19 bp, Homo sapiens
  siRNA target sequence for ABCC9 (NM_005691.1,3056-3074).
catcggagtacagtataaa

SEQ ID NO: 70726 - DNA, 19 bp, Homo sapiens
  siRNA target sequence for ABCC9 (NM_005691.1,3059-3077).
cggagtacagtataaacaa

SEQ ID NO: 70727 - DNA, 19 bp, Homo sapiens
  siRNA target sequence for ABCC9 (NM_005691.1,3060-3078).
ggagtacagtataaacaat

SEQ ID NO: 70728 - DNA, 19 bp, Homo sapiens
  siRNA target sequence for ABCC9 (NM_005691.1,3061-3079).
gagtacagtataaacaata

SEQ ID NO: 70729 - DNA, 19 bp, Homo sapiens
  siRNA target sequence for ABCC9 (NM_005691.1,3063-3081).
gtacagtataaacaatact

SEQ ID NO: 70730 - DNA, 19 bp, Homo sapiens
  siRNA target sequence for ABCC9 (NM_005691.1,3089-3107).
ctgatcagacctactatgt

SEQ ID NO: 70731 - DNA, 19 bp, Homo sapiens
  siRNA target sequence for ABCC9 (NM_005691.1,3109-3127).
gctggctttagcatactct

SEQ ID NO: 70732 - DNA, 19 bp, Homo sapiens
  siRNA target sequence for ABCC9 (NM_005691.1,3208-3226).
cacaaccttctcaataaga

SEQ ID NO: 70733 - DNA, 19 bp, Homo sapiens
  siRNA target sequence for ABCC9 (NM_005691.1,3210-3228).
caaccttctcaataagata

SEQ ID NO: 70734 - DNA, 19 bp, Homo sapiens
  siRNA target sequence for ABCC9 (NM_005691.1,3225-3243).
gataatccttggaccaata

SEQ ID NO: 70735 - DNA, 19 bp, Homo sapiens
  siRNA target sequence for ABCC9 (NM_005691.1,3231-3249).
ccttggaccaataaggttt

SEQ ID NO: 70736 - DNA, 19 bp, Homo sapiens
  siRNA target sequence for ABCC9 (NM_005691.1,3283-3301).
cgcttttcagctgatacta

SEQ ID NO: 70737 - DNA, 19 bp, Homo sapiens
  siRNA target sequence for ABCC9 (NM_005691.1,3323-3341).
ctccaaccttggaatctct

SEQ ID NO: 70738 - DNA, 19 bp, Homo sapiens
  siRNA target sequence for ABCC9 (NM_005691.1,3372-3390).
cattgggatgatttcttat

SEQ ID NO: 70739 - DNA, 19 bp, Homo sapiens
  siRNA target sequence for ABCC9 (NM_005691.1,3376-3394).
gggatgatttcttatgcta

SEQ ID NO: 70740 - DNA, 19 bp, Homo sapiens
  siRNA target sequence for ABCC9 (NM_005691.1,3556-3574).
cgggcctttaggcatgaaa

SEQ ID NO: 70741 - DNA, 19 bp, Homo sapiens
  siRNA target sequence for ABCC9 (NM_005691.1,3566-3584).
ggcatgaaaccagatttaa

SEQ ID NO: 70742 - DNA, 19 bp, Homo sapiens
  siRNA target sequence for ABCC9 (NM_005691.1,3567-3585).
gcatgaaaccagatttaaa

SEQ ID NO: 70743 - DNA, 19 bp, Homo sapiens
  siRNA target sequence for ABCC9 (NM_005691.1,3595-3613).
ctggaactgacggatacaa

SEQ ID NO: 70744 - DNA, 19 bp, Homo sapiens
  siRNA target sequence for ABCC9 (NM_005691.1,3598-3616).
gaactgacggatacaaaca

SEQ ID NO: 70745 - DNA, 19 bp, Homo sapiens
  siRNA target sequence for ABCC9 (NM_005691.1,3657-3675).
ggaggtcaggacggattat

SEQ ID NO: 70746 - DNA, 19 bp, Homo sapiens
  siRNA target sequence for ABCC9 (NM_005691.1,3700-3718).
gcatctatagcatccatta

SEQ ID NO: 70747 - DNA, 19 bp, Homo sapiens
  siRNA target sequence for ABCC9 (NM_005691.1,3763-3781).
gcacttacgataaccaatt

SEQ ID NO: 70748 - DNA, 19 bp, Homo sapiens
  siRNA target sequence for ABCC9 (NM_005691.1,3764-3782).
cacttacgataaccaatta

SEQ ID NO: 70749 - DNA, 19 bp, Homo sapiens
  siRNA target sequence for ABCC9 (NM_005691.1,3766-3784).
cttacgataaccaattatt

SEQ ID NO: 70750 - DNA, 19 bp, Homo sapiens
  siRNA target sequence for ABCC9 (NM_005691.1,3770-3788).
cgataaccaattatttgaa

SEQ ID NO: 70751 - DNA, 19 bp, Homo sapiens
  siRNA target sequence for ABCC9 (NM_005691.1,3771-3789).
gataaccaattatttgaat

SEQ ID NO: 70752 - DNA, 19 bp, Homo sapiens
  siRNA target sequence for ABCC9 (NM_005691.1,3920-3938).
cacaagaaggggagatcaa

SEQ ID NO: 70753 - DNA, 19 bp, Homo sapiens
  siRNA target sequence for ABCC9 (NM_005691.1,3922-3940).
caagaaggggagatcaaga

SEQ ID NO: 70754 - DNA, 19 bp, Homo sapiens
  siRNA target sequence for ABCC9 (NM_005691.1,3930-3948).
ggagatcaagatacatgat

SEQ ID NO: 70755 - DNA, 19 bp, Homo sapiens
  siRNA target sequence for ABCC9 (NM_005691.1,3991-4009).
cacgtcaaggcttacatca

SEQ ID NO: 70756 - DNA, 19 bp, Homo sapiens
  siRNA target sequence for ABCC9 (NM_005691.1,3993-4011).
cgtcaaggcttacatcaaa

SEQ ID NO: 70757 - DNA, 19 bp, Homo sapiens
  siRNA target sequence for ABCC9 (NM_005691.1,4041-4059).
cactggcagtgggaaatca

SEQ ID NO: 70758 - DNA, 19 bp, Homo sapiens
  siRNA target sequence for ABCC9 (NM_005691.1,4120-4138).
gggatagacatttccaaat

SEQ ID NO: 70759 - DNA, 19 bp, Homo sapiens
  siRNA target sequence for ABCC9 (NM_005691.1,4157-4175).
gttctagactttcaatcat

SEQ ID NO: 70760 - DNA, 19 bp, Homo sapiens
  siRNA target sequence for ABCC9 (NM_005691.1,4160-4178).
ctagactttcaatcattct

SEQ ID NO: 70761 - DNA, 19 bp, Homo sapiens
  siRNA target sequence for ABCC9 (NM_005691.1,4177-4195).
ctgcaggatccaatactat

SEQ ID NO: 70762 - DNA, 19 bp, Homo sapiens
  siRNA target sequence for ABCC9 (NM_005691.1,4180-4198).
caggatccaatactattca

SEQ ID NO: 70763 - DNA, 19 bp, Homo sapiens
  siRNA target sequence for ABCC9 (NM_005691.1,4192-4210).
ctattcagtggttccatta

SEQ ID NO: 70764 - DNA, 19 bp, Homo sapiens
  siRNA target sequence for ABCC9 (NM_005691.1,4199-4217).
gtggttccattagatttaa

SEQ ID NO: 70765 - DNA, 19 bp, Homo sapiens
  siRNA target sequence for ABCC9 (NM_005691.1,4254-4272).
ctgggaagccttagaaatt

SEQ ID NO: 70766 - DNA, 19 bp, Homo sapiens
  siRNA target sequence for ABCC9 (NM_005691.1,4384-4402).
gcctttgtccgcaaaagca

SEQ ID NO: 70767 - DNA, 19 bp, Homo sapiens
  siRNA target sequence for ABCC9 (NM_005691.1,4392-4410).
ccgcaaaagcagcattctt

SEQ ID NO: 70768 - DNA, 19 bp, Homo sapiens
  siRNA target sequence for ABCC9 (NM_005691.1,4393-4411).
cgcaaaagcagcattctta

SEQ ID NO: 70769 - DNA, 19 bp, Homo sapiens
  siRNA target sequence for ABCC9 (NM_005691.1,4400-4418).
gcagcattcttattatgga

SEQ ID NO: 70770 - DNA, 19 bp, Homo sapiens
  siRNA target sequence for ABCC9 (NM_005691.1,4401-4419).
cagcattcttattatggat

SEQ ID NO: 70771 - DNA, 19 bp, Homo sapiens
  siRNA target sequence for ABCC9 (NM_005691.1,4513-4531).
caccgtgtctcttctatta

SEQ ID NO: 70772 - DNA, 19 bp, Homo sapiens
  siRNA target sequence for ABCC9 (NM_005691.1,4537-4555).
gcaggccttgttttagtct

SEQ ID NO: 70773 - DNA, 19 bp, Homo sapiens
  siRNA target sequence for ABCC9 (NM_005691.1,4538-4556).
caggccttgttttagtctt

SEQ ID NO: 70774 - DNA, 19 bp, Homo sapiens
  siRNA target sequence for ABCC9 (NM_005691.1,4580-4598).
gtgatactgtcccaaattt

SEQ ID NO: 70775 - DNA, 19 bp, Homo sapiens
  siRNA target sequence for ABCC9 (NM_020297.1,4511-4529).
ctcatcgagtacacactat

SEQ ID NO: 70776 - DNA, 19 bp, Homo sapiens
  siRNA target sequence for ABCC9 (NM_020297.1,4516-4534).
cgagtacacactattctga

SEQ ID NO: 70777 - DNA, 19 bp, Homo sapiens
  siRNA target sequence for ABCC9 (NM_020297.1,4537-4555).
gcagacctggttattgtga

SEQ ID NO: 70778 - DNA, 19 bp, Homo sapiens
  siRNA target sequence for ABCC9 (NM_020297.1,4538-4556).
cagacctggttattgtgat

SEQ ID NO: 70779 - DNA, 19 bp, Homo sapiens
  siRNA target sequence for ABCC9 (NM_020297.1,4552-4570).
gtgatgaagcgaggaaata

SEQ ID NO: 70780 - DNA, 19 bp, Homo sapiens
  siRNA target sequence for ABCC9 (NM_020297.1,4604-4622).
ctcaggaaaatggagtatt

SEQ ID NO: 70781 - DNA, 19 bp, Homo sapiens
  siRNA target sequence for ABCC9 (NM_020298.1,1907-1925).
gagttgtcacaaatggata

SEQ ID NO: 70782 - DNA, 19 bp, Homo sapiens
  siRNA target sequence for ABCD1 (NM_000033.2,700-718).
ccttcctgtcggtgtatgt

SEQ ID NO: 70783 - DNA, 19 bp, Homo sapiens
  siRNA target sequence for ABCD1 (NM_000033.2,1256-1274).
ggaggagatcgccttctat

SEQ ID NO: 70784 - DNA, 19 bp, Homo sapiens
  siRNA target sequence for ABCD1 (NM_000033.2,1353-1371).
gaacgcctgtggtatgtta

SEQ ID NO: 70785 - DNA, 19 bp, Homo sapiens
  siRNA target sequence for ABCD1 (NM_000033.2,1528-1546).
gcacagaagccttcactat

SEQ ID NO: 70786 - DNA, 19 bp, Homo sapiens
  siRNA target sequence for ABCD1 (NM_000033.2,1529-1547).
cacagaagccttcactatt

SEQ ID NO: 70787 - DNA, 19 bp, Homo sapiens
  siRNA target sequence for ABCD1 (NM_000033.2,1578-1596).
gccattgagcggatcatgt

SEQ ID NO: 70788 - DNA, 19 bp, Homo sapiens
  siRNA target sequence for ABCD1 (NM_000033.2,1646-1664).
cgagatgttccaggtattt

SEQ ID NO: 70789 - DNA, 19 bp, Homo sapiens
  siRNA target sequence for ABCD1 (NM_000033.2,1674-1692).
cagcgctgtcacttcaaga

SEQ ID NO: 70790 - DNA, 19 bp, Homo sapiens
  siRNA target sequence for ABCD1 (NM_000033.2,1794-1812).
gtggaacaggggatcatct

SEQ ID NO: 70791 - DNA, 19 bp, Homo sapiens
  siRNA target sequence for ABCD1 (NM_000033.2,1993-2011).
cccagcgcatgttctacat

SEQ ID NO: 70792 - DNA, 19 bp, Homo sapiens
  siRNA target sequence for ABCD1 (NM_000033.2,2013-2031).
ccgcagaggccctacatgt

SEQ ID NO: 70793 - DNA, 19 bp, Homo sapiens
  siRNA target sequence for ABCD2 (NM_005164.2,560-578).
gacacatatgctaaatgca

SEQ ID NO: 70794 - DNA, 19 bp, Homo sapiens
  siRNA target sequence for ABCD2 (NM_005164.2,579-597).
gcagctgatcgagtgaaat

SEQ ID NO: 70795 - DNA, 19 bp, Homo sapiens
  siRNA target sequence for ABCD2 (NM_005164.2,642-660).
gcggcatatgctctgaaaa

SEQ ID NO: 70796 - DNA, 19 bp, Homo sapiens
  siRNA target sequence for ABCD2 (NM_005164.2,678-696).
ggcaagcgtttaaagcaat

SEQ ID NO: 70797 - DNA, 19 bp, Homo sapiens
  siRNA target sequence for ABCD2 (NM_005164.2,756-774).
cattgcaccgagaccattt

SEQ ID NO: 70798 - DNA, 19 bp, Homo sapiens
  siRNA target sequence for ABCD2 (NM_005164.2,760-778).
gcaccgagaccatttgtga

SEQ ID NO: 70799 - DNA, 19 bp, Homo sapiens
  siRNA target sequence for ABCD2 (NM_005164.2,761-779).
caccgagaccatttgtgaa

SEQ ID NO: 70800 - DNA, 19 bp, Homo sapiens
  siRNA target sequence for ABCD2 (NM_005164.2,764-782).
cgagaccatttgtgaaaaa

SEQ ID NO: 70801 - DNA, 19 bp, Homo sapiens
  siRNA target sequence for ABCD2 (NM_005164.2,767-785).
gaccatttgtgaaaaacct

SEQ ID NO: 70802 - DNA, 19 bp, Homo sapiens
  siRNA target sequence for ABCD2 (NM_005164.2,790-808).
ctggagtgaatgcagattt

SEQ ID NO: 70803 - DNA, 19 bp, Homo sapiens
  siRNA target sequence for ABCD2 (NM_005164.2,795-813).
gtgaatgcagatttcttca

SEQ ID NO: 70804 - DNA, 19 bp, Homo sapiens
  siRNA target sequence for ABCD2 (NM_005164.2,812-830).
caaacagctactagaactt

SEQ ID NO: 70805 - DNA, 19 bp, Homo sapiens
  siRNA target sequence for ABCD2 (NM_005164.2,885-903).
cactcagtggctctaatct

SEQ ID NO: 70806 - DNA, 19 bp, Homo sapiens
  siRNA target sequence for ABCD2 (NM_005164.2,887-905).
ctcagtggctctaatctca

SEQ ID NO: 70807 - DNA, 19 bp, Homo sapiens
  siRNA target sequence for ABCD2 (NM_005164.2,891-909).
gtggctctaatctcaagaa

SEQ ID NO: 70808 - DNA, 19 bp, Homo sapiens
  siRNA target sequence for ABCD2 (NM_005164.2,934-952).
gtctggatggaaaaatcgt

SEQ ID NO: 70809 - DNA, 19 bp, Homo sapiens
  siRNA target sequence for ABCD2 (NM_005164.2,939-957).
gatggaaaaatcgtgaaaa

SEQ ID NO: 70810 - DNA, 19 bp, Homo sapiens
  siRNA target sequence for ABCD2 (NM_005164.2,943-961).
gaaaaatcgtgaaaagcat

SEQ ID NO: 70811 - DNA, 19 bp, Homo sapiens
  siRNA target sequence for ABCD2 (NM_005164.2,975-993).
cctcggactttcatcatca

SEQ ID NO: 70812 - DNA, 19 bp, Homo sapiens
  siRNA target sequence for ABCD2 (NM_005164.2,976-994).
ctcggactttcatcatcaa

SEQ ID NO: 70813 - DNA, 19 bp, Homo sapiens
  siRNA target sequence for ABCD2 (NM_005164.2,978-996).
cggactttcatcatcaaat

SEQ ID NO: 70814 - DNA, 19 bp, Homo sapiens
  siRNA target sequence for ABCD2 (NM_005164.2,979-997).
ggactttcatcatcaaatt

SEQ ID NO: 70815 - DNA, 19 bp, Homo sapiens
  siRNA target sequence for ABCD2 (NM_005164.2,1051-1069).
ggtacctggaatgcaaatt

SEQ ID NO: 70816 - DNA, 19 bp, Homo sapiens
  siRNA target sequence for ABCD2 (NM_005164.2,1101-1119).
cacgcctatgaaacctatt

SEQ ID NO: 70817 - DNA, 19 bp, Homo sapiens
  siRNA target sequence for ABCD2 (NM_005164.2,1183-1201).
ctcttacggaggatattat

SEQ ID NO: 70818 - DNA, 19 bp, Homo sapiens
  siRNA target sequence for ABCD2 (NM_005164.2,1189-1207).
cggaggatattatgatgtt

SEQ ID NO: 70819 - DNA, 19 bp, Homo sapiens
  siRNA target sequence for ABCD2 (NM_005164.2,1220-1238).
ggctcacttgtattccaat

SEQ ID NO: 70820 - DNA, 19 bp, Homo sapiens
  siRNA target sequence for ABCD2 (NM_005164.2,1224-1242).
cacttgtattccaatctga

SEQ ID NO: 70821 - DNA, 19 bp, Homo sapiens
  siRNA target sequence for ABCD2 (NM_005164.2,1234-1252).
ccaatctgaccaaacctat

SEQ ID NO: 70822 - DNA, 19 bp, Homo sapiens
  siRNA target sequence for ABCD2 (NM_005164.2,1235-1253).
caatctgaccaaacctatt

SEQ ID NO: 70823 - DNA, 19 bp, Homo sapiens
  siRNA target sequence for ABCD2 (NM_005164.2,1249-1267).
ctattttagatgtaatgct

SEQ ID NO: 70824 - DNA, 19 bp, Homo sapiens
  siRNA target sequence for ABCD2 (NM_005164.2,1346-1364).
ggtgtatgccactgctaaa

SEQ ID NO: 70825 - DNA, 19 bp, Homo sapiens
  siRNA target sequence for ABCD2 (NM_005164.2,1354-1372).
ccactgctaaagtgttaaa

SEQ ID NO: 70826 - DNA, 19 bp, Homo sapiens
  siRNA target sequence for ABCD2 (NM_005164.2,1355-1373).
cactgctaaagtgttaaaa

SEQ ID NO: 70827 - DNA, 19 bp, Homo sapiens
  siRNA target sequence for ABCD2 (NM_005164.2,1450-1468).
gaattatagccaatgtaga

SEQ ID NO: 70828 - DNA, 19 bp, Homo sapiens
  siRNA target sequence for ABCD2 (NM_005164.2,1486-1504).
gaggacataaggtagaaat

SEQ ID NO: 70829 - DNA, 19 bp, Homo sapiens
  siRNA target sequence for ABCD2 (NM_005164.2,1547-1565).
gaacctcattttatccaaa

SEQ ID NO: 70830 - DNA, 19 bp, Homo sapiens
  siRNA target sequence for ABCD2 (NM_005164.2,1551-1569).
ctcattttatccaaacgtt

SEQ ID NO: 70831 - DNA, 19 bp, Homo sapiens
  siRNA target sequence for ABCD2 (NM_005164.2,1566-1584).
cgtttgtggtacatcatga

SEQ ID NO: 70832 - DNA, 19 bp, Homo sapiens
  siRNA target sequence for ABCD2 (NM_005164.2,1567-1585).
gtttgtggtacatcatgat

SEQ ID NO: 70833 - DNA, 19 bp, Homo sapiens
  siRNA target sequence for ABCD2 (NM_005164.2,1571-1589).
gtggtacatcatgatagaa

SEQ ID NO: 70834 - DNA, 19 bp, Homo sapiens
  siRNA target sequence for ABCD2 (NM_005164.2,1573-1591).
ggtacatcatgatagaaca

SEQ ID NO: 70835 - DNA, 19 bp, Homo sapiens
  siRNA target sequence for ABCD2 (NM_005164.2,1615-1633).
gcagcagtggactaattat

SEQ ID NO: 70836 - DNA, 19 bp, Homo sapiens
  siRNA target sequence for ABCD2 (NM_005164.2,1635-1653).
gtggctatacctattatca

SEQ ID NO: 70837 - DNA, 19 bp, Homo sapiens
  siRNA target sequence for ABCD2 (NM_005164.2,1637-1655).
ggctatacctattatcact

SEQ ID NO: 70838 - DNA, 19 bp, Homo sapiens
  siRNA target sequence for ABCD2 (NM_005164.2,1684-1702).
gccaaaagcaagttatggt

SEQ ID NO: 70839 - DNA, 19 bp, Homo sapiens
  siRNA target sequence for ABCD2 (NM_005164.2,1710-1728).
cggacagaagcctttacca

SEQ ID NO: 70840 - DNA, 19 bp, Homo sapiens
  siRNA target sequence for ABCD2 (NM_005164.2,1721-1739).
ctttaccactgctcgaaat

SEQ ID NO: 70841 - DNA, 19 bp, Homo sapiens
  siRNA target sequence for ABCD2 (NM_005164.2,1758-1776).
gatgctattgaaaggatta

SEQ ID NO: 70842 - DNA, 19 bp, Homo sapiens
  siRNA target sequence for ABCD2 (NM_005164.2,1771-1789).
ggattatgtcttcatacaa

SEQ ID NO: 70843 - DNA, 19 bp, Homo sapiens
  siRNA target sequence for ABCD2 (NM_005164.2,1814-1832).
cactgctcgagtgtacaat

SEQ ID NO: 70844 - DNA, 19 bp, Homo sapiens
  siRNA target sequence for ABCD2 (NM_005164.2,1816-1834).
ctgctcgagtgtacaatat

SEQ ID NO: 70845 - DNA, 19 bp, Homo sapiens
  siRNA target sequence for ABCD2 (NM_005164.2,1818-1836).
gctcgagtgtacaatatgt

SEQ ID NO: 70846 - DNA, 19 bp, Homo sapiens
  siRNA target sequence for ABCD2 (NM_005164.2,1819-1837).
ctcgagtgtacaatatgtt

SEQ ID NO: 70847 - DNA, 19 bp, Homo sapiens
  siRNA target sequence for ABCD2 (NM_005164.2,1821-1839).
cgagtgtacaatatgtttt

SEQ ID NO: 70848 - DNA, 19 bp, Homo sapiens
  siRNA target sequence for ABCD2 (NM_005164.2,1910-1928).
caagaatggagctaaggta

SEQ ID NO: 70849 - DNA, 19 bp, Homo sapiens
  siRNA target sequence for ABCD2 (NM_005164.2,1942-1960).
gtgacacattggcaattaa

SEQ ID NO: 70850 - DNA, 19 bp, Homo sapiens
  siRNA target sequence for ABCD2 (NM_005164.2,1977-1995).
gtggatcacggaattattt

SEQ ID NO: 70851 - DNA, 19 bp, Homo sapiens
  siRNA target sequence for ABCD2 (NM_005164.2,2037-2055).
gcttccaggctaaacttca

SEQ ID NO: 70852 - DNA, 19 bp, Homo sapiens
  siRNA target sequence for ABCD2 (NM_005164.2,2041-2059).
ccaggctaaacttcaaagt

SEQ ID NO: 70853 - DNA, 19 bp, Homo sapiens
  siRNA target sequence for ABCD2 (NM_005164.2,2044-2062).
ggctaaacttcaaagtaga

SEQ ID NO: 70854 - DNA, 19 bp, Homo sapiens
  siRNA target sequence for ABCD2 (NM_005164.2,2064-2082).
gaaggaatgcatcttttga

SEQ ID NO: 70855 - DNA, 19 bp, Homo sapiens
  siRNA target sequence for ABCD2 (NM_005164.2,2067-2085).
ggaatgcatcttttgataa

SEQ ID NO: 70856 - DNA, 19 bp, Homo sapiens
  siRNA target sequence for ABCD2 (NM_005164.2,2169-2187).
ccacctcctcaacatatgt

SEQ ID NO: 70857 - DNA, 19 bp, Homo sapiens
  siRNA target sequence for ABCD2 (NM_005164.2,2170-2188).
cacctcctcaacatatgtt

SEQ ID NO: 70858 - DNA, 19 bp, Homo sapiens
  siRNA target sequence for ABCD2 (NM_005164.2,2221-2239).
gaagtcttcgggatcaagt

SEQ ID NO: 70859 - DNA, 19 bp, Homo sapiens
  siRNA target sequence for ABCD2 (NM_005164.2,2224-2242).
gtcttcgggatcaagtcat

SEQ ID NO: 70860 - DNA, 19 bp, Homo sapiens
  siRNA target sequence for ABCD2 (NM_005164.2,2226-2244).
cttcgggatcaagtcattt

SEQ ID NO: 70861 - DNA, 19 bp, Homo sapiens
  siRNA target sequence for ABCD2 (NM_005164.2,2247-2265).
cctgattcagtggatgata

SEQ ID NO: 70862 - DNA, 19 bp, Homo sapiens
  siRNA target sequence for ABCD2 (NM_005164.2,2267-2285).
gcatgataaaggttataca

SEQ ID NO: 70863 - DNA, 19 bp, Homo sapiens
  siRNA target sequence for ABCD2 (NM_005164.2,2278-2296).
gttatacagaccaagatct

SEQ ID NO: 70864 - DNA, 19 bp, Homo sapiens
  siRNA target sequence for ABCD2 (NM_005164.2,2297-2315).
ggaacgtatcctacacaat

SEQ ID NO: 70865 - DNA, 19 bp, Homo sapiens
  siRNA target sequence for ABCD2 (NM_005164.2,2322-2340).
ctctatcacatagttcaaa

SEQ ID NO: 70866 - DNA, 19 bp, Homo sapiens
  siRNA target sequence for ABCD2 (NM_005164.2,2408-2426).
gggcatggctcgtatgttt

SEQ ID NO: 70867 - DNA, 19 bp, Homo sapiens
  siRNA target sequence for ABCD2 (NM_005164.2,2409-2427).
ggcatggctcgtatgtttt

SEQ ID NO: 70868 - DNA, 19 bp, Homo sapiens
  siRNA target sequence for ABCD2 (NM_005164.2,2410-2428).
gcatggctcgtatgtttta

SEQ ID NO: 70869 - DNA, 19 bp, Homo sapiens
  siRNA target sequence for ABCD2 (NM_005164.2,2411-2429).
catggctcgtatgttttat

SEQ ID NO: 70870 - DNA, 19 bp, Homo sapiens
  siRNA target sequence for ABCD2 (NM_005164.2,2416-2434).
ctcgtatgttttatcataa

SEQ ID NO: 70871 - DNA, 19 bp, Homo sapiens
  siRNA target sequence for ABCD2 (NM_005164.2,2481-2499).
gatgtcgaaggaaagatat

SEQ ID NO: 70872 - DNA, 19 bp, Homo sapiens
  siRNA target sequence for ABCD2 (NM_005164.2,2517-2535).
gctggaatttccttactgt

SEQ ID NO: 70873 - DNA, 19 bp, Homo sapiens
  siRNA target sequence for ABCD2 (NM_005164.2,2527-2545).
ccttactgtctataacaca

SEQ ID NO: 70874 - DNA, 19 bp, Homo sapiens
  siRNA target sequence for ABCD2 (NM_005164.2,2602-2620).
gttggcgctttgaacaatt

SEQ ID NO: 70875 - DNA, 19 bp, Homo sapiens
  siRNA target sequence for ABCD2 (NM_005164.2,2606-2624).
gcgctttgaacaattggat

SEQ ID NO: 70876 - DNA, 19 bp, Homo sapiens
  siRNA target sequence for ABCD2 (NM_005164.2,2607-2625).
cgctttgaacaattggata

SEQ ID NO: 70877 - DNA, 19 bp, Homo sapiens
  siRNA target sequence for ABCD2 (NM_005164.2,2628-2646).
gctatccgtttgacattga

SEQ ID NO: 70878 - DNA, 19 bp, Homo sapiens
  siRNA target sequence for ABCD2 (NM_005164.2,2699-2717).
gcagagactcaatgaacta

SEQ ID NO: 70879 - DNA, 19 bp, Homo sapiens
  siRNA target sequence for ABCD2 (NM_005164.2,2702-2720).
gagactcaatgaactatgt

SEQ ID NO: 70880 - DNA, 19 bp, Homo sapiens
  siRNA target sequence for ABCD2 (NM_005164.2,2704-2722).
gactcaatgaactatgtaa

SEQ ID NO: 70881 - DNA, 19 bp, Homo sapiens
  siRNA target sequence for ABCD3 (NM_002858.2,123-141).
cggcctgcacggtaagaaa

SEQ ID NO: 70882 - DNA, 19 bp, Homo sapiens
  siRNA target sequence for ABCD3 (NM_002858.2,154-172).
ccattacagaacaatgaga

SEQ ID NO: 70883 - DNA, 19 bp, Homo sapiens
  siRNA target sequence for ABCD3 (NM_002858.2,196-214).
gtggtggacaaggtgtttt

SEQ ID NO: 70884 - DNA, 19 bp, Homo sapiens
  siRNA target sequence for ABCD3 (NM_002858.2,216-234).
ctcaaggctcatacagatt

SEQ ID NO: 70885 - DNA, 19 bp, Homo sapiens
  siRNA target sequence for ABCD3 (NM_002858.2,272-290).
caggttacttggtacttat

SEQ ID NO: 70886 - DNA, 19 bp, Homo sapiens
  siRNA target sequence for ABCD3 (NM_002858.2,300-318).
gctggtgtctcgaacatat

SEQ ID NO: 70887 - DNA, 19 bp, Homo sapiens
  siRNA target sequence for ABCD3 (NM_002858.2,303-321).
ggtgtctcgaacatattgt

SEQ ID NO: 70888 - DNA, 19 bp, Homo sapiens
  siRNA target sequence for ABCD3 (NM_002858.2,306-324).
gtctcgaacatattgtgat

SEQ ID NO: 70889 - DNA, 19 bp, Homo sapiens
  siRNA target sequence for ABCD3 (NM_002858.2,320-338).
gtgatgtttggatgattca

SEQ ID NO: 70890 - DNA, 19 bp, Homo sapiens
  siRNA target sequence for ABCD3 (NM_002858.2,370-388).
ggtcgtagcaggaaagatt

SEQ ID NO: 70891 - DNA, 19 bp, Homo sapiens
  siRNA target sequence for ABCD3 (NM_002858.2,371-389).
gtcgtagcaggaaagattt

SEQ ID NO: 70892 - DNA, 19 bp, Homo sapiens
  siRNA target sequence for ABCD3 (NM_002858.2,373-391).
cgtagcaggaaagatttca

SEQ ID NO: 70893 - DNA, 19 bp, Homo sapiens
  siRNA target sequence for ABCD3 (NM_002858.2,427-445).
cttatctctctggttaata

SEQ ID NO: 70894 - DNA, 19 bp, Homo sapiens
  siRNA target sequence for ABCD3 (NM_002858.2,461-479).
ggttaaatgagcttaaact

SEQ ID NO: 70895 - DNA, 19 bp, Homo sapiens
  siRNA target sequence for ABCD3 (NM_002858.2,550-568).
gggaatctggacaacagaa

SEQ ID NO: 70896 - DNA, 19 bp, Homo sapiens
  siRNA target sequence for ABCD3 (NM_002858.2,552-570).
gaatctggacaacagaata

SEQ ID NO: 70897 - DNA, 19 bp, Homo sapiens
  siRNA target sequence for ABCD3 (NM_002858.2,556-574).
ctggacaacagaatagcta

SEQ ID NO: 70898 - DNA, 19 bp, Homo sapiens
  siRNA target sequence for ABCD3 (NM_002858.2,561-579).
caacagaatagctaatcca

SEQ ID NO: 70899 - DNA, 19 bp, Homo sapiens
  siRNA target sequence for ABCD3 (NM_002858.2,582-600).
ccagctgcttacacaagat

SEQ ID NO: 70900 - DNA, 19 bp, Homo sapiens
  siRNA target sequence for ABCD3 (NM_002858.2,585-603).
gctgcttacacaagatgta

SEQ ID NO: 70901 - DNA, 19 bp, Homo sapiens
  siRNA target sequence for ABCD3 (NM_002858.2,589-607).
cttacacaagatgtagaaa

SEQ ID NO: 70902 - DNA, 19 bp, Homo sapiens
  siRNA target sequence for ABCD3 (NM_002858.2,618-636).
cagtgtagtcgatctgtat

SEQ ID NO: 70903 - DNA, 19 bp, Homo sapiens
  siRNA target sequence for ABCD3 (NM_002858.2,622-640).
gtagtcgatctgtattcaa

SEQ ID NO: 70904 - DNA, 19 bp, Homo sapiens
  siRNA target sequence for ABCD3 (NM_002858.2,684-702).
gttaacgagtgcaattgga

SEQ ID NO: 70905 - DNA, 19 bp, Homo sapiens
  siRNA target sequence for ABCD3 (NM_002858.2,739-757).
gtttctgggctattcctaa

SEQ ID NO: 70906 - DNA, 19 bp, Homo sapiens
  siRNA target sequence for ABCD3 (NM_002858.2,763-781).
cttcgaagacccattggta

SEQ ID NO: 70907 - DNA, 19 bp, Homo sapiens
  siRNA target sequence for ABCD3 (NM_002858.2,767-785).
gaagacccattggtaagat

SEQ ID NO: 70908 - DNA, 19 bp, Homo sapiens
  siRNA target sequence for ABCD3 (NM_002858.2,919-937).
ctggtggaacacctacata

SEQ ID NO: 70909 - DNA, 19 bp, Homo sapiens
  siRNA target sequence for ABCD3 (NM_002858.2,921-939).
ggtggaacacctacataat

SEQ ID NO: 70910 - DNA, 19 bp, Homo sapiens
  siRNA target sequence for ABCD3 (NM_002858.2,922-940).
gtggaacacctacataatt

SEQ ID NO: 70911 - DNA, 19 bp, Homo sapiens
  siRNA target sequence for ABCD3 (NM_002858.2,925-943).
gaacacctacataatttca

SEQ ID NO: 70912 - DNA, 19 bp, Homo sapiens
  siRNA target sequence for ABCD3 (NM_002858.2,964-982).
ggcttcattgatagtatta

SEQ ID NO: 70913 - DNA, 19 bp, Homo sapiens
  siRNA target sequence for ABCD3 (NM_002858.2,999-1017).
cactgttgttggttaccta

SEQ ID NO: 70914 - DNA, 19 bp, Homo sapiens
  siRNA target sequence for ABCD3 (NM_002858.2,1046-1064).
ctcatcctcgacatctcaa

SEQ ID NO: 70915 - DNA, 19 bp, Homo sapiens
  siRNA target sequence for ABCD3 (NM_002858.2,1051-1069).
cctcgacatctcaagagta

SEQ ID NO: 70916 - DNA, 19 bp, Homo sapiens
  siRNA target sequence for ABCD3 (NM_002858.2,1078-1096).
gaacttctagaggattact

SEQ ID NO: 70917 - DNA, 19 bp, Homo sapiens
  siRNA target sequence for ABCD3 (NM_002858.2,1084-1102).
ctagaggattactaccaaa

SEQ ID NO: 70918 - DNA, 19 bp, Homo sapiens
  siRNA target sequence for ABCD3 (NM_002858.2,1132-1150).
gctctgggtcgaatagttt

SEQ ID NO: 70919 - DNA, 19 bp, Homo sapiens
  siRNA target sequence for ABCD3 (NM_002858.2,1133-1151).
ctctgggtcgaatagtttt

SEQ ID NO: 70920 - DNA, 19 bp, Homo sapiens
  siRNA target sequence for ABCD3 (NM_002858.2,1153-1171).
gctgggcgtgaaatgacta

SEQ ID NO: 70921 - DNA, 19 bp, Homo sapiens
  siRNA target sequence for ABCD3 (NM_002858.2,1156-1174).
gggcgtgaaatgactagat

SEQ ID NO: 70922 - DNA, 19 bp, Homo sapiens
  siRNA target sequence for ABCD3 (NM_002858.2,1157-1175).
ggcgtgaaatgactagatt

SEQ ID NO: 70923 - DNA, 19 bp, Homo sapiens
  siRNA target sequence for ABCD3 (NM_002858.2,1190-1208).
ctcggattacagaattaat

SEQ ID NO: 70924 - DNA, 19 bp, Homo sapiens
  siRNA target sequence for ABCD3 (NM_002858.2,1209-1227).
gcaagtactgaaggattta

SEQ ID NO: 70925 - DNA, 19 bp, Homo sapiens
  siRNA target sequence for ABCD3 (NM_002858.2,1274-1292).
gtattgaaggagtacaagt

SEQ ID NO: 70926 - DNA, 19 bp, Homo sapiens
  siRNA target sequence for ABCD3 (NM_002858.2,1307-1325).
ctggtgctggagaaatcat

SEQ ID NO: 70927 - DNA, 19 bp, Homo sapiens
  siRNA target sequence for ABCD3 (NM_002858.2,1338-1356).
cattataaagtttgatcat

SEQ ID NO: 70928 - DNA, 19 bp, Homo sapiens
  siRNA target sequence for ABCD3 (NM_002858.2,1370-1388).
cgccaaatggagatgtttt

SEQ ID NO: 70929 - DNA, 19 bp, Homo sapiens
  siRNA target sequence for ABCD3 (NM_002858.2,1389-1407).
gatccgagaccttaatttt

SEQ ID NO: 70930 - DNA, 19 bp, Homo sapiens
  siRNA target sequence for ABCD3 (NM_002858.2,1392-1410).
ccgagaccttaattttgaa

SEQ ID NO: 70931 - DNA, 19 bp, Homo sapiens
  siRNA target sequence for ABCD3 (NM_002858.2,1415-1433).
gatctggggctaatgttct

SEQ ID NO: 70932 - DNA, 19 bp, Homo sapiens
  siRNA target sequence for ABCD3 (NM_002858.2,1418-1436).
ctggggctaatgttctaat

SEQ ID NO: 70933 - DNA, 19 bp, Homo sapiens
  siRNA target sequence for ABCD3 (NM_002858.2,1454-1472).
gcggaaagagttcactttt

SEQ ID NO: 70934 - DNA, 19 bp, Homo sapiens
  siRNA target sequence for ABCD3 (NM_002858.2,1473-1491).
ccgtgttcttggtgaatta

SEQ ID NO: 70935 - DNA, 19 bp, Homo sapiens
  siRNA target sequence for ABCD3 (NM_002858.2,1574-1592).
gaacacttcgagatcaagt

SEQ ID NO: 70936 - DNA, 19 bp, Homo sapiens
  siRNA target sequence for ABCD3 (NM_002858.2,1579-1597).
cttcgagatcaagtgatat

SEQ ID NO: 70937 - DNA, 19 bp, Homo sapiens
  siRNA target sequence for ABCD3 (NM_002858.2,1639-1657).
gacctagtactgaaggaat

SEQ ID NO: 70938 - DNA, 19 bp, Homo sapiens
  siRNA target sequence for ABCD3 (NM_002858.2,1761-1779).
ggcgatggcaagattattt

SEQ ID NO: 70939 - DNA, 19 bp, Homo sapiens
  siRNA target sequence for ABCD3 (NM_002858.2,1762-1780).
gcgatggcaagattatttt

SEQ ID NO: 70940 - DNA, 19 bp, Homo sapiens
  siRNA target sequence for ABCD3 (NM_002858.2,1768-1786).
gcaagattattttatcata

SEQ ID NO: 70941 - DNA, 19 bp, Homo sapiens
  siRNA target sequence for ABCD3 (NM_002858.2,1814-1832).
gcacaagtgcagttagtgt

SEQ ID NO: 70942 - DNA, 19 bp, Homo sapiens
  siRNA target sequence for ABCD3 (NM_002858.2,1833-1851).
cgacgtggaaggctacatt

SEQ ID NO: 70943 - DNA, 19 bp, Homo sapiens
  siRNA target sequence for ABCD3 (NM_002858.2,1834-1852).
gacgtggaaggctacattt

SEQ ID NO: 70944 - DNA, 19 bp, Homo sapiens
  siRNA target sequence for ABCD3 (NM_002858.2,1949-1967).
gaggcaactatgaattcaa

SEQ ID NO: 70945 - DNA, 19 bp, Homo sapiens
  siRNA target sequence for ABCD3 (NM_002858.2,1976-1994).
cagaagatacagttgagtt

SEQ ID NO: 70946 - DNA, 19 bp, Homo sapiens
  siRNA target sequence for ABCD4 (NM_005050.1,84-102).
cgccaggcccaggttagat

SEQ ID NO: 70947 - DNA, 19 bp, Homo sapiens
  siRNA target sequence for ABCD4 (NM_005050.1,92-110).
ccaggttagatctgcaatt

SEQ ID NO: 70948 - DNA, 19 bp, Homo sapiens
  siRNA target sequence for ABCD4 (NM_005050.1,95-113).
ggttagatctgcaatttct

SEQ ID NO: 70949 - DNA, 19 bp, Homo sapiens
  siRNA target sequence for ABCD4 (NM_005050.1,124-142).
ctgcagatactgaaggttt

SEQ ID NO: 70950 - DNA, 19 bp, Homo sapiens
  siRNA target sequence for ABCD4 (NM_005050.1,198-216).
gaccctactggagcaattt

SEQ ID NO: 70951 - DNA, 19 bp, Homo sapiens
  siRNA target sequence for ABCD4 (NM_005050.1,202-220).
ctactggagcaatttgtga

SEQ ID NO: 70952 - DNA, 19 bp, Homo sapiens
  siRNA target sequence for ABCD4 (NM_005050.1,237-255).
gatccccagtcagtactat

SEQ ID NO: 70953 - DNA, 19 bp, Homo sapiens
  siRNA target sequence for ABCD4 (NM_005050.1,276-294).
cttggaagggtttaagact

SEQ ID NO: 70954 - DNA, 19 bp, Homo sapiens
  siRNA target sequence for ABCD4 (NM_005050.1,284-302).
ggtttaagactctgacatt

SEQ ID NO: 70955 - DNA, 19 bp, Homo sapiens
  siRNA target sequence for ABCD4 (NM_005050.1,306-324).
ggctgtcatgctcattgtt

SEQ ID NO: 70956 - DNA, 19 bp, Homo sapiens
  siRNA target sequence for ABCD4 (NM_005050.1,359-377).
cctgcaacctgctgtatgt

SEQ ID NO: 70957 - DNA, 19 bp, Homo sapiens
  siRNA target sequence for ABCD4 (NM_005050.1,454-472).
ctgcgggatgacatcgata

SEQ ID NO: 70958 - DNA, 19 bp, Homo sapiens
  siRNA target sequence for ABCD4 (NM_005050.1,554-572).
cgttcaccctcgtctacta

SEQ ID NO: 70959 - DNA, 19 bp, Homo sapiens
  siRNA target sequence for ABCD4 (NM_005050.1,560-578).
ccctcgtctactacactta

SEQ ID NO: 70960 - DNA, 19 bp, Homo sapiens
  siRNA target sequence for ABCD4 (NM_005050.1,617-635).
gcatcttcgggtatttcat

SEQ ID NO: 70961 - DNA, 19 bp, Homo sapiens
  siRNA target sequence for ABCD4 (NM_005050.1,640-658).
gggaccgtggtgaacaaaa

SEQ ID NO: 70962 - DNA, 19 bp, Homo sapiens
  siRNA target sequence for ABCD4 (NM_005050.1,644-662).
ccgtggtgaacaaaacttt

SEQ ID NO: 70963 - DNA, 19 bp, Homo sapiens
  siRNA target sequence for ABCD4 (NM_005050.1,869-887).
gcatcaacacctttgacta

SEQ ID NO: 70964 - DNA, 19 bp, Homo sapiens
  siRNA target sequence for ABCD4 (NM_005050.1,1267-1285).
gatctgagcctaaagatct

SEQ ID NO: 70965 - DNA, 19 bp, Homo sapiens
  siRNA target sequence for ABCD4 (NM_005050.1,1409-1427).
cccatggggtgctattcct

SEQ ID NO: 70966 - DNA, 19 bp, Homo sapiens
  siRNA target sequence for ABCD4 (NM_005050.1,1459-1477).
cttcgggagcaggtgatat

SEQ ID NO: 70967 - DNA, 19 bp, Homo sapiens
  siRNA target sequence for ABCD4 (NM_005050.1,1604-1622).
ggaactggtatgatgttct

SEQ ID NO: 70968 - DNA, 19 bp, Homo sapiens
  siRNA target sequence for ABCD4 (NM_005050.1,1649-1667).
cctttgcccgactcttcta

SEQ ID NO: 70969 - DNA, 19 bp, Homo sapiens
  siRNA target sequence for ABCD4 (NM_020326.2,895-913).
cagcatcctgagttacgtt

SEQ ID NO: 70970 - DNA, 19 bp, Homo sapiens
  siRNA target sequence for ABCE1 (NM_002940.1,126-144).
caagttaacgagaattgct

SEQ ID NO: 70971 - DNA, 19 bp, Homo sapiens
  siRNA target sequence for ABCE1 (NM_002940.1,134-152).
cgagaattgctattgtcaa

SEQ ID NO: 70972 - DNA, 19 bp, Homo sapiens
  siRNA target sequence for ABCE1 (NM_002940.1,143-161).
ctattgtcaaccatgacaa

SEQ ID NO: 70973 - DNA, 19 bp, Homo sapiens
  siRNA target sequence for ABCE1 (NM_002940.1,148-166).
gtcaaccatgacaaatgta

SEQ ID NO: 70974 - DNA, 19 bp, Homo sapiens
  siRNA target sequence for ABCE1 (NM_002940.1,200-218).
gttgtcctgtagttcgaat

SEQ ID NO: 70975 - DNA, 19 bp, Homo sapiens
  siRNA target sequence for ABCE1 (NM_002940.1,208-226).
gtagttcgaatgggaaaat

SEQ ID NO: 70976 - DNA, 19 bp, Homo sapiens
  siRNA target sequence for ABCE1 (NM_002940.1,211-229).
gttcgaatgggaaaattat

SEQ ID NO: 70977 - DNA, 19 bp, Homo sapiens
  siRNA target sequence for ABCE1 (NM_002940.1,214-232).
cgaatgggaaaattatgca

SEQ ID NO: 70978 - DNA, 19 bp, Homo sapiens
  siRNA target sequence for ABCE1 (NM_002940.1,238-256).
gttacaccccagagcaaaa

SEQ ID NO: 70979 - DNA, 19 bp, Homo sapiens
  siRNA target sequence for ABCE1 (NM_002940.1,244-262).
ccccagagcaaaatagcat

SEQ ID NO: 70980 - DNA, 19 bp, Homo sapiens
  siRNA target sequence for ABCE1 (NM_002940.1,260-278).
catggatttccgaaactct

SEQ ID NO: 70981 - DNA, 19 bp, Homo sapiens
  siRNA target sequence for ABCE1 (NM_002940.1,270-288).
cgaaactctttgtattggt

SEQ ID NO: 70982 - DNA, 19 bp, Homo sapiens
  siRNA target sequence for ABCE1 (NM_002940.1,287-305).
gttgtggtatctgtattaa

SEQ ID NO: 70983 - DNA, 19 bp, Homo sapiens
  siRNA target sequence for ABCE1 (NM_002940.1,312-330).
cccctttggcgccttatca

SEQ ID NO: 70984 - DNA, 19 bp, Homo sapiens
  siRNA target sequence for ABCE1 (NM_002940.1,313-331).
ccctttggcgccttatcaa

SEQ ID NO: 70985 - DNA, 19 bp, Homo sapiens
  siRNA target sequence for ABCE1 (NM_002940.1,314-332).
cctttggcgccttatcaat

SEQ ID NO: 70986 - DNA, 19 bp, Homo sapiens
  siRNA target sequence for ABCE1 (NM_002940.1,315-333).
ctttggcgccttatcaatt

SEQ ID NO: 70987 - DNA, 19 bp, Homo sapiens
  siRNA target sequence for ABCE1 (NM_002940.1,319-337).
ggcgccttatcaattgtca

SEQ ID NO: 70988 - DNA, 19 bp, Homo sapiens
  siRNA target sequence for ABCE1 (NM_002940.1,320-338).
gcgccttatcaattgtcaa

SEQ ID NO: 70989 - DNA, 19 bp, Homo sapiens
  siRNA target sequence for ABCE1 (NM_002940.1,323-341).
ccttatcaattgtcaatct

SEQ ID NO: 70990 - DNA, 19 bp, Homo sapiens
  siRNA target sequence for ABCE1 (NM_002940.1,324-342).
cttatcaattgtcaatcta

SEQ ID NO: 70991 - DNA, 19 bp, Homo sapiens
  siRNA target sequence for ABCE1 (NM_002940.1,361-379).
gaaaccacacatcgatatt

SEQ ID NO: 70992 - DNA, 19 bp, Homo sapiens
  siRNA target sequence for ABCE1 (NM_002940.1,445-463).
ggaactaatggtattggaa

SEQ ID NO: 70993 - DNA, 19 bp, Homo sapiens
  siRNA target sequence for ABCE1 (NM_002940.1,446-464).
gaactaatggtattggaaa

SEQ ID NO: 70994 - DNA, 19 bp, Homo sapiens
  siRNA target sequence for ABCE1 (NM_002940.1,529-547).
cctgactggcaggagattt

SEQ ID NO: 70995 - DNA, 19 bp, Homo sapiens
  siRNA target sequence for ABCE1 (NM_002940.1,558-576).
ccgtggatctgaattacaa

SEQ ID NO: 70996 - DNA, 19 bp, Homo sapiens
  siRNA target sequence for ABCE1 (NM_002940.1,614-632).
ccatcatcaaacctcaata

SEQ ID NO: 70997 - DNA, 19 bp, Homo sapiens
  siRNA target sequence for ABCE1 (NM_002940.1,615-633).
catcatcaaacctcaatat

SEQ ID NO: 70998 - DNA, 19 bp, Homo sapiens
  siRNA target sequence for ABCE1 (NM_002940.1,618-636).
catcaaacctcaatatgta

SEQ ID NO: 70999 - DNA, 19 bp, Homo sapiens
  siRNA target sequence for ABCE1 (NM_002940.1,660-678).
ggggacagtgggatctatt

SEQ ID NO: 71000 - DNA, 19 bp, Homo sapiens
  siRNA target sequence for ABCE1 (NM_002940.1,661-679).
gggacagtgggatctattt

SEQ ID NO: 71001 - DNA, 19 bp, Homo sapiens
  siRNA target sequence for ABCE1 (NM_002940.1,662-680).
ggacagtgggatctatttt

SEQ ID NO: 71002 - DNA, 19 bp, Homo sapiens
  siRNA target sequence for ABCE1 (NM_002940.1,674-692).
ctattttggaccgaaaaga

SEQ ID NO: 71003 - DNA, 19 bp, Homo sapiens
  siRNA target sequence for ABCE1 (NM_002940.1,681-699).
ggaccgaaaagatgaaaca

SEQ ID NO: 71004 - DNA, 19 bp, Homo sapiens
  siRNA target sequence for ABCE1 (NM_002940.1,704-722).
cacaggcaattgtatgtca

SEQ ID NO: 71005 - DNA, 19 bp, Homo sapiens
  siRNA target sequence for ABCE1 (NM_002940.1,738-756).
ccacctaaaagaacgaaat

SEQ ID NO: 71006 - DNA, 19 bp, Homo sapiens
  siRNA target sequence for ABCE1 (NM_002940.1,751-769).
cgaaatgttgaagatcttt

SEQ ID NO: 71007 - DNA, 19 bp, Homo sapiens
  siRNA target sequence for ABCE1 (NM_002940.1,773-791).
gaggagagttgcagagatt

SEQ ID NO: 71008 - DNA, 19 bp, Homo sapiens
  siRNA target sequence for ABCE1 (NM_002940.1,799-817).
gctgtcgtttgcatacaga

SEQ ID NO: 71009 - DNA, 19 bp, Homo sapiens
  siRNA target sequence for ABCE1 (NM_002940.1,809-827).
gcatacagaaagctgatat

SEQ ID NO: 71010 - DNA, 19 bp, Homo sapiens
  siRNA target sequence for ABCE1 (NM_002940.1,810-828).
catacagaaagctgatatt

SEQ ID NO: 71011 - DNA, 19 bp, Homo sapiens
  siRNA target sequence for ABCE1 (NM_002940.1,924-942).
cattgtggtggaacatgat

SEQ ID NO: 71012 - DNA, 19 bp, Homo sapiens
  siRNA target sequence for ABCE1 (NM_002940.1,928-946).
gtggtggaacatgatctaa

SEQ ID NO: 71013 - DNA, 19 bp, Homo sapiens
  siRNA target sequence for ABCF2 (NM_005692.3,343-361).
gcctctcaccccaacagta

SEQ ID NO: 71014 - DNA, 19 bp, Homo sapiens
  siRNA target sequence for ABCF2 (NM_005692.3,351-369).
ccccaacagtactgatgtt

SEQ ID NO: 71015 - DNA, 19 bp, Homo sapiens
  siRNA target sequence for ABCF2 (NM_005692.3,353-371).
ccaacagtactgatgttca

SEQ ID NO: 71016 - DNA, 19 bp, Homo sapiens
  siRNA target sequence for ABCF2 (NM_005692.3,378-396).
caacctctcacttaccttt

SEQ ID NO: 71017 - DNA, 19 bp, Homo sapiens
  siRNA target sequence for ABCF2 (NM_005692.3,381-399).
cctctcacttacctttcat

SEQ ID NO: 71018 - DNA, 19 bp, Homo sapiens
  siRNA target sequence for ABCF2 (NM_005692.3,456-474).
cctcattggtttaaatgga

SEQ ID NO: 71019 - DNA, 19 bp, Homo sapiens
  siRNA target sequence for ABCF2 (NM_005692.3,459-477).
cattggtttaaatggaatt

SEQ ID NO: 71020 - DNA, 19 bp, Homo sapiens
  siRNA target sequence for ABCF2 (NM_005692.3,486-504).
catgctgctctctgctatt

SEQ ID NO: 71021 - DNA, 19 bp, Homo sapiens
  siRNA target sequence for ABCF2 (NM_005692.3,778-796).
cgcaagaagctaaaagact

SEQ ID NO: 71022 - DNA, 19 bp, Homo sapiens
  siRNA target sequence for ABCF2 (NM_005692.3,980-998).
gtgtctgtaccaatatcat

SEQ ID NO: 71023 - DNA, 19 bp, Homo sapiens
  siRNA target sequence for ABCF2 (NM_005692.3,986-1004).
gtaccaatatcattcacat

SEQ ID NO: 71024 - DNA, 19 bp, Homo sapiens
  siRNA target sequence for ABCF2 (NM_005692.3,1011-1029).
caagaaactgaagtattat

SEQ ID NO: 71025 - DNA, 19 bp, Homo sapiens
  siRNA target sequence for ABCF2 (NM_005692.3,1023-1041).
gtattatacgggtaattat

SEQ ID NO: 71026 - DNA, 19 bp, Homo sapiens
  siRNA target sequence for ABCF2 (NM_005692.3,1031-1049).
cgggtaattatgatcagta

SEQ ID NO: 71027 - DNA, 19 bp, Homo sapiens
  siRNA target sequence for ABCF2 (NM_005692.3,1098-1116).
ctgggagcaagatcagatt

SEQ ID NO: 71028 - DNA, 19 bp, Homo sapiens
  siRNA target sequence for ABCF2 (NM_005692.3,1233-1251).
ggtcgtgagcgataagaca

SEQ ID NO: 71029 - DNA, 19 bp, Homo sapiens
  siRNA target sequence for ABCF2 (NM_005692.3,1333-1351).
gatgggccttgcatctaca

SEQ ID NO: 71030 - DNA, 19 bp, Homo sapiens
  siRNA target sequence for ABCF2 (NM_005692.3,1336-1354).
gggccttgcatctacaata

SEQ ID NO: 71031 - DNA, 19 bp, Homo sapiens
  siRNA target sequence for ABCF2 (NM_005692.3,1337-1355).
ggccttgcatctacaataa

SEQ ID NO: 71032 - DNA, 19 bp, Homo sapiens
  siRNA target sequence for ABCF2 (NM_005692.3,1338-1356).
gccttgcatctacaataat

SEQ ID NO: 71033 - DNA, 19 bp, Homo sapiens
  siRNA target sequence for ABCF2 (NM_005692.3,1340-1358).
cttgcatctacaataatct

SEQ ID NO: 71034 - DNA, 19 bp, Homo sapiens
  siRNA target sequence for ABCF2 (NM_005692.3,1347-1365).
ctacaataatctagaattt

SEQ ID NO: 71035 - DNA, 19 bp, Homo sapiens
  siRNA target sequence for ABCF2 (NM_005692.3,1491-1509).
caagatagggcgttaccat

SEQ ID NO: 71036 - DNA, 19 bp, Homo sapiens
  siRNA target sequence for ABCF2 (NM_005692.3,1499-1517).
ggcgttaccatcagcattt

SEQ ID NO: 71037 - DNA, 19 bp, Homo sapiens
  siRNA target sequence for ABCF2 (NM_005692.3,1500-1518).
gcgttaccatcagcattta

SEQ ID NO: 71038 - DNA, 19 bp, Homo sapiens
  siRNA target sequence for ABCF2 (NM_005692.3,1544-1562).
cacctttggagtacatgat

SEQ ID NO: 71039 - DNA, 19 bp, Homo sapiens
  siRNA target sequence for ABCF2 (NM_005692.3,1546-1564).
cctttggagtacatgatga

SEQ ID NO: 71040 - DNA, 19 bp, Homo sapiens
  siRNA target sequence for ABCF2 (NM_005692.3,1547-1565).
ctttggagtacatgatgaa

SEQ ID NO: 71041 - DNA, 19 bp, Homo sapiens
  siRNA target sequence for ABCF2 (NM_005692.3,1620-1638).
cggtctcactgggaaacaa

SEQ ID NO: 71042 - DNA, 19 bp, Homo sapiens
  siRNA target sequence for ABCF2 (NM_005692.3,1739-1757).
ccaccaatcacctggatat

SEQ ID NO: 71043 - DNA, 19 bp, Homo sapiens
  siRNA target sequence for ABCF2 (NM_005692.3,1742-1760).
ccaatcacctggatatcga

SEQ ID NO: 71044 - DNA, 19 bp, Homo sapiens
  siRNA target sequence for ABCF2 (NM_005692.3,1773-1791).
cctggcagatgccatcaat

SEQ ID NO: 71045 - DNA, 19 bp, Homo sapiens
  siRNA target sequence for ABCF3 (NM_018358.1,115-133).
cgacttgcgccgaaatcct

SEQ ID NO: 71046 - DNA, 19 bp, Homo sapiens
  siRNA target sequence for ABCF3 (NM_018358.1,137-155).
gagcgagttccccgaaatt

SEQ ID NO: 71047 - DNA, 19 bp, Homo sapiens
  siRNA target sequence for ABCF3 (NM_018358.1,139-157).
gcgagttccccgaaattga

SEQ ID NO: 71048 - DNA, 19 bp, Homo sapiens
  siRNA target sequence for ABCF3 (NM_018358.1,238-256).
ctgtaggggaactattgca

SEQ ID NO: 71049 - DNA, 19 bp, Homo sapiens
  siRNA target sequence for ABCF3 (NM_018358.1,375-393).
gcccctatccagttgtcaa

SEQ ID NO: 71050 - DNA, 19 bp, Homo sapiens
  siRNA target sequence for ABCF3 (NM_018358.1,379-397).
ctatccagttgtcaaagat

SEQ ID NO: 71051 - DNA, 19 bp, Homo sapiens
  siRNA target sequence for ABCF3 (NM_018358.1,454-472).
cctcgacagtgaatgcaaa

SEQ ID NO: 71052 - DNA, 19 bp, Homo sapiens
  siRNA target sequence for ABCF3 (NM_018358.1,600-618).
gagagtcggttggaatcat

SEQ ID NO: 71053 - DNA, 19 bp, Homo sapiens
  siRNA target sequence for ABCF3 (NM_018358.1,602-620).
gagtcggttggaatcatct

SEQ ID NO: 71054 - DNA, 19 bp, Homo sapiens
  siRNA target sequence for ABCF3 (NM_018358.1,619-637).
ctggcaagaacaaatccta

SEQ ID NO: 71055 - DNA, 19 bp, Homo sapiens
  siRNA target sequence for ABCF3 (NM_018358.1,644-662).
gcgaattgagaactttgat

SEQ ID NO: 71056 - DNA, 19 bp, Homo sapiens
  siRNA target sequence for ABCF3 (NM_018358.1,665-683).
gtcttttggcgatagagta

SEQ ID NO: 71057 - DNA, 19 bp, Homo sapiens
  siRNA target sequence for ABCF3 (NM_018358.1,749-767).
gttggggaagacaacgtta

SEQ ID NO: 71058 - DNA, 19 bp, Homo sapiens
  siRNA target sequence for ABCF3 (NM_018358.1,886-904).
gtgtgcgagaggatttgct

SEQ ID NO: 71059 - DNA, 19 bp, Homo sapiens
  siRNA target sequence for ABCF3 (NM_018358.1,1252-1270).
cccacgaccgcaacttctt

SEQ ID NO: 71060 - DNA, 19 bp, Homo sapiens
  siRNA target sequence for ABCF3 (NM_018358.1,1254-1272).
cacgaccgcaacttcttga

SEQ ID NO: 71061 - DNA, 19 bp, Homo sapiens
  siRNA target sequence for ABCF3 (NM_018358.1,1256-1274).
cgaccgcaacttcttgaat

SEQ ID NO: 71062 - DNA, 19 bp, Homo sapiens
  siRNA target sequence for ABCF3 (NM_018358.1,1306-1324).
gccagcggctagatggtta

SEQ ID NO: 71063 - DNA, 19 bp, Homo sapiens
  siRNA target sequence for ABCF3 (NM_018358.1,1321-1339).
gttaccggggagactttga

SEQ ID NO: 71064 - DNA, 19 bp, Homo sapiens
  siRNA target sequence for ABCF3 (NM_018358.1,1373-1391).
caaccagcagcgtgaatat

SEQ ID NO: 71065 - DNA, 19 bp, Homo sapiens
  siRNA target sequence for ABCF3 (NM_018358.1,1462-1480).
cctctcaagtgcagagtaa

SEQ ID NO: 71066 - DNA, 19 bp, Homo sapiens
  siRNA target sequence for ABCF3 (NM_018358.1,1516-1534).
ctgtggacaaggaatcaga

SEQ ID NO: 71067 - DNA, 19 bp, Homo sapiens
  siRNA target sequence for ABCF3 (NM_018358.1,1527-1545).
gaatcagaggtcgtaatga

SEQ ID NO: 71068 - DNA, 19 bp, Homo sapiens
  siRNA target sequence for ABCF3 (NM_018358.1,1762-1780).
ctcacaggaatctgaagat

SEQ ID NO: 71069 - DNA, 19 bp, Homo sapiens
  siRNA target sequence for ABCF3 (NM_018358.1,1773-1791).
ctgaagattggctatttca

SEQ ID NO: 71070 - DNA, 19 bp, Homo sapiens
  siRNA target sequence for ABCF3 (NM_018358.1,2058-2076).
ggccgtgccctcaacaatt

SEQ ID NO: 71071 - DNA, 19 bp, Homo sapiens
  siRNA target sequence for ABCF3 (NM_018358.1,2061-2079).
cgtgccctcaacaatttca

SEQ ID NO: 71072 - DNA, 19 bp, Homo sapiens
  siRNA target sequence for ABCF3 (NM_018358.1,2101-2119).
cccacgatgagcgctttat

SEQ ID NO: 71073 - DNA, 19 bp, Homo sapiens
  siRNA target sequence for ABCF3 (NM_018358.1,2103-2121).
cacgatgagcgctttatca

SEQ ID NO: 71074 - DNA, 19 bp, Homo sapiens
  siRNA target sequence for ABCG1 (NM_004915.2,170-188).
gacatctgaaaaaagtaga

SEQ ID NO: 71075 - DNA, 19 bp, Homo sapiens
  siRNA target sequence for ABCG1 (NM_004915.2,231-249).
gagggcagctgtgaacatt

SEQ ID NO: 71076 - DNA, 19 bp, Homo sapiens
  siRNA target sequence for ABCG1 (NM_004915.2,350-368).
gtgagttggtggccattat

SEQ ID NO: 71077 - DNA, 19 bp, Homo sapiens
  siRNA target sequence for ABCG1 (NM_004915.2,780-798).
ggtggtctcgctgatgaaa

SEQ ID NO: 71078 - DNA, 19 bp, Homo sapiens
  siRNA target sequence for ABCG1 (NM_004915.2,811-829).
gggggtcgctccatcattt

SEQ ID NO: 71079 - DNA, 19 bp, Homo sapiens
  siRNA target sequence for ABCG1 (NM_004915.2,814-832).
ggtcgctccatcatttgca

SEQ ID NO: 71080 - DNA, 19 bp, Homo sapiens
  siRNA target sequence for ABCG1 (NM_004915.2,885-903).
cctgagtcaaggacaatgt

SEQ ID NO: 71081 - DNA, 19 bp, Homo sapiens
  siRNA target sequence for ABCG1 (NM_004915.2,902-920).
gtgtgtaccggggaaaagt

SEQ ID NO: 71082 - DNA, 19 bp, Homo sapiens
  siRNA target sequence for ABCG1 (NM_004915.2,904-922).
gtgtaccggggaaaagtct

SEQ ID NO: 71083 - DNA, 19 bp, Homo sapiens
  siRNA target sequence for ABCG1 (NM_004915.2,1010-1028).
gcgagtacggtgatcagaa

SEQ ID NO: 71084 - DNA, 19 bp, Homo sapiens
  siRNA target sequence for ABCG1 (NM_004915.2,1141-1159).
gtaaagcagacaaaacgat

SEQ ID NO: 71085 - DNA, 19 bp, Homo sapiens
  siRNA target sequence for ABCG1 (NM_004915.2,1431-1449).
gcctactgttctgacattt

SEQ ID NO: 71086 - DNA, 19 bp, Homo sapiens
  siRNA target sequence for ABCG1 (NM_004915.2,1537-1555).
gtgccctttcagatcatgt

SEQ ID NO: 71087 - DNA, 19 bp, Homo sapiens
  siRNA target sequence for ABCG1 (NM_004915.2,1798-1816).
cagtggatgtcctacatct

SEQ ID NO: 71088 - DNA, 19 bp, Homo sapiens
  siRNA target sequence for ABCG1 (NM_004915.2,1978-1996).
gtactcgggattttcttca

SEQ ID NO: 71089 - DNA, 19 bp, Homo sapiens
  siRNA target sequence for ABCG2 (NM_004827.1,212-230).
ccagtaatgtcgaagtttt

SEQ ID NO: 71090 - DNA, 19 bp, Homo sapiens
  siRNA target sequence for ABCG2 (NM_004827.1,215-233).
gtaatgtcgaagtttttat

SEQ ID NO: 71091 - DNA, 19 bp, Homo sapiens
  siRNA target sequence for ABCG2 (NM_004827.1,301-319).
gaaggagctgtgttaagtt

SEQ ID NO: 71092 - DNA, 19 bp, Homo sapiens
  siRNA target sequence for ABCG2 (NM_004827.1,327-345).
catctgctatcgagtaaaa

SEQ ID NO: 71093 - DNA, 19 bp, Homo sapiens
  siRNA target sequence for ABCG2 (NM_004827.1,332-350).
gctatcgagtaaaactgaa

SEQ ID NO: 71094 - DNA, 19 bp, Homo sapiens
  siRNA target sequence for ABCG2 (NM_004827.1,447-465).
cacaggtggaggcaaatct

SEQ ID NO: 71095 - DNA, 19 bp, Homo sapiens
  siRNA target sequence for ABCG2 (NM_004827.1,464-482).
cttcgttattagatgtctt

SEQ ID NO: 71096 - DNA, 19 bp, Homo sapiens
  siRNA target sequence for ABCG2 (NM_004827.1,492-510).
gaaagatccaagtggatta

SEQ ID NO: 71097 - DNA, 19 bp, Homo sapiens
  siRNA target sequence for ABCG2 (NM_004827.1,573-591).
cgtggtacaagatgatgtt

SEQ ID NO: 71098 - DNA, 19 bp, Homo sapiens
  siRNA target sequence for ABCG2 (NM_004827.1,604-622).
ctgacggtgagagaaaact

SEQ ID NO: 71099 - DNA, 19 bp, Homo sapiens
  siRNA target sequence for ABCG2 (NM_004827.1,640-658).
cttcggcttgcaacaacta

SEQ ID NO: 71100 - DNA, 19 bp, Homo sapiens
  siRNA target sequence for ABCG2 (NM_004827.1,643-661).
cggcttgcaacaactatga

SEQ ID NO: 71101 - DNA, 19 bp, Homo sapiens
  siRNA target sequence for ABCG2 (NM_004827.1,653-671).
caactatgacgaatcatga

SEQ ID NO: 71102 - DNA, 19 bp, Homo sapiens
  siRNA target sequence for ABCG2 (NM_004827.1,656-674).
ctatgacgaatcatgaaaa

SEQ ID NO: 71103 - DNA, 19 bp, Homo sapiens
  siRNA target sequence for ABCG2 (NM_004827.1,662-680).
cgaatcatgaaaaaaacga

SEQ ID NO: 71104 - DNA, 19 bp, Homo sapiens
  siRNA target sequence for ABCG2 (NM_004827.1,899-917).
ctaagcagggacgaacaat

SEQ ID NO: 71105 - DNA, 19 bp, Homo sapiens
  siRNA target sequence for ABCG2 (NM_004827.1,904-922).
cagggacgaacaatcatct

SEQ ID NO: 71106 - DNA, 19 bp, Homo sapiens
  siRNA target sequence for ABCG2 (NM_004827.1,907-925).
ggacgaacaatcatcttct

SEQ ID NO: 71107 - DNA, 19 bp, Homo sapiens
  siRNA target sequence for ABCG2 (NM_004827.1,931-949).
catcagcctcgatattcca

SEQ ID NO: 71108 - DNA, 19 bp, Homo sapiens
  siRNA target sequence for ABCG2 (NM_004827.1,937-955).
cctcgatattccatcttca

SEQ ID NO: 71109 - DNA, 19 bp, Homo sapiens
  siRNA target sequence for ABCG2 (NM_004827.1,938-956).
ctcgatattccatcttcaa

SEQ ID NO: 71110 - DNA, 19 bp, Homo sapiens
  siRNA target sequence for ABCG2 (NM_004827.1,1020-1038).
ggccttgggatactttgaa

SEQ ID NO: 71111 - DNA, 19 bp, Homo sapiens
  siRNA target sequence for ABCG2 (NM_004827.1,1021-1039).
gccttgggatactttgaat

SEQ ID NO: 71112 - DNA, 19 bp, Homo sapiens
  siRNA target sequence for ABCG2 (NM_004827.1,1023-1041).
cttgggatactttgaatca

SEQ ID NO: 71113 - DNA, 19 bp, Homo sapiens
  siRNA target sequence for ABCG2 (NM_004827.1,1051-1069).
cactgtgaggcctataata

SEQ ID NO: 71114 - DNA, 19 bp, Homo sapiens
  siRNA target sequence for ABCG2 (NM_004827.1,1173-1191).
gcaggataagccactcata

SEQ ID NO: 71115 - DNA, 19 bp, Homo sapiens
  siRNA target sequence for ABCG2 (NM_004827.1,1176-1194).
ggataagccactcatagaa

SEQ ID NO: 71116 - DNA, 19 bp, Homo sapiens
  siRNA target sequence for ABCG2 (NM_004827.1,1192-1210).
gaaaaattagcggagattt

SEQ ID NO: 71117 - DNA, 19 bp, Homo sapiens
  siRNA target sequence for ABCG2 (NM_004827.1,1227-1245).
ctacaaagagacaaaagct

SEQ ID NO: 71118 - DNA, 19 bp, Homo sapiens
  siRNA target sequence for ABCG2 (NM_004827.1,1236-1254).
gacaaaagctgaattacat

SEQ ID NO: 71119 - DNA, 19 bp, Homo sapiens
  siRNA target sequence for ABCG2 (NM_004827.1,1340-1358).
gggtttccaagcgttcatt

SEQ ID NO: 71120 - DNA, 19 bp, Homo sapiens
  siRNA target sequence for ABCG2 (NM_004827.1,1342-1360).
gtttccaagcgttcattca

SEQ ID NO: 71121 - DNA, 19 bp, Homo sapiens
  siRNA target sequence for ABCG2 (NM_004827.1,1413-1431).
cgtactgggactggttata

SEQ ID NO: 71122 - DNA, 19 bp, Homo sapiens
  siRNA target sequence for ABCG2 (NM_004827.1,1426-1444).
gttataggtgccatttact

SEQ ID NO: 71123 - DNA, 19 bp, Homo sapiens
  siRNA target sequence for ABCG2 (NM_004827.1,1515-1533).
gtgtttcagcagtgtttca

SEQ ID NO: 71124 - DNA, 19 bp, Homo sapiens
  siRNA target sequence for ABCG2 (NM_004827.1,1532-1550).
cagccgtggaactctttgt

SEQ ID NO: 71125 - DNA, 19 bp, Homo sapiens
  siRNA target sequence for ABCG2 (NM_004827.1,1560-1578).
gaagctcttcatacatgaa

SEQ ID NO: 71126 - DNA, 19 bp, Homo sapiens
  siRNA target sequence for ABCG2 (NM_004827.1,1564-1582).
ctcttcatacatgaataca

SEQ ID NO: 71127 - DNA, 19 bp, Homo sapiens
  siRNA target sequence for ABCG2 (NM_004827.1,1598-1616).
gagtgtcatcttatttcct

SEQ ID NO: 71128 - DNA, 19 bp, Homo sapiens
  siRNA target sequence for ABCG2 (NM_004827.1,1650-1668).
gatgttaccaagtattata

SEQ ID NO: 71129 - DNA, 19 bp, Homo sapiens
  siRNA target sequence for ABCG2 (NM_004827.1,1657-1675).
ccaagtattatatttacct

SEQ ID NO: 71130 - DNA, 19 bp, Homo sapiens
  siRNA target sequence for ABCG2 (NM_004827.1,1673-1691).
cctgtatagtgtacttcat

SEQ ID NO: 71131 - DNA, 19 bp, Homo sapiens
  siRNA target sequence for ABCG2 (NM_004827.1,1676-1694).
gtatagtgtacttcatgtt

SEQ ID NO: 71132 - DNA, 19 bp, Homo sapiens
  siRNA target sequence for ABCG2 (NM_004827.1,1711-1729).
gcagatgccttcttcgtta

SEQ ID NO: 71133 - DNA, 19 bp, Homo sapiens
  siRNA target sequence for ABCG2 (NM_004827.1,1714-1732).
gatgccttcttcgttatga

SEQ ID NO: 71134 - DNA, 19 bp, Homo sapiens
  siRNA target sequence for ABCG2 (NM_004827.1,1803-1821).
ggtttctgtagcaacactt

SEQ ID NO: 71135 - DNA, 19 bp, Homo sapiens
  siRNA target sequence for ABCG2 (NM_004827.1,1861-1879).
ggtctgttggtcaatctca

SEQ ID NO: 71136 - DNA, 19 bp, Homo sapiens
  siRNA target sequence for ABCG2 (NM_004827.1,1914-1932).
cttcagcattccacgatat

SEQ ID NO: 71137 - DNA, 19 bp, Homo sapiens
  siRNA target sequence for ABCG2 (NM_004827.1,1917-1935).
cagcattccacgatatgga

SEQ ID NO: 71138 - DNA, 19 bp, Homo sapiens
  siRNA target sequence for ABCG2 (NM_004827.1,1919-1937).
gcattccacgatatggatt

SEQ ID NO: 71139 - DNA, 19 bp, Homo sapiens
  siRNA target sequence for ABCG2 (NM_004827.1,1920-1938).
cattccacgatatggattt

SEQ ID NO: 71140 - DNA, 19 bp, Homo sapiens
  siRNA target sequence for ABCG2 (NM_004827.1,1957-1975).
gaatttttgggacaaaact

SEQ ID NO: 71141 - DNA, 19 bp, Homo sapiens
  siRNA target sequence for ABCG2 (NM_004827.1,2024-2042).
catgtactggcgaagaata

SEQ ID NO: 71142 - DNA, 19 bp, Homo sapiens
  siRNA target sequence for ABCG2 (NM_004827.1,2027-2045).
gtactggcgaagaatattt

SEQ ID NO: 71143 - DNA, 19 bp, Homo sapiens
  siRNA target sequence for ABCG2 (NM_004827.1,2030-2048).
ctggcgaagaatatttggt

SEQ ID NO: 71144 - DNA, 19 bp, Homo sapiens
  siRNA target sequence for ABCG2 (NM_004827.1,2033-2051).
gcgaagaatatttggtaaa

SEQ ID NO: 71145 - DNA, 19 bp, Homo sapiens
  siRNA target sequence for ABCG2 (NM_004827.1,2095-2113).
gtggccttggcttgtatga

SEQ ID NO: 71146 - DNA, 19 bp, Homo sapiens
  siRNA target sequence for ABCG2 (NM_004827.1,2097-2115).
ggccttggcttgtatgatt

SEQ ID NO: 71147 - DNA, 19 bp, Homo sapiens
  siRNA target sequence for ABCG2 (NM_004827.1,2099-2117).
ccttggcttgtatgattgt

SEQ ID NO: 71148 - DNA, 19 bp, Homo sapiens
  siRNA target sequence for ABCG2 (NM_004827.1,2103-2121).
ggcttgtatgattgttatt

SEQ ID NO: 71149 - DNA, 19 bp, Homo sapiens
  siRNA target sequence for ABCG4 (NM_022169.2,227-245).
ggcgcaaaaggggttataa

SEQ ID NO: 71150 - DNA, 19 bp, Homo sapiens
  siRNA target sequence for ABCG4 (NM_022169.2,229-247).
cgcaaaaggggttataaga

SEQ ID NO: 71151 - DNA, 19 bp, Homo sapiens
  siRNA target sequence for ABCG4 (NM_022169.2,239-257).
gttataagacccttctcaa

SEQ ID NO: 71152 - DNA, 19 bp, Homo sapiens
  siRNA target sequence for ABCG4 (NM_022169.2,314-332).
gggctggcaagtctacatt

SEQ ID NO: 71153 - DNA, 19 bp, Homo sapiens
  siRNA target sequence for ABCG4 (NM_022169.2,316-334).
gctggcaagtctacattca

SEQ ID NO: 71154 - DNA, 19 bp, Homo sapiens
  siRNA target sequence for ABCG4 (NM_022169.2,372-390).
ggggcagatcctggttaat

SEQ ID NO: 71155 - DNA, 19 bp, Homo sapiens
  siRNA target sequence for ABCG4 (NM_022169.2,375-393).
gcagatcctggttaatgga

SEQ ID NO: 71156 - DNA, 19 bp, Homo sapiens
  siRNA target sequence for ABCG4 (NM_022169.2,656-674).
cgcctgtcatgttctttga

SEQ ID NO: 71157 - DNA, 19 bp, Homo sapiens
  siRNA target sequence for ABCG4 (NM_022169.2,858-876).
caacctgatcccctatcta

SEQ ID NO: 71158 - DNA, 19 bp, Homo sapiens
  siRNA target sequence for ABCG4 (NM_022169.2,998-1016).
gcgctatggctgagaagaa

SEQ ID NO: 71159 - DNA, 19 bp, Homo sapiens
  siRNA target sequence for ABCG4 (NM_022169.2,1345-1363).
gagatggcggtcttcatga

SEQ ID NO: 71160 - DNA, 19 bp, Homo sapiens
  siRNA target sequence for ABCG4 (NM_022169.2,1763-1781).
gagacctgacatgtttaga

SEQ ID NO: 71161 - DNA, 19 bp, Homo sapiens
  siRNA target sequence for ABCG5 (NM_022436.2,369-387).
gagagcgggcagatcatgt

SEQ ID NO: 71162 - DNA, 19 bp, Homo sapiens
  siRNA target sequence for ABCG5 (NM_022436.2,687-705).
cgactgattggcaactaca

SEQ ID NO: 71163 - DNA, 19 bp, Homo sapiens
  siRNA target sequence for ABCG5 (NM_022436.2,809-827).
ggactgcatgactgctaat

SEQ ID NO: 71164 - DNA, 19 bp, Homo sapiens
  siRNA target sequence for ABCG5 (NM_022436.2,893-911).
gccccgttctgagcttttt

SEQ ID NO: 71165 - DNA, 19 bp, Homo sapiens
  siRNA target sequence for ABCG5 (NM_022436.2,895-913).
cccgttctgagctttttca

SEQ ID NO: 71166 - DNA, 19 bp, Homo sapiens
  siRNA target sequence for ABCG5 (NM_022436.2,940-958).
gcttcggagagctgatttt

SEQ ID NO: 71167 - DNA, 19 bp, Homo sapiens
  siRNA target sequence for ABCG5 (NM_022436.2,944-962).
cggagagctgattttctgt

SEQ ID NO: 71168 - DNA, 19 bp, Homo sapiens
  siRNA target sequence for ABCG5 (NM_022436.2,964-982).
gcacgccagcggaaatgct

SEQ ID NO: 71169 - DNA, 19 bp, Homo sapiens
  siRNA target sequence for ABCG5 (NM_022436.2,965-983).
cacgccagcggaaatgctt

SEQ ID NO: 71170 - DNA, 19 bp, Homo sapiens
  siRNA target sequence for ABCG5 (NM_022436.2,969-987).
ccagcggaaatgcttgatt

SEQ ID NO: 71171 - DNA, 19 bp, Homo sapiens
  siRNA target sequence for ABCG5 (NM_022436.2,1057-1075).
cagtggatacccaaagcaa

SEQ ID NO: 71172 - DNA, 19 bp, Homo sapiens
  siRNA target sequence for ABCG5 (NM_022436.2,1127-1145).
caagaaatcagcaatttgt

SEQ ID NO: 71173 - DNA, 19 bp, Homo sapiens
  siRNA target sequence for ABCG5 (NM_022436.2,1175-1193).
gaaacacctgaaaacgtta

SEQ ID NO: 71174 - DNA, 19 bp, Homo sapiens
  siRNA target sequence for ABCG5 (NM_022436.2,1189-1207).
cgttaccaatggttccttt

SEQ ID NO: 71175 - DNA, 19 bp, Homo sapiens
  siRNA target sequence for ABCG5 (NM_022436.2,1194-1212).
ccaatggttcctttcaaaa

SEQ ID NO: 71176 - DNA, 19 bp, Homo sapiens
  siRNA target sequence for ABCG5 (NM_022436.2,1303-1321).
cgcgtctccttcagaatct

SEQ ID NO: 71177 - DNA, 19 bp, Homo sapiens
  siRNA target sequence for ABCG5 (NM_022436.2,1396-1414).
gcgtaggtctcctttacca

SEQ ID NO: 71178 - DNA, 19 bp, Homo sapiens
  siRNA target sequence for ABCG5 (NM_022436.2,1402-1420).
gtctcctttaccagtttgt

SEQ ID NO: 71179 - DNA, 19 bp, Homo sapiens
  siRNA target sequence for ABCG5 (NM_022436.2,1625-1643).
ggttgcccgatttggatat

SEQ ID NO: 71180 - DNA, 19 bp, Homo sapiens
  siRNA target sequence for ABCG5 (NM_022436.2,1626-1644).
gttgcccgatttggatatt

SEQ ID NO: 71181 - DNA, 19 bp, Homo sapiens
  siRNA target sequence for ABCG5 (NM_022436.2,1666-1684).
cccacttaattggtgaatt

SEQ ID NO: 71182 - DNA, 19 bp, Homo sapiens
  siRNA target sequence for ABCG5 (NM_022436.2,1690-1708).
ctcttgtgctacttggtat

SEQ ID NO: 71183 - DNA, 19 bp, Homo sapiens
  siRNA target sequence for ABCG5 (NM_022436.2,1709-1727).
cgtccaaaatccaaatata

SEQ ID NO: 71184 - DNA, 19 bp, Homo sapiens
  siRNA target sequence for ABCG5 (NM_022436.2,1713-1731).
caaaatccaaatatagtca

SEQ ID NO: 71185 - DNA, 19 bp, Homo sapiens
  siRNA target sequence for ABCG5 (NM_022436.2,1852-1870).
gcagtgagattcttgtagt

SEQ ID NO: 71186 - DNA, 19 bp, Homo sapiens
  siRNA target sequence for ABCG5 (NM_022436.2,1875-1893).
gagttctacggactgaatt

SEQ ID NO: 71187 - DNA, 19 bp, Homo sapiens
  siRNA target sequence for ABCG5 (NM_022436.2,1880-1898).
ctacggactgaatttcact

SEQ ID NO: 71188 - DNA, 19 bp, Homo sapiens
  siRNA target sequence for ABCG5 (NM_022436.2,1895-1913).
cacttgtggcagctcaaat

SEQ ID NO: 71189 - DNA, 19 bp, Homo sapiens
  siRNA target sequence for ABCG5 (NM_022436.2,1897-1915).
cttgtggcagctcaaatgt

SEQ ID NO: 71190 - DNA, 19 bp, Homo sapiens
  siRNA target sequence for ABCG5 (NM_022436.2,1918-1936).
ctgtgacaactaatccaat

SEQ ID NO: 71191 - DNA, 19 bp, Homo sapiens
  siRNA target sequence for ABCG5 (NM_022436.2,1922-1940).
gacaactaatccaatgtgt

SEQ ID NO: 71192 - DNA, 19 bp, Homo sapiens
  siRNA target sequence for ABCG5 (NM_022436.2,1939-1957).
gtgccttcactcaaggaat

SEQ ID NO: 71193 - DNA, 19 bp, Homo sapiens
  siRNA target sequence for ABCG5 (NM_022436.2,1953-1971).
ggaattcaattcattgaga

SEQ ID NO: 71194 - DNA, 19 bp, Homo sapiens
  siRNA target sequence for ABCG5 (NM_022436.2,1976-1994).
ctgcccaggtgcaacatct

SEQ ID NO: 71195 - DNA, 19 bp, Homo sapiens
  siRNA target sequence for ABCG5 (NM_022436.2,1981-1999).
caggtgcaacatctagatt

SEQ ID NO: 71196 - DNA, 19 bp, Homo sapiens
  siRNA target sequence for ABCG5 (NM_022436.2,1983-2001).
ggtgcaacatctagattca

SEQ ID NO: 71197 - DNA, 19 bp, Homo sapiens
  siRNA target sequence for ABCG5 (NM_022436.2,1986-2004).
gcaacatctagattcacaa

SEQ ID NO: 71198 - DNA, 19 bp, Homo sapiens
  siRNA target sequence for ABCG5 (NM_022436.2,1987-2005).
caacatctagattcacaat

SEQ ID NO: 71199 - DNA, 19 bp, Homo sapiens
  siRNA target sequence for ABCG5 (NM_022436.2,1993-2011).
ctagattcacaatgaactt

SEQ ID NO: 71200 - DNA, 19 bp, Homo sapiens
  siRNA target sequence for ABCG8 (NM_022437.2,154-172).
ggcctccaggatagattgt

SEQ ID NO: 71201 - DNA, 19 bp, Homo sapiens
  siRNA target sequence for ABCG8 (NM_022437.2,157-175).
ctccaggatagattgttct

SEQ ID NO: 71202 - DNA, 19 bp, Homo sapiens
  siRNA target sequence for ABCG8 (NM_022437.2,185-203).
gtgacaacagcctgtactt

SEQ ID NO: 71203 - DNA, 19 bp, Homo sapiens
  siRNA target sequence for ABCG8 (NM_022437.2,350-368).
gcatccagaacctaagctt

SEQ ID NO: 71204 - DNA, 19 bp, Homo sapiens
  siRNA target sequence for ABCG8 (NM_022437.2,698-716).
cccgcgtgggcaacatgta

SEQ ID NO: 71205 - DNA, 19 bp, Homo sapiens
  siRNA target sequence for ABCG8 (NM_022437.2,776-794).
ggaacccaggaatccttat

SEQ ID NO: 71206 - DNA, 19 bp, Homo sapiens
  siRNA target sequence for ABCG8 (NM_022437.2,904-922).
cctcgctctgacatcttca

SEQ ID NO: 71207 - DNA, 19 bp, Homo sapiens
  siRNA target sequence for ABCG8 (NM_022437.2,987-1005).
catggtccagtatttcaca

SEQ ID NO: 71208 - DNA, 19 bp, Homo sapiens
  siRNA target sequence for ABCG8 (NM_022437.2,1034-1052).
gcaatcctgctgacttcta

SEQ ID NO: 71209 - DNA, 19 bp, Homo sapiens
  siRNA target sequence for ABCG8 (NM_022437.2,1079-1097).
gcagcagagagcaggaatt

SEQ ID NO: 71210 - DNA, 19 bp, Homo sapiens
  siRNA target sequence for ABCG8 (NM_022437.2,1178-1196).
cagagacgaaggatcttga

SEQ ID NO: 71211 - DNA, 19 bp, Homo sapiens
  siRNA target sequence for ABCG8 (NM_022437.2,1293-1311).
gctgatccgtcgtcagatt

SEQ ID NO: 71212 - DNA, 19 bp, Homo sapiens
  siRNA target sequence for ABCG8 (NM_022437.2,1294-1312).
ctgatccgtcgtcagattt

SEQ ID NO: 71213 - DNA, 19 bp, Homo sapiens
  siRNA target sequence for ABCG8 (NM_022437.2,1379-1397).
ccatcggcttcctctattt

SEQ ID NO: 71214 - DNA, 19 bp, Homo sapiens
  siRNA target sequence for ABCG8 (NM_022437.2,1457-1475).
gtgctctcatccctttcaa

SEQ ID NO: 71215 - DNA, 19 bp, Homo sapiens
  siRNA target sequence for ABCG8 (NM_022437.2,1485-1503).
ggatgtcatctccaaatgt

SEQ ID NO: 71216 - DNA, 19 bp, Homo sapiens
  siRNA target sequence for ABCG8 (NM_022437.2,1506-1524).
ctcagagagggcaatgctt

SEQ ID NO: 71217 - DNA, 19 bp, Homo sapiens
  siRNA target sequence for ABCG8 (NM_022437.2,1514-1532).
gggcaatgctttactatga

SEQ ID NO: 71218 - DNA, 19 bp, Homo sapiens
  siRNA target sequence for ABCG8 (NM_022437.2,1515-1533).
ggcaatgctttactatgaa

SEQ ID NO: 71219 - DNA, 19 bp, Homo sapiens
  siRNA target sequence for ABCG8 (NM_022437.2,1600-1618).
cactgtgcctacatcatca

SEQ ID NO: 71220 - DNA, 19 bp, Homo sapiens
  siRNA target sequence for ABCG8 (NM_022437.2,1852-1870).
gcgtggatttccaaagtgt

SEQ ID NO: 71221 - DNA, 19 bp, Homo sapiens
  siRNA target sequence for ABCG8 (NM_022437.2,1875-1893).
cctgcggtggtgttttgaa

SEQ ID NO: 71222 - DNA, 19 bp, Homo sapiens
  siRNA target sequence for ABCG8 (NM_022437.2,1956-1974).
cgcggtctcaggagataaa

SEQ ID NO: 71223 - DNA, 19 bp, Homo sapiens
  siRNA target sequence for ABCG8 (NM_022437.2,1958-1976).
cggtctcaggagataaaat

SEQ ID NO: 71224 - DNA, 19 bp, Homo sapiens
  siRNA target sequence for ABCG8 (NM_022437.2,2068-2086).
gtgtccttaaggttcatca

SEQ ID NO: 71225 - DNA, 19 bp, Homo sapiens
  siRNA target sequence for ABCG8 (NM_022437.2,2072-2090).
ccttaaggttcatcaaaca

SEQ ID NO: 71226 - DNA, 19 bp, Homo sapiens
  siRNA target sequence for ABL2 (NM_005158.2,22-40).
gttctccttccacctaata

SEQ ID NO: 71227 - DNA, 19 bp, Homo sapiens
  siRNA target sequence for ABL2 (NM_005158.2,52-70).
gatcaggacacttcacttt

SEQ ID NO: 71228 - DNA, 19 bp, Homo sapiens
  siRNA target sequence for ABL2 (NM_005158.2,101-119).
ctctacccgacttaacaga

SEQ ID NO: 71229 - DNA, 19 bp, Homo sapiens
  siRNA target sequence for ABL2 (NM_005158.2,107-125).
ccgacttaacagaagcttt

SEQ ID NO: 71230 - DNA, 19 bp, Homo sapiens
  siRNA target sequence for ABL2 (NM_005158.2,111-129).
cttaacagaagctttgcat

SEQ ID NO: 71231 - DNA, 19 bp, Homo sapiens
  siRNA target sequence for ABL2 (NM_005158.2,212-230).
ctgagagtgaccctaatct

SEQ ID NO: 71232 - DNA, 19 bp, Homo sapiens
  siRNA target sequence for ABL2 (NM_005158.2,214-232).
gagagtgaccctaatctct

SEQ ID NO: 71233 - DNA, 19 bp, Homo sapiens
  siRNA target sequence for ABL2 (NM_005158.2,253-271).
gtagcaagtggtgataaca

SEQ ID NO: 71234 - DNA, 19 bp, Homo sapiens
  siRNA target sequence for ABL2 (NM_005158.2,270-288).
cacactcagcatcactaaa

SEQ ID NO: 71235 - DNA, 19 bp, Homo sapiens
  siRNA target sequence for ABL2 (NM_005158.2,538-556).
gagggacgtgtgtatcact

SEQ ID NO: 71236 - DNA, 19 bp, Homo sapiens
  siRNA target sequence for ABL2 (NM_005158.2,553-571).
cactacaggatcaatacca

SEQ ID NO: 71237 - DNA, 19 bp, Homo sapiens
  siRNA target sequence for ABL2 (NM_005158.2,575-593).
cagatggcaaggtgtatgt

SEQ ID NO: 71238 - DNA, 19 bp, Homo sapiens
  siRNA target sequence for ABL2 (NM_005158.2,617-635).
ccttggcagagcttgtaca

SEQ ID NO: 71239 - DNA, 19 bp, Homo sapiens
  siRNA target sequence for ABL2 (NM_005158.2,659-677).
ggctggtgacaacattaca

SEQ ID NO: 71240 - DNA, 19 bp, Homo sapiens
  siRNA target sequence for ABL2 (NM_005158.2,661-679).
ctggtgacaacattacact

SEQ ID NO: 71241 - DNA, 19 bp, Homo sapiens
  siRNA target sequence for ABL2 (NM_005158.2,681-699).
cccagcacccaagtgtaat

SEQ ID NO: 71242 - DNA, 19 bp, Homo sapiens
  siRNA target sequence for ABL2 (NM_005158.2,682-700).
ccagcacccaagtgtaata

SEQ ID NO: 71243 - DNA, 19 bp, Homo sapiens
  siRNA target sequence for ABL2 (NM_005158.2,742-760).
gaaatggagcgaacagata

SEQ ID NO: 71244 - DNA, 19 bp, Homo sapiens
  siRNA target sequence for ABL2 (NM_005158.2,748-766).
gagcgaacagatattacca

SEQ ID NO: 71245 - DNA, 19 bp, Homo sapiens
  siRNA target sequence for ABL2 (NM_005158.2,792-810).
gtatggagaggtttacgtt

SEQ ID NO: 71246 - DNA, 19 bp, Homo sapiens
  siRNA target sequence for ABL2 (NM_005158.2,831-849).
ccttacagttgctgtgaaa

SEQ ID NO: 71247 - DNA, 19 bp, Homo sapiens
  siRNA target sequence for ABL2 (NM_005158.2,909-927).
ggaaatcaagcatcctaat

SEQ ID NO: 71248 - DNA, 19 bp, Homo sapiens
  siRNA target sequence for ABL2 (NM_005158.2,923-941).
ctaatctggtacaactttt

SEQ ID NO: 71249 - DNA, 19 bp, Homo sapiens
  siRNA target sequence for ABL2 (NM_005158.2,998-1016).
ggaatttgctggattacct

SEQ ID NO: 71250 - DNA, 19 bp, Homo sapiens
  siRNA target sequence for ABL2 (NM_005158.2,1079-1097).
cttctgcaatggagtactt

SEQ ID NO: 71251 - DNA, 19 bp, Homo sapiens
  siRNA target sequence for ABL2 (NM_005158.2,1143-1161).
cctagtgggagaaaaccat

SEQ ID NO: 71252 - DNA, 19 bp, Homo sapiens
  siRNA target sequence for ABL2 (NM_005158.2,1164-1182).
ggtaaaagtggctgacttt

SEQ ID NO: 71253 - DNA, 19 bp, Homo sapiens
  siRNA target sequence for ABL2 (NM_005158.2,1177-1195).
gactttggcttaagtagat

SEQ ID NO: 71254 - DNA, 19 bp, Homo sapiens
  siRNA target sequence for ABL2 (NM_005158.2,1183-1201).
ggcttaagtagattgatga

SEQ ID NO: 71255 - DNA, 19 bp, Homo sapiens
  siRNA target sequence for ABL2 (NM_005158.2,1225-1243).
gctggagccaaatttccta

SEQ ID NO: 71256 - DNA, 19 bp, Homo sapiens
  siRNA target sequence for ABL2 (NM_005158.2,1226-1244).
ctggagccaaatttcctat

SEQ ID NO: 71257 - DNA, 19 bp, Homo sapiens
  siRNA target sequence for ABL2 (NM_005158.2,1228-1246).
ggagccaaatttcctatta

SEQ ID NO: 71258 - DNA, 19 bp, Homo sapiens
  siRNA target sequence for ABL2 (NM_005158.2,1261-1279).
gagagtcttgcctacaata

SEQ ID NO: 71259 - DNA, 19 bp, Homo sapiens
  siRNA target sequence for ABL2 (NM_005158.2,1270-1288).
gcctacaataccttctcaa

SEQ ID NO: 71260 - DNA, 19 bp, Homo sapiens
  siRNA target sequence for ABL2 (NM_005158.2,1271-1289).
cctacaataccttctcaat

SEQ ID NO: 71261 - DNA, 19 bp, Homo sapiens
  siRNA target sequence for ABL2 (NM_005158.2,1272-1290).
ctacaataccttctcaatt

SEQ ID NO: 71262 - DNA, 19 bp, Homo sapiens
  siRNA target sequence for ABL2 (NM_005158.2,1338-1356).
ctatggaatgtcaccatat

SEQ ID NO: 71263 - DNA, 19 bp, Homo sapiens
  siRNA target sequence for ABL2 (NM_005158.2,1347-1365).
gtcaccatatccaggtatt

SEQ ID NO: 71264 - DNA, 19 bp, Homo sapiens
  siRNA target sequence for ABL2 (NM_005158.2,1349-1367).
caccatatccaggtattga

SEQ ID NO: 71265 - DNA, 19 bp, Homo sapiens
  siRNA target sequence for ABL2 (NM_005158.2,1377-1395).
ggtctatgacctactagaa

SEQ ID NO: 71266 - DNA, 19 bp, Homo sapiens
  siRNA target sequence for ABL2 (NM_005158.2,1378-1396).
gtctatgacctactagaaa

SEQ ID NO: 71267 - DNA, 19 bp, Homo sapiens
  siRNA target sequence for ABL2 (NM_005158.2,1384-1402).
gacctactagaaaaaggat

SEQ ID NO: 71268 - DNA, 19 bp, Homo sapiens
  siRNA target sequence for ABL2 (NM_005158.2,1386-1404).
cctactagaaaaaggatat

SEQ ID NO: 71269 - DNA, 19 bp, Homo sapiens
  siRNA target sequence for ABL2 (NM_005158.2,1430-1448).
cccctaaggtttatgaact

SEQ ID NO: 71270 - DNA, 19 bp, Homo sapiens
  siRNA target sequence for ABL2 (NM_005158.2,1431-1449).
ccctaaggtttatgaactt

SEQ ID NO: 71271 - DNA, 19 bp, Homo sapiens
  siRNA target sequence for ABL2 (NM_005158.2,1432-1450).
cctaaggtttatgaactta

SEQ ID NO: 71272 - DNA, 19 bp, Homo sapiens
  siRNA target sequence for ABL2 (NM_005158.2,1479-1497).
cgataggccctcttttgct

SEQ ID NO: 71273 - DNA, 19 bp, Homo sapiens
  siRNA target sequence for ABL2 (NM_005158.2,1575-1593).
cgcctcctcgtcatctgtt

SEQ ID NO: 71274 - DNA, 19 bp, Homo sapiens
  siRNA target sequence for ABL2 (NM_005158.2,1578-1596).
ctcctcgtcatctgttgtt

SEQ ID NO: 71275 - DNA, 19 bp, Homo sapiens
  siRNA target sequence for ABL2 (NM_005158.2,1671-1689).
cattgaaggggcacaagat

SEQ ID NO: 71276 - DNA, 19 bp, Homo sapiens
  siRNA target sequence for ABL2 (NM_005158.2,1762-1780).
gcactgcctcgaaagcaaa

SEQ ID NO: 71277 - DNA, 19 bp, Homo sapiens
  siRNA target sequence for ABL2 (NM_005158.2,1926-1944).
gaatcagccccataagaaa

SEQ ID NO: 71278 - DNA, 19 bp, Homo sapiens
  siRNA target sequence for ABL2 (NM_005158.2,1956-1974).
gggtaacttctcatctgtt

SEQ ID NO: 71279 - DNA, 19 bp, Homo sapiens
  siRNA target sequence for ABL2 (NM_005158.2,1965-1983).
ctcatctgttgcttctcta

SEQ ID NO: 71280 - DNA, 19 bp, Homo sapiens
  siRNA target sequence for ABL2 (NM_005158.2,1987-2005).
catgctgatgggttctctt

SEQ ID NO: 71281 - DNA, 19 bp, Homo sapiens
  siRNA target sequence for ABL2 (NM_005158.2,1990-2008).
gctgatgggttctctttca

SEQ ID NO: 71282 - DNA, 19 bp, Homo sapiens
  siRNA target sequence for ABL2 (NM_005158.2,2156-2174).
caccacgcttaatcaaaaa

SEQ ID NO: 71283 - DNA, 19 bp, Homo sapiens
  siRNA target sequence for ABL2 (NM_005158.2,2181-2199).
gggcttacgagcaggtaaa

SEQ ID NO: 71284 - DNA, 19 bp, Homo sapiens
  siRNA target sequence for ABL2 (NM_005158.2,2498-2516).
gggatctagccattacaga

SEQ ID NO: 71285 - DNA, 19 bp, Homo sapiens
  siRNA target sequence for ABL2 (NM_005158.2,2752-2770).
gactctcaggggaataaat

SEQ ID NO: 71286 - DNA, 19 bp, Homo sapiens
  siRNA target sequence for ABL2 (NM_005158.2,2817-2835).
ccgaccccgacgggtaaaa

SEQ ID NO: 71287 - DNA, 19 bp, Homo sapiens
  siRNA target sequence for ABL2 (NM_005158.2,2821-2839).
ccccgacgggtaaaaccaa

SEQ ID NO: 71288 - DNA, 19 bp, Homo sapiens
  siRNA target sequence for ABL2 (NM_005158.2,2822-2840).
cccgacgggtaaaaccaaa

SEQ ID NO: 71289 - DNA, 19 bp, Homo sapiens
  siRNA target sequence for ABL2 (NM_005158.2,3053-3071).
ccatctcgccagccaaaat

SEQ ID NO: 71290 - DNA, 19 bp, Homo sapiens
  siRNA target sequence for ABL2 (NM_005158.2,3097-3115).
gtggctctgagaaaaacca

SEQ ID NO: 71291 - DNA, 19 bp, Homo sapiens
  siRNA target sequence for ABL2 (NM_005158.2,3118-3136).
caggccgctgagaaaatct

SEQ ID NO: 71292 - DNA, 19 bp, Homo sapiens
  siRNA target sequence for ABL2 (NM_005158.2,3120-3138).
ggccgctgagaaaatctca

SEQ ID NO: 71293 - DNA, 19 bp, Homo sapiens
  siRNA target sequence for ABL2 (NM_005158.2,3236-3254).
gacaccagctgcttgacta

SEQ ID NO: 71294 - DNA, 19 bp, Homo sapiens
  siRNA target sequence for ABL2 (NM_005158.2,3281-3299).
ctcaaactcgcaacaaatt

SEQ ID NO: 71295 - DNA, 19 bp, Homo sapiens
  siRNA target sequence for ABL2 (NM_005158.2,3388-3406).
cctgtccttaataacttat

SEQ ID NO: 71296 - DNA, 19 bp, Homo sapiens
  siRNA target sequence for ABL2 (NM_005158.2,3393-3411).
ccttaataacttattgtca

SEQ ID NO: 71297 - DNA, 19 bp, Homo sapiens
  siRNA target sequence for ABL2 (NM_007314.1,327-345).
cacagagaccggcttcaat

SEQ ID NO: 71298 - DNA, 19 bp, Homo sapiens
  siRNA target sequence for ACACA (NM_000664.3,607-625).
gctcattttggaggaataa

SEQ ID NO: 71299 - DNA, 19 bp, Homo sapiens
  siRNA target sequence for ACACA (NM_000664.3,672-690).
ctctcgattcataataggt

SEQ ID NO: 71300 - DNA, 19 bp, Homo sapiens
  siRNA target sequence for ACACA (NM_000664.3,791-809).
cagatacactctctgattt

SEQ ID NO: 71301 - DNA, 19 bp, Homo sapiens
  siRNA target sequence for ACACA (NM_000664.3,837-855).
ggccttgcacataagactt

SEQ ID NO: 71302 - DNA, 19 bp, Homo sapiens
  siRNA target sequence for ACACA (NM_198834.1,883-901).
cagggccgagacagaaaga

SEQ ID NO: 71303 - DNA, 19 bp, Homo sapiens
  siRNA target sequence for ACACA (NM_198834.1,1035-1053).
ccgtaggtggtcttatgaa

SEQ ID NO: 71304 - DNA, 19 bp, Homo sapiens
  siRNA target sequence for ACACA (NM_198834.1,1036-1054).
cgtaggtggtcttatgaaa

SEQ ID NO: 71305 - DNA, 19 bp, Homo sapiens
  siRNA target sequence for ACACA (NM_198834.1,1060-1078).
cgaaatgaacgtgcaatta

SEQ ID NO: 71306 - DNA, 19 bp, Homo sapiens
  siRNA target sequence for ACACA (NM_198834.1,1073-1091).
caattagattcgttgtcat

SEQ ID NO: 71307 - DNA, 19 bp, Homo sapiens
  siRNA target sequence for ACACA (NM_198834.1,1114-1132).
gccaatgcagaatacatta

SEQ ID NO: 71308 - DNA, 19 bp, Homo sapiens
  siRNA target sequence for ACACA (NM_198834.1,1271-1289).
ccaaactaccggaacttct

SEQ ID NO: 71309 - DNA, 19 bp, Homo sapiens
  siRNA target sequence for ACACA (NM_198834.1,1280-1298).
cggaacttctcttgaaaaa

SEQ ID NO: 71310 - DNA, 19 bp, Homo sapiens
  siRNA target sequence for ACACA (NM_198834.1,1468-1486).
ccccaggagctatatgaaa

SEQ ID NO: 71311 - DNA, 19 bp, Homo sapiens
  siRNA target sequence for ACACA (NM_198834.1,1469-1487).
cccaggagctatatgaaaa

SEQ ID NO: 71312 - DNA, 19 bp, Homo sapiens
  siRNA target sequence for ACACA (NM_198834.1,1470-1488).
ccaggagctatatgaaaaa

SEQ ID NO: 71313 - DNA, 19 bp, Homo sapiens
  siRNA target sequence for ACACA (NM_198834.1,1476-1494).
gctatatgaaaaaggttat

SEQ ID NO: 71314 - DNA, 19 bp, Homo sapiens
  siRNA target sequence for ACACA (NM_198834.1,1534-1552).
gttggatatccagtaatga

SEQ ID NO: 71315 - DNA, 19 bp, Homo sapiens
  siRNA target sequence for ACACA (NM_198834.1,1537-1555).
ggatatccagtaatgatca

SEQ ID NO: 71316 - DNA, 19 bp, Homo sapiens
  siRNA target sequence for ACACA (NM_198834.1,1538-1556).
gatatccagtaatgatcaa

SEQ ID NO: 71317 - DNA, 19 bp, Homo sapiens
  siRNA target sequence for ACACA (NM_198834.1,1671-1689).
gagactagccaaacaatct

SEQ ID NO: 71318 - DNA, 19 bp, Homo sapiens
  siRNA target sequence for ACACA (NM_198834.1,1707-1725).
gatcttagcggaccaatat

SEQ ID NO: 71319 - DNA, 19 bp, Homo sapiens
  siRNA target sequence for ACACA (NM_198834.1,1717-1735).
gaccaatatggcaatgcta

SEQ ID NO: 71320 - DNA, 19 bp, Homo sapiens
  siRNA target sequence for ACACA (NM_198834.1,1726-1744).
ggcaatgctatctctttgt

SEQ ID NO: 71321 - DNA, 19 bp, Homo sapiens
  siRNA target sequence for ACACA (NM_198834.1,1727-1745).
gcaatgctatctctttgtt

SEQ ID NO: 71322 - DNA, 19 bp, Homo sapiens
  siRNA target sequence for ACACA (NM_198834.1,1768-1786).
cgcaggcatcagaagatta

SEQ ID NO: 71323 - DNA, 19 bp, Homo sapiens
  siRNA target sequence for ACACA (NM_198834.1,1814-1832).
ctccagcagtatttgaaca

SEQ ID NO: 71324 - DNA, 19 bp, Homo sapiens
  siRNA target sequence for ACACA (NM_198834.1,1953-1971).
ggtagagcacccttgtaca

SEQ ID NO: 71325 - DNA, 19 bp, Homo sapiens
  siRNA target sequence for ACACA (NM_198834.1,2018-2036).
ccatggggattcctctata

SEQ ID NO: 71326 - DNA, 19 bp, Homo sapiens
  siRNA target sequence for ACACA (NM_198834.1,2024-2042).
ggattcctctatatagaat

SEQ ID NO: 71327 - DNA, 19 bp, Homo sapiens
  siRNA target sequence for ACACA (NM_198834.1,2046-2064).
ggatatccgtatgatgtat

SEQ ID NO: 71328 - DNA, 19 bp, Homo sapiens
  siRNA target sequence for ACACA (NM_198834.1,2079-2097).
gggtgattctcccattgat

SEQ ID NO: 71329 - DNA, 19 bp, Homo sapiens
  siRNA target sequence for ACACA (NM_198834.1,2080-2098).
ggtgattctcccattgatt

SEQ ID NO: 71330 - DNA, 19 bp, Homo sapiens
  siRNA target sequence for ACACA (NM_198834.1,2081-2099).
gtgattctcccattgattt

SEQ ID NO: 71331 - DNA, 19 bp, Homo sapiens
  siRNA target sequence for ACACA (NM_198834.1,2146-2164).
gctcggatcactagtgaaa

SEQ ID NO: 71332 - DNA, 19 bp, Homo sapiens
  siRNA target sequence for ACACA (NM_198834.1,2147-2165).
ctcggatcactagtgaaaa

SEQ ID NO: 71333 - DNA, 19 bp, Homo sapiens
  siRNA target sequence for ACACA (NM_198834.1,2151-2169).
gatcactagtgaaaatcca

SEQ ID NO: 71334 - DNA, 19 bp, Homo sapiens
  siRNA target sequence for ACACA (NM_198834.1,2195-2213).
gaacagttcaggagctaaa

SEQ ID NO: 71335 - DNA, 19 bp, Homo sapiens
  siRNA target sequence for ACACA (NM_198834.1,2209-2227).
ctaaatttccgcagcaata

SEQ ID NO: 71336 - DNA, 19 bp, Homo sapiens
  siRNA target sequence for ACACA (NM_198834.1,2217-2235).
ccgcagcaataagaatgtt

SEQ ID NO: 71337 - DNA, 19 bp, Homo sapiens
  siRNA target sequence for ACACA (NM_198834.1,2218-2236).
cgcagcaataagaatgttt

SEQ ID NO: 71338 - DNA, 19 bp, Homo sapiens
  siRNA target sequence for ACACA (NM_198834.1,2292-2310).
gtttggtcactgcttttct

SEQ ID NO: 71339 - DNA, 19 bp, Homo sapiens
  siRNA target sequence for ACACA (NM_198834.1,2376-2394).
gggtgactttcgaactaca

SEQ ID NO: 71340 - DNA, 19 bp, Homo sapiens
  siRNA target sequence for ACACA (NM_198834.1,2382-2400).
ctttcgaactacagttgaa

SEQ ID NO: 71341 - DNA, 19 bp, Homo sapiens
  siRNA target sequence for ACACA (NM_198834.1,2393-2411).
cagttgaatacctgatcaa

SEQ ID NO: 71342 - DNA, 19 bp, Homo sapiens
  siRNA target sequence for ACACA (NM_198834.1,2395-2413).
gttgaatacctgatcaaat

SEQ ID NO: 71343 - DNA, 19 bp, Homo sapiens
  siRNA target sequence for ACACA (NM_198834.1,2398-2416).
gaatacctgatcaaattgt

SEQ ID NO: 71344 - DNA, 19 bp, Homo sapiens
  siRNA target sequence for ACACA (NM_198834.1,2557-2575).
cggaatagcgtctctaact

SEQ ID NO: 71345 - DNA, 19 bp, Homo sapiens
  siRNA target sequence for ACACA (NM_198834.1,2558-2576).
ggaatagcgtctctaactt

SEQ ID NO: 71346 - DNA, 19 bp, Homo sapiens
  siRNA target sequence for ACACA (NM_198834.1,2611-2629).
gctcatacacttctgaata

SEQ ID NO: 71347 - DNA, 19 bp, Homo sapiens
  siRNA target sequence for ACACA (NM_198834.1,2632-2650).
gtagatgttgaacttatct

SEQ ID NO: 71348 - DNA, 19 bp, Homo sapiens
  siRNA target sequence for ACACA (NM_198834.1,2649-2667).
ctatgagggagtcaagtat

SEQ ID NO: 71349 - DNA, 19 bp, Homo sapiens
  siRNA target sequence for ACACA (NM_198834.1,2655-2673).
gggagtcaagtatgtactt

SEQ ID NO: 71350 - DNA, 19 bp, Homo sapiens
  siRNA target sequence for ACACA (NM_198834.1,2656-2674).
ggagtcaagtatgtactta

SEQ ID NO: 71351 - DNA, 19 bp, Homo sapiens
  siRNA target sequence for ACACA (NM_198834.1,2720-2738).
gctcatgtgtagaagtaga

SEQ ID NO: 71352 - DNA, 19 bp, Homo sapiens
  siRNA target sequence for ACACA (NM_198834.1,2784-2802).
cagcagttatactacgtat

SEQ ID NO: 71353 - DNA, 19 bp, Homo sapiens
  siRNA target sequence for ACACA (NM_198834.1,2786-2804).
gcagttatactacgtatat

SEQ ID NO: 71354 - DNA, 19 bp, Homo sapiens
  siRNA target sequence for ACACA (NM_198834.1,2789-2807).
gttatactacgtatatgaa

SEQ ID NO: 71355 - DNA, 19 bp, Homo sapiens
  siRNA target sequence for ACACA (NM_198834.1,2818-2836).
gatagatatcgcatcacaa

SEQ ID NO: 71356 - DNA, 19 bp, Homo sapiens
  siRNA target sequence for ACACA (NM_198834.1,2903-2921).
ggaagttaatccagtacat

SEQ ID NO: 71357 - DNA, 19 bp, Homo sapiens
  siRNA target sequence for ACACA (NM_198834.1,2904-2922).
gaagttaatccagtacatt

SEQ ID NO: 71358 - DNA, 19 bp, Homo sapiens
  siRNA target sequence for ACACA (NM_198834.1,2907-2925).
gttaatccagtacattgta

SEQ ID NO: 71359 - DNA, 19 bp, Homo sapiens
  siRNA target sequence for ACACA (NM_198834.1,2971-2989).
gaggtaatgaagatggtaa

SEQ ID NO: 71360 - DNA, 19 bp, Homo sapiens
  siRNA target sequence for ACACA (NM_198834.1,2982-3000).
gatggtaatgaccttaaca

SEQ ID NO: 71361 - DNA, 19 bp, Homo sapiens
  siRNA target sequence for ACACA (NM_198834.1,3007-3025).
gagtctggctgtatccatt

SEQ ID NO: 71362 - DNA, 19 bp, Homo sapiens
  siRNA target sequence for ACACA (NM_198834.1,3011-3029).
ctggctgtatccattacgt

SEQ ID NO: 71363 - DNA, 19 bp, Homo sapiens
  siRNA target sequence for ACACA (NM_198834.1,3059-3077).
gctgtgtactagccaaaat

SEQ ID NO: 71364 - DNA, 19 bp, Homo sapiens
  siRNA target sequence for ACACA (NM_198834.1,3062-3080).
gtgtactagccaaaatgca

SEQ ID NO: 71365 - DNA, 19 bp, Homo sapiens
  siRNA target sequence for ACACA (NM_198834.1,3152-3170).
cactcagaggcgagaaact

SEQ ID NO: 71366 - DNA, 19 bp, Homo sapiens
  siRNA target sequence for ACACA (NM_198834.1,3169-3187).
ctccatcgagtgttccatt

SEQ ID NO: 71367 - DNA, 19 bp, Homo sapiens
  siRNA target sequence for ACACA (NM_198834.1,3171-3189).
ccatcgagtgttccattat

SEQ ID NO: 71368 - DNA, 19 bp, Homo sapiens
  siRNA target sequence for ACACA (NM_198834.1,3205-3223).
gtcaatgtaatgaatggat

SEQ ID NO: 71369 - DNA, 19 bp, Homo sapiens
  siRNA target sequence for ACACA (NM_198834.1,3266-3284).
gggtagagcgattgatgaa

SEQ ID NO: 71370 - DNA, 19 bp, Homo sapiens
  siRNA target sequence for ACACA (NM_198834.1,3312-3330).
cctagaattgcaagatatt

SEQ ID NO: 71371 - DNA, 19 bp, Homo sapiens
  siRNA target sequence for ACACA (NM_198834.1,3464-3482).
gccatgcagctacattgaa

SEQ ID NO: 71372 - DNA, 19 bp, Homo sapiens
  siRNA target sequence for ACACA (NM_198834.1,3476-3494).
cattgaaccggaaatctga

SEQ ID NO: 71373 - DNA, 19 bp, Homo sapiens
  siRNA target sequence for ACACA (NM_198834.1,3491-3509).
ctgaacgggaagtcttctt

SEQ ID NO: 71374 - DNA, 19 bp, Homo sapiens
  siRNA target sequence for ACACA (NM_198834.1,3496-3514).
cgggaagtcttctttatga

SEQ ID NO: 71375 - DNA, 19 bp, Homo sapiens
  siRNA target sequence for ACACA (NM_198834.1,3498-3516).
ggaagtcttctttatgaat

SEQ ID NO: 71376 - DNA, 19 bp, Homo sapiens
  siRNA target sequence for ACACA (NM_198834.1,3513-3531).
gaatactcagagcattgtt

SEQ ID NO: 71377 - DNA, 19 bp, Homo sapiens
  siRNA target sequence for ACACA (NM_198834.1,3657-3675).
cgccctccgagaagagaat

SEQ ID NO: 71378 - DNA, 19 bp, Homo sapiens
  siRNA target sequence for ACACA (NM_198834.1,3658-3676).
gccctccgagaagagaata

SEQ ID NO: 71379 - DNA, 19 bp, Homo sapiens
  siRNA target sequence for ACACA (NM_198834.1,3739-3757).
cttctggtcacaatgctta

SEQ ID NO: 71380 - DNA, 19 bp, Homo sapiens
  siRNA target sequence for ACACA (NM_198834.1,3744-3762).
ggtcacaatgcttattgat

SEQ ID NO: 71381 - DNA, 19 bp, Homo sapiens
  siRNA target sequence for ACACA (NM_198834.1,3820-3838).
ctaactcaactcagtaaga

SEQ ID NO: 71382 - DNA, 19 bp, Homo sapiens
  siRNA target sequence for ACACA (NM_198834.1,3862-3880).
cgagcacgccaggttctta

SEQ ID NO: 71383 - DNA, 19 bp, Homo sapiens
  siRNA target sequence for ACACA (NM_198834.1,3863-3881).
gagcacgccaggttcttat

SEQ ID NO: 71384 - DNA, 19 bp, Homo sapiens
  siRNA target sequence for ACACA (NM_198834.1,3884-3902).
cctcccatttgccatcata

SEQ ID NO: 71385 - DNA, 19 bp, Homo sapiens
  siRNA target sequence for ACACA (NM_198834.1,3885-3903).
ctcccatttgccatcatat

SEQ ID NO: 71386 - DNA, 19 bp, Homo sapiens
  siRNA target sequence for ACACA (NM_198834.1,3887-3905).
cccatttgccatcatatga

SEQ ID NO: 71387 - DNA, 19 bp, Homo sapiens
  siRNA target sequence for ACACA (NM_198834.1,3922-3940).
gtagagtctatcttcctat

SEQ ID NO: 71388 - DNA, 19 bp, Homo sapiens
  siRNA target sequence for ACACA (NM_198834.1,3949-3967).
gacatgtatggacatcaat

SEQ ID NO: 71389 - DNA, 19 bp, Homo sapiens
  siRNA target sequence for ACACA (NM_198834.1,3951-3969).
catgtatggacatcaattt

SEQ ID NO: 71390 - DNA, 19 bp, Homo sapiens
  siRNA target sequence for ACACA (NM_198834.1,3991-4009).
ctcatcctatcagaaacat

SEQ ID NO: 71391 - DNA, 19 bp, Homo sapiens
  siRNA target sequence for ACACA (NM_198834.1,4021-4039).
gtcctaccaaacttcttct

SEQ ID NO: 71392 - DNA, 19 bp, Homo sapiens
  siRNA target sequence for ACACA (NM_198834.1,4027-4045).
ccaaacttcttctatcaca

SEQ ID NO: 71393 - DNA, 19 bp, Homo sapiens
  siRNA target sequence for ACACA (NM_198834.1,4203-4221).
catccctacgctaaacaga

SEQ ID NO: 71394 - DNA, 19 bp, Homo sapiens
  siRNA target sequence for ACACA (NM_198834.1,4207-4225).
cctacgctaaacagaatgt

SEQ ID NO: 71395 - DNA, 19 bp, Homo sapiens
  siRNA target sequence for ACACA (NM_198834.1,4282-4300).
gtactgttggacaactcat

SEQ ID NO: 71396 - DNA, 19 bp, Homo sapiens
  siRNA target sequence for ACACA (NM_198834.1,4285-4303).
ctgttggacaactcattca

SEQ ID NO: 71397 - DNA, 19 bp, Homo sapiens
  siRNA target sequence for ACACA (NM_198834.1,4287-4305).
gttggacaactcattcact

SEQ ID NO: 71398 - DNA, 19 bp, Homo sapiens
  siRNA target sequence for ACACA (NM_198834.1,4323-4341).
gggcggaatggtctctttt

SEQ ID NO: 71399 - DNA, 19 bp, Homo sapiens
  siRNA target sequence for ACACA (NM_198834.1,4430-4448).
caggtcacacgtctcttta

SEQ ID NO: 71400 - DNA, 19 bp, Homo sapiens
  siRNA target sequence for ACACA (NM_198834.1,4433-4451).
gtcacacgtctctttatga

SEQ ID NO: 71401 - DNA, 19 bp, Homo sapiens
  siRNA target sequence for ACACA (NM_198834.1,4442-4460).
ctctttatgatgaggataa

SEQ ID NO: 71402 - DNA, 19 bp, Homo sapiens
  siRNA target sequence for ACACA (NM_198834.1,4634-4652).
gaaagcaggtcaactatga

SEQ ID NO: 71403 - DNA, 19 bp, Homo sapiens
  siRNA target sequence for ACACA (NM_198834.1,4656-4674).
ggatcggagatttcataga

SEQ ID NO: 71404 - DNA, 19 bp, Homo sapiens
  siRNA target sequence for ACACA (NM_198834.1,4661-4679).
ggagatttcatagagaatt

SEQ ID NO: 71405 - DNA, 19 bp, Homo sapiens
  siRNA target sequence for ACACA (NM_198834.1,4669-4687).
catagagaattccctaaat

SEQ ID NO: 71406 - DNA, 19 bp, Homo sapiens
  siRNA target sequence for ACACA (NM_198834.1,4751-4769).
ctctggctttccagttaga

SEQ ID NO: 71407 - DNA, 19 bp, Homo sapiens
  siRNA target sequence for ACACA (NM_198834.1,4872-4890).
gacagactacaggttcttt

SEQ ID NO: 71408 - DNA, 19 bp, Homo sapiens
  siRNA target sequence for ACACA (NM_198834.1,5096-5114).
ccgtgcggagcatggtaat

SEQ ID NO: 71409 - DNA, 19 bp, Homo sapiens
  siRNA target sequence for ACACA (NM_198834.1,5122-5140).
ggaagtcgcctgtggaaat

SEQ ID NO: 71410 - DNA, 19 bp, Homo sapiens
  siRNA target sequence for ACACA (NM_198834.1,5123-5141).
gaagtcgcctgtggaaatt

SEQ ID NO: 71411 - DNA, 19 bp, Homo sapiens
  siRNA target sequence for ACACA (NM_198834.1,5152-5170).
caggcagaactgaaaatca

SEQ ID NO: 71412 - DNA, 19 bp, Homo sapiens
  siRNA target sequence for ACACA (NM_198834.1,5178-5196).
cctgacgccaactggaaaa

SEQ ID NO: 71413 - DNA, 19 bp, Homo sapiens
  siRNA target sequence for ACACA (NM_198834.1,5222-5240).
caaacgagtctggctatta

SEQ ID NO: 71414 - DNA, 19 bp, Homo sapiens
  siRNA target sequence for ACACA (NM_198834.1,5231-5249).
ctggctattacttggatat

SEQ ID NO: 71415 - DNA, 19 bp, Homo sapiens
  siRNA target sequence for ACACA (NM_198834.1,5233-5251).
ggctattacttggatatca

SEQ ID NO: 71416 - DNA, 19 bp, Homo sapiens
  siRNA target sequence for ACACA (NM_198834.1,5279-5297).
ggacagcacagatcatgtt

SEQ ID NO: 71417 - DNA, 19 bp, Homo sapiens
  siRNA target sequence for ACACA (NM_198834.1,5292-5310).
catgtttcaggcatatgga

SEQ ID NO: 71418 - DNA, 19 bp, Homo sapiens
  siRNA target sequence for ACACA (NM_198834.1,5321-5339).
gaccactgcatggaatgtt

SEQ ID NO: 71419 - DNA, 19 bp, Homo sapiens
  siRNA target sequence for ACACA (NM_198834.1,5323-5341).
ccactgcatggaatgttaa

SEQ ID NO: 71420 - DNA, 19 bp, Homo sapiens
  siRNA target sequence for ACACA (NM_198834.1,5326-5344).
ctgcatggaatgttaatca

SEQ ID NO: 71421 - DNA, 19 bp, Homo sapiens
  siRNA target sequence for ACACA (NM_198834.1,5328-5346).
gcatggaatgttaatcaat

SEQ ID NO: 71422 - DNA, 19 bp, Homo sapiens
  siRNA target sequence for ACACA (NM_198834.1,5329-5347).
catggaatgttaatcaata

SEQ ID NO: 71423 - DNA, 19 bp, Homo sapiens
  siRNA target sequence for ACACA (NM_198834.1,5337-5355).
gttaatcaatactccatat

SEQ ID NO: 71424 - DNA, 19 bp, Homo sapiens
  siRNA target sequence for ACACA (NM_198834.1,5365-5383).
gacctgctgcaatcaaaga

SEQ ID NO: 71425 - DNA, 19 bp, Homo sapiens
  siRNA target sequence for ACACA (NM_198834.1,5384-5402).
ggttccaggcacaatcctt

SEQ ID NO: 71426 - DNA, 19 bp, Homo sapiens
  siRNA target sequence for ACACA (NM_198834.1,5405-5423).
ggacaacatacatatatga

SEQ ID NO: 71427 - DNA, 19 bp, Homo sapiens
  siRNA target sequence for ACACA (NM_198834.1,5468-5486).
ctatgtccactcaagcatt

SEQ ID NO: 71428 - DNA, 19 bp, Homo sapiens
  siRNA target sequence for ACACA (NM_198834.1,5472-5490).
gtccactcaagcatttctt

SEQ ID NO: 71429 - DNA, 19 bp, Homo sapiens
  siRNA target sequence for ACACA (NM_198834.1,5552-5570).
gtcagctggtccacatgaa

SEQ ID NO: 71430 - DNA, 19 bp, Homo sapiens
  siRNA target sequence for ACACA (NM_198834.1,5639-5657).
cagaaggccgagatatcat

SEQ ID NO: 71431 - DNA, 19 bp, Homo sapiens
  siRNA target sequence for ACACA (NM_198834.1,5644-5662).
ggccgagatatcattgtta

SEQ ID NO: 71432 - DNA, 19 bp, Homo sapiens
  siRNA target sequence for ACACA (NM_198834.1,5698-5716).
gggcctcaagaggatttgt

SEQ ID NO: 71433 - DNA, 19 bp, Homo sapiens
  siRNA target sequence for ACACA (NM_198834.1,5699-5717).
ggcctcaagaggatttgtt

SEQ ID NO: 71434 - DNA, 19 bp, Homo sapiens
  siRNA target sequence for ACACA (NM_198834.1,5702-5720).
ctcaagaggatttgttatt

SEQ ID NO: 71435 - DNA, 19 bp, Homo sapiens
  siRNA target sequence for ACACA (NM_198834.1,5753-5771).
gtattccacgcatctatgt

SEQ ID NO: 71436 - DNA, 19 bp, Homo sapiens
  siRNA target sequence for ACACA (NM_198834.1,5806-5824).
gaagaaattcgccatatgt

SEQ ID NO: 71437 - DNA, 19 bp, Homo sapiens
  siRNA target sequence for ACACA (NM_198834.1,5881-5899).
ctgactcctcaagattata

SEQ ID NO: 71438 - DNA, 19 bp, Homo sapiens
  siRNA target sequence for ACACA (NM_198834.1,5930-5948).
gtgaacacgtggaagatga

SEQ ID NO: 71439 - DNA, 19 bp, Homo sapiens
  siRNA target sequence for ACACA (NM_198834.1,5961-5979).
gtacaagataacagatatt

SEQ ID NO: 71440 - DNA, 19 bp, Homo sapiens
  siRNA target sequence for ACACA (NM_198834.1,6047-6065).
cattggcctataatgagat

SEQ ID NO: 71441 - DNA, 19 bp, Homo sapiens
  siRNA target sequence for ACACA (NM_198834.1,6051-6069).
ggcctataatgagatcatt

SEQ ID NO: 71442 - DNA, 19 bp, Homo sapiens
  siRNA target sequence for ACACA (NM_198834.1,6052-6070).
gcctataatgagatcatta

SEQ ID NO: 71443 - DNA, 19 bp, Homo sapiens
  siRNA target sequence for ACACA (NM_198834.1,6144-6162).
ggttgagaattctcactta

SEQ ID NO: 71444 - DNA, 19 bp, Homo sapiens
  siRNA target sequence for ACACA (NM_198834.1,6145-6163).
gttgagaattctcacttaa

SEQ ID NO: 71445 - DNA, 19 bp, Homo sapiens
  siRNA target sequence for ACACA (NM_198834.1,6176-6194).
ctggagccctcaacaaagt

SEQ ID NO: 71446 - DNA, 19 bp, Homo sapiens
  siRNA target sequence for ACACA (NM_198834.1,6205-6223).
gaagtgtacacctccaata

SEQ ID NO: 71447 - DNA, 19 bp, Homo sapiens
  siRNA target sequence for ACACA (NM_198834.1,6275-6293).
ctgtgtgtgatgactttga

SEQ ID NO: 71448 - DNA, 19 bp, Homo sapiens
  siRNA target sequence for ACACA (NM_198834.1,6336-6354).
gagcgtgcacagttcagtt

SEQ ID NO: 71449 - DNA, 19 bp, Homo sapiens
  siRNA target sequence for ACACA (NM_198834.1,6363-6381).
gaactcaaaggatcctata

SEQ ID NO: 71450 - DNA, 19 bp, Homo sapiens
  siRNA target sequence for ACACA (NM_198834.1,6373-6391).
gatcctatagacagaatca

SEQ ID NO: 71451 - DNA, 19 bp, Homo sapiens
  siRNA target sequence for ACACA (NM_198834.1,6405-6423).
cacaaagaccccatacgat

SEQ ID NO: 71452 - DNA, 19 bp, Homo sapiens
  siRNA target sequence for ACACA (NM_198834.1,6573-6591).
gggagttgttgctgtagaa

SEQ ID NO: 71453 - DNA, 19 bp, Homo sapiens
  siRNA target sequence for ACACA (NM_198834.1,6594-6612).
ccgaacagtagaactaagt

SEQ ID NO: 71454 - DNA, 19 bp, Homo sapiens
  siRNA target sequence for ACACA (NM_198834.1,6595-6613).
cgaacagtagaactaagta

SEQ ID NO: 71455 - DNA, 19 bp, Homo sapiens
  siRNA target sequence for ACACA (NM_198834.1,6682-6700).
ccagattctgcgtttaaga

SEQ ID NO: 71456 - DNA, 19 bp, Homo sapiens
  siRNA target sequence for ACACA (NM_198834.1,6848-6866).
gccagcctgtgctggttta

SEQ ID NO: 71457 - DNA, 19 bp, Homo sapiens
  siRNA target sequence for ACACA (NM_198834.1,6981-6999).
gccagaagggacagtagaa

SEQ ID NO: 71458 - DNA, 19 bp, Homo sapiens
  siRNA target sequence for ACACA (NM_198834.1,6982-7000).
ccagaagggacagtagaaa

SEQ ID NO: 71459 - DNA, 19 bp, Homo sapiens
  siRNA target sequence for ACACA (NM_198834.1,7040-7058).
gggtggacccagtctacat

SEQ ID NO: 71460 - DNA, 19 bp, Homo sapiens
  siRNA target sequence for ACACA (NM_198834.1,7131-7149).
ggagcgggaggaattccta

SEQ ID NO: 71461 - DNA, 19 bp, Homo sapiens
  siRNA target sequence for ACACA (NM_198834.1,7132-7150).
gagcgggaggaattcctaa

SEQ ID NO: 71462 - DNA, 19 bp, Homo sapiens
  siRNA target sequence for ACACA (NM_198834.1,7134-7152).
gcgggaggaattcctaatt

SEQ ID NO: 71463 - DNA, 19 bp, Homo sapiens
  siRNA target sequence for ACACA (NM_198834.1,7223-7241).
gtgttattagcgatatcct

SEQ ID NO: 71464 - DNA, 19 bp, Homo sapiens
  siRNA target sequence for ACACA (NM_198834.1,7434-7452).
ggcggagtggctagagaaa

SEQ ID NO: 71465 - DNA, 19 bp, Homo sapiens
  siRNA target sequence for ACACA (NM_198834.1,7516-7534).
gactacgtcctcaagcaaa

SEQ ID NO: 71466 - DNA, 19 bp, Homo sapiens
  siRNA target sequence for ACACA (NM_198834.1,7573-7591).
gattccatcatccatatga

SEQ ID NO: 71467 - DNA, 19 bp, Homo sapiens
  siRNA target sequence for ACACA (NM_198834.1,7585-7603).
catatgacgcagcacatat

SEQ ID NO: 71468 - DNA, 19 bp, Homo sapiens
  siRNA target sequence for ACACA (NM_198834.1,7632-7650).
gatcctctccacaatggat

SEQ ID NO: 71469 - DNA, 19 bp, Homo sapiens
  siRNA target sequence for ACACB (NM_001093.1,43-61).
ctgaccttttcctggttaa

SEQ ID NO: 71470 - DNA, 19 bp, Homo sapiens
  siRNA target sequence for ACACB (NM_001093.1,45-63).
gaccttttcctggttaaaa

SEQ ID NO: 71471 - DNA, 19 bp, Homo sapiens
  siRNA target sequence for ACACB (NM_001093.1,91-109).
ccgatcaccaagagtaaat

SEQ ID NO: 71472 - DNA, 19 bp, Homo sapiens
  siRNA target sequence for ACACB (NM_001093.1,96-114).
caccaagagtaaatcagaa

SEQ ID NO: 71473 - DNA, 19 bp, Homo sapiens
  siRNA target sequence for ACACB (NM_001093.1,706-724).
gacctgcacagagacttta

SEQ ID NO: 71474 - DNA, 19 bp, Homo sapiens
  siRNA target sequence for ACACB (NM_001093.1,835-853).
cgcaggtgggcctatgaga

SEQ ID NO: 71475 - DNA, 19 bp, Homo sapiens
  siRNA target sequence for ACACB (NM_001093.1,836-854).
gcaggtgggcctatgagat

SEQ ID NO: 71476 - DNA, 19 bp, Homo sapiens
  siRNA target sequence for ACACB (NM_001093.1,839-857).
ggtgggcctatgagatgtt

SEQ ID NO: 71477 - DNA, 19 bp, Homo sapiens
  siRNA target sequence for ACACB (NM_001093.1,914-932).
ccaacgcagagtacatcaa

SEQ ID NO: 71478 - DNA, 19 bp, Homo sapiens
  siRNA target sequence for ACACB (NM_001093.1,965-983).
ggcccaataacaacaacta

SEQ ID NO: 71479 - DNA, 19 bp, Homo sapiens
  siRNA target sequence for ACACB (NM_001093.1,1268-1286).
gtgtcccagaagatgttta

SEQ ID NO: 71480 - DNA, 19 bp, Homo sapiens
  siRNA target sequence for ACACB (NM_001093.1,1298-1316).
gcgtgaaagacgtagatga

SEQ ID NO: 71481 - DNA, 19 bp, Homo sapiens
  siRNA target sequence for ACACB (NM_001093.1,1411-1429).
gaggacttcccgatccttt

SEQ ID NO: 71482 - DNA, 19 bp, Homo sapiens
  siRNA target sequence for ACACB (NM_001093.1,1452-1470).
cccaggctcgcccatcttt

SEQ ID NO: 71483 - DNA, 19 bp, Homo sapiens
  siRNA target sequence for ACACB (NM_001093.1,1456-1474).
ggctcgcccatctttctca

SEQ ID NO: 71484 - DNA, 19 bp, Homo sapiens
  siRNA target sequence for ACACB (NM_001093.1,1493-1511).
cccgtcacctggaagttca

SEQ ID NO: 71485 - DNA, 19 bp, Homo sapiens
  siRNA target sequence for ACACB (NM_001093.1,2192-2210).
ggactaccgtggaatacct

SEQ ID NO: 71486 - DNA, 19 bp, Homo sapiens
  siRNA target sequence for ACACB (NM_001093.1,2271-2289).
ctacctcattgctgagaaa

SEQ ID NO: 71487 - DNA, 19 bp, Homo sapiens
  siRNA target sequence for ACACB (NM_001093.1,2360-2378).
gaacgtgcatgacagattt

SEQ ID NO: 71488 - DNA, 19 bp, Homo sapiens
  siRNA target sequence for ACACB (NM_001093.1,2430-2448).
cctcgtagatgtggaatta

SEQ ID NO: 71489 - DNA, 19 bp, Homo sapiens
  siRNA target sequence for ACACB (NM_001093.1,2431-2449).
ctcgtagatgtggaattaa

SEQ ID NO: 71490 - DNA, 19 bp, Homo sapiens
  siRNA target sequence for ACACB (NM_001093.1,2433-2451).
cgtagatgtggaattaatt

SEQ ID NO: 71491 - DNA, 19 bp, Homo sapiens
  siRNA target sequence for ACACB (NM_001093.1,2434-2452).
gtagatgtggaattaattt

SEQ ID NO: 71492 - DNA, 19 bp, Homo sapiens
  siRNA target sequence for ACACB (NM_001093.1,2502-2520).
gttcgttctcatcatgaat

SEQ ID NO: 71493 - DNA, 19 bp, Homo sapiens
  siRNA target sequence for ACACB (NM_001093.1,2522-2540).
gctgccacatcgagattga

SEQ ID NO: 71494 - DNA, 19 bp, Homo sapiens
  siRNA target sequence for ACACB (NM_001093.1,2523-2541).
ctgccacatcgagattgat

SEQ ID NO: 71495 - DNA, 19 bp, Homo sapiens
  siRNA target sequence for ACACB (NM_001093.1,2880-2898).
gctcgatgacccttctaaa

SEQ ID NO: 71496 - DNA, 19 bp, Homo sapiens
  siRNA target sequence for ACACB (NM_001093.1,3009-3027).
cgtcatgagtggcttttgt

SEQ ID NO: 71497 - DNA, 19 bp, Homo sapiens
  siRNA target sequence for ACACB (NM_001093.1,3287-3305).
ctgatcgagaggtcttctt

SEQ ID NO: 71498 - DNA, 19 bp, Homo sapiens
  siRNA target sequence for ACACB (NM_001093.1,3289-3307).
gatcgagaggtcttcttca

SEQ ID NO: 71499 - DNA, 19 bp, Homo sapiens
  siRNA target sequence for ACACB (NM_001093.1,3525-3543).
ctacgacaagtgtgtgata

SEQ ID NO: 71500 - DNA, 19 bp, Homo sapiens
  siRNA target sequence for ACACB (NM_001093.1,3915-3933).
cttctatcacgcaaacaaa

SEQ ID NO: 71501 - DNA, 19 bp, Homo sapiens
  siRNA target sequence for ACACB (NM_001093.1,4025-4043).
gcacctgcgtggtagaatt

SEQ ID NO: 71502 - DNA, 19 bp, Homo sapiens
  siRNA target sequence for ACACB (NM_001093.1,4200-4218).
cgaggacttcaccagaaat

SEQ ID NO: 71503 - DNA, 19 bp, Homo sapiens
  siRNA target sequence for ACACB (NM_001093.1,4801-4819).
ctggaggtggcgttcaata

SEQ ID NO: 71504 - DNA, 19 bp, Homo sapiens
  siRNA target sequence for ACACB (NM_001093.1,4804-4822).
gaggtggcgttcaataaca

SEQ ID NO: 71505 - DNA, 19 bp, Homo sapiens
  siRNA target sequence for ACACB (NM_001093.1,4904-4922).
ccgtgcgctacatggttat

SEQ ID NO: 71506 - DNA, 19 bp, Homo sapiens
  siRNA target sequence for ACACB (NM_001093.1,5084-5102).
ccagatctggaaatatcat

SEQ ID NO: 71507 - DNA, 19 bp, Homo sapiens
  siRNA target sequence for ACACB (NM_001093.1,5136-5154).
gcacgggatgctgatcaat

SEQ ID NO: 71508 - DNA, 19 bp, Homo sapiens
  siRNA target sequence for ACACB (NM_001093.1,5137-5155).
cacgggatgctgatcaata

SEQ ID NO: 71509 - DNA, 19 bp, Homo sapiens
  siRNA target sequence for ACACB (NM_001093.1,5139-5157).
cgggatgctgatcaatact

SEQ ID NO: 71510 - DNA, 19 bp, Homo sapiens
  siRNA target sequence for ACACB (NM_001093.1,5209-5227).
ctgggaaccacctacatct

SEQ ID NO: 71511 - DNA, 19 bp, Homo sapiens
  siRNA target sequence for ACACB (NM_001093.1,5211-5229).
gggaaccacctacatctat

SEQ ID NO: 71512 - DNA, 19 bp, Homo sapiens
  siRNA target sequence for ACACB (NM_001093.1,5249-5267).
ggcaggctctctttaaact

SEQ ID NO: 71513 - DNA, 19 bp, Homo sapiens
  siRNA target sequence for ACACB (NM_001093.1,5270-5288).
ggggctccccagacaagta

SEQ ID NO: 71514 - DNA, 19 bp, Homo sapiens
  siRNA target sequence for ACACB (NM_001093.1,5301-5319).
cctgacatacactgaatta

SEQ ID NO: 71515 - DNA, 19 bp, Homo sapiens
  siRNA target sequence for ACACB (NM_001093.1,5389-5407).
gccttcaaaatgaggttta

SEQ ID NO: 71516 - DNA, 19 bp, Homo sapiens
  siRNA target sequence for ACACB (NM_001093.1,5423-5441).
cggaaggacgggatgtgat

SEQ ID NO: 71517 - DNA, 19 bp, Homo sapiens
  siRNA target sequence for ACACB (NM_001093.1,5463-5481).
ctttcgcattggatccttt

SEQ ID NO: 71518 - DNA, 19 bp, Homo sapiens
  siRNA target sequence for ACACB (NM_001093.1,5486-5504).
ctggagaggaccttctgta

SEQ ID NO: 71519 - DNA, 19 bp, Homo sapiens
  siRNA target sequence for ACACB (NM_001093.1,5639-5657).
cccacaaaggatttaaata

SEQ ID NO: 71520 - DNA, 19 bp, Homo sapiens
  siRNA target sequence for ACACB (NM_001093.1,5700-5718).
gaactccgtccactgtaaa

SEQ ID NO: 71521 - DNA, 19 bp, Homo sapiens
  siRNA target sequence for ACACB (NM_001093.1,5705-5723).
ccgtccactgtaaacacat

SEQ ID NO: 71522 - DNA, 19 bp, Homo sapiens
  siRNA target sequence for ACACB (NM_001093.1,5731-5749).
ggaggagagtccagataca

SEQ ID NO: 71523 - DNA, 19 bp, Homo sapiens
  siRNA target sequence for ACACB (NM_001093.1,5732-5750).
gaggagagtccagatacat

SEQ ID NO: 71524 - DNA, 19 bp, Homo sapiens
  siRNA target sequence for ACACB (NM_001093.1,5735-5753).
gagagtccagatacatgat

SEQ ID NO: 71525 - DNA, 19 bp, Homo sapiens
  siRNA target sequence for ACACB (NM_001093.1,5799-5817).
gaggggctcaggcatgatt

SEQ ID NO: 71526 - DNA, 19 bp, Homo sapiens
  siRNA target sequence for ACACB (NM_001093.1,5831-5849).
ctctggcttacgaagagat

SEQ ID NO: 71527 - DNA, 19 bp, Homo sapiens
  siRNA target sequence for ACACB (NM_001093.1,5845-5863).
gagatcgtcaccattagct

SEQ ID NO: 71528 - DNA, 19 bp, Homo sapiens
  siRNA target sequence for ACACB (NM_001093.1,5983-6001).
ggaagagaggtctacacat

SEQ ID NO: 71529 - DNA, 19 bp, Homo sapiens
  siRNA target sequence for ACACB (NM_001093.1,6019-6037).
ggcgttcagatcatgcatt

SEQ ID NO: 71530 - DNA, 19 bp, Homo sapiens
  siRNA target sequence for ACACB (NM_001093.1,6020-6038).
gcgttcagatcatgcatta

SEQ ID NO: 71531 - DNA, 19 bp, Homo sapiens
  siRNA target sequence for ACACB (NM_001093.1,6022-6040).
gttcagatcatgcattaca

SEQ ID NO: 71532 - DNA, 19 bp, Homo sapiens
  siRNA target sequence for ACACB (NM_001093.1,6057-6075).
caccgtgccagatgacttt

SEQ ID NO: 71533 - DNA, 19 bp, Homo sapiens
  siRNA target sequence for ACACB (NM_001093.1,6070-6088).
gactttgagggggtttata

SEQ ID NO: 71534 - DNA, 19 bp, Homo sapiens
  siRNA target sequence for ACACB (NM_001093.1,6094-6112).
ctggagtggctgtcctata

SEQ ID NO: 71535 - DNA, 19 bp, Homo sapiens
  siRNA target sequence for ACACB (NM_001093.1,6105-6123).
gtcctatatgccaaaggat

SEQ ID NO: 71536 - DNA, 19 bp, Homo sapiens
  siRNA target sequence for ACACB (NM_001093.1,6107-6125).
cctatatgccaaaggataa

SEQ ID NO: 71537 - DNA, 19 bp, Homo sapiens
  siRNA target sequence for ACACB (NM_001093.1,6157-6175).
gaccccattgacagagaaa

SEQ ID NO: 71538 - DNA, 19 bp, Homo sapiens
  siRNA target sequence for ACACB (NM_001093.1,6159-6177).
ccccattgacagagaaatt

SEQ ID NO: 71539 - DNA, 19 bp, Homo sapiens
  siRNA target sequence for ACACB (NM_001093.1,6257-6275).
ggcagagcggattctttga

SEQ ID NO: 71540 - DNA, 19 bp, Homo sapiens
  siRNA target sequence for ACACB (NM_001093.1,6348-6366).
gattcccgtgggagtgatt

SEQ ID NO: 71541 - DNA, 19 bp, Homo sapiens
  siRNA target sequence for ACACB (NM_001093.1,6557-6575).
ccggtggcatgaaagacat

SEQ ID NO: 71542 - DNA, 19 bp, Homo sapiens
  siRNA target sequence for ACACB (NM_001093.1,6610-6628).
gtggacggccttagacaat

SEQ ID NO: 71543 - DNA, 19 bp, Homo sapiens
  siRNA target sequence for ACACB (NM_001093.1,6613-6631).
gacggccttagacaataca

SEQ ID NO: 71544 - DNA, 19 bp, Homo sapiens
  siRNA target sequence for ACACB (NM_001093.1,6615-6633).
cggccttagacaatacaaa

SEQ ID NO: 71545 - DNA, 19 bp, Homo sapiens
  siRNA target sequence for ACACB (NM_001093.1,6708-6726).
caacccgctgtgcatagaa

SEQ ID NO: 71546 - DNA, 19 bp, Homo sapiens
  siRNA target sequence for ACACB (NM_001093.1,6712-6730).
ccgctgtgcatagaaatgt

SEQ ID NO: 71547 - DNA, 19 bp, Homo sapiens
  siRNA target sequence for ACACB (NM_001093.1,6713-6731).
cgctgtgcatagaaatgta

SEQ ID NO: 71548 - DNA, 19 bp, Homo sapiens
  siRNA target sequence for ACACB (NM_001093.1,6824-6842).
ggatcgatccagcttacaa

SEQ ID NO: 71549 - DNA, 19 bp, Homo sapiens
  siRNA target sequence for ACACB (NM_001093.1,7039-7057).
gcacgcaccttcctgtatt

SEQ ID NO: 71550 - DNA, 19 bp, Homo sapiens
  siRNA target sequence for ACACB (NM_001093.1,7190-7208).
cctacttgtgggacaacaa

SEQ ID NO: 71551 - DNA, 19 bp, Homo sapiens
  siRNA target sequence for ACACB (NM_001093.1,7351-7369).
gccgtggactgtgtgatat

SEQ ID NO: 71552 - DNA, 19 bp, Homo sapiens
  siRNA target sequence for ACACB (NM_001093.1,7352-7370).
ccgtggactgtgtgatata

SEQ ID NO: 71553 - DNA, 19 bp, Homo sapiens
  siRNA target sequence for ACK1 (NM_005781.2,716-734).
cccgcctgtcccactttga

SEQ ID NO: 71554 - DNA, 19 bp, Homo sapiens
  siRNA target sequence for ACK1 (NM_005781.2,832-850).
cgcaagtcgtggatgagta

SEQ ID NO: 71555 - DNA, 19 bp, Homo sapiens
  siRNA target sequence for ACK1 (NM_005781.2,833-851).
gcaagtcgtggatgagtaa

SEQ ID NO: 71556 - DNA, 19 bp, Homo sapiens
  siRNA target sequence for ACK1 (NM_005781.2,1347-1365).
ggagtccaagcgctttatt

SEQ ID NO: 71557 - DNA, 19 bp, Homo sapiens
  siRNA target sequence for ACK1 (NM_005781.2,1403-1421).
cccgcgacctggtcaagat

SEQ ID NO: 71558 - DNA, 19 bp, Homo sapiens
  siRNA target sequence for ACK1 (NM_005781.2,1440-1458).
gcgagcactacctcagaat

SEQ ID NO: 71559 - DNA, 19 bp, Homo sapiens
  siRNA target sequence for ACK1 (NM_005781.2,1442-1460).
gagcactacctcagaatga

SEQ ID NO: 71560 - DNA, 19 bp, Homo sapiens
  siRNA target sequence for ACK1 (NM_005781.2,1451-1469).
ctcagaatgacgaccatta

SEQ ID NO: 71561 - DNA, 19 bp, Homo sapiens
  siRNA target sequence for ACK1 (NM_005781.2,1625-1643).
gcagtcagatcctgcataa

SEQ ID NO: 71562 - DNA, 19 bp, Homo sapiens
  siRNA target sequence for ACK1 (NM_005781.2,1628-1646).
gtcagatcctgcataagat

SEQ ID NO: 71563 - DNA, 19 bp, Homo sapiens
  siRNA target sequence for ACK1 (NM_005781.2,1685-1703).
gtccccaggacatctacaa

SEQ ID NO: 71564 - DNA, 19 bp, Homo sapiens
  siRNA target sequence for ACK1 (NM_005781.2,1833-1851).
gcacatccagatgaatgat

SEQ ID NO: 71565 - DNA, 19 bp, Homo sapiens
  siRNA target sequence for ACK1 (NM_005781.2,1870-1888).
ggaagggccgagaactact

SEQ ID NO: 71566 - DNA, 19 bp, Homo sapiens
  siRNA target sequence for ACK1 (NM_005781.2,2143-2161).
catctaggaggggtgaaaa

SEQ ID NO: 71567 - DNA, 19 bp, Homo sapiens
  siRNA target sequence for ACK1 (NM_005781.2,2154-2172).
ggtgaaaaaaccaacctat

SEQ ID NO: 71568 - DNA, 19 bp, Homo sapiens
  siRNA target sequence for ACK1 (NM_005781.2,2534-2552).
cccaggatgaggatgactt

SEQ ID NO: 71569 - DNA, 19 bp, Homo sapiens
  siRNA target sequence for ACK1 (NM_005781.2,2554-2572).
gagatctgctccatcaaca

SEQ ID NO: 71570 - DNA, 19 bp, Homo sapiens
  siRNA target sequence for ACK1 (NM_005781.2,2720-2738).
cacagaccgcagagatctt

SEQ ID NO: 71571 - DNA, 19 bp, Homo sapiens
  siRNA target sequence for ACLY (NM_001096.2,166-184).
gtcggccaaggcaatttca

SEQ ID NO: 71572 - DNA, 19 bp, Homo sapiens
  siRNA target sequence for ACLY (NM_001096.2,168-186).
cggccaaggcaatttcaga

SEQ ID NO: 71573 - DNA, 19 bp, Homo sapiens
  siRNA target sequence for ACLY (NM_001096.2,337-355).
gccagaccagctgatcaaa

SEQ ID NO: 71574 - DNA, 19 bp, Homo sapiens
  siRNA target sequence for ACLY (NM_001096.2,628-646).
cgtggatgagaaactgaat

SEQ ID NO: 71575 - DNA, 19 bp, Homo sapiens
  siRNA target sequence for ACLY (NM_001096.2,720-738).
ccggcctcttcaatttcta

SEQ ID NO: 71576 - DNA, 19 bp, Homo sapiens
  siRNA target sequence for ACLY (NM_001096.2,775-793).
ccttgtagtgaccaaagat

SEQ ID NO: 71577 - DNA, 19 bp, Homo sapiens
  siRNA target sequence for ACLY (NM_001096.2,1030-1048).
cgataccatctgtgatcta

SEQ ID NO: 71578 - DNA, 19 bp, Homo sapiens
  siRNA target sequence for ACLY (NM_001096.2,1057-1075).
caacgagctggcaaactat

SEQ ID NO: 71579 - DNA, 19 bp, Homo sapiens
  siRNA target sequence for ACLY (NM_001096.2,1187-1205).
ggcagcatcgcaaacttca

SEQ ID NO: 71580 - DNA, 19 bp, Homo sapiens
  siRNA target sequence for ACLY (NM_001096.2,1231-1249).
catcgtgagagcaattcga

SEQ ID NO: 71581 - DNA, 19 bp, Homo sapiens
  siRNA target sequence for ACLY (NM_001096.2,1239-1257).
gagcaattcgagattacca

SEQ ID NO: 71582 - DNA, 19 bp, Homo sapiens
  siRNA target sequence for ACLY (NM_001096.2,1273-1291).
gcacgaagtcacaatcttt

SEQ ID NO: 71583 - DNA, 19 bp, Homo sapiens
  siRNA target sequence for ACLY (NM_001096.2,1299-1317).
gaggtggccccaactatca

SEQ ID NO: 71584 - DNA, 19 bp, Homo sapiens
  siRNA target sequence for ACLY (NM_001096.2,1359-1377).
ggatccccatccatgtctt

SEQ ID NO: 71585 - DNA, 19 bp, Homo sapiens
  siRNA target sequence for ACLY (NM_001096.2,1360-1378).
gatccccatccatgtcttt

SEQ ID NO: 71586 - DNA, 19 bp, Homo sapiens
  siRNA target sequence for ACLY (NM_001096.2,1577-1595).
cctgccatgccacaagatt

SEQ ID NO: 71587 - DNA, 19 bp, Homo sapiens
  siRNA target sequence for ACLY (NM_001096.2,1581-1599).
ccatgccacaagattcagt

SEQ ID NO: 71588 - DNA, 19 bp, Homo sapiens
  siRNA target sequence for ACLY (NM_001096.2,1695-1713).
gcatgctggactttgacta

SEQ ID NO: 71589 - DNA, 19 bp, Homo sapiens
  siRNA target sequence for ACLY (NM_001096.2,1747-1765).
catggtctaccctttcact

SEQ ID NO: 71590 - DNA, 19 bp, Homo sapiens
  siRNA target sequence for ACLY (NM_001096.2,1772-1790).
cacaagcagaagttttact

SEQ ID NO: 71591 - DNA, 19 bp, Homo sapiens
  siRNA target sequence for ACLY (NM_001096.2,1886-1904).
ctccgctctgcctatgaca

SEQ ID NO: 71592 - DNA, 19 bp, Homo sapiens
  siRNA target sequence for ACLY (NM_001096.2,2161-2179).
gtccaacgagctcaacaat

SEQ ID NO: 71593 - DNA, 19 bp, Homo sapiens
  siRNA target sequence for ACLY (NM_001096.2,2193-2211).
ccacggatggcgtctatga

SEQ ID NO: 71594 - DNA, 19 bp, Homo sapiens
  siRNA target sequence for ACLY (NM_001096.2,2247-2265).
ccacattcatggatcatgt

SEQ ID NO: 71595 - DNA, 19 bp, Homo sapiens
  siRNA target sequence for ACLY (NM_001096.2,2250-2268).
cattcatggatcatgtgtt

SEQ ID NO: 71596 - DNA, 19 bp, Homo sapiens
  siRNA target sequence for ACLY (NM_001096.2,2279-2297).
gacactccaggagtcaaaa

SEQ ID NO: 71597 - DNA, 19 bp, Homo sapiens
  siRNA target sequence for ACLY (NM_001096.2,2322-2340).
ggggcactgaggaatataa

SEQ ID NO: 71598 - DNA, 19 bp, Homo sapiens
  siRNA target sequence for ACLY (NM_001096.2,2325-2343).
gcactgaggaatataagat

SEQ ID NO: 71599 - DNA, 19 bp, Homo sapiens
  siRNA target sequence for ACLY (NM_001096.2,2326-2344).
cactgaggaatataagatt

SEQ ID NO: 71600 - DNA, 19 bp, Homo sapiens
  siRNA target sequence for ACLY (NM_001096.2,2551-2569).
catccagtctgtatacgaa

SEQ ID NO: 71601 - DNA, 19 bp, Homo sapiens
  siRNA target sequence for ACLY (NM_001096.2,2646-2664).
ccagggagcttggtttgat

SEQ ID NO: 71602 - DNA, 19 bp, Homo sapiens
  siRNA target sequence for ACLY (NM_001096.2,2820-2838).
cttgccagttcattgagat

SEQ ID NO: 71603 - DNA, 19 bp, Homo sapiens
  siRNA target sequence for ACVR1 (NM_001105.2,393-411).
cccctagtatggaagatga

SEQ ID NO: 71604 - DNA, 19 bp, Homo sapiens
  siRNA target sequence for ACVR1 (NM_001105.2,456-474).
gtctctcctgcggtaatga

SEQ ID NO: 71605 - DNA, 19 bp, Homo sapiens
  siRNA target sequence for ACVR1 (NM_001105.2,488-506).
ggccagcagtgcttttcct

SEQ ID NO: 71606 - DNA, 19 bp, Homo sapiens
  siRNA target sequence for ACVR1 (NM_001105.2,623-641).
caaggggactggtgtaaca

SEQ ID NO: 71607 - DNA, 19 bp, Homo sapiens
  siRNA target sequence for ACVR1 (NM_001105.2,662-680).
cccactaaaggaaaatcct

SEQ ID NO: 71608 - DNA, 19 bp, Homo sapiens
  siRNA target sequence for ACVR1 (NM_001105.2,734-752).
gtgttcgcagtatgtcttt

SEQ ID NO: 71609 - DNA, 19 bp, Homo sapiens
  siRNA target sequence for ACVR1 (NM_001105.2,767-785).
ggagttgctctccgaaaat

SEQ ID NO: 71610 - DNA, 19 bp, Homo sapiens
  siRNA target sequence for ACVR1 (NM_001105.2,768-786).
gagttgctctccgaaaatt

SEQ ID NO: 71611 - DNA, 19 bp, Homo sapiens
  siRNA target sequence for ACVR1 (NM_001105.2,826-844).
ggagtatggcactatcgaa

SEQ ID NO: 71612 - DNA, 19 bp, Homo sapiens
  siRNA target sequence for ACVR1 (NM_001105.2,881-899).
gcagatttattggatcatt

SEQ ID NO: 71613 - DNA, 19 bp, Homo sapiens
  siRNA target sequence for ACVR1 (NM_001105.2,892-910).
ggatcattcgtgtacatca

SEQ ID NO: 71614 - DNA, 19 bp, Homo sapiens
  siRNA target sequence for ACVR1 (NM_001105.2,1082-1100).
gaaacggaattgtacaaca

SEQ ID NO: 71615 - DNA, 19 bp, Homo sapiens
  siRNA target sequence for ACVR1 (NM_001105.2,1174-1192).
gctgtggttaattacacat

SEQ ID NO: 71616 - DNA, 19 bp, Homo sapiens
  siRNA target sequence for ACVR1 (NM_001105.2,1177-1195).
gtggttaattacacattat

SEQ ID NO: 71617 - DNA, 19 bp, Homo sapiens
  siRNA target sequence for ACVR1 (NM_001105.2,1206-1224).
gatcgttgtacgactatct

SEQ ID NO: 71618 - DNA, 19 bp, Homo sapiens
  siRNA target sequence for ACVR1 (NM_001105.2,1209-1227).
cgttgtacgactatcttca

SEQ ID NO: 71619 - DNA, 19 bp, Homo sapiens
  siRNA target sequence for ACVR1 (NM_001105.2,1281-1299).
gtggtcttgcacatttgca

SEQ ID NO: 71620 - DNA, 19 bp, Homo sapiens
  siRNA target sequence for ACVR1 (NM_001105.2,1378-1396).
gaatggacagtgttgcata

SEQ ID NO: 71621 - DNA, 19 bp, Homo sapiens
  siRNA target sequence for ACVR1 (NM_001105.2,1490-1508).
cccgaagttctagatgaaa

SEQ ID NO: 71622 - DNA, 19 bp, Homo sapiens
  siRNA target sequence for ACVR1 (NM_001105.2,1513-1531).
ccaggtggattgtttcgat

SEQ ID NO: 71623 - DNA, 19 bp, Homo sapiens
  siRNA target sequence for ACVR1 (NM_001105.2,1533-1551).
cttataaaagggtcgatat

SEQ ID NO: 71624 - DNA, 19 bp, Homo sapiens
  siRNA target sequence for ACVR1 (NM_001105.2,1589-1607).
cggatggtgagcaatggta

SEQ ID NO: 71625 - DNA, 19 bp, Homo sapiens
  siRNA target sequence for ACVR1 (NM_001105.2,1604-1622).
ggtatagtggaggattaca

SEQ ID NO: 71626 - DNA, 19 bp, Homo sapiens
  siRNA target sequence for ACVR1 (NM_001105.2,1605-1623).
gtatagtggaggattacaa

SEQ ID NO: 71627 - DNA, 19 bp, Homo sapiens
  siRNA target sequence for ACVR1 (NM_001105.2,1655-1673).
ccaagttttgaagatatga

SEQ ID NO: 71628 - DNA, 19 bp, Homo sapiens
  siRNA target sequence for ACVR1 (NM_001105.2,1682-1700).
gtctgtgtggatcaacaaa

SEQ ID NO: 71629 - DNA, 19 bp, Homo sapiens
  siRNA target sequence for ACVR1 (NM_001105.2,1723-1741).
gttctcagacccgacatta

SEQ ID NO: 71630 - DNA, 19 bp, Homo sapiens
  siRNA target sequence for ACVR1 (NM_001105.2,1798-1816).
cacagcactgcgtatcaaa

SEQ ID NO: 71631 - DNA, 19 bp, Homo sapiens
  siRNA target sequence for ACVR1 (NM_001105.2,1800-1818).
cagcactgcgtatcaaaaa

SEQ ID NO: 71632 - DNA, 19 bp, Homo sapiens
  siRNA target sequence for ACVR1 (NM_001105.2,1802-1820).
gcactgcgtatcaaaaaga

SEQ ID NO: 71633 - DNA, 19 bp, Homo sapiens
  siRNA target sequence for ACVR1 (NM_001105.2,1819-1837).
gactttgaccaaaattgat

SEQ ID NO: 71634 - DNA, 19 bp, Homo sapiens
  siRNA target sequence for ACVR1 (NM_001105.2,1835-1853).
gataattccctcgacaaat

SEQ ID NO: 71635 - DNA, 19 bp, Homo sapiens
  siRNA target sequence for ACVR1B (NM_004302.3,475-493).
gttttccttgtcattaact

SEQ ID NO: 71636 - DNA, 19 bp, Homo sapiens
  siRNA target sequence for ACVR1B (NM_004302.3,480-498).
ccttgtcattaactatcat

SEQ ID NO: 71637 - DNA, 19 bp, Homo sapiens
  siRNA target sequence for ACVR1B (NM_004302.3,496-514).
catcagcgtgtctatcaca

SEQ ID NO: 71638 - DNA, 19 bp, Homo sapiens
  siRNA target sequence for ACVR1B (NM_004302.3,575-593).
cgctccaggatcttgtcta

SEQ ID NO: 71639 - DNA, 19 bp, Homo sapiens
  siRNA target sequence for ACVR1B (NM_004302.3,649-667).
gtggcccgaaccatcgttt

SEQ ID NO: 71640 - DNA, 19 bp, Homo sapiens
  siRNA target sequence for ACVR1B (NM_004302.3,651-669).
ggcccgaaccatcgtttta

SEQ ID NO: 71641 - DNA, 19 bp, Homo sapiens
  siRNA target sequence for ACVR1B (NM_004302.3,653-671).
cccgaaccatcgttttaca

SEQ ID NO: 71642 - DNA, 19 bp, Homo sapiens
  siRNA target sequence for ACVR1B (NM_004302.3,654-672).
ccgaaccatcgttttacaa

SEQ ID NO: 71643 - DNA, 19 bp, Homo sapiens
  siRNA target sequence for ACVR1B (NM_004302.3,656-674).
gaaccatcgttttacaaga

SEQ ID NO: 71644 - DNA, 19 bp, Homo sapiens
  siRNA target sequence for ACVR1B (NM_004302.3,900-918).
gcacgggtccctgtttgat

SEQ ID NO: 71645 - DNA, 19 bp, Homo sapiens
  siRNA target sequence for ACVR1B (NM_004302.3,901-919).
cacgggtccctgtttgatt

SEQ ID NO: 71646 - DNA, 19 bp, Homo sapiens
  siRNA target sequence for ACVR1B (NM_004302.3,927-945).
ccggtacacagtgacaatt

SEQ ID NO: 71647 - DNA, 19 bp, Homo sapiens
  siRNA target sequence for ACVR1B (NM_004302.3,939-957).
gacaattgaggggatgatt

SEQ ID NO: 71648 - DNA, 19 bp, Homo sapiens
  siRNA target sequence for ACVR1B (NM_004302.3,1107-1125).
cctggctgtccgtcatgat

SEQ ID NO: 71649 - DNA, 19 bp, Homo sapiens
  siRNA target sequence for ACVR1B (NM_004302.3,1129-1147).
gtcactgacaccattgaca

SEQ ID NO: 71650 - DNA, 19 bp, Homo sapiens
  siRNA target sequence for ACVR1B (NM_004302.3,1144-1162).
gacattgccccgaatcaga

SEQ ID NO: 71651 - DNA, 19 bp, Homo sapiens
  siRNA target sequence for ACVR1B (NM_004302.3,1255-1273).
gccctcgggcttgtatatt

SEQ ID NO: 71652 - DNA, 19 bp, Homo sapiens
  siRNA target sequence for ACVR1B (NM_004302.3,1278-1296).
gattgctcgaagatgcaat

SEQ ID NO: 71653 - DNA, 19 bp, Homo sapiens
  siRNA target sequence for ACVR1B (NM_004302.3,1371-1389).
gcgaaaggttgtatgtgat

SEQ ID NO: 71654 - DNA, 19 bp, Homo sapiens
  siRNA target sequence for ACVR1B (NM_004302.3,1413-1431).
caactggtggcagagttat

SEQ ID NO: 71655 - DNA, 19 bp, Homo sapiens
  siRNA target sequence for ACVR1B (NM_004302.3,1540-1558).
caggaagacgtgaagatct

SEQ ID NO: 71656 - DNA, 19 bp, Homo sapiens
  siRNA target sequence for ACVR1B (NM_020328.2,1352-1370).
gatcacccaaagctgtttt

SEQ ID NO: 71657 - DNA, 19 bp, Homo sapiens
  siRNA target sequence for ACVR1B (NM_020328.2,1355-1373).
cacccaaagctgttttact

SEQ ID NO: 71658 - DNA, 19 bp, Homo sapiens
  siRNA target sequence for ACVR1B (NM_020328.2,1414-1432).
gagcctgaatcatcgttta

SEQ ID NO: 71659 - DNA, 19 bp, Homo sapiens
  siRNA target sequence for ACVR1B (NM_020328.2,1418-1436).
ctgaatcatcgtttaaggt

SEQ ID NO: 71660 - DNA, 19 bp, Homo sapiens
  siRNA target sequence for ACVR1B (NM_020328.2,1428-1446).
gtttaaggttgccatcaaa

SEQ ID NO: 71661 - DNA, 19 bp, Homo sapiens
  siRNA target sequence for ACVR1B (NM_020328.2,1462-1480).
gtgcttagggtgcgtttat

SEQ ID NO: 71662 - DNA, 19 bp, Homo sapiens
  siRNA target sequence for ACVR1B (NM_020328.2,1465-1483).
cttagggtgcgtttattct

SEQ ID NO: 71663 - DNA, 19 bp, Homo sapiens
  siRNA target sequence for ACVR1C (NM_145259.1,386-404).
catcagtcatgctaaccaa

SEQ ID NO: 71664 - DNA, 19 bp, Homo sapiens
  siRNA target sequence for ACVR1C (NM_145259.1,391-409).
gtcatgctaaccaatggaa

SEQ ID NO: 71665 - DNA, 19 bp, Homo sapiens
  siRNA target sequence for ACVR1C (NM_145259.1,407-425).
gaaaagagcaggtgatcaa

SEQ ID NO: 71666 - DNA, 19 bp, Homo sapiens
  siRNA target sequence for ACVR1C (NM_145259.1,412-430).
gagcaggtgatcaaatcct

SEQ ID NO: 71667 - DNA, 19 bp, Homo sapiens
  siRNA target sequence for ACVR1C (NM_145259.1,467-485).
gtcatagttccaacaatgt

SEQ ID NO: 71668 - DNA, 19 bp, Homo sapiens
  siRNA target sequence for ACVR1C (NM_145259.1,473-491).
gttccaacaatgttaccaa

SEQ ID NO: 71669 - DNA, 19 bp, Homo sapiens
  siRNA target sequence for ACVR1C (NM_145259.1,580-598).
gagctggccatcattatta

SEQ ID NO: 71670 - DNA, 19 bp, Homo sapiens
  siRNA target sequence for ACVR1C (NM_145259.1,710-728).
ctgagtgcaatctggtaaa

SEQ ID NO: 71671 - DNA, 19 bp, Homo sapiens
  siRNA target sequence for ACVR1C (NM_145259.1,714-732).
gtgcaatctggtaaatgct

SEQ ID NO: 71672 - DNA, 19 bp, Homo sapiens
  siRNA target sequence for ACVR1C (NM_145259.1,798-816).
gttggttcaaaggacaatt

SEQ ID NO: 71673 - DNA, 19 bp, Homo sapiens
  siRNA target sequence for ACVR1C (NM_145259.1,1039-1057).
ctttggctggtatctgaat

SEQ ID NO: 71674 - DNA, 19 bp, Homo sapiens
  siRNA target sequence for ACVR1C (NM_145259.1,1125-1143).
gctggcgctctcaattgct

SEQ ID NO: 71675 - DNA, 19 bp, Homo sapiens
  siRNA target sequence for ACVR1C (NM_145259.1,1147-1165).
ggtctggcacaccttcata

SEQ ID NO: 71676 - DNA, 19 bp, Homo sapiens
  siRNA target sequence for ACVR1C (NM_145259.1,1148-1166).
gtctggcacaccttcatat

SEQ ID NO: 71677 - DNA, 19 bp, Homo sapiens
  siRNA target sequence for ACVR1C (NM_145259.1,1275-1293).
ggctgtgaagcatgattca

SEQ ID NO: 71678 - DNA, 19 bp, Homo sapiens
  siRNA target sequence for ACVR1C (NM_145259.1,1276-1294).
gctgtgaagcatgattcaa

SEQ ID NO: 71679 - DNA, 19 bp, Homo sapiens
  siRNA target sequence for ACVR1C (NM_145259.1,1309-1327).
gacatacctcagaatccta

SEQ ID NO: 71680 - DNA, 19 bp, Homo sapiens
  siRNA target sequence for ACVR1C (NM_145259.1,1330-1348).
gtgggaaccaagaggtata

SEQ ID NO: 71681 - DNA, 19 bp, Homo sapiens
  siRNA target sequence for ACVR1C (NM_145259.1,1455-1473).
gtgttcagtcggaggaatt

SEQ ID NO: 71682 - DNA, 19 bp, Homo sapiens
  siRNA target sequence for ACVR1C (NM_145259.1,1581-1599).
ccagtggcaaagttgtgaa

SEQ ID NO: 71683 - DNA, 19 bp, Homo sapiens
  siRNA target sequence for ACVR1C (NM_145259.1,1658-1676).
gcctaactgctcttcgtat

SEQ ID NO: 71684 - DNA, 19 bp, Homo sapiens
  siRNA target sequence for ACVR1C (NM_145259.1,1666-1684).
gctcttcgtattaagaaga

SEQ ID NO: 71685 - DNA, 19 bp, Homo sapiens
  siRNA target sequence for ACVR1C (NM_145259.1,1669-1687).
cttcgtattaagaagacta

SEQ ID NO: 71686 - DNA, 19 bp, Homo sapiens
  siRNA target sequence for ACVR1C (NM_145259.1,1680-1698).
gaagactatatctcaactt

SEQ ID NO: 71687 - DNA, 19 bp, Homo sapiens
  siRNA target sequence for ACVR1C (NM_145259.1,1683-1701).
gactatatctcaactttgt

SEQ ID NO: 71688 - DNA, 19 bp, Homo sapiens
  siRNA target sequence for ACVR1C (NM_145259.1,1685-1703).
ctatatctcaactttgtgt

SEQ ID NO: 71689 - DNA, 19 bp, Homo sapiens
  siRNA target sequence for ACVR2 (NM_001616.2,184-202).
ggcgtttgccgtctttctt

SEQ ID NO: 71690 - DNA, 19 bp, Homo sapiens
  siRNA target sequence for ACVR2 (NM_001616.2,185-203).
gcgtttgccgtctttctta

SEQ ID NO: 71691 - DNA, 19 bp, Homo sapiens
  siRNA target sequence for ACVR2 (NM_001616.2,186-204).
cgtttgccgtctttcttat

SEQ ID NO: 71692 - DNA, 19 bp, Homo sapiens
  siRNA target sequence for ACVR2 (NM_001616.2,210-228).
gttcttcaggtgctatact

SEQ ID NO: 71693 - DNA, 19 bp, Homo sapiens
  siRNA target sequence for ACVR2 (NM_001616.2,266-284).
gctaattgggaaaaagaca

SEQ ID NO: 71694 - DNA, 19 bp, Homo sapiens
  siRNA target sequence for ACVR2 (NM_001616.2,289-307).
caatcaaactggtgttgaa

SEQ ID NO: 71695 - DNA, 19 bp, Homo sapiens
  siRNA target sequence for ACVR2 (NM_001616.2,309-327).
cgtgttatggtgacaaaga

SEQ ID NO: 71696 - DNA, 19 bp, Homo sapiens
  siRNA target sequence for ACVR2 (NM_001616.2,366-384).
ctggttccattgaaatagt

SEQ ID NO: 71697 - DNA, 19 bp, Homo sapiens
  siRNA target sequence for ACVR2 (NM_001616.2,368-386).
ggttccattgaaatagtga

SEQ ID NO: 71698 - DNA, 19 bp, Homo sapiens
  siRNA target sequence for ACVR2 (NM_001616.2,396-414).
gttggctggatgatatcaa

SEQ ID NO: 71699 - DNA, 19 bp, Homo sapiens
  siRNA target sequence for ACVR2 (NM_001616.2,407-425).
gatatcaactgctatgaca

SEQ ID NO: 71700 - DNA, 19 bp, Homo sapiens
  siRNA target sequence for ACVR2 (NM_001616.2,424-442).
caggactgattgtgtagaa

SEQ ID NO: 71701 - DNA, 19 bp, Homo sapiens
  siRNA target sequence for ACVR2 (NM_001616.2,471-489).
gttgctgtgagggcaatat

SEQ ID NO: 71702 - DNA, 19 bp, Homo sapiens
  siRNA target sequence for ACVR2 (NM_001616.2,475-493).
ctgtgagggcaatatgtgt

SEQ ID NO: 71703 - DNA, 19 bp, Homo sapiens
  siRNA target sequence for ACVR2 (NM_001616.2,477-495).
gtgagggcaatatgtgtaa

SEQ ID NO: 71704 - DNA, 19 bp, Homo sapiens
  siRNA target sequence for ACVR2 (NM_001616.2,483-501).
gcaatatgtgtaatgaaaa

SEQ ID NO: 71705 - DNA, 19 bp, Homo sapiens
  siRNA target sequence for ACVR2 (NM_001616.2,529-547).
cacacagcccacttcaaat

SEQ ID NO: 71706 - DNA, 19 bp, Homo sapiens
  siRNA target sequence for ACVR2 (NM_001616.2,538-556).
cacttcaaatccagttaca

SEQ ID NO: 71707 - DNA, 19 bp, Homo sapiens
  siRNA target sequence for ACVR2 (NM_001616.2,555-573).
cacctaagccaccctatta

SEQ ID NO: 71708 - DNA, 19 bp, Homo sapiens
  siRNA target sequence for ACVR2 (NM_001616.2,557-575).
cctaagccaccctattaca

SEQ ID NO: 71709 - DNA, 19 bp, Homo sapiens
  siRNA target sequence for ACVR2 (NM_001616.2,558-576).
ctaagccaccctattacaa

SEQ ID NO: 71710 - DNA, 19 bp, Homo sapiens
  siRNA target sequence for ACVR2 (NM_001616.2,591-609).
ccttggtgccacttatgtt

SEQ ID NO: 71711 - DNA, 19 bp, Homo sapiens
  siRNA target sequence for ACVR2 (NM_001616.2,592-610).
cttggtgccacttatgtta

SEQ ID NO: 71712 - DNA, 19 bp, Homo sapiens
  siRNA target sequence for ACVR2 (NM_001616.2,595-613).
ggtgccacttatgttaatt

SEQ ID NO: 71713 - DNA, 19 bp, Homo sapiens
  siRNA target sequence for ACVR2 (NM_001616.2,639-657).
gggtgtacaggcatcacaa

SEQ ID NO: 71714 - DNA, 19 bp, Homo sapiens
  siRNA target sequence for ACVR2 (NM_001616.2,661-679).
ggcctaccctcctgtactt

SEQ ID NO: 71715 - DNA, 19 bp, Homo sapiens
  siRNA target sequence for ACVR2 (NM_001616.2,664-682).
ctaccctcctgtacttgtt

SEQ ID NO: 71716 - DNA, 19 bp, Homo sapiens
  siRNA target sequence for ACVR2 (NM_001616.2,706-724).
cccaccttctccattacta

SEQ ID NO: 71717 - DNA, 19 bp, Homo sapiens
  siRNA target sequence for ACVR2 (NM_001616.2,735-753).
cactgcagttattagaagt

SEQ ID NO: 71718 - DNA, 19 bp, Homo sapiens
  siRNA target sequence for ACVR2 (NM_001616.2,788-806).
gcccagttgcttaacgaat

SEQ ID NO: 71719 - DNA, 19 bp, Homo sapiens
  siRNA target sequence for ACVR2 (NM_001616.2,789-807).
cccagttgcttaacgaata

SEQ ID NO: 71720 - DNA, 19 bp, Homo sapiens
  siRNA target sequence for ACVR2 (NM_001616.2,857-875).
gaatacgaagtctacagtt

SEQ ID NO: 71721 - DNA, 19 bp, Homo sapiens
  siRNA target sequence for ACVR2 (NM_001616.2,910-928).
cattggtgcagaaaaacga

SEQ ID NO: 71722 - DNA, 19 bp, Homo sapiens
  siRNA target sequence for ACVR2 (NM_001616.2,954-972).
ggctgatcacagcatttca

SEQ ID NO: 71723 - DNA, 19 bp, Homo sapiens
  siRNA target sequence for ACVR2 (NM_001616.2,955-973).
gctgatcacagcatttcat

SEQ ID NO: 71724 - DNA, 19 bp, Homo sapiens
  siRNA target sequence for ACVR2 (NM_001616.2,979-997).
gggttcactatcagacttt

SEQ ID NO: 71725 - DNA, 19 bp, Homo sapiens
  siRNA target sequence for ACVR2 (NM_001616.2,1021-1039).
gaatgaactgtgtcatatt

SEQ ID NO: 71726 - DNA, 19 bp, Homo sapiens
  siRNA target sequence for ACVR2 (NM_001616.2,1032-1050).
gtcatattgcagaaaccat

SEQ ID NO: 71727 - DNA, 19 bp, Homo sapiens
  siRNA target sequence for ACVR2 (NM_001616.2,1053-1071).
ctagaggattggcatattt

SEQ ID NO: 71728 - DNA, 19 bp, Homo sapiens
  siRNA target sequence for ACVR2 (NM_001616.2,1056-1074).
gaggattggcatatttaca

SEQ ID NO: 71729 - DNA, 19 bp, Homo sapiens
  siRNA target sequence for ACVR2 (NM_001616.2,1188-1206).
ggttggccttaaaatttga

SEQ ID NO: 71730 - DNA, 19 bp, Homo sapiens
  siRNA target sequence for ACVR2 (NM_001616.2,1270-1288).
ggtattagagggtgctata

SEQ ID NO: 71731 - DNA, 19 bp, Homo sapiens
  siRNA target sequence for ACVR2 (NM_001616.2,1280-1298).
ggtgctataaacttccaaa

SEQ ID NO: 71732 - DNA, 19 bp, Homo sapiens
  siRNA target sequence for ACVR2 (NM_001616.2,1304-1322).
gcatttttgaggatagata

SEQ ID NO: 71733 - DNA, 19 bp, Homo sapiens
  siRNA target sequence for ACVR2 (NM_001616.2,1380-1398).
gacctgtagatgaatacat

SEQ ID NO: 71734 - DNA, 19 bp, Homo sapiens
  siRNA target sequence for ACVR2 (NM_001616.2,1382-1400).
cctgtagatgaatacatgt

SEQ ID NO: 71735 - DNA, 19 bp, Homo sapiens
  siRNA target sequence for ACVR2 (NM_001616.2,1450-1468).
ggaagttgttgtgcataaa

SEQ ID NO: 71736 - DNA, 19 bp, Homo sapiens
  siRNA target sequence for ACVR2 (NM_001616.2,1474-1492).
gaggcctgttttaagagat

SEQ ID NO: 71737 - DNA, 19 bp, Homo sapiens
  siRNA target sequence for ACVR2 (NM_001616.2,1570-1588).
gttatcagctggatgtgta

SEQ ID NO: 71738 - DNA, 19 bp, Homo sapiens
  siRNA target sequence for ACVR2 (NM_001616.2,1685-1703).
cccaaagaatctagtctat

SEQ ID NO: 71739 - DNA, 19 bp, Homo sapiens
  siRNA target sequence for ACVR2B (NM_001106.2,231-249).
gctgctggctagatgactt

SEQ ID NO: 71740 - DNA, 19 bp, Homo sapiens
  siRNA target sequence for ACVR2B (NM_001106.2,234-252).
gctggctagatgacttcaa

SEQ ID NO: 71741 - DNA, 19 bp, Homo sapiens
  siRNA target sequence for ACVR2B (NM_001106.2,245-263).
gacttcaactgctacgata

SEQ ID NO: 71742 - DNA, 19 bp, Homo sapiens
  siRNA target sequence for ACVR2B (NM_001106.2,619-637).
gaaggcccagctcatgaat

SEQ ID NO: 71743 - DNA, 19 bp, Homo sapiens
  siRNA target sequence for ACVR2B (NM_001106.2,765-783).
gctccaacctcgaagtaga

SEQ ID NO: 71744 - DNA, 19 bp, Homo sapiens
  siRNA target sequence for ACVR2B (NM_001106.2,937-955).
gggccacaagccgtctatt

SEQ ID NO: 71745 - DNA, 19 bp, Homo sapiens
  siRNA target sequence for ACVR2B (NM_001106.2,1026-1044).
gcttggctgttcgatttga

SEQ ID NO: 71746 - DNA, 19 bp, Homo sapiens
  siRNA target sequence for ACVR2B (NM_001106.2,1112-1130).
ctcgagggagccatcaact

SEQ ID NO: 71747 - DNA, 19 bp, Homo sapiens
  siRNA target sequence for ACVR2B (NM_001106.2,1143-1161).
ccttcctgcgcattgacat

SEQ ID NO: 71748 - DNA, 19 bp, Homo sapiens
  siRNA target sequence for ACVR2B (NM_001106.2,1147-1165).
cctgcgcattgacatgtat

SEQ ID NO: 71749 - DNA, 19 bp, Homo sapiens
  siRNA target sequence for ACVR2B (NM_001106.2,1218-1236).
gacccgtggatgagtacat

SEQ ID NO: 71750 - DNA, 19 bp, Homo sapiens
  siRNA target sequence for ACVR2B (NM_001106.2,1309-1327).
gatgaggcccaccattaaa

SEQ ID NO: 71751 - DNA, 19 bp, Homo sapiens
  siRNA target sequence for ACVR2B (NM_001106.2,1312-1330).
gaggcccaccattaaagat

SEQ ID NO: 71752 - DNA, 19 bp, Homo sapiens
  siRNA target sequence for ACVR2B (NM_001106.2,1314-1332).
ggcccaccattaaagatca

SEQ ID NO: 71753 - DNA, 19 bp, Homo sapiens
  siRNA target sequence for ACVR2B (NM_001106.2,1514-1532).
gacctgccccctaaagagt

SEQ ID NO: 71754 - DNA, 19 bp, Homo sapiens
  siRNA target sequence for ACVRL1 (NM_000020.1,1008-1026).
gactgagatctataacaca

SEQ ID NO: 71755 - DNA, 19 bp, Homo sapiens
  siRNA target sequence for ACVRL1 (NM_000020.1,1130-1148).
gctccctctacgactttct

SEQ ID NO: 71756 - DNA, 19 bp, Homo sapiens
  siRNA target sequence for ACVRL1 (NM_000020.1,1349-1367).
cacagggcagcgattacct

SEQ ID NO: 71757 - DNA, 19 bp, Homo sapiens
  siRNA target sequence for ACVRL1 (NM_000020.1,1438-1456).
cgcacggactgctttgagt

SEQ ID NO: 71758 - DNA, 19 bp, Homo sapiens
  siRNA target sequence for ACVRL1 (NM_000020.1,1528-1546).
ggcatcgtggaggactata

SEQ ID NO: 71759 - DNA, 19 bp, Homo sapiens
  siRNA target sequence for ACVRL1 (NM_000020.1,1530-1548).
catcgtggaggactataga

SEQ ID NO: 71760 - DNA, 19 bp, Homo sapiens
  siRNA target sequence for ACVRL1 (NM_000020.1,1542-1560).
ctatagaccacccttctat

SEQ ID NO: 71761 - DNA, 19 bp, Homo sapiens
  siRNA target sequence for ACVRL1 (NM_000020.1,1547-1565).
gaccacccttctatgatgt

SEQ ID NO: 71762 - DNA, 19 bp, Homo sapiens
  siRNA target sequence for ACVRL1 (NM_000020.1,1667-1685).
caggcctagctcagatgat

SEQ ID NO: 71763 - DNA, 19 bp, Homo sapiens
  siRNA target sequence for ACVRL1 (NM_000020.1,1724-1742).
ccgcgctgcggatcaagaa

SEQ ID NO: 71764 - DNA, 19 bp, Homo sapiens
  siRNA target sequence for ACVRL1 (NM_000020.1,1773-1791).
gaagcctaaagtgattcaa

SEQ ID NO: 71765 - DNA, 19 bp, Homo sapiens
  siRNA target sequence for ADRBK1 (NM_001619.2,402-420).
gggagatcttcgactcata

SEQ ID NO: 71766 - DNA, 19 bp, Homo sapiens
  siRNA target sequence for ADRBK1 (NM_001619.2,404-422).
gagatcttcgactcataca

SEQ ID NO: 71767 - DNA, 19 bp, Homo sapiens
  siRNA target sequence for ADRBK1 (NM_001619.2,560-578).
ggggacgtgttccagaaat

SEQ ID NO: 71768 - DNA, 19 bp, Homo sapiens
  siRNA target sequence for ADRBK1 (NM_001619.2,658-676).
cagcgtgcatcgcatcatt

SEQ ID NO: 71769 - DNA, 19 bp, Homo sapiens
  siRNA target sequence for ADRBK1 (NM_001619.2,833-851).
gactgcccattcattgtct

SEQ ID NO: 71770 - DNA, 19 bp, Homo sapiens
  siRNA target sequence for ADRBK1 (NM_001619.2,958-976).
ggctgacatgcgcttctat

SEQ ID NO: 71771 - DNA, 19 bp, Homo sapiens
  siRNA target sequence for ADRBK1 (NM_001619.2,1559-1577).
gacacaaaaggaatcaagt

SEQ ID NO: 71772 - DNA, 19 bp, Homo sapiens
  siRNA target sequence for ADRBK1 (NM_001619.2,1690-1708).
gctggaggctcgcaagaaa

SEQ ID NO: 71773 - DNA, 19 bp, Homo sapiens
  siRNA target sequence for ADRBK1 (NM_001619.2,1959-1977).
gcggtgggaaacagttcat

SEQ ID NO: 71774 - DNA, 19 bp, Homo sapiens
  siRNA target sequence for ADRBK1 (NM_001619.2,1965-1983).
ggaaacagttcattttgca

SEQ ID NO: 71775 - DNA, 19 bp, Homo sapiens
  siRNA target sequence for ADRBK1 (NM_001619.2,2060-2078).
cagcgggtgcccaagatga

SEQ ID NO: 71776 - DNA, 19 bp, Homo sapiens
  siRNA target sequence for ADRBK2 (NM_005160.2,228-246).
gacaagattttcaatcaga

SEQ ID NO: 71777 - DNA, 19 bp, Homo sapiens
  siRNA target sequence for ADRBK2 (NM_005160.2,298-316).
ctgtacctcaggtgaagtt

SEQ ID NO: 71778 - DNA, 19 bp, Homo sapiens
  siRNA target sequence for ADRBK2 (NM_005160.2,370-388).
gcagaagtcgacaaattta

SEQ ID NO: 71779 - DNA, 19 bp, Homo sapiens
  siRNA target sequence for ADRBK2 (NM_005160.2,419-437).
ctgttcacatcctttctca

SEQ ID NO: 71780 - DNA, 19 bp, Homo sapiens
  siRNA target sequence for ADRBK2 (NM_005160.2,421-439).
gttcacatcctttctcaaa

SEQ ID NO: 71781 - DNA, 19 bp, Homo sapiens
  siRNA target sequence for ADRBK2 (NM_005160.2,434-452).
ctcaaagcaagctgtagaa

SEQ ID NO: 71782 - DNA, 19 bp, Homo sapiens
  siRNA target sequence for ADRBK2 (NM_005160.2,444-462).
gctgtagaacacgtacaaa

SEQ ID NO: 71783 - DNA, 19 bp, Homo sapiens
  siRNA target sequence for ADRBK2 (NM_005160.2,450-468).
gaacacgtacaaagtcatt

SEQ ID NO: 71784 - DNA, 19 bp, Homo sapiens
  siRNA target sequence for ADRBK2 (NM_005160.2,453-471).
cacgtacaaagtcatttat

SEQ ID NO: 71785 - DNA, 19 bp, Homo sapiens
  siRNA target sequence for ADRBK2 (NM_005160.2,529-547).
gccttcgaggtgacatttt

SEQ ID NO: 71786 - DNA, 19 bp, Homo sapiens
  siRNA target sequence for ADRBK2 (NM_005160.2,530-548).
ccttcgaggtgacattttt

SEQ ID NO: 71787 - DNA, 19 bp, Homo sapiens
  siRNA target sequence for ADRBK2 (NM_005160.2,565-583).
gtgacaagttcactagatt

SEQ ID NO: 71788 - DNA, 19 bp, Homo sapiens
  siRNA target sequence for ADRBK2 (NM_005160.2,588-606).
cagtggaaaaacgttgaat

SEQ ID NO: 71789 - DNA, 19 bp, Homo sapiens
  siRNA target sequence for ADRBK2 (NM_005160.2,592-610).
ggaaaaacgttgaattaaa

SEQ ID NO: 71790 - DNA, 19 bp, Homo sapiens
  siRNA target sequence for ADRBK2 (NM_005160.2,599-617).
cgttgaattaaatatccat

SEQ ID NO: 71791 - DNA, 19 bp, Homo sapiens
  siRNA target sequence for ADRBK2 (NM_005160.2,632-650).
gttcagtgtgcataggatt

SEQ ID NO: 71792 - DNA, 19 bp, Homo sapiens
  siRNA target sequence for ADRBK2 (NM_005160.2,660-678).
ggaggattcggggaagttt

SEQ ID NO: 71793 - DNA, 19 bp, Homo sapiens
  siRNA target sequence for ADRBK2 (NM_005160.2,715-733).
caatgaaatgcttagataa

SEQ ID NO: 71794 - DNA, 19 bp, Homo sapiens
  siRNA target sequence for ADRBK2 (NM_005160.2,814-832).
gtcctttcattgtatgtat

SEQ ID NO: 71795 - DNA, 19 bp, Homo sapiens
  siRNA target sequence for ADRBK2 (NM_005160.2,935-953).
gaaggagatgcggttttat

SEQ ID NO: 71796 - DNA, 19 bp, Homo sapiens
  siRNA target sequence for ADRBK2 (NM_005160.2,1044-1062).
catggacacgcaagaatat

SEQ ID NO: 71797 - DNA, 19 bp, Homo sapiens
  siRNA target sequence for ADRBK2 (NM_005160.2,1052-1070).
cgcaagaatatcagatctt

SEQ ID NO: 71798 - DNA, 19 bp, Homo sapiens
  siRNA target sequence for ADRBK2 (NM_005160.2,1071-1089).
ggtcttgcctgcgattttt

SEQ ID NO: 71799 - DNA, 19 bp, Homo sapiens
  siRNA target sequence for ADRBK2 (NM_005160.2,1074-1092).
cttgcctgcgatttttcca

SEQ ID NO: 71800 - DNA, 19 bp, Homo sapiens
  siRNA target sequence for ADRBK2 (NM_005160.2,1077-1095).
gcctgcgatttttccaaaa

SEQ ID NO: 71801 - DNA, 19 bp, Homo sapiens
  siRNA target sequence for ADRBK2 (NM_005160.2,1195-1213).
gctgcatgcttttcaaact

SEQ ID NO: 71802 - DNA, 19 bp, Homo sapiens
  siRNA target sequence for ADRBK2 (NM_005160.2,1229-1247).
ccctttcagacaacataaa

SEQ ID NO: 71803 - DNA, 19 bp, Homo sapiens
  siRNA target sequence for ADRBK2 (NM_005160.2,1230-1248).
cctttcagacaacataaaa

SEQ ID NO: 71804 - DNA, 19 bp, Homo sapiens
  siRNA target sequence for ADRBK2 (NM_005160.2,1387-1405).
gcggctcacaggaagtaaa

SEQ ID NO: 71805 - DNA, 19 bp, Homo sapiens
  siRNA target sequence for ADRBK2 (NM_005160.2,1388-1406).
cggctcacaggaagtaaaa

SEQ ID NO: 71806 - DNA, 19 bp, Homo sapiens
  siRNA target sequence for ADRBK2 (NM_005160.2,1433-1451).
ctggcagcatgtctactta

SEQ ID NO: 71807 - DNA, 19 bp, Homo sapiens
  siRNA target sequence for ADRBK2 (NM_005160.2,1440-1458).
catgtctacttacaaaagt

SEQ ID NO: 71808 - DNA, 19 bp, Homo sapiens
  siRNA target sequence for ADRBK2 (NM_005160.2,1457-1475).
gtacccaccacccttgatt

SEQ ID NO: 71809 - DNA, 19 bp, Homo sapiens
  siRNA target sequence for ADRBK2 (NM_005160.2,1508-1526).
ctttgatattggctcattt

SEQ ID NO: 71810 - DNA, 19 bp, Homo sapiens
  siRNA target sequence for ADRBK2 (NM_005160.2,1545-1563).
gggattaagctacttgatt

SEQ ID NO: 71811 - DNA, 19 bp, Homo sapiens
  siRNA target sequence for ADRBK2 (NM_005160.2,1564-1582).
gcgaccaagaactctacaa

SEQ ID NO: 71812 - DNA, 19 bp, Homo sapiens
  siRNA target sequence for ADRBK2 (NM_005160.2,1566-1584).
gaccaagaactctacaaga

SEQ ID NO: 71813 - DNA, 19 bp, Homo sapiens
  siRNA target sequence for ADRBK2 (NM_005160.2,1620-1638).
gaagtaacggaaacagttt

SEQ ID NO: 71814 - DNA, 19 bp, Homo sapiens
  siRNA target sequence for ADRBK2 (NM_005160.2,1647-1665).
gtaaatgcagacacagata

SEQ ID NO: 71815 - DNA, 19 bp, Homo sapiens
  siRNA target sequence for ADRBK2 (NM_005160.2,1723-1741).
ctctggggaaggactgtat

SEQ ID NO: 71816 - DNA, 19 bp, Homo sapiens
  siRNA target sequence for ADRBK2 (NM_005160.2,1729-1747).
ggaaggactgtattatgca

SEQ ID NO: 71817 - DNA, 19 bp, Homo sapiens
  siRNA target sequence for ADRBK2 (NM_005160.2,1787-1805).
gtggcagcgtcgctatttt

SEQ ID NO: 71818 - DNA, 19 bp, Homo sapiens
  siRNA target sequence for ADRBK2 (NM_005160.2,1789-1807).
ggcagcgtcgctattttta

SEQ ID NO: 71819 - DNA, 19 bp, Homo sapiens
  siRNA target sequence for ADRBK2 (NM_005160.2,1841-1859).
gggagagtcccggcaaaat

SEQ ID NO: 71820 - DNA, 19 bp, Homo sapiens
  siRNA target sequence for ADRBK2 (NM_005160.2,1843-1861).
gagagtcccggcaaaattt

SEQ ID NO: 71821 - DNA, 19 bp, Homo sapiens
  siRNA target sequence for ADRBK2 (NM_005160.2,1938-1956).
ggagggaaacaatttgtct

SEQ ID NO: 71822 - DNA, 19 bp, Homo sapiens
  siRNA target sequence for ADRBK2 (NM_005160.2,1979-1997).
gtttgtgcagtggaagaaa

SEQ ID NO: 71823 - DNA, 19 bp, Homo sapiens
  siRNA target sequence for ADRBK2 (NM_005160.2,2044-2062).
ccccgaagttcctcaacaa

SEQ ID NO: 71824 - DNA, 19 bp, Homo sapiens
  siRNA target sequence for AFG3L1 (NM_001132.1,474-492).
cctgggatgacgaggattt

SEQ ID NO: 71825 - DNA, 19 bp, Homo sapiens
  siRNA target sequence for AFG3L1 (NM_001132.1,571-589).
cacgtggaagcactttgta

SEQ ID NO: 71826 - DNA, 19 bp, Homo sapiens
  siRNA target sequence for AFG3L1 (NM_001132.1,573-591).
cgtggaagcactttgtaca

SEQ ID NO: 71827 - DNA, 19 bp, Homo sapiens
  siRNA target sequence for AFG3L1 (NM_001132.1,625-643).
ggaagtcgtgaacaaacaa

SEQ ID NO: 71828 - DNA, 19 bp, Homo sapiens
  siRNA target sequence for AFG3L1 (NM_001132.1,777-795).
ggtctgagttcctggaaat

SEQ ID NO: 71829 - DNA, 19 bp, Homo sapiens
  siRNA target sequence for AFG3L1 (NM_001132.1,894-912).
gcggcctggccggtttcat

SEQ ID NO: 71830 - DNA, 19 bp, Homo sapiens
  siRNA target sequence for AFG3L1 (NM_001132.1,904-922).
cggtttcatcgccagattt

SEQ ID NO: 71831 - DNA, 19 bp, Homo sapiens
  siRNA target sequence for AFG3L1 (NM_001132.1,924-942).
cactggtcccccttacatt

SEQ ID NO: 71832 - DNA, 19 bp, Homo sapiens
  siRNA target sequence for AFG3L1 (NM_001132.1,926-944).
ctggtcccccttacattaa

SEQ ID NO: 71833 - DNA, 19 bp, Homo sapiens
  siRNA target sequence for AFG3L1 (NM_001132.1,950-968).
ggtcctccatctttaaggt

SEQ ID NO: 71834 - DNA, 19 bp, Homo sapiens
  siRNA target sequence for AFURS1 (NM_024524.2,1829-1847).
gacaataatgccttgtgat

SEQ ID NO: 71835 - DNA, 19 bp, Homo sapiens
  siRNA target sequence for AFURS1 (NM_024524.2,1840-1858).
cttgtgatgctgtgcttat

SEQ ID NO: 71836 - DNA, 19 bp, Homo sapiens
  siRNA target sequence for AFURS1 (NM_024524.2,1864-1882).
gtacctgcattgtaaacga

SEQ ID NO: 71837 - DNA, 19 bp, Homo sapiens
  siRNA target sequence for AFURS1 (NM_024524.2,1875-1893).
gtaaacgaaagcatgttaa

SEQ ID NO: 71838 - DNA, 19 bp, Homo sapiens
  siRNA target sequence for AFURS1 (NM_024524.2,1905-1923).
gttccagtgacaaagacta

SEQ ID NO: 71839 - DNA, 19 bp, Homo sapiens
  siRNA target sequence for AFURS1 (NM_024524.2,1984-2002).
cacataaacgacatacttt

SEQ ID NO: 71840 - DNA, 19 bp, Homo sapiens
  siRNA target sequence for AFURS1 (NM_024524.2,2008-2026).
gtgggacaactgttattca

SEQ ID NO: 71841 - DNA, 19 bp, Homo sapiens
  siRNA target sequence for AFURS1 (NM_024524.2,2067-2085).
gttagaacaggatttagta

SEQ ID NO: 71842 - DNA, 19 bp, Homo sapiens
  siRNA target sequence for AFURS1 (NM_024524.2,2097-2115).
cagcttgttcgttccatat

SEQ ID NO: 71843 - DNA, 19 bp, Homo sapiens
  siRNA target sequence for AFURS1 (NM_024524.2,2100-2118).
cttgttcgttccatattgt

SEQ ID NO: 71844 - DNA, 19 bp, Homo sapiens
  siRNA target sequence for AFURS1 (NM_024524.2,2117-2135).
gtatcccaaaccaactgat

SEQ ID NO: 71845 - DNA, 19 bp, Homo sapiens
  siRNA target sequence for AFURS1 (NM_024524.2,2154-2172).
gcctacttgtttctactat

SEQ ID NO: 71846 - DNA, 19 bp, Homo sapiens
  siRNA target sequence for AFURS1 (NM_024524.2,2156-2174).
ctacttgtttctactatgt

SEQ ID NO: 71847 - DNA, 19 bp, Homo sapiens
  siRNA target sequence for AFURS1 (NM_024524.2,2188-2206).
ctggcattgggtttatcta

SEQ ID NO: 71848 - DNA, 19 bp, Homo sapiens
  siRNA target sequence for AFURS1 (NM_024524.2,2190-2208).
ggcattgggtttatctaca

SEQ ID NO: 71849 - DNA, 19 bp, Homo sapiens
  siRNA target sequence for AFURS1 (NM_024524.2,2259-2277).
gagtctcttgatattatca

SEQ ID NO: 71850 - DNA, 19 bp, Homo sapiens
  siRNA target sequence for AFURS1 (NM_024524.2,2312-2330).
gactgctggtattgtgtat

SEQ ID NO: 71851 - DNA, 19 bp, Homo sapiens
  siRNA target sequence for AFURS1 (NM_024524.2,2392-2410).
gtggacagctcaatcttgt

SEQ ID NO: 71852 - DNA, 19 bp, Homo sapiens
  siRNA target sequence for AFURS1 (NM_024524.2,2394-2412).
ggacagctcaatcttgttt

SEQ ID NO: 71853 - DNA, 19 bp, Homo sapiens
  siRNA target sequence for AFURS1 (NM_024524.2,2553-2571).
gctacttgtcattcactta

SEQ ID NO: 71854 - DNA, 19 bp, Homo sapiens
  siRNA target sequence for AFURS1 (NM_024524.2,2557-2575).
cttgtcattcacttacaaa

SEQ ID NO: 71855 - DNA, 19 bp, Homo sapiens
  siRNA target sequence for AFURS1 (NM_024524.2,2596-2614).
gtgatccacttgatctgaa

SEQ ID NO: 71856 - DNA, 19 bp, Homo sapiens
  siRNA target sequence for AFURS1 (NM_024524.2,2665-2683).
cagcacttcataatcgaat

SEQ ID NO: 71857 - DNA, 19 bp, Homo sapiens
  siRNA target sequence for AFURS1 (NM_024524.2,2668-2686).
cacttcataatcgaattat

SEQ ID NO: 71858 - DNA, 19 bp, Homo sapiens
  siRNA target sequence for AFURS1 (NM_024524.2,2696-2714).
ggttcgtcctcccaaacaa

SEQ ID NO: 71859 - DNA, 19 bp, Homo sapiens
  siRNA target sequence for AFURS1 (NM_024524.2,2773-2791).
ctacttatgagataggaat

SEQ ID NO: 71860 - DNA, 19 bp, Homo sapiens
  siRNA target sequence for AFURS1 (NM_024524.2,2796-2814).
cgccagttcccattttctt

SEQ ID NO: 71861 - DNA, 19 bp, Homo sapiens
  siRNA target sequence for AFURS1 (NM_024524.2,2812-2830).
cttctgctttgcaacgtat

SEQ ID NO: 71862 - DNA, 19 bp, Homo sapiens
  siRNA target sequence for AFURS1 (NM_024524.2,2925-2943).
gttcctgtcgattttcaaa

SEQ ID NO: 71863 - DNA, 19 bp, Homo sapiens
  siRNA target sequence for AFURS1 (NM_024524.2,2929-2947).
ctgtcgattttcaaaacgt

SEQ ID NO: 71864 - DNA, 19 bp, Homo sapiens
  siRNA target sequence for AFURS1 (NM_024524.2,2931-2949).
gtcgattttcaaaacgttt

SEQ ID NO: 71865 - DNA, 19 bp, Homo sapiens
  siRNA target sequence for AFURS1 (NM_024524.2,2996-3014).
cagaaaattggagtcaaaa

SEQ ID NO: 71866 - DNA, 19 bp, Homo sapiens
  siRNA target sequence for AFURS1 (NM_024524.2,3019-3037).
catggcataaagtacagaa

SEQ ID NO: 71867 - DNA, 19 bp, Homo sapiens
  siRNA target sequence for AFURS1 (NM_024524.2,3117-3135).
cctgcagtacttgaagatt

SEQ ID NO: 71868 - DNA, 19 bp, Homo sapiens
  siRNA target sequence for AFURS1 (NM_024524.2,3203-3221).
cagagattgtggaatgatt

SEQ ID NO: 71869 - DNA, 19 bp, Homo sapiens
  siRNA target sequence for AFURS1 (NM_024524.2,3205-3223).
gagattgtggaatgattct

SEQ ID NO: 71870 - DNA, 19 bp, Homo sapiens
  siRNA target sequence for AFURS1 (NM_024524.2,3222-3240).
ctacctcaggataaagtga

SEQ ID NO: 71871 - DNA, 19 bp, Homo sapiens
  siRNA target sequence for AFURS1 (NM_024524.2,3225-3243).
cctcaggataaagtgatta

SEQ ID NO: 71872 - DNA, 19 bp, Homo sapiens
  siRNA target sequence for AFURS1 (NM_024524.2,3230-3248).
ggataaagtgattattgct

SEQ ID NO: 71873 - DNA, 19 bp, Homo sapiens
  siRNA target sequence for AFURS1 (NM_024524.2,3239-3257).
gattattgctgaagcatta

SEQ ID NO: 71874 - DNA, 19 bp, Homo sapiens
  siRNA target sequence for AFURS1 (NM_024524.2,3281-3299).
caaaataaattggcattat

SEQ ID NO: 71875 - DNA, 19 bp, Homo sapiens
  siRNA target sequence for AFURS1 (NM_024524.2,3322-3340).
gtcatccatcagcaattga

SEQ ID NO: 71876 - DNA, 19 bp, Homo sapiens
  siRNA target sequence for AFURS1 (NM_024524.2,3345-3363).
gaggctattccggttaaat

SEQ ID NO: 71877 - DNA, 19 bp, Homo sapiens
  siRNA target sequence for AFURS1 (NM_024524.2,3349-3367).
ctattccggttaaattggt

SEQ ID NO: 71878 - DNA, 19 bp, Homo sapiens
  siRNA target sequence for AFURS1 (NM_024524.2,3357-3375).
gttaaattggtccatgata

SEQ ID NO: 71879 - DNA, 19 bp, Homo sapiens
  siRNA target sequence for AFURS1 (NM_024524.2,3390-3408).
caaatgactcgttatcatt

SEQ ID NO: 71880 - DNA, 19 bp, Homo sapiens
  siRNA target sequence for AFURS1 (NM_024524.2,3395-3413).
gactcgttatcattttgca

SEQ ID NO: 71881 - DNA, 19 bp, Homo sapiens
  siRNA target sequence for AFURS1 (NM_024524.2,3397-3415).
ctcgttatcattttgcaat

SEQ ID NO: 71882 - DNA, 19 bp, Homo sapiens
  siRNA target sequence for AFURS1 (NM_024524.2,3456-3474).
gaccttgttcctaagttga

SEQ ID NO: 71883 - DNA, 19 bp, Homo sapiens
  siRNA target sequence for AFURS1 (NM_024524.2,3520-3538).
cacagttgatagaagcatt

SEQ ID NO: 71884 - DNA, 19 bp, Homo sapiens
  siRNA target sequence for AFURS1 (NM_024524.2,3607-3625).
cacacggaggcatttcctt

SEQ ID NO: 71885 - DNA, 19 bp, Homo sapiens
  siRNA target sequence for AFURS1 (NM_024524.2,3609-3627).
cacggaggcatttccttat

SEQ ID NO: 71886 - DNA, 19 bp, Homo sapiens
  siRNA target sequence for AFURS1 (NM_024524.2,3661-3679).
cctctaagactcctagtat

SEQ ID NO: 71887 - DNA, 19 bp, Homo sapiens
  siRNA target sequence for AFURS1 (NM_024524.2,3662-3680).
ctctaagactcctagtatt

SEQ ID NO: 71888 - DNA, 19 bp, Homo sapiens
  siRNA target sequence for AFURS1 (NM_024524.2,3682-3700).
cctgtgtgccaaaccttat

SEQ ID NO: 71889 - DNA, 19 bp, Homo sapiens
  siRNA target sequence for AFURS1 (NM_024524.2,3704-3722).
ggaaggccgtgctgcttta

SEQ ID NO: 71890 - DNA, 19 bp, Homo sapiens
  siRNA target sequence for AFURS1 (NM_024524.2,3710-3728).
ccgtgctgctttaataact

SEQ ID NO: 71891 - DNA, 19 bp, Homo sapiens
  siRNA target sequence for AFURS1 (NM_024524.2,3711-3729).
cgtgctgctttaataactt

SEQ ID NO: 71892 - DNA, 19 bp, Homo sapiens
  siRNA target sequence for AK1 (NM_000476.1,314-332).
ggtggccaaagtcaatact

SEQ ID NO: 71893 - DNA, 19 bp, Homo sapiens
  siRNA target sequence for AK1 (NM_000476.1,315-333).
gtggccaaagtcaatactt

SEQ ID NO: 71894 - DNA, 19 bp, Homo sapiens
  siRNA target sequence for AK1 (NM_000476.1,449-467).
gacccagcggctcttgaaa

SEQ ID NO: 71895 - DNA, 19 bp, Homo sapiens
  siRNA target sequence for AK1 (NM_000476.1,519-537).
cggctggagacctattaca

SEQ ID NO: 71896 - DNA, 19 bp, Homo sapiens
  siRNA target sequence for AK1 (NM_000476.1,552-570).
gtcatcgccttctatgaga

SEQ ID NO: 71897 - DNA, 19 bp, Homo sapiens
  siRNA target sequence for AK2 (NM_001625.2,723-741).
ctccaaagccacatgtaaa

SEQ ID NO: 71898 - DNA, 19 bp, Homo sapiens
  siRNA target sequence for AK2 (NM_001625.2,725-743).
ccaaagccacatgtaaaga

SEQ ID NO: 71899 - DNA, 19 bp, Homo sapiens
  siRNA target sequence for AK2 (NM_001625.2,742-760).
gacttggttatgtttatct

SEQ ID NO: 71900 - DNA, 19 bp, Homo sapiens
  siRNA target sequence for AK2 (NM_172199.1,561-579).
ccgtcgatcagatatagga

SEQ ID NO: 71901 - DNA, 19 bp, Homo sapiens
  siRNA target sequence for AK2 (NM_172199.1,593-611).
gcttcctcaggctagcaaa

SEQ ID NO: 71902 - DNA, 19 bp, Homo sapiens
  siRNA target sequence for AK2 (NM_172199.1,598-616).
ctcaggctagcaaaaatat

SEQ ID NO: 71903 - DNA, 19 bp, Homo sapiens
  siRNA target sequence for AK2 (NM_172199.1,600-618).
caggctagcaaaaatatca

SEQ ID NO: 71904 - DNA, 19 bp, Homo sapiens
  siRNA target sequence for AK2 (NM_172199.1,602-620).
ggctagcaaaaatatcatt

SEQ ID NO: 71905 - DNA, 19 bp, Homo sapiens
  siRNA target sequence for AK3L1 (NM_016282.2,432-450).
caggcagaagccctagata

SEQ ID NO: 71906 - DNA, 19 bp, Homo sapiens
  siRNA target sequence for AK3L1 (NM_016282.2,434-452).
ggcagaagccctagataga

SEQ ID NO: 71907 - DNA, 19 bp, Homo sapiens
  siRNA target sequence for AK3L1 (NM_016282.2,442-460).
ccctagatagagcttatca

SEQ ID NO: 71908 - DNA, 19 bp, Homo sapiens
  siRNA target sequence for AK3L1 (NM_016282.2,444-462).
ctagatagagcttatcaga

SEQ ID NO: 71909 - DNA, 19 bp, Homo sapiens
  siRNA target sequence for AK3L1 (NM_016282.2,459-477).
cagatcgacacagtgatta

SEQ ID NO: 71910 - DNA, 19 bp, Homo sapiens
  siRNA target sequence for AK3L1 (NM_016282.2,469-487).
cagtgattaacctgaatgt

SEQ ID NO: 71911 - DNA, 19 bp, Homo sapiens
  siRNA target sequence for AK3L1 (NM_016282.2,488-506).
gccctttgaggtcattaaa

SEQ ID NO: 71912 - DNA, 19 bp, Homo sapiens
  siRNA target sequence for AK3L1 (NM_016282.2,536-554).
cgccagtggccgagtctat

SEQ ID NO: 71913 - DNA, 19 bp, Homo sapiens
  siRNA target sequence for AK3L1 (NM_016282.2,537-555).
gccagtggccgagtctata

SEQ ID NO: 71914 - DNA, 19 bp, Homo sapiens
  siRNA target sequence for AK3L1 (NM_016282.2,538-556).
ccagtggccgagtctataa

SEQ ID NO: 71915 - DNA, 19 bp, Homo sapiens
  siRNA target sequence for AK3L1 (NM_016282.2,541-559).
gtggccgagtctataacat

SEQ ID NO: 71916 - DNA, 19 bp, Homo sapiens
  siRNA target sequence for AK3L1 (NM_016282.2,546-564).
cgagtctataacattgaat

SEQ ID NO: 71917 - DNA, 19 bp, Homo sapiens
  siRNA target sequence for AK3L1 (NM_016282.2,549-567).
gtctataacattgaattca

SEQ ID NO: 71918 - DNA, 19 bp, Homo sapiens
  siRNA target sequence for AK3L1 (NM_016282.2,655-673).
gactaaaggcttatgaaga

SEQ ID NO: 71919 - DNA, 19 bp, Homo sapiens
  siRNA target sequence for AK3L1 (NM_016282.2,663-681).
gcttatgaagaccaaacaa

SEQ ID NO: 71920 - DNA, 19 bp, Homo sapiens
  siRNA target sequence for AK5 (NM_012093.2,1038-1056).
gcccgaagatccagtagaa

SEQ ID NO: 71921 - DNA, 19 bp, Homo sapiens
  siRNA target sequence for AK5 (NM_012093.2,1040-1058).
ccgaagatccagtagaata

SEQ ID NO: 71922 - DNA, 19 bp, Homo sapiens
  siRNA target sequence for AK5 (NM_012093.2,1059-1077).
cttggaaagttgtttacaa

SEQ ID NO: 71923 - DNA, 19 bp, Homo sapiens
  siRNA target sequence for AK5 (NM_012093.2,1107-1125).
ggtgaaatgggatacattt

SEQ ID NO: 71924 - DNA, 19 bp, Homo sapiens
  siRNA target sequence for AK5 (NM_012093.2,1170-1188).
gtcacggagatcctttcta

SEQ ID NO: 71925 - DNA, 19 bp, Homo sapiens
  siRNA target sequence for AK5 (NM_012093.2,1178-1196).
gatcctttctaagaaatgt

SEQ ID NO: 71926 - DNA, 19 bp, Homo sapiens
  siRNA target sequence for AK5 (NM_012093.2,1243-1261).
cctccaatccatcaattct

SEQ ID NO: 71927 - DNA, 19 bp, Homo sapiens
  siRNA target sequence for AK5 (NM_012093.2,1334-1352).
gacctcgaccaaaaatcat

SEQ ID NO: 71928 - DNA, 19 bp, Homo sapiens
  siRNA target sequence for AK5 (NM_012093.2,1384-1402).
ggtactcagagtttgaaaa

SEQ ID NO: 71929 - DNA, 19 bp, Homo sapiens
  siRNA target sequence for AK5 (NM_012093.2,1411-1429).
cgatatggattccaataca

SEQ ID NO: 71930 - DNA, 19 bp, Homo sapiens
  siRNA target sequence for AK5 (NM_012093.2,1412-1430).
gatatggattccaatacat

SEQ ID NO: 71931 - DNA, 19 bp, Homo sapiens
  siRNA target sequence for AK5 (NM_012093.2,1488-1506).
gagtcttattgccaagata

SEQ ID NO: 71932 - DNA, 19 bp, Homo sapiens
  siRNA target sequence for AK5 (NM_012093.2,1525-1543).
gccccacaggaaacaacaa

SEQ ID NO: 71933 - DNA, 19 bp, Homo sapiens
  siRNA target sequence for AK5 (NM_012093.2,1655-1673).
cccccgatttggtggtatt

SEQ ID NO: 71934 - DNA, 19 bp, Homo sapiens
  siRNA target sequence for AK5 (NM_012093.2,1658-1676).
ccgatttggtggtattcct

SEQ ID NO: 71935 - DNA, 19 bp, Homo sapiens
  siRNA target sequence for AK5 (NM_012093.2,1733-1751).
gccgaccagacgacaatgt

SEQ ID NO: 71936 - DNA, 19 bp, Homo sapiens
  siRNA target sequence for AK5 (NM_012093.2,1734-1752).
ccgaccagacgacaatgta

SEQ ID NO: 71937 - DNA, 19 bp, Homo sapiens
  siRNA target sequence for AK5 (NM_012093.2,1735-1753).
cgaccagacgacaatgtaa

SEQ ID NO: 71938 - DNA, 19 bp, Homo sapiens
  siRNA target sequence for AK5 (NM_012093.2,1741-1759).
gacgacaatgtaaaagcta

SEQ ID NO: 71939 - DNA, 19 bp, Homo sapiens
  siRNA target sequence for AK5 (NM_012093.2,1756-1774).
gctacccaaaggagactaa

SEQ ID NO: 71940 - DNA, 19 bp, Homo sapiens
  siRNA target sequence for AK5 (NM_012093.2,1757-1775).
ctacccaaaggagactaat

SEQ ID NO: 71941 - DNA, 19 bp, Homo sapiens
  siRNA target sequence for AK5 (NM_012093.2,1762-1780).
caaaggagactaatgaact

SEQ ID NO: 71942 - DNA, 19 bp, Homo sapiens
  siRNA target sequence for AK5 (NM_012093.2,1766-1784).
ggagactaatgaacttcaa

SEQ ID NO: 71943 - DNA, 19 bp, Homo sapiens
  siRNA target sequence for AK5 (NM_012093.2,1788-1806).
gaatgctgctccattggtt

SEQ ID NO: 71944 - DNA, 19 bp, Homo sapiens
  siRNA target sequence for AK5 (NM_012093.2,1793-1811).
ctgctccattggttaaata

SEQ ID NO: 71945 - DNA, 19 bp, Homo sapiens
  siRNA target sequence for AK5 (NM_012093.2,1796-1814).
ctccattggttaaatactt

SEQ ID NO: 71946 - DNA, 19 bp, Homo sapiens
  siRNA target sequence for AK5 (NM_012093.2,1819-1837).
gaaaaggggctcatcatga

SEQ ID NO: 71947 - DNA, 19 bp, Homo sapiens
  siRNA target sequence for AK5 (NM_012093.2,1824-1842).
ggggctcatcatgacattt

SEQ ID NO: 71948 - DNA, 19 bp, Homo sapiens
  siRNA target sequence for AK5 (NM_012093.2,1941-1959).
ccttgatccttcgatgata

SEQ ID NO: 71949 - DNA, 19 bp, Homo sapiens
  siRNA target sequence for AK5 (NM_012093.2,1942-1960).
cttgatccttcgatgatat

SEQ ID NO: 71950 - DNA, 19 bp, Homo sapiens
  siRNA target sequence for AK5 (NM_012093.2,2005-2023).
cagggtgatgaccagttaa

SEQ ID NO: 71951 - DNA, 19 bp, Homo sapiens
  siRNA target sequence for AK5 (NM_012093.2,2007-2025).
gggtgatgaccagttaaat

SEQ ID NO: 71952 - DNA, 19 bp, Homo sapiens
  siRNA target sequence for AK5 (NM_012093.2,2009-2027).
gtgatgaccagttaaatgt

SEQ ID NO: 71953 - DNA, 19 bp, Homo sapiens
  siRNA target sequence for AK5 (NM_012093.2,2058-2076).
ggaagatttgagaaagtgt

SEQ ID NO: 71954 - DNA, 19 bp, Homo sapiens
  siRNA target sequence for AK5 (NM_012093.2,2535-2553).
cgcctactacgagacaaaa

SEQ ID NO: 71955 - DNA, 19 bp, Homo sapiens
  siRNA target sequence for AK5 (NM_012093.2,2536-2554).
gcctactacgagacaaaaa

SEQ ID NO: 71956 - DNA, 19 bp, Homo sapiens
  siRNA target sequence for AK5 (NM_012093.2,2582-2600).
gaacaccagaggacgtttt

SEQ ID NO: 71957 - DNA, 19 bp, Homo sapiens
  siRNA target sequence for AK5 (NM_012093.2,2588-2606).
cagaggacgtttttcttca

SEQ ID NO: 71958 - DNA, 19 bp, Homo sapiens
  siRNA target sequence for AK5 (NM_012093.2,2608-2626).
ctctgcacagctattgact

SEQ ID NO: 71959 - DNA, 19 bp, Homo sapiens
  siRNA target sequence for AK5 (NM_012093.2,2612-2630).
gcacagctattgactctat

SEQ ID NO: 71960 - DNA, 19 bp, Homo sapiens
  siRNA target sequence for AK5 (NM_012093.2,2613-2631).
cacagctattgactctatt

SEQ ID NO: 71961 - DNA, 19 bp, Homo sapiens
  siRNA target sequence for AKT1 (NM_005163.1,241-259).
cgaggggagtacatcaaga

SEQ ID NO: 71962 - DNA, 19 bp, Homo sapiens
  siRNA target sequence for AKT1 (NM_005163.1,951-969).
cttctatggcgctgagatt

SEQ ID NO: 71963 - DNA, 19 bp, Homo sapiens
  siRNA target sequence for AKT1 (NM_005163.1,1404-1422).
catgcagcatcgcttcttt

SEQ ID NO: 71964 - DNA, 19 bp, Homo sapiens
  siRNA target sequence for AKT2 (NM_001626.2,240-258).
cacaagcgtggtgaataca

SEQ ID NO: 71965 - DNA, 19 bp, Homo sapiens
  siRNA target sequence for AKT2 (NM_001626.2,246-264).
cgtggtgaatacatcaaga

SEQ ID NO: 71966 - DNA, 19 bp, Homo sapiens
  siRNA target sequence for AKT2 (NM_001626.2,293-311).
gagcgacggctccttcatt

SEQ ID NO: 71967 - DNA, 19 bp, Homo sapiens
  siRNA target sequence for AKT2 (NM_001626.2,346-364).
ctctaccccccttaaacaa

SEQ ID NO: 71968 - DNA, 19 bp, Homo sapiens
  siRNA target sequence for AKT2 (NM_001626.2,348-366).
ctaccccccttaaacaact

SEQ ID NO: 71969 - DNA, 19 bp, Homo sapiens
  siRNA target sequence for AKT2 (NM_001626.2,408-426).
cgacccaacacctttgtca

SEQ ID NO: 71970 - DNA, 19 bp, Homo sapiens
  siRNA target sequence for AKT2 (NM_001626.2,409-427).
gacccaacacctttgtcat

SEQ ID NO: 71971 - DNA, 19 bp, Homo sapiens
  siRNA target sequence for AKT2 (NM_001626.2,555-573).
gaccccatggactacaagt

SEQ ID NO: 71972 - DNA, 19 bp, Homo sapiens
  siRNA target sequence for AKT2 (NM_001626.2,625-643).
gcaaggcacgggctaaagt

SEQ ID NO: 71973 - DNA, 19 bp, Homo sapiens
  siRNA target sequence for AKT2 (NM_001626.2,637-655).
ctaaagtgaccatgaatga

SEQ ID NO: 71974 - DNA, 19 bp, Homo sapiens
  siRNA target sequence for AKT2 (NM_001626.2,836-854).
cctcactgcgctgaagtat

SEQ ID NO: 71975 - DNA, 19 bp, Homo sapiens
  siRNA target sequence for AKT2 (NM_001626.2,1344-1362).
cttgctgggctgcttaaga

SEQ ID NO: 71976 - DNA, 19 bp, Homo sapiens
  siRNA target sequence for AKT3 (NM_005465.3,87-105).
cgatgttaccattgtgaaa

SEQ ID NO: 71977 - DNA, 19 bp, Homo sapiens
  siRNA target sequence for AKT3 (NM_005465.3,175-193).
gatggctcattcataggat

SEQ ID NO: 71978 - DNA, 19 bp, Homo sapiens
  siRNA target sequence for AKT3 (NM_005465.3,178-196).
ggctcattcataggatata

SEQ ID NO: 71979 - DNA, 19 bp, Homo sapiens
  siRNA target sequence for AKT3 (NM_005465.3,179-197).
gctcattcataggatataa

SEQ ID NO: 71980 - DNA, 19 bp, Homo sapiens
  siRNA target sequence for AKT3 (NM_005465.3,223-241).
ccttatcccctcaacaact

SEQ ID NO: 71981 - DNA, 19 bp, Homo sapiens
  siRNA target sequence for AKT3 (NM_005465.3,312-330).
ccagtggactactgttata

SEQ ID NO: 71982 - DNA, 19 bp, Homo sapiens
  siRNA target sequence for AKT3 (NM_005465.3,437-455).
gtagtccaacttcacaaat

SEQ ID NO: 71983 - DNA, 19 bp, Homo sapiens
  siRNA target sequence for AKT3 (NM_005465.3,440-458).
gtccaacttcacaaattga

SEQ ID NO: 71984 - DNA, 19 bp, Homo sapiens
  siRNA target sequence for AKT3 (NM_005465.3,446-464).
cttcacaaattgataatat

SEQ ID NO: 71985 - DNA, 19 bp, Homo sapiens
  siRNA target sequence for AKT3 (NM_005465.3,485-503).
cctctacaacccatcataa

SEQ ID NO: 71986 - DNA, 19 bp, Homo sapiens
  siRNA target sequence for AKT3 (NM_005465.3,486-504).
ctctacaacccatcataaa

SEQ ID NO: 71987 - DNA, 19 bp, Homo sapiens
  siRNA target sequence for AKT3 (NM_005465.3,651-669).
ggcacacactctaactgaa

SEQ ID NO: 71988 - DNA, 19 bp, Homo sapiens
  siRNA target sequence for AKT3 (NM_005465.3,652-670).
gcacacactctaactgaaa

SEQ ID NO: 71989 - DNA, 19 bp, Homo sapiens
  siRNA target sequence for AKT3 (NM_005465.3,736-754).
gaccgtttgtgttttgtga

SEQ ID NO: 71990 - DNA, 19 bp, Homo sapiens
  siRNA target sequence for AKT3 (NM_005465.3,772-790).
ggcgagctgtttttccatt

SEQ ID NO: 71991 - DNA, 19 bp, Homo sapiens
  siRNA target sequence for AKT3 (NM_005465.3,773-791).
gcgagctgtttttccattt

SEQ ID NO: 71992 - DNA, 19 bp, Homo sapiens
  siRNA target sequence for AKT3 (NM_005465.3,816-834).
ggaccgcacacgtttctat

SEQ ID NO: 71993 - DNA, 19 bp, Homo sapiens
  siRNA target sequence for AKT3 (NM_005465.3,849-867).
ctctgccttggactatcta

SEQ ID NO: 71994 - DNA, 19 bp, Homo sapiens
  siRNA target sequence for AKT3 (NM_005465.3,851-869).
ctgccttggactatctaca

SEQ ID NO: 71995 - DNA, 19 bp, Homo sapiens
  siRNA target sequence for AKT3 (NM_005465.3,853-871).
gccttggactatctacatt

SEQ ID NO: 71996 - DNA, 19 bp, Homo sapiens
  siRNA target sequence for AKT3 (NM_005465.3,930-948).
ccacataaaaattacagat

SEQ ID NO: 71997 - DNA, 19 bp, Homo sapiens
  siRNA target sequence for AKT3 (NM_005465.3,1073-1091).
gcctaggggttgtcatgta

SEQ ID NO: 71998 - DNA, 19 bp, Homo sapiens
  siRNA target sequence for AKT3 (NM_005465.3,1074-1092).
cctaggggttgtcatgtat

SEQ ID NO: 71999 - DNA, 19 bp, Homo sapiens
  siRNA target sequence for AKT3 (NM_005465.3,1081-1099).
gttgtcatgtatgaaatga

SEQ ID NO: 72000 - DNA, 19 bp, Homo sapiens
  siRNA target sequence for AKT3 (NM_005465.3,1103-1121).
gtgggaggttacctttcta

SEQ ID NO: 72001 - DNA, 19 bp, Homo sapiens
  siRNA target sequence for AKT3 (NM_005465.3,1106-1124).
ggaggttacctttctacaa

SEQ ID NO: 72002 - DNA, 19 bp, Homo sapiens
  siRNA target sequence for AKT3 (NM_005465.3,1210-1228).
ctttcagggctcttgataa

SEQ ID NO: 72003 - DNA, 19 bp, Homo sapiens
  siRNA target sequence for AKT3 (NM_005465.3,1221-1239).
cttgataaaggatccaaat

SEQ ID NO: 72004 - DNA, 19 bp, Homo sapiens
  siRNA target sequence for AKT3 (NM_005465.3,1301-1319).
gagtaaactggcaagatgt

SEQ ID NO: 72005 - DNA, 19 bp, Homo sapiens
  siRNA target sequence for AKT3 (NM_005465.3,1308-1326).
ctggcaagatgtatatgat

SEQ ID NO: 72006 - DNA, 19 bp, Homo sapiens
  siRNA target sequence for AKT3 (NM_005465.3,1332-1350).
gcttgtacctccttttaaa

SEQ ID NO: 72007 - DNA, 19 bp, Homo sapiens
  siRNA target sequence for AKT3 (NM_005465.3,1364-1382).
ctgagacagatactagata

SEQ ID NO: 72008 - DNA, 19 bp, Homo sapiens
  siRNA target sequence for AKT3 (NM_005465.3,1370-1388).
cagatactagatattttga

SEQ ID NO: 72009 - DNA, 19 bp, Homo sapiens
  siRNA target sequence for AKT3 (NM_005465.3,1477-1495).
ccgcatttccctcaatttt

SEQ ID NO: 72010 - DNA, 19 bp, Homo sapiens
  siRNA target sequence for ALS2CR2 (NM_018571.4,378-396).
gattgcttctgcacttcaa

SEQ ID NO: 72011 - DNA, 19 bp, Homo sapiens
  siRNA target sequence for ALS2CR2 (NM_018571.4,383-401).
cttctgcacttcaagaaca

SEQ ID NO: 72012 - DNA, 19 bp, Homo sapiens
  siRNA target sequence for ALS2CR2 (NM_018571.4,389-407).
cacttcaagaacacaagtt

SEQ ID NO: 72013 - DNA, 19 bp, Homo sapiens
  siRNA target sequence for ALS2CR2 (NM_018571.4,391-409).
cttcaagaacacaagttga

SEQ ID NO: 72014 - DNA, 19 bp, Homo sapiens
  siRNA target sequence for ALS2CR2 (NM_018571.4,397-415).
gaacacaagttgaatcact

SEQ ID NO: 72015 - DNA, 19 bp, Homo sapiens
  siRNA target sequence for ALS2CR2 (NM_018571.4,610-628).
caggaacactggtaactat

SEQ ID NO: 72016 - DNA, 19 bp, Homo sapiens
  siRNA target sequence for ALS2CR2 (NM_018571.4,881-899).
gaactatctgcaccaaaat

SEQ ID NO: 72017 - DNA, 19 bp, Homo sapiens
  siRNA target sequence for ALS2CR2 (NM_018571.4,890-908).
gcaccaaaatggctgtatt

SEQ ID NO: 72018 - DNA, 19 bp, Homo sapiens
  siRNA target sequence for ALS2CR2 (NM_018571.4,1206-1224).
ctgaaaggtcctccttata

SEQ ID NO: 72019 - DNA, 19 bp, Homo sapiens
  siRNA target sequence for ALS2CR2 (NM_018571.4,1218-1236).
ccttatagcccattggata

SEQ ID NO: 72020 - DNA, 19 bp, Homo sapiens
  siRNA target sequence for ALS2CR2 (NM_018571.4,1219-1237).
cttatagcccattggatat

SEQ ID NO: 72021 - DNA, 19 bp, Homo sapiens
  siRNA target sequence for ALS2CR2 (NM_018571.4,1225-1243).
gcccattggatatcagtat

SEQ ID NO: 72022 - DNA, 19 bp, Homo sapiens
  siRNA target sequence for ALS2CR2 (NM_018571.4,1360-1378).
caccatcctcaaaaacttt

SEQ ID NO: 72023 - DNA, 19 bp, Homo sapiens
  siRNA target sequence for ALS2CR7 (NM_139158.1,242-260).
ggggcagcctcatcttact

SEQ ID NO: 72024 - DNA, 19 bp, Homo sapiens
  siRNA target sequence for ALS2CR7 (NM_139158.1,243-261).
gggcagcctcatcttactt

SEQ ID NO: 72025 - DNA, 19 bp, Homo sapiens
  siRNA target sequence for ALS2CR7 (NM_139158.1,284-302).
ggctcttatgcgacagttt

SEQ ID NO: 72026 - DNA, 19 bp, Homo sapiens
  siRNA target sequence for ALS2CR7 (NM_139158.1,299-317).
gtttacaaggggattagca

SEQ ID NO: 72027 - DNA, 19 bp, Homo sapiens
  siRNA target sequence for ALS2CR7 (NM_139158.1,304-322).
caaggggattagcagaata

SEQ ID NO: 72028 - DNA, 19 bp, Homo sapiens
  siRNA target sequence for ALS2CR7 (NM_139158.1,307-325).
ggggattagcagaataaat

SEQ ID NO: 72029 - DNA, 19 bp, Homo sapiens
  siRNA target sequence for ALS2CR7 (NM_139158.1,327-345).
gacaactagtggctttaaa

SEQ ID NO: 72030 - DNA, 19 bp, Homo sapiens
  siRNA target sequence for ALS2CR7 (NM_139158.1,365-383).
gaggaaggagtcccattta

SEQ ID NO: 72031 - DNA, 19 bp, Homo sapiens
  siRNA target sequence for ALS2CR7 (NM_139158.1,367-385).
ggaaggagtcccatttaca

SEQ ID NO: 72032 - DNA, 19 bp, Homo sapiens
  siRNA target sequence for ALS2CR7 (NM_139158.1,406-424).
cctgaagggtttgaaacat

SEQ ID NO: 72033 - DNA, 19 bp, Homo sapiens
  siRNA target sequence for ALS2CR7 (NM_139158.1,434-452).
gtgctcctgcatgacataa

SEQ ID NO: 72034 - DNA, 19 bp, Homo sapiens
  siRNA target sequence for ALS2CR7 (NM_139158.1,466-484).
gacactgacattcgttttt

SEQ ID NO: 72035 - DNA, 19 bp, Homo sapiens
  siRNA target sequence for ALS2CR7 (NM_139158.1,468-486).
cactgacattcgtttttga

SEQ ID NO: 72036 - DNA, 19 bp, Homo sapiens
  siRNA target sequence for ALS2CR7 (NM_139158.1,555-573).
gacttttcatgtttcaact

SEQ ID NO: 72037 - DNA, 19 bp, Homo sapiens
  siRNA target sequence for ALS2CR7 (NM_139158.1,699-717).
ccattcccagccagacata

SEQ ID NO: 72038 - DNA, 19 bp, Homo sapiens
  siRNA target sequence for ALS2CR7 (NM_139158.1,704-722).
cccagccagacatactctt

SEQ ID NO: 72039 - DNA, 19 bp, Homo sapiens
  siRNA target sequence for ALS2CR7 (NM_139158.1,804-822).
gtgcaggctgcatctttat

SEQ ID NO: 72040 - DNA, 19 bp, Homo sapiens
  siRNA target sequence for ALS2CR7 (NM_139158.1,905-923).
gtccctacagaggatactt

SEQ ID NO: 72041 - DNA, 19 bp, Homo sapiens
  siRNA target sequence for ALS2CR7 (NM_139158.1,930-948).
gagtctccaagctacctaa

SEQ ID NO: 72042 - DNA, 19 bp, Homo sapiens
  siRNA target sequence for ALS2CR7 (NM_139158.1,936-954).
ccaagctacctaactacaa

SEQ ID NO: 72043 - DNA, 19 bp, Homo sapiens
  siRNA target sequence for ALS2CR7 (NM_139158.1,937-955).
caagctacctaactacaat

SEQ ID NO: 72044 - DNA, 19 bp, Homo sapiens
  siRNA target sequence for ALS2CR7 (NM_139158.1,978-996).
cgcctcgaagccttcatgt

SEQ ID NO: 72045 - DNA, 19 bp, Homo sapiens
  siRNA target sequence for ALS2CR7 (NM_139158.1,979-997).
gcctcgaagccttcatgtt

SEQ ID NO: 72046 - DNA, 19 bp, Homo sapiens
  siRNA target sequence for ALS2CR7 (NM_139158.1,1091-1109).
gcacttgttcatgattatt

SEQ ID NO: 72047 - DNA, 19 bp, Homo sapiens
  siRNA target sequence for ALS2CR7 (NM_139158.1,1150-1168).
ggagtctttgtttacagtt

SEQ ID NO: 72048 - DNA, 19 bp, Homo sapiens
  siRNA target sequence for AMHR2 (NM_020547.1,93-111).
ggggctttgggcattactt

SEQ ID NO: 72049 - DNA, 19 bp, Homo sapiens
  siRNA target sequence for AMHR2 (NM_020547.1,140-158).
ggcgaacctgtgtgttctt

SEQ ID NO: 72050 - DNA, 19 bp, Homo sapiens
  siRNA target sequence for AMHR2 (NM_020547.1,141-159).
gcgaacctgtgtgttcttt

SEQ ID NO: 72051 - DNA, 19 bp, Homo sapiens
  siRNA target sequence for AMHR2 (NM_020547.1,143-161).
gaacctgtgtgttctttga

SEQ ID NO: 72052 - DNA, 19 bp, Homo sapiens
  siRNA target sequence for AMHR2 (NM_020547.1,172-190).
gtgcggggaagcacaaaga

SEQ ID NO: 72053 - DNA, 19 bp, Homo sapiens
  siRNA target sequence for AMHR2 (NM_020547.1,174-192).
gcggggaagcacaaagaca

SEQ ID NO: 72054 - DNA, 19 bp, Homo sapiens
  siRNA target sequence for AMHR2 (NM_020547.1,583-601).
ctgctacagcgaaagaact

SEQ ID NO: 72055 - DNA, 19 bp, Homo sapiens
  siRNA target sequence for AMHR2 (NM_020547.1,586-604).
ctacagcgaaagaactaca

SEQ ID NO: 72056 - DNA, 19 bp, Homo sapiens
  siRNA target sequence for AMHR2 (NM_020547.1,676-694).
ctgcctgagctgtgtttct

SEQ ID NO: 72057 - DNA, 19 bp, Homo sapiens
  siRNA target sequence for AMHR2 (NM_020547.1,844-862).
cacattgtccgatttatca

SEQ ID NO: 72058 - DNA, 19 bp, Homo sapiens
  siRNA target sequence for AMHR2 (NM_020547.1,846-864).
cattgtccgatttatcact

SEQ ID NO: 72059 - DNA, 19 bp, Homo sapiens
  siRNA target sequence for AMHR2 (NM_020547.1,932-950).
gctccctgtgccactactt

SEQ ID NO: 72060 - DNA, 19 bp, Homo sapiens
  siRNA target sequence for AMHR2 (NM_020547.1,1037-1055).
ggcagaatggccaatataa

SEQ ID NO: 72061 - DNA, 19 bp, Homo sapiens
  siRNA target sequence for AMHR2 (NM_020547.1,1038-1056).
gcagaatggccaatataaa

SEQ ID NO: 72062 - DNA, 19 bp, Homo sapiens
  siRNA target sequence for AMHR2 (NM_020547.1,1041-1059).
gaatggccaatataaacca

SEQ ID NO: 72063 - DNA, 19 bp, Homo sapiens
  siRNA target sequence for AMHR2 (NM_020547.1,1289-1307).
ccctccgacgagctgatat

SEQ ID NO: 72064 - DNA, 19 bp, Homo sapiens
  siRNA target sequence for AMHR2 (NM_020547.1,1290-1308).
cctccgacgagctgatatt

SEQ ID NO: 72065 - DNA, 19 bp, Homo sapiens
  siRNA target sequence for AMHR2 (NM_020547.1,1291-1309).
ctccgacgagctgatattt

SEQ ID NO: 72066 - DNA, 19 bp, Homo sapiens
  siRNA target sequence for AMHR2 (NM_020547.1,1294-1312).
cgacgagctgatatttact

SEQ ID NO: 72067 - DNA, 19 bp, Homo sapiens
  siRNA target sequence for ANKK1 (NM_178510.1,377-395).
ggtattgtgatggagttta

SEQ ID NO: 72068 - DNA, 19 bp, Homo sapiens
  siRNA target sequence for ANKK1 (NM_178510.1,559-577).
caacatgcatgtcaaaatt

SEQ ID NO: 72069 - DNA, 19 bp, Homo sapiens
  siRNA target sequence for ANKK1 (NM_178510.1,562-580).
catgcatgtcaaaatttca

SEQ ID NO: 72070 - DNA, 19 bp, Homo sapiens
  siRNA target sequence for ANKK1 (NM_178510.1,694-712).
caaggccccaggacctaaa

SEQ ID NO: 72071 - DNA, 19 bp, Homo sapiens
  siRNA target sequence for ANKK1 (NM_178510.1,768-786).
catactcagggttcaacat

SEQ ID NO: 72072 - DNA, 19 bp, Homo sapiens
  siRNA target sequence for ANKK1 (NM_178510.1,918-936).
ggccatgctttctagacat

SEQ ID NO: 72073 - DNA, 19 bp, Homo sapiens
  siRNA target sequence for ANKK1 (NM_178510.1,920-938).
ccatgctttctagacatta

SEQ ID NO: 72074 - DNA, 19 bp, Homo sapiens
  siRNA target sequence for ANKK1 (NM_178510.1,1120-1138).
gctctccgaccgtaagaat

SEQ ID NO: 72075 - DNA, 19 bp, Homo sapiens
  siRNA target sequence for ANKK1 (NM_178510.1,1121-1139).
ctctccgaccgtaagaatt

SEQ ID NO: 72076 - DNA, 19 bp, Homo sapiens
  siRNA target sequence for ANKK1 (NM_178510.1,1125-1143).
ccgaccgtaagaatttggt

SEQ ID NO: 72077 - DNA, 19 bp, Homo sapiens
  siRNA target sequence for ANKK1 (NM_178510.1,1493-1511).
ctggctgcacagaataact

SEQ ID NO: 72078 - DNA, 19 bp, Homo sapiens
  siRNA target sequence for ANKK1 (NM_178510.1,1499-1517).
gcacagaataactttgaga

SEQ ID NO: 72079 - DNA, 19 bp, Homo sapiens
  siRNA target sequence for ANKK1 (NM_178510.1,1598-1616).
gcctactttggccatgtta

SEQ ID NO: 72080 - DNA, 19 bp, Homo sapiens
  siRNA target sequence for ANKK1 (NM_178510.1,1932-1950).
cagagagccacgcaaacat

SEQ ID NO: 72081 - DNA, 19 bp, Homo sapiens
  siRNA target sequence for ANKK1 (NM_178510.1,2119-2137).
catcaacctcctagaacat

SEQ ID NO: 72082 - DNA, 19 bp, Homo sapiens
  siRNA target sequence for ANKK1 (NM_178510.1,2300-2318).
cgaaagcagggcatcatgt

SEQ ID NO: 72083 - DNA, 19 bp, Homo sapiens
  siRNA target sequence for ANKK1 (NM_178510.1,2370-2388).
caggagccgagatggaaat

SEQ ID NO: 72084 - DNA, 19 bp, Homo sapiens
  siRNA target sequence for ANKK1 (NM_178510.1,2372-2390).
ggagccgagatggaaattt

SEQ ID NO: 72085 - DNA, 19 bp, Homo sapiens
  siRNA target sequence for ANKRD3 (NM_020639.1,234-252).
gcgcatggagcttttggaa

SEQ ID NO: 72086 - DNA, 19 bp, Homo sapiens
  siRNA target sequence for ANKRD3 (NM_020639.1,508-526).
cactaccacgtcaagattt

SEQ ID NO: 72087 - DNA, 19 bp, Homo sapiens
  siRNA target sequence for ANKRD3 (NM_020639.1,513-531).
ccacgtcaagatttctgat

SEQ ID NO: 72088 - DNA, 19 bp, Homo sapiens
  siRNA target sequence for ANKRD3 (NM_020639.1,896-914).
ccgaggacctgtgtgaaaa

SEQ ID NO: 72089 - DNA, 19 bp, Homo sapiens
  siRNA target sequence for ANKRD3 (NM_020639.1,943-961).
catgatctggacgtgaaaa

SEQ ID NO: 72090 - DNA, 19 bp, Homo sapiens
  siRNA target sequence for ANKRD3 (NM_020639.1,1013-1031).
ctgcccccaccttcgataa

SEQ ID NO: 72091 - DNA, 19 bp, Homo sapiens
  siRNA target sequence for ANKRD3 (NM_020639.1,1413-1431).
gtggctgctgctcaacaat

SEQ ID NO: 72092 - DNA, 19 bp, Homo sapiens
  siRNA target sequence for APAF1 (NM_001160.2,581-599).
gatgcaaaagctcgaaatt

SEQ ID NO: 72093 - DNA, 19 bp, Homo sapiens
  siRNA target sequence for APAF1 (NM_001160.2,584-602).
gcaaaagctcgaaattgtt

SEQ ID NO: 72094 - DNA, 19 bp, Homo sapiens
  siRNA target sequence for APAF1 (NM_001160.2,585-603).
caaaagctcgaaattgttt

SEQ ID NO: 72095 - DNA, 19 bp, Homo sapiens
  siRNA target sequence for APAF1 (NM_001160.2,652-670).
catggatcacatgattagt

SEQ ID NO: 72096 - DNA, 19 bp, Homo sapiens
  siRNA target sequence for APAF1 (NM_001160.2,732-750).
gagcagctatgctgattaa

SEQ ID NO: 72097 - DNA, 19 bp, Homo sapiens
  siRNA target sequence for APAF1 (NM_001160.2,734-752).
gcagctatgctgattaaaa

SEQ ID NO: 72098 - DNA, 19 bp, Homo sapiens
  siRNA target sequence for APAF1 (NM_001160.2,735-753).
cagctatgctgattaaaat

SEQ ID NO: 72099 - DNA, 19 bp, Homo sapiens
  siRNA target sequence for APAF1 (NM_001160.2,742-760).
gctgattaaaatgatactt

SEQ ID NO: 72100 - DNA, 19 bp, Homo sapiens
  siRNA target sequence for APAF1 (NM_001160.2,743-761).
ctgattaaaatgatactta

SEQ ID NO: 72101 - DNA, 19 bp, Homo sapiens
  siRNA target sequence for APAF1 (NM_001160.2,767-785).
gataatgattcctacgtat

SEQ ID NO: 72102 - DNA, 19 bp, Homo sapiens
  siRNA target sequence for APAF1 (NM_001160.2,773-791).
gattcctacgtatcattct

SEQ ID NO: 72103 - DNA, 19 bp, Homo sapiens
  siRNA target sequence for APAF1 (NM_001160.2,777-795).
cctacgtatcattctacaa

SEQ ID NO: 72104 - DNA, 19 bp, Homo sapiens
  siRNA target sequence for APAF1 (NM_001160.2,778-796).
ctacgtatcattctacaat

SEQ ID NO: 72105 - DNA, 19 bp, Homo sapiens
  siRNA target sequence for APAF1 (NM_001160.2,800-818).
ctactacatgaaggatata

SEQ ID NO: 72106 - DNA, 19 bp, Homo sapiens
  siRNA target sequence for APAF1 (NM_001160.2,990-1008).
gggtcaccatacatggaat

SEQ ID NO: 72107 - DNA, 19 bp, Homo sapiens
  siRNA target sequence for APAF1 (NM_001160.2,1103-1121).
gttgggaaacaagacaaat

SEQ ID NO: 72108 - DNA, 19 bp, Homo sapiens
  siRNA target sequence for APAF1 (NM_001160.2,1184-1202).
cagaggcttccacttaata

SEQ ID NO: 72109 - DNA, 19 bp, Homo sapiens
  siRNA target sequence for APAF1 (NM_001160.2,1186-1204).
gaggcttccacttaatatt

SEQ ID NO: 72110 - DNA, 19 bp, Homo sapiens
  siRNA target sequence for APAF1 (NM_001160.2,1188-1206).
ggcttccacttaatattga

SEQ ID NO: 72111 - DNA, 19 bp, Homo sapiens
  siRNA target sequence for APAF1 (NM_001160.2,1217-1235).
gaccgtctccgcattctga

SEQ ID NO: 72112 - DNA, 19 bp, Homo sapiens
  siRNA target sequence for APAF1 (NM_001160.2,1311-1329).
gtcagtgtcagattcttct

SEQ ID NO: 72113 - DNA, 19 bp, Homo sapiens
  siRNA target sequence for APAF1 (NM_001160.2,1336-1354).
cagagacaagagtgttaca

SEQ ID NO: 72114 - DNA, 19 bp, Homo sapiens
  siRNA target sequence for APAF1 (NM_001160.2,1345-1363).
gagtgttacagattcagta

SEQ ID NO: 72115 - DNA, 19 bp, Homo sapiens
  siRNA target sequence for APAF1 (NM_001160.2,1347-1365).
gtgttacagattcagtaat

SEQ ID NO: 72116 - DNA, 19 bp, Homo sapiens
  siRNA target sequence for APAF1 (NM_001160.2,1359-1377).
cagtaatgggtcctaaata

SEQ ID NO: 72117 - DNA, 19 bp, Homo sapiens
  siRNA target sequence for APAF1 (NM_001160.2,1473-1491).
ctcatagtattataaaaga

SEQ ID NO: 72118 - DNA, 19 bp, Homo sapiens
  siRNA target sequence for APAF1 (NM_001160.2,1506-1524).
cccttgtagtatctttaat

SEQ ID NO: 72119 - DNA, 19 bp, Homo sapiens
  siRNA target sequence for APAF1 (NM_001160.2,1507-1525).
ccttgtagtatctttaatt

SEQ ID NO: 72120 - DNA, 19 bp, Homo sapiens
  siRNA target sequence for APAF1 (NM_001160.2,1527-1545).
gtgcacttttacgtgattt

SEQ ID NO: 72121 - DNA, 19 bp, Homo sapiens
  siRNA target sequence for APAF1 (NM_001160.2,1548-1566).
ccaatcgctgggagtacta

SEQ ID NO: 72122 - DNA, 19 bp, Homo sapiens
  siRNA target sequence for APAF1 (NM_001160.2,1582-1600).
gaataagcagtttaagaga

SEQ ID NO: 72123 - DNA, 19 bp, Homo sapiens
  siRNA target sequence for APAF1 (NM_001160.2,1589-1607).
cagtttaagagaataagga

SEQ ID NO: 72124 - DNA, 19 bp, Homo sapiens
  siRNA target sequence for APAF1 (NM_001160.2,1605-1623).
ggaaatcttcgtcttatga

SEQ ID NO: 72125 - DNA, 19 bp, Homo sapiens
  siRNA target sequence for APAF1 (NM_001160.2,1611-1629).
cttcgtcttatgattatga

SEQ ID NO: 72126 - DNA, 19 bp, Homo sapiens
  siRNA target sequence for APAF1 (NM_001160.2,1637-1655).
gatgaagccatgtctataa

SEQ ID NO: 72127 - DNA, 19 bp, Homo sapiens
  siRNA target sequence for APAF1 (NM_001160.2,1645-1663).
catgtctataagtgttgaa

SEQ ID NO: 72128 - DNA, 19 bp, Homo sapiens
  siRNA target sequence for APAF1 (NM_001160.2,1685-1703).
gattattacacagatcttt

SEQ ID NO: 72129 - DNA, 19 bp, Homo sapiens
  siRNA target sequence for APAF1 (NM_001160.2,1727-1745).
gtgcctacaaaggtgttat

SEQ ID NO: 72130 - DNA, 19 bp, Homo sapiens
  siRNA target sequence for APAF1 (NM_001160.2,1729-1747).
gcctacaaaggtgttatgt

SEQ ID NO: 72131 - DNA, 19 bp, Homo sapiens
  siRNA target sequence for APAF1 (NM_001160.2,1730-1748).
cctacaaaggtgttatgta

SEQ ID NO: 72132 - DNA, 19 bp, Homo sapiens
  siRNA target sequence for APAF1 (NM_001160.2,1731-1749).
ctacaaaggtgttatgtat

SEQ ID NO: 72133 - DNA, 19 bp, Homo sapiens
  siRNA target sequence for APAF1 (NM_001160.2,1832-1850).
ggaaagtcgtttcgttatt

SEQ ID NO: 72134 - DNA, 19 bp, Homo sapiens
  siRNA target sequence for APAF1 (NM_001160.2,1833-1851).
gaaagtcgtttcgttatta

SEQ ID NO: 72135 - DNA, 19 bp, Homo sapiens
  siRNA target sequence for APAF1 (NM_001160.2,1839-1857).
cgtttcgttattatttaca

SEQ ID NO: 72136 - DNA, 19 bp, Homo sapiens
  siRNA target sequence for APAF1 (NM_001160.2,1840-1858).
gtttcgttattatttacat

SEQ ID NO: 72137 - DNA, 19 bp, Homo sapiens
  siRNA target sequence for APAF1 (NM_001160.2,1929-1947).
ctcagtttcagagatatca

SEQ ID NO: 72138 - DNA, 19 bp, Homo sapiens
  siRNA target sequence for APAF1 (NM_001160.2,1946-1964).
caccagccgcatactcttt

SEQ ID NO: 72139 - DNA, 19 bp, Homo sapiens
  siRNA target sequence for APAF1 (NM_001160.2,1970-1988).
gatcaggaagactgtatgt

SEQ ID NO: 72140 - DNA, 19 bp, Homo sapiens
  siRNA target sequence for APAF1 (NM_001160.2,1976-1994).
gaagactgtatgtattggt

SEQ ID NO: 72141 - DNA, 19 bp, Homo sapiens
  siRNA target sequence for APAF1 (NM_001160.2,2062-2080).
cctggattggattaaagca

SEQ ID NO: 72142 - DNA, 19 bp, Homo sapiens
  siRNA target sequence for APAF1 (NM_001160.2,2063-2081).
ctggattggattaaagcaa

SEQ ID NO: 72143 - DNA, 19 bp, Homo sapiens
  siRNA target sequence for APAF1 (NM_001160.2,2098-2116).
ccctgctcatctgattcat

SEQ ID NO: 72144 - DNA, 19 bp, Homo sapiens
  siRNA target sequence for APAF1 (NM_001160.2,2102-2120).
gctcatctgattcatgaat

SEQ ID NO: 72145 - DNA, 19 bp, Homo sapiens
  siRNA target sequence for APAF1 (NM_001160.2,2160-2178).
cagtcagtgagaattttca

SEQ ID NO: 72146 - DNA, 19 bp, Homo sapiens
  siRNA target sequence for APAF1 (NM_001160.2,2210-2228).
ggacgacagccatttccta

SEQ ID NO: 72147 - DNA, 19 bp, Homo sapiens
  siRNA target sequence for APAF1 (NM_001160.2,2211-2229).
gacgacagccatttcctaa

SEQ ID NO: 72148 - DNA, 19 bp, Homo sapiens
  siRNA target sequence for APAF1 (NM_001160.2,2246-2264).
ctctgtgagccggaaactt

SEQ ID NO: 72149 - DNA, 19 bp, Homo sapiens
  siRNA target sequence for APAF1 (NM_001160.2,2295-2313).
ccaagcaggaggtcgataa

SEQ ID NO: 72150 - DNA, 19 bp, Homo sapiens
  siRNA target sequence for APAF1 (NM_001160.2,2299-2317).
gcaggaggtcgataatgga

SEQ ID NO: 72151 - DNA, 19 bp, Homo sapiens
  siRNA target sequence for APAF1 (NM_001160.2,2305-2323).
ggtcgataatggaatgctt

SEQ ID NO: 72152 - DNA, 19 bp, Homo sapiens
  siRNA target sequence for APAF1 (NM_001160.2,2306-2324).
gtcgataatggaatgcttt

SEQ ID NO: 72153 - DNA, 19 bp, Homo sapiens
  siRNA target sequence for APAF1 (NM_001160.2,2321-2339).
ctttacctggaatggataa

SEQ ID NO: 72154 - DNA, 19 bp, Homo sapiens
  siRNA target sequence for APAF1 (NM_001160.2,2396-2414).
gtttaccatgcctgctttt

SEQ ID NO: 72155 - DNA, 19 bp, Homo sapiens
  siRNA target sequence for APAF1 (NM_001160.2,2420-2438).
gatggtcagagaatagctt

SEQ ID NO: 72156 - DNA, 19 bp, Homo sapiens
  siRNA target sequence for APAF1 (NM_001160.2,2464-2482).
ggtgttcaaagctgaaaca

SEQ ID NO: 72157 - DNA, 19 bp, Homo sapiens
  siRNA target sequence for APAF1 (NM_001160.2,2515-2533).
ggatgaagtgctttgttgt

SEQ ID NO: 72158 - DNA, 19 bp, Homo sapiens
  siRNA target sequence for APAF1 (NM_001160.2,2524-2542).
gctttgttgtgcattctct

SEQ ID NO: 72159 - DNA, 19 bp, Homo sapiens
  siRNA target sequence for APAF1 (NM_001160.2,2539-2557).
ctctacagatgacagattt

SEQ ID NO: 72160 - DNA, 19 bp, Homo sapiens
  siRNA target sequence for APAF1 (NM_001160.2,2541-2559).
ctacagatgacagatttat

SEQ ID NO: 72161 - DNA, 19 bp, Homo sapiens
  siRNA target sequence for APAF1 (NM_001160.2,2562-2580).
caacctgctcagtggataa

SEQ ID NO: 72162 - DNA, 19 bp, Homo sapiens
  siRNA target sequence for APAF1 (NM_001160.2,2635-2653).
gcactcagagcaagtcaat

SEQ ID NO: 72163 - DNA, 19 bp, Homo sapiens
  siRNA target sequence for APAF1 (NM_001160.2,2636-2654).
cactcagagcaagtcaatt

SEQ ID NO: 72164 - DNA, 19 bp, Homo sapiens
  siRNA target sequence for APAF1 (NM_001160.2,2667-2685).
ccaacagtagtcatcatct

SEQ ID NO: 72165 - DNA, 19 bp, Homo sapiens
  siRNA target sequence for APAF1 (NM_001160.2,2668-2686).
caacagtagtcatcatctt

SEQ ID NO: 72166 - DNA, 19 bp, Homo sapiens
  siRNA target sequence for APAF1 (NM_001160.2,2738-2756).
caaaaagaatgtcgaaata

SEQ ID NO: 72167 - DNA, 19 bp, Homo sapiens
  siRNA target sequence for APAF1 (NM_001160.2,2761-2779).
gtttggtcatacaaattca

SEQ ID NO: 72168 - DNA, 19 bp, Homo sapiens
  siRNA target sequence for APAF1 (NM_001160.2,2791-2809).
cagattttcaccagatgat

SEQ ID NO: 72169 - DNA, 19 bp, Homo sapiens
  siRNA target sequence for APAF1 (NM_001160.2,2812-2830).
gcttttggctagttgttca

SEQ ID NO: 72170 - DNA, 19 bp, Homo sapiens
  siRNA target sequence for APAF1 (NM_001160.2,2829-2847).
cagctgatggaaccttaaa

SEQ ID NO: 72171 - DNA, 19 bp, Homo sapiens
  siRNA target sequence for APAF1 (NM_001160.2,2854-2872).
ggatgcgacatcagcaaat

SEQ ID NO: 72172 - DNA, 19 bp, Homo sapiens
  siRNA target sequence for APAF1 (NM_001160.2,2930-2948).
gatatggaagtgatagtga

SEQ ID NO: 72173 - DNA, 19 bp, Homo sapiens
  siRNA target sequence for APAF1 (NM_001160.2,2936-2954).
gaagtgatagtgaagtgtt

SEQ ID NO: 72174 - DNA, 19 bp, Homo sapiens
  siRNA target sequence for APAF1 (NM_001160.2,2939-2957).
gtgatagtgaagtgttgtt

SEQ ID NO: 72175 - DNA, 19 bp, Homo sapiens
  siRNA target sequence for APAF1 (NM_001160.2,3089-3107).
cctgatggatcatcatttt

SEQ ID NO: 72176 - DNA, 19 bp, Homo sapiens
  siRNA target sequence for APAF1 (NM_001160.2,3095-3113).
ggatcatcatttttgacat

SEQ ID NO: 72177 - DNA, 19 bp, Homo sapiens
  siRNA target sequence for APAF1 (NM_001160.2,3135-3153).
ggctctgggagacaaagaa

SEQ ID NO: 72178 - DNA, 19 bp, Homo sapiens
  siRNA target sequence for APAF1 (NM_001160.2,3159-3177).
gtaagaactctgctgtaat

SEQ ID NO: 72179 - DNA, 19 bp, Homo sapiens
  siRNA target sequence for APAF1 (NM_001160.2,3226-3244).
ccttgcagttgaccatata

SEQ ID NO: 72180 - DNA, 19 bp, Homo sapiens
  siRNA target sequence for APAF1 (NM_001160.2,3227-3245).
cttgcagttgaccatataa

SEQ ID NO: 72181 - DNA, 19 bp, Homo sapiens
  siRNA target sequence for APAF1 (NM_001160.2,3246-3264).
gacgtctgcaactcattaa

SEQ ID NO: 72182 - DNA, 19 bp, Homo sapiens
  siRNA target sequence for APAF1 (NM_001160.2,3251-3269).
ctgcaactcattaatggaa

SEQ ID NO: 72183 - DNA, 19 bp, Homo sapiens
  siRNA target sequence for APAF1 (NM_001160.2,3270-3288).
gaacaggtcagattgatta

SEQ ID NO: 72184 - DNA, 19 bp, Homo sapiens
  siRNA target sequence for APAF1 (NM_001160.2,3275-3293).
ggtcagattgattatctga

SEQ ID NO: 72185 - DNA, 19 bp, Homo sapiens
  siRNA target sequence for APAF1 (NM_001160.2,3305-3323).
gttagctgctgttgcttaa

SEQ ID NO: 72186 - DNA, 19 bp, Homo sapiens
  siRNA target sequence for APAF1 (NM_001160.2,3329-3347).
catcttcagtacattgcat

SEQ ID NO: 72187 - DNA, 19 bp, Homo sapiens
  siRNA target sequence for APAF1 (NM_001160.2,3340-3358).
cattgcatttggagatgaa

SEQ ID NO: 72188 - DNA, 19 bp, Homo sapiens
  siRNA target sequence for APAF1 (NM_001160.2,3371-3389).
gagattttagaacttgtaa

SEQ ID NO: 72189 - DNA, 19 bp, Homo sapiens
  siRNA target sequence for APAF1 (NM_001160.2,3412-3430).
gtttcagcacaagaaaact

SEQ ID NO: 72190 - DNA, 19 bp, Homo sapiens
  siRNA target sequence for APAF1 (NM_001160.2,3452-3470).
gccgatgagaagactctta

SEQ ID NO: 72191 - DNA, 19 bp, Homo sapiens
  siRNA target sequence for APAF1 (NM_001160.2,3453-3471).
ccgatgagaagactcttat

SEQ ID NO: 72192 - DNA, 19 bp, Homo sapiens
  siRNA target sequence for APAF1 (NM_001160.2,3454-3472).
cgatgagaagactcttatt

SEQ ID NO: 72193 - DNA, 19 bp, Homo sapiens
  siRNA target sequence for APAF1 (NM_001160.2,3510-3528).
ggcaattggacaaatgtat

SEQ ID NO: 72194 - DNA, 19 bp, Homo sapiens
  siRNA target sequence for APAF1 (NM_001160.2,3517-3535).
ggacaaatgtatctttcta

SEQ ID NO: 72195 - DNA, 19 bp, Homo sapiens
  siRNA target sequence for APAF1 (NM_001160.2,3552-3570).
cagtgaaagactttagact

SEQ ID NO: 72196 - DNA, 19 bp, Homo sapiens
  siRNA target sequence for APAF1 (NM_001160.2,3612-3630).
cagtgaaggtatggaatat

SEQ ID NO: 72197 - DNA, 19 bp, Homo sapiens
  siRNA target sequence for APAF1 (NM_001160.2,3614-3632).
gtgaaggtatggaatatta

SEQ ID NO: 72198 - DNA, 19 bp, Homo sapiens
  siRNA target sequence for APAF1 (NM_001160.2,3665-3683).
caccagggtacagtacttt

SEQ ID NO: 72199 - DNA, 19 bp, Homo sapiens
  siRNA target sequence for APAF1 (NM_001160.2,3667-3685).
ccagggtacagtactttct

SEQ ID NO: 72200 - DNA, 19 bp, Homo sapiens
  siRNA target sequence for APAF1 (NM_001160.2,3668-3686).
cagggtacagtactttctt

SEQ ID NO: 72201 - DNA, 19 bp, Homo sapiens
  siRNA target sequence for APAF1 (NM_001160.2,3700-3718).
cgatgctaccaagttttca

SEQ ID NO: 72202 - DNA, 19 bp, Homo sapiens
  siRNA target sequence for APAF1 (NM_001160.2,3701-3719).
gatgctaccaagttttcat

SEQ ID NO: 72203 - DNA, 19 bp, Homo sapiens
  siRNA target sequence for APAF1 (NM_001160.2,3741-3759).
caaagatctggagttttga

SEQ ID NO: 72204 - DNA, 19 bp, Homo sapiens
  siRNA target sequence for APAF1 (NM_001160.2,3841-3859).
ggcaacgggagatgacaat

SEQ ID NO: 72205 - DNA, 19 bp, Homo sapiens
  siRNA target sequence for APAF1 (NM_001160.2,3907-3925).
gtgtgctccgctttcagaa

SEQ ID NO: 72206 - DNA, 19 bp, Homo sapiens
  siRNA target sequence for APAF1 (NM_001160.2,3951-3969).
gggtgactgacctttgctt

SEQ ID NO: 72207 - DNA, 19 bp, Homo sapiens
  siRNA target sequence for APAF1 (NM_001160.2,4044-4062).
cacagaccttctacacaaa

SEQ ID NO: 72208 - DNA, 19 bp, Homo sapiens
  siRNA target sequence for APAF1 (NM_001160.2,4048-4066).
gaccttctacacaaatgga

SEQ ID NO: 72209 - DNA, 19 bp, Homo sapiens
  siRNA target sequence for APAF1 (NM_001160.2,4054-4072).
ctacacaaatggaaccaat

SEQ ID NO: 72210 - DNA, 19 bp, Homo sapiens
  siRNA target sequence for APAF1 (NM_001160.2,4057-4075).
cacaaatggaaccaatctt

SEQ ID NO: 72211 - DNA, 19 bp, Homo sapiens
  siRNA target sequence for APAF1 (NM_001160.2,4087-4105).
cgtgtcccctgacttcaaa

SEQ ID NO: 72212 - DNA, 19 bp, Homo sapiens
  siRNA target sequence for APAF1 (NM_001160.2,4088-4106).
gtgtcccctgacttcaaaa

SEQ ID NO: 72213 - DNA, 19 bp, Homo sapiens
  siRNA target sequence for APAF1 (NM_001160.2,4092-4110).
cccctgacttcaaaacata

SEQ ID NO: 72214 - DNA, 19 bp, Homo sapiens
  siRNA target sequence for APAF1 (NM_001160.2,4107-4125).
catatgtgactgtggataa

SEQ ID NO: 72215 - DNA, 19 bp, Homo sapiens
  siRNA target sequence for APAF1 (NM_013229.2,3030-3048).
gtggcctattgggagaaat

SEQ ID NO: 72216 - DNA, 19 bp, Homo sapiens
  siRNA target sequence for APAF1 (NM_013229.2,3123-3141).
cccagtactgtgtagagtt

SEQ ID NO: 72217 - DNA, 19 bp, Homo sapiens
  siRNA target sequence for APAF1 (NM_181861.1,890-908).
ggaataacttcgtatgtaa

SEQ ID NO: 72218 - DNA, 19 bp, Homo sapiens
  siRNA target sequence for APG-1 (NM_014278.2,384-402).
gaactcgagccattggaaa

SEQ ID NO: 72219 - DNA, 19 bp, Homo sapiens
  siRNA target sequence for APG-1 (NM_014278.2,416-434).
cagatagtcacgaacgtaa

SEQ ID NO: 72220 - DNA, 19 bp, Homo sapiens
  siRNA target sequence for APG-1 (NM_014278.2,422-440).
gtcacgaacgtaagaaata

SEQ ID NO: 72221 - DNA, 19 bp, Homo sapiens
  siRNA target sequence for APG-1 (NM_014278.2,424-442).
cacgaacgtaagaaataca

SEQ ID NO: 72222 - DNA, 19 bp, Homo sapiens
  siRNA target sequence for APG-1 (NM_014278.2,426-444).
cgaacgtaagaaatacaat

SEQ ID NO: 72223 - DNA, 19 bp, Homo sapiens
  siRNA target sequence for APG-1 (NM_014278.2,430-448).
cgtaagaaatacaattcat

SEQ ID NO: 72224 - DNA, 19 bp, Homo sapiens
  siRNA target sequence for APG-1 (NM_014278.2,460-478).
gcttcatgggcgatcattt

SEQ ID NO: 72225 - DNA, 19 bp, Homo sapiens
  siRNA target sequence for APG-1 (NM_014278.2,505-523).
gatcaggcttccctatgaa

SEQ ID NO: 72226 - DNA, 19 bp, Homo sapiens
  siRNA target sequence for APG-1 (NM_014278.2,515-533).
ccctatgaactgcagaaaa

SEQ ID NO: 72227 - DNA, 19 bp, Homo sapiens
  siRNA target sequence for APG-1 (NM_014278.2,613-631).
gctgttagccaagcttaaa

SEQ ID NO: 72228 - DNA, 19 bp, Homo sapiens
  siRNA target sequence for APG-1 (NM_014278.2,733-751).
ccaggttgcaggcttaaat

SEQ ID NO: 72229 - DNA, 19 bp, Homo sapiens
  siRNA target sequence for APG-1 (NM_014278.2,734-752).
caggttgcaggcttaaatt

SEQ ID NO: 72230 - DNA, 19 bp, Homo sapiens
  siRNA target sequence for APG-1 (NM_014278.2,736-754).
ggttgcaggcttaaattgt

SEQ ID NO: 72231 - DNA, 19 bp, Homo sapiens
  siRNA target sequence for APG-1 (NM_014278.2,737-755).
gttgcaggcttaaattgtt

SEQ ID NO: 72232 - DNA, 19 bp, Homo sapiens
  siRNA target sequence for APG-1 (NM_014278.2,743-761).
ggcttaaattgtttaaggt

SEQ ID NO: 72233 - DNA, 19 bp, Homo sapiens
  siRNA target sequence for APG-1 (NM_014278.2,785-803).
gcactggcgtatggaattt

SEQ ID NO: 72234 - DNA, 19 bp, Homo sapiens
  siRNA target sequence for APG-1 (NM_014278.2,786-804).
cactggcgtatggaattta

SEQ ID NO: 72235 - DNA, 19 bp, Homo sapiens
  siRNA target sequence for APG-1 (NM_014278.2,788-806).
ctggcgtatggaatttata

SEQ ID NO: 72236 - DNA, 19 bp, Homo sapiens
  siRNA target sequence for APG-1 (NM_014278.2,872-890).
gcctatcaggtcttggttt

SEQ ID NO: 72237 - DNA, 19 bp, Homo sapiens
  siRNA target sequence for APG-1 (NM_014278.2,968-986).
gctttagtagactacttct

SEQ ID NO: 72238 - DNA, 19 bp, Homo sapiens
  siRNA target sequence for APG-1 (NM_014278.2,1034-1052).
cgggccttgttgcgtttat

SEQ ID NO: 72239 - DNA, 19 bp, Homo sapiens
  siRNA target sequence for APG-1 (NM_014278.2,1035-1053).
gggccttgttgcgtttata

SEQ ID NO: 72240 - DNA, 19 bp, Homo sapiens
  siRNA target sequence for APG-1 (NM_014278.2,1036-1054).
ggccttgttgcgtttatat

SEQ ID NO: 72241 - DNA, 19 bp, Homo sapiens
  siRNA target sequence for APG-1 (NM_014278.2,1075-1093).
gaagctaatgagtgcaaat

SEQ ID NO: 72242 - DNA, 19 bp, Homo sapiens
  siRNA target sequence for APG-1 (NM_014278.2,1095-1113).
catcagatcttccattgaa

SEQ ID NO: 72243 - DNA, 19 bp, Homo sapiens
  siRNA target sequence for APG-1 (NM_014278.2,1126-1144).
catgaatgaccttgatgtt

SEQ ID NO: 72244 - DNA, 19 bp, Homo sapiens
  siRNA target sequence for APG-1 (NM_014278.2,1159-1177).
cagggctcaatttgaacaa

SEQ ID NO: 72245 - DNA, 19 bp, Homo sapiens
  siRNA target sequence for APG-1 (NM_014278.2,1200-1218).
gggttgaaccacctttaaa

SEQ ID NO: 72246 - DNA, 19 bp, Homo sapiens
  siRNA target sequence for APG-1 (NM_014278.2,1201-1219).
ggttgaaccacctttaaaa

SEQ ID NO: 72247 - DNA, 19 bp, Homo sapiens
  siRNA target sequence for APG-1 (NM_014278.2,1221-1239).
cagtaatggaacaagctaa

SEQ ID NO: 72248 - DNA, 19 bp, Homo sapiens
  siRNA target sequence for APG-1 (NM_014278.2,1228-1246).
ggaacaagctaacttacaa

SEQ ID NO: 72249 - DNA, 19 bp, Homo sapiens
  siRNA target sequence for APG-1 (NM_014278.2,1244-1262).
caacgtgaagacattagta

SEQ ID NO: 72250 - DNA, 19 bp, Homo sapiens
  siRNA target sequence for APG-1 (NM_014278.2,1247-1265).
cgtgaagacattagtagta

SEQ ID NO: 72251 - DNA, 19 bp, Homo sapiens
  siRNA target sequence for APG-1 (NM_014278.2,1442-1460).
cttgttccctattcaatca

SEQ ID NO: 72252 - DNA, 19 bp, Homo sapiens
  siRNA target sequence for APG-1 (NM_014278.2,1445-1463).
gttccctattcaatcacat

SEQ ID NO: 72253 - DNA, 19 bp, Homo sapiens
  siRNA target sequence for APG-1 (NM_014278.2,1448-1466).
ccctattcaatcacattaa

SEQ ID NO: 72254 - DNA, 19 bp, Homo sapiens
  siRNA target sequence for APG-1 (NM_014278.2,1471-1489).
gaagacctcttttgaagat

SEQ ID NO: 72255 - DNA, 19 bp, Homo sapiens
  siRNA target sequence for APG-1 (NM_014278.2,1496-1514).
ggggaatgtgaagttttct

SEQ ID NO: 72256 - DNA, 19 bp, Homo sapiens
  siRNA target sequence for APG-1 (NM_014278.2,1529-1547).
gccccattctcaaaagtca

SEQ ID NO: 72257 - DNA, 19 bp, Homo sapiens
  siRNA target sequence for APG-1 (NM_014278.2,1561-1579).
gaaggaaccatttgaacta

SEQ ID NO: 72258 - DNA, 19 bp, Homo sapiens
  siRNA target sequence for APG-1 (NM_014278.2,1564-1582).
ggaaccatttgaactagaa

SEQ ID NO: 72259 - DNA, 19 bp, Homo sapiens
  siRNA target sequence for APG-1 (NM_014278.2,1580-1598).
gaagcattttatactaatt

SEQ ID NO: 72260 - DNA, 19 bp, Homo sapiens
  siRNA target sequence for APG-1 (NM_014278.2,1631-1649).
gggagcttcactattcaga

SEQ ID NO: 72261 - DNA, 19 bp, Homo sapiens
  siRNA target sequence for APG-1 (NM_014278.2,1632-1650).
ggagcttcactattcagaa

SEQ ID NO: 72262 - DNA, 19 bp, Homo sapiens
  siRNA target sequence for APG-1 (NM_014278.2,1635-1653).
gcttcactattcagaatgt

SEQ ID NO: 72263 - DNA, 19 bp, Homo sapiens
  siRNA target sequence for APG-1 (NM_014278.2,1639-1657).
cactattcagaatgttttt

SEQ ID NO: 72264 - DNA, 19 bp, Homo sapiens
  siRNA target sequence for APG-1 (NM_014278.2,1670-1688).
ggtgatagttccaaagtga

SEQ ID NO: 72265 - DNA, 19 bp, Homo sapiens
  siRNA target sequence for APG-1 (NM_014278.2,1677-1695).
gttccaaagtgaaggttaa

SEQ ID NO: 72266 - DNA, 19 bp, Homo sapiens
  siRNA target sequence for APG-1 (NM_014278.2,1680-1698).
ccaaagtgaaggttaaagt

SEQ ID NO: 72267 - DNA, 19 bp, Homo sapiens
  siRNA target sequence for APG-1 (NM_014278.2,1691-1709).
gttaaagttcgtgttaaca

SEQ ID NO: 72268 - DNA, 19 bp, Homo sapiens
  siRNA target sequence for APG-1 (NM_014278.2,1731-1749).
ctagcgcatcagtaattga

SEQ ID NO: 72269 - DNA, 19 bp, Homo sapiens
  siRNA target sequence for APG-1 (NM_014278.2,1734-1752).
gcgcatcagtaattgagaa

SEQ ID NO: 72270 - DNA, 19 bp, Homo sapiens
  siRNA target sequence for APG-1 (NM_014278.2,1840-1858).
gcaggttgatcaagaagaa

SEQ ID NO: 72271 - DNA, 19 bp, Homo sapiens
  siRNA target sequence for APG-1 (NM_014278.2,1927-1945).
gtcagctgtctcagacaaa

SEQ ID NO: 72272 - DNA, 19 bp, Homo sapiens
  siRNA target sequence for APG-1 (NM_014278.2,1940-1958).
gacaaacaagaccgattaa

SEQ ID NO: 72273 - DNA, 19 bp, Homo sapiens
  siRNA target sequence for APG-1 (NM_014278.2,2005-2023).
ccagagtagcctatgtaga

SEQ ID NO: 72274 - DNA, 19 bp, Homo sapiens
  siRNA target sequence for APG-1 (NM_014278.2,2022-2040).
gacaactaggccaagatct

SEQ ID NO: 72275 - DNA, 19 bp, Homo sapiens
  siRNA target sequence for APG-1 (NM_014278.2,2074-2092).
gatcatgcaagataagtta

SEQ ID NO: 72276 - DNA, 19 bp, Homo sapiens
  siRNA target sequence for APG-1 (NM_014278.2,2112-2130).
ctaagaatgccgttgaaga

SEQ ID NO: 72277 - DNA, 19 bp, Homo sapiens
  siRNA target sequence for APG-1 (NM_014278.2,2120-2138).
gccgttgaagaatatgtat

SEQ ID NO: 72278 - DNA, 19 bp, Homo sapiens
  siRNA target sequence for APG-1 (NM_014278.2,2121-2139).
ccgttgaagaatatgtata

SEQ ID NO: 72279 - DNA, 19 bp, Homo sapiens
  siRNA target sequence for APG-1 (NM_014278.2,2122-2140).
cgttgaagaatatgtatat

SEQ ID NO: 72280 - DNA, 19 bp, Homo sapiens
  siRNA target sequence for APG-1 (NM_014278.2,2152-2170).
caggctgggcactgtctat

SEQ ID NO: 72281 - DNA, 19 bp, Homo sapiens
  siRNA target sequence for APG-1 (NM_014278.2,2189-2207).
gaagacttgagtaaactgt

SEQ ID NO: 72282 - DNA, 19 bp, Homo sapiens
  siRNA target sequence for APG-1 (NM_014278.2,2312-2330).
cctattcaaatgaagtaca

SEQ ID NO: 72283 - DNA, 19 bp, Homo sapiens
  siRNA target sequence for APG-1 (NM_014278.2,2381-2399).
caacttgtcatgaaagtga

SEQ ID NO: 72284 - DNA, 19 bp, Homo sapiens
  siRNA target sequence for APG-1 (NM_014278.2,2392-2410).
gaaagtgatagaagcttat

SEQ ID NO: 72285 - DNA, 19 bp, Homo sapiens
  siRNA target sequence for APG-1 (NM_014278.2,2416-2434).
caaggatgaaagatatgat

SEQ ID NO: 72286 - DNA, 19 bp, Homo sapiens
  siRNA target sequence for APG-1 (NM_014278.2,2440-2458).
ggatcctactgaaatggaa

SEQ ID NO: 72287 - DNA, 19 bp, Homo sapiens
  siRNA target sequence for APG-1 (NM_014278.2,2461-2479).
ggttgaaaaatgtatcagt

SEQ ID NO: 72288 - DNA, 19 bp, Homo sapiens
  siRNA target sequence for APG-1 (NM_014278.2,2483-2501).
gccatgagttggctgaata

SEQ ID NO: 72289 - DNA, 19 bp, Homo sapiens
  siRNA target sequence for APG-1 (NM_014278.2,2493-2511).
ggctgaatagtaagatgaa

SEQ ID NO: 72290 - DNA, 19 bp, Homo sapiens
  siRNA target sequence for APG-1 (NM_014278.2,2645-2663).
gacaaaccaaaagctaata

SEQ ID NO: 72291 - DNA, 19 bp, Homo sapiens
  siRNA target sequence for APG-1 (NM_014278.2,2692-2710).
gagtggaactgaaactaaa

SEQ ID NO: 72292 - DNA, 19 bp, Homo sapiens
  siRNA target sequence for ARAF1 (NM_001654.1,254-272).
gtgggcaccgtcaaagtat

SEQ ID NO: 72293 - DNA, 19 bp, Homo sapiens
  siRNA target sequence for ARAF1 (NM_001654.1,258-276).
gcaccgtcaaagtatacct

SEQ ID NO: 72294 - DNA, 19 bp, Homo sapiens
  siRNA target sequence for ARAF1 (NM_001654.1,349-367).
gaaggtgcggggtctaaat

SEQ ID NO: 72295 - DNA, 19 bp, Homo sapiens
  siRNA target sequence for ARAF1 (NM_001654.1,485-503).
ccgctgaccatgcacaatt

SEQ ID NO: 72296 - DNA, 19 bp, Homo sapiens
  siRNA target sequence for ARAF1 (NM_001654.1,486-504).
cgctgaccatgcacaattt

SEQ ID NO: 72297 - DNA, 19 bp, Homo sapiens
  siRNA target sequence for ARAF1 (NM_001654.1,490-508).
gaccatgcacaattttgta

SEQ ID NO: 72298 - DNA, 19 bp, Homo sapiens
  siRNA target sequence for ARAF1 (NM_001654.1,506-524).
gtacggaagaccttcttca

SEQ ID NO: 72299 - DNA, 19 bp, Homo sapiens
  siRNA target sequence for ARAF1 (NM_001654.1,629-647).
gtctgtgttgacatgagta

SEQ ID NO: 72300 - DNA, 19 bp, Homo sapiens
  siRNA target sequence for ARAF1 (NM_001654.1,645-663).
gtaccaaccgccaacagtt

SEQ ID NO: 72301 - DNA, 19 bp, Homo sapiens
  siRNA target sequence for ARAF1 (NM_001654.1,648-666).
ccaaccgccaacagttcta

SEQ ID NO: 72302 - DNA, 19 bp, Homo sapiens
  siRNA target sequence for ARAF1 (NM_001654.1,843-861).
ccactcccaacgtccatat

SEQ ID NO: 72303 - DNA, 19 bp, Homo sapiens
  siRNA target sequence for ARAF1 (NM_001654.1,1278-1296).
ggaagacgcgacatgtcaa

SEQ ID NO: 72304 - DNA, 19 bp, Homo sapiens
  siRNA target sequence for ARAF1 (NM_001654.1,1696-1714).
gctctacgagcttatgact

SEQ ID NO: 72305 - DNA, 19 bp, Homo sapiens
  siRNA target sequence for ARAF1 (NM_001654.1,1885-1903).
ccagatcctggccacaatt

SEQ ID NO: 72306 - DNA, 19 bp, Homo sapiens
  siRNA target sequence for ARK5 (NM_014840.1,1593-1611).
ggccaccgagaggttttct

SEQ ID NO: 72307 - DNA, 19 bp, Homo sapiens
  siRNA target sequence for ARK5 (NM_014840.1,1610-1628).
ctggccgagtggttgctat

SEQ ID NO: 72308 - DNA, 19 bp, Homo sapiens
  siRNA target sequence for ARK5 (NM_014840.1,1612-1630).
ggccgagtggttgctataa

SEQ ID NO: 72309 - DNA, 19 bp, Homo sapiens
  siRNA target sequence for ARK5 (NM_014840.1,1614-1632).
ccgagtggttgctataaaa

SEQ ID NO: 72310 - DNA, 19 bp, Homo sapiens
  siRNA target sequence for ARK5 (NM_014840.1,1615-1633).
cgagtggttgctataaaat

SEQ ID NO: 72311 - DNA, 19 bp, Homo sapiens
  siRNA target sequence for ARK5 (NM_014840.1,1634-1652).
ccattcgtaaggacaaaat

SEQ ID NO: 72312 - DNA, 19 bp, Homo sapiens
  siRNA target sequence for ARK5 (NM_014840.1,1635-1653).
cattcgtaaggacaaaatt

SEQ ID NO: 72313 - DNA, 19 bp, Homo sapiens
  siRNA target sequence for ARK5 (NM_014840.1,1714-1732).
catcctcatatcatcagta

SEQ ID NO: 72314 - DNA, 19 bp, Homo sapiens
  siRNA target sequence for ARK5 (NM_014840.1,1718-1736).
ctcatatcatcagtattta

SEQ ID NO: 72315 - DNA, 19 bp, Homo sapiens
  siRNA target sequence for ARK5 (NM_014840.1,1756-1774).
gataagattgtgatcatca

SEQ ID NO: 72316 - DNA, 19 bp, Homo sapiens
  siRNA target sequence for ARK5 (NM_014840.1,1936-1954).
ctcgatgacaactgcaata

SEQ ID NO: 72317 - DNA, 19 bp, Homo sapiens
  siRNA target sequence for ARK5 (NM_014840.1,1938-1956).
cgatgacaactgcaatatt

SEQ ID NO: 72318 - DNA, 19 bp, Homo sapiens
  siRNA target sequence for ARK5 (NM_014840.1,1939-1957).
gatgacaactgcaatatta

SEQ ID NO: 72319 - DNA, 19 bp, Homo sapiens
  siRNA target sequence for ARK5 (NM_014840.1,1989-2007).
ccagaaggataagttctta

SEQ ID NO: 72320 - DNA, 19 bp, Homo sapiens
  siRNA target sequence for ARK5 (NM_014840.1,1992-2010).
gaaggataagttcttacaa

SEQ ID NO: 72321 - DNA, 19 bp, Homo sapiens
  siRNA target sequence for ARK5 (NM_014840.1,2020-2038).
gggagtccactctatgcat

SEQ ID NO: 72322 - DNA, 19 bp, Homo sapiens
  siRNA target sequence for ARK5 (NM_014840.1,2031-2049).
ctatgcatctcctgagatt

SEQ ID NO: 72323 - DNA, 19 bp, Homo sapiens
  siRNA target sequence for ARK5 (NM_014840.1,2129-2147).
caatgcccttcgatggttt

SEQ ID NO: 72324 - DNA, 19 bp, Homo sapiens
  siRNA target sequence for ARK5 (NM_014840.1,2133-2151).
gcccttcgatggtttcgat

SEQ ID NO: 72325 - DNA, 19 bp, Homo sapiens
  siRNA target sequence for ARK5 (NM_014840.1,2144-2162).
gtttcgatcacaaaaacct

SEQ ID NO: 72326 - DNA, 19 bp, Homo sapiens
  siRNA target sequence for ARK5 (NM_014840.1,2294-2312).
gggtgaactggggctataa

SEQ ID NO: 72327 - DNA, 19 bp, Homo sapiens
  siRNA target sequence for ARK5 (NM_014840.1,2362-2380).
ctggctcggatcattgact

SEQ ID NO: 72328 - DNA, 19 bp, Homo sapiens
  siRNA target sequence for ARK5 (NM_014840.1,2410-2428).
gacaccgaagccaaaatga

SEQ ID NO: 72329 - DNA, 19 bp, Homo sapiens
  siRNA target sequence for ARK5 (NM_014840.1,2472-2490).
gcagcggtcgctgaagaaa

SEQ ID NO: 72330 - DNA, 19 bp, Homo sapiens
  siRNA target sequence for ARK5 (NM_014840.1,2473-2491).
cagcggtcgctgaagaaat

SEQ ID NO: 72331 - DNA, 19 bp, Homo sapiens
  siRNA target sequence for ARK5 (NM_014840.1,2476-2494).
cggtcgctgaagaaatcca

SEQ ID NO: 72332 - DNA, 19 bp, Homo sapiens
  siRNA target sequence for ARK5 (NM_014840.1,2545-2563).
ccatccaagttgagttcta

SEQ ID NO: 72333 - DNA, 19 bp, Homo sapiens
  siRNA target sequence for ARK5 (NM_014840.1,2625-2643).
cttcattgaaggtgtagtt

SEQ ID NO: 72334 - DNA, 19 bp, Homo sapiens
  siRNA target sequence for ARK5 (NM_014840.1,2725-2743).
gaggtgccgggaaaactca

SEQ ID NO: 72335 - DNA, 19 bp, Homo sapiens
  siRNA target sequence for ARK5 (NM_014840.1,2803-2821).
gaatcaggttactactctt

SEQ ID NO: 72336 - DNA, 19 bp, Homo sapiens
  siRNA target sequence for ARK5 (NM_014840.1,2843-2861).
cggagctgttggacagtaa

SEQ ID NO: 72337 - DNA, 19 bp, Homo sapiens
  siRNA target sequence for ARK5 (NM_014840.1,2847-2865).
gctgttggacagtaatgat

SEQ ID NO: 72338 - DNA, 19 bp, Homo sapiens
  siRNA target sequence for ASNA1 (NM_004317.1,18-36).
gccgctggagcctacactt

SEQ ID NO: 72339 - DNA, 19 bp, Homo sapiens
  siRNA target sequence for ASNA1 (NM_004317.1,19-37).
ccgctggagcctacactta

SEQ ID NO: 72340 - DNA, 19 bp, Homo sapiens
  siRNA target sequence for ASNA1 (NM_004317.1,28-46).
cctacacttagcaacatca

SEQ ID NO: 72341 - DNA, 19 bp, Homo sapiens
  siRNA target sequence for ASNA1 (NM_004317.1,29-47).
ctacacttagcaacatcat

SEQ ID NO: 72342 - DNA, 19 bp, Homo sapiens
  siRNA target sequence for ASNA1 (NM_004317.1,146-164).
gtgagagtgttctgatcat

SEQ ID NO: 72343 - DNA, 19 bp, Homo sapiens
  siRNA target sequence for ASNA1 (NM_004317.1,415-433).
gtgaagggcatgaacttct

SEQ ID NO: 72344 - DNA, 19 bp, Homo sapiens
  siRNA target sequence for ASNA1 (NM_004317.1,429-447).
cttctcggtggtggtattt

SEQ ID NO: 72345 - DNA, 19 bp, Homo sapiens
  siRNA target sequence for ASNA1 (NM_004317.1,517-535).
cggcttatgcagatcaaga

SEQ ID NO: 72346 - DNA, 19 bp, Homo sapiens
  siRNA target sequence for ASNA1 (NM_004317.1,518-536).
ggcttatgcagatcaagaa

SEQ ID NO: 72347 - DNA, 19 bp, Homo sapiens
  siRNA target sequence for ASNA1 (NM_004317.1,641-659).
gctcagtcagcgaacagtt

SEQ ID NO: 72348 - DNA, 19 bp, Homo sapiens
  siRNA target sequence for ASNA1 (NM_004317.1,756-774).
caagattgacacacacaat

SEQ ID NO: 72349 - DNA, 19 bp, Homo sapiens
  siRNA target sequence for ASNA1 (NM_004317.1,759-777).
gattgacacacacaatata

SEQ ID NO: 72350 - DNA, 19 bp, Homo sapiens
  siRNA target sequence for ASNA1 (NM_004317.1,827-845).
gtgaggcccgtcacaagat

SEQ ID NO: 72351 - DNA, 19 bp, Homo sapiens
  siRNA target sequence for ASNA1 (NM_004317.1,867-885).
gatggaggacctgtatgaa

SEQ ID NO: 72352 - DNA, 19 bp, Homo sapiens
  siRNA target sequence for ASS (NM_000050.2,555-573).
gatggagtacgcaaagcaa

SEQ ID NO: 72353 - DNA, 19 bp, Homo sapiens
  siRNA target sequence for ASS (NM_000050.2,879-897).
cgtggagaaccgcttcatt

SEQ ID NO: 72354 - DNA, 19 bp, Homo sapiens
  siRNA target sequence for ASS (NM_000050.2,942-960).
cctttaccatgctcattta

SEQ ID NO: 72355 - DNA, 19 bp, Homo sapiens
  siRNA target sequence for ASS (NM_000050.2,1006-1024).
caaggcctgggcttgaaat

SEQ ID NO: 72356 - DNA, 19 bp, Homo sapiens
  siRNA target sequence for ATP10A (NM_024490.2,602-620).
cgctccgaccacaagatca

SEQ ID NO: 72357 - DNA, 19 bp, Homo sapiens
  siRNA target sequence for ATP10A (NM_024490.2,708-726).
gtcttcgctgcaacgaaat

SEQ ID NO: 72358 - DNA, 19 bp, Homo sapiens
  siRNA target sequence for ATP10A (NM_024490.2,910-928).
caacgacctgagtaggttt

SEQ ID NO: 72359 - DNA, 19 bp, Homo sapiens
  siRNA target sequence for ATP10A (NM_024490.2,925-943).
gtttcgcggctgcatcata

SEQ ID NO: 72360 - DNA, 19 bp, Homo sapiens
  siRNA target sequence for ATP10A (NM_024490.2,930-948).
gcggctgcatcatacatga

SEQ ID NO: 72361 - DNA, 19 bp, Homo sapiens
  siRNA target sequence for ATP10A (NM_024490.2,1019-1037).
gcagtcgtcggcattgtca

SEQ ID NO: 72362 - DNA, 19 bp, Homo sapiens
  siRNA target sequence for ATP10A (NM_024490.2,1020-1038).
cagtcgtcggcattgtcat

SEQ ID NO: 72363 - DNA, 19 bp, Homo sapiens
  siRNA target sequence for ATP10A (NM_024490.2,1036-1054).
catctacgcaggacatgaa

SEQ ID NO: 72364 - DNA, 19 bp, Homo sapiens
  siRNA target sequence for ATP10A (NM_024490.2,1189-1207).
gtggatatggcggtatcaa

SEQ ID NO: 72365 - DNA, 19 bp, Homo sapiens
  siRNA target sequence for ATP10A (NM_024490.2,1191-1209).
ggatatggcggtatcaaga

SEQ ID NO: 72366 - DNA, 19 bp, Homo sapiens
  siRNA target sequence for ATP10A (NM_024490.2,1199-1217).
cggtatcaagagaagaagt

SEQ ID NO: 72367 - DNA, 19 bp, Homo sapiens
  siRNA target sequence for ATP10A (NM_024490.2,1307-1325).
caggttttgatcccaattt

SEQ ID NO: 72368 - DNA, 19 bp, Homo sapiens
  siRNA target sequence for ATP10A (NM_024490.2,1319-1337).
ccaatttccttatacgttt

SEQ ID NO: 72369 - DNA, 19 bp, Homo sapiens
  siRNA target sequence for ATP10A (NM_024490.2,1327-1345).
cttatacgtttccattgaa

SEQ ID NO: 72370 - DNA, 19 bp, Homo sapiens
  siRNA target sequence for ATP10A (NM_024490.2,1355-1373).
gcatgccaagtgtacttca

SEQ ID NO: 72371 - DNA, 19 bp, Homo sapiens
  siRNA target sequence for ATP10A (NM_024490.2,1356-1374).
catgccaagtgtacttcat

SEQ ID NO: 72372 - DNA, 19 bp, Homo sapiens
  siRNA target sequence for ATP10A (NM_024490.2,1359-1377).
gccaagtgtacttcattaa

SEQ ID NO: 72373 - DNA, 19 bp, Homo sapiens
  siRNA target sequence for ATP10A (NM_024490.2,1444-1462).
ggaagacttaggacagata

SEQ ID NO: 72374 - DNA, 19 bp, Homo sapiens
  siRNA target sequence for ATP10A (NM_024490.2,1448-1466).
gacttaggacagatacagt

SEQ ID NO: 72375 - DNA, 19 bp, Homo sapiens
  siRNA target sequence for ATP10A (NM_024490.2,1454-1472).
ggacagatacagtacattt

SEQ ID NO: 72376 - DNA, 19 bp, Homo sapiens
  siRNA target sequence for ATP10A (NM_024490.2,1459-1477).
gatacagtacattttctca

SEQ ID NO: 72377 - DNA, 19 bp, Homo sapiens
  siRNA target sequence for ATP10A (NM_024490.2,1533-1551).
ctggtgtagaatattctca

SEQ ID NO: 72378 - DNA, 19 bp, Homo sapiens
  siRNA target sequence for ATP10A (NM_024490.2,1773-1791).
gccccatggagaaggatat

SEQ ID NO: 72379 - DNA, 19 bp, Homo sapiens
  siRNA target sequence for ATP10A (NM_024490.2,1956-1974).
cggatcagccacgaacaaa

SEQ ID NO: 72380 - DNA, 19 bp, Homo sapiens
  siRNA target sequence for ATP10A (NM_024490.2,2002-2020).
cccggtgaagacgatagaa

SEQ ID NO: 72381 - DNA, 19 bp, Homo sapiens
  siRNA target sequence for ATP10A (NM_024490.2,2410-2428).
gcacacactgggtttcgat

SEQ ID NO: 72382 - DNA, 19 bp, Homo sapiens
  siRNA target sequence for ATP10A (NM_024490.2,2411-2429).
cacacactgggtttcgatt

SEQ ID NO: 72383 - DNA, 19 bp, Homo sapiens
  siRNA target sequence for ATP10A (NM_024490.2,2466-2484).
cgcttaccgatgagatcaa

SEQ ID NO: 72384 - DNA, 19 bp, Homo sapiens
  siRNA target sequence for ATP10A (NM_024490.2,2549-2567).
gccagagggaggcatcaaa

SEQ ID NO: 72385 - DNA, 19 bp, Homo sapiens
  siRNA target sequence for ATP10A (NM_024490.2,2550-2568).
ccagagggaggcatcaaaa

SEQ ID NO: 72386 - DNA, 19 bp, Homo sapiens
  siRNA target sequence for ATP10A (NM_024490.2,2551-2569).
cagagggaggcatcaaaaa

SEQ ID NO: 72387 - DNA, 19 bp, Homo sapiens
  siRNA target sequence for ATP10A (NM_024490.2,2580-2598).
gcaaaactcagaattacct

SEQ ID NO: 72388 - DNA, 19 bp, Homo sapiens
  siRNA target sequence for ATP10A (NM_024490.2,2755-2773).
gaccaacctgcacttgtta

SEQ ID NO: 72389 - DNA, 19 bp, Homo sapiens
  siRNA target sequence for ATP10A (NM_024490.2,2806-2824).
cggagtccctgaaactatt

SEQ ID NO: 72390 - DNA, 19 bp, Homo sapiens
  siRNA target sequence for ATP10A (NM_024490.2,2807-2825).
ggagtccctgaaactattt

SEQ ID NO: 72391 - DNA, 19 bp, Homo sapiens
  siRNA target sequence for ATP10A (NM_024490.2,2810-2828).
gtccctgaaactatttcta

SEQ ID NO: 72392 - DNA, 19 bp, Homo sapiens
  siRNA target sequence for ATP10A (NM_024490.2,2857-2875).
ggttctcactggtgacaaa

SEQ ID NO: 72393 - DNA, 19 bp, Homo sapiens
  siRNA target sequence for ATP10A (NM_024490.2,3138-3156).
cctacgctctcgagaaaaa

SEQ ID NO: 72394 - DNA, 19 bp, Homo sapiens
  siRNA target sequence for ATP10A (NM_024490.2,3537-3555).
ctgcatctaccatgattga

SEQ ID NO: 72395 - DNA, 19 bp, Homo sapiens
  siRNA target sequence for ATP10A (NM_024490.2,3550-3568).
gattgaccagtggtatcta

SEQ ID NO: 72396 - DNA, 19 bp, Homo sapiens
  siRNA target sequence for ATP10A (NM_024490.2,3554-3572).
gaccagtggtatctaatct

SEQ ID NO: 72397 - DNA, 19 bp, Homo sapiens
  siRNA target sequence for ATP10A (NM_024490.2,3561-3579).
ggtatctaatcttctttaa

SEQ ID NO: 72398 - DNA, 19 bp, Homo sapiens
  siRNA target sequence for ATP10A (NM_024490.2,3654-3672).
ccaacccgcagctctacaa

SEQ ID NO: 72399 - DNA, 19 bp, Homo sapiens
  siRNA target sequence for ATP10A (NM_024490.2,3701-3719).
ccacgaacgttctggttta

SEQ ID NO: 72400 - DNA, 19 bp, Homo sapiens
  siRNA target sequence for ATP10A (NM_024490.2,3702-3720).
cacgaacgttctggtttaa

SEQ ID NO: 72401 - DNA, 19 bp, Homo sapiens
  siRNA target sequence for ATP10A (NM_024490.2,3704-3722).
cgaacgttctggtttaaca

SEQ ID NO: 72402 - DNA, 19 bp, Homo sapiens
  siRNA target sequence for ATP10A (NM_024490.2,3705-3723).
gaacgttctggtttaacat

SEQ ID NO: 72403 - DNA, 19 bp, Homo sapiens
  siRNA target sequence for ATP10A (NM_024490.2,3804-3822).
cctgggggacccctattgt

SEQ ID NO: 72404 - DNA, 19 bp, Homo sapiens
  siRNA target sequence for ATP10A (NM_024490.2,3810-3828).
ggacccctattgtgacaat

SEQ ID NO: 72405 - DNA, 19 bp, Homo sapiens
  siRNA target sequence for ATP10A (NM_024490.2,3825-3843).
caatcgcgctgctcacttt

SEQ ID NO: 72406 - DNA, 19 bp, Homo sapiens
  siRNA target sequence for ATP10A (NM_024490.2,4052-4070).
gcactgctgcccagattgt

SEQ ID NO: 72407 - DNA, 19 bp, Homo sapiens
  siRNA target sequence for ATP10A (NM_024490.2,4497-4515).
ctaccttcagcttactcaa

SEQ ID NO: 72408 - DNA, 19 bp, Homo sapiens
  siRNA target sequence for ATP10A (NM_024490.2,4543-4561).
caggctggggagtgtctta

SEQ ID NO: 72409 - DNA, 19 bp, Homo sapiens
  siRNA target sequence for ATP10A (NM_024490.2,4547-4565).
ctggggagtgtcttacagt

SEQ ID NO: 72410 - DNA, 19 bp, Homo sapiens
  siRNA target sequence for ATP10A (NM_024490.2,4651-4669).
gccagaccacagactactt

SEQ ID NO: 72411 - DNA, 19 bp, Homo sapiens
  siRNA target sequence for ATP10A (NM_024490.2,4667-4685).
cttataggagcatcttcaa

SEQ ID NO: 72412 - DNA, 19 bp, Homo sapiens
  siRNA target sequence for ATP10D (NM_020453.2,180-198).
caatgggccagatatcact

SEQ ID NO: 72413 - DNA, 19 bp, Homo sapiens
  siRNA target sequence for ATP10D (NM_020453.2,217-235).
gtgcaaccagggatgatga

SEQ ID NO: 72414 - DNA, 19 bp, Homo sapiens
  siRNA target sequence for ATP10D (NM_020453.2,219-237).
gcaaccagggatgatgatt

SEQ ID NO: 72415 - DNA, 19 bp, Homo sapiens
  siRNA target sequence for ATP10D (NM_020453.2,240-258).
gggccatacaactattcct

SEQ ID NO: 72416 - DNA, 19 bp, Homo sapiens
  siRNA target sequence for ATP10D (NM_020453.2,283-301).
cctctcagacccctaaact

SEQ ID NO: 72417 - DNA, 19 bp, Homo sapiens
  siRNA target sequence for ATP10D (NM_020453.2,307-325).
gaaggcaccggattgttgt

SEQ ID NO: 72418 - DNA, 19 bp, Homo sapiens
  siRNA target sequence for ATP10D (NM_020453.2,338-356).
gcccttcaaggatgagtat

SEQ ID NO: 72419 - DNA, 19 bp, Homo sapiens
  siRNA target sequence for ATP10D (NM_020453.2,367-385).
ccggagcctatgtgaacaa

SEQ ID NO: 72420 - DNA, 19 bp, Homo sapiens
  siRNA target sequence for ATP10D (NM_020453.2,368-386).
cggagcctatgtgaacaat

SEQ ID NO: 72421 - DNA, 19 bp, Homo sapiens
  siRNA target sequence for ATP10D (NM_020453.2,372-390).
gcctatgtgaacaatcgaa

SEQ ID NO: 72422 - DNA, 19 bp, Homo sapiens
  siRNA target sequence for ATP10D (NM_020453.2,374-392).
ctatgtgaacaatcgaata

SEQ ID NO: 72423 - DNA, 19 bp, Homo sapiens
  siRNA target sequence for ATP10D (NM_020453.2,383-401).
caatcgaatacgaacaaca

SEQ ID NO: 72424 - DNA, 19 bp, Homo sapiens
  siRNA target sequence for ATP10D (NM_020453.2,387-405).
cgaatacgaacaacaaagt

SEQ ID NO: 72425 - DNA, 19 bp, Homo sapiens
  siRNA target sequence for ATP10D (NM_020453.2,388-406).
gaatacgaacaacaaagta

SEQ ID NO: 72426 - DNA, 19 bp, Homo sapiens
  siRNA target sequence for ATP10D (NM_020453.2,450-468).
cacagagctgccaatttat

SEQ ID NO: 72427 - DNA, 19 bp, Homo sapiens
  siRNA target sequence for ATP10D (NM_020453.2,546-564).
gtggtggtccttacaatta

SEQ ID NO: 72428 - DNA, 19 bp, Homo sapiens
  siRNA target sequence for ATP10D (NM_020453.2,555-573).
cttacaattatcgcaatta

SEQ ID NO: 72429 - DNA, 19 bp, Homo sapiens
  siRNA target sequence for ATP10D (NM_020453.2,559-577).
caattatcgcaattaaaga

SEQ ID NO: 72430 - DNA, 19 bp, Homo sapiens
  siRNA target sequence for ATP10D (NM_020453.2,611-629).
caaacagatcaataattta

SEQ ID NO: 72431 - DNA, 19 bp, Homo sapiens
  siRNA target sequence for ATP10D (NM_020453.2,733-751).
ctgcagacatggtactact

SEQ ID NO: 72432 - DNA, 19 bp, Homo sapiens
  siRNA target sequence for ATP10D (NM_020453.2,830-848).
ggtggttcggggatatgca

SEQ ID NO: 72433 - DNA, 19 bp, Homo sapiens
  siRNA target sequence for ATP10D (NM_020453.2,875-893).
gaagttttccagtaggata

SEQ ID NO: 72434 - DNA, 19 bp, Homo sapiens
  siRNA target sequence for ATP10D (NM_020453.2,898-916).
gtgaaagcccaaacaatga

SEQ ID NO: 72435 - DNA, 19 bp, Homo sapiens
  siRNA target sequence for ATP10D (NM_020453.2,930-948).
cgaggcttcctagaacatt

SEQ ID NO: 72436 - DNA, 19 bp, Homo sapiens
  siRNA target sequence for ATP10D (NM_020453.2,961-979).
gcgtgggtctcagtaaaga

SEQ ID NO: 72437 - DNA, 19 bp, Homo sapiens
  siRNA target sequence for ATP10D (NM_020453.2,962-980).
cgtgggtctcagtaaagaa

SEQ ID NO: 72438 - DNA, 19 bp, Homo sapiens
  siRNA target sequence for ATP10D (NM_020453.2,990-1008).
cttagaggatgcaccatta

SEQ ID NO: 72439 - DNA, 19 bp, Homo sapiens
  siRNA target sequence for ATP10D (NM_020453.2,1028-1046).
gggcattgtggtttatgca

SEQ ID NO: 72440 - DNA, 19 bp, Homo sapiens
  siRNA target sequence for ATP10D (NM_020453.2,1038-1056).
gtttatgcaggccatgaaa

SEQ ID NO: 72441 - DNA, 19 bp, Homo sapiens
  siRNA target sequence for ATP10D (NM_020453.2,1086-1104).
cggtataagcgcagcaaat

SEQ ID NO: 72442 - DNA, 19 bp, Homo sapiens
  siRNA target sequence for ATP10D (NM_020453.2,1087-1105).
ggtataagcgcagcaaatt

SEQ ID NO: 72443 - DNA, 19 bp, Homo sapiens
  siRNA target sequence for ATP10D (NM_020453.2,1088-1106).
gtataagcgcagcaaatta

SEQ ID NO: 72444 - DNA, 19 bp, Homo sapiens
  siRNA target sequence for ATP10D (NM_020453.2,1140-1158).
gtcatgcttctggtcataa

SEQ ID NO: 72445 - DNA, 19 bp, Homo sapiens
  siRNA target sequence for ATP10D (NM_020453.2,1151-1169).
ggtcataatgtgcttaact

SEQ ID NO: 72446 - DNA, 19 bp, Homo sapiens
  siRNA target sequence for ATP10D (NM_020453.2,1201-1219).
ggtatgaaaagatgcattt

SEQ ID NO: 72447 - DNA, 19 bp, Homo sapiens
  siRNA target sequence for ATP10D (NM_020453.2,1231-1249).
ccgagcctgatggacatat

SEQ ID NO: 72448 - DNA, 19 bp, Homo sapiens
  siRNA target sequence for ATP10D (NM_020453.2,1235-1253).
gcctgatggacatatcata

SEQ ID NO: 72449 - DNA, 19 bp, Homo sapiens
  siRNA target sequence for ATP10D (NM_020453.2,1260-1278).
ctgttggcaggattttata

SEQ ID NO: 72450 - DNA, 19 bp, Homo sapiens
  siRNA target sequence for ATP10D (NM_020453.2,1265-1283).
ggcaggattttatatgttt

SEQ ID NO: 72451 - DNA, 19 bp, Homo sapiens
  siRNA target sequence for ATP10D (NM_020453.2,1288-1306).
ccatgatcattttgttaca

SEQ ID NO: 72452 - DNA, 19 bp, Homo sapiens
  siRNA target sequence for ATP10D (NM_020453.2,1326-1344).
ctctatgtttccatcgaaa

SEQ ID NO: 72453 - DNA, 19 bp, Homo sapiens
  siRNA target sequence for ATP10D (NM_020453.2,1349-1367).
gaagcttggacaaatatat

SEQ ID NO: 72454 - DNA, 19 bp, Homo sapiens
  siRNA target sequence for ATP10D (NM_020453.2,1508-1526).
ggtttttcgaagatgtagt

SEQ ID NO: 72455 - DNA, 19 bp, Homo sapiens
  siRNA target sequence for ATP10D (NM_020453.2,1664-1682).
ctgcaggacagttcataat

SEQ ID NO: 72456 - DNA, 19 bp, Homo sapiens
  siRNA target sequence for ATP10D (NM_020453.2,1691-1709).
gggaaataagccctcaaat

SEQ ID NO: 72457 - DNA, 19 bp, Homo sapiens
  siRNA target sequence for ATP10D (NM_020453.2,1693-1711).
gaaataagccctcaaatca

SEQ ID NO: 72458 - DNA, 19 bp, Homo sapiens
  siRNA target sequence for ATP10D (NM_020453.2,1789-1807).
gtagccccattgaaacaga

SEQ ID NO: 72459 - DNA, 19 bp, Homo sapiens
  siRNA target sequence for ATP10D (NM_020453.2,1833-1851).
gacaaatttagtcagatta

SEQ ID NO: 72460 - DNA, 19 bp, Homo sapiens
  siRNA target sequence for ATP10D (NM_020453.2,1872-1890).
ctagatgagaccatccaaa

SEQ ID NO: 72461 - DNA, 19 bp, Homo sapiens
  siRNA target sequence for ATP10D (NM_020453.2,1969-1987).
ctaaccaaccccgacaaaa

SEQ ID NO: 72462 - DNA, 19 bp, Homo sapiens
  siRNA target sequence for ATP10D (NM_020453.2,2009-2027).
ggggttgcccattaagtct

SEQ ID NO: 72463 - DNA, 19 bp, Homo sapiens
  siRNA target sequence for ATP10D (NM_020453.2,2010-2028).
gggttgcccattaagtctt

SEQ ID NO: 72464 - DNA, 19 bp, Homo sapiens
  siRNA target sequence for ATP10D (NM_020453.2,2011-2029).
ggttgcccattaagtcttt

SEQ ID NO: 72465 - DNA, 19 bp, Homo sapiens
  siRNA target sequence for ATP10D (NM_020453.2,2060-2078).
gtctgtccgaagatcaagt

SEQ ID NO: 72466 - DNA, 19 bp, Homo sapiens
  siRNA target sequence for ATP10D (NM_020453.2,2135-2153).
gagcagactccctctcttt

SEQ ID NO: 72467 - DNA, 19 bp, Homo sapiens
  siRNA target sequence for ATP10D (NM_020453.2,2138-2156).
cagactccctctctttagt

SEQ ID NO: 72468 - DNA, 19 bp, Homo sapiens
  siRNA target sequence for ATP10D (NM_020453.2,2146-2164).
ctctctttagtcgaatgaa

SEQ ID NO: 72469 - DNA, 19 bp, Homo sapiens
  siRNA target sequence for ATP10D (NM_020453.2,2349-2367).
gacgaagcggccttagtgt

SEQ ID NO: 72470 - DNA, 19 bp, Homo sapiens
  siRNA target sequence for ATP10D (NM_020453.2,2351-2369).
cgaagcggccttagtgtat

SEQ ID NO: 72471 - DNA, 19 bp, Homo sapiens
  siRNA target sequence for ATP10D (NM_020453.2,2378-2396).
ggcttaccaatgcacttta

SEQ ID NO: 72472 - DNA, 19 bp, Homo sapiens
  siRNA target sequence for ATP10D (NM_020453.2,2441-2459).
gggaccattaacatttcaa

SEQ ID NO: 72473 - DNA, 19 bp, Homo sapiens
  siRNA target sequence for ATP10D (NM_020453.2,2443-2461).
gaccattaacatttcaact

SEQ ID NO: 72474 - DNA, 19 bp, Homo sapiens
  siRNA target sequence for ATP10D (NM_020453.2,2452-2470).
catttcaactcctacacat

SEQ ID NO: 72475 - DNA, 19 bp, Homo sapiens
  siRNA target sequence for ATP10D (NM_020453.2,2472-2490).
ctgccctttgactcagtaa

SEQ ID NO: 72476 - DNA, 19 bp, Homo sapiens
  siRNA target sequence for ATP10D (NM_020453.2,2474-2492).
gccctttgactcagtaaga

SEQ ID NO: 72477 - DNA, 19 bp, Homo sapiens
  siRNA target sequence for ATP10D (NM_020453.2,2476-2494).
cctttgactcagtaagaaa

SEQ ID NO: 72478 - DNA, 19 bp, Homo sapiens
  siRNA target sequence for ATP10D (NM_020453.2,2532-2550).
caagttgtggtgtatacga

SEQ ID NO: 72479 - DNA, 19 bp, Homo sapiens
  siRNA target sequence for ATP10D (NM_020453.2,2548-2566).
cgaaaggcgctgattctgt

SEQ ID NO: 72480 - DNA, 19 bp, Homo sapiens
  siRNA target sequence for ATP10D (NM_020453.2,2554-2572).
gcgctgattctgtgatcat

SEQ ID NO: 72481 - DNA, 19 bp, Homo sapiens
  siRNA target sequence for ATP10D (NM_020453.2,2673-2691).
caaggccttcgtactttat

SEQ ID NO: 72482 - DNA, 19 bp, Homo sapiens
  siRNA target sequence for ATP10D (NM_020453.2,2676-2694).
ggccttcgtactttatgta

SEQ ID NO: 72483 - DNA, 19 bp, Homo sapiens
  siRNA target sequence for ATP10D (NM_020453.2,2677-2695).
gccttcgtactttatgtat

SEQ ID NO: 72484 - DNA, 19 bp, Homo sapiens
  siRNA target sequence for ATP10D (NM_020453.2,2678-2696).
ccttcgtactttatgtata

SEQ ID NO: 72485 - DNA, 19 bp, Homo sapiens
  siRNA target sequence for ATP10D (NM_020453.2,2682-2700).
cgtactttatgtatagcaa

SEQ ID NO: 72486 - DNA, 19 bp, Homo sapiens
  siRNA target sequence for ATP10D (NM_020453.2,2706-2724).
gtcatgagtgacactgaat

SEQ ID NO: 72487 - DNA, 19 bp, Homo sapiens
  siRNA target sequence for ATP10D (NM_020453.2,2778-2796).
gaagaattactacttgaat

SEQ ID NO: 72488 - DNA, 19 bp, Homo sapiens
  siRNA target sequence for ATP10D (NM_020453.2,2807-2825).
gttggagaacaaacttaca

SEQ ID NO: 72489 - DNA, 19 bp, Homo sapiens
  siRNA target sequence for ATP10D (NM_020453.2,2864-2882).
gggagtccctgaatctata

SEQ ID NO: 72490 - DNA, 19 bp, Homo sapiens
  siRNA target sequence for ATP10D (NM_020453.2,2866-2884).
gagtccctgaatctataga

SEQ ID NO: 72491 - DNA, 19 bp, Homo sapiens
  siRNA target sequence for ATP10D (NM_020453.2,2946-2964).
gtcaacatagcttatgcat

SEQ ID NO: 72492 - DNA, 19 bp, Homo sapiens
  siRNA target sequence for ATP10D (NM_020453.2,2999-3017).
cctcaatacccaaagtaaa

SEQ ID NO: 72493 - DNA, 19 bp, Homo sapiens
  siRNA target sequence for ATP10D (NM_020453.2,3140-3158).
gttacgagctggactcatt

SEQ ID NO: 72494 - DNA, 19 bp, Homo sapiens
  siRNA target sequence for ATP10D (NM_020453.2,3177-3195).
gagtttgccctgcaagaaa

SEQ ID NO: 72495 - DNA, 19 bp, Homo sapiens
  siRNA target sequence for ATP10D (NM_020453.2,3179-3197).
gtttgccctgcaagaaagt

SEQ ID NO: 72496 - DNA, 19 bp, Homo sapiens
  siRNA target sequence for ATP10D (NM_020453.2,3274-3292).
gtgaagtggtgaaattggt

SEQ ID NO: 72497 - DNA, 19 bp, Homo sapiens
  siRNA target sequence for ATP10D (NM_020453.2,3308-3326).
ggtgatgacccttgctatt

SEQ ID NO: 72498 - DNA, 19 bp, Homo sapiens
  siRNA target sequence for ATP10D (NM_020453.2,3311-3329).
gatgacccttgctattggt

SEQ ID NO: 72499 - DNA, 19 bp, Homo sapiens
  siRNA target sequence for ATP10D (NM_020453.2,3353-3371).
gatacaagtggcagacatt

SEQ ID NO: 72500 - DNA, 19 bp, Homo sapiens
  siRNA target sequence for ATP10D (NM_020453.2,3468-3486).
catggacactggtgttata

SEQ ID NO: 72501 - DNA, 19 bp, Homo sapiens
  siRNA target sequence for ATP10D (NM_020453.2,3481-3499).
gttatacacggctttccaa

SEQ ID NO: 72502 - DNA, 19 bp, Homo sapiens
  siRNA target sequence for ATP10D (NM_020453.2,3487-3505).
cacggctttccaacatgat

SEQ ID NO: 72503 - DNA, 19 bp, Homo sapiens
  siRNA target sequence for ATP10D (NM_020453.2,3532-3550).
cctatgtgaacctcctttt

SEQ ID NO: 72504 - DNA, 19 bp, Homo sapiens
  siRNA target sequence for ATP10D (NM_020453.2,3601-3619).
gggttttgatcttcttcaa

SEQ ID NO: 72505 - DNA, 19 bp, Homo sapiens
  siRNA target sequence for ATP10D (NM_020453.2,3638-3656).
ccctcctgtcatttatggt

SEQ ID NO: 72506 - DNA, 19 bp, Homo sapiens
  siRNA target sequence for ATP10D (NM_020453.2,3712-3730).
gaagtggtcagaaatcaga

SEQ ID NO: 72507 - DNA, 19 bp, Homo sapiens
  siRNA target sequence for ATP10D (NM_020453.2,3733-3751).
catacttaccccatacctt

SEQ ID NO: 72508 - DNA, 19 bp, Homo sapiens
  siRNA target sequence for ATP10D (NM_020453.2,3748-3766).
ccttctggatcaccttatt

SEQ ID NO: 72509 - DNA, 19 bp, Homo sapiens
  siRNA target sequence for ATP10D (NM_020453.2,3887-3905).
cctccatctggtcattgaa

SEQ ID NO: 72510 - DNA, 19 bp, Homo sapiens
  siRNA target sequence for ATP10D (NM_020453.2,3908-3926).
caagagtttgacttggatt

SEQ ID NO: 72511 - DNA, 19 bp, Homo sapiens
  siRNA target sequence for ATP10D (NM_020453.2,3945-3963).
ggtagcatcttgtcttatt

SEQ ID NO: 72512 - DNA, 19 bp, Homo sapiens
  siRNA target sequence for ATP10D (NM_020453.2,3984-4002).
ggagccatgtgtgtaactt

SEQ ID NO: 72513 - DNA, 19 bp, Homo sapiens
  siRNA target sequence for ATP10D (NM_020453.2,4047-4065).
ctggatccagtattctact

SEQ ID NO: 72514 - DNA, 19 bp, Homo sapiens
  siRNA target sequence for ATP10D (NM_020453.2,4049-4067).
ggatccagtattctactta

SEQ ID NO: 72515 - DNA, 19 bp, Homo sapiens
  siRNA target sequence for ATP10D (NM_020453.2,4053-4071).
ccagtattctacttagttt

SEQ ID NO: 72516 - DNA, 19 bp, Homo sapiens
  siRNA target sequence for ATP10D (NM_020453.2,4192-4210).
ggactaaagctctcaagaa

SEQ ID NO: 72517 - DNA, 19 bp, Homo sapiens
  siRNA target sequence for ATP10D (NM_020453.2,4219-4237).
gggctggaaagatgaatca

SEQ ID NO: 72518 - DNA, 19 bp, Homo sapiens
  siRNA target sequence for ATP10D (NM_020453.2,4339-4357).
ctattgagcaaggaaactt

SEQ ID NO: 72519 - DNA, 19 bp, Homo sapiens
  siRNA target sequence for ATP12A (NM_001676.2,190-208).
gcaccagctctttcagaaa

SEQ ID NO: 72520 - DNA, 19 bp, Homo sapiens
  siRNA target sequence for ATP12A (NM_001676.2,498-516).
cgcctgagatcgtcaagtt

SEQ ID NO: 72521 - DNA, 19 bp, Homo sapiens
  siRNA target sequence for ATP12A (NM_001676.2,661-679).
cattttaacggggatcttt

SEQ ID NO: 72522 - DNA, 19 bp, Homo sapiens
  siRNA target sequence for ATP12A (NM_001676.2,669-687).
cggggatctttgcttatta

SEQ ID NO: 72523 - DNA, 19 bp, Homo sapiens
  siRNA target sequence for ATP12A (NM_001676.2,717-735).
ccagcttcaataagatgat

SEQ ID NO: 72524 - DNA, 19 bp, Homo sapiens
  siRNA target sequence for ATP12A (NM_001676.2,758-776).
cgagattccgagaagaaga

SEQ ID NO: 72525 - DNA, 19 bp, Homo sapiens
  siRNA target sequence for ATP12A (NM_001676.2,869-887).
gggtgtcgggtggataact

SEQ ID NO: 72526 - DNA, 19 bp, Homo sapiens
  siRNA target sequence for ATP12A (NM_001676.2,871-889).
gtgtcgggtggataactca

SEQ ID NO: 72527 - DNA, 19 bp, Homo sapiens
  siRNA target sequence for ATP12A (NM_001676.2,1033-1051).
caccatcattggccatatt

SEQ ID NO: 72528 - DNA, 19 bp, Homo sapiens
  siRNA target sequence for ATP12A (NM_001676.2,1105-1123).
cgagcactttgttcacatt

SEQ ID NO: 72529 - DNA, 19 bp, Homo sapiens
  siRNA target sequence for ATP12A (NM_001676.2,1139-1157).
gtctccatcggcatccttt

SEQ ID NO: 72530 - DNA, 19 bp, Homo sapiens
  siRNA target sequence for ATP12A (NM_001676.2,1270-1288).
cctgtcgctgacagcaaaa

SEQ ID NO: 72531 - DNA, 19 bp, Homo sapiens
  siRNA target sequence for ATP12A (NM_001676.2,1412-1430).
ctgtggttcgacaatcaga

SEQ ID NO: 72532 - DNA, 19 bp, Homo sapiens
  siRNA target sequence for ATP12A (NM_001676.2,1416-1434).
ggttcgacaatcagatctt

SEQ ID NO: 72533 - DNA, 19 bp, Homo sapiens
  siRNA target sequence for ATP12A (NM_001676.2,1417-1435).
gttcgacaatcagatcttt

SEQ ID NO: 72534 - DNA, 19 bp, Homo sapiens
  siRNA target sequence for ATP12A (NM_001676.2,1496-1514).
gcctccttatccaagataa

SEQ ID NO: 72535 - DNA, 19 bp, Homo sapiens
  siRNA target sequence for ATP12A (NM_001676.2,1497-1515).
cctccttatccaagataat

SEQ ID NO: 72536 - DNA, 19 bp, Homo sapiens
  siRNA target sequence for ATP12A (NM_001676.2,1498-1516).
ctccttatccaagataata

SEQ ID NO: 72537 - DNA, 19 bp, Homo sapiens
  siRNA target sequence for ATP12A (NM_001676.2,1507-1525).
caagataataacattgtgt

SEQ ID NO: 72538 - DNA, 19 bp, Homo sapiens
  siRNA target sequence for ATP12A (NM_001676.2,1524-1542).
gtaaccgagcagagttcaa

SEQ ID NO: 72539 - DNA, 19 bp, Homo sapiens
  siRNA target sequence for ATP12A (NM_001676.2,1593-1611).
cctcagaaactgctctttt

SEQ ID NO: 72540 - DNA, 19 bp, Homo sapiens
  siRNA target sequence for ATP12A (NM_001676.2,1594-1612).
ctcagaaactgctctttta

SEQ ID NO: 72541 - DNA, 19 bp, Homo sapiens
  siRNA target sequence for ATP12A (NM_001676.2,1670-1688).
gtagctgaaatccctttta

SEQ ID NO: 72542 - DNA, 19 bp, Homo sapiens
  siRNA target sequence for ATP12A (NM_001676.2,1681-1699).
cccttttaactctactaat

SEQ ID NO: 72543 - DNA, 19 bp, Homo sapiens
  siRNA target sequence for ATP12A (NM_001676.2,1683-1701).
cttttaactctactaataa

SEQ ID NO: 72544 - DNA, 19 bp, Homo sapiens
  siRNA target sequence for ATP12A (NM_001676.2,1955-1973).
gacatagacgctatgaact

SEQ ID NO: 72545 - DNA, 19 bp, Homo sapiens
  siRNA target sequence for ATP12A (NM_001676.2,1957-1975).
catagacgctatgaacttt

SEQ ID NO: 72546 - DNA, 19 bp, Homo sapiens
  siRNA target sequence for ATP12A (NM_001676.2,1977-1995).
cgacctccaacctctgttt

SEQ ID NO: 72547 - DNA, 19 bp, Homo sapiens
  siRNA target sequence for ATP12A (NM_001676.2,1978-1996).
gacctccaacctctgtttt

SEQ ID NO: 72548 - DNA, 19 bp, Homo sapiens
  siRNA target sequence for ATP12A (NM_001676.2,2067-2085).
cagggatcaaggttattat

SEQ ID NO: 72549 - DNA, 19 bp, Homo sapiens
  siRNA target sequence for ATP12A (NM_001676.2,2128-2146).
gagtgtggggatcatttca

SEQ ID NO: 72550 - DNA, 19 bp, Homo sapiens
  siRNA target sequence for ATP12A (NM_001676.2,2145-2163).
cagccaacagtgaaacagt

SEQ ID NO: 72551 - DNA, 19 bp, Homo sapiens
  siRNA target sequence for ATP12A (NM_001676.2,2154-2172).
gtgaaacagtggaagacat

SEQ ID NO: 72552 - DNA, 19 bp, Homo sapiens
  siRNA target sequence for ATP12A (NM_001676.2,2289-2307).
ccaactaccaggagattgt

SEQ ID NO: 72553 - DNA, 19 bp, Homo sapiens
  siRNA target sequence for ATP12A (NM_001676.2,2402-2420).
gactctccggctctaaaga

SEQ ID NO: 72554 - DNA, 19 bp, Homo sapiens
  siRNA target sequence for ATP12A (NM_001676.2,2443-2461).
ggggatagcaggttctgat

SEQ ID NO: 72555 - DNA, 19 bp, Homo sapiens
  siRNA target sequence for ATP12A (NM_001676.2,2557-2575).
caagaagactattgcttat

SEQ ID NO: 72556 - DNA, 19 bp, Homo sapiens
  siRNA target sequence for ATP12A (NM_001676.2,2604-2622).
gcccctttctgatctacat

SEQ ID NO: 72557 - DNA, 19 bp, Homo sapiens
  siRNA target sequence for ATP12A (NM_001676.2,2606-2624).
ccctttctgatctacatca

SEQ ID NO: 72558 - DNA, 19 bp, Homo sapiens
  siRNA target sequence for ATP12A (NM_001676.2,2710-2728).
gtacgagaaagctgaaagt

SEQ ID NO: 72559 - DNA, 19 bp, Homo sapiens
  siRNA target sequence for ATP12A (NM_001676.2,2748-2766).
ctcgccacaagaataagga

SEQ ID NO: 72560 - DNA, 19 bp, Homo sapiens
  siRNA target sequence for ATP12A (NM_001676.2,2784-2802).
cgctcgctgtgtactcata

SEQ ID NO: 72561 - DNA, 19 bp, Homo sapiens
  siRNA target sequence for ATP12A (NM_001676.2,2920-2938).
ctacgtgaatgacttgaaa

SEQ ID NO: 72562 - DNA, 19 bp, Homo sapiens
  siRNA target sequence for ATP12A (NM_001676.2,2991-3009).
cgggctacacggctttctt

SEQ ID NO: 72563 - DNA, 19 bp, Homo sapiens
  siRNA target sequence for ATP12A (NM_001676.2,2992-3010).
gggctacacggctttcttt

SEQ ID NO: 72564 - DNA, 19 bp, Homo sapiens
  siRNA target sequence for ATP12A (NM_001676.2,2995-3013).
ctacacggctttctttgtt

SEQ ID NO: 72565 - DNA, 19 bp, Homo sapiens
  siRNA target sequence for ATP12A (NM_001676.2,3114-3132).
ggatcacctcacagatcat

SEQ ID NO: 72566 - DNA, 19 bp, Homo sapiens
  siRNA target sequence for ATP12A (NM_001676.2,3165-3183).
gtgtcacagccttgagttt

SEQ ID NO: 72567 - DNA, 19 bp, Homo sapiens
  siRNA target sequence for ATP12A (NM_001676.2,3284-3302).
ggaagctggtgggataaga

SEQ ID NO: 72568 - DNA, 19 bp, Homo sapiens
  siRNA target sequence for ATP12A (NM_001676.2,3288-3306).
gctggtgggataagaacat

SEQ ID NO: 72569 - DNA, 19 bp, Homo sapiens
  siRNA target sequence for ATP12A (NM_001676.2,3292-3310).
gtgggataagaacatgtat

SEQ ID NO: 72570 - DNA, 19 bp, Homo sapiens
  siRNA target sequence for ATP12A (NM_001676.2,3294-3312).
gggataagaacatgtatta

SEQ ID NO: 72571 - DNA, 19 bp, Homo sapiens
  siRNA target sequence for ATP1A1 (NM_000701.5,262-280).
ggggttggacgtgataagt

SEQ ID NO: 72572 - DNA, 19 bp, Homo sapiens
  siRNA target sequence for ATP1A1 (NM_000701.5,263-281).
gggttggacgtgataagta

SEQ ID NO: 72573 - DNA, 19 bp, Homo sapiens
  siRNA target sequence for ATP1A1 (NM_000701.5,264-282).
ggttggacgtgataagtat

SEQ ID NO: 72574 - DNA, 19 bp, Homo sapiens
  siRNA target sequence for ATP1A1 (NM_000701.5,371-389).
ctatggatgatcataaact

SEQ ID NO: 72575 - DNA, 19 bp, Homo sapiens
  siRNA target sequence for ATP1A1 (NM_000701.5,397-415).
gatgaacttcatcgtaaat

SEQ ID NO: 72576 - DNA, 19 bp, Homo sapiens
  siRNA target sequence for ATP1A1 (NM_000701.5,503-521).
ccactactcctgaatggat

SEQ ID NO: 72577 - DNA, 19 bp, Homo sapiens
  siRNA target sequence for ATP1A1 (NM_000701.5,509-527).
ctcctgaatggatcaagtt

SEQ ID NO: 72578 - DNA, 19 bp, Homo sapiens
  siRNA target sequence for ATP1A1 (NM_000701.5,545-563).
gggggttctcaatgttact

SEQ ID NO: 72579 - DNA, 19 bp, Homo sapiens
  siRNA target sequence for ATP1A1 (NM_000701.5,567-585).
gattggagcgattctttgt

SEQ ID NO: 72580 - DNA, 19 bp, Homo sapiens
  siRNA target sequence for ATP1A1 (NM_000701.5,571-589).
ggagcgattctttgtttct

SEQ ID NO: 72581 - DNA, 19 bp, Homo sapiens
  siRNA target sequence for ATP1A1 (NM_000701.5,572-590).
gagcgattctttgtttctt

SEQ ID NO: 72582 - DNA, 19 bp, Homo sapiens
  siRNA target sequence for ATP1A1 (NM_000701.5,619-637).
gaggaacctcaaaacgata

SEQ ID NO: 72583 - DNA, 19 bp, Homo sapiens
  siRNA target sequence for ATP1A1 (NM_000701.5,621-639).
ggaacctcaaaacgataat

SEQ ID NO: 72584 - DNA, 19 bp, Homo sapiens
  siRNA target sequence for ATP1A1 (NM_000701.5,625-643).
cctcaaaacgataatctgt

SEQ ID NO: 72585 - DNA, 19 bp, Homo sapiens
  siRNA target sequence for ATP1A1 (NM_000701.5,655-673).
gtgctatcagccgttgtaa

SEQ ID NO: 72586 - DNA, 19 bp, Homo sapiens
  siRNA target sequence for ATP1A1 (NM_000701.5,658-676).
ctatcagccgttgtaatca

SEQ ID NO: 72587 - DNA, 19 bp, Homo sapiens
  siRNA target sequence for ATP1A1 (NM_000701.5,707-725).
ctaaaagttcaaagatcat

SEQ ID NO: 72588 - DNA, 19 bp, Homo sapiens
  siRNA target sequence for ATP1A1 (NM_000701.5,765-783).
gattcgaaatggtgagaaa

SEQ ID NO: 72589 - DNA, 19 bp, Homo sapiens
  siRNA target sequence for ATP1A1 (NM_000701.5,775-793).
ggtgagaaaatgagcataa

SEQ ID NO: 72590 - DNA, 19 bp, Homo sapiens
  siRNA target sequence for ATP1A1 (NM_000701.5,853-871).
gctgacctcagaatcatat

SEQ ID NO: 72591 - DNA, 19 bp, Homo sapiens
  siRNA target sequence for ATP1A1 (NM_000701.5,861-879).
cagaatcatatctgcaaat

SEQ ID NO: 72592 - DNA, 19 bp, Homo sapiens
  siRNA target sequence for ATP1A1 (NM_000701.5,900-918).
ctcgctcactggtgaatca

SEQ ID NO: 72593 - DNA, 19 bp, Homo sapiens
  siRNA target sequence for ATP1A1 (NM_000701.5,932-950).
ggtctccagatttcacaaa

SEQ ID NO: 72594 - DNA, 19 bp, Homo sapiens
  siRNA target sequence for ATP1A1 (NM_000701.5,960-978).
cctggagacgaggaacatt

SEQ ID NO: 72595 - DNA, 19 bp, Homo sapiens
  siRNA target sequence for ATP1A1 (NM_000701.5,1007-1025).
gcaccgcacgtggtattgt

SEQ ID NO: 72596 - DNA, 19 bp, Homo sapiens
  siRNA target sequence for ATP1A1 (NM_000701.5,1008-1026).
caccgcacgtggtattgtt

SEQ ID NO: 72597 - DNA, 19 bp, Homo sapiens
  siRNA target sequence for ATP1A1 (NM_000701.5,1010-1028).
ccgcacgtggtattgttgt

SEQ ID NO: 72598 - DNA, 19 bp, Homo sapiens
  siRNA target sequence for ATP1A1 (NM_000701.5,1013-1031).
cacgtggtattgttgtcta

SEQ ID NO: 72599 - DNA, 19 bp, Homo sapiens
  siRNA target sequence for ATP1A1 (NM_000701.5,1097-1115).
cccccattgctgcagaaat

SEQ ID NO: 72600 - DNA, 19 bp, Homo sapiens
  siRNA target sequence for ATP1A1 (NM_000701.5,1098-1116).
ccccattgctgcagaaatt

SEQ ID NO: 72601 - DNA, 19 bp, Homo sapiens
  siRNA target sequence for ATP1A1 (NM_000701.5,1106-1124).
ctgcagaaattgaacattt

SEQ ID NO: 72602 - DNA, 19 bp, Homo sapiens
  siRNA target sequence for ATP1A1 (NM_000701.5,1241-1259).
ccaatgtgccggaaggttt

SEQ ID NO: 72603 - DNA, 19 bp, Homo sapiens
  siRNA target sequence for ATP1A1 (NM_000701.5,1317-1335).
ctgcttagtgaagaactta

SEQ ID NO: 72604 - DNA, 19 bp, Homo sapiens
  siRNA target sequence for ATP1A1 (NM_000701.5,1451-1469).
ctgatacgacagagaatca

SEQ ID NO: 72605 - DNA, 19 bp, Homo sapiens
  siRNA target sequence for ATP1A1 (NM_000701.5,1453-1471).
gatacgacagagaatcaga

SEQ ID NO: 72606 - DNA, 19 bp, Homo sapiens
  siRNA target sequence for ATP1A1 (NM_000701.5,1564-1582).
gaaaacctacctattctta

SEQ ID NO: 72607 - DNA, 19 bp, Homo sapiens
  siRNA target sequence for ATP1A1 (NM_000701.5,1605-1623).
ctctgagtcagcactctta

SEQ ID NO: 72608 - DNA, 19 bp, Homo sapiens
  siRNA target sequence for ATP1A1 (NM_000701.5,1607-1625).
ctgagtcagcactcttaaa

SEQ ID NO: 72609 - DNA, 19 bp, Homo sapiens
  siRNA target sequence for ATP1A1 (NM_000701.5,1729-1747).
cataagaaccccaacacat

SEQ ID NO: 72610 - DNA, 19 bp, Homo sapiens
  siRNA target sequence for ATP1A1 (NM_000701.5,1898-1916).
gagaacgagtcctaggttt

SEQ ID NO: 72611 - DNA, 19 bp, Homo sapiens
  siRNA target sequence for ATP1A1 (NM_000701.5,1966-1984).
gacactgacgatgtgaatt

SEQ ID NO: 72612 - DNA, 19 bp, Homo sapiens
  siRNA target sequence for ATP1A1 (NM_000701.5,1978-1996).
gtgaatttccctatcgata

SEQ ID NO: 72613 - DNA, 19 bp, Homo sapiens
  siRNA target sequence for ATP1A1 (NM_000701.5,1980-1998).
gaatttccctatcgataat

SEQ ID NO: 72614 - DNA, 19 bp, Homo sapiens
  siRNA target sequence for ATP1A1 (NM_000701.5,1992-2010).
cgataatctgtgctttgtt

SEQ ID NO: 72615 - DNA, 19 bp, Homo sapiens
  siRNA target sequence for ATP1A1 (NM_000701.5,2231-2249).
ccaaggcctgcgtagtaca

SEQ ID NO: 72616 - DNA, 19 bp, Homo sapiens
  siRNA target sequence for ATP1A1 (NM_000701.5,2245-2263).
gtacacggcagtgatctaa

SEQ ID NO: 72617 - DNA, 19 bp, Homo sapiens
  siRNA target sequence for ATP1A1 (NM_000701.5,2394-2412).
gactggtgacggtgtgaat

SEQ ID NO: 72618 - DNA, 19 bp, Homo sapiens
  siRNA target sequence for ATP1A1 (NM_000701.5,2396-2414).
ctggtgacggtgtgaatga

SEQ ID NO: 72619 - DNA, 19 bp, Homo sapiens
  siRNA target sequence for ATP1A1 (NM_000701.5,2613-2631).
caccccgttcctgatattt

SEQ ID NO: 72620 - DNA, 19 bp, Homo sapiens
  siRNA target sequence for ATP1A1 (NM_000701.5,2615-2633).
ccccgttcctgatatttat

SEQ ID NO: 72621 - DNA, 19 bp, Homo sapiens
  siRNA target sequence for ATP1A1 (NM_000701.5,2617-2635).
ccgttcctgatatttatta

SEQ ID NO: 72622 - DNA, 19 bp, Homo sapiens
  siRNA target sequence for ATP1A1 (NM_000701.5,2843-2861).
gaggcttctttacttactt

SEQ ID NO: 72623 - DNA, 19 bp, Homo sapiens
  siRNA target sequence for ATP1A2 (NM_000702.1,475-493).
ccaacgacaatctatatct

SEQ ID NO: 72624 - DNA, 19 bp, Homo sapiens
  siRNA target sequence for ATP1A2 (NM_000702.1,702-720).
gacctccggatcatctctt

SEQ ID NO: 72625 - DNA, 19 bp, Homo sapiens
  siRNA target sequence for ATP1A2 (NM_000702.1,707-725).
ccggatcatctcttctcat

SEQ ID NO: 72626 - DNA, 19 bp, Homo sapiens
  siRNA target sequence for ATP1A2 (NM_000702.1,809-827).
ggagacccgcaatatctgt

SEQ ID NO: 72627 - DNA, 19 bp, Homo sapiens
  siRNA target sequence for ATP1A2 (NM_000702.1,810-828).
gagacccgcaatatctgtt

SEQ ID NO: 72628 - DNA, 19 bp, Homo sapiens
  siRNA target sequence for ATP1A2 (NM_000702.1,816-834).
cgcaatatctgtttcttct

SEQ ID NO: 72629 - DNA, 19 bp, Homo sapiens
  siRNA target sequence for ATP1A2 (NM_000702.1,936-954).
gggcggacacccatagcaa

SEQ ID NO: 72630 - DNA, 19 bp, Homo sapiens
  siRNA target sequence for ATP1A2 (NM_000702.1,937-955).
ggcggacacccatagcaat

SEQ ID NO: 72631 - DNA, 19 bp, Homo sapiens
  siRNA target sequence for ATP1A2 (NM_000702.1,946-964).
ccatagcaatggagattga

SEQ ID NO: 72632 - DNA, 19 bp, Homo sapiens
  siRNA target sequence for ATP1A2 (NM_000702.1,1323-1341).
gccacttttgacaaacgat

SEQ ID NO: 72633 - DNA, 19 bp, Homo sapiens
  siRNA target sequence for ATP1A2 (NM_000702.1,1352-1370).
gacggccctgtctcgaatt

SEQ ID NO: 72634 - DNA, 19 bp, Homo sapiens
  siRNA target sequence for ATP1A2 (NM_000702.1,1355-1373).
ggccctgtctcgaattgct

SEQ ID NO: 72635 - DNA, 19 bp, Homo sapiens
  siRNA target sequence for ATP1A2 (NM_000702.1,1533-1551).
gagattcctttcaactcta

SEQ ID NO: 72636 - DNA, 19 bp, Homo sapiens
  siRNA target sequence for ATP1A2 (NM_000702.1,1787-1805).
gtttcctcggggcttcaaa

SEQ ID NO: 72637 - DNA, 19 bp, Homo sapiens
  siRNA target sequence for ATP1A2 (NM_000702.1,1792-1810).
ctcggggcttcaaattcga

SEQ ID NO: 72638 - DNA, 19 bp, Homo sapiens
  siRNA target sequence for ATP1A2 (NM_000702.1,1946-1964).
cggggatcaccctatcaca

SEQ ID NO: 72639 - DNA, 19 bp, Homo sapiens
  siRNA target sequence for ATP1A2 (NM_000702.1,2502-2520).
ggcactgtgaccatccttt

SEQ ID NO: 72640 - DNA, 19 bp, Homo sapiens
  siRNA target sequence for ATP1A2 (NM_000702.1,2571-2589).
gcagctgagagtgatatca

SEQ ID NO: 72641 - DNA, 19 bp, Homo sapiens
  siRNA target sequence for ATP1A2 (NM_000702.1,2765-2783).
ggatgaccggaccatgaat

SEQ ID NO: 72642 - DNA, 19 bp, Homo sapiens
  siRNA target sequence for ATP1A2 (NM_000702.1,2982-3000).
gcgttggctgcctttctct

SEQ ID NO: 72643 - DNA, 19 bp, Homo sapiens
  siRNA target sequence for ATP1A2 (NM_000702.1,2988-3006).
gctgcctttctctcttact

SEQ ID NO: 72644 - DNA, 19 bp, Homo sapiens
  siRNA target sequence for ATP1A2 (NM_000702.1,3031-3049).
gcatgtacccgctcaaagt

SEQ ID NO: 72645 - DNA, 19 bp, Homo sapiens
  siRNA target sequence for ATP1A3 (NM_152296.2,234-252).
gaggtctgccggaaataca

SEQ ID NO: 72646 - DNA, 19 bp, Homo sapiens
  siRNA target sequence for ATP1A3 (NM_152296.2,237-255).
gtctgccggaaatacaaca

SEQ ID NO: 72647 - DNA, 19 bp, Homo sapiens
  siRNA target sequence for ATP1A3 (NM_152296.2,1301-1319).
ccagtcagggacctcattt

SEQ ID NO: 72648 - DNA, 19 bp, Homo sapiens
  siRNA target sequence for ATP1A3 (NM_152296.2,1498-1516).
gtgaacgcaacaagaaagt

SEQ ID NO: 72649 - DNA, 19 bp, Homo sapiens
  siRNA target sequence for ATP1A3 (NM_152296.2,1671-1689).
cctctggacgaggaaatga

SEQ ID NO: 72650 - DNA, 19 bp, Homo sapiens
  siRNA target sequence for ATP1A3 (NM_152296.2,1742-1760).
gcttggtttctgccattat

SEQ ID NO: 72651 - DNA, 19 bp, Homo sapiens
  siRNA target sequence for ATP1A3 (NM_152296.2,3055-3073).
gtgccttcccctacagttt

SEQ ID NO: 72652 - DNA, 19 bp, Homo sapiens
  siRNA target sequence for ATP1A3 (NM_152296.2,3090-3108).
gacgaaatccgcaaactca

SEQ ID NO: 72653 - DNA, 19 bp, Homo sapiens
  siRNA target sequence for ATP1A4 (NM_144699.1,520-538).
ccaagacgaagacctaaaa

SEQ ID NO: 72654 - DNA, 19 bp, Homo sapiens
  siRNA target sequence for ATP1A4 (NM_144699.1,521-539).
caagacgaagacctaaaaa

SEQ ID NO: 72655 - DNA, 19 bp, Homo sapiens
  siRNA target sequence for ATP1A4 (NM_144699.1,619-637).
gatgatcacaaattaacct

SEQ ID NO: 72656 - DNA, 19 bp, Homo sapiens
  siRNA target sequence for ATP1A4 (NM_144699.1,757-775).
gaatgggtcaaattctgta

SEQ ID NO: 72657 - DNA, 19 bp, Homo sapiens
  siRNA target sequence for ATP1A4 (NM_144699.1,1212-1230).
ccgaaacatctgcttcttt

SEQ ID NO: 72658 - DNA, 19 bp, Homo sapiens
  siRNA target sequence for ATP1A4 (NM_144699.1,1663-1681).
cacatgtggtttgatatga

SEQ ID NO: 72659 - DNA, 19 bp, Homo sapiens
  siRNA target sequence for ATP1A4 (NM_144699.1,1692-1710).
ggccgacaccactgaagaa

SEQ ID NO: 72660 - DNA, 19 bp, Homo sapiens
  siRNA target sequence for ATP1A4 (NM_144699.1,1694-1712).
ccgacaccactgaagaaca

SEQ ID NO: 72661 - DNA, 19 bp, Homo sapiens
  siRNA target sequence for ATP1A4 (NM_144699.1,1736-1754).
gctctgatacctggtttat

SEQ ID NO: 72662 - DNA, 19 bp, Homo sapiens
  siRNA target sequence for ATP1A4 (NM_144699.1,1778-1796).
gcaaccgggctgactttaa

SEQ ID NO: 72663 - DNA, 19 bp, Homo sapiens
  siRNA target sequence for ATP1A4 (NM_144699.1,1997-2015).
cccacgtactgatgatgaa

SEQ ID NO: 72664 - DNA, 19 bp, Homo sapiens
  siRNA target sequence for ATP1A4 (NM_144699.1,2066-2084).
ggcaggagtactcaatgaa

SEQ ID NO: 72665 - DNA, 19 bp, Homo sapiens
  siRNA target sequence for ATP1A4 (NM_144699.1,2149-2167).
ctaggcttctgcttcttga

SEQ ID NO: 72666 - DNA, 19 bp, Homo sapiens
  siRNA target sequence for ATP1A4 (NM_144699.1,2190-2208).
gggattcccatttaataca

SEQ ID NO: 72667 - DNA, 19 bp, Homo sapiens
  siRNA target sequence for ATP1A4 (NM_144699.1,2197-2215).
ccatttaatacagatgaaa

SEQ ID NO: 72668 - DNA, 19 bp, Homo sapiens
  siRNA target sequence for ATP1A4 (NM_144699.1,2304-2322).
gtgtcgcagtgcaggaatt

SEQ ID NO: 72669 - DNA, 19 bp, Homo sapiens
  siRNA target sequence for ATP1A4 (NM_144699.1,3000-3018).
gaacccaaagacggataat

SEQ ID NO: 72670 - DNA, 19 bp, Homo sapiens
  siRNA target sequence for ATP1A4 (NM_144699.1,3021-3039).
ggtgaaccaccgtctcatt

SEQ ID NO: 72671 - DNA, 19 bp, Homo sapiens
  siRNA target sequence for ATP1A4 (NM_144699.1,3105-3123).
cctggctgagaatggtttt

SEQ ID NO: 72672 - DNA, 19 bp, Homo sapiens
  siRNA target sequence for ATP1A4 (NM_144699.1,3106-3124).
ctggctgagaatggtttta

SEQ ID NO: 72673 - DNA, 19 bp, Homo sapiens
  siRNA target sequence for ATP1A4 (NM_144699.1,3119-3137).
gttttaggcctgttgatct

SEQ ID NO: 72674 - DNA, 19 bp, Homo sapiens
  siRNA target sequence for ATP1A4 (NM_144699.1,3207-3225).
gacctatgagcaacgaaaa

SEQ ID NO: 72675 - DNA, 19 bp, Homo sapiens
  siRNA target sequence for ATP1A4 (NM_144699.1,3209-3227).
cctatgagcaacgaaaagt

SEQ ID NO: 72676 - DNA, 19 bp, Homo sapiens
  siRNA target sequence for ATP1A4 (NM_144699.1,3210-3228).
ctatgagcaacgaaaagtt

SEQ ID NO: 72677 - DNA, 19 bp, Homo sapiens
  siRNA target sequence for ATP1A4 (NM_144699.1,3244-3262).
caaacggccttttttgtca

SEQ ID NO: 72678 - DNA, 19 bp, Homo sapiens
  siRNA target sequence for ATP1A4 (NM_144699.1,3305-3323).
ctcgccgcaactcactttt

SEQ ID NO: 72679 - DNA, 19 bp, Homo sapiens
  siRNA target sequence for ATP1A4 (NM_144699.1,3425-3443).
gaatgtacccactcaagat

SEQ ID NO: 72680 - DNA, 19 bp, Homo sapiens
  siRNA target sequence for ATP1A4 (NM_144699.1,3458-3476).
gtgccattccctacagtat

SEQ ID NO: 72681 - DNA, 19 bp, Homo sapiens
  siRNA target sequence for ATP1A4 (NM_144699.1,3461-3479).
ccattccctacagtattct

SEQ ID NO: 72682 - DNA, 19 bp, Homo sapiens
  siRNA target sequence for ATP2A1 (NM_004320.2,116-134).
gaggccgctcatgctaaaa

SEQ ID NO: 72683 - DNA, 19 bp, Homo sapiens
  siRNA target sequence for ATP2A1 (NM_004320.2,182-200).
ctcaccccggaccaagtta

SEQ ID NO: 72684 - DNA, 19 bp, Homo sapiens
  siRNA target sequence for ATP2A1 (NM_004320.2,307-325).
cctcctggccgcatgcatt

SEQ ID NO: 72685 - DNA, 19 bp, Homo sapiens
  siRNA target sequence for ATP2A1 (NM_004320.2,602-620).
cgaatcctcgccatcaaat

SEQ ID NO: 72686 - DNA, 19 bp, Homo sapiens
  siRNA target sequence for ATP2A1 (NM_004320.2,650-668).
ctgacaggcgagtctgtat

SEQ ID NO: 72687 - DNA, 19 bp, Homo sapiens
  siRNA target sequence for ATP2A1 (NM_004320.2,654-672).
caggcgagtctgtatctgt

SEQ ID NO: 72688 - DNA, 19 bp, Homo sapiens
  siRNA target sequence for ATP2A1 (NM_004320.2,661-679).
gtctgtatctgtcatcaaa

SEQ ID NO: 72689 - DNA, 19 bp, Homo sapiens
  siRNA target sequence for ATP2A1 (NM_004320.2,810-828).
ggaagatccgagaccaaat

SEQ ID NO: 72690 - DNA, 19 bp, Homo sapiens
  siRNA target sequence for ATP2A1 (NM_004320.2,917-935).
gtggctgtctggcttatca

SEQ ID NO: 72691 - DNA, 19 bp, Homo sapiens
  siRNA target sequence for ATP2A1 (NM_004320.2,921-939).
ctgtctggcttatcaacat

SEQ ID NO: 72692 - DNA, 19 bp, Homo sapiens
  siRNA target sequence for ATP2A1 (NM_004320.2,1080-1098).
cccgtcggatggcaaagaa

SEQ ID NO: 72693 - DNA, 19 bp, Homo sapiens
  siRNA target sequence for ATP2A1 (NM_004320.2,1083-1101).
gtcggatggcaaagaagaa

SEQ ID NO: 72694 - DNA, 19 bp, Homo sapiens
  siRNA target sequence for ATP2A1 (NM_004320.2,1199-1217).
gtctgcaagatgtttatca

SEQ ID NO: 72695 - DNA, 19 bp, Homo sapiens
  siRNA target sequence for ATP2A1 (NM_004320.2,1203-1221).
gcaagatgtttatcattga

SEQ ID NO: 72696 - DNA, 19 bp, Homo sapiens
  siRNA target sequence for ATP2A1 (NM_004320.2,1288-1306).
gggagaggtcttgaagaat

SEQ ID NO: 72697 - DNA, 19 bp, Homo sapiens
  siRNA target sequence for ATP2A1 (NM_004320.2,1290-1308).
gagaggtcttgaagaatga

SEQ ID NO: 72698 - DNA, 19 bp, Homo sapiens
  siRNA target sequence for ATP2A1 (NM_004320.2,1530-1548).
cggtgatccgccagctaat

SEQ ID NO: 72699 - DNA, 19 bp, Homo sapiens
  siRNA target sequence for ATP2A1 (NM_004320.2,1631-1649).
gctgtgggcaacaagatgt

SEQ ID NO: 72700 - DNA, 19 bp, Homo sapiens
  siRNA target sequence for ATP2A1 (NM_004320.2,1632-1650).
ctgtgggcaacaagatgtt

SEQ ID NO: 72701 - DNA, 19 bp, Homo sapiens
  siRNA target sequence for ATP2A1 (NM_004320.2,1673-1691).
gtcatcgaccgctgtaact

SEQ ID NO: 72702 - DNA, 19 bp, Homo sapiens
  siRNA target sequence for ATP2A1 (NM_004320.2,1675-1693).
catcgaccgctgtaactat

SEQ ID NO: 72703 - DNA, 19 bp, Homo sapiens
  siRNA target sequence for ATP2A1 (NM_004320.2,2155-2173).
ctcgcacaagtccaagatt

SEQ ID NO: 72704 - DNA, 19 bp, Homo sapiens
  siRNA target sequence for ATP2A1 (NM_004320.2,2696-2714).
gggcctcatgtcaactaca

SEQ ID NO: 72705 - DNA, 19 bp, Homo sapiens
  siRNA target sequence for ATP2A1 (NM_004320.2,2756-2774).
cactttgagggcatagact

SEQ ID NO: 72706 - DNA, 19 bp, Homo sapiens
  siRNA target sequence for ATP2A1 (NM_004320.2,2963-2981).
gaccccctgccgatgatct

SEQ ID NO: 72707 - DNA, 19 bp, Homo sapiens
  siRNA target sequence for ATP2A1 (NM_004320.2,2966-2984).
cccctgccgatgatcttca

SEQ ID NO: 72708 - DNA, 19 bp, Homo sapiens
  siRNA target sequence for ATP2A1 (NM_173201.1,3085-3103).
cctagaggatccagaagat

SEQ ID NO: 72709 - DNA, 19 bp, Homo sapiens
  siRNA target sequence for ATP2A2 (NM_001681.2,242-260).
gaacaggtcaagaagctta

SEQ ID NO: 72710 - DNA, 19 bp, Homo sapiens
  siRNA target sequence for ATP2A2 (NM_001681.2,338-356).
gacttgctagttaggattt

SEQ ID NO: 72711 - DNA, 19 bp, Homo sapiens
  siRNA target sequence for ATP2A2 (NM_001681.2,340-358).
cttgctagttaggatttta

SEQ ID NO: 72712 - DNA, 19 bp, Homo sapiens
  siRNA target sequence for ATP2A2 (NM_001681.2,362-380).
ctggcagcatgtatatctt

SEQ ID NO: 72713 - DNA, 19 bp, Homo sapiens
  siRNA target sequence for ATP2A2 (NM_001681.2,364-382).
ggcagcatgtatatctttt

SEQ ID NO: 72714 - DNA, 19 bp, Homo sapiens
  siRNA target sequence for ATP2A2 (NM_001681.2,420-438).
cagcctttgtagaaccttt

SEQ ID NO: 72715 - DNA, 19 bp, Homo sapiens
  siRNA target sequence for ATP2A2 (NM_001681.2,511-529).
cgaagcccttaaggaatat

SEQ ID NO: 72716 - DNA, 19 bp, Homo sapiens
  siRNA target sequence for ATP2A2 (NM_001681.2,568-586).
gagtgtgcagcggattaaa

SEQ ID NO: 72717 - DNA, 19 bp, Homo sapiens
  siRNA target sequence for ATP2A2 (NM_001681.2,595-613).
catagttcctggtgatatt

SEQ ID NO: 72718 - DNA, 19 bp, Homo sapiens
  siRNA target sequence for ATP2A2 (NM_001681.2,634-652).
caaagttcctgctgatata

SEQ ID NO: 72719 - DNA, 19 bp, Homo sapiens
  siRNA target sequence for ATP2A2 (NM_001681.2,638-656).
gttcctgctgatataaggt

SEQ ID NO: 72720 - DNA, 19 bp, Homo sapiens
  siRNA target sequence for ATP2A2 (NM_001681.2,641-659).
cctgctgatataaggttaa

SEQ ID NO: 72721 - DNA, 19 bp, Homo sapiens
  siRNA target sequence for ATP2A2 (NM_001681.2,644-662).
gctgatataaggttaactt

SEQ ID NO: 72722 - DNA, 19 bp, Homo sapiens
  siRNA target sequence for ATP2A2 (NM_001681.2,667-685).
caaatctaccacactaaga

SEQ ID NO: 72723 - DNA, 19 bp, Homo sapiens
  siRNA target sequence for ATP2A2 (NM_001681.2,684-702).
gagttgaccagtcaattct

SEQ ID NO: 72724 - DNA, 19 bp, Homo sapiens
  siRNA target sequence for ATP2A2 (NM_001681.2,686-704).
gttgaccagtcaattctca

SEQ ID NO: 72725 - DNA, 19 bp, Homo sapiens
  siRNA target sequence for ATP2A2 (NM_001681.2,833-851).
gtagcaactggagttaaca

SEQ ID NO: 72726 - DNA, 19 bp, Homo sapiens
  siRNA target sequence for ATP2A2 (NM_001681.2,861-879).
gcaagatccgggatgaaat

SEQ ID NO: 72727 - DNA, 19 bp, Homo sapiens
  siRNA target sequence for ATP2A2 (NM_001681.2,903-921).
caccccttcagcaaaaact

SEQ ID NO: 72728 - DNA, 19 bp, Homo sapiens
  siRNA target sequence for ATP2A2 (NM_001681.2,906-924).
cccttcagcaaaaactaga

SEQ ID NO: 72729 - DNA, 19 bp, Homo sapiens
  siRNA target sequence for ATP2A2 (NM_001681.2,907-925).
ccttcagcaaaaactagat

SEQ ID NO: 72730 - DNA, 19 bp, Homo sapiens
  siRNA target sequence for ATP2A2 (NM_001681.2,967-985).
cattgcagtctggatcata

SEQ ID NO: 72731 - DNA, 19 bp, Homo sapiens
  siRNA target sequence for ATP2A2 (NM_001681.2,971-989).
gcagtctggatcataaata

SEQ ID NO: 72732 - DNA, 19 bp, Homo sapiens
  siRNA target sequence for ATP2A2 (NM_001681.2,1026-1044).
ggatcagaggtgctattta

SEQ ID NO: 72733 - DNA, 19 bp, Homo sapiens
  siRNA target sequence for ATP2A2 (NM_001681.2,1032-1050).
gaggtgctatttactactt

SEQ ID NO: 72734 - DNA, 19 bp, Homo sapiens
  siRNA target sequence for ATP2A2 (NM_001681.2,1190-1208).
ggttgtacttctgttatct

SEQ ID NO: 72735 - DNA, 19 bp, Homo sapiens
  siRNA target sequence for ATP2A2 (NM_001681.2,1248-1266).
cagtctgcaggatgttcat

SEQ ID NO: 72736 - DNA, 19 bp, Homo sapiens
  siRNA target sequence for ATP2A2 (NM_001681.2,1273-1291).
cagagtggaaggtgatact

SEQ ID NO: 72737 - DNA, 19 bp, Homo sapiens
  siRNA target sequence for ATP2A2 (NM_001681.2,1277-1295).
gtggaaggtgatacttgtt

SEQ ID NO: 72738 - DNA, 19 bp, Homo sapiens
  siRNA target sequence for ATP2A2 (NM_001681.2,1311-1329).
ccataactggatcaactta

SEQ ID NO: 72739 - DNA, 19 bp, Homo sapiens
  siRNA target sequence for ATP2A2 (NM_001681.2,1312-1330).
cataactggatcaacttat

SEQ ID NO: 72740 - DNA, 19 bp, Homo sapiens
  siRNA target sequence for ATP2A2 (NM_001681.2,1335-1353).
ctattggagaagtgcataa

SEQ ID NO: 72741 - DNA, 19 bp, Homo sapiens
  siRNA target sequence for ATP2A2 (NM_001681.2,1369-1387).
gaattgtcaccagtatgat

SEQ ID NO: 72742 - DNA, 19 bp, Homo sapiens
  siRNA target sequence for ATP2A2 (NM_001681.2,1388-1406).
ggtctggtagaattagcaa

SEQ ID NO: 72743 - DNA, 19 bp, Homo sapiens
  siRNA target sequence for ATP2A2 (NM_001681.2,1393-1411).
ggtagaattagcaacaatt

SEQ ID NO: 72744 - DNA, 19 bp, Homo sapiens
  siRNA target sequence for ATP2A2 (NM_001681.2,1427-1445).
gactctgctttggattaca

SEQ ID NO: 72745 - DNA, 19 bp, Homo sapiens
  siRNA target sequence for ATP2A2 (NM_001681.2,1429-1447).
ctctgctttggattacaat

SEQ ID NO: 72746 - DNA, 19 bp, Homo sapiens
  siRNA target sequence for ATP2A2 (NM_001681.2,1494-1512).
ctctcacttgcctagtaga

SEQ ID NO: 72747 - DNA, 19 bp, Homo sapiens
  siRNA target sequence for ATP2A2 (NM_001681.2,1523-1541).
gtatttgataccgaattga

SEQ ID NO: 72748 - DNA, 19 bp, Homo sapiens
  siRNA target sequence for ATP2A2 (NM_001681.2,1571-1589).
gcctgcaactcagtcatta

SEQ ID NO: 72749 - DNA, 19 bp, Homo sapiens
  siRNA target sequence for ATP2A2 (NM_001681.2,1572-1590).
cctgcaactcagtcattaa

SEQ ID NO: 72750 - DNA, 19 bp, Homo sapiens
  siRNA target sequence for ATP2A2 (NM_001681.2,1606-1624).
ggaattcactctagagttt

SEQ ID NO: 72751 - DNA, 19 bp, Homo sapiens
  siRNA target sequence for ATP2A2 (NM_001681.2,1626-1644).
cacgtgacagaaagtcaat

SEQ ID NO: 72752 - DNA, 19 bp, Homo sapiens
  siRNA target sequence for ATP2A2 (NM_001681.2,1639-1657).
gtcaatgtcggtttactgt

SEQ ID NO: 72753 - DNA, 19 bp, Homo sapiens
  siRNA target sequence for ATP2A2 (NM_001681.2,1654-1672).
ctgtacaccaaataaacca

SEQ ID NO: 72754 - DNA, 19 bp, Homo sapiens
  siRNA target sequence for ATP2A2 (NM_001681.2,1712-1730).
cctgaaggtgtcattgaca

SEQ ID NO: 72755 - DNA, 19 bp, Homo sapiens
  siRNA target sequence for ATP2A2 (NM_001681.2,1741-1759).
cattcgagttggaagtact

SEQ ID NO: 72756 - DNA, 19 bp, Homo sapiens
  siRNA target sequence for ATP2A2 (NM_001681.2,1752-1770).
gaagtactaaggttcctat

SEQ ID NO: 72757 - DNA, 19 bp, Homo sapiens
  siRNA target sequence for ATP2A2 (NM_001681.2,1895-1913).
gaggactctgccaacttta

SEQ ID NO: 72758 - DNA, 19 bp, Homo sapiens
  siRNA target sequence for ATP2A2 (NM_001681.2,2214-2232).
ctaaaatcgtagaatttct

SEQ ID NO: 72759 - DNA, 19 bp, Homo sapiens
  siRNA target sequence for ATP2A2 (NM_001681.2,2327-2345).
ggcactgcggtggctaaaa

SEQ ID NO: 72760 - DNA, 19 bp, Homo sapiens
  siRNA target sequence for ATP2A2 (NM_001681.2,2460-2478).
ccaacgtcggggaagttgt

SEQ ID NO: 72761 - DNA, 19 bp, Homo sapiens
  siRNA target sequence for ATP2A2 (NM_001681.2,2491-2509).
gacagcagcccttggattt

SEQ ID NO: 72762 - DNA, 19 bp, Homo sapiens
  siRNA target sequence for ATP2A2 (NM_001681.2,2505-2523).
gatttcccgaggctttgat

SEQ ID NO: 72763 - DNA, 19 bp, Homo sapiens
  siRNA target sequence for ATP2A2 (NM_001681.2,2595-2613).
ctgatctggacatcatgaa

SEQ ID NO: 72764 - DNA, 19 bp, Homo sapiens
  siRNA target sequence for ATP2A2 (NM_001681.2,2772-2790).
gtcatttcctacagtgtaa

SEQ ID NO: 72765 - DNA, 19 bp, Homo sapiens
  siRNA target sequence for ATP2A2 (NM_001681.2,2794-2812).
ggacaacccggactttgaa

SEQ ID NO: 72766 - DNA, 19 bp, Homo sapiens
  siRNA target sequence for ATP2A2 (NM_001681.2,2814-2832).
gcgtggattgtgcaatctt

SEQ ID NO: 72767 - DNA, 19 bp, Homo sapiens
  siRNA target sequence for ATP2A2 (NM_001681.2,2815-2833).
cgtggattgtgcaatcttt

SEQ ID NO: 72768 - DNA, 19 bp, Homo sapiens
  siRNA target sequence for ATP2A2 (NM_001681.2,2819-2837).
gattgtgcaatctttgaat

SEQ ID NO: 72769 - DNA, 19 bp, Homo sapiens
  siRNA target sequence for ATP2A2 (NM_001681.2,2838-2856).
ccccatacccgatgacaat

SEQ ID NO: 72770 - DNA, 19 bp, Homo sapiens
  siRNA target sequence for ATP2A2 (NM_001681.2,2857-2875).
ggcgctctctgttctagta

SEQ ID NO: 72771 - DNA, 19 bp, Homo sapiens
  siRNA target sequence for ATP2A2 (NM_001681.2,2858-2876).
gcgctctctgttctagtaa

SEQ ID NO: 72772 - DNA, 19 bp, Homo sapiens
  siRNA target sequence for ATP2A2 (NM_001681.2,2863-2881).
ctctgttctagtaactata

SEQ ID NO: 72773 - DNA, 19 bp, Homo sapiens
  siRNA target sequence for ATP2A2 (NM_001681.2,2865-2883).
ctgttctagtaactataga

SEQ ID NO: 72774 - DNA, 19 bp, Homo sapiens
  siRNA target sequence for ATP2A2 (NM_001681.2,2867-2885).
gttctagtaactatagaaa

SEQ ID NO: 72775 - DNA, 19 bp, Homo sapiens
  siRNA target sequence for ATP2A2 (NM_001681.2,3081-3099).
ccttgcccgtgattctcat

SEQ ID NO: 72776 - DNA, 19 bp, Homo sapiens
  siRNA target sequence for ATP2A2 (NM_170665.2,3212-3230).
ccgtttgtgctgctcataa

SEQ ID NO: 72777 - DNA, 19 bp, Homo sapiens
  siRNA target sequence for ATP2A2 (NM_170665.2,3236-3254).
ctggtgatctgggtctata

SEQ ID NO: 72778 - DNA, 19 bp, Homo sapiens
  siRNA target sequence for ATP2A3 (NM_005173.2,586-604).
cgtcccaggggacattgta

SEQ ID NO: 72779 - DNA, 19 bp, Homo sapiens
  siRNA target sequence for ATP2A3 (NM_005173.2,591-609).
caggggacattgtagaagt

SEQ ID NO: 72780 - DNA, 19 bp, Homo sapiens
  siRNA target sequence for ATP2A3 (NM_005173.2,641-659).
cgcctcatcgagatcaagt

SEQ ID NO: 72781 - DNA, 19 bp, Homo sapiens
  siRNA target sequence for ATP2A3 (NM_005173.2,685-703).
catcctgacgggtgaatct

SEQ ID NO: 72782 - DNA, 19 bp, Homo sapiens
  siRNA target sequence for ATP2A3 (NM_005173.2,773-791).
ctgttttctggcaccaata

SEQ ID NO: 72783 - DNA, 19 bp, Homo sapiens
  siRNA target sequence for ATP2A3 (NM_005173.2,1019-1037).
cgtggcgctgtctactact

SEQ ID NO: 72784 - DNA, 19 bp, Homo sapiens
  siRNA target sequence for ATP2A3 (NM_005173.2,1020-1038).
gtggcgctgtctactactt

SEQ ID NO: 72785 - DNA, 19 bp, Homo sapiens
  siRNA target sequence for ATP2A3 (NM_005173.2,1082-1100).
ctcccggctgtcatcacta

SEQ ID NO: 72786 - DNA, 19 bp, Homo sapiens
  siRNA target sequence for ATP2A3 (NM_005173.2,1085-1103).
ccggctgtcatcactacat

SEQ ID NO: 72787 - DNA, 19 bp, Homo sapiens
  siRNA target sequence for ATP2A3 (NM_005173.2,1550-1568).
cgagctggcgcctgtaaca

SEQ ID NO: 72788 - DNA, 19 bp, Homo sapiens
  siRNA target sequence for ATP2A3 (NM_005173.2,1885-1903).
ggacgactgcagcaagttt

SEQ ID NO: 72789 - DNA, 19 bp, Homo sapiens
  siRNA target sequence for ATP2A3 (NM_005173.2,2020-2038).
gatcacgggggataacaaa

SEQ ID NO: 72790 - DNA, 19 bp, Homo sapiens
  siRNA target sequence for ATP2A3 (NM_005173.2,2059-2077).
ccgcaggcttggcatcttt

SEQ ID NO: 72791 - DNA, 19 bp, Homo sapiens
  siRNA target sequence for ATP2A3 (NM_005173.2,2236-2254).
cgagatcactgctatgact

SEQ ID NO: 72792 - DNA, 19 bp, Homo sapiens
  siRNA target sequence for ATP2A3 (NM_005173.2,2440-2458).
cctcatctcctccaatgtt

SEQ ID NO: 72793 - DNA, 19 bp, Homo sapiens
  siRNA target sequence for ATP2A3 (NM_005173.2,2709-2727).
cctggtggtttgtgtatga

SEQ ID NO: 72794 - DNA, 19 bp, Homo sapiens
  siRNA target sequence for ATP2A3 (NM_005173.2,2735-2753).
ggacctcacatcaacttct

SEQ ID NO: 72795 - DNA, 19 bp, Homo sapiens
  siRNA target sequence for ATP2A3 (NM_005173.2,2857-2875).
cgtgctcgtgaccattgaa

SEQ ID NO: 72796 - DNA, 19 bp, Homo sapiens
  siRNA target sequence for ATP2A3 (NM_005173.2,2858-2876).
gtgctcgtgaccattgaaa

SEQ ID NO: 72797 - DNA, 19 bp, Homo sapiens
  siRNA target sequence for ATP2A3 (NM_005173.2,2861-2879).
ctcgtgaccattgaaatgt

SEQ ID NO: 72798 - DNA, 19 bp, Homo sapiens
  siRNA target sequence for ATP2A3 (NM_005173.2,3055-3073).
ggtggtgctccagatatct

SEQ ID NO: 72799 - DNA, 19 bp, Homo sapiens
  siRNA target sequence for ATP2A3 (NM_174953.1,3124-3142).
catgcacgcctgtctttat

SEQ ID NO: 72800 - DNA, 19 bp, Homo sapiens
  siRNA target sequence for ATP2B1 (NM_001682.1,185-203).
ggcgacatggcaaacaact

SEQ ID NO: 72801 - DNA, 19 bp, Homo sapiens
  siRNA target sequence for ATP2B1 (NM_001682.1,209-227).
gcttacagtggtgtgaaaa

SEQ ID NO: 72802 - DNA, 19 bp, Homo sapiens
  siRNA target sequence for ATP2B1 (NM_001682.1,235-253).
gaaggaagctaatcatgat

SEQ ID NO: 72803 - DNA, 19 bp, Homo sapiens
  siRNA target sequence for ATP2B1 (NM_001682.1,307-325).
cacagatgcattacgaaaa

SEQ ID NO: 72804 - DNA, 19 bp, Homo sapiens
  siRNA target sequence for ATP2B1 (NM_001682.1,353-371).
ggaatttgcaccaaattga

SEQ ID NO: 72805 - DNA, 19 bp, Homo sapiens
  siRNA target sequence for ATP2B1 (NM_001682.1,375-393).
catctcccaatgaaggttt

SEQ ID NO: 72806 - DNA, 19 bp, Homo sapiens
  siRNA target sequence for ATP2B1 (NM_001682.1,442-460).
gaattttatacctcctaaa

SEQ ID NO: 72807 - DNA, 19 bp, Homo sapiens
  siRNA target sequence for ATP2B1 (NM_001682.1,500-518).
caagatgtcactttaatta

SEQ ID NO: 72808 - DNA, 19 bp, Homo sapiens
  siRNA target sequence for ATP2B1 (NM_001682.1,565-583).
gcctccagaaggggataat

SEQ ID NO: 72809 - DNA, 19 bp, Homo sapiens
  siRNA target sequence for ATP2B1 (NM_001682.1,682-700).
gttagtaacagctttcaat

SEQ ID NO: 72810 - DNA, 19 bp, Homo sapiens
  siRNA target sequence for ATP2B1 (NM_001682.1,774-792).
ggggtggtcaggtcattca

SEQ ID NO: 72811 - DNA, 19 bp, Homo sapiens
  siRNA target sequence for ATP2B1 (NM_001682.1,777-795).
gtggtcaggtcattcagat

SEQ ID NO: 72812 - DNA, 19 bp, Homo sapiens
  siRNA target sequence for ATP2B1 (NM_001682.1,793-811).
gatacctgtagctgacatt

SEQ ID NO: 72813 - DNA, 19 bp, Homo sapiens
  siRNA target sequence for ATP2B1 (NM_001682.1,854-872).
ccagctgacggcatactta

SEQ ID NO: 72814 - DNA, 19 bp, Homo sapiens
  siRNA target sequence for ATP2B1 (NM_001682.1,855-873).
cagctgacggcatacttat

SEQ ID NO: 72815 - DNA, 19 bp, Homo sapiens
  siRNA target sequence for ATP2B1 (NM_001682.1,858-876).
ctgacggcatacttattca

SEQ ID NO: 72816 - DNA, 19 bp, Homo sapiens
  siRNA target sequence for ATP2B1 (NM_001682.1,879-897).
gcaacgatcttaaaattga

SEQ ID NO: 72817 - DNA, 19 bp, Homo sapiens
  siRNA target sequence for ATP2B1 (NM_001682.1,880-898).
caacgatcttaaaattgat

SEQ ID NO: 72818 - DNA, 19 bp, Homo sapiens
  siRNA target sequence for ATP2B1 (NM_001682.1,883-901).
cgatcttaaaattgatgaa

SEQ ID NO: 72819 - DNA, 19 bp, Homo sapiens
  siRNA target sequence for ATP2B1 (NM_001682.1,910-928).
gactggtgaatcagatcat

SEQ ID NO: 72820 - DNA, 19 bp, Homo sapiens
  siRNA target sequence for ATP2B1 (NM_001682.1,912-930).
ctggtgaatcagatcatgt

SEQ ID NO: 72821 - DNA, 19 bp, Homo sapiens
  siRNA target sequence for ATP2B1 (NM_001682.1,914-932).
ggtgaatcagatcatgtta

SEQ ID NO: 72822 - DNA, 19 bp, Homo sapiens
  siRNA target sequence for ATP2B1 (NM_001682.1,915-933).
gtgaatcagatcatgttaa

SEQ ID NO: 72823 - DNA, 19 bp, Homo sapiens
  siRNA target sequence for ATP2B1 (NM_001682.1,962-980).
ctatcaggtactcatgtaa

SEQ ID NO: 72824 - DNA, 19 bp, Homo sapiens
  siRNA target sequence for ATP2B1 (NM_001682.1,1302-1320).
gcaaagcaggtctgttgat

SEQ ID NO: 72825 - DNA, 19 bp, Homo sapiens
  siRNA target sequence for ATP2B1 (NM_001682.1,1400-1418).
gagtgcacaccaatttata

SEQ ID NO: 72826 - DNA, 19 bp, Homo sapiens
  siRNA target sequence for ATP2B1 (NM_001682.1,1402-1420).
gtgcacaccaatttatata

SEQ ID NO: 72827 - DNA, 19 bp, Homo sapiens
  siRNA target sequence for ATP2B1 (NM_001682.1,1404-1422).
gcacaccaatttatataca

SEQ ID NO: 72828 - DNA, 19 bp, Homo sapiens
  siRNA target sequence for ATP2B1 (NM_001682.1,1405-1423).
cacaccaatttatatacaa

SEQ ID NO: 72829 - DNA, 19 bp, Homo sapiens
  siRNA target sequence for ATP2B1 (NM_001682.1,1407-1425).
caccaatttatatacaata

SEQ ID NO: 72830 - DNA, 19 bp, Homo sapiens
  siRNA target sequence for ATP2B1 (NM_001682.1,1409-1427).
ccaatttatatacaatact

SEQ ID NO: 72831 - DNA, 19 bp, Homo sapiens
  siRNA target sequence for ATP2B1 (NM_001682.1,1571-1589).
gaaaccatgggaaatgcta

SEQ ID NO: 72832 - DNA, 19 bp, Homo sapiens
  siRNA target sequence for ATP2B1 (NM_001682.1,1579-1597).
gggaaatgctacagctatt

SEQ ID NO: 72833 - DNA, 19 bp, Homo sapiens
  siRNA target sequence for ATP2B1 (NM_001682.1,1638-1656).
cagtcgttcaagcttacat

SEQ ID NO: 72834 - DNA, 19 bp, Homo sapiens
  siRNA target sequence for ATP2B1 (NM_001682.1,1642-1660).
cgttcaagcttacataaat

SEQ ID NO: 72835 - DNA, 19 bp, Homo sapiens
  siRNA target sequence for ATP2B1 (NM_001682.1,1691-1709).
gaagctattccaccaaata

SEQ ID NO: 72836 - DNA, 19 bp, Homo sapiens
  siRNA target sequence for ATP2B1 (NM_001682.1,1739-1757).
gtgaattgtgcttatacat

SEQ ID NO: 72837 - DNA, 19 bp, Homo sapiens
  siRNA target sequence for ATP2B1 (NM_001682.1,1746-1764).
gtgcttatacatcaaaaat

SEQ ID NO: 72838 - DNA, 19 bp, Homo sapiens
  siRNA target sequence for ATP2B1 (NM_001682.1,1748-1766).
gcttatacatcaaaaatat

SEQ ID NO: 72839 - DNA, 19 bp, Homo sapiens
  siRNA target sequence for ATP2B1 (NM_001682.1,1793-1811).
cctcgtcacgttggtaata

SEQ ID NO: 72840 - DNA, 19 bp, Homo sapiens
  siRNA target sequence for ATP2B1 (NM_001682.1,1794-1812).
ctcgtcacgttggtaataa

SEQ ID NO: 72841 - DNA, 19 bp, Homo sapiens
  siRNA target sequence for ATP2B1 (NM_001682.1,1796-1814).
cgtcacgttggtaataaaa

SEQ ID NO: 72842 - DNA, 19 bp, Homo sapiens
  siRNA target sequence for ATP2B1 (NM_001682.1,1824-1842).
ccttgttgggacttctttt

SEQ ID NO: 72843 - DNA, 19 bp, Homo sapiens
  siRNA target sequence for ATP2B1 (NM_001682.1,1853-1871).
cgggattatcaggatgtta

SEQ ID NO: 72844 - DNA, 19 bp, Homo sapiens
  siRNA target sequence for ATP2B1 (NM_001682.1,1889-1907).
gaagcactgtacaaagtct

SEQ ID NO: 72845 - DNA, 19 bp, Homo sapiens
  siRNA target sequence for ATP2B1 (NM_001682.1,1922-1940).
gttaggaagtccatgagta

SEQ ID NO: 72846 - DNA, 19 bp, Homo sapiens
  siRNA target sequence for ATP2B1 (NM_001682.1,1936-1954).
gagtactgtcctgaaaaat

SEQ ID NO: 72847 - DNA, 19 bp, Homo sapiens
  siRNA target sequence for ATP2B1 (NM_001682.1,1961-1979).
ggaagttatcgaatattca

SEQ ID NO: 72848 - DNA, 19 bp, Homo sapiens
  siRNA target sequence for ATP2B1 (NM_001682.1,1981-1999).
caagggtgcatctgagata

SEQ ID NO: 72849 - DNA, 19 bp, Homo sapiens
  siRNA target sequence for ATP2B1 (NM_001682.1,1994-2012).
gagataattctgaaaaagt

SEQ ID NO: 72850 - DNA, 19 bp, Homo sapiens
  siRNA target sequence for ATP2B1 (NM_001682.1,2036-2054).
ggtgaggcaaaagtattca

SEQ ID NO: 72851 - DNA, 19 bp, Homo sapiens
  siRNA target sequence for ATP2B1 (NM_001682.1,2057-2075).
ccaagggaccgtgatgata

SEQ ID NO: 72852 - DNA, 19 bp, Homo sapiens
  siRNA target sequence for ATP2B1 (NM_001682.1,2058-2076).
caagggaccgtgatgatat

SEQ ID NO: 72853 - DNA, 19 bp, Homo sapiens
  siRNA target sequence for ATP2B1 (NM_001682.1,2061-2079).
gggaccgtgatgatattgt

SEQ ID NO: 72854 - DNA, 19 bp, Homo sapiens
  siRNA target sequence for ATP2B1 (NM_001682.1,2112-2130).
gcttgagaaccatatgtct

SEQ ID NO: 72855 - DNA, 19 bp, Homo sapiens
  siRNA target sequence for ATP2B1 (NM_001682.1,2122-2140).
catatgtcttgcattcaga

SEQ ID NO: 72856 - DNA, 19 bp, Homo sapiens
  siRNA target sequence for ATP2B1 (NM_001682.1,2172-2190).
gggataatgaaaatgatat

SEQ ID NO: 72857 - DNA, 19 bp, Homo sapiens
  siRNA target sequence for ATP2B1 (NM_001682.1,2194-2212).
caccggccttacatgcatt

SEQ ID NO: 72858 - DNA, 19 bp, Homo sapiens
  siRNA target sequence for ATP2B1 (NM_001682.1,2269-2287).
gtgtcagagggctggaatt

SEQ ID NO: 72859 - DNA, 19 bp, Homo sapiens
  siRNA target sequence for ATP2B1 (NM_001682.1,2336-2354).
gctaccaaatgtggtattt

SEQ ID NO: 72860 - DNA, 19 bp, Homo sapiens
  siRNA target sequence for ATP2B1 (NM_001682.1,2432-2450).
gagcaagagaggatagaca

SEQ ID NO: 72861 - DNA, 19 bp, Homo sapiens
  siRNA target sequence for ATP2B1 (NM_001682.1,2438-2456).
gagaggatagacaagattt

SEQ ID NO: 72862 - DNA, 19 bp, Homo sapiens
  siRNA target sequence for ATP2B1 (NM_001682.1,2458-2476).
gccaaaacttcgagtactt

SEQ ID NO: 72863 - DNA, 19 bp, Homo sapiens
  siRNA target sequence for ATP2B1 (NM_001682.1,2484-2502).
catctcctactgataagca

SEQ ID NO: 72864 - DNA, 19 bp, Homo sapiens
  siRNA target sequence for ATP2B1 (NM_001682.1,2490-2508).
ctactgataagcatacact

SEQ ID NO: 72865 - DNA, 19 bp, Homo sapiens
  siRNA target sequence for ATP2B1 (NM_001682.1,2505-2523).
cactggttaaaggtataat

SEQ ID NO: 72866 - DNA, 19 bp, Homo sapiens
  siRNA target sequence for ATP2B1 (NM_001682.1,2548-2566).
ccaggttgtagctgtaact

SEQ ID NO: 72867 - DNA, 19 bp, Homo sapiens
  siRNA target sequence for ATP2B1 (NM_001682.1,2582-2600).
gatggcccagcactaaaga

SEQ ID NO: 72868 - DNA, 19 bp, Homo sapiens
  siRNA target sequence for ATP2B1 (NM_001682.1,2604-2622).
cagatgttggatttgcaat

SEQ ID NO: 72869 - DNA, 19 bp, Homo sapiens
  siRNA target sequence for ATP2B1 (NM_001682.1,2623-2641).
gggtattgctggaactgat

SEQ ID NO: 72870 - DNA, 19 bp, Homo sapiens
  siRNA target sequence for ATP2B1 (NM_001682.1,2631-2649).
ctggaactgatgtagctaa

SEQ ID NO: 72871 - DNA, 19 bp, Homo sapiens
  siRNA target sequence for ATP2B1 (NM_001682.1,2634-2652).
gaactgatgtagctaaaga

SEQ ID NO: 72872 - DNA, 19 bp, Homo sapiens
  siRNA target sequence for ATP2B1 (NM_001682.1,2654-2672).
gcatccgatattattctca

SEQ ID NO: 72873 - DNA, 19 bp, Homo sapiens
  siRNA target sequence for ATP2B1 (NM_001682.1,2680-2698).
caactttacaagcattgtt

SEQ ID NO: 72874 - DNA, 19 bp, Homo sapiens
  siRNA target sequence for ATP2B1 (NM_001682.1,2731-2749).
cagcatctcaaaattcctt

SEQ ID NO: 72875 - DNA, 19 bp, Homo sapiens
  siRNA target sequence for ATP2B1 (NM_001682.1,2755-2773).
ccaacttactgttaatgta

SEQ ID NO: 72876 - DNA, 19 bp, Homo sapiens
  siRNA target sequence for ATP2B1 (NM_001682.1,2848-2866).
ggtaaacctcataatggat

SEQ ID NO: 72877 - DNA, 19 bp, Homo sapiens
  siRNA target sequence for ATP2B1 (NM_001682.1,2849-2867).
gtaaacctcataatggata

SEQ ID NO: 72878 - DNA, 19 bp, Homo sapiens
  siRNA target sequence for ATP2B1 (NM_001682.1,2912-2930).
ctcttgcttcggaaacctt

SEQ ID NO: 72879 - DNA, 19 bp, Homo sapiens
  siRNA target sequence for ATP2B1 (NM_001682.1,2914-2932).
cttgcttcggaaaccttat

SEQ ID NO: 72880 - DNA, 19 bp, Homo sapiens
  siRNA target sequence for ATP2B1 (NM_001682.1,2917-2935).
gcttcggaaaccttatggt

SEQ ID NO: 72881 - DNA, 19 bp, Homo sapiens
  siRNA target sequence for ATP2B1 (NM_001682.1,2918-2936).
cttcggaaaccttatggta

SEQ ID NO: 72882 - DNA, 19 bp, Homo sapiens
  siRNA target sequence for ATP2B1 (NM_001682.1,2946-2964).
ctctcatctcacgtacaat

SEQ ID NO: 72883 - DNA, 19 bp, Homo sapiens
  siRNA target sequence for ATP2B1 (NM_001682.1,2948-2966).
ctcatctcacgtacaatga

SEQ ID NO: 72884 - DNA, 19 bp, Homo sapiens
  siRNA target sequence for ATP2B1 (NM_001682.1,2957-2975).
cgtacaatgatgaagaata

SEQ ID NO: 72885 - DNA, 19 bp, Homo sapiens
  siRNA target sequence for ATP2B1 (NM_001682.1,2988-3006).
cattctatcaacttgtagt

SEQ ID NO: 72886 - DNA, 19 bp, Homo sapiens
  siRNA target sequence for ATP2B1 (NM_001682.1,3010-3028).
ctttacactcttatttgct

SEQ ID NO: 72887 - DNA, 19 bp, Homo sapiens
  siRNA target sequence for ATP2B1 (NM_001682.1,3084-3102).
cttcagaacattatactat

SEQ ID NO: 72888 - DNA, 19 bp, Homo sapiens
  siRNA target sequence for ATP2B1 (NM_001682.1,3089-3107).
gaacattatactattgttt

SEQ ID NO: 72889 - DNA, 19 bp, Homo sapiens
  siRNA target sequence for ATP2B1 (NM_001682.1,3176-3194).
gtattcgaaggaatcttta

SEQ ID NO: 72890 - DNA, 19 bp, Homo sapiens
  siRNA target sequence for ATP2B1 (NM_001682.1,3226-3244).
cacttttgtggtacagata

SEQ ID NO: 72891 - DNA, 19 bp, Homo sapiens
  siRNA target sequence for ATP2B1 (NM_001682.1,3303-3321).
ggctatggtcaatattcct

SEQ ID NO: 72892 - DNA, 19 bp, Homo sapiens
  siRNA target sequence for ATP2B1 (NM_001682.1,3304-3322).
gctatggtcaatattccta

SEQ ID NO: 72893 - DNA, 19 bp, Homo sapiens
  siRNA target sequence for ATP2B1 (NM_001682.1,3309-3327).
ggtcaatattcctaggaat

SEQ ID NO: 72894 - DNA, 19 bp, Homo sapiens
  siRNA target sequence for ATP2B1 (NM_001682.1,3319-3337).
cctaggaatgggaacatta

SEQ ID NO: 72895 - DNA, 19 bp, Homo sapiens
  siRNA target sequence for ATP2B1 (NM_001682.1,3338-3356).
ctctggggccagcttattt

SEQ ID NO: 72896 - DNA, 19 bp, Homo sapiens
  siRNA target sequence for ATP2B1 (NM_001682.1,3344-3362).
ggccagcttatttcaacaa

SEQ ID NO: 72897 - DNA, 19 bp, Homo sapiens
  siRNA target sequence for ATP2B1 (NM_001682.1,3345-3363).
gccagcttatttcaacaat

SEQ ID NO: 72898 - DNA, 19 bp, Homo sapiens
  siRNA target sequence for ATP2B1 (NM_001682.1,3346-3364).
ccagcttatttcaacaatt

SEQ ID NO: 72899 - DNA, 19 bp, Homo sapiens
  siRNA target sequence for ATP2B1 (NM_001682.1,3365-3383).
ccaactagccgtttaaaat

SEQ ID NO: 72900 - DNA, 19 bp, Homo sapiens
  siRNA target sequence for ATP2B1 (NM_001682.1,3366-3384).
caactagccgtttaaaatt

SEQ ID NO: 72901 - DNA, 19 bp, Homo sapiens
  siRNA target sequence for ATP2B1 (NM_001682.1,3369-3387).
ctagccgtttaaaattcct

SEQ ID NO: 72902 - DNA, 19 bp, Homo sapiens
  siRNA target sequence for ATP2B1 (NM_001682.1,3396-3414).
ctggtcatggaacacaaaa

SEQ ID NO: 72903 - DNA, 19 bp, Homo sapiens
  siRNA target sequence for ATP2B1 (NM_001682.1,3482-3500).
cggcgtggccaaatcttgt

SEQ ID NO: 72904 - DNA, 19 bp, Homo sapiens
  siRNA target sequence for ATP2B1 (NM_001682.1,3509-3527).
ggtctgaacagaatccaaa

SEQ ID NO: 72905 - DNA, 19 bp, Homo sapiens
  siRNA target sequence for ATP2B1 (NM_001682.1,3578-3596).
gaaaaaccggaatcaagaa

SEQ ID NO: 72906 - DNA, 19 bp, Homo sapiens
  siRNA target sequence for ATP2B1 (NM_001682.1,3586-3604).
ggaatcaagaagttcgatt

SEQ ID NO: 72907 - DNA, 19 bp, Homo sapiens
  siRNA target sequence for ATP2B1 (NM_001682.1,3594-3612).
gaagttcgattcacaactt

SEQ ID NO: 72908 - DNA, 19 bp, Homo sapiens
  siRNA target sequence for ATP2B1 (NM_001682.1,3597-3615).
gttcgattcacaactttat

SEQ ID NO: 72909 - DNA, 19 bp, Homo sapiens
  siRNA target sequence for ATP2B1 (NM_001682.1,3624-3642).
ctgagtttaggatagaaga

SEQ ID NO: 72910 - DNA, 19 bp, Homo sapiens
  siRNA target sequence for ATP2B1 (NM_001682.1,3628-3646).
gtttaggatagaagattca

SEQ ID NO: 72911 - DNA, 19 bp, Homo sapiens
  siRNA target sequence for ATP2B1 (NM_001682.1,3649-3667).
gcctcatatcccccttatt

SEQ ID NO: 72912 - DNA, 19 bp, Homo sapiens
  siRNA target sequence for ATP2B1 (NM_001682.1,3651-3669).
ctcatatcccccttattga

SEQ ID NO: 72913 - DNA, 19 bp, Homo sapiens
  siRNA target sequence for ATP2B1 (NM_001682.1,3747-3765).
ctgttgacagtggaattca

SEQ ID NO: 72914 - DNA, 19 bp, Homo sapiens
  siRNA target sequence for ATP2B1 (NM_001682.1,3756-3774).
gtggaattcaccttacaat

SEQ ID NO: 72915 - DNA, 19 bp, Homo sapiens
  siRNA target sequence for ATP2B1 (NM_001682.1,3764-3782).
caccttacaatagaaatga

SEQ ID NO: 72916 - DNA, 19 bp, Homo sapiens
  siRNA target sequence for ATP2B1 (NM_001682.1,3806-3824).
ccaggaagcccactacata

SEQ ID NO: 72917 - DNA, 19 bp, Homo sapiens
  siRNA target sequence for ATP2B1 (NM_001682.1,3809-3827).
ggaagcccactacatagtt

SEQ ID NO: 72918 - DNA, 19 bp, Homo sapiens
  siRNA target sequence for ATP2B1 (NM_001682.1,3818-3836).
ctacatagtttggaaacat

SEQ ID NO: 72919 - DNA, 19 bp, Homo sapiens
  siRNA target sequence for ATP2B2 (NM_001683.1,695-713).
ctgaggctgtggtcaagat

SEQ ID NO: 72920 - DNA, 19 bp, Homo sapiens
  siRNA target sequence for ATP2B2 (NM_001683.1,1043-1061).
ccattctcctctcagttat

SEQ ID NO: 72921 - DNA, 19 bp, Homo sapiens
  siRNA target sequence for ATP2B2 (NM_001683.1,1131-1149).
catcgagcaggaacagaaa

SEQ ID NO: 72922 - DNA, 19 bp, Homo sapiens
  siRNA target sequence for ATP2B2 (NM_001683.1,1273-1291).
gacctcaagattgatgaaa

SEQ ID NO: 72923 - DNA, 19 bp, Homo sapiens
  siRNA target sequence for ATP2B2 (NM_001683.1,1742-1760).
ccgtctacgtgcagtactt

SEQ ID NO: 72924 - DNA, 19 bp, Homo sapiens
  siRNA target sequence for ATP2B2 (NM_001683.1,1743-1761).
cgtctacgtgcagtacttt

SEQ ID NO: 72925 - DNA, 19 bp, Homo sapiens
  siRNA target sequence for ATP2B2 (NM_001683.1,1993-2011).
gacgtccactataaagaga

SEQ ID NO: 72926 - DNA, 19 bp, Homo sapiens
  siRNA target sequence for ATP2B2 (NM_001683.1,2629-2647).
gtcactggcgacaatatca

SEQ ID NO: 72927 - DNA, 19 bp, Homo sapiens
  siRNA target sequence for ATP2B2 (NM_001683.1,2767-2785).
gagcgaattgacaagatct

SEQ ID NO: 72928 - DNA, 19 bp, Homo sapiens
  siRNA target sequence for ATP2B2 (NM_001683.1,2998-3016).
ctgacagacgacaatttca

SEQ ID NO: 72929 - DNA, 19 bp, Homo sapiens
  siRNA target sequence for ATP2B2 (NM_001683.1,3490-3508).
cacggcgagcgcaatgtct

SEQ ID NO: 72930 - DNA, 19 bp, Homo sapiens
  siRNA target sequence for ATP2B2 (NM_001683.1,3492-3510).
cggcgagcgcaatgtcttt

SEQ ID NO: 72931 - DNA, 19 bp, Homo sapiens
  siRNA target sequence for ATP2B2 (NM_001683.1,3557-3575).
cctttgccatccagatagt

SEQ ID NO: 72932 - DNA, 19 bp, Homo sapiens
  siRNA target sequence for ATP2B2 (NM_001683.1,3628-3646).
cagtggatgtggtgcatat

SEQ ID NO: 72933 - DNA, 19 bp, Homo sapiens
  siRNA target sequence for ATP2B2 (NM_001683.1,3890-3908).
ctctctatgaaggtttaga

SEQ ID NO: 72934 - DNA, 19 bp, Homo sapiens
  siRNA target sequence for ATP2B2 (NM_001683.1,3922-3940).
cgaacctccatccataact

SEQ ID NO: 72935 - DNA, 19 bp, Homo sapiens
  siRNA target sequence for ATP2B2 (NM_001683.1,3923-3941).
gaacctccatccataactt

SEQ ID NO: 72936 - DNA, 19 bp, Homo sapiens
  siRNA target sequence for ATP2B2 (NM_001683.1,3955-3973).
gaattccggatcgaagatt

SEQ ID NO: 72937 - DNA, 19 bp, Homo sapiens
  siRNA target sequence for ATP2B2 (NM_001683.1,4048-4066).
ccgtcatccctcaacaaga

SEQ ID NO: 72938 - DNA, 19 bp, Homo sapiens
  siRNA target sequence for ATP2B2 (NM_001683.1,4049-4067).
cgtcatccctcaacaagaa

SEQ ID NO: 72939 - DNA, 19 bp, Homo sapiens
  siRNA target sequence for ATP2B2 (NM_001683.1,4098-4116).
gacgaccgacacaagcaaa

SEQ ID NO: 72940 - DNA, 19 bp, Homo sapiens
  siRNA target sequence for ATP2B3 (NM_021949.1,130-148).
ggcgacatggccaatagtt

SEQ ID NO: 72941 - DNA, 19 bp, Homo sapiens
  siRNA target sequence for ATP2B3 (NM_021949.1,390-408).
cttcatccccccaaagcaa

SEQ ID NO: 72942 - DNA, 19 bp, Homo sapiens
  siRNA target sequence for ATP2B3 (NM_021949.1,529-547).
gaagcctgtgggaatgtgt

SEQ ID NO: 72943 - DNA, 19 bp, Homo sapiens
  siRNA target sequence for ATP2B3 (NM_021949.1,1070-1088).
gtagccagaccaaagctaa

SEQ ID NO: 72944 - DNA, 19 bp, Homo sapiens
  siRNA target sequence for ATP2B3 (NM_021949.1,1209-1227).
ggggaagctcacaaagcta

SEQ ID NO: 72945 - DNA, 19 bp, Homo sapiens
  siRNA target sequence for ATP2B3 (NM_021949.1,1284-1302).
ggtcctctactttgtgatt

SEQ ID NO: 72946 - DNA, 19 bp, Homo sapiens
  siRNA target sequence for ATP2B3 (NM_021949.1,1341-1359).
gtgcacgccggtctatgta

SEQ ID NO: 72947 - DNA, 19 bp, Homo sapiens
  siRNA target sequence for ATP2B3 (NM_021949.1,1343-1361).
gcacgccggtctatgtaca

SEQ ID NO: 72948 - DNA, 19 bp, Homo sapiens
  siRNA target sequence for ATP2B3 (NM_021949.1,1344-1362).
cacgccggtctatgtacaa

SEQ ID NO: 72949 - DNA, 19 bp, Homo sapiens
  siRNA target sequence for ATP2B3 (NM_021949.1,1346-1364).
cgccggtctatgtacaata

SEQ ID NO: 72950 - DNA, 19 bp, Homo sapiens
  siRNA target sequence for ATP2B3 (NM_021949.1,1348-1366).
ccggtctatgtacaatact

SEQ ID NO: 72951 - DNA, 19 bp, Homo sapiens
  siRNA target sequence for ATP2B3 (NM_021949.1,1349-1367).
cggtctatgtacaatactt

SEQ ID NO: 72952 - DNA, 19 bp, Homo sapiens
  siRNA target sequence for ATP2B3 (NM_021949.1,1631-1649).
gcgccctgacccctaagat

SEQ ID NO: 72953 - DNA, 19 bp, Homo sapiens
  siRNA target sequence for ATP2B3 (NM_021949.1,1822-1840).
ccggaagacaagctttaca

SEQ ID NO: 72954 - DNA, 19 bp, Homo sapiens
  siRNA target sequence for ATP2B3 (NM_021949.1,1823-1841).
cggaagacaagctttacaa

SEQ ID NO: 72955 - DNA, 19 bp, Homo sapiens
  siRNA target sequence for ATP2B3 (NM_021949.1,1928-1946).
cctcagagatcctcttgaa

SEQ ID NO: 72956 - DNA, 19 bp, Homo sapiens
  siRNA target sequence for ATP2B3 (NM_021949.1,1929-1947).
ctcagagatcctcttgaaa

SEQ ID NO: 72957 - DNA, 19 bp, Homo sapiens
  siRNA target sequence for ATP2B3 (NM_021949.1,1933-1951).
gagatcctcttgaaaaagt

SEQ ID NO: 72958 - DNA, 19 bp, Homo sapiens
  siRNA target sequence for ATP2B3 (NM_021949.1,2441-2459).
cactggtcaaagggattat

SEQ ID NO: 72959 - DNA, 19 bp, Homo sapiens
  siRNA target sequence for ATP2B3 (NM_021949.1,2730-2748).
cacaggtgcctgcattact

SEQ ID NO: 72960 - DNA, 19 bp, Homo sapiens
  siRNA target sequence for ATP2B3 (NM_021949.1,2790-2808).
cttgatcatggacacattt

SEQ ID NO: 72961 - DNA, 19 bp, Homo sapiens
  siRNA target sequence for ATP2B3 (NM_021949.1,3112-3130).
gtgttcgacggcatcttca

SEQ ID NO: 72962 - DNA, 19 bp, Homo sapiens
  siRNA target sequence for ATP2B3 (NM_021949.1,3164-3182).
ctttcgggattcagattgt

SEQ ID NO: 72963 - DNA, 19 bp, Homo sapiens
  siRNA target sequence for ATP2B3 (NM_021949.1,3377-3395).
ccgaaggcgaggaagagat

SEQ ID NO: 72964 - DNA, 19 bp, Homo sapiens
  siRNA target sequence for ATP2B3 (NM_021949.1,3475-3493).
gtagtgagtaccttcaaga

SEQ ID NO: 72965 - DNA, 19 bp, Homo sapiens
  siRNA target sequence for ATP2B3 (NM_021949.1,3546-3564).
gcttcatgacgtaaccaat

SEQ ID NO: 72966 - DNA, 19 bp, Homo sapiens
  siRNA target sequence for ATP2B3 (NM_021949.1,3550-3568).
catgacgtaaccaatcttt

SEQ ID NO: 72967 - DNA, 19 bp, Homo sapiens
  siRNA target sequence for ATP2B3 (NM_021949.1,3574-3592).
cctactcacgcaattctct

SEQ ID NO: 72968 - DNA, 19 bp, Homo sapiens
  siRNA target sequence for ATP2C1 (NM_014382.1,238-256).
gaaggttgcacgttttcaa

SEQ ID NO: 72969 - DNA, 19 bp, Homo sapiens
  siRNA target sequence for ATP2C1 (NM_014382.1,241-259).
ggttgcacgttttcaaaaa

SEQ ID NO: 72970 - DNA, 19 bp, Homo sapiens
  siRNA target sequence for ATP2C1 (NM_014382.1,242-260).
gttgcacgttttcaaaaaa

SEQ ID NO: 72971 - DNA, 19 bp, Homo sapiens
  siRNA target sequence for ATP2C1 (NM_014382.1,328-346).
cagtgaagttgcaagcatt

SEQ ID NO: 72972 - DNA, 19 bp, Homo sapiens
  siRNA target sequence for ATP2C1 (NM_014382.1,343-361).
cattctccaagctgatctt

SEQ ID NO: 72973 - DNA, 19 bp, Homo sapiens
  siRNA target sequence for ATP2C1 (NM_014382.1,349-367).
ccaagctgatcttcagaat

SEQ ID NO: 72974 - DNA, 19 bp, Homo sapiens
  siRNA target sequence for ATP2C1 (NM_014382.1,511-529).
catcagtgttttaatgcat

SEQ ID NO: 72975 - DNA, 19 bp, Homo sapiens
  siRNA target sequence for ATP2C1 (NM_014382.1,536-554).
gatgatgccgtcagtatca

SEQ ID NO: 72976 - DNA, 19 bp, Homo sapiens
  siRNA target sequence for ATP2C1 (NM_014382.1,555-573).
ctgtggcaatacttatcgt

SEQ ID NO: 72977 - DNA, 19 bp, Homo sapiens
  siRNA target sequence for ATP2C1 (NM_014382.1,560-578).
gcaatacttatcgttgtta

SEQ ID NO: 72978 - DNA, 19 bp, Homo sapiens
  siRNA target sequence for ATP2C1 (NM_014382.1,586-604).
ctttgttcaggaatatcgt

SEQ ID NO: 72979 - DNA, 19 bp, Homo sapiens
  siRNA target sequence for ATP2C1 (NM_014382.1,657-675).
gtgtgcgtgaaggaaaatt

SEQ ID NO: 72980 - DNA, 19 bp, Homo sapiens
  siRNA target sequence for ATP2C1 (NM_014382.1,669-687).
gaaaattggagcatacact

SEQ ID NO: 72981 - DNA, 19 bp, Homo sapiens
  siRNA target sequence for ATP2C1 (NM_014382.1,747-765).
ctgacttacgcttgtttga

SEQ ID NO: 72982 - DNA, 19 bp, Homo sapiens
  siRNA target sequence for ATP2C1 (NM_014382.1,860-878).
gatcttgcatcgagaagta

SEQ ID NO: 72983 - DNA, 19 bp, Homo sapiens
  siRNA target sequence for ATP2C1 (NM_014382.1,863-881).
cttgcatcgagaagtaaca

SEQ ID NO: 72984 - DNA, 19 bp, Homo sapiens
  siRNA target sequence for ATP2C1 (NM_014382.1,959-977).
ggggaggtttttaaaatga

SEQ ID NO: 72985 - DNA, 19 bp, Homo sapiens
  siRNA target sequence for ATP2C1 (NM_014382.1,1051-1069).
ctcctttggtataatagga

SEQ ID NO: 72986 - DNA, 19 bp, Homo sapiens
  siRNA target sequence for ATP2C1 (NM_014382.1,1053-1071).
cctttggtataataggaat

SEQ ID NO: 72987 - DNA, 19 bp, Homo sapiens
  siRNA target sequence for ATP2C1 (NM_014382.1,1059-1077).
gtataataggaatcatcat

SEQ ID NO: 72988 - DNA, 19 bp, Homo sapiens
  siRNA target sequence for ATP2C1 (NM_014382.1,1108-1126).
cctggaaatgtttactatt

SEQ ID NO: 72989 - DNA, 19 bp, Homo sapiens
  siRNA target sequence for ATP2C1 (NM_014382.1,1117-1135).
gtttactattagtgtaagt

SEQ ID NO: 72990 - DNA, 19 bp, Homo sapiens
  siRNA target sequence for ATP2C1 (NM_014382.1,1185-1203).
cgctagctcttggtgttat

SEQ ID NO: 72991 - DNA, 19 bp, Homo sapiens
  siRNA target sequence for ATP2C1 (NM_014382.1,1190-1208).
gctcttggtgttatgagaa

SEQ ID NO: 72992 - DNA, 19 bp, Homo sapiens
  siRNA target sequence for ATP2C1 (NM_014382.1,1191-1209).
ctcttggtgttatgagaat

SEQ ID NO: 72993 - DNA, 19 bp, Homo sapiens
  siRNA target sequence for ATP2C1 (NM_014382.1,1231-1249).
gaaaaagctgcctattgtt

SEQ ID NO: 72994 - DNA, 19 bp, Homo sapiens
  siRNA target sequence for ATP2C1 (NM_014382.1,1258-1276).
gggctgctgtaatgtgatt

SEQ ID NO: 72995 - DNA, 19 bp, Homo sapiens
  siRNA target sequence for ATP2C1 (NM_014382.1,1259-1277).
ggctgctgtaatgtgattt

SEQ ID NO: 72996 - DNA, 19 bp, Homo sapiens
  siRNA target sequence for ATP2C1 (NM_014382.1,1261-1279).
ctgctgtaatgtgatttgt

SEQ ID NO: 72997 - DNA, 19 bp, Homo sapiens
  siRNA target sequence for ATP2C1 (NM_014382.1,1298-1316).
ctgacgaagaatgaaatga

SEQ ID NO: 72998 - DNA, 19 bp, Homo sapiens
  siRNA target sequence for ATP2C1 (NM_014382.1,1362-1380).
ctggagttggctataatca

SEQ ID NO: 72999 - DNA, 19 bp, Homo sapiens
  siRNA target sequence for ATP2C1 (NM_014382.1,1364-1382).
ggagttggctataatcaat

SEQ ID NO: 73000 - DNA, 19 bp, Homo sapiens
  siRNA target sequence for ATP2C1 (NM_014382.1,1365-1383).
gagttggctataatcaatt

SEQ ID NO: 73001 - DNA, 19 bp, Homo sapiens
  siRNA target sequence for ATP2C1 (NM_014382.1,1429-1447).
cccagctgttagcagaatt

SEQ ID NO: 73002 - DNA, 19 bp, Homo sapiens
  siRNA target sequence for ATP2C1 (NM_014382.1,1456-1474).
gggctgtgtgtgcaatgat

SEQ ID NO: 73003 - DNA, 19 bp, Homo sapiens
  siRNA target sequence for ATP2C1 (NM_014382.1,1509-1527).
caacagaaggggccttaat

SEQ ID NO: 73004 - DNA, 19 bp, Homo sapiens
  siRNA target sequence for ATP2C1 (NM_014382.1,1548-1566).
gtcttgatggacttcaaca

SEQ ID NO: 73005 - DNA, 19 bp, Homo sapiens
  siRNA target sequence for ATP2C1 (NM_014382.1,1557-1575).
gacttcaacaagactacat

SEQ ID NO: 73006 - DNA, 19 bp, Homo sapiens
  siRNA target sequence for ATP2C1 (NM_014382.1,1559-1577).
cttcaacaagactacatca

SEQ ID NO: 73007 - DNA, 19 bp, Homo sapiens
  siRNA target sequence for ATP2C1 (NM_014382.1,1676-1694).
ggtgcttacgaacaagtaa

SEQ ID NO: 73008 - DNA, 19 bp, Homo sapiens
  siRNA target sequence for ATP2C1 (NM_014382.1,1677-1695).
gtgcttacgaacaagtaat

SEQ ID NO: 73009 - DNA, 19 bp, Homo sapiens
  siRNA target sequence for ATP2C1 (NM_014382.1,1691-1709).
gtaattaagtactgtacta

SEQ ID NO: 73010 - DNA, 19 bp, Homo sapiens
  siRNA target sequence for ATP2C1 (NM_014382.1,1724-1742).
gggcagaccttgacactta

SEQ ID NO: 73011 - DNA, 19 bp, Homo sapiens
  siRNA target sequence for ATP2C1 (NM_014382.1,1854-1872).
gcttggtgggaatcattga

SEQ ID NO: 73012 - DNA, 19 bp, Homo sapiens
  siRNA target sequence for ATP2C1 (NM_014382.1,1855-1873).
cttggtgggaatcattgat

SEQ ID NO: 73013 - DNA, 19 bp, Homo sapiens
  siRNA target sequence for ATP2C1 (NM_014382.1,1867-1885).
cattgatccacctagaact

SEQ ID NO: 73014 - DNA, 19 bp, Homo sapiens
  siRNA target sequence for ATP2C1 (NM_014382.1,1889-1907).
gtgaaagaagctgttacaa

SEQ ID NO: 73015 - DNA, 19 bp, Homo sapiens
  siRNA target sequence for ATP2C1 (NM_014382.1,1916-1934).
gcctcaggagtatcaataa

SEQ ID NO: 73016 - DNA, 19 bp, Homo sapiens
  siRNA target sequence for ATP2C1 (NM_014382.1,1917-1935).
cctcaggagtatcaataaa

SEQ ID NO: 73017 - DNA, 19 bp, Homo sapiens
  siRNA target sequence for ATP2C1 (NM_014382.1,1977-1995).
ccagtcgtctgggattgta

SEQ ID NO: 73018 - DNA, 19 bp, Homo sapiens
  siRNA target sequence for ATP2C1 (NM_014382.1,1978-1996).
cagtcgtctgggattgtat

SEQ ID NO: 73019 - DNA, 19 bp, Homo sapiens
  siRNA target sequence for ATP2C1 (NM_014382.1,1983-2001).
gtctgggattgtattccaa

SEQ ID NO: 73020 - DNA, 19 bp, Homo sapiens
  siRNA target sequence for ATP2C1 (NM_014382.1,1987-2005).
gggattgtattccaaaact

SEQ ID NO: 73021 - DNA, 19 bp, Homo sapiens
  siRNA target sequence for ATP2C1 (NM_014382.1,2045-2063).
gttcagcagctttcacaaa

SEQ ID NO: 73022 - DNA, 19 bp, Homo sapiens
  siRNA target sequence for ATP2C1 (NM_014382.1,2070-2088).
caaaggttgcagtatttta

SEQ ID NO: 73023 - DNA, 19 bp, Homo sapiens
  siRNA target sequence for ATP2C1 (NM_014382.1,2094-2112).
ctagcccaaggcacaagat

SEQ ID NO: 73024 - DNA, 19 bp, Homo sapiens
  siRNA target sequence for ATP2C1 (NM_014382.1,2218-2236).
gggccagactggtacagat

SEQ ID NO: 73025 - DNA, 19 bp, Homo sapiens
  siRNA target sequence for ATP2C1 (NM_014382.1,2273-2291).
gatgattttcaaaccataa

SEQ ID NO: 73026 - DNA, 19 bp, Homo sapiens
  siRNA target sequence for ATP2C1 (NM_014382.1,2309-2327).
ggtaaagggatttataata

SEQ ID NO: 73027 - DNA, 19 bp, Homo sapiens
  siRNA target sequence for ATP2C1 (NM_014382.1,2353-2371).
gctgagcacgagtatagca

SEQ ID NO: 73028 - DNA, 19 bp, Homo sapiens
  siRNA target sequence for ATP2C1 (NM_014382.1,2359-2377).
cacgagtatagcagcatta

SEQ ID NO: 73029 - DNA, 19 bp, Homo sapiens
  siRNA target sequence for ATP2C1 (NM_014382.1,2420-2438).
ctcaatgccatgcagattt

SEQ ID NO: 73030 - DNA, 19 bp, Homo sapiens
  siRNA target sequence for ATP2C1 (NM_014382.1,2431-2449).
gcagattttgtggatcaat

SEQ ID NO: 73031 - DNA, 19 bp, Homo sapiens
  siRNA target sequence for ATP2C1 (NM_014382.1,2442-2460).
ggatcaatattattatgga

SEQ ID NO: 73032 - DNA, 19 bp, Homo sapiens
  siRNA target sequence for ATP2C1 (NM_014382.1,2443-2461).
gatcaatattattatggat

SEQ ID NO: 73033 - DNA, 19 bp, Homo sapiens
  siRNA target sequence for ATP2C1 (NM_014382.1,2498-2516).
gataaagatgtcattcgta

SEQ ID NO: 73034 - DNA, 19 bp, Homo sapiens
  siRNA target sequence for ATP2C1 (NM_014382.1,2522-2540).
cctcgcaactggaaagaca

SEQ ID NO: 73035 - DNA, 19 bp, Homo sapiens
  siRNA target sequence for ATP2C1 (NM_014382.1,2541-2559).
gcattttgactaaaaactt

SEQ ID NO: 73036 - DNA, 19 bp, Homo sapiens
  siRNA target sequence for ATP2C1 (NM_014382.1,2573-2591).
cttgtttcatcaataatca

SEQ ID NO: 73037 - DNA, 19 bp, Homo sapiens
  siRNA target sequence for ATP2C1 (NM_014382.1,2622-2640).
gtgagctacgagacaatgt

SEQ ID NO: 73038 - DNA, 19 bp, Homo sapiens
  siRNA target sequence for ATP2C1 (NM_014382.1,2626-2644).
gctacgagacaatgtgatt

SEQ ID NO: 73039 - DNA, 19 bp, Homo sapiens
  siRNA target sequence for ATP2C1 (NM_014382.1,2627-2645).
ctacgagacaatgtgatta

SEQ ID NO: 73040 - DNA, 19 bp, Homo sapiens
  siRNA target sequence for ATP2C1 (NM_014382.1,2646-2664).
cacctcgagacacaacaat

SEQ ID NO: 73041 - DNA, 19 bp, Homo sapiens
  siRNA target sequence for ATP2C1 (NM_014382.1,2692-2710).
catgttcaatgcactaagt

SEQ ID NO: 73042 - DNA, 19 bp, Homo sapiens
  siRNA target sequence for ATP2C1 (NM_014382.1,2747-2765).
ctctgcagtaatagaatgt

SEQ ID NO: 73043 - DNA, 19 bp, Homo sapiens
  siRNA target sequence for ATP2C1 (NM_014382.1,2784-2802).
gatccatcatgggacaatt

SEQ ID NO: 73044 - DNA, 19 bp, Homo sapiens
  siRNA target sequence for ATP2C1 (NM_014382.1,2788-2806).
catcatgggacaattacta

SEQ ID NO: 73045 - DNA, 19 bp, Homo sapiens
  siRNA target sequence for ATP2C1 (NM_014382.1,2791-2809).
catgggacaattactagtt

SEQ ID NO: 73046 - DNA, 19 bp, Homo sapiens
  siRNA target sequence for ATP2C1 (NM_014382.1,2819-2837).
cctccgcttcagaaggttt

SEQ ID NO: 73047 - DNA, 19 bp, Homo sapiens
  siRNA target sequence for ATP2C1 (NM_014382.1,2820-2838).
ctccgcttcagaaggtttt

SEQ ID NO: 73048 - DNA, 19 bp, Homo sapiens
  siRNA target sequence for ATP2C1 (NM_014382.1,2901-2919).
gcatagtggcagaaattat

SEQ ID NO: 73049 - DNA, 19 bp, Homo sapiens
  siRNA target sequence for ATP2C1 (NM_014382.1,2957-2975).
catgttagttcgacatcat

SEQ ID NO: 73050 - DNA, 19 bp, Homo sapiens
  siRNA target sequence for ATP2C1 (NM_014382.1,2960-2978).
gttagttcgacatcatcat

SEQ ID NO: 73051 - DNA, 19 bp, Homo sapiens
  siRNA target sequence for ATP2C1 (NM_014382.1,2964-2982).
gttcgacatcatcatcttt

SEQ ID NO: 73052 - DNA, 19 bp, Homo sapiens
  siRNA target sequence for ATP2C1 (NM_014382.1,2973-2991).
catcatcttttcttgaagt

SEQ ID NO: 73053 - DNA, 19 bp, Homo sapiens
  siRNA target sequence for ATP4A (NM_000704.1,33-51).
ggggaaggccgagaactat

SEQ ID NO: 73054 - DNA, 19 bp, Homo sapiens
  siRNA target sequence for ATP4A (NM_000704.1,35-53).
ggaaggccgagaactatga

SEQ ID NO: 73055 - DNA, 19 bp, Homo sapiens
  siRNA target sequence for ATP4A (NM_000704.1,209-227).
cggagctggaacagaaata

SEQ ID NO: 73056 - DNA, 19 bp, Homo sapiens
  siRNA target sequence for ATP4A (NM_000704.1,437-455).
ccaccgacgacaatctgta

SEQ ID NO: 73057 - DNA, 19 bp, Homo sapiens
  siRNA target sequence for ATP4A (NM_000704.1,502-520).
ggctactaccaggaattca

SEQ ID NO: 73058 - DNA, 19 bp, Homo sapiens
  siRNA target sequence for ATP4A (NM_000704.1,503-521).
gctactaccaggaattcaa

SEQ ID NO: 73059 - DNA, 19 bp, Homo sapiens
  siRNA target sequence for ATP4A (NM_000704.1,576-594).
catccgcgatggagacaaa

SEQ ID NO: 73060 - DNA, 19 bp, Homo sapiens
  siRNA target sequence for ATP4A (NM_000704.1,627-645).
cgacctggtggagatgaaa

SEQ ID NO: 73061 - DNA, 19 bp, Homo sapiens
  siRNA target sequence for ATP4A (NM_000704.1,884-902).
cgtcgggggtggaaaacga

SEQ ID NO: 73062 - DNA, 19 bp, Homo sapiens
  siRNA target sequence for ATP4A (NM_000704.1,969-987).
cggtgccacattttttatt

SEQ ID NO: 73063 - DNA, 19 bp, Homo sapiens
  siRNA target sequence for ATP4A (NM_000704.1,1111-1129).
cgcctggccagtaagaact

SEQ ID NO: 73064 - DNA, 19 bp, Homo sapiens
  siRNA target sequence for ATP4A (NM_000704.1,1475-1493).
gggaccgcttcccaaaagt

SEQ ID NO: 73065 - DNA, 19 bp, Homo sapiens
  siRNA target sequence for ATP4A (NM_000704.1,1477-1495).
gaccgcttcccaaaagtct

SEQ ID NO: 73066 - DNA, 19 bp, Homo sapiens
  siRNA target sequence for ATP4A (NM_000704.1,1612-1630).
cgctgcagctccatcctta

SEQ ID NO: 73067 - DNA, 19 bp, Homo sapiens
  siRNA target sequence for ATP4A (NM_000704.1,1777-1795).
gacgtagaggccatgaact

SEQ ID NO: 73068 - DNA, 19 bp, Homo sapiens
  siRNA target sequence for ATP4A (NM_000704.1,1821-1839).
gggacttgtatccatgatt

SEQ ID NO: 73069 - DNA, 19 bp, Homo sapiens
  siRNA target sequence for ATP4A (NM_000704.1,2013-2031).
gcccgtagaccaggttaat

SEQ ID NO: 73070 - DNA, 19 bp, Homo sapiens
  siRNA target sequence for ATP4A (NM_000704.1,2042-2060).
cccgtgcctgtgtgatcaa

SEQ ID NO: 73071 - DNA, 19 bp, Homo sapiens
  siRNA target sequence for ATP4A (NM_000704.1,2043-2061).
ccgtgcctgtgtgatcaat

SEQ ID NO: 73072 - DNA, 19 bp, Homo sapiens
  siRNA target sequence for ATP4A (NM_000704.1,2276-2294).
gctcagatgctgccaaaaa

SEQ ID NO: 73073 - DNA, 19 bp, Homo sapiens
  siRNA target sequence for ATP4A (NM_000704.1,2493-2511).
cgaactctgcactgacatt

SEQ ID NO: 73074 - DNA, 19 bp, Homo sapiens
  siRNA target sequence for ATP4A (NM_000704.1,2521-2539).
gtgtccctggcatatgaaa

SEQ ID NO: 73075 - DNA, 19 bp, Homo sapiens
  siRNA target sequence for ATP4A (NM_000704.1,2816-2834).
gctacaccgtgttcttcat

SEQ ID NO: 73076 - DNA, 19 bp, Homo sapiens
  siRNA target sequence for ATP4A (NM_000704.1,2906-2924).
gcttcttcaggaataagat

SEQ ID NO: 73077 - DNA, 19 bp, Homo sapiens
  siRNA target sequence for ATP4A (NM_000704.1,3116-3134).
gggaccaggaactctacta

SEQ ID NO: 73078 - DNA, 19 bp, Homo sapiens
  siRNA target sequence for ATP4A (NM_000704.1,3117-3135).
ggaccaggaactctactat

SEQ ID NO: 73079 - DNA, 19 bp, Homo sapiens
  siRNA target sequence for ATP4A (NM_000704.1,3118-3136).
gaccaggaactctactatt

SEQ ID NO: 73080 - DNA, 19 bp, Homo sapiens
  siRNA target sequence for ATP5A1 (NM_004046.3,112-130).
cggactggtctccagaaat

SEQ ID NO: 73081 - DNA, 19 bp, Homo sapiens
  siRNA target sequence for ATP5A1 (NM_004046.3,243-261).
ctgatacctctgttgatct

SEQ ID NO: 73082 - DNA, 19 bp, Homo sapiens
  siRNA target sequence for ATP5A1 (NM_004046.3,266-284).
gaaactgggcgtgtcttaa

SEQ ID NO: 73083 - DNA, 19 bp, Homo sapiens
  siRNA target sequence for ATP5A1 (NM_004046.3,270-288).
ctgggcgtgtcttaagtat

SEQ ID NO: 73084 - DNA, 19 bp, Homo sapiens
  siRNA target sequence for ATP5A1 (NM_004046.3,401-419).
ggtgttgtcgtgtttggaa

SEQ ID NO: 73085 - DNA, 19 bp, Homo sapiens
  siRNA target sequence for ATP5A1 (NM_004046.3,407-425).
gtcgtgtttggaaatgata

SEQ ID NO: 73086 - DNA, 19 bp, Homo sapiens
  siRNA target sequence for ATP5A1 (NM_004046.3,409-427).
cgtgtttggaaatgataaa

SEQ ID NO: 73087 - DNA, 19 bp, Homo sapiens
  siRNA target sequence for ATP5A1 (NM_004046.3,493-511).
gctgttgggtcgtgtagtt

SEQ ID NO: 73088 - DNA, 19 bp, Homo sapiens
  siRNA target sequence for ATP5A1 (NM_004046.3,512-530).
gatgcccttggtaatgcta

SEQ ID NO: 73089 - DNA, 19 bp, Homo sapiens
  siRNA target sequence for ATP5A1 (NM_004046.3,516-534).
cccttggtaatgctattga

SEQ ID NO: 73090 - DNA, 19 bp, Homo sapiens
  siRNA target sequence for ATP5A1 (NM_004046.3,669-687).
gtggtcagcgtgaactgat

SEQ ID NO: 73091 - DNA, 19 bp, Homo sapiens
  siRNA target sequence for ATP5A1 (NM_004046.3,672-690).
gtcagcgtgaactgattat

SEQ ID NO: 73092 - DNA, 19 bp, Homo sapiens
  siRNA target sequence for ATP5A1 (NM_004046.3,676-694).
gcgtgaactgattattggt

SEQ ID NO: 73093 - DNA, 19 bp, Homo sapiens
  siRNA target sequence for ATP5A1 (NM_004046.3,708-726).
ggaaaacctcaattgctat

SEQ ID NO: 73094 - DNA, 19 bp, Homo sapiens
  siRNA target sequence for ATP5A1 (NM_004046.3,717-735).
caattgctattgacacaat

SEQ ID NO: 73095 - DNA, 19 bp, Homo sapiens
  siRNA target sequence for ATP5A1 (NM_004046.3,722-740).
gctattgacacaatcatta

SEQ ID NO: 73096 - DNA, 19 bp, Homo sapiens
  siRNA target sequence for ATP5A1 (NM_004046.3,781-799).
gctgtactgtatttatgtt

SEQ ID NO: 73097 - DNA, 19 bp, Homo sapiens
  siRNA target sequence for ATP5A1 (NM_004046.3,797-815).
gttgctattggtcaaaaga

SEQ ID NO: 73098 - DNA, 19 bp, Homo sapiens
  siRNA target sequence for ATP5A1 (NM_004046.3,800-818).
gctattggtcaaaagagat

SEQ ID NO: 73099 - DNA, 19 bp, Homo sapiens
  siRNA target sequence for ATP5A1 (NM_004046.3,854-872).
gcagatgccatgaagtaca

SEQ ID NO: 73100 - DNA, 19 bp, Homo sapiens
  siRNA target sequence for ATP5A1 (NM_004046.3,937-955).
ctgttccatgggagagtat

SEQ ID NO: 73101 - DNA, 19 bp, Homo sapiens
  siRNA target sequence for ATP5A1 (NM_004046.3,969-987).
gcaaacatgctttgatcat

SEQ ID NO: 73102 - DNA, 19 bp, Homo sapiens
  siRNA target sequence for ATP5A1 (NM_004046.3,1002-1020).
ccaaacaggctgttgctta

SEQ ID NO: 73103 - DNA, 19 bp, Homo sapiens
  siRNA target sequence for ATP5A1 (NM_004046.3,1150-1168).
gactgctttgccagtcata

SEQ ID NO: 73104 - DNA, 19 bp, Homo sapiens
  siRNA target sequence for ATP5A1 (NM_004046.3,1194-1212).
cttacattccaacaaatgt

SEQ ID NO: 73105 - DNA, 19 bp, Homo sapiens
  siRNA target sequence for ATP5A1 (NM_004046.3,1224-1242).
ctgacggacagatcttctt

SEQ ID NO: 73106 - DNA, 19 bp, Homo sapiens
  siRNA target sequence for ATP5A1 (NM_004046.3,1250-1268).
gaattgttctacaaaggta

SEQ ID NO: 73107 - DNA, 19 bp, Homo sapiens
  siRNA target sequence for ATP5A1 (NM_004046.3,1265-1283).
ggtatccgccctgcaatta

SEQ ID NO: 73108 - DNA, 19 bp, Homo sapiens
  siRNA target sequence for ATP5A1 (NM_004046.3,1266-1284).
gtatccgccctgcaattaa

SEQ ID NO: 73109 - DNA, 19 bp, Homo sapiens
  siRNA target sequence for ATP5A1 (NM_004046.3,1270-1288).
ccgccctgcaattaacgtt

SEQ ID NO: 73110 - DNA, 19 bp, Homo sapiens
  siRNA target sequence for ATP5A1 (NM_004046.3,1285-1303).
cgttggtctgtctgtatct

SEQ ID NO: 73111 - DNA, 19 bp, Homo sapiens
  siRNA target sequence for ATP5A1 (NM_004046.3,1320-1338).
cccaaaccagggctatgaa

SEQ ID NO: 73112 - DNA, 19 bp, Homo sapiens
  siRNA target sequence for ATP5A1 (NM_004046.3,1417-1435).
cgatgctgccactcaacaa

SEQ ID NO: 73113 - DNA, 19 bp, Homo sapiens
  siRNA target sequence for ATP5A1 (NM_004046.3,1527-1545).
cgggtgtaaggggatatct

SEQ ID NO: 73114 - DNA, 19 bp, Homo sapiens
  siRNA target sequence for ATP5A1 (NM_004046.3,1676-1694).
ctgaaagagattgtaacaa

SEQ ID NO: 73115 - DNA, 19 bp, Homo sapiens
  siRNA target sequence for ATP5B (NM_001686.2,220-238).
ggtggacgtccagtttgat

SEQ ID NO: 73116 - DNA, 19 bp, Homo sapiens
  siRNA target sequence for ATP5B (NM_001686.2,243-261).
gactaccaccaattctaaa

SEQ ID NO: 73117 - DNA, 19 bp, Homo sapiens
  siRNA target sequence for ATP5B (NM_001686.2,282-300).
gggagaccagactggtttt

SEQ ID NO: 73118 - DNA, 19 bp, Homo sapiens
  siRNA target sequence for ATP5B (NM_001686.2,325-343).
gagcacagtaaggactatt

SEQ ID NO: 73119 - DNA, 19 bp, Homo sapiens
  siRNA target sequence for ATP5B (NM_001686.2,328-346).
cacagtaaggactattgct

SEQ ID NO: 73120 - DNA, 19 bp, Homo sapiens
  siRNA target sequence for ATP5B (NM_001686.2,474-492).
gaggtcccatcaaaaccaa

SEQ ID NO: 73121 - DNA, 19 bp, Homo sapiens
  siRNA target sequence for ATP5B (NM_001686.2,538-556).
gagtgttgagcaggaaatt

SEQ ID NO: 73122 - DNA, 19 bp, Homo sapiens
  siRNA target sequence for ATP5B (NM_001686.2,642-660).
gcaagactgtactgatcat

SEQ ID NO: 73123 - DNA, 19 bp, Homo sapiens
  siRNA target sequence for ATP5B (NM_001686.2,650-668).
gtactgatcatggagttaa

SEQ ID NO: 73124 - DNA, 19 bp, Homo sapiens
  siRNA target sequence for ATP5B (NM_001686.2,727-745).
gacccgtgaaggcaatgat

SEQ ID NO: 73125 - DNA, 19 bp, Homo sapiens
  siRNA target sequence for ATP5B (NM_001686.2,764-782).
gaatctggtgttatcaact

SEQ ID NO: 73126 - DNA, 19 bp, Homo sapiens
  siRNA target sequence for ATP5B (NM_001686.2,798-816).
ctaaggtagcgctggtata

SEQ ID NO: 73127 - DNA, 19 bp, Homo sapiens
  siRNA target sequence for ATP5B (NM_001686.2,802-820).
ggtagcgctggtatatggt

SEQ ID NO: 73128 - DNA, 19 bp, Homo sapiens
  siRNA target sequence for ATP5B (NM_001686.2,807-825).
cgctggtatatggtcaaat

SEQ ID NO: 73129 - DNA, 19 bp, Homo sapiens
  siRNA target sequence for ATP5B (NM_001686.2,911-929).
gtactgctatttattgata

SEQ ID NO: 73130 - DNA, 19 bp, Homo sapiens
  siRNA target sequence for ATP5B (NM_001686.2,914-932).
ctgctatttattgataaca

SEQ ID NO: 73131 - DNA, 19 bp, Homo sapiens
  siRNA target sequence for ATP5B (NM_001686.2,957-975).
cagaggtgtctgcattatt

SEQ ID NO: 73132 - DNA, 19 bp, Homo sapiens
  siRNA target sequence for ATP5B (NM_001686.2,1017-1035).
ccactgacatgggtactat

SEQ ID NO: 73133 - DNA, 19 bp, Homo sapiens
  siRNA target sequence for ATP5B (NM_001686.2,1053-1071).
ctaccaagaagggatctat

SEQ ID NO: 73134 - DNA, 19 bp, Homo sapiens
  siRNA target sequence for ATP5B (NM_001686.2,1074-1092).
cctctgtacaggctatcta

SEQ ID NO: 73135 - DNA, 19 bp, Homo sapiens
  siRNA target sequence for ATP5B (NM_001686.2,1075-1093).
ctctgtacaggctatctat

SEQ ID NO: 73136 - DNA, 19 bp, Homo sapiens
  siRNA target sequence for ATP5B (NM_001686.2,1077-1095).
ctgtacaggctatctatgt

SEQ ID NO: 73137 - DNA, 19 bp, Homo sapiens
  siRNA target sequence for ATP5B (NM_001686.2,1271-1289).
gcccgtggggtgcaaaaga

SEQ ID NO: 73138 - DNA, 19 bp, Homo sapiens
  siRNA target sequence for ATP5B (NM_001686.2,1272-1290).
cccgtggggtgcaaaagat

SEQ ID NO: 73139 - DNA, 19 bp, Homo sapiens
  siRNA target sequence for ATP5B (NM_001686.2,1333-1351).
gggtatggatgaactttct

SEQ ID NO: 73140 - DNA, 19 bp, Homo sapiens
  siRNA target sequence for ATP5B (NM_001686.2,1335-1353).
gtatggatgaactttctga

SEQ ID NO: 73141 - DNA, 19 bp, Homo sapiens
  siRNA target sequence for ATP5B (NM_001686.2,1372-1390).
gtcccgtgcacggaaaata

SEQ ID NO: 73142 - DNA, 19 bp, Homo sapiens
  siRNA target sequence for ATP5B (NM_001686.2,1374-1392).
cccgtgcacggaaaataca

SEQ ID NO: 73143 - DNA, 19 bp, Homo sapiens
  siRNA target sequence for ATP6AP1 (NM_001183.3,88-106).
ccgtggctgccggtgtttt

SEQ ID NO: 73144 - DNA, 19 bp, Homo sapiens
  siRNA target sequence for ATP6AP1 (NM_001183.3,89-107).
cgtggctgccggtgttttt

SEQ ID NO: 73145 - DNA, 19 bp, Homo sapiens
  siRNA target sequence for ATP6AP1 (NM_001183.3,237-255).
gctctctacctacttagat

SEQ ID NO: 73146 - DNA, 19 bp, Homo sapiens
  siRNA target sequence for ATP6AP1 (NM_001183.3,307-325).
ctgagcattgaggatttca

SEQ ID NO: 73147 - DNA, 19 bp, Homo sapiens
  siRNA target sequence for ATP6AP1 (NM_001183.3,355-373).
caggacagcgccttttcta

SEQ ID NO: 73148 - DNA, 19 bp, Homo sapiens
  siRNA target sequence for ATP6AP1 (NM_001183.3,654-672).
cgaagatgtcccatacaca

SEQ ID NO: 73149 - DNA, 19 bp, Homo sapiens
  siRNA target sequence for ATP6AP1 (NM_001183.3,739-757).
ggtcgccagctgctacaaa

SEQ ID NO: 73150 - DNA, 19 bp, Homo sapiens
  siRNA target sequence for ATP6AP1 (NM_001183.3,740-758).
gtcgccagctgctacaaaa

SEQ ID NO: 73151 - DNA, 19 bp, Homo sapiens
  siRNA target sequence for ATP6AP1 (NM_001183.3,785-803).
ctcctgtgagttacaatga

SEQ ID NO: 73152 - DNA, 19 bp, Homo sapiens
  siRNA target sequence for ATP6AP1 (NM_001183.3,942-960).
gctctcactgacctatgaa

SEQ ID NO: 73153 - DNA, 19 bp, Homo sapiens
  siRNA target sequence for ATP6AP1 (NM_001183.3,951-969).
gacctatgaacgactcttt

SEQ ID NO: 73154 - DNA, 19 bp, Homo sapiens
  siRNA target sequence for ATP6AP1 (NM_001183.3,970-988).
ggtaccacagtgacattca

SEQ ID NO: 73155 - DNA, 19 bp, Homo sapiens
  siRNA target sequence for ATP6AP1 (NM_001183.3,974-992).
ccacagtgacattcaagtt

SEQ ID NO: 73156 - DNA, 19 bp, Homo sapiens
  siRNA target sequence for ATP6AP1 (NM_001183.3,1069-1087).
ggctccgtcgcctacttca

SEQ ID NO: 73157 - DNA, 19 bp, Homo sapiens
  siRNA target sequence for ATP6AP1 (NM_001183.3,1071-1089).
ctccgtcgcctacttcaat

SEQ ID NO: 73158 - DNA, 19 bp, Homo sapiens
  siRNA target sequence for ATP6AP1 (NM_001183.3,1371-1389).
gaccatggatcgctttgat

SEQ ID NO: 73159 - DNA, 19 bp, Homo sapiens
  siRNA target sequence for ATP6V1A (NM_001690.2,77-95).
ccaagctacccaaaatact

SEQ ID NO: 73160 - DNA, 19 bp, Homo sapiens
  siRNA target sequence for ATP6V1A (NM_001690.2,86-104).
ccaaaatactcgatgaaga

SEQ ID NO: 73161 - DNA, 19 bp, Homo sapiens
  siRNA target sequence for ATP6V1A (NM_001690.2,87-105).
caaaatactcgatgaagat

SEQ ID NO: 73162 - DNA, 19 bp, Homo sapiens
  siRNA target sequence for ATP6V1A (NM_001690.2,170-188).
cgggtgcagccatgtatga

SEQ ID NO: 73163 - DNA, 19 bp, Homo sapiens
  siRNA target sequence for ATP6V1A (NM_001690.2,201-219).
gggccacagcgaattggtt

SEQ ID NO: 73164 - DNA, 19 bp, Homo sapiens
  siRNA target sequence for ATP6V1A (NM_001690.2,216-234).
ggttggagagattattcga

SEQ ID NO: 73165 - DNA, 19 bp, Homo sapiens
  siRNA target sequence for ATP6V1A (NM_001690.2,217-235).
gttggagagattattcgat

SEQ ID NO: 73166 - DNA, 19 bp, Homo sapiens
  siRNA target sequence for ATP6V1A (NM_001690.2,242-260).
gtgacatggctactattca

SEQ ID NO: 73167 - DNA, 19 bp, Homo sapiens
  siRNA target sequence for ATP6V1A (NM_001690.2,251-269).
ctactattcaggtgtatga

SEQ ID NO: 73168 - DNA, 19 bp, Homo sapiens
  siRNA target sequence for ATP6V1A (NM_001690.2,353-371).
gagccatttttgatggtat

SEQ ID NO: 73169 - DNA, 19 bp, Homo sapiens
  siRNA target sequence for ATP6V1A (NM_001690.2,356-374).
ccatttttgatggtattca

SEQ ID NO: 73170 - DNA, 19 bp, Homo sapiens
  siRNA target sequence for ATP6V1A (NM_001690.2,440-458).
ctgctcttagcagagatat

SEQ ID NO: 73171 - DNA, 19 bp, Homo sapiens
  siRNA target sequence for ATP6V1A (NM_001690.2,442-460).
gctcttagcagagatatca

SEQ ID NO: 73172 - DNA, 19 bp, Homo sapiens
  siRNA target sequence for ATP6V1A (NM_001690.2,443-461).
ctcttagcagagatatcaa

SEQ ID NO: 73173 - DNA, 19 bp, Homo sapiens
  siRNA target sequence for ATP6V1A (NM_001690.2,486-504).
cctacgggttggtagtcat

SEQ ID NO: 73174 - DNA, 19 bp, Homo sapiens
  siRNA target sequence for ATP6V1A (NM_001690.2,487-505).
ctacgggttggtagtcata

SEQ ID NO: 73175 - DNA, 19 bp, Homo sapiens
  siRNA target sequence for ATP6V1A (NM_001690.2,492-510).
ggttggtagtcatatcact

SEQ ID NO: 73176 - DNA, 19 bp, Homo sapiens
  siRNA target sequence for ATP6V1A (NM_001690.2,507-525).
cactggcggagacatttat

SEQ ID NO: 73177 - DNA, 19 bp, Homo sapiens
  siRNA target sequence for ATP6V1A (NM_001690.2,513-531).
cggagacatttatggaatt

SEQ ID NO: 73178 - DNA, 19 bp, Homo sapiens
  siRNA target sequence for ATP6V1A (NM_001690.2,543-561).
ctcgcttatcaaacacaaa

SEQ ID NO: 73179 - DNA, 19 bp, Homo sapiens
  siRNA target sequence for ATP6V1A (NM_001690.2,567-585).
gttacccccacgaaacaga

SEQ ID NO: 73180 - DNA, 19 bp, Homo sapiens
  siRNA target sequence for ATP6V1A (NM_001690.2,577-595).
cgaaacagaggaactgtaa

SEQ ID NO: 73181 - DNA, 19 bp, Homo sapiens
  siRNA target sequence for ATP6V1A (NM_001690.2,584-602).
gaggaactgtaacttacat

SEQ ID NO: 73182 - DNA, 19 bp, Homo sapiens
  siRNA target sequence for ATP6V1A (NM_001690.2,605-623).
ctccacctgggaattatga

SEQ ID NO: 73183 - DNA, 19 bp, Homo sapiens
  siRNA target sequence for ATP6V1A (NM_001690.2,607-625).
ccacctgggaattatgata

SEQ ID NO: 73184 - DNA, 19 bp, Homo sapiens
  siRNA target sequence for ATP6V1A (NM_001690.2,634-652).
gttgtcttggagcttgaat

SEQ ID NO: 73185 - DNA, 19 bp, Homo sapiens
  siRNA target sequence for ATP6V1A (NM_001690.2,838-856).
gtgatatcacagtctctat

SEQ ID NO: 73186 - DNA, 19 bp, Homo sapiens
  siRNA target sequence for ATP6V1A (NM_001690.2,849-867).
gtctctatccaagtattct

SEQ ID NO: 73187 - DNA, 19 bp, Homo sapiens
  siRNA target sequence for ATP6V1A (NM_001690.2,870-888).
cagtgatgtaatcatctat

SEQ ID NO: 73188 - DNA, 19 bp, Homo sapiens
  siRNA target sequence for ATP6V1A (NM_001690.2,965-983).
gtaaggtagagtcaattat

SEQ ID NO: 73189 - DNA, 19 bp, Homo sapiens
  siRNA target sequence for ATP6V1A (NM_001690.2,1000-1018).
gtagccaatacctccaata

SEQ ID NO: 73190 - DNA, 19 bp, Homo sapiens
  siRNA target sequence for ATP6V1A (NM_001690.2,1030-1048).
gctagagaagcctctattt

SEQ ID NO: 73191 - DNA, 19 bp, Homo sapiens
  siRNA target sequence for ATP6V1A (NM_001690.2,1031-1049).
ctagagaagcctctattta

SEQ ID NO: 73192 - DNA, 19 bp, Homo sapiens
  siRNA target sequence for ATP6V1A (NM_001690.2,1108-1126).
gctgactctacctctagat

SEQ ID NO: 73193 - DNA, 19 bp, Homo sapiens
  siRNA target sequence for ATP6V1A (NM_001690.2,1170-1188).
gcctgcagatagtggatat

SEQ ID NO: 73194 - DNA, 19 bp, Homo sapiens
  siRNA target sequence for ATP6V1A (NM_001690.2,1204-1222).
gcccgtctggcctcgtttt

SEQ ID NO: 73195 - DNA, 19 bp, Homo sapiens
  siRNA target sequence for ATP6V1A (NM_001690.2,1205-1223).
cccgtctggcctcgtttta

SEQ ID NO: 73196 - DNA, 19 bp, Homo sapiens
  siRNA target sequence for ATP6V1A (NM_001690.2,1206-1224).
ccgtctggcctcgttttat

SEQ ID NO: 73197 - DNA, 19 bp, Homo sapiens
  siRNA target sequence for ATP6V1A (NM_001690.2,1232-1250).
caggcagggtgaaatgtct

SEQ ID NO: 73198 - DNA, 19 bp, Homo sapiens
  siRNA target sequence for ATP6V1A (NM_001690.2,1331-1349).
catctgccactcttggtat

SEQ ID NO: 73199 - DNA, 19 bp, Homo sapiens
  siRNA target sequence for ATP6V1A (NM_001690.2,1356-1374).
ggtgttctggggcttagat

SEQ ID NO: 73200 - DNA, 19 bp, Homo sapiens
  siRNA target sequence for ATP6V1A (NM_001690.2,1364-1382).
ggggcttagataagaaact

SEQ ID NO: 73201 - DNA, 19 bp, Homo sapiens
  siRNA target sequence for ATP6V1A (NM_001690.2,1381-1399).
ctagctcaacgtaagcatt

SEQ ID NO: 73202 - DNA, 19 bp, Homo sapiens
  siRNA target sequence for ATP6V1A (NM_001690.2,1419-1437).
catcagctacagcaagtat

SEQ ID NO: 73203 - DNA, 19 bp, Homo sapiens
  siRNA target sequence for ATP6V1A (NM_001690.2,1441-1459).
cgtgccttggatgaatact

SEQ ID NO: 73204 - DNA, 19 bp, Homo sapiens
  siRNA target sequence for ATP6V1A (NM_001690.2,1442-1460).
gtgccttggatgaatacta

SEQ ID NO: 73205 - DNA, 19 bp, Homo sapiens
  siRNA target sequence for ATP6V1A (NM_001690.2,1594-1612).
gaggtagcaaaacttatca

SEQ ID NO: 73206 - DNA, 19 bp, Homo sapiens
  siRNA target sequence for ATP6V1A (NM_001690.2,1615-1633).
gatgatttcctacaacaaa

SEQ ID NO: 73207 - DNA, 19 bp, Homo sapiens
  siRNA target sequence for ATP6V1A (NM_001690.2,1655-1673).
ggttctgcccattctacaa

SEQ ID NO: 73208 - DNA, 19 bp, Homo sapiens
  siRNA target sequence for ATP6V1A (NM_001690.2,1681-1699).
gggatgctgtccaacatga

SEQ ID NO: 73209 - DNA, 19 bp, Homo sapiens
  siRNA target sequence for ATP6V1A (NM_001690.2,1716-1734).
ggctcgtagagctgttgaa

SEQ ID NO: 73210 - DNA, 19 bp, Homo sapiens
  siRNA target sequence for ATP6V1A (NM_001690.2,1717-1735).
gctcgtagagctgttgaaa

SEQ ID NO: 73211 - DNA, 19 bp, Homo sapiens
  siRNA target sequence for ATP6V1A (NM_001690.2,1737-1755).
cactgcccagagtgacaat

SEQ ID NO: 73212 - DNA, 19 bp, Homo sapiens
  siRNA target sequence for ATP6V1A (NM_001690.2,1739-1757).
ctgcccagagtgacaataa

SEQ ID NO: 73213 - DNA, 19 bp, Homo sapiens
  siRNA target sequence for ATP6V1A (NM_001690.2,1761-1779).
cacatggtccattattcgt

SEQ ID NO: 73214 - DNA, 19 bp, Homo sapiens
  siRNA target sequence for ATP6V1A (NM_001690.2,1788-1806).
gggagacatcctctataaa

SEQ ID NO: 73215 - DNA, 19 bp, Homo sapiens
  siRNA target sequence for ATP6V1A (NM_001690.2,1862-1880).
gcgactatgcacaacttct

SEQ ID NO: 73216 - DNA, 19 bp, Homo sapiens
  siRNA target sequence for ATP6V1A (NM_001690.2,1866-1884).
ctatgcacaacttcttgaa

SEQ ID NO: 73217 - DNA, 19 bp, Homo sapiens
  siRNA target sequence for ATP6V1A (NM_001690.2,1871-1889).
cacaacttcttgaagacat

SEQ ID NO: 73218 - DNA, 19 bp, Homo sapiens
  siRNA target sequence for ATP6V1B1 (NM_001692.2,124-142).
gtgcagcccgagaacacat

SEQ ID NO: 73219 - DNA, 19 bp, Homo sapiens
  siRNA target sequence for ATP6V1B1 (NM_001692.2,147-165).
gcggtcacccgaaactaca

SEQ ID NO: 73220 - DNA, 19 bp, Homo sapiens
  siRNA target sequence for ATP6V1B1 (NM_001692.2,148-166).
cggtcacccgaaactacat

SEQ ID NO: 73221 - DNA, 19 bp, Homo sapiens
  siRNA target sequence for ATP6V1B1 (NM_001692.2,150-168).
gtcacccgaaactacatca

SEQ ID NO: 73222 - DNA, 19 bp, Homo sapiens
  siRNA target sequence for ATP6V1B1 (NM_001692.2,319-337).
gcaccaaggcgattgttca

SEQ ID NO: 73223 - DNA, 19 bp, Homo sapiens
  siRNA target sequence for ATP6V1B1 (NM_001692.2,328-346).
cgattgttcaggtgtttga

SEQ ID NO: 73224 - DNA, 19 bp, Homo sapiens
  siRNA target sequence for ATP6V1B1 (NM_001692.2,329-347).
gattgttcaggtgtttgaa

SEQ ID NO: 73225 - DNA, 19 bp, Homo sapiens
  siRNA target sequence for ATP6V1B1 (NM_001692.2,374-392).
gaccacttgcgaatttaca

SEQ ID NO: 73226 - DNA, 19 bp, Homo sapiens
  siRNA target sequence for ATP6V1B1 (NM_001692.2,491-509).
ggactttctggatatcaat

SEQ ID NO: 73227 - DNA, 19 bp, Homo sapiens
  siRNA target sequence for ATP6V1B1 (NM_001692.2,560-578).
gacgggcatttctcctatt

SEQ ID NO: 73228 - DNA, 19 bp, Homo sapiens
  siRNA target sequence for ATP6V1B1 (NM_001692.2,562-580).
cgggcatttctcctattga

SEQ ID NO: 73229 - DNA, 19 bp, Homo sapiens
  siRNA target sequence for ATP6V1B1 (NM_001692.2,571-589).
ctcctattgacgtcatgaa

SEQ ID NO: 73230 - DNA, 19 bp, Homo sapiens
  siRNA target sequence for ATP6V1B1 (NM_001692.2,573-591).
cctattgacgtcatgaaca

SEQ ID NO: 73231 - DNA, 19 bp, Homo sapiens
  siRNA target sequence for ATP6V1B1 (NM_001692.2,694-712).
ccaaggctgtgctggatta

SEQ ID NO: 73232 - DNA, 19 bp, Homo sapiens
  siRNA target sequence for ATP6V1B1 (NM_001692.2,880-898).
cgctgaccactgctgaatt

SEQ ID NO: 73233 - DNA, 19 bp, Homo sapiens
  siRNA target sequence for ATP6V1B1 (NM_001692.2,884-902).
gaccactgctgaattcctt

SEQ ID NO: 73234 - DNA, 19 bp, Homo sapiens
  siRNA target sequence for ATP6V1B1 (NM_001692.2,921-939).
catgtgctggtcatactga

SEQ ID NO: 73235 - DNA, 19 bp, Homo sapiens
  siRNA target sequence for ATP6V1B1 (NM_001692.2,938-956).
gacggacatgagttcctat

SEQ ID NO: 73236 - DNA, 19 bp, Homo sapiens
  siRNA target sequence for ATP6V1B1 (NM_001692.2,1012-1030).
ggtttcctggatatatgta

SEQ ID NO: 73237 - DNA, 19 bp, Homo sapiens
  siRNA target sequence for ATP6V1B1 (NM_001692.2,1111-1129).
ccatgcccaacgacgatat

SEQ ID NO: 73238 - DNA, 19 bp, Homo sapiens
  siRNA target sequence for ATP6V1B1 (NM_001692.2,1146-1164).
gacttgacgggcttcatca

SEQ ID NO: 73239 - DNA, 19 bp, Homo sapiens
  siRNA target sequence for ATP6V1B1 (NM_001692.2,1237-1255).
ccctgtcgcggctgatgaa

SEQ ID NO: 73240 - DNA, 19 bp, Homo sapiens
  siRNA target sequence for ATP6V1B1 (NM_001692.2,1239-1257).
ctgtcgcggctgatgaagt

SEQ ID NO: 73241 - DNA, 19 bp, Homo sapiens
  siRNA target sequence for ATP6V1B1 (NM_001692.2,1540-1558).
ccgtgatcgacgagttcta

SEQ ID NO: 73242 - DNA, 19 bp, Homo sapiens
  siRNA target sequence for ATP6V1B1 (NM_001692.2,1541-1559).
cgtgatcgacgagttctat

SEQ ID NO: 73243 - DNA, 19 bp, Homo sapiens
  siRNA target sequence for ATP6V1B1 (NM_001692.2,1542-1560).
gtgatcgacgagttctatt

SEQ ID NO: 73244 - DNA, 19 bp, Homo sapiens
  siRNA target sequence for ATP6V1B2 (NM_001693.2,331-349).
cagcctcgcctcacataca

SEQ ID NO: 73245 - DNA, 19 bp, Homo sapiens
  siRNA target sequence for ATP6V1B2 (NM_001693.2,334-352).
cctcgcctcacatacaaga

SEQ ID NO: 73246 - DNA, 19 bp, Homo sapiens
  siRNA target sequence for ATP6V1B2 (NM_001693.2,342-360).
cacatacaagacagtatct

SEQ ID NO: 73247 - DNA, 19 bp, Homo sapiens
  siRNA target sequence for ATP6V1B2 (NM_001693.2,351-369).
gacagtatctggagtcaat

SEQ ID NO: 73248 - DNA, 19 bp, Homo sapiens
  siRNA target sequence for ATP6V1B2 (NM_001693.2,371-389).
gtccactagtgatcttaga

SEQ ID NO: 73249 - DNA, 19 bp, Homo sapiens
  siRNA target sequence for ATP6V1B2 (NM_001693.2,374-392).
cactagtgatcttagatca

SEQ ID NO: 73250 - DNA, 19 bp, Homo sapiens
  siRNA target sequence for ATP6V1B2 (NM_001693.2,379-397).
gtgatcttagatcatgtta

SEQ ID NO: 73251 - DNA, 19 bp, Homo sapiens
  siRNA target sequence for ATP6V1B2 (NM_001693.2,436-454).
ccggatggcacaaagagaa

SEQ ID NO: 73252 - DNA, 19 bp, Homo sapiens
  siRNA target sequence for ATP6V1B2 (NM_001693.2,486-504).
ggcagtagttcaggtattt

SEQ ID NO: 73253 - DNA, 19 bp, Homo sapiens
  siRNA target sequence for ATP6V1B2 (NM_001693.2,512-530).
cttcaggtatagatgctaa

SEQ ID NO: 73254 - DNA, 19 bp, Homo sapiens
  siRNA target sequence for ATP6V1B2 (NM_001693.2,738-756).
cgatgggatgaacagtatt

SEQ ID NO: 73255 - DNA, 19 bp, Homo sapiens
  siRNA target sequence for ATP6V1B2 (NM_001693.2,764-782).
ggcagaaaattcctatctt

SEQ ID NO: 73256 - DNA, 19 bp, Homo sapiens
  siRNA target sequence for ATP6V1B2 (NM_001693.2,791-809).
ctgggctaccacacaatga

SEQ ID NO: 73257 - DNA, 19 bp, Homo sapiens
  siRNA target sequence for ATP6V1B2 (NM_001693.2,854-872).
ccaaagatgtagtagacta

SEQ ID NO: 73258 - DNA, 19 bp, Homo sapiens
  siRNA target sequence for ATP6V1B2 (NM_001693.2,922-940).
gaaactgcccggttcttca

SEQ ID NO: 73259 - DNA, 19 bp, Homo sapiens
  siRNA target sequence for ATP6V1B2 (NM_001693.2,929-947).
cccggttcttcaaatctga

SEQ ID NO: 73260 - DNA, 19 bp, Homo sapiens
  siRNA target sequence for ATP6V1B2 (NM_001693.2,961-979).
ggctcaatggacaatgtct

SEQ ID NO: 73261 - DNA, 19 bp, Homo sapiens
  siRNA target sequence for ATP6V1B2 (NM_001693.2,996-1014).
ggctaatgacccaaccatt

SEQ ID NO: 73262 - DNA, 19 bp, Homo sapiens
  siRNA target sequence for ATP6V1B2 (NM_001693.2,1006-1024).
ccaaccattgagcgaatta

SEQ ID NO: 73263 - DNA, 19 bp, Homo sapiens
  siRNA target sequence for ATP6V1B2 (NM_001693.2,1054-1072).
gaatttctggcgtaccaat

SEQ ID NO: 73264 - DNA, 19 bp, Homo sapiens
  siRNA target sequence for ATP6V1B2 (NM_001693.2,1062-1080).
ggcgtaccaatgtgagaaa

SEQ ID NO: 73265 - DNA, 19 bp, Homo sapiens
  siRNA target sequence for ATP6V1B2 (NM_001693.2,1064-1082).
cgtaccaatgtgagaaaca

SEQ ID NO: 73266 - DNA, 19 bp, Homo sapiens
  siRNA target sequence for ATP6V1B2 (NM_001693.2,1065-1083).
gtaccaatgtgagaaacat

SEQ ID NO: 73267 - DNA, 19 bp, Homo sapiens
  siRNA target sequence for ATP6V1B2 (NM_001693.2,1096-1114).
ctaacagacatgagttctt

SEQ ID NO: 73268 - DNA, 19 bp, Homo sapiens
  siRNA target sequence for ATP6V1B2 (NM_001693.2,1234-1252).
gggagaaacggctcgatta

SEQ ID NO: 73269 - DNA, 19 bp, Homo sapiens
  siRNA target sequence for ATP6V1B2 (NM_001693.2,1236-1254).
gagaaacggctcgattact

SEQ ID NO: 73270 - DNA, 19 bp, Homo sapiens
  siRNA target sequence for ATP6V1B2 (NM_001693.2,1238-1256).
gaaacggctcgattactca

SEQ ID NO: 73271 - DNA, 19 bp, Homo sapiens
  siRNA target sequence for ATP6V1B2 (NM_001693.2,1271-1289).
ccatgcctaatgatgatat

SEQ ID NO: 73272 - DNA, 19 bp, Homo sapiens
  siRNA target sequence for ATP6V1B2 (NM_001693.2,1275-1293).
gcctaatgatgatatcact

SEQ ID NO: 73273 - DNA, 19 bp, Homo sapiens
  siRNA target sequence for ATP6V1B2 (NM_001693.2,1306-1324).
gacttgactggctacatta

SEQ ID NO: 73274 - DNA, 19 bp, Homo sapiens
  siRNA target sequence for ATP6V1B2 (NM_001693.2,1368-1386).
gatttatccacctatcaat

SEQ ID NO: 73275 - DNA, 19 bp, Homo sapiens
  siRNA target sequence for ATP6V1B2 (NM_001693.2,1446-1464).
ggatcatgccgatgtatct

SEQ ID NO: 73276 - DNA, 19 bp, Homo sapiens
  siRNA target sequence for ATP6V1B2 (NM_001693.2,1447-1465).
gatcatgccgatgtatcta

SEQ ID NO: 73277 - DNA, 19 bp, Homo sapiens
  siRNA target sequence for ATP6V1B2 (NM_001693.2,1471-1489).
ctatatgcgtgctatgcta

SEQ ID NO: 73278 - DNA, 19 bp, Homo sapiens
  siRNA target sequence for ATP6V1B2 (NM_001693.2,1477-1495).
gcgtgctatgctattggaa

SEQ ID NO: 73279 - DNA, 19 bp, Homo sapiens
  siRNA target sequence for ATP6V1B2 (NM_001693.2,1478-1496).
cgtgctatgctattggaaa

SEQ ID NO: 73280 - DNA, 19 bp, Homo sapiens
  siRNA target sequence for ATP6V1B2 (NM_001693.2,1482-1500).
ctatgctattggaaaggat

SEQ ID NO: 73281 - DNA, 19 bp, Homo sapiens
  siRNA target sequence for ATP6V1B2 (NM_001693.2,1541-1559).
cctcagatgatcttctcta

SEQ ID NO: 73282 - DNA, 19 bp, Homo sapiens
  siRNA target sequence for ATP6V1B2 (NM_001693.2,1544-1562).
cagatgatcttctctactt

SEQ ID NO: 73283 - DNA, 19 bp, Homo sapiens
  siRNA target sequence for ATP6V1B2 (NM_001693.2,1597-1615).
gctcagggtccttacgaaa

SEQ ID NO: 73284 - DNA, 19 bp, Homo sapiens
  siRNA target sequence for ATP6V1B2 (NM_001693.2,1598-1616).
ctcagggtccttacgaaaa

SEQ ID NO: 73285 - DNA, 19 bp, Homo sapiens
  siRNA target sequence for ATP6V1B2 (NM_001693.2,1611-1629).
cgaaaatcgcactgtcttt

SEQ ID NO: 73286 - DNA, 19 bp, Homo sapiens
  siRNA target sequence for ATP6V1B2 (NM_001693.2,1649-1667).
ggcagctactccgaatctt

SEQ ID NO: 73287 - DNA, 19 bp, Homo sapiens
  siRNA target sequence for ATP6V1B2 (NM_001693.2,1659-1677).
ccgaatcttccccaaagaa

SEQ ID NO: 73288 - DNA, 19 bp, Homo sapiens
  siRNA target sequence for ATP6V1C1 (NM_001695.2,249-267).
catgcggcaacttcaaaga

SEQ ID NO: 73289 - DNA, 19 bp, Homo sapiens
  siRNA target sequence for ATP6V1C1 (NM_001695.2,253-271).
cggcaacttcaaagaacaa

SEQ ID NO: 73290 - DNA, 19 bp, Homo sapiens
  siRNA target sequence for ATP6V1C1 (NM_001695.2,282-300).
gtcacttccaagttcaata

SEQ ID NO: 73291 - DNA, 19 bp, Homo sapiens
  siRNA target sequence for ATP6V1C1 (NM_001695.2,293-311).
gttcaatattcctgactta

SEQ ID NO: 73292 - DNA, 19 bp, Homo sapiens
  siRNA target sequence for ATP6V1C1 (NM_001695.2,335-353).
ggttggcttgtcagatgaa

SEQ ID NO: 73293 - DNA, 19 bp, Homo sapiens
  siRNA target sequence for ATP6V1C1 (NM_001695.2,346-364).
cagatgaactggctaaact

SEQ ID NO: 73294 - DNA, 19 bp, Homo sapiens
  siRNA target sequence for ATP6V1C1 (NM_001695.2,356-374).
ggctaaactggatgcattt

SEQ ID NO: 73295 - DNA, 19 bp, Homo sapiens
  siRNA target sequence for ATP6V1C1 (NM_001695.2,407-425).
catggctgatgtattggaa

SEQ ID NO: 73296 - DNA, 19 bp, Homo sapiens
  siRNA target sequence for ATP6V1C1 (NM_001695.2,465-483).
ggagtggacttggttactt

SEQ ID NO: 73297 - DNA, 19 bp, Homo sapiens
  siRNA target sequence for ATP6V1C1 (NM_001695.2,466-484).
gagtggacttggttactta

SEQ ID NO: 73298 - DNA, 19 bp, Homo sapiens
  siRNA target sequence for ATP6V1C1 (NM_001695.2,468-486).
gtggacttggttacttata

SEQ ID NO: 73299 - DNA, 19 bp, Homo sapiens
  siRNA target sequence for ATP6V1C1 (NM_001695.2,470-488).
ggacttggttacttatata

SEQ ID NO: 73300 - DNA, 19 bp, Homo sapiens
  siRNA target sequence for ATP6V1C1 (NM_001695.2,471-489).
gacttggttacttatataa

SEQ ID NO: 73301 - DNA, 19 bp, Homo sapiens
  siRNA target sequence for ATP6V1C1 (NM_001695.2,560-578).
caagggagtaactcagatt

SEQ ID NO: 73302 - DNA, 19 bp, Homo sapiens
  siRNA target sequence for ATP6V1C1 (NM_001695.2,564-582).
ggagtaactcagattgata

SEQ ID NO: 73303 - DNA, 19 bp, Homo sapiens
  siRNA target sequence for ATP6V1C1 (NM_001695.2,595-613).
ctcgagcatctgcatacaa

SEQ ID NO: 73304 - DNA, 19 bp, Homo sapiens
  siRNA target sequence for ATP6V1C1 (NM_001695.2,597-615).
cgagcatctgcatacaata

SEQ ID NO: 73305 - DNA, 19 bp, Homo sapiens
  siRNA target sequence for ATP6V1C1 (NM_001695.2,601-619).
catctgcatacaataacct

SEQ ID NO: 73306 - DNA, 19 bp, Homo sapiens
  siRNA target sequence for ATP6V1C1 (NM_001695.2,673-691).
gaagtctagcagaaattgt

SEQ ID NO: 73307 - DNA, 19 bp, Homo sapiens
  siRNA target sequence for ATP6V1C1 (NM_001695.2,718-736).
cagagtatctcgtcacatt

SEQ ID NO: 73308 - DNA, 19 bp, Homo sapiens
  siRNA target sequence for ATP6V1C1 (NM_001695.2,731-749).
cacattactggtagtagtt

SEQ ID NO: 73309 - DNA, 19 bp, Homo sapiens
  siRNA target sequence for ATP6V1C1 (NM_001695.2,740-758).
ggtagtagttcccaagtta

SEQ ID NO: 73310 - DNA, 19 bp, Homo sapiens
  siRNA target sequence for ATP6V1C1 (NM_001695.2,741-759).
gtagtagttcccaagttaa

SEQ ID NO: 73311 - DNA, 19 bp, Homo sapiens
  siRNA target sequence for ATP6V1C1 (NM_001695.2,770-788).
ctggattaagcagtatgaa

SEQ ID NO: 73312 - DNA, 19 bp, Homo sapiens
  siRNA target sequence for ATP6V1C1 (NM_001695.2,773-791).
gattaagcagtatgaaaca

SEQ ID NO: 73313 - DNA, 19 bp, Homo sapiens
  siRNA target sequence for ATP6V1C1 (NM_001695.2,811-829).
caaggtctagcaatgttct

SEQ ID NO: 73314 - DNA, 19 bp, Homo sapiens
  siRNA target sequence for ATP6V1C1 (NM_001695.2,815-833).
gtctagcaatgttctttca

SEQ ID NO: 73315 - DNA, 19 bp, Homo sapiens
  siRNA target sequence for ATP6V1C1 (NM_001695.2,924-942).
gttcgtgacttccagtata

SEQ ID NO: 73316 - DNA, 19 bp, Homo sapiens
  siRNA target sequence for ATP6V1C1 (NM_001695.2,928-946).
gtgacttccagtataatga

SEQ ID NO: 73317 - DNA, 19 bp, Homo sapiens
  siRNA target sequence for ATP6V1C1 (NM_001695.2,977-995).
gaacaggctttctactgat

SEQ ID NO: 73318 - DNA, 19 bp, Homo sapiens
  siRNA target sequence for ATP6V1C1 (NM_001695.2,1063-1081).
ggattcacgtgaaagcatt

SEQ ID NO: 73319 - DNA, 19 bp, Homo sapiens
  siRNA target sequence for ATP6V1C1 (NM_001695.2,1064-1082).
gattcacgtgaaagcatta

SEQ ID NO: 73320 - DNA, 19 bp, Homo sapiens
  siRNA target sequence for ATP6V1C1 (NM_001695.2,1140-1158).
ctacttcagcccaataaga

SEQ ID NO: 73321 - DNA, 19 bp, Homo sapiens
  siRNA target sequence for ATP6V1C1 (NM_001695.2,1175-1193).
gagagaagtattacatgaa

SEQ ID NO: 73322 - DNA, 19 bp, Homo sapiens
  siRNA target sequence for ATP6V1C1 (NM_001695.2,1177-1195).
gagaagtattacatgaatt

SEQ ID NO: 73323 - DNA, 19 bp, Homo sapiens
  siRNA target sequence for ATP6V1C1 (NM_001695.2,1216-1234).
gtgcagcagctattattga

SEQ ID NO: 73324 - DNA, 19 bp, Homo sapiens
  siRNA target sequence for ATP6V1C1 (NM_001695.2,1275-1293).
gaatactacccctatgtgt

SEQ ID NO: 73325 - DNA, 19 bp, Homo sapiens
  siRNA target sequence for ATP6V1C1 (NM_001695.2,1286-1304).
ctatgtgtactacaagatt

SEQ ID NO: 73326 - DNA, 19 bp, Homo sapiens
  siRNA target sequence for ATP6V1C2 (NM_144583.1,43-61).
ctgcccctggcgataagga

SEQ ID NO: 73327 - DNA, 19 bp, Homo sapiens
  siRNA target sequence for ATP6V1C2 (NM_144583.1,45-63).
gcccctggcgataaggaaa

SEQ ID NO: 73328 - DNA, 19 bp, Homo sapiens
  siRNA target sequence for ATP6V1C2 (NM_144583.1,46-64).
cccctggcgataaggaaaa

SEQ ID NO: 73329 - DNA, 19 bp, Homo sapiens
  siRNA target sequence for ATP6V1C2 (NM_144583.1,47-65).
ccctggcgataaggaaaat

SEQ ID NO: 73330 - DNA, 19 bp, Homo sapiens
  siRNA target sequence for ATP6V1C2 (NM_144583.1,49-67).
ctggcgataaggaaaattt

SEQ ID NO: 73331 - DNA, 19 bp, Homo sapiens
  siRNA target sequence for ATP6V1C2 (NM_144583.1,101-119).
caagtccaacctgtcttat

SEQ ID NO: 73332 - DNA, 19 bp, Homo sapiens
  siRNA target sequence for ATP6V1C2 (NM_144583.1,104-122).
gtccaacctgtcttataat

SEQ ID NO: 73333 - DNA, 19 bp, Homo sapiens
  siRNA target sequence for ATP6V1C2 (NM_144583.1,110-128).
cctgtcttataataccaaa

SEQ ID NO: 73334 - DNA, 19 bp, Homo sapiens
  siRNA target sequence for ATP6V1C2 (NM_144583.1,111-129).
ctgtcttataataccaaat

SEQ ID NO: 73335 - DNA, 19 bp, Homo sapiens
  siRNA target sequence for ATP6V1C2 (NM_144583.1,374-392).
gagtgtggtggacacaata

SEQ ID NO: 73336 - DNA, 19 bp, Homo sapiens
  siRNA target sequence for ATP6V1C2 (NM_144583.1,505-523).
cccggacactgagtgatat

SEQ ID NO: 73337 - DNA, 19 bp, Homo sapiens
  siRNA target sequence for ATP6V1C2 (NM_144583.1,506-524).
ccggacactgagtgatatt

SEQ ID NO: 73338 - DNA, 19 bp, Homo sapiens
  siRNA target sequence for ATP6V1C2 (NM_144583.1,508-526).
ggacactgagtgatattgt

SEQ ID NO: 73339 - DNA, 19 bp, Homo sapiens
  siRNA target sequence for ATP6V1C2 (NM_144583.1,542-560).
cgtgctggattctgaatat

SEQ ID NO: 73340 - DNA, 19 bp, Homo sapiens
  siRNA target sequence for ATP6V1C2 (NM_144583.1,576-594).
gtcatcgtccccaaaccaa

SEQ ID NO: 73341 - DNA, 19 bp, Homo sapiens
  siRNA target sequence for ATP6V1C2 (NM_144583.1,601-619).
cacaatggcaaaaaaccta

SEQ ID NO: 73342 - DNA, 19 bp, Homo sapiens
  siRNA target sequence for ATP6V1C2 (NM_144583.1,645-663).
cctcgatcaaccaaactca

SEQ ID NO: 73343 - DNA, 19 bp, Homo sapiens
  siRNA target sequence for ATP6V1C2 (NM_144583.1,646-664).
ctcgatcaaccaaactcat

SEQ ID NO: 73344 - DNA, 19 bp, Homo sapiens
  siRNA target sequence for ATP6V1C2 (NM_144583.1,648-666).
cgatcaaccaaactcatta

SEQ ID NO: 73345 - DNA, 19 bp, Homo sapiens
  siRNA target sequence for ATP6V1C2 (NM_144583.1,700-718).
ctctgtttcgaaaagtgat

SEQ ID NO: 73346 - DNA, 19 bp, Homo sapiens
  siRNA target sequence for ATP6V1C2 (NM_144583.1,704-722).
gtttcgaaaagtgattgaa

SEQ ID NO: 73347 - DNA, 19 bp, Homo sapiens
  siRNA target sequence for ATP6V1C2 (NM_144583.1,708-726).
cgaaaagtgattgaagatt

SEQ ID NO: 73348 - DNA, 19 bp, Homo sapiens
  siRNA target sequence for ATP6V1C2 (NM_144583.1,752-770).
gttcactgttcgtgaattt

SEQ ID NO: 73349 - DNA, 19 bp, Homo sapiens
  siRNA target sequence for ATP6V1C2 (NM_144583.1,757-775).
ctgttcgtgaattttacta

SEQ ID NO: 73350 - DNA, 19 bp, Homo sapiens
  siRNA target sequence for ATP6V1C2 (NM_144583.1,859-877).
gctggctcaaggtgaactt

SEQ ID NO: 73351 - DNA, 19 bp, Homo sapiens
  siRNA target sequence for ATP6V1C2 (NM_144583.1,1009-1027).
gtttaagagaggttctaaa

SEQ ID NO: 73352 - DNA, 19 bp, Homo sapiens
  siRNA target sequence for ATP6V1C2 (NM_144583.1,1092-1110).
ccgggactgcaactcaata

SEQ ID NO: 73353 - DNA, 19 bp, Homo sapiens
  siRNA target sequence for ATP6V1C2 (NM_144583.1,1093-1111).
cgggactgcaactcaataa

SEQ ID NO: 73354 - DNA, 19 bp, Homo sapiens
  siRNA target sequence for ATP6V1C2 (NM_144583.1,1096-1114).
gactgcaactcaataacca

SEQ ID NO: 73355 - DNA, 19 bp, Homo sapiens
  siRNA target sequence for ATP6V1C2 (NM_144583.1,1139-1157).
ccatattgaccttagtctt

SEQ ID NO: 73356 - DNA, 19 bp, Homo sapiens
  siRNA target sequence for ATP6V1H (NM_015941.1,267-285).
gctgctgtccccaccaata

SEQ ID NO: 73357 - DNA, 19 bp, Homo sapiens
  siRNA target sequence for ATP6V1H (NM_015941.1,271-289).
ctgtccccaccaatattat

SEQ ID NO: 73358 - DNA, 19 bp, Homo sapiens
  siRNA target sequence for ATP6V1H (NM_015941.1,304-322).
cagaagttcgtgcaaacaa

SEQ ID NO: 73359 - DNA, 19 bp, Homo sapiens
  siRNA target sequence for ATP6V1H (NM_015941.1,309-327).
gttcgtgcaaacaaagtca

SEQ ID NO: 73360 - DNA, 19 bp, Homo sapiens
  siRNA target sequence for ATP6V1H (NM_015941.1,492-510).
gaacagaccgttcagtata

SEQ ID NO: 73361 - DNA, 19 bp, Homo sapiens
  siRNA target sequence for ATP6V1H (NM_015941.1,497-515).
gaccgttcagtatatacta

SEQ ID NO: 73362 - DNA, 19 bp, Homo sapiens
  siRNA target sequence for ATP6V1H (NM_015941.1,500-518).
cgttcagtatatactaact

SEQ ID NO: 73363 - DNA, 19 bp, Homo sapiens
  siRNA target sequence for ATP6V1H (NM_015941.1,501-519).
gttcagtatatactaacta

SEQ ID NO: 73364 - DNA, 19 bp, Homo sapiens
  siRNA target sequence for ATP6V1H (NM_015941.1,549-567).
cagcgtgttagcattttct

SEQ ID NO: 73365 - DNA, 19 bp, Homo sapiens
  siRNA target sequence for ATP6V1H (NM_015941.1,566-584).
ctttgactatgcaagatgt

SEQ ID NO: 73366 - DNA, 19 bp, Homo sapiens
  siRNA target sequence for ATP6V1H (NM_015941.1,593-611).
cactgcgtggccctacttt

SEQ ID NO: 73367 - DNA, 19 bp, Homo sapiens
  siRNA target sequence for ATP6V1H (NM_015941.1,595-613).
ctgcgtggccctactttct

SEQ ID NO: 73368 - DNA, 19 bp, Homo sapiens
  siRNA target sequence for ATP6V1H (NM_015941.1,701-719).
ggaaggcagtgacttaaat

SEQ ID NO: 73369 - DNA, 19 bp, Homo sapiens
  siRNA target sequence for ATP6V1H (NM_015941.1,702-720).
gaaggcagtgacttaaatt

SEQ ID NO: 73370 - DNA, 19 bp, Homo sapiens
  siRNA target sequence for ATP6V1H (NM_015941.1,706-724).
gcagtgacttaaattacta

SEQ ID NO: 73371 - DNA, 19 bp, Homo sapiens
  siRNA target sequence for ATP6V1H (NM_015941.1,707-725).
cagtgacttaaattactat

SEQ ID NO: 73372 - DNA, 19 bp, Homo sapiens
  siRNA target sequence for ATP6V1H (NM_015941.1,808-826).
gtgatagttcgcagtatgt

SEQ ID NO: 73373 - DNA, 19 bp, Homo sapiens
  siRNA target sequence for ATP6V1H (NM_015941.1,894-912).
gcagatggggtaaattgca

SEQ ID NO: 73374 - DNA, 19 bp, Homo sapiens
  siRNA target sequence for ATP6V1H (NM_015941.1,897-915).
gatggggtaaattgcataa

SEQ ID NO: 73375 - DNA, 19 bp, Homo sapiens
  siRNA target sequence for ATP6V1H (NM_015941.1,945-963).
cagctccagtatcaaatga

SEQ ID NO: 73376 - DNA, 19 bp, Homo sapiens
  siRNA target sequence for ATP6V1H (NM_015941.1,947-965).
gctccagtatcaaatgatt

SEQ ID NO: 73377 - DNA, 19 bp, Homo sapiens
  siRNA target sequence for ATP6V1H (NM_015941.1,948-966).
ctccagtatcaaatgattt

SEQ ID NO: 73378 - DNA, 19 bp, Homo sapiens
  siRNA target sequence for ATP6V1H (NM_015941.1,950-968).
ccagtatcaaatgattttt

SEQ ID NO: 73379 - DNA, 19 bp, Homo sapiens
  siRNA target sequence for ATP6V1H (NM_015941.1,953-971).
gtatcaaatgattttttca

SEQ ID NO: 73380 - DNA, 19 bp, Homo sapiens
  siRNA target sequence for ATP6V1H (NM_015941.1,984-1002).
gcattcagtcctcaaatgt

SEQ ID NO: 73381 - DNA, 19 bp, Homo sapiens
  siRNA target sequence for ATP6V1H (NM_015941.1,1085-1103).
cattcttgcagcatttcgt

SEQ ID NO: 73382 - DNA, 19 bp, Homo sapiens
  siRNA target sequence for ATP6V1H (NM_015941.1,1092-1110).
gcagcatttcgtaactttt

SEQ ID NO: 73383 - DNA, 19 bp, Homo sapiens
  siRNA target sequence for ATP6V1H (NM_015941.1,1269-1287).
gtccaggaccttagttcat

SEQ ID NO: 73384 - DNA, 19 bp, Homo sapiens
  siRNA target sequence for ATP6V1H (NM_015941.1,1271-1289).
ccaggaccttagttcattt

SEQ ID NO: 73385 - DNA, 19 bp, Homo sapiens
  siRNA target sequence for ATP6V1H (NM_015941.1,1367-1385).
gaatgctgtgaggttaaat

SEQ ID NO: 73386 - DNA, 19 bp, Homo sapiens
  siRNA target sequence for ATP6V1H (NM_015941.1,1568-1586).
ccagcaggtccgctataat

SEQ ID NO: 73387 - DNA, 19 bp, Homo sapiens
  siRNA target sequence for ATP6V1H (NM_015941.1,1571-1589).
gcaggtccgctataatgct

SEQ ID NO: 73388 - DNA, 19 bp, Homo sapiens
  siRNA target sequence for ATP7A (NM_000052.1,152-170).
ccaagtatgggtgtgaatt

SEQ ID NO: 73389 - DNA, 19 bp, Homo sapiens
  siRNA target sequence for ATP7A (NM_000052.1,162-180).
gtgtgaattctgttaccat

SEQ ID NO: 73390 - DNA, 19 bp, Homo sapiens
  siRNA target sequence for ATP7A (NM_000052.1,229-247).
gcagattggaaaagtgaat

SEQ ID NO: 73391 - DNA, 19 bp, Homo sapiens
  siRNA target sequence for ATP7A (NM_000052.1,249-267).
gtgtgcatcacattaaggt

SEQ ID NO: 73392 - DNA, 19 bp, Homo sapiens
  siRNA target sequence for ATP7A (NM_000052.1,251-269).
gtgcatcacattaaggtat

SEQ ID NO: 73393 - DNA, 19 bp, Homo sapiens
  siRNA target sequence for ATP7A (NM_000052.1,439-457).
gccatgggaccatatccaa

SEQ ID NO: 73394 - DNA, 19 bp, Homo sapiens
  siRNA target sequence for ATP7A (NM_000052.1,440-458).
ccatgggaccatatccaaa

SEQ ID NO: 73395 - DNA, 19 bp, Homo sapiens
  siRNA target sequence for ATP7A (NM_000052.1,479-497).
ggtgtgacagacattaaaa

SEQ ID NO: 73396 - DNA, 19 bp, Homo sapiens
  siRNA target sequence for ATP7A (NM_000052.1,480-498).
gtgtgacagacattaaaat

SEQ ID NO: 73397 - DNA, 19 bp, Homo sapiens
  siRNA target sequence for ATP7A (NM_000052.1,526-544).
gacaataatcccttctata

SEQ ID NO: 73398 - DNA, 19 bp, Homo sapiens
  siRNA target sequence for ATP7A (NM_000052.1,653-671).
gaagtcgtgctgaagatga

SEQ ID NO: 73399 - DNA, 19 bp, Homo sapiens
  siRNA target sequence for ATP7A (NM_000052.1,682-700).
gatgacctgccattcatgt

SEQ ID NO: 73400 - DNA, 19 bp, Homo sapiens
  siRNA target sequence for ATP7A (NM_000052.1,696-714).
catgtactagcactattga

SEQ ID NO: 73401 - DNA, 19 bp, Homo sapiens
  siRNA target sequence for ATP7A (NM_000052.1,702-720).
ctagcactattgaaggaaa

SEQ ID NO: 73402 - DNA, 19 bp, Homo sapiens
  siRNA target sequence for ATP7A (NM_000052.1,705-723).
gcactattgaaggaaaaat

SEQ ID NO: 73403 - DNA, 19 bp, Homo sapiens
  siRNA target sequence for ATP7A (NM_000052.1,734-752).
caaggtgttcagcgaatta

SEQ ID NO: 73404 - DNA, 19 bp, Homo sapiens
  siRNA target sequence for ATP7A (NM_000052.1,738-756).
gtgttcagcgaattaaagt

SEQ ID NO: 73405 - DNA, 19 bp, Homo sapiens
  siRNA target sequence for ATP7A (NM_000052.1,770-788).
caagaagctactattgttt

SEQ ID NO: 73406 - DNA, 19 bp, Homo sapiens
  siRNA target sequence for ATP7A (NM_000052.1,785-803).
gtttatcaacctcatctta

SEQ ID NO: 73407 - DNA, 19 bp, Homo sapiens
  siRNA target sequence for ATP7A (NM_000052.1,877-895).
cctcaaattgggagctatt

SEQ ID NO: 73408 - DNA, 19 bp, Homo sapiens
  siRNA target sequence for ATP7A (NM_000052.1,880-898).
caaattgggagctattgat

SEQ ID NO: 73409 - DNA, 19 bp, Homo sapiens
  siRNA target sequence for ATP7A (NM_000052.1,886-904).
gggagctattgatgtagaa

SEQ ID NO: 73410 - DNA, 19 bp, Homo sapiens
  siRNA target sequence for ATP7A (NM_000052.1,946-964).
gcaaaggagtccatcatat

SEQ ID NO: 73411 - DNA, 19 bp, Homo sapiens
  siRNA target sequence for ATP7A (NM_000052.1,951-969).
ggagtccatcatataccaa

SEQ ID NO: 73412 - DNA, 19 bp, Homo sapiens
  siRNA target sequence for ATP7A (NM_000052.1,952-970).
gagtccatcatataccaat

SEQ ID NO: 73413 - DNA, 19 bp, Homo sapiens
  siRNA target sequence for ATP7A (NM_000052.1,971-989).
gattcaacagccactttca

SEQ ID NO: 73414 - DNA, 19 bp, Homo sapiens
  siRNA target sequence for ATP7A (NM_000052.1,975-993).
caacagccactttcatcat

SEQ ID NO: 73415 - DNA, 19 bp, Homo sapiens
  siRNA target sequence for ATP7A (NM_000052.1,1008-1026).
gtaaatcatgtgtgtcaaa

SEQ ID NO: 73416 - DNA, 19 bp, Homo sapiens
  siRNA target sequence for ATP7A (NM_000052.1,1014-1032).
catgtgtgtcaaatattga

SEQ ID NO: 73417 - DNA, 19 bp, Homo sapiens
  siRNA target sequence for ATP7A (NM_000052.1,1038-1056).
ctttatctgcactccaata

SEQ ID NO: 73418 - DNA, 19 bp, Homo sapiens
  siRNA target sequence for ATP7A (NM_000052.1,1065-1083).
gcatagtagtttctttaga

SEQ ID NO: 73419 - DNA, 19 bp, Homo sapiens
  siRNA target sequence for ATP7A (NM_000052.1,1089-1107).
ggtctgccattgtgaagta

SEQ ID NO: 73420 - DNA, 19 bp, Homo sapiens
  siRNA target sequence for ATP7A (NM_000052.1,1090-1108).
gtctgccattgtgaagtat

SEQ ID NO: 73421 - DNA, 19 bp, Homo sapiens
  siRNA target sequence for ATP7A (NM_000052.1,1169-1187).
ctatatagagttagtatca

SEQ ID NO: 73422 - DNA, 19 bp, Homo sapiens
  siRNA target sequence for ATP7A (NM_000052.1,1196-1214).
gttgagagtacctcaaact

SEQ ID NO: 73423 - DNA, 19 bp, Homo sapiens
  siRNA target sequence for ATP7A (NM_000052.1,1314-1332).
cctgtgtgcagtctattga

SEQ ID NO: 73424 - DNA, 19 bp, Homo sapiens
  siRNA target sequence for ATP7A (NM_000052.1,1324-1342).
gtctattgagggtgtcata

SEQ ID NO: 73425 - DNA, 19 bp, Homo sapiens
  siRNA target sequence for ATP7A (NM_000052.1,1344-1362).
caaaaaagccaggtgtaaa

SEQ ID NO: 73426 - DNA, 19 bp, Homo sapiens
  siRNA target sequence for ATP7A (NM_000052.1,1370-1388).
cgagtctcccttgcaaata

SEQ ID NO: 73427 - DNA, 19 bp, Homo sapiens
  siRNA target sequence for ATP7A (NM_000052.1,1373-1391).
gtctcccttgcaaatagca

SEQ ID NO: 73428 - DNA, 19 bp, Homo sapiens
  siRNA target sequence for ATP7A (NM_000052.1,1389-1407).
gcaatgggactgttgagta

SEQ ID NO: 73429 - DNA, 19 bp, Homo sapiens
  siRNA target sequence for ATP7A (NM_000052.1,1390-1408).
caatgggactgttgagtat

SEQ ID NO: 73430 - DNA, 19 bp, Homo sapiens
  siRNA target sequence for ATP7A (NM_000052.1,1434-1452).
cgttgagaggagcaataga

SEQ ID NO: 73431 - DNA, 19 bp, Homo sapiens
  siRNA target sequence for ATP7A (NM_000052.1,1492-1510).
gccgttggtagtaatagct

SEQ ID NO: 73432 - DNA, 19 bp, Homo sapiens
  siRNA target sequence for ATP7A (NM_000052.1,1566-1584).
ggatgacaccagttcaaga

SEQ ID NO: 73433 - DNA, 19 bp, Homo sapiens
  siRNA target sequence for ATP7A (NM_000052.1,1605-1623).
catctaagtgttacataca

SEQ ID NO: 73434 - DNA, 19 bp, Homo sapiens
  siRNA target sequence for ATP7A (NM_000052.1,1677-1695).
ggcgggaagaaggaatata

SEQ ID NO: 73435 - DNA, 19 bp, Homo sapiens
  siRNA target sequence for ATP7A (NM_000052.1,1678-1696).
gcgggaagaaggaatatat

SEQ ID NO: 73436 - DNA, 19 bp, Homo sapiens
  siRNA target sequence for ATP7A (NM_000052.1,1726-1744).
ggcagaagtaaggtataat

SEQ ID NO: 73437 - DNA, 19 bp, Homo sapiens
  siRNA target sequence for ATP7A (NM_000052.1,1869-1887).
gtgcctcctgcgtacataa

SEQ ID NO: 73438 - DNA, 19 bp, Homo sapiens
  siRNA target sequence for ATP7A (NM_000052.1,1871-1889).
gcctcctgcgtacataaaa

SEQ ID NO: 73439 - DNA, 19 bp, Homo sapiens
  siRNA target sequence for ATP7A (NM_000052.1,1872-1890).
cctcctgcgtacataaaat

SEQ ID NO: 73440 - DNA, 19 bp, Homo sapiens
  siRNA target sequence for ATP7A (NM_000052.1,1873-1891).
ctcctgcgtacataaaata

SEQ ID NO: 73441 - DNA, 19 bp, Homo sapiens
  siRNA target sequence for ATP7A (NM_000052.1,1875-1893).
cctgcgtacataaaataga

SEQ ID NO: 73442 - DNA, 19 bp, Homo sapiens
  siRNA target sequence for ATP7A (NM_000052.1,1910-1928).
cacagagggatcctatact

SEQ ID NO: 73443 - DNA, 19 bp, Homo sapiens
  siRNA target sequence for ATP7A (NM_000052.1,1944-1962).
caaccaacaaagcacatat

SEQ ID NO: 73444 - DNA, 19 bp, Homo sapiens
  siRNA target sequence for ATP7A (NM_000052.1,1986-2004).
gtcctagagatattatcca

SEQ ID NO: 73445 - DNA, 19 bp, Homo sapiens
  siRNA target sequence for ATP7A (NM_000052.1,1988-2006).
cctagagatattatccata

SEQ ID NO: 73446 - DNA, 19 bp, Homo sapiens
  siRNA target sequence for ATP7A (NM_000052.1,2053-2071).
gtcagcaagtcacttagat

SEQ ID NO: 73447 - DNA, 19 bp, Homo sapiens
  siRNA target sequence for ATP7A (NM_000052.1,2055-2073).
cagcaagtcacttagatca

SEQ ID NO: 73448 - DNA, 19 bp, Homo sapiens
  siRNA target sequence for ATP7A (NM_000052.1,2181-2199).
caactcttcaccataatca

SEQ ID NO: 73449 - DNA, 19 bp, Homo sapiens
  siRNA target sequence for ATP7A (NM_000052.1,2189-2207).
caccataatcaaaacatga

SEQ ID NO: 73450 - DNA, 19 bp, Homo sapiens
  siRNA target sequence for ATP7A (NM_000052.1,2261-2279).
cttccaggattgtctgtta

SEQ ID NO: 73451 - DNA, 19 bp, Homo sapiens
  siRNA target sequence for ATP7A (NM_000052.1,2264-2282).
ccaggattgtctgttatga

SEQ ID NO: 73452 - DNA, 19 bp, Homo sapiens
  siRNA target sequence for ATP7A (NM_000052.1,2338-2356).
ctacattcaggcttataaa

SEQ ID NO: 73453 - DNA, 19 bp, Homo sapiens
  siRNA target sequence for ATP7A (NM_000052.1,2362-2380).
gaagcataagacagcaaat

SEQ ID NO: 73454 - DNA, 19 bp, Homo sapiens
  siRNA target sequence for ATP7A (NM_000052.1,2376-2394).
caaatatggacgtactgat

SEQ ID NO: 73455 - DNA, 19 bp, Homo sapiens
  siRNA target sequence for ATP7A (NM_000052.1,2441-2459).
ctagttgcaatgtatgaga

SEQ ID NO: 73456 - DNA, 19 bp, Homo sapiens
  siRNA target sequence for ATP7A (NM_000052.1,2462-2480).
gccaaagtgaaccctatta

SEQ ID NO: 73457 - DNA, 19 bp, Homo sapiens
  siRNA target sequence for ATP7A (NM_000052.1,2464-2482).
caaagtgaaccctattact

SEQ ID NO: 73458 - DNA, 19 bp, Homo sapiens
  siRNA target sequence for ATP7A (NM_000052.1,2493-2511).
caccccctatgctgtttgt

SEQ ID NO: 73459 - DNA, 19 bp, Homo sapiens
  siRNA target sequence for ATP7A (NM_000052.1,2526-2544).
gccgatggctggaacatat

SEQ ID NO: 73460 - DNA, 19 bp, Homo sapiens
  siRNA target sequence for ATP7A (NM_000052.1,2559-2577).
catcagaggctcttgcaaa

SEQ ID NO: 73461 - DNA, 19 bp, Homo sapiens
  siRNA target sequence for ATP7A (NM_000052.1,2564-2582).
gaggctcttgcaaagttaa

SEQ ID NO: 73462 - DNA, 19 bp, Homo sapiens
  siRNA target sequence for ATP7A (NM_000052.1,2616-2634).
ctcttgattctgataatat

SEQ ID NO: 73463 - DNA, 19 bp, Homo sapiens
  siRNA target sequence for ATP7A (NM_000052.1,2656-2674).
ggatgtggaacttgtacaa

SEQ ID NO: 73464 - DNA, 19 bp, Homo sapiens
  siRNA target sequence for ATP7A (NM_000052.1,2669-2687).
gtacaacgtggagatatca

SEQ ID NO: 73465 - DNA, 19 bp, Homo sapiens
  siRNA target sequence for ATP7A (NM_000052.1,2672-2690).
caacgtggagatatcatta

SEQ ID NO: 73466 - DNA, 19 bp, Homo sapiens
  siRNA target sequence for ATP7A (NM_000052.1,2715-2733).
cagtggatggtcgtgttat

SEQ ID NO: 73467 - DNA, 19 bp, Homo sapiens
  siRNA target sequence for ATP7A (NM_000052.1,2719-2737).
ggatggtcgtgttattgaa

SEQ ID NO: 73468 - DNA, 19 bp, Homo sapiens
  siRNA target sequence for ATP7A (NM_000052.1,2845-2863).
gcttatctgcgcaacacat

SEQ ID NO: 73469 - DNA, 19 bp, Homo sapiens
  siRNA target sequence for ATP7A (NM_000052.1,2871-2889).
cagacacaaccctttctca

SEQ ID NO: 73470 - DNA, 19 bp, Homo sapiens
  siRNA target sequence for ATP7A (NM_000052.1,2875-2893).
cacaaccctttctcaaatt

SEQ ID NO: 73471 - DNA, 19 bp, Homo sapiens
  siRNA target sequence for ATP7A (NM_000052.1,2877-2895).
caaccctttctcaaattgt

SEQ ID NO: 73472 - DNA, 19 bp, Homo sapiens
  siRNA target sequence for ATP7A (NM_000052.1,2905-2923).
ggaagaggcacaaacatca

SEQ ID NO: 73473 - DNA, 19 bp, Homo sapiens
  siRNA target sequence for ATP7A (NM_000052.1,3017-3035).
gtaattggatttctgaatt

SEQ ID NO: 73474 - DNA, 19 bp, Homo sapiens
  siRNA target sequence for ATP7A (NM_000052.1,3052-3070).
ctactttcctggctacaat

SEQ ID NO: 73475 - DNA, 19 bp, Homo sapiens
  siRNA target sequence for ATP7A (NM_000052.1,3055-3073).
ctttcctggctacaataga

SEQ ID NO: 73476 - DNA, 19 bp, Homo sapiens
  siRNA target sequence for ATP7A (NM_000052.1,3059-3077).
cctggctacaatagaagta

SEQ ID NO: 73477 - DNA, 19 bp, Homo sapiens
  siRNA target sequence for ATP7A (NM_000052.1,3060-3078).
ctggctacaatagaagtat

SEQ ID NO: 73478 - DNA, 19 bp, Homo sapiens
  siRNA target sequence for ATP7A (NM_000052.1,3079-3097).
ctcccgaacagaaacgata

SEQ ID NO: 73479 - DNA, 19 bp, Homo sapiens
  siRNA target sequence for ATP7A (NM_000052.1,3081-3099).
cccgaacagaaacgataat

SEQ ID NO: 73480 - DNA, 19 bp, Homo sapiens
  siRNA target sequence for ATP7A (NM_000052.1,3082-3100).
ccgaacagaaacgataata

SEQ ID NO: 73481 - DNA, 19 bp, Homo sapiens
  siRNA target sequence for ATP7A (NM_000052.1,3107-3125).
gctttccaagcctctatca

SEQ ID NO: 73482 - DNA, 19 bp, Homo sapiens
  siRNA target sequence for ATP7A (NM_000052.1,3120-3138).
ctatcacagttctgtgtat

SEQ ID NO: 73483 - DNA, 19 bp, Homo sapiens
  siRNA target sequence for ATP7A (NM_000052.1,3124-3142).
cacagttctgtgtattgca

SEQ ID NO: 73484 - DNA, 19 bp, Homo sapiens
  siRNA target sequence for ATP7A (NM_000052.1,3203-3221).
gctcaaaatggcatactaa

SEQ ID NO: 73485 - DNA, 19 bp, Homo sapiens
  siRNA target sequence for ATP7A (NM_000052.1,3204-3222).
ctcaaaatggcatactaat

SEQ ID NO: 73486 - DNA, 19 bp, Homo sapiens
  siRNA target sequence for ATP7A (NM_000052.1,3241-3259).
ggagatggctcataaggta

SEQ ID NO: 73487 - DNA, 19 bp, Homo sapiens
  siRNA target sequence for ATP7A (NM_000052.1,3247-3265).
ggctcataaggtaaaggta

SEQ ID NO: 73488 - DNA, 19 bp, Homo sapiens
  siRNA target sequence for ATP7A (NM_000052.1,3407-3425).
ctaggaacagccataacca

SEQ ID NO: 73489 - DNA, 19 bp, Homo sapiens
  siRNA target sequence for ATP7A (NM_000052.1,3416-3434).
gccataaccaaatattgca

SEQ ID NO: 73490 - DNA, 19 bp, Homo sapiens
  siRNA target sequence for ATP7A (NM_000052.1,3457-3475).
cttgggtacctgcatagat

SEQ ID NO: 73491 - DNA, 19 bp, Homo sapiens
  siRNA target sequence for ATP7A (NM_000052.1,3462-3480).
gtacctgcatagatttcca

SEQ ID NO: 73492 - DNA, 19 bp, Homo sapiens
  siRNA target sequence for ATP7A (NM_000052.1,3488-3506).
ccaggctgtggtattagct

SEQ ID NO: 73493 - DNA, 19 bp, Homo sapiens
  siRNA target sequence for ATP7A (NM_000052.1,3649-3667).
gatctcaaatgctcttaat

SEQ ID NO: 73494 - DNA, 19 bp, Homo sapiens
  siRNA target sequence for ATP7A (NM_000052.1,3652-3670).
ctcaaatgctcttaatgct

SEQ ID NO: 73495 - DNA, 19 bp, Homo sapiens
  siRNA target sequence for ATP7A (NM_000052.1,3714-3732).
gaaatggtcttgtcattaa

SEQ ID NO: 73496 - DNA, 19 bp, Homo sapiens
  siRNA target sequence for ATP7A (NM_000052.1,3720-3738).
gtcttgtcattaataacga

SEQ ID NO: 73497 - DNA, 19 bp, Homo sapiens
  siRNA target sequence for ATP7A (NM_000052.1,3727-3745).
cattaataacgatgtaaat

SEQ ID NO: 73498 - DNA, 19 bp, Homo sapiens
  siRNA target sequence for ATP7A (NM_000052.1,3774-3792).
gtcggactgctgtattagt

SEQ ID NO: 73499 - DNA, 19 bp, Homo sapiens
  siRNA target sequence for ATP7A (NM_000052.1,3885-3903).
gcttagaagtagttctgat

SEQ ID NO: 73500 - DNA, 19 bp, Homo sapiens
  siRNA target sequence for ATP7A (NM_000052.1,3942-3960).
ctcaggttggcattactaa

SEQ ID NO: 73501 - DNA, 19 bp, Homo sapiens
  siRNA target sequence for ATP7A (NM_000052.1,3986-4004).
cacaaggttgctaaagtga

SEQ ID NO: 73502 - DNA, 19 bp, Homo sapiens
  siRNA target sequence for ATP7A (NM_000052.1,4068-4086).
ctctggcaatggctaatgt

SEQ ID NO: 73503 - DNA, 19 bp, Homo sapiens
  siRNA target sequence for ATP7A (NM_000052.1,4130-4148).
gctgatgtggttttgataa

SEQ ID NO: 73504 - DNA, 19 bp, Homo sapiens
  siRNA target sequence for ATP7A (NM_000052.1,4169-4187).
gtggcaagtattgacttat

SEQ ID NO: 73505 - DNA, 19 bp, Homo sapiens
  siRNA target sequence for ATP7A (NM_000052.1,4201-4219).
caagaggattcggataaat

SEQ ID NO: 73506 - DNA, 19 bp, Homo sapiens
  siRNA target sequence for ATP7A (NM_000052.1,4204-4222).
gaggattcggataaatttt

SEQ ID NO: 73507 - DNA, 19 bp, Homo sapiens
  siRNA target sequence for ATP7A (NM_000052.1,4206-4224).
ggattcggataaattttgt

SEQ ID NO: 73508 - DNA, 19 bp, Homo sapiens
  siRNA target sequence for ATP7A (NM_000052.1,4386-4404).
cttacgagagttatgaact

SEQ ID NO: 73509 - DNA, 19 bp, Homo sapiens
  siRNA target sequence for ATP7A (NM_000052.1,4440-4458).
cagaaatcagcgttcatgt

SEQ ID NO: 73510 - DNA, 19 bp, Homo sapiens
  siRNA target sequence for ATP7A (NM_000052.1,4447-4465).
cagcgttcatgttggaata

SEQ ID NO: 73511 - DNA, 19 bp, Homo sapiens
  siRNA target sequence for ATP7A (NM_000052.1,4449-4467).
gcgttcatgttggaataga

SEQ ID NO: 73512 - DNA, 19 bp, Homo sapiens
  siRNA target sequence for ATP7A (NM_000052.1,4450-4468).
cgttcatgttggaatagat

SEQ ID NO: 73513 - DNA, 19 bp, Homo sapiens
  siRNA target sequence for ATP7A (NM_000052.1,4501-4519).
gctggaccggattgttaat

SEQ ID NO: 73514 - DNA, 19 bp, Homo sapiens
  siRNA target sequence for ATP7A (NM_000052.1,4502-4520).
ctggaccggattgttaatt

SEQ ID NO: 73515 - DNA, 19 bp, Homo sapiens
  siRNA target sequence for ATP7A (NM_000052.1,4504-4522).
ggaccggattgttaattat

SEQ ID NO: 73516 - DNA, 19 bp, Homo sapiens
  siRNA target sequence for ATP7A (NM_000052.1,4505-4523).
gaccggattgttaattata

SEQ ID NO: 73517 - DNA, 19 bp, Homo sapiens
  siRNA target sequence for ATP7A (NM_000052.1,4525-4543).
cagagcctctataaactca

SEQ ID NO: 73518 - DNA, 19 bp, Homo sapiens
  siRNA target sequence for ATP7A (NM_000052.1,4540-4558).
ctcactactgtctgataaa

SEQ ID NO: 73519 - DNA, 19 bp, Homo sapiens
  siRNA target sequence for ATP7A (NM_000052.1,4553-4571).
gataaacgctccctaaaca

SEQ ID NO: 73520 - DNA, 19 bp, Homo sapiens
  siRNA target sequence for ATP7B (NM_000053.1,200-218).
gggccagtcggaaaatctt

SEQ ID NO: 73521 - DNA, 19 bp, Homo sapiens
  siRNA target sequence for ATP7B (NM_000053.1,201-219).
ggccagtcggaaaatctta

SEQ ID NO: 73522 - DNA, 19 bp, Homo sapiens
  siRNA target sequence for ATP7B (NM_000053.1,202-220).
gccagtcggaaaatcttat

SEQ ID NO: 73523 - DNA, 19 bp, Homo sapiens
  siRNA target sequence for ATP7B (NM_000053.1,204-222).
cagtcggaaaatcttatct

SEQ ID NO: 73524 - DNA, 19 bp, Homo sapiens
  siRNA target sequence for ATP7B (NM_000053.1,206-224).
gtcggaaaatcttatctaa

SEQ ID NO: 73525 - DNA, 19 bp, Homo sapiens
  siRNA target sequence for ATP7B (NM_000053.1,245-263).
cctgggaaccagcaatgaa

SEQ ID NO: 73526 - DNA, 19 bp, Homo sapiens
  siRNA target sequence for ATP7B (NM_000053.1,391-409).
gaggacaggatttccaatt

SEQ ID NO: 73527 - DNA, 19 bp, Homo sapiens
  siRNA target sequence for ATP7B (NM_000053.1,630-648).
ctgtgtcagctccattgaa

SEQ ID NO: 73528 - DNA, 19 bp, Homo sapiens
  siRNA target sequence for ATP7B (NM_000053.1,671-689).
gagtagtgagagtcaaagt

SEQ ID NO: 73529 - DNA, 19 bp, Homo sapiens
  siRNA target sequence for ATP7B (NM_000053.1,673-691).
gtagtgagagtcaaagtct

SEQ ID NO: 73530 - DNA, 19 bp, Homo sapiens
  siRNA target sequence for ATP7B (NM_000053.1,719-737).
cttatcagccttatctcat

SEQ ID NO: 73531 - DNA, 19 bp, Homo sapiens
  siRNA target sequence for ATP7B (NM_000053.1,748-766).
gacctcagggaccatgtaa

SEQ ID NO: 73532 - DNA, 19 bp, Homo sapiens
  siRNA target sequence for ATP7B (NM_000053.1,815-833).
gcctgggaccaattgatat

SEQ ID NO: 73533 - DNA, 19 bp, Homo sapiens
  siRNA target sequence for ATP7B (NM_000053.1,816-834).
cctgggaccaattgatatt

SEQ ID NO: 73534 - DNA, 19 bp, Homo sapiens
  siRNA target sequence for ATP7B (NM_000053.1,829-847).
gatattgagcggttacaaa

SEQ ID NO: 73535 - DNA, 19 bp, Homo sapiens
  siRNA target sequence for ATP7B (NM_000053.1,945-963).
gagaatagatggaatgcat

SEQ ID NO: 73536 - DNA, 19 bp, Homo sapiens
  siRNA target sequence for ATP7B (NM_000053.1,965-983).
gtaagtcttgcgtcttgaa

SEQ ID NO: 73537 - DNA, 19 bp, Homo sapiens
  siRNA target sequence for ATP7B (NM_000053.1,969-987).
gtcttgcgtcttgaatatt

SEQ ID NO: 73538 - DNA, 19 bp, Homo sapiens
  siRNA target sequence for ATP7B (NM_000053.1,974-992).
gcgtcttgaatattgaaga

SEQ ID NO: 73539 - DNA, 19 bp, Homo sapiens
  siRNA target sequence for ATP7B (NM_000053.1,1003-1021).
cagctcctaggggttcaaa

SEQ ID NO: 73540 - DNA, 19 bp, Homo sapiens
  siRNA target sequence for ATP7B (NM_000053.1,1008-1026).
cctaggggttcaaagtatt

SEQ ID NO: 73541 - DNA, 19 bp, Homo sapiens
  siRNA target sequence for ATP7B (NM_000053.1,1013-1031).
gggttcaaagtattcaagt

SEQ ID NO: 73542 - DNA, 19 bp, Homo sapiens
  siRNA target sequence for ATP7B (NM_000053.1,1049-1067).
ctgcccaagtaaagtatga

SEQ ID NO: 73543 - DNA, 19 bp, Homo sapiens
  siRNA target sequence for ATP7B (NM_000053.1,1176-1194).
caggtcttccagttctcat

SEQ ID NO: 73544 - DNA, 19 bp, Homo sapiens
  siRNA target sequence for ATP7B (NM_000053.1,1314-1332).
ggaaggggtgcagcaaata

SEQ ID NO: 73545 - DNA, 19 bp, Homo sapiens
  siRNA target sequence for ATP7B (NM_000053.1,1347-1365).
cgaagggactgcaacagtt

SEQ ID NO: 73546 - DNA, 19 bp, Homo sapiens
  siRNA target sequence for ATP7B (NM_000053.1,1351-1369).
gggactgcaacagttcttt

SEQ ID NO: 73547 - DNA, 19 bp, Homo sapiens
  siRNA target sequence for ATP7B (NM_000053.1,1441-1459).
gtttctgaaagctgttcta

SEQ ID NO: 73548 - DNA, 19 bp, Homo sapiens
  siRNA target sequence for ATP7B (NM_000053.1,1622-1640).
cgcagaagtgcttcttaca

SEQ ID NO: 73549 - DNA, 19 bp, Homo sapiens
  siRNA target sequence for ATP7B (NM_000053.1,1658-1676).
gtgcatcctgtgtgtctaa

SEQ ID NO: 73550 - DNA, 19 bp, Homo sapiens
  siRNA target sequence for ATP7B (NM_000053.1,1660-1678).
gcatcctgtgtgtctaaca

SEQ ID NO: 73551 - DNA, 19 bp, Homo sapiens
  siRNA target sequence for ATP7B (NM_000053.1,1664-1682).
cctgtgtgtctaacataga

SEQ ID NO: 73552 - DNA, 19 bp, Homo sapiens
  siRNA target sequence for ATP7B (NM_000053.1,1665-1683).
ctgtgtgtctaacatagaa

SEQ ID NO: 73553 - DNA, 19 bp, Homo sapiens
  siRNA target sequence for ATP7B (NM_000053.1,1857-1875).
cattgagctgacaatcaca

SEQ ID NO: 73554 - DNA, 19 bp, Homo sapiens
  siRNA target sequence for ATP7B (NM_000053.1,1890-1908).
gtcctgtgtccacaacata

SEQ ID NO: 73555 - DNA, 19 bp, Homo sapiens
  siRNA target sequence for ATP7B (NM_000053.1,1925-1943).
ggacaaatggcatcactta

SEQ ID NO: 73556 - DNA, 19 bp, Homo sapiens
  siRNA target sequence for ATP7B (NM_000053.1,1926-1944).
gacaaatggcatcacttat

SEQ ID NO: 73557 - DNA, 19 bp, Homo sapiens
  siRNA target sequence for ATP7B (NM_000053.1,2002-2020).
ggtccacgggatattatca

SEQ ID NO: 73558 - DNA, 19 bp, Homo sapiens
  siRNA target sequence for ATP7B (NM_000053.1,2003-2021).
gtccacgggatattatcaa

SEQ ID NO: 73559 - DNA, 19 bp, Homo sapiens
  siRNA target sequence for ATP7B (NM_000053.1,2005-2023).
ccacgggatattatcaaaa

SEQ ID NO: 73560 - DNA, 19 bp, Homo sapiens
  siRNA target sequence for ATP7B (NM_000053.1,2006-2024).
cacgggatattatcaaaat

SEQ ID NO: 73561 - DNA, 19 bp, Homo sapiens
  siRNA target sequence for ATP7B (NM_000053.1,2154-2172).
catggccttaatgatctat

SEQ ID NO: 73562 - DNA, 19 bp, Homo sapiens
  siRNA target sequence for ATP7B (NM_000053.1,2234-2252).
gactgtccattctaaatct

SEQ ID NO: 73563 - DNA, 19 bp, Homo sapiens
  siRNA target sequence for ATP7B (NM_000053.1,2287-2305).
ctcggtgggtggtacttct

SEQ ID NO: 73564 - DNA, 19 bp, Homo sapiens
  siRNA target sequence for ATP7B (NM_000053.1,2304-2322).
ctacgttcaggcctacaaa

SEQ ID NO: 73565 - DNA, 19 bp, Homo sapiens
  siRNA target sequence for ATP7B (NM_000053.1,2307-2325).
cgttcaggcctacaaatct

SEQ ID NO: 73566 - DNA, 19 bp, Homo sapiens
  siRNA target sequence for ATP7B (NM_000053.1,2361-2379).
cgtcctggccacaagcatt

SEQ ID NO: 73567 - DNA, 19 bp, Homo sapiens
  siRNA target sequence for ATP7B (NM_000053.1,2367-2385).
ggccacaagcattgcttat

SEQ ID NO: 73568 - DNA, 19 bp, Homo sapiens
  siRNA target sequence for ATP7B (NM_000053.1,2582-2600).
cccttggtgaggacaattt

SEQ ID NO: 73569 - DNA, 19 bp, Homo sapiens
  siRNA target sequence for ATP7B (NM_000053.1,2583-2601).
ccttggtgaggacaattta

SEQ ID NO: 73570 - DNA, 19 bp, Homo sapiens
  siRNA target sequence for ATP7B (NM_000053.1,2743-2761).
gccatgccagtcactaaga

SEQ ID NO: 73571 - DNA, 19 bp, Homo sapiens
  siRNA target sequence for ATP7B (NM_000053.1,2744-2762).
ccatgccagtcactaagaa

SEQ ID NO: 73572 - DNA, 19 bp, Homo sapiens
  siRNA target sequence for ATP7B (NM_000053.1,2841-2859).
caccactttggctcagatt

SEQ ID NO: 73573 - DNA, 19 bp, Homo sapiens
  siRNA target sequence for ATP7B (NM_000053.1,2846-2864).
ctttggctcagattgtgaa

SEQ ID NO: 73574 - DNA, 19 bp, Homo sapiens
  siRNA target sequence for ATP7B (NM_000053.1,2907-2925).
gctggctgaccggtttagt

SEQ ID NO: 73575 - DNA, 19 bp, Homo sapiens
  siRNA target sequence for ATP7B (NM_000053.1,2914-2932).
gaccggtttagtggatatt

SEQ ID NO: 73576 - DNA, 19 bp, Homo sapiens
  siRNA target sequence for ATP7B (NM_000053.1,2964-2982).
gacgttggtggtatggatt

SEQ ID NO: 73577 - DNA, 19 bp, Homo sapiens
  siRNA target sequence for ATP7B (NM_000053.1,2978-2996).
ggattgtaatcggttttat

SEQ ID NO: 73578 - DNA, 19 bp, Homo sapiens
  siRNA target sequence for ATP7B (NM_000053.1,2983-3001).
gtaatcggttttatcgatt

SEQ ID NO: 73579 - DNA, 19 bp, Homo sapiens
  siRNA target sequence for ATP7B (NM_000053.1,3058-3076).
gtgatcatccggtttgctt

SEQ ID NO: 73580 - DNA, 19 bp, Homo sapiens
  siRNA target sequence for ATP7B (NM_000053.1,3207-3225).
ggagatggcgcacaagata

SEQ ID NO: 73581 - DNA, 19 bp, Homo sapiens
  siRNA target sequence for ATP7B (NM_000053.1,3376-3394).
ggcgtggcagtcaccaaat

SEQ ID NO: 73582 - DNA, 19 bp, Homo sapiens
  siRNA target sequence for ATP7B (NM_000053.1,3377-3395).
gcgtggcagtcaccaaata

SEQ ID NO: 73583 - DNA, 19 bp, Homo sapiens
  siRNA target sequence for ATP7B (NM_000053.1,3379-3397).
gtggcagtcaccaaatact

SEQ ID NO: 73584 - DNA, 19 bp, Homo sapiens
  siRNA target sequence for ATP7B (NM_000053.1,3381-3399).
ggcagtcaccaaatactgt

SEQ ID NO: 73585 - DNA, 19 bp, Homo sapiens
  siRNA target sequence for ATP7B (NM_000053.1,3507-3525).
cagtgagcgccctttgagt

SEQ ID NO: 73586 - DNA, 19 bp, Homo sapiens
  siRNA target sequence for ATP7B (NM_000053.1,3530-3548).
cggccagtcacctgaatga

SEQ ID NO: 73587 - DNA, 19 bp, Homo sapiens
  siRNA target sequence for ATP7B (NM_000053.1,3626-3644).
ggcgcaacggtttaaccat

SEQ ID NO: 73588 - DNA, 19 bp, Homo sapiens
  siRNA target sequence for ATP7B (NM_000053.1,3627-3645).
gcgcaacggtttaaccatt

SEQ ID NO: 73589 - DNA, 19 bp, Homo sapiens
  siRNA target sequence for ATP7B (NM_000053.1,3628-3646).
cgcaacggtttaaccattt

SEQ ID NO: 73590 - DNA, 19 bp, Homo sapiens
  siRNA target sequence for ATP7B (NM_000053.1,3630-3648).
caacggtttaaccatttct

SEQ ID NO: 73591 - DNA, 19 bp, Homo sapiens
  siRNA target sequence for ATP7B (NM_000053.1,3698-3716).
ccatcctggtggctattga

SEQ ID NO: 73592 - DNA, 19 bp, Homo sapiens
  siRNA target sequence for ATP7B (NM_000053.1,3800-3818).
gtgtggacgtggttctgat

SEQ ID NO: 73593 - DNA, 19 bp, Homo sapiens
  siRNA target sequence for ATP7B (NM_000053.1,3858-3876).
ccaggttggcatcaacaaa

SEQ ID NO: 73594 - DNA, 19 bp, Homo sapiens
  siRNA target sequence for ATP7B (NM_000053.1,4043-4061).
cagccgacgtcgtccttat

SEQ ID NO: 73595 - DNA, 19 bp, Homo sapiens
  siRNA target sequence for ATP7B (NM_000053.1,4045-4063).
gccgacgtcgtccttatca

SEQ ID NO: 73596 - DNA, 19 bp, Homo sapiens
  siRNA target sequence for ATP7B (NM_000053.1,4047-4065).
cgacgtcgtccttatcaga

SEQ ID NO: 73597 - DNA, 19 bp, Homo sapiens
  siRNA target sequence for ATP7B (NM_000053.1,4048-4066).
gacgtcgtccttatcagaa

SEQ ID NO: 73598 - DNA, 19 bp, Homo sapiens
  siRNA target sequence for ATP7B (NM_000053.1,4050-4068).
cgtcgtccttatcagaaat

SEQ ID NO: 73599 - DNA, 19 bp, Homo sapiens
  siRNA target sequence for ATP7B (NM_000053.1,4053-4071).
cgtccttatcagaaatgat

SEQ ID NO: 73600 - DNA, 19 bp, Homo sapiens
  siRNA target sequence for ATP7B (NM_000053.1,4077-4095).
ggatgtggtggctagcatt

SEQ ID NO: 73601 - DNA, 19 bp, Homo sapiens
  siRNA target sequence for ATP7B (NM_000053.1,4107-4125).
gaggactgtccgaaggata

SEQ ID NO: 73602 - DNA, 19 bp, Homo sapiens
  siRNA target sequence for ATP7B (NM_000053.1,4137-4155).
ggtcctggcactgatttat

SEQ ID NO: 73603 - DNA, 19 bp, Homo sapiens
  siRNA target sequence for ATP7B (NM_000053.1,4273-4291).
ctgcagctcaagtgctata

SEQ ID NO: 73604 - DNA, 19 bp, Homo sapiens
  siRNA target sequence for ATP8A1 (NM_006095.1,140-158).
caaaattctgcaataacca

SEQ ID NO: 73605 - DNA, 19 bp, Homo sapiens
  siRNA target sequence for ATP8A1 (NM_006095.1,219-237).
cagaagagctgctaattca

SEQ ID NO: 73606 - DNA, 19 bp, Homo sapiens
  siRNA target sequence for ATP8A1 (NM_006095.1,224-242).
gagctgctaattcattttt

SEQ ID NO: 73607 - DNA, 19 bp, Homo sapiens
  siRNA target sequence for ATP8A1 (NM_006095.1,279-297).
gtcaccaacaggtcgttat

SEQ ID NO: 73608 - DNA, 19 bp, Homo sapiens
  siRNA target sequence for ATP8A1 (NM_006095.1,283-301).
ccaacaggtcgttatacaa

SEQ ID NO: 73609 - DNA, 19 bp, Homo sapiens
  siRNA target sequence for ATP8A1 (NM_006095.1,455-473).
cagtaggggagatagtgaa

SEQ ID NO: 73610 - DNA, 19 bp, Homo sapiens
  siRNA target sequence for ATP8A1 (NM_006095.1,531-549).
ccaagccatgtgctacatt

SEQ ID NO: 73611 - DNA, 19 bp, Homo sapiens
  siRNA target sequence for ATP8A1 (NM_006095.1,535-553).
gccatgtgctacattgaaa

SEQ ID NO: 73612 - DNA, 19 bp, Homo sapiens
  siRNA target sequence for ATP8A1 (NM_006095.1,605-623).
caacatcagatatcaaaga

SEQ ID NO: 73613 - DNA, 19 bp, Homo sapiens
  siRNA target sequence for ATP8A1 (NM_006095.1,641-659).
ggatttctggcagaattga

SEQ ID NO: 73614 - DNA, 19 bp, Homo sapiens
  siRNA target sequence for ATP8A1 (NM_006095.1,783-801).
gtgggttcatggaatagtt

SEQ ID NO: 73615 - DNA, 19 bp, Homo sapiens
  siRNA target sequence for ATP8A1 (NM_006095.1,825-843).
gctgatgcagaattcaaca

SEQ ID NO: 73616 - DNA, 19 bp, Homo sapiens
  siRNA target sequence for ATP8A1 (NM_006095.1,839-857).
caacaagtccaccacttaa

SEQ ID NO: 73617 - DNA, 19 bp, Homo sapiens
  siRNA target sequence for ATP8A1 (NM_006095.1,842-860).
caagtccaccacttaagct

SEQ ID NO: 73618 - DNA, 19 bp, Homo sapiens
  siRNA target sequence for ATP8A1 (NM_006095.1,870-888).
ggaacggattacaaatgta

SEQ ID NO: 73619 - DNA, 19 bp, Homo sapiens
  siRNA target sequence for ATP8A1 (NM_006095.1,874-892).
cggattacaaatgtacaaa

SEQ ID NO: 73620 - DNA, 19 bp, Homo sapiens
  siRNA target sequence for ATP8A1 (NM_006095.1,881-899).
caaatgtacaaattttgat

SEQ ID NO: 73621 - DNA, 19 bp, Homo sapiens
  siRNA target sequence for ATP8A1 (NM_006095.1,979-997).
gactggtatctcaatctaa

SEQ ID NO: 73622 - DNA, 19 bp, Homo sapiens
  siRNA target sequence for ATP8A1 (NM_006095.1,983-1001).
ggtatctcaatctaaacta

SEQ ID NO: 73623 - DNA, 19 bp, Homo sapiens
  siRNA target sequence for ATP8A1 (NM_006095.1,984-1002).
gtatctcaatctaaactat

SEQ ID NO: 73624 - DNA, 19 bp, Homo sapiens
  siRNA target sequence for ATP8A1 (NM_006095.1,999-1017).
ctatggtggcgctagtaat

SEQ ID NO: 73625 - DNA, 19 bp, Homo sapiens
  siRNA target sequence for ATP8A1 (NM_006095.1,1060-1078).
ctcattcctatcagcttat

SEQ ID NO: 73626 - DNA, 19 bp, Homo sapiens
  siRNA target sequence for ATP8A1 (NM_006095.1,1066-1084).
cctatcagcttattggtta

SEQ ID NO: 73627 - DNA, 19 bp, Homo sapiens
  siRNA target sequence for ATP8A1 (NM_006095.1,1106-1124).
cccaggcatacttcataaa

SEQ ID NO: 73628 - DNA, 19 bp, Homo sapiens
  siRNA target sequence for ATP8A1 (NM_006095.1,1107-1125).
ccaggcatacttcataaat

SEQ ID NO: 73629 - DNA, 19 bp, Homo sapiens
  siRNA target sequence for ATP8A1 (NM_006095.1,1108-1126).
caggcatacttcataaatt

SEQ ID NO: 73630 - DNA, 19 bp, Homo sapiens
  siRNA target sequence for ATP8A1 (NM_006095.1,1165-1183).
gctatggctcgaacatcta

SEQ ID NO: 73631 - DNA, 19 bp, Homo sapiens
  siRNA target sequence for ATP8A1 (NM_006095.1,1166-1184).
ctatggctcgaacatctaa

SEQ ID NO: 73632 - DNA, 19 bp, Homo sapiens
  siRNA target sequence for ATP8A1 (NM_006095.1,1172-1190).
ctcgaacatctaatctgaa

SEQ ID NO: 73633 - DNA, 19 bp, Homo sapiens
  siRNA target sequence for ATP8A1 (NM_006095.1,1194-1212).
ggaacttggccaggttaaa

SEQ ID NO: 73634 - DNA, 19 bp, Homo sapiens
  siRNA target sequence for ATP8A1 (NM_006095.1,1195-1213).
gaacttggccaggttaaat

SEQ ID NO: 73635 - DNA, 19 bp, Homo sapiens
  siRNA target sequence for ATP8A1 (NM_006095.1,1198-1216).
cttggccaggttaaataca

SEQ ID NO: 73636 - DNA, 19 bp, Homo sapiens
  siRNA target sequence for ATP8A1 (NM_006095.1,1203-1221).
ccaggttaaatacatattt

SEQ ID NO: 73637 - DNA, 19 bp, Homo sapiens
  siRNA target sequence for ATP8A1 (NM_006095.1,1238-1256).
ctctgacatgcaatgtaat

SEQ ID NO: 73638 - DNA, 19 bp, Homo sapiens
  siRNA target sequence for ATP8A1 (NM_006095.1,1274-1292).
ccatagcgggagttgctta

SEQ ID NO: 73639 - DNA, 19 bp, Homo sapiens
  siRNA target sequence for ATP8A1 (NM_006095.1,1275-1293).
catagcgggagttgcttat

SEQ ID NO: 73640 - DNA, 19 bp, Homo sapiens
  siRNA target sequence for ATP8A1 (NM_006095.1,1418-1436).
ctgcacctataatatgtga

SEQ ID NO: 73641 - DNA, 19 bp, Homo sapiens
  siRNA target sequence for ATP8A1 (NM_006095.1,1424-1442).
ctataatatgtgaatttct

SEQ ID NO: 73642 - DNA, 19 bp, Homo sapiens
  siRNA target sequence for ATP8A1 (NM_006095.1,1479-1497).
gcgagaaggtgacaagatt

SEQ ID NO: 73643 - DNA, 19 bp, Homo sapiens
  siRNA target sequence for ATP8A1 (NM_006095.1,1480-1498).
cgagaaggtgacaagatta

SEQ ID NO: 73644 - DNA, 19 bp, Homo sapiens
  siRNA target sequence for ATP8A1 (NM_006095.1,1538-1556).
gagcagccaagcaattgaa

SEQ ID NO: 73645 - DNA, 19 bp, Homo sapiens
  siRNA target sequence for ATP8A1 (NM_006095.1,1544-1562).
ccaagcaattgaattttgt

SEQ ID NO: 73646 - DNA, 19 bp, Homo sapiens
  siRNA target sequence for ATP8A1 (NM_006095.1,1577-1595).
cacccgactcggtgattat

SEQ ID NO: 73647 - DNA, 19 bp, Homo sapiens
  siRNA target sequence for ATP8A1 (NM_006095.1,1580-1598).
ccgactcggtgattataga

SEQ ID NO: 73648 - DNA, 19 bp, Homo sapiens
  siRNA target sequence for ATP8A1 (NM_006095.1,1581-1599).
cgactcggtgattatagat

SEQ ID NO: 73649 - DNA, 19 bp, Homo sapiens
  siRNA target sequence for ATP8A1 (NM_006095.1,1584-1602).
ctcggtgattatagattca

SEQ ID NO: 73650 - DNA, 19 bp, Homo sapiens
  siRNA target sequence for ATP8A1 (NM_006095.1,1630-1648).
ctcaatgtcttggagttta

SEQ ID NO: 73651 - DNA, 19 bp, Homo sapiens
  siRNA target sequence for ATP8A1 (NM_006095.1,1747-1765).
gcagagacgtcaaaataca

SEQ ID NO: 73652 - DNA, 19 bp, Homo sapiens
  siRNA target sequence for ATP8A1 (NM_006095.1,1752-1770).
gacgtcaaaatacaaagaa

SEQ ID NO: 73653 - DNA, 19 bp, Homo sapiens
  siRNA target sequence for ATP8A1 (NM_006095.1,1783-1801).
catttagagcagtttgcta

SEQ ID NO: 73654 - DNA, 19 bp, Homo sapiens
  siRNA target sequence for ATP8A1 (NM_006095.1,1875-1893).
ctatcagcgagcatctaca

SEQ ID NO: 73655 - DNA, 19 bp, Homo sapiens
  siRNA target sequence for ATP8A1 (NM_006095.1,1899-1917).
gcagaacaggctactcaaa

SEQ ID NO: 73656 - DNA, 19 bp, Homo sapiens
  siRNA target sequence for ATP8A1 (NM_006095.1,1918-1936).
ctcgaagagagttatgagt

SEQ ID NO: 73657 - DNA, 19 bp, Homo sapiens
  siRNA target sequence for ATP8A1 (NM_006095.1,1926-1944).
gagttatgagttgattgaa

SEQ ID NO: 73658 - DNA, 19 bp, Homo sapiens
  siRNA target sequence for ATP8A1 (NM_006095.1,1970-1988).
cagccattgaggataaatt

SEQ ID NO: 73659 - DNA, 19 bp, Homo sapiens
  siRNA target sequence for ATP8A1 (NM_006095.1,1973-1991).
ccattgaggataaattaca

SEQ ID NO: 73660 - DNA, 19 bp, Homo sapiens
  siRNA target sequence for ATP8A1 (NM_006095.1,1999-2017).
gtgcctgaaaccatagaaa

SEQ ID NO: 73661 - DNA, 19 bp, Homo sapiens
  siRNA target sequence for ATP8A1 (NM_006095.1,2009-2027).
ccatagaaacgctaatgaa

SEQ ID NO: 73662 - DNA, 19 bp, Homo sapiens
  siRNA target sequence for ATP8A1 (NM_006095.1,2167-2185).
ctcagtcgtcactgtacta

SEQ ID NO: 73663 - DNA, 19 bp, Homo sapiens
  siRNA target sequence for ATP8A1 (NM_006095.1,2198-2216).
ctctccggaaagagaatga

SEQ ID NO: 73664 - DNA, 19 bp, Homo sapiens
  siRNA target sequence for ATP8A1 (NM_006095.1,2200-2218).
ctccggaaagagaatgatt

SEQ ID NO: 73665 - DNA, 19 bp, Homo sapiens
  siRNA target sequence for ATP8A1 (NM_006095.1,2202-2220).
ccggaaagagaatgatttt

SEQ ID NO: 73666 - DNA, 19 bp, Homo sapiens
  siRNA target sequence for ATP8A1 (NM_006095.1,2245-2263).
ctcaaatatgccttaacct

SEQ ID NO: 73667 - DNA, 19 bp, Homo sapiens
  siRNA target sequence for ATP8A1 (NM_006095.1,2262-2280).
ctttggagtacgacagtat

SEQ ID NO: 73668 - DNA, 19 bp, Homo sapiens
  siRNA target sequence for ATP8A1 (NM_006095.1,2267-2285).
gagtacgacagtatttcct

SEQ ID NO: 73669 - DNA, 19 bp, Homo sapiens
  siRNA target sequence for ATP8A1 (NM_006095.1,2289-2307).
cttagctttgtcatgcaaa

SEQ ID NO: 73670 - DNA, 19 bp, Homo sapiens
  siRNA target sequence for ATP8A1 (NM_006095.1,2330-2348).
ctcctcttcaaaaatctga

SEQ ID NO: 73671 - DNA, 19 bp, Homo sapiens
  siRNA target sequence for ATP8A1 (NM_006095.1,2347-2365).
gaagttgttgagatggtta

SEQ ID NO: 73672 - DNA, 19 bp, Homo sapiens
  siRNA target sequence for ATP8A1 (NM_006095.1,2361-2379).
ggttaagaaacaagtcaaa

SEQ ID NO: 73673 - DNA, 19 bp, Homo sapiens
  siRNA target sequence for ATP8A1 (NM_006095.1,2435-2453).
cgcacgttggtgttggtat

SEQ ID NO: 73674 - DNA, 19 bp, Homo sapiens
  siRNA target sequence for ATP8A1 (NM_006095.1,2470-2488).
ctgcaggcagctaattcct

SEQ ID NO: 73675 - DNA, 19 bp, Homo sapiens
  siRNA target sequence for ATP8A1 (NM_006095.1,2539-2557).
catggtgcctggaactata

SEQ ID NO: 73676 - DNA, 19 bp, Homo sapiens
  siRNA target sequence for ATP8A1 (NM_006095.1,2648-2666).
ctggacagatcctctttga

SEQ ID NO: 73677 - DNA, 19 bp, Homo sapiens
  siRNA target sequence for ATP8A1 (NM_006095.1,2672-2690).
ggtgtataggtctctataa

SEQ ID NO: 73678 - DNA, 19 bp, Homo sapiens
  siRNA target sequence for ATP8A1 (NM_006095.1,2675-2693).
gtataggtctctataacgt

SEQ ID NO: 73679 - DNA, 19 bp, Homo sapiens
  siRNA target sequence for ATP8A1 (NM_006095.1,2681-2699).
gtctctataacgtgatgtt

SEQ ID NO: 73680 - DNA, 19 bp, Homo sapiens
  siRNA target sequence for ATP8A1 (NM_006095.1,2683-2701).
ctctataacgtgatgttta

SEQ ID NO: 73681 - DNA, 19 bp, Homo sapiens
  siRNA target sequence for ATP8A1 (NM_006095.1,2685-2703).
ctataacgtgatgtttaca

SEQ ID NO: 73682 - DNA, 19 bp, Homo sapiens
  siRNA target sequence for ATP8A1 (NM_006095.1,2760-2778).
gttgaagtaccctgaatta

SEQ ID NO: 73683 - DNA, 19 bp, Homo sapiens
  siRNA target sequence for ATP8A1 (NM_006095.1,2766-2784).
gtaccctgaattatacaaa

SEQ ID NO: 73684 - DNA, 19 bp, Homo sapiens
  siRNA target sequence for ATP8A1 (NM_006095.1,2770-2788).
cctgaattatacaaaacat

SEQ ID NO: 73685 - DNA, 19 bp, Homo sapiens
  siRNA target sequence for ATP8A1 (NM_006095.1,2818-2836).
gttttctgggttcattgtt

SEQ ID NO: 73686 - DNA, 19 bp, Homo sapiens
  siRNA target sequence for ATP8A1 (NM_006095.1,2935-2953).
ctactgggaaactttgtgt

SEQ ID NO: 73687 - DNA, 19 bp, Homo sapiens
  siRNA target sequence for ATP8A1 (NM_006095.1,2941-2959).
ggaaactttgtgtacactt

SEQ ID NO: 73688 - DNA, 19 bp, Homo sapiens
  siRNA target sequence for ATP8A1 (NM_006095.1,2987-3005).
ctggattggagacatcata

SEQ ID NO: 73689 - DNA, 19 bp, Homo sapiens
  siRNA target sequence for ATP8A1 (NM_006095.1,2989-3007).
ggattggagacatcatatt

SEQ ID NO: 73690 - DNA, 19 bp, Homo sapiens
  siRNA target sequence for ATP8A1 (NM_006095.1,3046-3064).
gcactctgggtggtgtttt

SEQ ID NO: 73691 - DNA, 19 bp, Homo sapiens
  siRNA target sequence for ATP8A1 (NM_006095.1,3097-3115).
ccgatggcccctgatatgt

SEQ ID NO: 73692 - DNA, 19 bp, Homo sapiens
  siRNA target sequence for ATP8A1 (NM_006095.1,3099-3117).
gatggcccctgatatgtca

SEQ ID NO: 73693 - DNA, 19 bp, Homo sapiens
  siRNA target sequence for ATP8A1 (NM_006095.1,3124-3142).
gcagccatgttgttcagtt

SEQ ID NO: 73694 - DNA, 19 bp, Homo sapiens
  siRNA target sequence for ATP8A1 (NM_006095.1,3150-3168).
cttttggatgggcttgtta

SEQ ID NO: 73695 - DNA, 19 bp, Homo sapiens
  siRNA target sequence for ATP8A1 (NM_006095.1,3196-3214).
gatgtggtgtacaaggtta

SEQ ID NO: 73696 - DNA, 19 bp, Homo sapiens
  siRNA target sequence for ATP8A1 (NM_006095.1,3202-3220).
gtgtacaaggttatcaaga

SEQ ID NO: 73697 - DNA, 19 bp, Homo sapiens
  siRNA target sequence for ATP8A1 (NM_006095.1,3236-3254).
cattggtcgatgaagttca

SEQ ID NO: 73698 - DNA, 19 bp, Homo sapiens
  siRNA target sequence for ATP8A1 (NM_006095.1,3258-3276).
gctggaggcaaaatctcaa

SEQ ID NO: 73699 - DNA, 19 bp, Homo sapiens
  siRNA target sequence for ATP8A1 (NM_006095.1,3279-3297).
cccaggagcagttgtactt

SEQ ID NO: 73700 - DNA, 19 bp, Homo sapiens
  siRNA target sequence for ATP8A1 (NM_006095.1,3325-3343).
ctgctcaagaacgtcttta

SEQ ID NO: 73701 - DNA, 19 bp, Homo sapiens
  siRNA target sequence for ATP8A1 (NM_006095.1,3402-3420).
gtatgcgttctctcaagat

SEQ ID NO: 73702 - DNA, 19 bp, Homo sapiens
  siRNA target sequence for ATP8A1 (NM_006095.1,3407-3425).
cgttctctcaagatgaaaa

SEQ ID NO: 73703 - DNA, 19 bp, Homo sapiens
  siRNA target sequence for ATP8A2 (NM_016529.3,158-176).
cagcgtgttgacatttcta

SEQ ID NO: 73704 - DNA, 19 bp, Homo sapiens
  siRNA target sequence for ATP8A2 (NM_016529.3,185-203).
cttgtatgagcagattaga

SEQ ID NO: 73705 - DNA, 19 bp, Homo sapiens
  siRNA target sequence for ATP8A2 (NM_016529.3,210-228).
gctaatgccttctttctct

SEQ ID NO: 73706 - DNA, 19 bp, Homo sapiens
  siRNA target sequence for ATP8A2 (NM_016529.3,283-301).
ccctggtgccattgatcat

SEQ ID NO: 73707 - DNA, 19 bp, Homo sapiens
  siRNA target sequence for ATP8A2 (NM_016529.3,285-303).
ctggtgccattgatcatta

SEQ ID NO: 73708 - DNA, 19 bp, Homo sapiens
  siRNA target sequence for ATP8A2 (NM_016529.3,290-308).
gccattgatcattatttta

SEQ ID NO: 73709 - DNA, 19 bp, Homo sapiens
  siRNA target sequence for ATP8A2 (NM_016529.3,310-328).
caattgcaggcatcaaaga

SEQ ID NO: 73710 - DNA, 19 bp, Homo sapiens
  siRNA target sequence for ATP8A2 (NM_016529.3,357-375).
gcagacaatgcagttaaca

SEQ ID NO: 73711 - DNA, 19 bp, Homo sapiens
  siRNA target sequence for ATP8A2 (NM_016529.3,402-420).
ggtatgtggcataccatta

SEQ ID NO: 73712 - DNA, 19 bp, Homo sapiens
  siRNA target sequence for ATP8A2 (NM_016529.3,458-476).
cgtcaatgggcagtatctt

SEQ ID NO: 73713 - DNA, 19 bp, Homo sapiens
  siRNA target sequence for ATP8A2 (NM_016529.3,550-568).
gggagacgaaccttaaaat

SEQ ID NO: 73714 - DNA, 19 bp, Homo sapiens
  siRNA target sequence for ATP8A2 (NM_016529.3,554-572).
gacgaaccttaaaatacgt

SEQ ID NO: 73715 - DNA, 19 bp, Homo sapiens
  siRNA target sequence for ATP8A2 (NM_016529.3,607-625).
gtgaagttctgatgaagtt

SEQ ID NO: 73716 - DNA, 19 bp, Homo sapiens
  siRNA target sequence for ATP8A2 (NM_016529.3,652-670).
ccaaccgccacctctatga

SEQ ID NO: 73717 - DNA, 19 bp, Homo sapiens
  siRNA target sequence for ATP8A2 (NM_016529.3,717-735).
gggcctgaccagatcttat

SEQ ID NO: 73718 - DNA, 19 bp, Homo sapiens
  siRNA target sequence for ATP8A2 (NM_016529.3,718-736).
ggcctgaccagatcttatt

SEQ ID NO: 73719 - DNA, 19 bp, Homo sapiens
  siRNA target sequence for ATP8A2 (NM_016529.3,719-737).
gcctgaccagatcttatta

SEQ ID NO: 73720 - DNA, 19 bp, Homo sapiens
  siRNA target sequence for ATP8A2 (NM_016529.3,739-757).
gaggtacacagcttagaaa

SEQ ID NO: 73721 - DNA, 19 bp, Homo sapiens
  siRNA target sequence for ATP8A2 (NM_016529.3,764-782).
gtgggtctttggcatagtt

SEQ ID NO: 73722 - DNA, 19 bp, Homo sapiens
  siRNA target sequence for ATP8A2 (NM_016529.3,828-846).
gcgcctctcaagagatcaa

SEQ ID NO: 73723 - DNA, 19 bp, Homo sapiens
  siRNA target sequence for ATP8A2 (NM_016529.3,832-850).
ctctcaagagatcaaatgt

SEQ ID NO: 73724 - DNA, 19 bp, Homo sapiens
  siRNA target sequence for ATP8A2 (NM_016529.3,980-998).
ggacaccacctcagataat

SEQ ID NO: 73725 - DNA, 19 bp, Homo sapiens
  siRNA target sequence for ATP8A2 (NM_016529.3,988-1006).
cctcagataattttggata

SEQ ID NO: 73726 - DNA, 19 bp, Homo sapiens
  siRNA target sequence for ATP8A2 (NM_016529.3,1025-1043).
catcttatacaacaatctt

SEQ ID NO: 73727 - DNA, 19 bp, Homo sapiens
  siRNA target sequence for ATP8A2 (NM_016529.3,1028-1046).
cttatacaacaatcttatt

SEQ ID NO: 73728 - DNA, 19 bp, Homo sapiens
  siRNA target sequence for ATP8A2 (NM_016529.3,1073-1091).
ggttgtgaagtatactcaa

SEQ ID NO: 73729 - DNA, 19 bp, Homo sapiens
  siRNA target sequence for ATP8A2 (NM_016529.3,1106-1124).
ctgggacacagatatgtat

SEQ ID NO: 73730 - DNA, 19 bp, Homo sapiens
  siRNA target sequence for ATP8A2 (NM_016529.3,1156-1174).
ggacatcaaaccttaatga

SEQ ID NO: 73731 - DNA, 19 bp, Homo sapiens
  siRNA target sequence for ATP8A2 (NM_016529.3,1185-1203).
caggtgaaatatctctttt

SEQ ID NO: 73732 - DNA, 19 bp, Homo sapiens
  siRNA target sequence for ATP8A2 (NM_016529.3,1215-1233).
ggaacgcttacatgcaata

SEQ ID NO: 73733 - DNA, 19 bp, Homo sapiens
  siRNA target sequence for ATP8A2 (NM_016529.3,1216-1234).
gaacgcttacatgcaatat

SEQ ID NO: 73734 - DNA, 19 bp, Homo sapiens
  siRNA target sequence for ATP8A2 (NM_016529.3,1219-1237).
cgcttacatgcaatatcat

SEQ ID NO: 73735 - DNA, 19 bp, Homo sapiens
  siRNA target sequence for ATP8A2 (NM_016529.3,1221-1239).
cttacatgcaatatcatga

SEQ ID NO: 73736 - DNA, 19 bp, Homo sapiens
  siRNA target sequence for ATP8A2 (NM_016529.3,1225-1243).
catgcaatatcatgaactt

SEQ ID NO: 73737 - DNA, 19 bp, Homo sapiens
  siRNA target sequence for ATP8A2 (NM_016529.3,1228-1246).
gcaatatcatgaactttaa

SEQ ID NO: 73738 - DNA, 19 bp, Homo sapiens
  siRNA target sequence for ATP8A2 (NM_016529.3,1255-1273).
gcattgccggagtaaccta

SEQ ID NO: 73739 - DNA, 19 bp, Homo sapiens
  siRNA target sequence for ATP8A2 (NM_016529.3,1256-1274).
cattgccggagtaacctat

SEQ ID NO: 73740 - DNA, 19 bp, Homo sapiens
  siRNA target sequence for ATP8A2 (NM_016529.3,1328-1346).
gcctcctccctgtagtgat

SEQ ID NO: 73741 - DNA, 19 bp, Homo sapiens
  siRNA target sequence for ATP8A2 (NM_016529.3,1329-1347).
cctcctccctgtagtgatt

SEQ ID NO: 73742 - DNA, 19 bp, Homo sapiens
  siRNA target sequence for ATP8A2 (NM_016529.3,1564-1582).
cattctcagtcatcataga

SEQ ID NO: 73743 - DNA, 19 bp, Homo sapiens
  siRNA target sequence for ATP8A2 (NM_016529.3,1641-1659).
gtgaaatggcatgtctatt

SEQ ID NO: 73744 - DNA, 19 bp, Homo sapiens
  siRNA target sequence for ATP8A2 (NM_016529.3,1648-1666).
ggcatgtctattgtaaata

SEQ ID NO: 73745 - DNA, 19 bp, Homo sapiens
  siRNA target sequence for ATP8A2 (NM_016529.3,1678-1696).
caagggcagccattactca

SEQ ID NO: 73746 - DNA, 19 bp, Homo sapiens
  siRNA target sequence for ATP8A2 (NM_016529.3,1702-1720).
gcactgaccttgggaattt

SEQ ID NO: 73747 - DNA, 19 bp, Homo sapiens
  siRNA target sequence for ATP8A2 (NM_016529.3,1961-1979).
cgtgggtgtgggaatcagt

SEQ ID NO: 73748 - DNA, 19 bp, Homo sapiens
  siRNA target sequence for ATP8A2 (NM_016529.3,2019-2037).
gccatcgcacagttttcct

SEQ ID NO: 73749 - DNA, 19 bp, Homo sapiens
  siRNA target sequence for ATP8A2 (NM_016529.3,2020-2038).
ccatcgcacagttttccta

SEQ ID NO: 73750 - DNA, 19 bp, Homo sapiens
  siRNA target sequence for ATP8A2 (NM_016529.3,2085-2103).
gtgaccaagtgcatcttgt

SEQ ID NO: 73751 - DNA, 19 bp, Homo sapiens
  siRNA target sequence for ATP8A2 (NM_016529.3,2117-2135).
gaacgtggtcctgtatatt

SEQ ID NO: 73752 - DNA, 19 bp, Homo sapiens
  siRNA target sequence for ATP8A2 (NM_016529.3,2120-2138).
cgtggtcctgtatattatt

SEQ ID NO: 73753 - DNA, 19 bp, Homo sapiens
  siRNA target sequence for ATP8A2 (NM_016529.3,2141-2159).
gctttggttcgcctttgtt

SEQ ID NO: 73754 - DNA, 19 bp, Homo sapiens
  siRNA target sequence for ATP8A2 (NM_016529.3,2142-2160).
ctttggttcgcctttgtta

SEQ ID NO: 73755 - DNA, 19 bp, Homo sapiens
  siRNA target sequence for ATP8A2 (NM_016529.3,2194-2212).
ggtgcatcggcctgtacaa

SEQ ID NO: 73756 - DNA, 19 bp, Homo sapiens
  siRNA target sequence for ATP8A2 (NM_016529.3,2195-2213).
gtgcatcggcctgtacaat

SEQ ID NO: 73757 - DNA, 19 bp, Homo sapiens
  siRNA target sequence for ATP8A2 (NM_016529.3,2197-2215).
gcatcggcctgtacaatgt

SEQ ID NO: 73758 - DNA, 19 bp, Homo sapiens
  siRNA target sequence for ATP8A2 (NM_016529.3,2201-2219).
cggcctgtacaatgtgatt

SEQ ID NO: 73759 - DNA, 19 bp, Homo sapiens
  siRNA target sequence for ATP8A2 (NM_016529.3,2203-2221).
gcctgtacaatgtgatttt

SEQ ID NO: 73760 - DNA, 19 bp, Homo sapiens
  siRNA target sequence for ATP8A2 (NM_016529.3,2319-2337).
ggcgaaggcttcaacacaa

SEQ ID NO: 73761 - DNA, 19 bp, Homo sapiens
  siRNA target sequence for ATP8A2 (NM_016529.3,2407-2425).
ctctggagcatgatactgt

SEQ ID NO: 73762 - DNA, 19 bp, Homo sapiens
  siRNA target sequence for ATP8A2 (NM_016529.3,2436-2454).
ggtcatgctaccgactatt

SEQ ID NO: 73763 - DNA, 19 bp, Homo sapiens
  siRNA target sequence for ATP8A2 (NM_016529.3,2439-2457).
catgctaccgactatttat

SEQ ID NO: 73764 - DNA, 19 bp, Homo sapiens
  siRNA target sequence for ATP8A2 (NM_016529.3,2443-2461).
ctaccgactatttatttgt

SEQ ID NO: 73765 - DNA, 19 bp, Homo sapiens
  siRNA target sequence for ATP8A2 (NM_016529.3,2477-2495).
cacatatgttgttgttact

SEQ ID NO: 73766 - DNA, 19 bp, Homo sapiens
  siRNA target sequence for ATP8A2 (NM_016529.3,2521-2539).
ccacagcttggactaaatt

SEQ ID NO: 73767 - DNA, 19 bp, Homo sapiens
  siRNA target sequence for ATP8A2 (NM_016529.3,2570-2588).
gacctggctggtgtttttt

SEQ ID NO: 73768 - DNA, 19 bp, Homo sapiens
  siRNA target sequence for ATP8A2 (NM_016529.3,2670-2688).
cacttctggttgggattat

SEQ ID NO: 73769 - DNA, 19 bp, Homo sapiens
  siRNA target sequence for ATP8A2 (NM_016529.3,2701-2719).
ctgcctgtttgattgaaga

SEQ ID NO: 73770 - DNA, 19 bp, Homo sapiens
  siRNA target sequence for ATP8A2 (NM_016529.3,2741-2759).
gcacacctgcaaaaagaca

SEQ ID NO: 73771 - DNA, 19 bp, Homo sapiens
  siRNA target sequence for ATP8A2 (NM_016529.3,2742-2760).
cacacctgcaaaaagacat

SEQ ID NO: 73772 - DNA, 19 bp, Homo sapiens
  siRNA target sequence for ATP8A2 (NM_016529.3,2812-2830).
cggtgctgcgggatagcaa

SEQ ID NO: 73773 - DNA, 19 bp, Homo sapiens
  siRNA target sequence for ATP8A2 (NM_016529.3,2813-2831).
ggtgctgcgggatagcaat

SEQ ID NO: 73774 - DNA, 19 bp, Homo sapiens
  siRNA target sequence for ATP8A2 (NM_016529.3,2817-2835).
ctgcgggatagcaatggaa

SEQ ID NO: 73775 - DNA, 19 bp, Homo sapiens
  siRNA target sequence for ATP8A2 (NM_016529.3,2925-2943).
gtcccgcatgggtatgctt

SEQ ID NO: 73776 - DNA, 19 bp, Homo sapiens
  siRNA target sequence for ATP8A2 (NM_016529.3,2927-2945).
cccgcatgggtatgctttt

SEQ ID NO: 73777 - DNA, 19 bp, Homo sapiens
  siRNA target sequence for ATP8A2 (NM_016529.3,2928-2946).
ccgcatgggtatgcttttt

SEQ ID NO: 73778 - DNA, 19 bp, Homo sapiens
  siRNA target sequence for ATP8A2 (NM_016529.3,2930-2948).
gcatgggtatgctttttct

SEQ ID NO: 73779 - DNA, 19 bp, Homo sapiens
  siRNA target sequence for ATP8A2 (NM_016529.3,2991-3009).
gcttatgacaccaccaaaa

SEQ ID NO: 73780 - DNA, 19 bp, Homo sapiens
  siRNA target sequence for ATP8A2 (NM_016529.3,2992-3010).
cttatgacaccaccaaaaa

SEQ ID NO: 73781 - DNA, 19 bp, Homo sapiens
  siRNA target sequence for ATP8B1 (NM_005603.1,63-81).
ggttccctacagtgatgat

SEQ ID NO: 73782 - DNA, 19 bp, Homo sapiens
  siRNA target sequence for ATP8B1 (NM_005603.1,219-237).
ccacgaacaacctcacttt

SEQ ID NO: 73783 - DNA, 19 bp, Homo sapiens
  siRNA target sequence for ATP8B1 (NM_005603.1,220-238).
cacgaacaacctcacttta

SEQ ID NO: 73784 - DNA, 19 bp, Homo sapiens
  siRNA target sequence for ATP8B1 (NM_005603.1,223-241).
gaacaacctcactttatga

SEQ ID NO: 73785 - DNA, 19 bp, Homo sapiens
  siRNA target sequence for ATP8B1 (NM_005603.1,229-247).
cctcactttatgaacacaa

SEQ ID NO: 73786 - DNA, 19 bp, Homo sapiens
  siRNA target sequence for ATP8B1 (NM_005603.1,230-248).
ctcactttatgaacacaaa

SEQ ID NO: 73787 - DNA, 19 bp, Homo sapiens
  siRNA target sequence for ATP8B1 (NM_005603.1,255-273).
gtgtattaaggagagtaaa

SEQ ID NO: 73788 - DNA, 19 bp, Homo sapiens
  siRNA target sequence for ATP8B1 (NM_005603.1,267-285).
gagtaaatatgcgaataat

SEQ ID NO: 73789 - DNA, 19 bp, Homo sapiens
  siRNA target sequence for ATP8B1 (NM_005603.1,303-321).
gtacaacgcatttaccttt

SEQ ID NO: 73790 - DNA, 19 bp, Homo sapiens
  siRNA target sequence for ATP8B1 (NM_005603.1,306-324).
caacgcatttacctttata

SEQ ID NO: 73791 - DNA, 19 bp, Homo sapiens
  siRNA target sequence for ATP8B1 (NM_005603.1,311-329).
catttacctttataccaat

SEQ ID NO: 73792 - DNA, 19 bp, Homo sapiens
  siRNA target sequence for ATP8B1 (NM_005603.1,317-335).
cctttataccaatgaatct

SEQ ID NO: 73793 - DNA, 19 bp, Homo sapiens
  siRNA target sequence for ATP8B1 (NM_005603.1,334-352).
ctgtttgagcagtttaaga

SEQ ID NO: 73794 - DNA, 19 bp, Homo sapiens
  siRNA target sequence for ATP8B1 (NM_005603.1,336-354).
gtttgagcagtttaagaga

SEQ ID NO: 73795 - DNA, 19 bp, Homo sapiens
  siRNA target sequence for ATP8B1 (NM_005603.1,456-474).
gggcgtcactgcaatcaaa

SEQ ID NO: 73796 - DNA, 19 bp, Homo sapiens
  siRNA target sequence for ATP8B1 (NM_005603.1,486-504).
cgatgtggctcgccataaa

SEQ ID NO: 73797 - DNA, 19 bp, Homo sapiens
  siRNA target sequence for ATP8B1 (NM_005603.1,487-505).
gatgtggctcgccataaaa

SEQ ID NO: 73798 - DNA, 19 bp, Homo sapiens
  siRNA target sequence for ATP8B1 (NM_005603.1,492-510).
ggctcgccataaaatggat

SEQ ID NO: 73799 - DNA, 19 bp, Homo sapiens
  siRNA target sequence for ATP8B1 (NM_005603.1,493-511).
gctcgccataaaatggata

SEQ ID NO: 73800 - DNA, 19 bp, Homo sapiens
  siRNA target sequence for ATP8B1 (NM_005603.1,494-512).
ctcgccataaaatggataa

SEQ ID NO: 73801 - DNA, 19 bp, Homo sapiens
  siRNA target sequence for ATP8B1 (NM_005603.1,527-545).
ggacgtgtgaagtcattaa

SEQ ID NO: 73802 - DNA, 19 bp, Homo sapiens
  siRNA target sequence for ATP8B1 (NM_005603.1,546-564).
ggatggcaggttcaaagtt

SEQ ID NO: 73803 - DNA, 19 bp, Homo sapiens
  siRNA target sequence for ATP8B1 (NM_005603.1,592-610).
gacgtcattcgtctgaaaa

SEQ ID NO: 73804 - DNA, 19 bp, Homo sapiens
  siRNA target sequence for ATP8B1 (NM_005603.1,594-612).
cgtcattcgtctgaaaaaa

SEQ ID NO: 73805 - DNA, 19 bp, Homo sapiens
  siRNA target sequence for ATP8B1 (NM_005603.1,595-613).
gtcattcgtctgaaaaaaa

SEQ ID NO: 73806 - DNA, 19 bp, Homo sapiens
  siRNA target sequence for ATP8B1 (NM_005603.1,822-840).
gtttacaggaacactattt

SEQ ID NO: 73807 - DNA, 19 bp, Homo sapiens
  siRNA target sequence for ATP8B1 (NM_005603.1,882-900).
gttacgtggctgtgtaatt

SEQ ID NO: 73808 - DNA, 19 bp, Homo sapiens
  siRNA target sequence for ATP8B1 (NM_005603.1,917-935).
gccacggcttagtcatttt

SEQ ID NO: 73809 - DNA, 19 bp, Homo sapiens
  siRNA target sequence for ATP8B1 (NM_005603.1,918-936).
ccacggcttagtcattttt

SEQ ID NO: 73810 - DNA, 19 bp, Homo sapiens
  siRNA target sequence for ATP8B1 (NM_005603.1,921-939).
cggcttagtcatttttgca

SEQ ID NO: 73811 - DNA, 19 bp, Homo sapiens
  siRNA target sequence for ATP8B1 (NM_005603.1,968-986).
gtgggaaaaccagatttaa

SEQ ID NO: 73812 - DNA, 19 bp, Homo sapiens
  siRNA target sequence for ATP8B1 (NM_005603.1,1017-1035).
catggtttacacgatcttt

SEQ ID NO: 73813 - DNA, 19 bp, Homo sapiens
  siRNA target sequence for ATP8B1 (NM_005603.1,1066-1084).
gccatcggccatgcttatt

SEQ ID NO: 73814 - DNA, 19 bp, Homo sapiens
  siRNA target sequence for ATP8B1 (NM_005603.1,1169-1187).
ggggctatatcattgttct

SEQ ID NO: 73815 - DNA, 19 bp, Homo sapiens
  siRNA target sequence for ATP8B1 (NM_005603.1,1240-1258).
ggacagagtcacttcatca

SEQ ID NO: 73816 - DNA, 19 bp, Homo sapiens
  siRNA target sequence for ATP8B1 (NM_005603.1,1263-1281).
ggacctgcaaatgtactat

SEQ ID NO: 73817 - DNA, 19 bp, Homo sapiens
  siRNA target sequence for ATP8B1 (NM_005603.1,1330-1348).
cagctcgggcagatccatt

SEQ ID NO: 73818 - DNA, 19 bp, Homo sapiens
  siRNA target sequence for ATP8B1 (NM_005603.1,1332-1350).
gctcgggcagatccattat

SEQ ID NO: 73819 - DNA, 19 bp, Homo sapiens
  siRNA target sequence for ATP8B1 (NM_005603.1,1333-1351).
ctcgggcagatccattata

SEQ ID NO: 73820 - DNA, 19 bp, Homo sapiens
  siRNA target sequence for ATP8B1 (NM_005603.1,1336-1354).
gggcagatccattatatct

SEQ ID NO: 73821 - DNA, 19 bp, Homo sapiens
  siRNA target sequence for ATP8B1 (NM_005603.1,1337-1355).
ggcagatccattatatctt

SEQ ID NO: 73822 - DNA, 19 bp, Homo sapiens
  siRNA target sequence for ATP8B1 (NM_005603.1,1368-1386).
ggggacactcacacaaaat

SEQ ID NO: 73823 - DNA, 19 bp, Homo sapiens
  siRNA target sequence for ATP8B1 (NM_005603.1,1409-1427).
gtatcaacgggcagatata

SEQ ID NO: 73824 - DNA, 19 bp, Homo sapiens
  siRNA target sequence for ATP8B1 (NM_005603.1,1471-1489).
gagcaagttgattttagct

SEQ ID NO: 73825 - DNA, 19 bp, Homo sapiens
  siRNA target sequence for ATP8B1 (NM_005603.1,1480-1498).
gattttagctggaatacat

SEQ ID NO: 73826 - DNA, 19 bp, Homo sapiens
  siRNA target sequence for ATP8B1 (NM_005603.1,1567-1585).
gaagtacgacagttcttct

SEQ ID NO: 73827 - DNA, 19 bp, Homo sapiens
  siRNA target sequence for ATP8B1 (NM_005603.1,1570-1588).
gtacgacagttcttcttct

SEQ ID NO: 73828 - DNA, 19 bp, Homo sapiens
  siRNA target sequence for ATP8B1 (NM_005603.1,1625-1643).
ctgatggtcagctcaacta

SEQ ID NO: 73829 - DNA, 19 bp, Homo sapiens
  siRNA target sequence for ATP8B1 (NM_005603.1,1747-1765).
ggcactgaaaggacttaca

SEQ ID NO: 73830 - DNA, 19 bp, Homo sapiens
  siRNA target sequence for ATP8B1 (NM_005603.1,1751-1769).
ctgaaaggacttacaatgt

SEQ ID NO: 73831 - DNA, 19 bp, Homo sapiens
  siRNA target sequence for ATP8B1 (NM_005603.1,1795-1813).
gaccggaagcgaatgtcta

SEQ ID NO: 73832 - DNA, 19 bp, Homo sapiens
  siRNA target sequence for ATP8B1 (NM_005603.1,1798-1816).
cggaagcgaatgtctatca

SEQ ID NO: 73833 - DNA, 19 bp, Homo sapiens
  siRNA target sequence for ATP8B1 (NM_005603.1,1799-1817).
ggaagcgaatgtctatcat

SEQ ID NO: 73834 - DNA, 19 bp, Homo sapiens
  siRNA target sequence for ATP8B1 (NM_005603.1,1800-1818).
gaagcgaatgtctatcatt

SEQ ID NO: 73835 - DNA, 19 bp, Homo sapiens
  siRNA target sequence for ATP8B1 (NM_005603.1,1803-1821).
gcgaatgtctatcattgta

SEQ ID NO: 73836 - DNA, 19 bp, Homo sapiens
  siRNA target sequence for ATP8B1 (NM_005603.1,1804-1822).
cgaatgtctatcattgtaa

SEQ ID NO: 73837 - DNA, 19 bp, Homo sapiens
  siRNA target sequence for ATP8B1 (NM_005603.1,1834-1852).
ggcaatatcaagctttact

SEQ ID NO: 73838 - DNA, 19 bp, Homo sapiens
  siRNA target sequence for ATP8B1 (NM_005603.1,1842-1860).
caagctttactgtaaaggt

SEQ ID NO: 73839 - DNA, 19 bp, Homo sapiens
  siRNA target sequence for ATP8B1 (NM_005603.1,1955-1973).
gaaccctatgcctttgcta

SEQ ID NO: 73840 - DNA, 19 bp, Homo sapiens
  siRNA target sequence for ATP8B1 (NM_005603.1,2052-2070).
cgaagctctggataaagta

SEQ ID NO: 73841 - DNA, 19 bp, Homo sapiens
  siRNA target sequence for ATP8B1 (NM_005603.1,2103-2121).
gggagctacagctattgaa

SEQ ID NO: 73842 - DNA, 19 bp, Homo sapiens
  siRNA target sequence for ATP8B1 (NM_005603.1,2105-2123).
gagctacagctattgaaga

SEQ ID NO: 73843 - DNA, 19 bp, Homo sapiens
  siRNA target sequence for ATP8B1 (NM_005603.1,2164-2182).
gcaaaagctgacattaaga

SEQ ID NO: 73844 - DNA, 19 bp, Homo sapiens
  siRNA target sequence for ATP8B1 (NM_005603.1,2188-2206).
gtgcttactggagacaaaa

SEQ ID NO: 73845 - DNA, 19 bp, Homo sapiens
  siRNA target sequence for ATP8B1 (NM_005603.1,2265-2283).
ctgctatggggaggatatt

SEQ ID NO: 73846 - DNA, 19 bp, Homo sapiens
  siRNA target sequence for ATP8B1 (NM_005603.1,2267-2285).
gctatggggaggatattaa

SEQ ID NO: 73847 - DNA, 19 bp, Homo sapiens
  siRNA target sequence for ATP8B1 (NM_005603.1,2273-2291).
gggaggatattaattctct

SEQ ID NO: 73848 - DNA, 19 bp, Homo sapiens
  siRNA target sequence for ATP8B1 (NM_005603.1,2274-2292).
ggaggatattaattctctt

SEQ ID NO: 73849 - DNA, 19 bp, Homo sapiens
  siRNA target sequence for ATP8B1 (NM_005603.1,2327-2345).
gtggcgtctacgcaaagtt

SEQ ID NO: 73850 - DNA, 19 bp, Homo sapiens
  siRNA target sequence for ATP8B1 (NM_005603.1,2381-2399).
gtggaaaccgtgccttaat

SEQ ID NO: 73851 - DNA, 19 bp, Homo sapiens
  siRNA target sequence for ATP8B1 (NM_005603.1,2384-2402).
gaaaccgtgccttaatcat

SEQ ID NO: 73852 - DNA, 19 bp, Homo sapiens
  siRNA target sequence for ATP8B1 (NM_005603.1,2403-2421).
cactggttcttggttgaat

SEQ ID NO: 73853 - DNA, 19 bp, Homo sapiens
  siRNA target sequence for ATP8B1 (NM_005603.1,2411-2429).
cttggttgaatgaaattct

SEQ ID NO: 73854 - DNA, 19 bp, Homo sapiens
  siRNA target sequence for ATP8B1 (NM_005603.1,2466-2484).
gctgaagttcccaagaaca

SEQ ID NO: 73855 - DNA, 19 bp, Homo sapiens
  siRNA target sequence for ATP8B1 (NM_005603.1,2469-2487).
gaagttcccaagaacagaa

SEQ ID NO: 73856 - DNA, 19 bp, Homo sapiens
  siRNA target sequence for ATP8B1 (NM_005603.1,2497-2515).
cggatgcggacccaaagta

SEQ ID NO: 73857 - DNA, 19 bp, Homo sapiens
  siRNA target sequence for ATP8B1 (NM_005603.1,2498-2516).
ggatgcggacccaaagtaa

SEQ ID NO: 73858 - DNA, 19 bp, Homo sapiens
  siRNA target sequence for ATP8B1 (NM_005603.1,2499-2517).
gatgcggacccaaagtaaa

SEQ ID NO: 73859 - DNA, 19 bp, Homo sapiens
  siRNA target sequence for ATP8B1 (NM_005603.1,2520-2538).
gaggctagaagctaagaaa

SEQ ID NO: 73860 - DNA, 19 bp, Homo sapiens
  siRNA target sequence for ATP8B1 (NM_005603.1,2539-2557).
gagcagcggcagaaaaact

SEQ ID NO: 73861 - DNA, 19 bp, Homo sapiens
  siRNA target sequence for ATP8B1 (NM_005603.1,2541-2559).
gcagcggcagaaaaacttt

SEQ ID NO: 73862 - DNA, 19 bp, Homo sapiens
  siRNA target sequence for ATP8B1 (NM_005603.1,2681-2699).
gggccaatgacgtgaacat

SEQ ID NO: 73863 - DNA, 19 bp, Homo sapiens
  siRNA target sequence for ATP8B1 (NM_005603.1,2689-2707).
gacgtgaacatgatcaaaa

SEQ ID NO: 73864 - DNA, 19 bp, Homo sapiens
  siRNA target sequence for ATP8B1 (NM_005603.1,2711-2729).
cccacattggcgttggaat

SEQ ID NO: 73865 - DNA, 19 bp, Homo sapiens
  siRNA target sequence for ATP8B1 (NM_005603.1,2712-2730).
ccacattggcgttggaata

SEQ ID NO: 73866 - DNA, 19 bp, Homo sapiens
  siRNA target sequence for ATP8B1 (NM_005603.1,2713-2731).
cacattggcgttggaataa

SEQ ID NO: 73867 - DNA, 19 bp, Homo sapiens
  siRNA target sequence for ATP8B1 (NM_005603.1,2715-2733).
cattggcgttggaataagt

SEQ ID NO: 73868 - DNA, 19 bp, Homo sapiens
  siRNA target sequence for ATP8B1 (NM_005603.1,2755-2773).
gtcatgtcgagtgactatt

SEQ ID NO: 73869 - DNA, 19 bp, Homo sapiens
  siRNA target sequence for ATP8B1 (NM_005603.1,2760-2778).
gtcgagtgactattccttt

SEQ ID NO: 73870 - DNA, 19 bp, Homo sapiens
  siRNA target sequence for ATP8B1 (NM_005603.1,2815-2833).
catggccgatggtcttaca

SEQ ID NO: 73871 - DNA, 19 bp, Homo sapiens
  siRNA target sequence for ATP8B1 (NM_005603.1,2818-2836).
ggccgatggtcttacataa

SEQ ID NO: 73872 - DNA, 19 bp, Homo sapiens
  siRNA target sequence for ATP8B1 (NM_005603.1,2821-2839).
cgatggtcttacataagga

SEQ ID NO: 73873 - DNA, 19 bp, Homo sapiens
  siRNA target sequence for ATP8B1 (NM_005603.1,2847-2865).
gttcctacgatacttcttt

SEQ ID NO: 73874 - DNA, 19 bp, Homo sapiens
  siRNA target sequence for ATP8B1 (NM_005603.1,2851-2869).
ctacgatacttcttttaca

SEQ ID NO: 73875 - DNA, 19 bp, Homo sapiens
  siRNA target sequence for ATP8B1 (NM_005603.1,2854-2872).
cgatacttcttttacaaaa

SEQ ID NO: 73876 - DNA, 19 bp, Homo sapiens
  siRNA target sequence for ATP8B1 (NM_005603.1,2933-2951).
ctgcatacgaggattggtt

SEQ ID NO: 73877 - DNA, 19 bp, Homo sapiens
  siRNA target sequence for ATP8B1 (NM_005603.1,3016-3034).
gatgtgagtgacaaactga

SEQ ID NO: 73878 - DNA, 19 bp, Homo sapiens
  siRNA target sequence for ATP8B1 (NM_005603.1,3040-3058).
cgattccctgggttataca

SEQ ID NO: 73879 - DNA, 19 bp, Homo sapiens
  siRNA target sequence for ATP8B1 (NM_005603.1,3041-3059).
gattccctgggttatacat

SEQ ID NO: 73880 - DNA, 19 bp, Homo sapiens
  siRNA target sequence for ATP8B1 (NM_005603.1,3073-3091).
gacttactattcaactata

SEQ ID NO: 73881 - DNA, 19 bp, Homo sapiens
  siRNA target sequence for ATP8B1 (NM_005603.1,3079-3097).
ctattcaactataagagat

SEQ ID NO: 73882 - DNA, 19 bp, Homo sapiens
  siRNA target sequence for ATP8B1 (NM_005603.1,3087-3105).
ctataagagattctttgta

SEQ ID NO: 73883 - DNA, 19 bp, Homo sapiens
  siRNA target sequence for ATP8B1 (NM_005603.1,3128-3146).
catcgatgatcctcttctt

SEQ ID NO: 73884 - DNA, 19 bp, Homo sapiens
  siRNA target sequence for ATP8B1 (NM_005603.1,3131-3149).
cgatgatcctcttcttcat

SEQ ID NO: 73885 - DNA, 19 bp, Homo sapiens
  siRNA target sequence for ATP8B1 (NM_005603.1,3233-3251).
ctgctcttgtaataacagt

SEQ ID NO: 73886 - DNA, 19 bp, Homo sapiens
  siRNA target sequence for ATP8B1 (NM_005603.1,3238-3256).
cttgtaataacagtcaatt

SEQ ID NO: 73887 - DNA, 19 bp, Homo sapiens
  siRNA target sequence for ATP8B1 (NM_005603.1,3335-3353).
gcatcatgtttgactttca

SEQ ID NO: 73888 - DNA, 19 bp, Homo sapiens
  siRNA target sequence for ATP8B1 (NM_005603.1,3424-3442).
cagccatacatttggttaa

SEQ ID NO: 73889 - DNA, 19 bp, Homo sapiens
  siRNA target sequence for ATP8B1 (NM_005603.1,3426-3444).
gccatacatttggttaact

SEQ ID NO: 73890 - DNA, 19 bp, Homo sapiens
  siRNA target sequence for ATP8B1 (NM_005603.1,3427-3445).
ccatacatttggttaacta

SEQ ID NO: 73891 - DNA, 19 bp, Homo sapiens
  siRNA target sequence for ATP8B1 (NM_005603.1,3475-3493).
cccgtcgttgccattcgat

SEQ ID NO: 73892 - DNA, 19 bp, Homo sapiens
  siRNA target sequence for ATP8B1 (NM_005603.1,3476-3494).
ccgtcgttgccattcgatt

SEQ ID NO: 73893 - DNA, 19 bp, Homo sapiens
  siRNA target sequence for ATP8B1 (NM_005603.1,3510-3528).
ctggccatcagaaagtgat

SEQ ID NO: 73894 - DNA, 19 bp, Homo sapiens
  siRNA target sequence for ATSV (NM_004321.3,698-716).
ggctgtcacctcctacaat

SEQ ID NO: 73895 - DNA, 19 bp, Homo sapiens
  siRNA target sequence for ATSV (NM_004321.3,700-718).
ctgtcacctcctacaatga

SEQ ID NO: 73896 - DNA, 19 bp, Homo sapiens
  siRNA target sequence for ATSV (NM_004321.3,798-816).
cacgccgtcttcaacatca

SEQ ID NO: 73897 - DNA, 19 bp, Homo sapiens
  siRNA target sequence for ATSV (NM_004321.3,834-852).
catgacgcagagaccaata

SEQ ID NO: 73898 - DNA, 19 bp, Homo sapiens
  siRNA target sequence for ATSV (NM_004321.3,837-855).
gacgcagagaccaatatca

SEQ ID NO: 73899 - DNA, 19 bp, Homo sapiens
  siRNA target sequence for ATSV (NM_004321.3,1141-1159).
gtcctgcagacatcaacta

SEQ ID NO: 73900 - DNA, 19 bp, Homo sapiens
  siRNA target sequence for ATSV (NM_004321.3,1279-1297).
ggctgcgggaccttctgta

SEQ ID NO: 73901 - DNA, 19 bp, Homo sapiens
  siRNA target sequence for ATSV (NM_004321.3,1404-1422).
ctccacgagcgcatcttgt

SEQ ID NO: 73902 - DNA, 19 bp, Homo sapiens
  siRNA target sequence for ATSV (NM_004321.3,1406-1424).
ccacgagcgcatcttgttt

SEQ ID NO: 73903 - DNA, 19 bp, Homo sapiens
  siRNA target sequence for ATSV (NM_004321.3,1587-1605).
ggcaccttgggcgtattct

SEQ ID NO: 73904 - DNA, 19 bp, Homo sapiens
  siRNA target sequence for ATSV (NM_004321.3,1720-1738).
ggcggcaggacattgttct

SEQ ID NO: 73905 - DNA, 19 bp, Homo sapiens
  siRNA target sequence for ATSV (NM_004321.3,1841-1859).
ctacgtcaatggcaagaaa

SEQ ID NO: 73906 - DNA, 19 bp, Homo sapiens
  siRNA target sequence for ATSV (NM_004321.3,2881-2899).
cctttgatgaccagcattt

SEQ ID NO: 73907 - DNA, 19 bp, Homo sapiens
  siRNA target sequence for ATSV (NM_004321.3,3010-3028).
cctcagccgatgaagtcaa

SEQ ID NO: 73908 - DNA, 19 bp, Homo sapiens
  siRNA target sequence for ATSV (NM_004321.3,3013-3031).
cagccgatgaagtcaacaa

SEQ ID NO: 73909 - DNA, 19 bp, Homo sapiens
  siRNA target sequence for ATSV (NM_004321.3,3015-3033).
gccgatgaagtcaacaaca

SEQ ID NO: 73910 - DNA, 19 bp, Homo sapiens
  siRNA target sequence for ATSV (NM_004321.3,3018-3036).
gatgaagtcaacaacaaca

SEQ ID NO: 73911 - DNA, 19 bp, Homo sapiens
  siRNA target sequence for ATSV (NM_004321.3,3187-3205).
ccgaatatgccgacatctt

SEQ ID NO: 73912 - DNA, 19 bp, Homo sapiens
  siRNA target sequence for ATSV (NM_004321.3,3189-3207).
gaatatgccgacatcttct

SEQ ID NO: 73913 - DNA, 19 bp, Homo sapiens
  siRNA target sequence for ATSV (NM_004321.3,3320-3338).
ggtgaccaagtccttcatt

SEQ ID NO: 73914 - DNA, 19 bp, Homo sapiens
  siRNA target sequence for ATSV (NM_004321.3,3579-3597).
gaggccaacggcgattaca

SEQ ID NO: 73915 - DNA, 19 bp, Homo sapiens
  siRNA target sequence for ATSV (NM_004321.3,3840-3858).
caagatgaccggacctttt

SEQ ID NO: 73916 - DNA, 19 bp, Homo sapiens
  siRNA target sequence for ATSV (NM_004321.3,3846-3864).
gaccggaccttttaccaat

SEQ ID NO: 73917 - DNA, 19 bp, Homo sapiens
  siRNA target sequence for ATSV (NM_004321.3,3848-3866).
ccggaccttttaccaattt

SEQ ID NO: 73918 - DNA, 19 bp, Homo sapiens
  siRNA target sequence for ATSV (NM_004321.3,3850-3868).
ggaccttttaccaatttga

SEQ ID NO: 73919 - DNA, 19 bp, Homo sapiens
  siRNA target sequence for ATSV (NM_004321.3,3911-3929).
ccgggtcaccccttatcga

SEQ ID NO: 73920 - DNA, 19 bp, Homo sapiens
  siRNA target sequence for ATSV (NM_004321.3,3917-3935).
caccccttatcgagagaaa

SEQ ID NO: 73921 - DNA, 19 bp, Homo sapiens
  siRNA target sequence for ATSV (NM_004321.3,3919-3937).
ccccttatcgagagaaaat

SEQ ID NO: 73922 - DNA, 19 bp, Homo sapiens
  siRNA target sequence for ATSV (NM_004321.3,3921-3939).
ccttatcgagagaaaatct

SEQ ID NO: 73923 - DNA, 19 bp, Homo sapiens
  siRNA target sequence for ATSV (NM_004321.3,3922-3940).
cttatcgagagaaaatcta

SEQ ID NO: 73924 - DNA, 19 bp, Homo sapiens
  siRNA target sequence for ATSV (NM_004321.3,3946-3964).
cactctccgcttatatcga

SEQ ID NO: 73925 - DNA, 19 bp, Homo sapiens
  siRNA target sequence for ATSV (NM_004321.3,4244-4262).
ccggagtgacagtctcatt

SEQ ID NO: 73926 - DNA, 19 bp, Homo sapiens
  siRNA target sequence for ATSV (NM_004321.3,4857-4875).
cgagtcagcccgatcgttt

SEQ ID NO: 73927 - DNA, 19 bp, Homo sapiens
  siRNA target sequence for ATSV (NM_004321.3,4950-4968).
ccctatgcctacatgtaca

SEQ ID NO: 73928 - DNA, 19 bp, Homo sapiens
  siRNA target sequence for AURKB (NM_004217.1,242-260).
gtgggacacccgacatctt

SEQ ID NO: 73929 - DNA, 19 bp, Homo sapiens
  siRNA target sequence for AURKB (NM_004217.1,244-262).
gggacacccgacatcttaa

SEQ ID NO: 73930 - DNA, 19 bp, Homo sapiens
  siRNA target sequence for AURKB (NM_004217.1,263-281).
cgcggcacttcacaattga

SEQ ID NO: 73931 - DNA, 19 bp, Homo sapiens
  siRNA target sequence for AURKB (NM_004217.1,266-284).
ggcacttcacaattgatga

SEQ ID NO: 73932 - DNA, 19 bp, Homo sapiens
  siRNA target sequence for AURKB (NM_004217.1,421-439).
ctgcgcagagagatcgaaa

SEQ ID NO: 73933 - DNA, 19 bp, Homo sapiens
  siRNA target sequence for AURKB (NM_004217.1,425-443).
gcagagagatcgaaatcca

SEQ ID NO: 73934 - DNA, 19 bp, Homo sapiens
  siRNA target sequence for AURKB (NM_004217.1,468-486).
cctgcgtctctacaactat

SEQ ID NO: 73935 - DNA, 19 bp, Homo sapiens
  siRNA target sequence for AURKB (NM_004217.1,469-487).
ctgcgtctctacaactatt

SEQ ID NO: 73936 - DNA, 19 bp, Homo sapiens
  siRNA target sequence for AURKB (NM_004217.1,496-514).
cggaggaggatctacttga

SEQ ID NO: 73937 - DNA, 19 bp, Homo sapiens
  siRNA target sequence for AURKB (NM_004217.1,501-519).
gaggatctacttgattcta

SEQ ID NO: 73938 - DNA, 19 bp, Homo sapiens
  siRNA target sequence for AURKB (NM_004217.1,507-525).
ctacttgattctagagtat

SEQ ID NO: 73939 - DNA, 19 bp, Homo sapiens
  siRNA target sequence for AURKB (NM_004217.1,610-628).
gcagatgctctaatgtact

SEQ ID NO: 73940 - DNA, 19 bp, Homo sapiens
  siRNA target sequence for AURKC (NM_003160.1,528-546).
gatccaggctcatctacaa

SEQ ID NO: 73941 - DNA, 19 bp, Homo sapiens
  siRNA target sequence for AURKC (NM_003160.1,558-576).
cctgcgcctgtataactat

SEQ ID NO: 73942 - DNA, 19 bp, Homo sapiens
  siRNA target sequence for AURKC (NM_003160.1,559-577).
ctgcgcctgtataactatt

SEQ ID NO: 73943 - DNA, 19 bp, Homo sapiens
  siRNA target sequence for AURKC (NM_003160.1,563-581).
gcctgtataactatttcca

SEQ ID NO: 73944 - DNA, 19 bp, Homo sapiens
  siRNA target sequence for AURKC (NM_003160.1,564-582).
cctgtataactatttccat

SEQ ID NO: 73945 - DNA, 19 bp, Homo sapiens
  siRNA target sequence for AURKC (NM_003160.1,653-671).
gcgagaaattagatgaaca

SEQ ID NO: 73946 - DNA, 19 bp, Homo sapiens
  siRNA target sequence for AURKC (NM_003160.1,672-690).
gcgcacagccacgataata

SEQ ID NO: 73947 - DNA, 19 bp, Homo sapiens
  siRNA target sequence for AURKC (NM_003160.1,674-692).
gcacagccacgataataga

SEQ ID NO: 73948 - DNA, 19 bp, Homo sapiens
  siRNA target sequence for AURKC (NM_003160.1,864-882).
cttgccgccagaaatgatt

SEQ ID NO: 73949 - DNA, 19 bp, Homo sapiens
  siRNA target sequence for AURKC (NM_003160.1,998-1016).
gcatcctcaaggtagatgt

SEQ ID NO: 73950 - DNA, 19 bp, Homo sapiens
  siRNA target sequence for AURKC (NM_003160.1,1015-1033).
gtgaggtttccactatcaa

SEQ ID NO: 73951 - DNA, 19 bp, Homo sapiens
  siRNA target sequence for AXL (NM_001699.3,545-563).
cacgcaggctgaagaaagt

SEQ ID NO: 73952 - DNA, 19 bp, Homo sapiens
  siRNA target sequence for AXL (NM_001699.3,718-736).
ccctgggtgaggatgaaca

SEQ ID NO: 73953 - DNA, 19 bp, Homo sapiens
  siRNA target sequence for AXL (NM_001699.3,793-811).
cgggacagtaccagtgttt

SEQ ID NO: 73954 - DNA, 19 bp, Homo sapiens
  siRNA target sequence for AXL (NM_001699.3,1041-1059).
ccagggctgaacaagacat

SEQ ID NO: 73955 - DNA, 19 bp, Homo sapiens
  siRNA target sequence for AXL (NM_001699.3,1359-1377).
cctcacaccccttatcaca

SEQ ID NO: 73956 - DNA, 19 bp, Homo sapiens
  siRNA target sequence for AXL (NM_001699.3,1556-1574).
gtaccggctggcgtatcaa

SEQ ID NO: 73957 - DNA, 19 bp, Homo sapiens
  siRNA target sequence for AXL (NM_001699.3,1859-1877).
gaaggagacccgttatgga

SEQ ID NO: 73958 - DNA, 19 bp, Homo sapiens
  siRNA target sequence for AXL (NM_001699.3,1867-1885).
cccgttatggagaagtgtt

SEQ ID NO: 73959 - DNA, 19 bp, Homo sapiens
  siRNA target sequence for AXL (NM_001699.3,1868-1886).
ccgttatggagaagtgttt

SEQ ID NO: 73960 - DNA, 19 bp, Homo sapiens
  siRNA target sequence for AXL (NM_001699.3,2187-2205).
gcggtctgcatgaaggaat

SEQ ID NO: 73961 - DNA, 19 bp, Homo sapiens
  siRNA target sequence for AXL (NM_001699.3,2188-2206).
cggtctgcatgaaggaatt

SEQ ID NO: 73962 - DNA, 19 bp, Homo sapiens
  siRNA target sequence for AXL (NM_001699.3,2227-2245).
ggctcatcggtgtctgttt

SEQ ID NO: 73963 - DNA, 19 bp, Homo sapiens
  siRNA target sequence for AXL (NM_001699.3,2418-2436).
ctgagtaccaagagattca

SEQ ID NO: 73964 - DNA, 19 bp, Homo sapiens
  siRNA target sequence for AXL (NM_001699.3,2420-2438).
gagtaccaagagattcata

SEQ ID NO: 73965 - DNA, 19 bp, Homo sapiens
  siRNA target sequence for AXL (NM_001699.3,2422-2440).
gtaccaagagattcataca

SEQ ID NO: 73966 - DNA, 19 bp, Homo sapiens
  siRNA target sequence for AXL (NM_001699.3,2505-2523).
gggctctccaagaagatct

SEQ ID NO: 73967 - DNA, 19 bp, Homo sapiens
  siRNA target sequence for AXL (NM_001699.3,2506-2524).
ggctctccaagaagatcta

SEQ ID NO: 73968 - DNA, 19 bp, Homo sapiens
  siRNA target sequence for AXL (NM_001699.3,2696-2714).
cagcgagatttatgactat

SEQ ID NO: 73969 - DNA, 19 bp, Homo sapiens
  siRNA target sequence for AXL (NM_001699.3,2698-2716).
gcgagatttatgactatct

SEQ ID NO: 73970 - DNA, 19 bp, Homo sapiens
  siRNA target sequence for AXL (NM_001699.3,2760-2778).
ggactgtatgccttgatgt

SEQ ID NO: 73971 - DNA, 19 bp, Homo sapiens
  siRNA target sequence for AXL (NM_001699.3,2800-2818).
cccaggaccggccaagttt

SEQ ID NO: 73972 - DNA, 19 bp, Homo sapiens
  siRNA target sequence for AXL (NM_001699.3,2802-2820).
caggaccggccaagtttta

SEQ ID NO: 73973 - DNA, 19 bp, Homo sapiens
  siRNA target sequence for AXL (NM_001699.3,2804-2822).
ggaccggccaagttttaca

SEQ ID NO: 73974 - DNA, 19 bp, Homo sapiens
  siRNA target sequence for AXL (NM_001699.3,2880-2898).
gacgaaatcctctatgtca

SEQ ID NO: 73975 - DNA, 19 bp, Homo sapiens
  siRNA target sequence for AXL (NM_001699.3,2963-2981).
ccagccagaccctaaggat

SEQ ID NO: 73976 - DNA, 19 bp, Homo sapiens
  siRNA target sequence for AXL (NM_001699.3,2964-2982).
cagccagaccctaaggatt

SEQ ID NO: 73977 - DNA, 19 bp, Homo sapiens
  siRNA target sequence for BCKDK (NM_005881.1,642-660).
gcacgtgcatgagctatat

SEQ ID NO: 73978 - DNA, 19 bp, Homo sapiens
  siRNA target sequence for BCKDK (NM_005881.1,1137-1155).
cctagacactccctacaat

SEQ ID NO: 73979 - DNA, 19 bp, Homo sapiens
  siRNA target sequence for BCKDK (NM_005881.1,1173-1191).
caccatcgccaacaatgat

SEQ ID NO: 73980 - DNA, 19 bp, Homo sapiens
  siRNA target sequence for BCKDK (NM_005881.1,1175-1193).
ccatcgccaacaatgatgt

SEQ ID NO: 73981 - DNA, 19 bp, Homo sapiens
  siRNA target sequence for BCKDK (NM_005881.1,1189-1207).
gatgtcgatctgatcatca

SEQ ID NO: 73982 - DNA, 19 bp, Homo sapiens
  siRNA target sequence for BCKDK (NM_005881.1,1226-1244).
gaggaatcgctcacaaaga

SEQ ID NO: 73983 - DNA, 19 bp, Homo sapiens
  siRNA target sequence for BCKDK (NM_005881.1,1229-1247).
gaatcgctcacaaagatct

SEQ ID NO: 73984 - DNA, 19 bp, Homo sapiens
  siRNA target sequence for BCKDK (NM_005881.1,1321-1339).
ggccatctggacatgcata

SEQ ID NO: 73985 - DNA, 19 bp, Homo sapiens
  siRNA target sequence for BCS1L (NM_004328.3,309-327).
ctactttggggctggattt

SEQ ID NO: 73986 - DNA, 19 bp, Homo sapiens
  siRNA target sequence for BCS1L (NM_004328.3,532-550).
ggccgcatttccactaagt

SEQ ID NO: 73987 - DNA, 19 bp, Homo sapiens
  siRNA target sequence for BCS1L (NM_004328.3,533-551).
gccgcatttccactaagtt

SEQ ID NO: 73988 - DNA, 19 bp, Homo sapiens
  siRNA target sequence for BCS1L (NM_004328.3,534-552).
ccgcatttccactaagttt

SEQ ID NO: 73989 - DNA, 19 bp, Homo sapiens
  siRNA target sequence for BCS1L (NM_004328.3,566-584).
gccctggaaaccattttat

SEQ ID NO: 73990 - DNA, 19 bp, Homo sapiens
  siRNA target sequence for BCS1L (NM_004328.3,587-605).
ggtatcgggggaaatggat

SEQ ID NO: 73991 - DNA, 19 bp, Homo sapiens
  siRNA target sequence for BCS1L (NM_004328.3,588-606).
gtatcgggggaaatggatt

SEQ ID NO: 73992 - DNA, 19 bp, Homo sapiens
  siRNA target sequence for BCS1L (NM_004328.3,620-638).
gtcgagagatgcagatgat

SEQ ID NO: 73993 - DNA, 19 bp, Homo sapiens
  siRNA target sequence for BCS1L (NM_004328.3,687-705).
gggcactgaccgaaaggtt

SEQ ID NO: 73994 - DNA, 19 bp, Homo sapiens
  siRNA target sequence for BCS1L (NM_004328.3,688-706).
ggcactgaccgaaaggttt

SEQ ID NO: 73995 - DNA, 19 bp, Homo sapiens
  siRNA target sequence for BCS1L (NM_004328.3,692-710).
ctgaccgaaaggttttctt

SEQ ID NO: 73996 - DNA, 19 bp, Homo sapiens
  siRNA target sequence for BCS1L (NM_004328.3,821-839).
ggcgaccactgaattctgt

SEQ ID NO: 73997 - DNA, 19 bp, Homo sapiens
  siRNA target sequence for BCS1L (NM_004328.3,854-872).
gtctggctgaccgaattgt

SEQ ID NO: 73998 - DNA, 19 bp, Homo sapiens
  siRNA target sequence for BCS1L (NM_004328.3,856-874).
ctggctgaccgaattgtca

SEQ ID NO: 73999 - DNA, 19 bp, Homo sapiens
  siRNA target sequence for BCS1L (NM_004328.3,880-898).
gtccaggaattcatcgata

SEQ ID NO: 74000 - DNA, 19 bp, Homo sapiens
  siRNA target sequence for BCS1L (NM_004328.3,935-953).
gacgtggctacctgcttta

SEQ ID NO: 74001 - DNA, 19 bp, Homo sapiens
  siRNA target sequence for BCS1L (NM_004328.3,970-988).
ggaaagagcagttttatca

SEQ ID NO: 74002 - DNA, 19 bp, Homo sapiens
  siRNA target sequence for BCS1L (NM_004328.3,1150-1168).
gtggagaacccagtaaagt

SEQ ID NO: 74003 - DNA, 19 bp, Homo sapiens
  siRNA target sequence for BCS1L (NM_004328.3,1486-1504).
cctgtaggggcaattcaca

SEQ ID NO: 74004 - DNA, 19 bp, Homo sapiens
  siRNA target sequence for BCS1L (NM_004328.3,1487-1505).
ctgtaggggcaattcacaa

SEQ ID NO: 74005 - DNA, 19 bp, Homo sapiens
  siRNA target sequence for BLK (NM_001715.2,785-803).
ctacaccgctatgaatgat

SEQ ID NO: 74006 - DNA, 19 bp, Homo sapiens
  siRNA target sequence for BLK (NM_001715.2,898-916).
gctatgtgcccagtaactt

SEQ ID NO: 74007 - DNA, 19 bp, Homo sapiens
  siRNA target sequence for BLK (NM_001715.2,899-917).
ctatgtgcccagtaacttt

SEQ ID NO: 74008 - DNA, 19 bp, Homo sapiens
  siRNA target sequence for BLK (NM_001715.2,993-1011).
cttcttgctccaatcaaca

SEQ ID NO: 74009 - DNA, 19 bp, Homo sapiens
  siRNA target sequence for BLK (NM_001715.2,1098-1116).
ctgatcaagcactataaga

SEQ ID NO: 74010 - DNA, 19 bp, Homo sapiens
  siRNA target sequence for BLK (NM_001715.2,1128-1146).
gatgaagggggctactaca

SEQ ID NO: 74011 - DNA, 19 bp, Homo sapiens
  siRNA target sequence for BLK (NM_001715.2,1179-1197).
gccctggtgcagcactatt

SEQ ID NO: 74012 - DNA, 19 bp, Homo sapiens
  siRNA target sequence for BLK (NM_001715.2,1182-1200).
ctggtgcagcactattcta

SEQ ID NO: 74013 - DNA, 19 bp, Homo sapiens
  siRNA target sequence for BLK (NM_001715.2,1185-1203).
gtgcagcactattctaaga

SEQ ID NO: 74014 - DNA, 19 bp, Homo sapiens
  siRNA target sequence for BLK (NM_001715.2,1531-1549).
gaggatgcctgctggattt

SEQ ID NO: 74015 - DNA, 19 bp, Homo sapiens
  siRNA target sequence for BLK (NM_001715.2,1581-1599).
ctcccaaggctgattgaca

SEQ ID NO: 74016 - DNA, 19 bp, Homo sapiens
  siRNA target sequence for BLK (NM_001715.2,1691-1709).
ggccttgtgctgcaaaatt

SEQ ID NO: 74017 - DNA, 19 bp, Homo sapiens
  siRNA target sequence for BLK (NM_001715.2,1728-1746).
cgaatcatcgacagtgaat

SEQ ID NO: 74018 - DNA, 19 bp, Homo sapiens
  siRNA target sequence for BLK (NM_001715.2,1729-1747).
gaatcatcgacagtgaata

SEQ ID NO: 74019 - DNA, 19 bp, Homo sapiens
  siRNA target sequence for BLK (NM_001715.2,1808-1826).
cggggtcttcaccatcaaa

SEQ ID NO: 74020 - DNA, 19 bp, Homo sapiens
  siRNA target sequence for BLK (NM_001715.2,1856-1874).
gatggaagttgtcacttat

SEQ ID NO: 74021 - DNA, 19 bp, Homo sapiens
  siRNA target sequence for BMP2K (NM_017593.3,393-411).
gtgcattgaagcgaatgta

SEQ ID NO: 74022 - DNA, 19 bp, Homo sapiens
  siRNA target sequence for BMP2K (NM_017593.3,400-418).
gaagcgaatgtatgtcaat

SEQ ID NO: 74023 - DNA, 19 bp, Homo sapiens
  siRNA target sequence for BMP2K (NM_017593.3,469-487).
gctatctggtcacaaaaat

SEQ ID NO: 74024 - DNA, 19 bp, Homo sapiens
  siRNA target sequence for BMP2K (NM_017593.3,502-520).
ggactgtgctgttaattca

SEQ ID NO: 74025 - DNA, 19 bp, Homo sapiens
  siRNA target sequence for BMP2K (NM_017593.3,505-523).
ctgtgctgttaattcaatt

SEQ ID NO: 74026 - DNA, 19 bp, Homo sapiens
  siRNA target sequence for BMP2K (NM_017593.3,510-528).
ctgttaattcaattagtga

SEQ ID NO: 74027 - DNA, 19 bp, Homo sapiens
  siRNA target sequence for BMP2K (NM_017593.3,512-530).
gttaattcaattagtgata

SEQ ID NO: 74028 - DNA, 19 bp, Homo sapiens
  siRNA target sequence for BMP2K (NM_017593.3,533-551).
gtatgggaagtccttatct

SEQ ID NO: 74029 - DNA, 19 bp, Homo sapiens
  siRNA target sequence for BMP2K (NM_017593.3,537-555).
gggaagtccttatcttaat

SEQ ID NO: 74030 - DNA, 19 bp, Homo sapiens
  siRNA target sequence for BMP2K (NM_017593.3,572-590).
ggacaggtagtgaatcaaa

SEQ ID NO: 74031 - DNA, 19 bp, Homo sapiens
  siRNA target sequence for BMP2K (NM_017593.3,573-591).
gacaggtagtgaatcaaat

SEQ ID NO: 74032 - DNA, 19 bp, Homo sapiens
  siRNA target sequence for BMP2K (NM_017593.3,666-684).
caaggttgcatcagtgtaa

SEQ ID NO: 74033 - DNA, 19 bp, Homo sapiens
  siRNA target sequence for BMP2K (NM_017593.3,670-688).
gttgcatcagtgtaagact

SEQ ID NO: 74034 - DNA, 19 bp, Homo sapiens
  siRNA target sequence for BMP2K (NM_017593.3,679-697).
gtgtaagactccaataatt

SEQ ID NO: 74035 - DNA, 19 bp, Homo sapiens
  siRNA target sequence for BMP2K (NM_017593.3,681-699).
gtaagactccaataattca

SEQ ID NO: 74036 - DNA, 19 bp, Homo sapiens
  siRNA target sequence for BMP2K (NM_017593.3,741-759).
ggaactatgtactttgtga

SEQ ID NO: 74037 - DNA, 19 bp, Homo sapiens
  siRNA target sequence for BMP2K (NM_017593.3,760-778).
ctttggcagtgccactaat

SEQ ID NO: 74038 - DNA, 19 bp, Homo sapiens
  siRNA target sequence for BMP2K (NM_017593.3,765-783).
gcagtgccactaataaatt

SEQ ID NO: 74039 - DNA, 19 bp, Homo sapiens
  siRNA target sequence for BMP2K (NM_017593.3,766-784).
cagtgccactaataaattt

SEQ ID NO: 74040 - DNA, 19 bp, Homo sapiens
  siRNA target sequence for BMP2K (NM_017593.3,770-788).
gccactaataaatttctta

SEQ ID NO: 74041 - DNA, 19 bp, Homo sapiens
  siRNA target sequence for BMP2K (NM_017593.3,771-789).
ccactaataaatttcttaa

SEQ ID NO: 74042 - DNA, 19 bp, Homo sapiens
  siRNA target sequence for BMP2K (NM_017593.3,860-878).
cctgaaatgatcaaccttt

SEQ ID NO: 74043 - DNA, 19 bp, Homo sapiens
  siRNA target sequence for BMP2K (NM_017593.3,861-879).
ctgaaatgatcaaccttta

SEQ ID NO: 74044 - DNA, 19 bp, Homo sapiens
  siRNA target sequence for BMP2K (NM_017593.3,913-931).
ctgggcactgggatgtcta

SEQ ID NO: 74045 - DNA, 19 bp, Homo sapiens
  siRNA target sequence for BMP2K (NM_017593.3,922-940).
gggatgtctactctataaa

SEQ ID NO: 74046 - DNA, 19 bp, Homo sapiens
  siRNA target sequence for BMP2K (NM_017593.3,924-942).
gatgtctactctataaact

SEQ ID NO: 74047 - DNA, 19 bp, Homo sapiens
  siRNA target sequence for BMP2K (NM_017593.3,929-947).
ctactctataaactttgtt

SEQ ID NO: 74048 - DNA, 19 bp, Homo sapiens
  siRNA target sequence for BMP2K (NM_017593.3,966-984).
gtgagagtcaggttgctat

SEQ ID NO: 74049 - DNA, 19 bp, Homo sapiens
  siRNA target sequence for BMP2K (NM_017593.3,1000-1018).
caccatcccagacaattct

SEQ ID NO: 74050 - DNA, 19 bp, Homo sapiens
  siRNA target sequence for BMP2K (NM_017593.3,1017-1035).
ctcgttactcccgtaacat

SEQ ID NO: 74051 - DNA, 19 bp, Homo sapiens
  siRNA target sequence for BMP2K (NM_017593.3,1020-1038).
gttactcccgtaacataca

SEQ ID NO: 74052 - DNA, 19 bp, Homo sapiens
  siRNA target sequence for BMP2K (NM_017593.3,1026-1044).
cccgtaacatacattgctt

SEQ ID NO: 74053 - DNA, 19 bp, Homo sapiens
  siRNA target sequence for BMP2K (NM_017593.3,1027-1045).
ccgtaacatacattgctta

SEQ ID NO: 74054 - DNA, 19 bp, Homo sapiens
  siRNA target sequence for BMP2K (NM_017593.3,1028-1046).
cgtaacatacattgcttaa

SEQ ID NO: 74055 - DNA, 19 bp, Homo sapiens
  siRNA target sequence for BMP2K (NM_017593.3,1029-1047).
gtaacatacattgcttaat

SEQ ID NO: 74056 - DNA, 19 bp, Homo sapiens
  siRNA target sequence for BMP2K (NM_017593.3,1061-1079).
gaaccagatccggaacata

SEQ ID NO: 74057 - DNA, 19 bp, Homo sapiens
  siRNA target sequence for BMP2K (NM_017593.3,1071-1089).
cggaacatagacctgatat

SEQ ID NO: 74058 - DNA, 19 bp, Homo sapiens
  siRNA target sequence for BMP2K (NM_017593.3,1080-1098).
gacctgatatatttcaagt

SEQ ID NO: 74059 - DNA, 19 bp, Homo sapiens
  siRNA target sequence for BMP2K (NM_017593.3,1094-1112).
caagtgtcatattttgcat

SEQ ID NO: 74060 - DNA, 19 bp, Homo sapiens
  siRNA target sequence for BMP2K (NM_017593.3,1136-1154).
ccagtctccaacatcaata

SEQ ID NO: 74061 - DNA, 19 bp, Homo sapiens
  siRNA target sequence for BMP2K (NM_017593.3,1139-1157).
gtctccaacatcaataatt

SEQ ID NO: 74062 - DNA, 19 bp, Homo sapiens
  siRNA target sequence for BMP2K (NM_017593.3,1291-1309).
ggccaactctgctactact

SEQ ID NO: 74063 - DNA, 19 bp, Homo sapiens
  siRNA target sequence for BMP2K (NM_017593.3,1338-1356).
gttcagcaacacctgttaa

SEQ ID NO: 74064 - DNA, 19 bp, Homo sapiens
  siRNA target sequence for BMP2K (NM_017593.3,1370-1388).
ggtgaattcggtaaccata

SEQ ID NO: 74065 - DNA, 19 bp, Homo sapiens
  siRNA target sequence for BMP2K (NM_017593.3,1458-1476).
cgccacagcagcatagagt

SEQ ID NO: 74066 - DNA, 19 bp, Homo sapiens
  siRNA target sequence for BMP2K (NM_017593.3,1492-1510).
gcagggagattggagatta

SEQ ID NO: 74067 - DNA, 19 bp, Homo sapiens
  siRNA target sequence for BMP2K (NM_017593.3,1648-1666).
cctacttcaagatgcttat

SEQ ID NO: 74068 - DNA, 19 bp, Homo sapiens
  siRNA target sequence for BMP2K (NM_017593.3,1649-1667).
ctacttcaagatgcttata

SEQ ID NO: 74069 - DNA, 19 bp, Homo sapiens
  siRNA target sequence for BMP2K (NM_017593.3,1758-1776).
cacagtatcctacaatgat

SEQ ID NO: 74070 - DNA, 19 bp, Homo sapiens
  siRNA target sequence for BMP2K (NM_017593.3,1807-1825).
gcagatgctagctcaacat

SEQ ID NO: 74071 - DNA, 19 bp, Homo sapiens
  siRNA target sequence for BMP2K (NM_017593.3,1843-1861).
ggcatcacctgaatatctt

SEQ ID NO: 74072 - DNA, 19 bp, Homo sapiens
  siRNA target sequence for BMP2K (NM_017593.3,1844-1862).
gcatcacctgaatatctta

SEQ ID NO: 74073 - DNA, 19 bp, Homo sapiens
  siRNA target sequence for BMP2K (NM_017593.3,1916-1934).
gctcaggttggaaccataa

SEQ ID NO: 74074 - DNA, 19 bp, Homo sapiens
  siRNA target sequence for BMP2K (NM_017593.3,1985-2003).
gcaaatttcacaaatcaga

SEQ ID NO: 74075 - DNA, 19 bp, Homo sapiens
  siRNA target sequence for BMP2K (NM_017593.3,2029-2047).
gtcagggtggaatcctttt

SEQ ID NO: 74076 - DNA, 19 bp, Homo sapiens
  siRNA target sequence for BMP2K (NM_017593.3,2048-2066).
ggagaggataatttctcta

SEQ ID NO: 74077 - DNA, 19 bp, Homo sapiens
  siRNA target sequence for BMP2K (NM_017593.3,2124-2142).
gacacttgaaggcttattt

SEQ ID NO: 74078 - DNA, 19 bp, Homo sapiens
  siRNA target sequence for BMP2K (NM_017593.3,2128-2146).
cttgaaggcttattttgct

SEQ ID NO: 74079 - DNA, 19 bp, Homo sapiens
  siRNA target sequence for BMP2K (NM_198892.1,2280-2298).
ctgcaaaccctatcaagaa

SEQ ID NO: 74080 - DNA, 19 bp, Homo sapiens
  siRNA target sequence for BMP2K (NM_198892.1,2288-2306).
cctatcaagaacggtaaaa

SEQ ID NO: 74081 - DNA, 19 bp, Homo sapiens
  siRNA target sequence for BMP2K (NM_198892.1,2293-2311).
caagaacggtaaaacaagt

SEQ ID NO: 74082 - DNA, 19 bp, Homo sapiens
  siRNA target sequence for BMP2K (NM_198892.1,2310-2328).
gtccagcatctaaagatca

SEQ ID NO: 74083 - DNA, 19 bp, Homo sapiens
  siRNA target sequence for BMP2K (NM_198892.1,2371-2389).
ggggaatgatgaatctgaa

SEQ ID NO: 74084 - DNA, 19 bp, Homo sapiens
  siRNA target sequence for BMPR1A (NM_004329.1,319-337).
ctatacatttacatcagat

SEQ ID NO: 74085 - DNA, 19 bp, Homo sapiens
  siRNA target sequence for BMPR1A (NM_004329.1,335-353).
gattattgggagcctattt

SEQ ID NO: 74086 - DNA, 19 bp, Homo sapiens
  siRNA target sequence for BMPR1A (NM_004329.1,357-375).
catcatttctcgtgttcaa

SEQ ID NO: 74087 - DNA, 19 bp, Homo sapiens
  siRNA target sequence for BMPR1A (NM_004329.1,376-394).
ggacagaatctggatagta

SEQ ID NO: 74088 - DNA, 19 bp, Homo sapiens
  siRNA target sequence for BMPR1A (NM_004329.1,377-395).
gacagaatctggatagtat

SEQ ID NO: 74089 - DNA, 19 bp, Homo sapiens
  siRNA target sequence for BMPR1A (NM_004329.1,400-418).
catggcactgggatgaaat

SEQ ID NO: 74090 - DNA, 19 bp, Homo sapiens
  siRNA target sequence for BMPR1A (NM_004329.1,404-422).
gcactgggatgaaatcaga

SEQ ID NO: 74091 - DNA, 19 bp, Homo sapiens
  siRNA target sequence for BMPR1A (NM_004329.1,419-437).
cagactccgaccagaaaaa

SEQ ID NO: 74092 - DNA, 19 bp, Homo sapiens
  siRNA target sequence for BMPR1A (NM_004329.1,421-439).
gactccgaccagaaaaagt

SEQ ID NO: 74093 - DNA, 19 bp, Homo sapiens
  siRNA target sequence for BMPR1A (NM_004329.1,423-441).
ctccgaccagaaaaagtca

SEQ ID NO: 74094 - DNA, 19 bp, Homo sapiens
  siRNA target sequence for BMPR1A (NM_004329.1,469-487).
gataccttgccttttttaa

SEQ ID NO: 74095 - DNA, 19 bp, Homo sapiens
  siRNA target sequence for BMPR1A (NM_004329.1,555-573).
ctttgccatcatagaagaa

SEQ ID NO: 74096 - DNA, 19 bp, Homo sapiens
  siRNA target sequence for BMPR1A (NM_004329.1,582-600).
gggagaaaccacattagct

SEQ ID NO: 74097 - DNA, 19 bp, Homo sapiens
  siRNA target sequence for BMPR1A (NM_004329.1,583-601).
ggagaaaccacattagctt

SEQ ID NO: 74098 - DNA, 19 bp, Homo sapiens
  siRNA target sequence for BMPR1A (NM_004329.1,598-616).
gcttcagggtgtatgaaat

SEQ ID NO: 74099 - DNA, 19 bp, Homo sapiens
  siRNA target sequence for BMPR1A (NM_004329.1,599-617).
cttcagggtgtatgaaata

SEQ ID NO: 74100 - DNA, 19 bp, Homo sapiens
  siRNA target sequence for BMPR1A (NM_004329.1,628-646).
gattttcagtgcaaagatt

SEQ ID NO: 74101 - DNA, 19 bp, Homo sapiens
  siRNA target sequence for BMPR1A (NM_004329.1,657-675).
ccagctacgccggacaata

SEQ ID NO: 74102 - DNA, 19 bp, Homo sapiens
  siRNA target sequence for BMPR1A (NM_004329.1,660-678).
gctacgccggacaatagaa

SEQ ID NO: 74103 - DNA, 19 bp, Homo sapiens
  siRNA target sequence for BMPR1A (NM_004329.1,661-679).
ctacgccggacaatagaat

SEQ ID NO: 74104 - DNA, 19 bp, Homo sapiens
  siRNA target sequence for BMPR1A (NM_004329.1,664-682).
cgccggacaatagaatgtt

SEQ ID NO: 74105 - DNA, 19 bp, Homo sapiens
  siRNA target sequence for BMPR1A (NM_004329.1,666-684).
ccggacaatagaatgttgt

SEQ ID NO: 74106 - DNA, 19 bp, Homo sapiens
  siRNA target sequence for BMPR1A (NM_004329.1,676-694).
gaatgttgtcggaccaatt

SEQ ID NO: 74107 - DNA, 19 bp, Homo sapiens
  siRNA target sequence for BMPR1A (NM_004329.1,683-701).
gtcggaccaatttatgtaa

SEQ ID NO: 74108 - DNA, 19 bp, Homo sapiens
  siRNA target sequence for BMPR1A (NM_004329.1,735-753).
cataggtccgttttttgat

SEQ ID NO: 74109 - DNA, 19 bp, Homo sapiens
  siRNA target sequence for BMPR1A (NM_004329.1,758-776).
gcattcgatggctggtttt

SEQ ID NO: 74110 - DNA, 19 bp, Homo sapiens
  siRNA target sequence for BMPR1A (NM_004329.1,789-807).
ggctgtctgcataattgct

SEQ ID NO: 74111 - DNA, 19 bp, Homo sapiens
  siRNA target sequence for BMPR1A (NM_004329.1,790-808).
gctgtctgcataattgcta

SEQ ID NO: 74112 - DNA, 19 bp, Homo sapiens
  siRNA target sequence for BMPR1A (NM_004329.1,791-809).
ctgtctgcataattgctat

SEQ ID NO: 74113 - DNA, 19 bp, Homo sapiens
  siRNA target sequence for BMPR1A (NM_004329.1,797-815).
gcataattgctatgatcat

SEQ ID NO: 74114 - DNA, 19 bp, Homo sapiens
  siRNA target sequence for BMPR1A (NM_004329.1,827-845).
gcttttgttacaaacatta

SEQ ID NO: 74115 - DNA, 19 bp, Homo sapiens
  siRNA target sequence for BMPR1B (NM_001203.1,282-300).
gcgaagtgcaggaaaatta

SEQ ID NO: 74116 - DNA, 19 bp, Homo sapiens
  siRNA target sequence for BMPR1B (NM_001203.1,416-434).
gcacagacggatattgttt

SEQ ID NO: 74117 - DNA, 19 bp, Homo sapiens
  siRNA target sequence for BMPR1B (NM_001203.1,431-449).
gtttcacgatgatagaaga

SEQ ID NO: 74118 - DNA, 19 bp, Homo sapiens
  siRNA target sequence for BMPR1B (NM_001203.1,532-550).
cctcatcaaagaagatcaa

SEQ ID NO: 74119 - DNA, 19 bp, Homo sapiens
  siRNA target sequence for BMPR1B (NM_001203.1,533-551).
ctcatcaaagaagatcaat

SEQ ID NO: 74120 - DNA, 19 bp, Homo sapiens
  siRNA target sequence for BMPR1B (NM_001203.1,563-581).
cagaaaggaacgaatgtaa

SEQ ID NO: 74121 - DNA, 19 bp, Homo sapiens
  siRNA target sequence for BMPR1B (NM_001203.1,565-583).
gaaaggaacgaatgtaata

SEQ ID NO: 74122 - DNA, 19 bp, Homo sapiens
  siRNA target sequence for BMPR1B (NM_001203.1,569-587).
ggaacgaatgtaataaaga

SEQ ID NO: 74123 - DNA, 19 bp, Homo sapiens
  siRNA target sequence for BMPR1B (NM_001203.1,603-621).
gcctccattgaaaaacaga

SEQ ID NO: 74124 - DNA, 19 bp, Homo sapiens
  siRNA target sequence for BMPR1B (NM_001203.1,714-732).
cttccggtataaaagacaa

SEQ ID NO: 74125 - DNA, 19 bp, Homo sapiens
  siRNA target sequence for BMPR1B (NM_001203.1,759-777).
gttagaacaggatgaaact

SEQ ID NO: 74126 - DNA, 19 bp, Homo sapiens
  siRNA target sequence for BMPR1B (NM_001203.1,763-781).
gaacaggatgaaacttaca

SEQ ID NO: 74127 - DNA, 19 bp, Homo sapiens
  siRNA target sequence for BMPR1B (NM_001203.1,793-811).
gaatccctgagagacttaa

SEQ ID NO: 74128 - DNA, 19 bp, Homo sapiens
  siRNA target sequence for BMPR1B (NM_001203.1,859-877).
gtccaaaggactatagcta

SEQ ID NO: 74129 - DNA, 19 bp, Homo sapiens
  siRNA target sequence for BMPR1B (NM_001203.1,910-928).
ggtcgctatggggaagttt

SEQ ID NO: 74130 - DNA, 19 bp, Homo sapiens
  siRNA target sequence for BMPR1B (NM_001203.1,939-957).
gtggcgtggcgaaaaggta

SEQ ID NO: 74131 - DNA, 19 bp, Homo sapiens
  siRNA target sequence for BMPR1B (NM_001203.1,996-1014).
gttcagagagacagaaata

SEQ ID NO: 74132 - DNA, 19 bp, Homo sapiens
  siRNA target sequence for BMPR1B (NM_001203.1,1088-1106).
ggacccagttgtacctaat

SEQ ID NO: 74133 - DNA, 19 bp, Homo sapiens
  siRNA target sequence for BMPR1B (NM_001203.1,1092-1110).
ccagttgtacctaatcaca

SEQ ID NO: 74134 - DNA, 19 bp, Homo sapiens
  siRNA target sequence for BMPR1B (NM_001203.1,1098-1116).
gtacctaatcacagactat

SEQ ID NO: 74135 - DNA, 19 bp, Homo sapiens
  siRNA target sequence for BMPR1B (NM_001203.1,1101-1119).
cctaatcacagactatcat

SEQ ID NO: 74136 - DNA, 19 bp, Homo sapiens
  siRNA target sequence for BMPR1B (NM_001203.1,1155-1173).
caccctagacgctaaatca

SEQ ID NO: 74137 - DNA, 19 bp, Homo sapiens
  siRNA target sequence for BMPR1B (NM_001203.1,1157-1175).
ccctagacgctaaatcaat

SEQ ID NO: 74138 - DNA, 19 bp, Homo sapiens
  siRNA target sequence for BMPR1B (NM_001203.1,1196-1214).
ctgtcagtggcttatgtca

SEQ ID NO: 74139 - DNA, 19 bp, Homo sapiens
  siRNA target sequence for BMPR1B (NM_001203.1,1198-1216).
gtcagtggcttatgtcatt

SEQ ID NO: 74140 - DNA, 19 bp, Homo sapiens
  siRNA target sequence for BMPR1B (NM_001203.1,1258-1276).
gcccatcgagatctgaaaa

SEQ ID NO: 74141 - DNA, 19 bp, Homo sapiens
  siRNA target sequence for BMPR1B (NM_001203.1,1500-1518).
ggttgctaggagatgtgta

SEQ ID NO: 74142 - DNA, 19 bp, Homo sapiens
  siRNA target sequence for BMPR1B (NM_001203.1,1501-1519).
gttgctaggagatgtgtat

SEQ ID NO: 74143 - DNA, 19 bp, Homo sapiens
  siRNA target sequence for BMPR1B (NM_001203.1,1514-1532).
gtgtatcaggaggtatagt

SEQ ID NO: 74144 - DNA, 19 bp, Homo sapiens
  siRNA target sequence for BMPR1B (NM_001203.1,1566-1584).
gcccagtgacccctcttat

SEQ ID NO: 74145 - DNA, 19 bp, Homo sapiens
  siRNA target sequence for BMPR1B (NM_001203.1,1568-1586).
ccagtgacccctcttatga

SEQ ID NO: 74146 - DNA, 19 bp, Homo sapiens
  siRNA target sequence for BMPR2 (NM_001204.4,670-688).
cggctgcttcgcagaatca

SEQ ID NO: 74147 - DNA, 19 bp, Homo sapiens
  siRNA target sequence for BMPR2 (NM_001204.4,671-689).
ggctgcttcgcagaatcaa

SEQ ID NO: 74148 - DNA, 19 bp, Homo sapiens
  siRNA target sequence for BMPR2 (NM_001204.4,673-691).
ctgcttcgcagaatcaaga

SEQ ID NO: 74149 - DNA, 19 bp, Homo sapiens
  siRNA target sequence for BMPR2 (NM_001204.4,694-712).
ggctatgtgcgtttaaaga

SEQ ID NO: 74150 - DNA, 19 bp, Homo sapiens
  siRNA target sequence for BMPR2 (NM_001204.4,695-713).
gctatgtgcgtttaaagat

SEQ ID NO: 74151 - DNA, 19 bp, Homo sapiens
  siRNA target sequence for BMPR2 (NM_001204.4,733-751).
ggataggtgagagtagaat

SEQ ID NO: 74152 - DNA, 19 bp, Homo sapiens
  siRNA target sequence for BMPR2 (NM_001204.4,743-761).
gagtagaatctctcatgaa

SEQ ID NO: 74153 - DNA, 19 bp, Homo sapiens
  siRNA target sequence for BMPR2 (NM_001204.4,871-889).
cccaagagtgtcactatga

SEQ ID NO: 74154 - DNA, 19 bp, Homo sapiens
  siRNA target sequence for BMPR2 (NM_001204.4,872-890).
ccaagagtgtcactatgaa

SEQ ID NO: 74155 - DNA, 19 bp, Homo sapiens
  siRNA target sequence for BMPR2 (NM_001204.4,876-894).
gagtgtcactatgaagaat

SEQ ID NO: 74156 - DNA, 19 bp, Homo sapiens
  siRNA target sequence for BMPR2 (NM_001204.4,888-906).
gaagaatgtgtagtaacta

SEQ ID NO: 74157 - DNA, 19 bp, Homo sapiens
  siRNA target sequence for BMPR2 (NM_001204.4,947-965).
ctgttgtagcacagattta

SEQ ID NO: 74158 - DNA, 19 bp, Homo sapiens
  siRNA target sequence for BMPR2 (NM_001204.4,1038-1056).
cgagatgagacaataatca

SEQ ID NO: 74159 - DNA, 19 bp, Homo sapiens
  siRNA target sequence for BMPR2 (NM_001204.4,1064-1082).
ggcatcagtctctgtatta

SEQ ID NO: 74160 - DNA, 19 bp, Homo sapiens
  siRNA target sequence for BMPR2 (NM_001204.4,1095-1113).
gttgccttatgctttggat

SEQ ID NO: 74161 - DNA, 19 bp, Homo sapiens
  siRNA target sequence for BMPR2 (NM_001204.4,1105-1123).
gctttggatacagaatgtt

SEQ ID NO: 74162 - DNA, 19 bp, Homo sapiens
  siRNA target sequence for BMPR2 (NM_001204.4,1124-1142).
gacaggagaccgtaaacaa

SEQ ID NO: 74163 - DNA, 19 bp, Homo sapiens
  siRNA target sequence for BMPR2 (NM_001204.4,1180-1198).
ccgaaccctctcttgatct

SEQ ID NO: 74164 - DNA, 19 bp, Homo sapiens
  siRNA target sequence for BMPR2 (NM_001204.4,1181-1199).
cgaaccctctcttgatcta

SEQ ID NO: 74165 - DNA, 19 bp, Homo sapiens
  siRNA target sequence for BMPR2 (NM_001204.4,1185-1203).
ccctctcttgatctagata

SEQ ID NO: 74166 - DNA, 19 bp, Homo sapiens
  siRNA target sequence for BMPR2 (NM_001204.4,1186-1204).
cctctcttgatctagataa

SEQ ID NO: 74167 - DNA, 19 bp, Homo sapiens
  siRNA target sequence for BMPR2 (NM_001204.4,1189-1207).
ctcttgatctagataatct

SEQ ID NO: 74168 - DNA, 19 bp, Homo sapiens
  siRNA target sequence for BMPR2 (NM_001204.4,1191-1209).
cttgatctagataatctga

SEQ ID NO: 74169 - DNA, 19 bp, Homo sapiens
  siRNA target sequence for BMPR2 (NM_001204.4,1223-1241).
gattggccgaggtcgatat

SEQ ID NO: 74170 - DNA, 19 bp, Homo sapiens
  siRNA target sequence for BMPR2 (NM_001204.4,1234-1252).
gtcgatatggagcagtata

SEQ ID NO: 74171 - DNA, 19 bp, Homo sapiens
  siRNA target sequence for BMPR2 (NM_001204.4,1236-1254).
cgatatggagcagtatata

SEQ ID NO: 74172 - DNA, 19 bp, Homo sapiens
  siRNA target sequence for BMPR2 (NM_001204.4,1237-1255).
gatatggagcagtatataa

SEQ ID NO: 74173 - DNA, 19 bp, Homo sapiens
  siRNA target sequence for BMPR2 (NM_001204.4,1271-1289).
gcgtccagttgctgtaaaa

SEQ ID NO: 74174 - DNA, 19 bp, Homo sapiens
  siRNA target sequence for BMPR2 (NM_001204.4,1276-1294).
cagttgctgtaaaagtgtt

SEQ ID NO: 74175 - DNA, 19 bp, Homo sapiens
  siRNA target sequence for BMPR2 (NM_001204.4,1298-1316).
ctttgcaaaccgtcagaat

SEQ ID NO: 74176 - DNA, 19 bp, Homo sapiens
  siRNA target sequence for BMPR2 (NM_001204.4,1303-1321).
caaaccgtcagaattttat

SEQ ID NO: 74177 - DNA, 19 bp, Homo sapiens
  siRNA target sequence for BMPR2 (NM_001204.4,1364-1382).
caacattgcccgctttata

SEQ ID NO: 74178 - DNA, 19 bp, Homo sapiens
  siRNA target sequence for BMPR2 (NM_001204.4,1367-1385).
cattgcccgctttatagtt

SEQ ID NO: 74179 - DNA, 19 bp, Homo sapiens
  siRNA target sequence for BMPR2 (NM_001204.4,1405-1423).
cagatggacgcatggaata

SEQ ID NO: 74180 - DNA, 19 bp, Homo sapiens
  siRNA target sequence for BMPR2 (NM_001204.4,1407-1425).
gatggacgcatggaatatt

SEQ ID NO: 74181 - DNA, 19 bp, Homo sapiens
  siRNA target sequence for BMPR2 (NM_001204.4,1411-1429).
gacgcatggaatatttgct

SEQ ID NO: 74182 - DNA, 19 bp, Homo sapiens
  siRNA target sequence for BMPR2 (NM_001204.4,1437-1455).
gagtactatcccaatggat

SEQ ID NO: 74183 - DNA, 19 bp, Homo sapiens
  siRNA target sequence for BMPR2 (NM_001204.4,1442-1460).
ctatcccaatggatcttta

SEQ ID NO: 74184 - DNA, 19 bp, Homo sapiens
  siRNA target sequence for BMPR2 (NM_001204.4,1446-1464).
cccaatggatctttatgca

SEQ ID NO: 74185 - DNA, 19 bp, Homo sapiens
  siRNA target sequence for BMPR2 (NM_001204.4,1506-1524).
cgtcttgctcattctgtta

SEQ ID NO: 74186 - DNA, 19 bp, Homo sapiens
  siRNA target sequence for BMPR2 (NM_001204.4,1525-1543).
ctagaggactggcttatct

SEQ ID NO: 74187 - DNA, 19 bp, Homo sapiens
  siRNA target sequence for BMPR2 (NM_001204.4,1537-1555).
cttatcttcacacagaatt

SEQ ID NO: 74188 - DNA, 19 bp, Homo sapiens
  siRNA target sequence for BMPR2 (NM_001204.4,1557-1575).
ccacgaggagatcattata

SEQ ID NO: 74189 - DNA, 19 bp, Homo sapiens
  siRNA target sequence for BMPR2 (NM_001204.4,1558-1576).
cacgaggagatcattataa

SEQ ID NO: 74190 - DNA, 19 bp, Homo sapiens
  siRNA target sequence for BMPR2 (NM_001204.4,1606-1624).
gcagaaatgtcctagtgaa

SEQ ID NO: 74191 - DNA, 19 bp, Homo sapiens
  siRNA target sequence for BMPR2 (NM_001204.4,1633-1651).
gaacctgtgttattagtga

SEQ ID NO: 74192 - DNA, 19 bp, Homo sapiens
  siRNA target sequence for BMPR2 (NM_001204.4,1637-1655).
ctgtgttattagtgacttt

SEQ ID NO: 74193 - DNA, 19 bp, Homo sapiens
  siRNA target sequence for BMPR2 (NM_001204.4,1664-1682).
catgaggctgactggaaat

SEQ ID NO: 74194 - DNA, 19 bp, Homo sapiens
  siRNA target sequence for BMPR2 (NM_001204.4,1667-1685).
gaggctgactggaaataga

SEQ ID NO: 74195 - DNA, 19 bp, Homo sapiens
  siRNA target sequence for BMPR2 (NM_001204.4,1724-1742).
cgaggttggcactatcaga

SEQ ID NO: 74196 - DNA, 19 bp, Homo sapiens
  siRNA target sequence for BMPR2 (NM_001204.4,1725-1743).
gaggttggcactatcagat

SEQ ID NO: 74197 - DNA, 19 bp, Homo sapiens
  siRNA target sequence for BMPR2 (NM_001204.4,1727-1745).
ggttggcactatcagatat

SEQ ID NO: 74198 - DNA, 19 bp, Homo sapiens
  siRNA target sequence for BMPR2 (NM_001204.4,1728-1746).
gttggcactatcagatata

SEQ ID NO: 74199 - DNA, 19 bp, Homo sapiens
  siRNA target sequence for BMPR2 (NM_001204.4,1798-1816).
ctttgaaacaagtagacat

SEQ ID NO: 74200 - DNA, 19 bp, Homo sapiens
  siRNA target sequence for BMPR2 (NM_001204.4,1821-1839).
gctcttggactaatctatt

SEQ ID NO: 74201 - DNA, 19 bp, Homo sapiens
  siRNA target sequence for BMPR2 (NM_001204.4,1830-1848).
ctaatctattgggagatat

SEQ ID NO: 74202 - DNA, 19 bp, Homo sapiens
  siRNA target sequence for BMPR2 (NM_001204.4,1910-1928).
gacagaggttggaaaccat

SEQ ID NO: 74203 - DNA, 19 bp, Homo sapiens
  siRNA target sequence for BMPR2 (NM_001204.4,2143-2161).
gcccaacagtcaatccaat

SEQ ID NO: 74204 - DNA, 19 bp, Homo sapiens
  siRNA target sequence for BMPR2 (NM_001204.4,2181-2199).
gaacgcaacctgtcacata

SEQ ID NO: 74205 - DNA, 19 bp, Homo sapiens
  siRNA target sequence for BMPR2 (NM_001204.4,2184-2202).
cgcaacctgtcacataata

SEQ ID NO: 74206 - DNA, 19 bp, Homo sapiens
  siRNA target sequence for BMPR2 (NM_001204.4,2256-2274).
gaagactctatccatcata

SEQ ID NO: 74207 - DNA, 19 bp, Homo sapiens
  siRNA target sequence for BMPR2 (NM_001204.4,2275-2293).
ctgacagcatcgtgaagaa

SEQ ID NO: 74208 - DNA, 19 bp, Homo sapiens
  siRNA target sequence for BMPR2 (NM_001204.4,2315-2333).
gtccagcacacctttgact

SEQ ID NO: 74209 - DNA, 19 bp, Homo sapiens
  siRNA target sequence for BMPR2 (NM_001204.4,2318-2336).
cagcacacctttgactata

SEQ ID NO: 74210 - DNA, 19 bp, Homo sapiens
  siRNA target sequence for BMPR2 (NM_001204.4,2339-2357).
ggaaaaaaaccgaaattca

SEQ ID NO: 74211 - DNA, 19 bp, Homo sapiens
  siRNA target sequence for BMPR2 (NM_001204.4,2348-2366).
ccgaaattcaattaactat

SEQ ID NO: 74212 - DNA, 19 bp, Homo sapiens
  siRNA target sequence for BMPR2 (NM_001204.4,2467-2485).
gtactggcatgactactat

SEQ ID NO: 74213 - DNA, 19 bp, Homo sapiens
  siRNA target sequence for BMPR2 (NM_001204.4,2473-2491).
gcatgactactatatctga

SEQ ID NO: 74214 - DNA, 19 bp, Homo sapiens
  siRNA target sequence for BMPR2 (NM_001204.4,2658-2676).
gagcactctcttaaacagt

SEQ ID NO: 74215 - DNA, 19 bp, Homo sapiens
  siRNA target sequence for BMPR2 (NM_001204.4,2688-2706).
gacccactgagcagtacta

SEQ ID NO: 74216 - DNA, 19 bp, Homo sapiens
  siRNA target sequence for BMPR2 (NM_001204.4,2694-2712).
ctgagcagtactagttcta

SEQ ID NO: 74217 - DNA, 19 bp, Homo sapiens
  siRNA target sequence for BMPR2 (NM_001204.4,2714-2732).
cttgctttacccactcata

SEQ ID NO: 74218 - DNA, 19 bp, Homo sapiens
  siRNA target sequence for BMPR2 (NM_001204.4,2779-2797).
caaatggccaagcatgttt

SEQ ID NO: 74219 - DNA, 19 bp, Homo sapiens
  siRNA target sequence for BMPR2 (NM_001204.4,2853-2871).
cccaagagacctactagtt

SEQ ID NO: 74220 - DNA, 19 bp, Homo sapiens
  siRNA target sequence for BMPR2 (NM_001204.4,2854-2872).
ccaagagacctactagttt

SEQ ID NO: 74221 - DNA, 19 bp, Homo sapiens
  siRNA target sequence for BMPR2 (NM_001204.4,2927-2945).
gcacaaatcaaacttgaaa

SEQ ID NO: 74222 - DNA, 19 bp, Homo sapiens
  siRNA target sequence for BMPR2 (NM_001204.4,3077-3095).
caatgggacagtactatct

SEQ ID NO: 74223 - DNA, 19 bp, Homo sapiens
  siRNA target sequence for BMPR2 (NM_001204.4,3087-3105).
gtactatctggccaaacaa

SEQ ID NO: 74224 - DNA, 19 bp, Homo sapiens
  siRNA target sequence for BMPR2 (NM_001204.4,3097-3115).
gccaaacaaccaacatagt

SEQ ID NO: 74225 - DNA, 19 bp, Homo sapiens
  siRNA target sequence for BMPR2 (NM_001204.4,3099-3117).
caaacaaccaacatagtga

SEQ ID NO: 74226 - DNA, 19 bp, Homo sapiens
  siRNA target sequence for BMPR2 (NM_001204.4,3161-3179).
ggacacccggctgaatatt

SEQ ID NO: 74227 - DNA, 19 bp, Homo sapiens
  siRNA target sequence for BMPR2 (NM_001204.4,3162-3180).
gacacccggctgaatatta

SEQ ID NO: 74228 - DNA, 19 bp, Homo sapiens
  siRNA target sequence for BMPR2 (NM_001204.4,3164-3182).
cacccggctgaatattaat

SEQ ID NO: 74229 - DNA, 19 bp, Homo sapiens
  siRNA target sequence for BMPR2 (NM_001204.4,3195-3213).
gagcatgagcctttactga

SEQ ID NO: 74230 - DNA, 19 bp, Homo sapiens
  siRNA target sequence for BMPR2 (NM_001204.4,3285-3303).
gaaggtggccgaactaatt

SEQ ID NO: 74231 - DNA, 19 bp, Homo sapiens
  siRNA target sequence for BMPR2 (NM_001204.4,3288-3306).
ggtggccgaactaattcca

SEQ ID NO: 74232 - DNA, 19 bp, Homo sapiens
  siRNA target sequence for BMPR2 (NM_001204.4,3289-3307).
gtggccgaactaattccaa

SEQ ID NO: 74233 - DNA, 19 bp, Homo sapiens
  siRNA target sequence for BMPR2 (NM_001204.4,3291-3309).
ggccgaactaattccaata

SEQ ID NO: 74234 - DNA, 19 bp, Homo sapiens
  siRNA target sequence for BMPR2 (NM_001204.4,3292-3310).
gccgaactaattccaataa

SEQ ID NO: 74235 - DNA, 19 bp, Homo sapiens
  siRNA target sequence for BMPR2 (NM_001204.4,3294-3312).
cgaactaattccaataaca

SEQ ID NO: 74236 - DNA, 19 bp, Homo sapiens
  siRNA target sequence for BMPR2 (NM_001204.4,3320-3338).
caatccatgttcagaacaa

SEQ ID NO: 74237 - DNA, 19 bp, Homo sapiens
  siRNA target sequence for BMPR2 (NM_001204.4,3328-3346).
gttcagaacaagatgttct

SEQ ID NO: 74238 - DNA, 19 bp, Homo sapiens
  siRNA target sequence for BMPR2 (NM_001204.4,3403-3421).
cacagaggcctaattctct

SEQ ID NO: 74239 - DNA, 19 bp, Homo sapiens
  siRNA target sequence for BMPR2 (NM_001204.4,3422-3440).
ggatctttcagccacaaat

SEQ ID NO: 74240 - DNA, 19 bp, Homo sapiens
  siRNA target sequence for BMPR2 (NM_001204.4,3611-3629).
cagtaacagggcagttcat

SEQ ID NO: 74241 - DNA, 19 bp, Homo sapiens
  siRNA target sequence for BMPR2 (NM_001204.4,3617-3635).
cagggcagttcattccaaa

SEQ ID NO: 74242 - DNA, 19 bp, Homo sapiens
  siRNA target sequence for BMPR2 (NM_001204.4,3673-3691).
ctacaaccatggtgtctaa

SEQ ID NO: 74243 - DNA, 19 bp, Homo sapiens
  siRNA target sequence for BMPR2 (NM_001204.4,3680-3698).
catggtgtctaaagatata

SEQ ID NO: 74244 - DNA, 19 bp, Homo sapiens
  siRNA target sequence for BMPR2 (NM_001204.4,3683-3701).
ggtgtctaaagatatagga

SEQ ID NO: 74245 - DNA, 19 bp, Homo sapiens
  siRNA target sequence for BMS1L (NM_014753.1,1319-1337).
ccattttcggagatgaaga

SEQ ID NO: 74246 - DNA, 19 bp, Homo sapiens
  siRNA target sequence for BMS1L (NM_014753.1,1320-1338).
cattttcggagatgaagat

SEQ ID NO: 74247 - DNA, 19 bp, Homo sapiens
  siRNA target sequence for BMS1L (NM_014753.1,1395-1413).
ggaaaacggctctagtgat

SEQ ID NO: 74248 - DNA, 19 bp, Homo sapiens
  siRNA target sequence for BMS1L (NM_014753.1,1441-1459).
gagatgactgatcagtata

SEQ ID NO: 74249 - DNA, 19 bp, Homo sapiens
  siRNA target sequence for BMS1L (NM_014753.1,1461-1479).
ggctgttaagggcatcaaa

SEQ ID NO: 74250 - DNA, 19 bp, Homo sapiens
  siRNA target sequence for BMS1L (NM_014753.1,1473-1491).
catcaaacgacggaaactt

SEQ ID NO: 74251 - DNA, 19 bp, Homo sapiens
  siRNA target sequence for BMS1L (NM_014753.1,1652-1670).
ctgctggagaaggtagtaa

SEQ ID NO: 74252 - DNA, 19 bp, Homo sapiens
  siRNA target sequence for BMS1L (NM_014753.1,1744-1762).
gctctccccactttcgatt

SEQ ID NO: 74253 - DNA, 19 bp, Homo sapiens
  siRNA target sequence for BMS1L (NM_014753.1,1914-1932).
ggggccacagaacttcatt

SEQ ID NO: 74254 - DNA, 19 bp, Homo sapiens
  siRNA target sequence for BMS1L (NM_014753.1,2086-2104).
ccaaacctccgaaagctta

SEQ ID NO: 74255 - DNA, 19 bp, Homo sapiens
  siRNA target sequence for BMS1L (NM_014753.1,2087-2105).
caaacctccgaaagcttat

SEQ ID NO: 74256 - DNA, 19 bp, Homo sapiens
  siRNA target sequence for BMS1L (NM_014753.1,2223-2241).
ggactgctccagatttctt

SEQ ID NO: 74257 - DNA, 19 bp, Homo sapiens
  siRNA target sequence for BMS1L (NM_014753.1,2269-2287).
gaggaggttatgaacagta

SEQ ID NO: 74258 - DNA, 19 bp, Homo sapiens
  siRNA target sequence for BMX (NM_001721.3,206-224).
caaagaacggctttttgtt

SEQ ID NO: 74259 - DNA, 19 bp, Homo sapiens
  siRNA target sequence for BMX (NM_001721.3,235-253).
caaacctttcctactatga

SEQ ID NO: 74260 - DNA, 19 bp, Homo sapiens
  siRNA target sequence for BMX (NM_001721.3,275-293).
cagcagaaaaggatccatt

SEQ ID NO: 74261 - DNA, 19 bp, Homo sapiens
  siRNA target sequence for BMX (NM_001721.3,286-304).
gatccattgaaattaagaa

SEQ ID NO: 74262 - DNA, 19 bp, Homo sapiens
  siRNA target sequence for BMX (NM_001721.3,313-331).
gtgtggagaaagtaaatct

SEQ ID NO: 74263 - DNA, 19 bp, Homo sapiens
  siRNA target sequence for BMX (NM_001721.3,362-380).
cccatttcagattgtctat

SEQ ID NO: 74264 - DNA, 19 bp, Homo sapiens
  siRNA target sequence for BMX (NM_001721.3,395-413).
ctatgtctatgcatcaaat

SEQ ID NO: 74265 - DNA, 19 bp, Homo sapiens
  siRNA target sequence for BMX (NM_001721.3,422-440).
ccgaagtcagtggttgaaa

SEQ ID NO: 74266 - DNA, 19 bp, Homo sapiens
  siRNA target sequence for BMX (NM_001721.3,584-602).
gcatactgcagtcaatgaa

SEQ ID NO: 74267 - DNA, 19 bp, Homo sapiens
  siRNA target sequence for BMX (NM_001721.3,653-671).
ggcagttcctgttctcaaa

SEQ ID NO: 74268 - DNA, 19 bp, Homo sapiens
  siRNA target sequence for BMX (NM_001721.3,654-672).
gcagttcctgttctcaaaa

SEQ ID NO: 74269 - DNA, 19 bp, Homo sapiens
  siRNA target sequence for BMX (NM_001721.3,697-715).
ctctagcccaatatgacaa

SEQ ID NO: 74270 - DNA, 19 bp, Homo sapiens
  siRNA target sequence for BMX (NM_001721.3,702-720).
gcccaatatgacaacgaat

SEQ ID NO: 74271 - DNA, 19 bp, Homo sapiens
  siRNA target sequence for BMX (NM_001721.3,705-723).
caatatgacaacgaatcaa

SEQ ID NO: 74272 - DNA, 19 bp, Homo sapiens
  siRNA target sequence for BMX (NM_001721.3,741-759).
cagccaccatcttcaagta

SEQ ID NO: 74273 - DNA, 19 bp, Homo sapiens
  siRNA target sequence for BMX (NM_001721.3,852-870).
gactggtggcaagtaagaa

SEQ ID NO: 74274 - DNA, 19 bp, Homo sapiens
  siRNA target sequence for BMX (NM_001721.3,854-872).
ctggtggcaagtaagaaaa

SEQ ID NO: 74275 - DNA, 19 bp, Homo sapiens
  siRNA target sequence for BMX (NM_001721.3,1036-1054).
gatcacaatctgaacagtt

SEQ ID NO: 74276 - DNA, 19 bp, Homo sapiens
  siRNA target sequence for BMX (NM_001721.3,1041-1059).
caatctgaacagttactca

SEQ ID NO: 74277 - DNA, 19 bp, Homo sapiens
  siRNA target sequence for BMX (NM_001721.3,1080-1098).
gcatttatggttagaaatt

SEQ ID NO: 74278 - DNA, 19 bp, Homo sapiens
  siRNA target sequence for BMX (NM_001721.3,1099-1117).
cgagccaagtgggaatgta

SEQ ID NO: 74279 - DNA, 19 bp, Homo sapiens
  siRNA target sequence for BMX (NM_001721.3,1135-1153).
gtaaggctgtgaatgataa

SEQ ID NO: 74280 - DNA, 19 bp, Homo sapiens
  siRNA target sequence for BMX (NM_001721.3,1170-1188).
cattaccacgtgcatacaa

SEQ ID NO: 74281 - DNA, 19 bp, Homo sapiens
  siRNA target sequence for BMX (NM_001721.3,1220-1238).
ctactgttttgattccatt

SEQ ID NO: 74282 - DNA, 19 bp, Homo sapiens
  siRNA target sequence for BMX (NM_001721.3,1436-1454).
gaaggggcagtatgatgtt

SEQ ID NO: 74283 - DNA, 19 bp, Homo sapiens
  siRNA target sequence for BMX (NM_001721.3,1506-1524).
gaggcccagactatgatga

SEQ ID NO: 74284 - DNA, 19 bp, Homo sapiens
  siRNA target sequence for BMX (NM_001721.3,1508-1526).
ggcccagactatgatgaaa

SEQ ID NO: 74285 - DNA, 19 bp, Homo sapiens
  siRNA target sequence for BMX (NM_001721.3,1510-1528).
cccagactatgatgaaact

SEQ ID NO: 74286 - DNA, 19 bp, Homo sapiens
  siRNA target sequence for BMX (NM_001721.3,1531-1549).
gccatcccaagctggttaa

SEQ ID NO: 74287 - DNA, 19 bp, Homo sapiens
  siRNA target sequence for BMX (NM_001721.3,1532-1550).
ccatcccaagctggttaaa

SEQ ID NO: 74288 - DNA, 19 bp, Homo sapiens
  siRNA target sequence for BMX (NM_001721.3,1557-1575).
ggagtgtgttcaaaggaat

SEQ ID NO: 74289 - DNA, 19 bp, Homo sapiens
  siRNA target sequence for BMX (NM_001721.3,1558-1576).
gagtgtgttcaaaggaata

SEQ ID NO: 74290 - DNA, 19 bp, Homo sapiens
  siRNA target sequence for BMX (NM_001721.3,1567-1585).
caaaggaataccccatata

SEQ ID NO: 74291 - DNA, 19 bp, Homo sapiens
  siRNA target sequence for BMX (NM_001721.3,1586-1604).
catagtgactgaatatata

SEQ ID NO: 74292 - DNA, 19 bp, Homo sapiens
  siRNA target sequence for BMX (NM_001721.3,1592-1610).
gactgaatatataagcaat

SEQ ID NO: 74293 - DNA, 19 bp, Homo sapiens
  siRNA target sequence for BMX (NM_001721.3,1656-1674).
ccttcccagctcttagaaa

SEQ ID NO: 74294 - DNA, 19 bp, Homo sapiens
  siRNA target sequence for BMX (NM_001721.3,1657-1675).
cttcccagctcttagaaat

SEQ ID NO: 74295 - DNA, 19 bp, Homo sapiens
  siRNA target sequence for BMX (NM_001721.3,1799-1817).
gacaaggtatgttcttgat

SEQ ID NO: 74296 - DNA, 19 bp, Homo sapiens
  siRNA target sequence for BMX (NM_001721.3,1831-1849).
gttcagtcggaacaaagtt

SEQ ID NO: 74297 - DNA, 19 bp, Homo sapiens
  siRNA target sequence for BMX (NM_001721.3,1866-1884).
gctccagaggtgtttcatt

SEQ ID NO: 74298 - DNA, 19 bp, Homo sapiens
  siRNA target sequence for BMX (NM_001721.3,1872-1890).
gaggtgtttcattacttca

SEQ ID NO: 74299 - DNA, 19 bp, Homo sapiens
  siRNA target sequence for BMX (NM_001721.3,1954-1972).
ggaagcagccctatgactt

SEQ ID NO: 74300 - DNA, 19 bp, Homo sapiens
  siRNA target sequence for BMX (NM_001721.3,2074-2092).
ggcacgagcttccagaaaa

SEQ ID NO: 74301 - DNA, 19 bp, Homo sapiens
  siRNA target sequence for BRAF (NM_004333.2,196-214).
ggaggtgtggaatatcaaa

SEQ ID NO: 74302 - DNA, 19 bp, Homo sapiens
  siRNA target sequence for BRAF (NM_004333.2,205-223).
gaatatcaaacaaatgatt

SEQ ID NO: 74303 - DNA, 19 bp, Homo sapiens
  siRNA target sequence for BRAF (NM_004333.2,226-244).
gttgacacaggaacatata

SEQ ID NO: 74304 - DNA, 19 bp, Homo sapiens
  siRNA target sequence for BRAF (NM_004333.2,245-263).
gaggccctattggacaaat

SEQ ID NO: 74305 - DNA, 19 bp, Homo sapiens
  siRNA target sequence for BRAF (NM_004333.2,250-268).
cctattggacaaatttggt

SEQ ID NO: 74306 - DNA, 19 bp, Homo sapiens
  siRNA target sequence for BRAF (NM_004333.2,296-314).
ctggaggcctatgaagaat

SEQ ID NO: 74307 - DNA, 19 bp, Homo sapiens
  siRNA target sequence for BRAF (NM_004333.2,368-386).
ctggggaacggaactgatt

SEQ ID NO: 74308 - DNA, 19 bp, Homo sapiens
  siRNA target sequence for BRAF (NM_004333.2,370-388).
ggggaacggaactgatttt

SEQ ID NO: 74309 - DNA, 19 bp, Homo sapiens
  siRNA target sequence for BRAF (NM_004333.2,412-430).
ggataccgttacatcttct

SEQ ID NO: 74310 - DNA, 19 bp, Homo sapiens
  siRNA target sequence for BRAF (NM_004333.2,508-526).
caagtcaccacaaaaacct

SEQ ID NO: 74311 - DNA, 19 bp, Homo sapiens
  siRNA target sequence for BRAF (NM_004333.2,573-591).
caaggtgtggagttacagt

SEQ ID NO: 74312 - DNA, 19 bp, Homo sapiens
  siRNA target sequence for BRAF (NM_004333.2,588-606).
cagtccgagacagtctaaa

SEQ ID NO: 74313 - DNA, 19 bp, Homo sapiens
  siRNA target sequence for BRAF (NM_004333.2,590-608).
gtccgagacagtctaaaga

SEQ ID NO: 74314 - DNA, 19 bp, Homo sapiens
  siRNA target sequence for BRAF (NM_004333.2,640-658).
gtgctgtgctgtttacaga

SEQ ID NO: 74315 - DNA, 19 bp, Homo sapiens
  siRNA target sequence for BRAF (NM_004333.2,643-661).
ctgtgctgtttacagaatt

SEQ ID NO: 74316 - DNA, 19 bp, Homo sapiens
  siRNA target sequence for BRAF (NM_004333.2,686-704).
ggttgggacactgatattt

SEQ ID NO: 74317 - DNA, 19 bp, Homo sapiens
  siRNA target sequence for BRAF (NM_004333.2,708-726).
ggcttactggagaagaatt

SEQ ID NO: 74318 - DNA, 19 bp, Homo sapiens
  siRNA target sequence for BRAF (NM_004333.2,733-751).
ggaagtgttggagaatgtt

SEQ ID NO: 74319 - DNA, 19 bp, Homo sapiens
  siRNA target sequence for BRAF (NM_004333.2,742-760).
ggagaatgttccacttaca

SEQ ID NO: 74320 - DNA, 19 bp, Homo sapiens
  siRNA target sequence for BRAF (NM_004333.2,769-787).
ctttgtacgaaaaacgttt

SEQ ID NO: 74321 - DNA, 19 bp, Homo sapiens
  siRNA target sequence for BRAF (NM_004333.2,773-791).
gtacgaaaaacgtttttca

SEQ ID NO: 74322 - DNA, 19 bp, Homo sapiens
  siRNA target sequence for BRAF (NM_004333.2,813-831).
gtcgaaagctgcttttcca

SEQ ID NO: 74323 - DNA, 19 bp, Homo sapiens
  siRNA target sequence for BRAF (NM_004333.2,832-850).
gggtttccgctgtcaaaca

SEQ ID NO: 74324 - DNA, 19 bp, Homo sapiens
  siRNA target sequence for BRAF (NM_004333.2,833-851).
ggtttccgctgtcaaacat

SEQ ID NO: 74325 - DNA, 19 bp, Homo sapiens
  siRNA target sequence for BRAF (NM_004333.2,841-859).
ctgtcaaacatgtggttat

SEQ ID NO: 74326 - DNA, 19 bp, Homo sapiens
  siRNA target sequence for BRAF (NM_004333.2,868-886).
ccagcgttgtagtacagaa

SEQ ID NO: 74327 - DNA, 19 bp, Homo sapiens
  siRNA target sequence for BRAF (NM_004333.2,871-889).
gcgttgtagtacagaagtt

SEQ ID NO: 74328 - DNA, 19 bp, Homo sapiens
  siRNA target sequence for BRAF (NM_004333.2,887-905).
gttccactgatgtgtgtta

SEQ ID NO: 74329 - DNA, 19 bp, Homo sapiens
  siRNA target sequence for BRAF (NM_004333.2,983-1001).
gcagagactgccctaacat

SEQ ID NO: 74330 - DNA, 19 bp, Homo sapiens
  siRNA target sequence for BRAF (NM_004333.2,1061-1079).
ccgtctccttcaaaatcca

SEQ ID NO: 74331 - DNA, 19 bp, Homo sapiens
  siRNA target sequence for BRAF (NM_004333.2,1096-1114).
cttccgaccagcagatgaa

SEQ ID NO: 74332 - DNA, 19 bp, Homo sapiens
  siRNA target sequence for BRAF (NM_004333.2,1112-1130).
gaagatcatcgaaatcaat

SEQ ID NO: 74333 - DNA, 19 bp, Homo sapiens
  siRNA target sequence for BRAF (NM_004333.2,1157-1175).
gctcccaatgtgcatataa

SEQ ID NO: 74334 - DNA, 19 bp, Homo sapiens
  siRNA target sequence for BRAF (NM_004333.2,1158-1176).
ctcccaatgtgcatataaa

SEQ ID NO: 74335 - DNA, 19 bp, Homo sapiens
  siRNA target sequence for BRAF (NM_004333.2,1160-1178).
cccaatgtgcatataaaca

SEQ ID NO: 74336 - DNA, 19 bp, Homo sapiens
  siRNA target sequence for BRAF (NM_004333.2,1328-1346).
cagcgagaaaggaagtcat

SEQ ID NO: 74337 - DNA, 19 bp, Homo sapiens
  siRNA target sequence for BRAF (NM_004333.2,1331-1349).
cgagaaaggaagtcatctt

SEQ ID NO: 74338 - DNA, 19 bp, Homo sapiens
  siRNA target sequence for BRAF (NM_004333.2,1361-1379).
gacaggaatcgaatgaaaa

SEQ ID NO: 74339 - DNA, 19 bp, Homo sapiens
  siRNA target sequence for BRAF (NM_004333.2,1366-1384).
gaatcgaatgaaaacactt

SEQ ID NO: 74340 - DNA, 19 bp, Homo sapiens
  siRNA target sequence for BRAF (NM_004333.2,1391-1409).
cgggactcgagtgatgatt

SEQ ID NO: 74341 - DNA, 19 bp, Homo sapiens
  siRNA target sequence for BRAF (NM_004333.2,1530-1548).
ctacacctcagcagttaca

SEQ ID NO: 74342 - DNA, 19 bp, Homo sapiens
  siRNA target sequence for BRAF (NM_004333.2,1565-1583).
gtaggagtactcaggaaaa

SEQ ID NO: 74343 - DNA, 19 bp, Homo sapiens
  siRNA target sequence for BRAF (NM_004333.2,1584-1602).
cacgacatgtgaatatcct

SEQ ID NO: 74344 - DNA, 19 bp, Homo sapiens
  siRNA target sequence for BRAF (NM_004333.2,1628-1646).
ccacaactggctattgtta

SEQ ID NO: 74345 - DNA, 19 bp, Homo sapiens
  siRNA target sequence for BRAF (NM_004333.2,1685-1703).
catatcattgagaccaaat

SEQ ID NO: 74346 - DNA, 19 bp, Homo sapiens
  siRNA target sequence for BRAF (NM_004333.2,1711-1729).
gatcaaacttatagatatt

SEQ ID NO: 74347 - DNA, 19 bp, Homo sapiens
  siRNA target sequence for BRAF (NM_004333.2,1783-1801).
cagagacctcaagagtaat

SEQ ID NO: 74348 - DNA, 19 bp, Homo sapiens
  siRNA target sequence for BRAF (NM_004333.2,1814-1832).
catgaagacctcacagtaa

SEQ ID NO: 74349 - DNA, 19 bp, Homo sapiens
  siRNA target sequence for BRAF (NM_004333.2,1875-1893).
gtgggtcccatcagtttga

SEQ ID NO: 74350 - DNA, 19 bp, Homo sapiens
  siRNA target sequence for BRAF (NM_004333.2,1878-1896).
ggtcccatcagtttgaaca

SEQ ID NO: 74351 - DNA, 19 bp, Homo sapiens
  siRNA target sequence for BRAF (NM_004333.2,1881-1899).
cccatcagtttgaacagtt

SEQ ID NO: 74352 - DNA, 19 bp, Homo sapiens
  siRNA target sequence for BRAF (NM_004333.2,1923-1941).
caccagaagtcatcagaat

SEQ ID NO: 74353 - DNA, 19 bp, Homo sapiens
  siRNA target sequence for BRAF (NM_004333.2,1960-1978).
cagctttcagtcagatgta

SEQ ID NO: 74354 - DNA, 19 bp, Homo sapiens
  siRNA target sequence for BRAF (NM_004333.2,1994-2012).
gttctgtatgaattgatga

SEQ ID NO: 74355 - DNA, 19 bp, Homo sapiens
  siRNA target sequence for BRAF (NM_004333.2,2141-2159).
gcagagtgcctcaaaaaga

SEQ ID NO: 74356 - DNA, 19 bp, Homo sapiens
  siRNA target sequence for BRAF (NM_004333.2,2215-2233).
ccgctcattgccaaaaatt

SEQ ID NO: 74357 - DNA, 19 bp, Homo sapiens
  siRNA target sequence for BRAF (NM_004333.2,2260-2278).
gaatcgggctggtttccaa

SEQ ID NO: 74358 - DNA, 19 bp, Homo sapiens
  siRNA target sequence for BRAF (NM_004333.2,2280-2298).
cagaggattttagtctata

SEQ ID NO: 74359 - DNA, 19 bp, Homo sapiens
  siRNA target sequence for BRAF (NM_004333.2,2284-2302).
ggattttagtctatatgct

SEQ ID NO: 74360 - DNA, 19 bp, Homo sapiens
  siRNA target sequence for BRAF (NM_004333.2,2300-2318).
gcttgtgcttctccaaaaa

SEQ ID NO: 74361 - DNA, 19 bp, Homo sapiens
  siRNA target sequence for BRAF (NM_004333.2,2326-2344).
ccaggcagggggatatggt

SEQ ID NO: 74362 - DNA, 19 bp, Homo sapiens
  siRNA target sequence for BTK (NM_000061.1,196-214).
gaagcgatcccaacagaaa

SEQ ID NO: 74363 - DNA, 19 bp, Homo sapiens
  siRNA target sequence for BTK (NM_000061.1,200-218).
cgatcccaacagaaaaaga

SEQ ID NO: 74364 - DNA, 19 bp, Homo sapiens
  siRNA target sequence for BTK (NM_000061.1,265-283).
gcacaaactctcctactat

SEQ ID NO: 74365 - DNA, 19 bp, Homo sapiens
  siRNA target sequence for BTK (NM_000061.1,276-294).
cctactatgagtatgactt

SEQ ID NO: 74366 - DNA, 19 bp, Homo sapiens
  siRNA target sequence for BTK (NM_000061.1,312-330).
gcagtaagaagggttcaat

SEQ ID NO: 74367 - DNA, 19 bp, Homo sapiens
  siRNA target sequence for BTK (NM_000061.1,313-331).
cagtaagaagggttcaata

SEQ ID NO: 74368 - DNA, 19 bp, Homo sapiens
  siRNA target sequence for BTK (NM_000061.1,315-333).
gtaagaagggttcaataga

SEQ ID NO: 74369 - DNA, 19 bp, Homo sapiens
  siRNA target sequence for BTK (NM_000061.1,319-337).
gaagggttcaatagatgtt

SEQ ID NO: 74370 - DNA, 19 bp, Homo sapiens
  siRNA target sequence for BTK (NM_000061.1,324-342).
gttcaatagatgttgagaa

SEQ ID NO: 74371 - DNA, 19 bp, Homo sapiens
  siRNA target sequence for BTK (NM_000061.1,327-345).
caatagatgttgagaagat

SEQ ID NO: 74372 - DNA, 19 bp, Homo sapiens
  siRNA target sequence for BTK (NM_000061.1,332-350).
gatgttgagaagatcactt

SEQ ID NO: 74373 - DNA, 19 bp, Homo sapiens
  siRNA target sequence for BTK (NM_000061.1,364-382).
ggttcctgaaaaaaatcct

SEQ ID NO: 74374 - DNA, 19 bp, Homo sapiens
  siRNA target sequence for BTK (NM_000061.1,539-557).
caccagctcaaaaacgtaa

SEQ ID NO: 74375 - DNA, 19 bp, Homo sapiens
  siRNA target sequence for BTK (NM_000061.1,647-665).
gctatgggctgccaaattt

SEQ ID NO: 74376 - DNA, 19 bp, Homo sapiens
  siRNA target sequence for BTK (NM_000061.1,648-666).
ctatgggctgccaaatttt

SEQ ID NO: 74377 - DNA, 19 bp, Homo sapiens
  siRNA target sequence for BTK (NM_000061.1,817-835).
ggttgtggccctttatgat

SEQ ID NO: 74378 - DNA, 19 bp, Homo sapiens
  siRNA target sequence for BTK (NM_000061.1,838-856).
catgccaatgaatgcaaat

SEQ ID NO: 74379 - DNA, 19 bp, Homo sapiens
  siRNA target sequence for BTK (NM_000061.1,865-883).
gctgcggaagggtgatgaa

SEQ ID NO: 74380 - DNA, 19 bp, Homo sapiens
  siRNA target sequence for BTK (NM_000061.1,866-884).
ctgcggaagggtgatgaat

SEQ ID NO: 74381 - DNA, 19 bp, Homo sapiens
  siRNA target sequence for BTK (NM_000061.1,868-886).
gcggaagggtgatgaatat

SEQ ID NO: 74382 - DNA, 19 bp, Homo sapiens
  siRNA target sequence for BTK (NM_000061.1,869-887).
cggaagggtgatgaatatt

SEQ ID NO: 74383 - DNA, 19 bp, Homo sapiens
  siRNA target sequence for BTK (NM_000061.1,892-910).
cttggaggaaagcaactta

SEQ ID NO: 74384 - DNA, 19 bp, Homo sapiens
  siRNA target sequence for BTK (NM_000061.1,941-959).
caggaaggctacattccta

SEQ ID NO: 74385 - DNA, 19 bp, Homo sapiens
  siRNA target sequence for BTK (NM_000061.1,977-995).
gcagaagactccatagaaa

SEQ ID NO: 74386 - DNA, 19 bp, Homo sapiens
  siRNA target sequence for BTK (NM_000061.1,997-1015).
gtatgagtggtattccaaa

SEQ ID NO: 74387 - DNA, 19 bp, Homo sapiens
  siRNA target sequence for BTK (NM_000061.1,1149-1167).
gggtgatacgtcattatgt

SEQ ID NO: 74388 - DNA, 19 bp, Homo sapiens
  siRNA target sequence for BTK (NM_000061.1,1150-1168).
ggtgatacgtcattatgtt

SEQ ID NO: 74389 - DNA, 19 bp, Homo sapiens
  siRNA target sequence for BTK (NM_000061.1,1255-1273).
caactctgcaggactcata

SEQ ID NO: 74390 - DNA, 19 bp, Homo sapiens
  siRNA target sequence for BTK (NM_000061.1,1268-1286).
ctcatatccaggctcaaat

SEQ ID NO: 74391 - DNA, 19 bp, Homo sapiens
  siRNA target sequence for BTK (NM_000061.1,1289-1307).
ccagtgtctcaacaaaaca

SEQ ID NO: 74392 - DNA, 19 bp, Homo sapiens
  siRNA target sequence for BTK (NM_000061.1,1339-1357).
cggatcatgggaaattgat

SEQ ID NO: 74393 - DNA, 19 bp, Homo sapiens
  siRNA target sequence for BTK (NM_000061.1,1500-1518).
ccaaagtcatgatgaatct

SEQ ID NO: 74394 - DNA, 19 bp, Homo sapiens
  siRNA target sequence for BTK (NM_000061.1,1726-1744).
cctggcagctcgaaactgt

SEQ ID NO: 74395 - DNA, 19 bp, Homo sapiens
  siRNA target sequence for BTK (NM_000061.1,1727-1745).
ctggcagctcgaaactgtt

SEQ ID NO: 74396 - DNA, 19 bp, Homo sapiens
  siRNA target sequence for BTK (NM_000061.1,1733-1751).
gctcgaaactgtttggtaa

SEQ ID NO: 74397 - DNA, 19 bp, Homo sapiens
  siRNA target sequence for BTK (NM_000061.1,1757-1775).
caaggagttgttaaagtat

SEQ ID NO: 74398 - DNA, 19 bp, Homo sapiens
  siRNA target sequence for BTK (NM_000061.1,1857-1875).
caccggaagtcctgatgta

SEQ ID NO: 74399 - DNA, 19 bp, Homo sapiens
  siRNA target sequence for BTK (NM_000061.1,1859-1877).
ccggaagtcctgatgtata

SEQ ID NO: 74400 - DNA, 19 bp, Homo sapiens
  siRNA target sequence for BTK (NM_000061.1,1862-1880).
gaagtcctgatgtatagca

SEQ ID NO: 74401 - DNA, 19 bp, Homo sapiens
  siRNA target sequence for BTK (NM_000061.1,1974-1992).
gtgagactgctgaacacat

SEQ ID NO: 74402 - DNA, 19 bp, Homo sapiens
  siRNA target sequence for BTK (NM_000061.1,2027-2045).
gcttcagagaaggtatata

SEQ ID NO: 74403 - DNA, 19 bp, Homo sapiens
  siRNA target sequence for BTK (NM_000061.1,2081-2099).
gagcgtcccactttcaaaa

SEQ ID NO: 74404 - DNA, 19 bp, Homo sapiens
  siRNA target sequence for BUB1 (NM_004336.1,242-260).
gacccaagattcatcagtt

SEQ ID NO: 74405 - DNA, 19 bp, Homo sapiens
  siRNA target sequence for BUB1 (NM_004336.1,340-358).
gtcatcccctctgtacatt

SEQ ID NO: 74406 - DNA, 19 bp, Homo sapiens
  siRNA target sequence for BUB1 (NM_004336.1,458-476).
caacaacaatacaggttat

SEQ ID NO: 74407 - DNA, 19 bp, Homo sapiens
  siRNA target sequence for BUB1 (NM_004336.1,479-497).
cagacacgcctcactgaaa

SEQ ID NO: 74408 - DNA, 19 bp, Homo sapiens
  siRNA target sequence for BUB1 (NM_004336.1,525-543).
cagaacctctgcataatgt

SEQ ID NO: 74409 - DNA, 19 bp, Homo sapiens
  siRNA target sequence for BUB1 (NM_004336.1,562-580).
gataacatcaaaatcaaat

SEQ ID NO: 74410 - DNA, 19 bp, Homo sapiens
  siRNA target sequence for BUB1 (NM_004336.1,642-660).
cttcagcttgtgataaaga

SEQ ID NO: 74411 - DNA, 19 bp, Homo sapiens
  siRNA target sequence for BUB1 (NM_004336.1,674-692).
cgaagagtgatcacgattt

SEQ ID NO: 74412 - DNA, 19 bp, Homo sapiens
  siRNA target sequence for BUB1 (NM_004336.1,678-696).
gagtgatcacgatttctaa

SEQ ID NO: 74413 - DNA, 19 bp, Homo sapiens
  siRNA target sequence for BUB1 (NM_004336.1,680-698).
gtgatcacgatttctaaat

SEQ ID NO: 74414 - DNA, 19 bp, Homo sapiens
  siRNA target sequence for BUB1 (NM_004336.1,682-700).
gatcacgatttctaaatca

SEQ ID NO: 74415 - DNA, 19 bp, Homo sapiens
  siRNA target sequence for BUB1 (NM_004336.1,737-755).
gatgttgagcaggttgtta

SEQ ID NO: 74416 - DNA, 19 bp, Homo sapiens
  siRNA target sequence for BUB1 (NM_004336.1,826-844).
caatcaacggagaaagcat

SEQ ID NO: 74417 - DNA, 19 bp, Homo sapiens
  siRNA target sequence for BUB1 (NM_004336.1,841-859).
gcatgagcaatgggtaaat

SEQ ID NO: 74418 - DNA, 19 bp, Homo sapiens
  siRNA target sequence for BUB1 (NM_004336.1,897-915).
cttttgaagaacagctatt

SEQ ID NO: 74419 - DNA, 19 bp, Homo sapiens
  siRNA target sequence for BUB1 (NM_004336.1,994-1012).
ggaaaggtccgaggttaat

SEQ ID NO: 74420 - DNA, 19 bp, Homo sapiens
  siRNA target sequence for BUB1 (NM_004336.1,1259-1277).
gatgctggatgtgtgaata

SEQ ID NO: 74421 - DNA, 19 bp, Homo sapiens
  siRNA target sequence for BUB1 (NM_004336.1,1273-1291).
gaataagagtactcatgaa

SEQ ID NO: 74422 - DNA, 19 bp, Homo sapiens
  siRNA target sequence for BUB1 (NM_004336.1,1337-1355).
cataaggttgccaacacaa

SEQ ID NO: 74423 - DNA, 19 bp, Homo sapiens
  siRNA target sequence for BUB1 (NM_004336.1,1343-1361).
gttgccaacacaagttctt

SEQ ID NO: 74424 - DNA, 19 bp, Homo sapiens
  siRNA target sequence for BUB1 (NM_004336.1,1378-1396).
cacatcactgggaatggtt

SEQ ID NO: 74425 - DNA, 19 bp, Homo sapiens
  siRNA target sequence for BUB1 (NM_004336.1,1428-1446).
ccaccgtgcacacaaaaga

SEQ ID NO: 74426 - DNA, 19 bp, Homo sapiens
  siRNA target sequence for BUB1 (NM_004336.1,1429-1447).
caccgtgcacacaaaagaa

SEQ ID NO: 74427 - DNA, 19 bp, Homo sapiens
  siRNA target sequence for BUB1 (NM_004336.1,1448-1466).
gcattaggtttcatcatga

SEQ ID NO: 74428 - DNA, 19 bp, Homo sapiens
  siRNA target sequence for BUB1 (NM_004336.1,1471-1489).
gtttcaggctcctacactt

SEQ ID NO: 74429 - DNA, 19 bp, Homo sapiens
  siRNA target sequence for BUB1 (NM_004336.1,1479-1497).
ctcctacacttcctgatat

SEQ ID NO: 74430 - DNA, 19 bp, Homo sapiens
  siRNA target sequence for BUB1 (NM_004336.1,1583-1601).
ggggcttggggagtcaata

SEQ ID NO: 74431 - DNA, 19 bp, Homo sapiens
  siRNA target sequence for BUB1 (NM_004336.1,1584-1602).
gggcttggggagtcaataa

SEQ ID NO: 74432 - DNA, 19 bp, Homo sapiens
  siRNA target sequence for BUB1 (NM_004336.1,1586-1604).
gcttggggagtcaataaga

SEQ ID NO: 74433 - DNA, 19 bp, Homo sapiens
  siRNA target sequence for BUB1 (NM_004336.1,1587-1605).
cttggggagtcaataagat

SEQ ID NO: 74434 - DNA, 19 bp, Homo sapiens
  siRNA target sequence for BUB1 (NM_004336.1,1592-1610).
ggagtcaataagatcatct

SEQ ID NO: 74435 - DNA, 19 bp, Homo sapiens
  siRNA target sequence for BUB1 (NM_004336.1,1795-1813).
gggtattcgctgcaacaaa

SEQ ID NO: 74436 - DNA, 19 bp, Homo sapiens
  siRNA target sequence for BUB1 (NM_004336.1,1796-1814).
ggtattcgctgcaacaaaa

SEQ ID NO: 74437 - DNA, 19 bp, Homo sapiens
  siRNA target sequence for BUB1 (NM_004336.1,1952-1970).
caggcgactttggattctt

SEQ ID NO: 74438 - DNA, 19 bp, Homo sapiens
  siRNA target sequence for BUB1 (NM_004336.1,1954-1972).
ggcgactttggattcttgt

SEQ ID NO: 74439 - DNA, 19 bp, Homo sapiens
  siRNA target sequence for BUB1 (NM_004336.1,1990-2008).
gccttcaagggatggaaaa

SEQ ID NO: 74440 - DNA, 19 bp, Homo sapiens
  siRNA target sequence for BUB1 (NM_004336.1,2004-2022).
gaaaattcagtccaattca

SEQ ID NO: 74441 - DNA, 19 bp, Homo sapiens
  siRNA target sequence for BUB1 (NM_004336.1,2043-2061).
ccttgtcgtctcacatgta

SEQ ID NO: 74442 - DNA, 19 bp, Homo sapiens
  siRNA target sequence for BUB1 (NM_004336.1,2044-2062).
cttgtcgtctcacatgtat

SEQ ID NO: 74443 - DNA, 19 bp, Homo sapiens
  siRNA target sequence for BUB1 (NM_004336.1,2047-2065).
gtcgtctcacatgtattca

SEQ ID NO: 74444 - DNA, 19 bp, Homo sapiens
  siRNA target sequence for BUB1 (NM_004336.1,2161-2179).
cgctgccattgcagaagat

SEQ ID NO: 74445 - DNA, 19 bp, Homo sapiens
  siRNA target sequence for BUB1 (NM_004336.1,2210-2228).
gaatggatgcagatgagtt

SEQ ID NO: 74446 - DNA, 19 bp, Homo sapiens
  siRNA target sequence for BUB1 (NM_004336.1,2215-2233).
gatgcagatgagttcactt

SEQ ID NO: 74447 - DNA, 19 bp, Homo sapiens
  siRNA target sequence for BUB1 (NM_004336.1,2238-2256).
ctgttgatgctccaaactt

SEQ ID NO: 74448 - DNA, 19 bp, Homo sapiens
  siRNA target sequence for BUB1 (NM_004336.1,2264-2282).
gggaacccatgggatgata

SEQ ID NO: 74449 - DNA, 19 bp, Homo sapiens
  siRNA target sequence for BUB1 (NM_004336.1,2274-2292).
gggatgataagctgatttt

SEQ ID NO: 74450 - DNA, 19 bp, Homo sapiens
  siRNA target sequence for BUB1 (NM_004336.1,2318-2336).
ccagtgagttcctatccaa

SEQ ID NO: 74451 - DNA, 19 bp, Homo sapiens
  siRNA target sequence for BUB1 (NM_004336.1,2323-2341).
gagttcctatccaaatact

SEQ ID NO: 74452 - DNA, 19 bp, Homo sapiens
  siRNA target sequence for BUB1 (NM_004336.1,2328-2346).
cctatccaaatacttttga

SEQ ID NO: 74453 - DNA, 19 bp, Homo sapiens
  siRNA target sequence for BUB1 (NM_004336.1,2375-2393).
cccaagactgaatttcaat

SEQ ID NO: 74454 - DNA, 19 bp, Homo sapiens
  siRNA target sequence for BUB1 (NM_004336.1,2471-2489).
gatctgaatgatgctaaaa

SEQ ID NO: 74455 - DNA, 19 bp, Homo sapiens
  siRNA target sequence for BUB1 (NM_004336.1,2580-2598).
ctatgcagcacatgtttat

SEQ ID NO: 74456 - DNA, 19 bp, Homo sapiens
  siRNA target sequence for BUB1 (NM_004336.1,2588-2606).
cacatgtttatgaagttct

SEQ ID NO: 74457 - DNA, 19 bp, Homo sapiens
  siRNA target sequence for BUB1 (NM_004336.1,2626-2644).
gaatggcagtgtattagta

SEQ ID NO: 74458 - DNA, 19 bp, Homo sapiens
  siRNA target sequence for BUB1 (NM_004336.1,2653-2671).
ctacagctatggaacatta

SEQ ID NO: 74459 - DNA, 19 bp, Homo sapiens
  siRNA target sequence for BUB1 (NM_004336.1,2656-2674).
cagctatggaacattatta

SEQ ID NO: 74460 - DNA, 19 bp, Homo sapiens
  siRNA target sequence for BUB1 (NM_004336.1,2741-2759).
gctatgagaatgctttaca

SEQ ID NO: 74461 - DNA, 19 bp, Homo sapiens
  siRNA target sequence for BUB1 (NM_004336.1,2742-2760).
ctatgagaatgctttacat

SEQ ID NO: 74462 - DNA, 19 bp, Homo sapiens
  siRNA target sequence for BUB1 (NM_004336.1,2748-2766).
gaatgctttacatgattga

SEQ ID NO: 74463 - DNA, 19 bp, Homo sapiens
  siRNA target sequence for BUB1 (NM_004336.1,2888-2906).
ctgggtcagagtatagata

SEQ ID NO: 74464 - DNA, 19 bp, Homo sapiens
  siRNA target sequence for BUB1 (NM_004336.1,2891-2909).
ggtcagagtatagatatga

SEQ ID NO: 74465 - DNA, 19 bp, Homo sapiens
  siRNA target sequence for BUB1 (NM_004336.1,2892-2910).
gtcagagtatagatatgaa

SEQ ID NO: 74466 - DNA, 19 bp, Homo sapiens
  siRNA target sequence for BUB1 (NM_004336.1,2994-3012).
ggaactaccagatcgatta

SEQ ID NO: 74467 - DNA, 19 bp, Homo sapiens
  siRNA target sequence for BUB1 (NM_004336.1,2998-3016).
ctaccagatcgattacttt

SEQ ID NO: 74468 - DNA, 19 bp, Homo sapiens
  siRNA target sequence for BUB1 (NM_004336.1,3017-3035).
ggggttgctgcaacagtat

SEQ ID NO: 74469 - DNA, 19 bp, Homo sapiens
  siRNA target sequence for BUB1 (NM_004336.1,3020-3038).
gttgctgcaacagtatatt

SEQ ID NO: 74470 - DNA, 19 bp, Homo sapiens
  siRNA target sequence for BUB1 (NM_004336.1,3050-3068).
ggcacttacatgaaagtga

SEQ ID NO: 74471 - DNA, 19 bp, Homo sapiens
  siRNA target sequence for BUB1 (NM_004336.1,3087-3105).
gtaagcctgaaggtctttt

SEQ ID NO: 74472 - DNA, 19 bp, Homo sapiens
  siRNA target sequence for BUB1 (NM_004336.1,3091-3109).
gcctgaaggtctttttaga

SEQ ID NO: 74473 - DNA, 19 bp, Homo sapiens
  siRNA target sequence for BUB1 (NM_004336.1,3111-3129).
ggcttcctcatttggatat

SEQ ID NO: 74474 - DNA, 19 bp, Homo sapiens
  siRNA target sequence for BUB1 (NM_004336.1,3218-3236).
gtatttcaacaacactata

SEQ ID NO: 74475 - DNA, 19 bp, Homo sapiens
  siRNA target sequence for BUB1 (NM_004336.1,3224-3242).
caacaacactatactaaca

SEQ ID NO: 74476 - DNA, 19 bp, Homo sapiens
  siRNA target sequence for BUB1 (NM_004336.1,3244-3262).
gattagggccctacgtaat

SEQ ID NO: 74477 - DNA, 19 bp, Homo sapiens
  siRNA target sequence for BUB1 (NM_004336.1,3253-3271).
cctacgtaataggctaatt

SEQ ID NO: 74478 - DNA, 19 bp, Homo sapiens
  siRNA target sequence for BUB1 (NM_004336.1,3272-3290).
gtactgctcttagaatgta

SEQ ID NO: 74479 - DNA, 19 bp, Homo sapiens
  siRNA target sequence for BUB1B (NM_001211.3,273-291).
caagaatctgcctgtaaca

SEQ ID NO: 74480 - DNA, 19 bp, Homo sapiens
  siRNA target sequence for BUB1B (NM_001211.3,276-294).
gaatctgcctgtaacaata

SEQ ID NO: 74481 - DNA, 19 bp, Homo sapiens
  siRNA target sequence for BUB1B (NM_001211.3,312-330).
cgggcatttgaatatgaaa

SEQ ID NO: 74482 - DNA, 19 bp, Homo sapiens
  siRNA target sequence for BUB1B (NM_001211.3,359-377).
ggatgtttgggataggtat

SEQ ID NO: 74483 - DNA, 19 bp, Homo sapiens
  siRNA target sequence for BUB1B (NM_001211.3,408-426).
ggtgggaaggagagtaata

SEQ ID NO: 74484 - DNA, 19 bp, Homo sapiens
  siRNA target sequence for BUB1B (NM_001211.3,411-429).
gggaaggagagtaatatgt

SEQ ID NO: 74485 - DNA, 19 bp, Homo sapiens
  siRNA target sequence for BUB1B (NM_001211.3,419-437).
gagtaatatgtcaacgtta

SEQ ID NO: 74486 - DNA, 19 bp, Homo sapiens
  siRNA target sequence for BUB1B (NM_001211.3,421-439).
gtaatatgtcaacgttatt

SEQ ID NO: 74487 - DNA, 19 bp, Homo sapiens
  siRNA target sequence for BUB1B (NM_001211.3,428-446).
gtcaacgttattagaaaga

SEQ ID NO: 74488 - DNA, 19 bp, Homo sapiens
  siRNA target sequence for BUB1B (NM_001211.3,500-518).
caatctctggcttaaatta

SEQ ID NO: 74489 - DNA, 19 bp, Homo sapiens
  siRNA target sequence for BUB1B (NM_001211.3,510-528).
cttaaattagggcgtttat

SEQ ID NO: 74490 - DNA, 19 bp, Homo sapiens
  siRNA target sequence for BUB1B (NM_001211.3,534-552).
gagcctttggatatgtaca

SEQ ID NO: 74491 - DNA, 19 bp, Homo sapiens
  siRNA target sequence for BUB1B (NM_001211.3,583-601).
cacttgctcagttctatat

SEQ ID NO: 74492 - DNA, 19 bp, Homo sapiens
  siRNA target sequence for BUB1B (NM_001211.3,585-603).
cttgctcagttctatatct

SEQ ID NO: 74493 - DNA, 19 bp, Homo sapiens
  siRNA target sequence for BUB1B (NM_001211.3,640-658).
ggaaagcagatgcgatatt

SEQ ID NO: 74494 - DNA, 19 bp, Homo sapiens
  siRNA target sequence for BUB1B (NM_001211.3,706-724).
cccagcaccgacaattcca

SEQ ID NO: 74495 - DNA, 19 bp, Homo sapiens
  siRNA target sequence for BUB1B (NM_001211.3,707-725).
ccagcaccgacaattccaa

SEQ ID NO: 74496 - DNA, 19 bp, Homo sapiens
  siRNA target sequence for BUB1B (NM_001211.3,730-748).
gagtgtctcggcaaactct

SEQ ID NO: 74497 - DNA, 19 bp, Homo sapiens
  siRNA target sequence for BUB1B (NM_001211.3,982-1000).
ctacagcagagttgtctaa

SEQ ID NO: 74498 - DNA, 19 bp, Homo sapiens
  siRNA target sequence for BUB1B (NM_001211.3,1034-1052).
gcccagggccaaagagaat

SEQ ID NO: 74499 - DNA, 19 bp, Homo sapiens
  siRNA target sequence for BUB1B (NM_001211.3,1097-1115).
caggcctcgtggcaataca

SEQ ID NO: 74500 - DNA, 19 bp, Homo sapiens
  siRNA target sequence for BUB1B (NM_001211.3,1109-1127).
caatacagcttcactgata

SEQ ID NO: 74501 - DNA, 19 bp, Homo sapiens
  siRNA target sequence for BUB1B (NM_001211.3,1186-1204).
cagttatgacaccatgtaa

SEQ ID NO: 74502 - DNA, 19 bp, Homo sapiens
  siRNA target sequence for BUB1B (NM_001211.3,1201-1219).
gtaaaattgaacctagtat

SEQ ID NO: 74503 - DNA, 19 bp, Homo sapiens
  siRNA target sequence for BUB1B (NM_001211.3,1586-1604).
cgagtctcagaaaatacca

SEQ ID NO: 74504 - DNA, 19 bp, Homo sapiens
  siRNA target sequence for BUB1B (NM_001211.3,1626-1644).
gtttgtcaagtaaactgtt

SEQ ID NO: 74505 - DNA, 19 bp, Homo sapiens
  siRNA target sequence for BUB1B (NM_001211.3,1640-1658).
ctgttgtgccagagaaact

SEQ ID NO: 74506 - DNA, 19 bp, Homo sapiens
  siRNA target sequence for BUB1B (NM_001211.3,1657-1675).
cttcacttgcggagaacat

SEQ ID NO: 74507 - DNA, 19 bp, Homo sapiens
  siRNA target sequence for BUB1B (NM_001211.3,1682-1700).
ggaacaacctcattctaaa

SEQ ID NO: 74508 - DNA, 19 bp, Homo sapiens
  siRNA target sequence for BUB1B (NM_001211.3,1771-1789).
cagatcccccacgagtttt

SEQ ID NO: 74509 - DNA, 19 bp, Homo sapiens
  siRNA target sequence for BUB1B (NM_001211.3,1832-1850).
catcacctcaaatgaagat

SEQ ID NO: 74510 - DNA, 19 bp, Homo sapiens
  siRNA target sequence for BUB1B (NM_001211.3,1853-1871).
gtctccagatgtttgtgat

SEQ ID NO: 74511 - DNA, 19 bp, Homo sapiens
  siRNA target sequence for BUB1B (NM_001211.3,1969-1987).
ccagagcagctcgttttgt

SEQ ID NO: 74512 - DNA, 19 bp, Homo sapiens
  siRNA target sequence for BUB1B (NM_001211.3,1990-2008).
ccactccttttcatgagat

SEQ ID NO: 74513 - DNA, 19 bp, Homo sapiens
  siRNA target sequence for BUB1B (NM_001211.3,1991-2009).
cactccttttcatgagata

SEQ ID NO: 74514 - DNA, 19 bp, Homo sapiens
  siRNA target sequence for BUB1B (NM_001211.3,1993-2011).
ctccttttcatgagataat

SEQ ID NO: 74515 - DNA, 19 bp, Homo sapiens
  siRNA target sequence for BUB1B (NM_001211.3,2048-2066).
gttaccggaagaagatcta

SEQ ID NO: 74516 - DNA, 19 bp, Homo sapiens
  siRNA target sequence for BUB1B (NM_001211.3,2095-2113).
cagcttgtggcactatcta

SEQ ID NO: 74517 - DNA, 19 bp, Homo sapiens
  siRNA target sequence for BUB1B (NM_001211.3,2135-2153).
gaagctgagcccaattatt

SEQ ID NO: 74518 - DNA, 19 bp, Homo sapiens
  siRNA target sequence for BUB1B (NM_001211.3,2349-2367).
gcctctgcagagttgtgta

SEQ ID NO: 74519 - DNA, 19 bp, Homo sapiens
  siRNA target sequence for BUB1B (NM_001211.3,2350-2368).
cctctgcagagttgtgtat

SEQ ID NO: 74520 - DNA, 19 bp, Homo sapiens
  siRNA target sequence for BUB1B (NM_001211.3,2379-2397).
ccaatgcctaagttggaaa

SEQ ID NO: 74521 - DNA, 19 bp, Homo sapiens
  siRNA target sequence for BUB1B (NM_001211.3,2380-2398).
caatgcctaagttggaaat

SEQ ID NO: 74522 - DNA, 19 bp, Homo sapiens
  siRNA target sequence for BUB1B (NM_001211.3,2385-2403).
cctaagttggaaattgaga

SEQ ID NO: 74523 - DNA, 19 bp, Homo sapiens
  siRNA target sequence for BUB1B (NM_001211.3,2434-2452).
gcattaaacgagaatacct

SEQ ID NO: 74524 - DNA, 19 bp, Homo sapiens
  siRNA target sequence for BUB1B (NM_001211.3,2435-2453).
cattaaacgagaataccta

SEQ ID NO: 74525 - DNA, 19 bp, Homo sapiens
  siRNA target sequence for BUB1B (NM_001211.3,2488-2506).
caagaaactctgcagaatt

SEQ ID NO: 74526 - DNA, 19 bp, Homo sapiens
  siRNA target sequence for BUB1B (NM_001211.3,2532-2550).
cctgtcccatgggactttt

SEQ ID NO: 74527 - DNA, 19 bp, Homo sapiens
  siRNA target sequence for BUB1B (NM_001211.3,2533-2551).
ctgtcccatgggactttta

SEQ ID NO: 74528 - DNA, 19 bp, Homo sapiens
  siRNA target sequence for BUB1B (NM_001211.3,2561-2579).
caagttaaaggaacgttta

SEQ ID NO: 74529 - DNA, 19 bp, Homo sapiens
  siRNA target sequence for BUB1B (NM_001211.3,2586-2604).
gattttgatcatttttgca

SEQ ID NO: 74530 - DNA, 19 bp, Homo sapiens
  siRNA target sequence for BUB1B (NM_001211.3,2605-2623).
gctgttatcaatatcaaga

SEQ ID NO: 74531 - DNA, 19 bp, Homo sapiens
  siRNA target sequence for BUB1B (NM_001211.3,2629-2647).
gtattgtttggcaccaata

SEQ ID NO: 74532 - DNA, 19 bp, Homo sapiens
  siRNA target sequence for BUB1B (NM_001211.3,2634-2652).
gtttggcaccaatatataa

SEQ ID NO: 74533 - DNA, 19 bp, Homo sapiens
  siRNA target sequence for BUB1B (NM_001211.3,2673-2691).
cttctccaacacagtgaat

SEQ ID NO: 74534 - DNA, 19 bp, Homo sapiens
  siRNA target sequence for BUB1B (NM_001211.3,2676-2694).
ctccaacacagtgaatata

SEQ ID NO: 74535 - DNA, 19 bp, Homo sapiens
  siRNA target sequence for BUB1B (NM_001211.3,2678-2696).
ccaacacagtgaatatatt

SEQ ID NO: 74536 - DNA, 19 bp, Homo sapiens
  siRNA target sequence for BUB1B (NM_001211.3,2785-2803).
gtccaaggtgtctgattct

SEQ ID NO: 74537 - DNA, 19 bp, Homo sapiens
  siRNA target sequence for BUB1B (NM_001211.3,2816-2834).
ccacgatccctatgattgt

SEQ ID NO: 74538 - DNA, 19 bp, Homo sapiens
  siRNA target sequence for BUB1B (NM_001211.3,2817-2835).
cacgatccctatgattgta

SEQ ID NO: 74539 - DNA, 19 bp, Homo sapiens
  siRNA target sequence for BUB1B (NM_001211.3,2820-2838).
gatccctatgattgtaaca

SEQ ID NO: 74540 - DNA, 19 bp, Homo sapiens
  siRNA target sequence for BUB1B (NM_001211.3,2843-2861).
caatcaagctttgaagata

SEQ ID NO: 74541 - DNA, 19 bp, Homo sapiens
  siRNA target sequence for BUB1B (NM_001211.3,2890-2908).
gggtgcagctggatgtttt

SEQ ID NO: 74542 - DNA, 19 bp, Homo sapiens
  siRNA target sequence for BUB1B (NM_001211.3,2891-2909).
ggtgcagctggatgttttt

SEQ ID NO: 74543 - DNA, 19 bp, Homo sapiens
  siRNA target sequence for BUB1B (NM_001211.3,2892-2910).
gtgcagctggatgttttta

SEQ ID NO: 74544 - DNA, 19 bp, Homo sapiens
  siRNA target sequence for BUB1B (NM_001211.3,2920-2938).
gctttcggactgtacagat

SEQ ID NO: 74545 - DNA, 19 bp, Homo sapiens
  siRNA target sequence for BUB1B (NM_001211.3,3067-3085).
ggaaacttagccaaaatat

SEQ ID NO: 74546 - DNA, 19 bp, Homo sapiens
  siRNA target sequence for BUB1B (NM_001211.3,3099-3117).
gatggtgaattgtggaata

SEQ ID NO: 74547 - DNA, 19 bp, Homo sapiens
  siRNA target sequence for BUB1B (NM_001211.3,3195-3213).
ggggtttttgacactacat

SEQ ID NO: 74548 - DNA, 19 bp, Homo sapiens
  siRNA target sequence for BUB1B (NM_001211.3,3225-3243).
ctgaacaaagccttatgga

SEQ ID NO: 74549 - DNA, 19 bp, Homo sapiens
  siRNA target sequence for BUB1B (NM_001211.3,3242-3260).
gaaggtagggaagttaact

SEQ ID NO: 74550 - DNA, 19 bp, Homo sapiens
  siRNA target sequence for BUB1B (NM_001211.3,3245-3263).
ggtagggaagttaactagt

SEQ ID NO: 74551 - DNA, 19 bp, Homo sapiens
  siRNA target sequence for BUB1B (NM_001211.3,3267-3285).
ggggctttgctctttcagt

SEQ ID NO: 74552 - DNA, 19 bp, Homo sapiens
  siRNA target sequence for C14orf127 (NM_025152.1,90-108).
ggagtgagaccctaaaaca

SEQ ID NO: 74553 - DNA, 19 bp, Homo sapiens
  siRNA target sequence for C14orf127 (NM_025152.1,153-171).
cgatagaaggtgttaaaca

SEQ ID NO: 74554 - DNA, 19 bp, Homo sapiens
  siRNA target sequence for C14orf127 (NM_025152.1,197-215).
ggtggagtcggaaaatcta

SEQ ID NO: 74555 - DNA, 19 bp, Homo sapiens
  siRNA target sequence for C14orf127 (NM_025152.1,213-231).
ctactacagcagtgaatct

SEQ ID NO: 74556 - DNA, 19 bp, Homo sapiens
  siRNA target sequence for C14orf127 (NM_025152.1,239-257).
gcactagcagcgaacgatt

SEQ ID NO: 74557 - DNA, 19 bp, Homo sapiens
  siRNA target sequence for C14orf127 (NM_025152.1,258-276).
cgtccaaggccattggttt

SEQ ID NO: 74558 - DNA, 19 bp, Homo sapiens
  siRNA target sequence for C14orf127 (NM_025152.1,267-285).
ccattggtttgctagatgt

SEQ ID NO: 74559 - DNA, 19 bp, Homo sapiens
  siRNA target sequence for C14orf127 (NM_025152.1,300-318).
cttcagttccaaagatgat

SEQ ID NO: 74560 - DNA, 19 bp, Homo sapiens
  siRNA target sequence for C14orf127 (NM_025152.1,330-348).
gaaatccggaattatcaca

SEQ ID NO: 74561 - DNA, 19 bp, Homo sapiens
  siRNA target sequence for C14orf127 (NM_025152.1,365-383).
cctctcttgaattatggta

SEQ ID NO: 74562 - DNA, 19 bp, Homo sapiens
  siRNA target sequence for C14orf127 (NM_025152.1,370-388).
cttgaattatggtattgct

SEQ ID NO: 74563 - DNA, 19 bp, Homo sapiens
  siRNA target sequence for C14orf127 (NM_025152.1,381-399).
gtattgcttgtatgtctat

SEQ ID NO: 74564 - DNA, 19 bp, Homo sapiens
  siRNA target sequence for C14orf127 (NM_025152.1,400-418).
gggctttctggttgaagaa

SEQ ID NO: 74565 - DNA, 19 bp, Homo sapiens
  siRNA target sequence for C14orf127 (NM_025152.1,401-419).
ggctttctggttgaagaaa

SEQ ID NO: 74566 - DNA, 19 bp, Homo sapiens
  siRNA target sequence for C14orf127 (NM_025152.1,416-434).
gaaagtgaaccagtagttt

SEQ ID NO: 74567 - DNA, 19 bp, Homo sapiens
  siRNA target sequence for C14orf127 (NM_025152.1,435-453).
ggagaggccttatggtaat

SEQ ID NO: 74568 - DNA, 19 bp, Homo sapiens
  siRNA target sequence for C14orf127 (NM_025152.1,449-467).
gtaatgtcggccattgaga

SEQ ID NO: 74569 - DNA, 19 bp, Homo sapiens
  siRNA target sequence for C14orf127 (NM_025152.1,456-474).
cggccattgagaaattgtt

SEQ ID NO: 74570 - DNA, 19 bp, Homo sapiens
  siRNA target sequence for C14orf127 (NM_025152.1,489-507).
ggggtcaactggactactt

SEQ ID NO: 74571 - DNA, 19 bp, Homo sapiens
  siRNA target sequence for C14orf127 (NM_025152.1,490-508).
gggtcaactggactactta

SEQ ID NO: 74572 - DNA, 19 bp, Homo sapiens
  siRNA target sequence for C14orf127 (NM_025152.1,492-510).
gtcaactggactacttagt

SEQ ID NO: 74573 - DNA, 19 bp, Homo sapiens
  siRNA target sequence for C14orf127 (NM_025152.1,534-552).
gagatgtgcagttatcagt

SEQ ID NO: 74574 - DNA, 19 bp, Homo sapiens
  siRNA target sequence for C14orf127 (NM_025152.1,597-615).
cccaggacatcgcattgat

SEQ ID NO: 74575 - DNA, 19 bp, Homo sapiens
  siRNA target sequence for C14orf127 (NM_025152.1,625-643).
caagggtgctgagatgttt

SEQ ID NO: 74576 - DNA, 19 bp, Homo sapiens
  siRNA target sequence for C14orf127 (NM_025152.1,668-686).
ggccttgtccaaaacatga

SEQ ID NO: 74577 - DNA, 19 bp, Homo sapiens
  siRNA target sequence for C14orf127 (NM_025152.1,708-726).
gtaaacacaaaactcatat

SEQ ID NO: 74578 - DNA, 19 bp, Homo sapiens
  siRNA target sequence for C14orf127 (NM_025152.1,787-805).
cattcccttacaccttaat

SEQ ID NO: 74579 - DNA, 19 bp, Homo sapiens
  siRNA target sequence for C14orf127 (NM_025152.1,825-843).
caggccagccaattgtgtt

SEQ ID NO: 74580 - DNA, 19 bp, Homo sapiens
  siRNA target sequence for C14orf127 (NM_025152.1,827-845).
ggccagccaattgtgtttt

SEQ ID NO: 74581 - DNA, 19 bp, Homo sapiens
  siRNA target sequence for C14orf127 (NM_025152.1,858-876).
gtgatgaggccaaagctta

SEQ ID NO: 74582 - DNA, 19 bp, Homo sapiens
  siRNA target sequence for C14orf131 (NM_018335.1,28-46).
caagattacctcagtagtt

SEQ ID NO: 74583 - DNA, 19 bp, Homo sapiens
  siRNA target sequence for C14orf131 (NM_018335.1,90-108).
ggttgctgagtcattagga

SEQ ID NO: 74584 - DNA, 19 bp, Homo sapiens
  siRNA target sequence for C14orf131 (NM_018335.1,91-109).
gttgctgagtcattaggaa

SEQ ID NO: 74585 - DNA, 19 bp, Homo sapiens
  siRNA target sequence for C14orf131 (NM_018335.1,240-258).
gggactggcctcagtgaaa

SEQ ID NO: 74586 - DNA, 19 bp, Homo sapiens
  siRNA target sequence for C14orf131 (NM_018335.1,271-289).
gaagccctgtccaacgata

SEQ ID NO: 74587 - DNA, 19 bp, Homo sapiens
  siRNA target sequence for C14orf131 (NM_018335.1,282-300).
caacgataccactgaatct

SEQ ID NO: 74588 - DNA, 19 bp, Homo sapiens
  siRNA target sequence for C14orf131 (NM_018335.1,387-405).
ctctccccgttctgaagaa

SEQ ID NO: 74589 - DNA, 19 bp, Homo sapiens
  siRNA target sequence for C14orf131 (NM_018335.1,739-757).
ggacacctcggcaaggttt

SEQ ID NO: 74590 - DNA, 19 bp, Homo sapiens
  siRNA target sequence for C14orf131 (NM_018335.1,821-839).
cccctccgcttgagaaaat

SEQ ID NO: 74591 - DNA, 19 bp, Homo sapiens
  siRNA target sequence for C14orf131 (NM_018335.1,823-841).
cctccgcttgagaaaattt

SEQ ID NO: 74592 - DNA, 19 bp, Homo sapiens
  siRNA target sequence for C14orf131 (NM_018335.1,824-842).
ctccgcttgagaaaatttt

SEQ ID NO: 74593 - DNA, 19 bp, Homo sapiens
  siRNA target sequence for C14orf131 (NM_018335.1,828-846).
gcttgagaaaattttgtct

SEQ ID NO: 74594 - DNA, 19 bp, Homo sapiens
  siRNA target sequence for C14orf131 (NM_018335.1,908-926).
gcccacatggatcactatt

SEQ ID NO: 74595 - DNA, 19 bp, Homo sapiens
  siRNA target sequence for C14orf131 (NM_018335.1,910-928).
ccacatggatcactattga

SEQ ID NO: 74596 - DNA, 19 bp, Homo sapiens
  siRNA target sequence for C14orf131 (NM_018335.1,947-965).
gcctttcgggggacttgaa

SEQ ID NO: 74597 - DNA, 19 bp, Homo sapiens
  siRNA target sequence for C14orf131 (NM_018335.1,1041-1059).
ggcttttgaaatttccaat

SEQ ID NO: 74598 - DNA, 19 bp, Homo sapiens
  siRNA target sequence for C14orf131 (NM_018335.1,1109-1127).
cttccgatgggcttatctt

SEQ ID NO: 74599 - DNA, 19 bp, Homo sapiens
  siRNA target sequence for C14orf131 (NM_018335.1,1128-1146).
gtcccctccaggtacaata

SEQ ID NO: 74600 - DNA, 19 bp, Homo sapiens
  siRNA target sequence for C14orf131 (NM_018335.1,1132-1150).
cctccaggtacaatagtgt

SEQ ID NO: 74601 - DNA, 19 bp, Homo sapiens
  siRNA target sequence for C14orf20 (NM_174944.1,745-763).
cttcttaccgccaagtgaa

SEQ ID NO: 74602 - DNA, 19 bp, Homo sapiens
  siRNA target sequence for C14orf20 (NM_174944.1,753-771).
cgccaagtgaactgctttt

SEQ ID NO: 74603 - DNA, 19 bp, Homo sapiens
  siRNA target sequence for C14orf20 (NM_174944.1,774-792).
cacctcagccagacttact

SEQ ID NO: 74604 - DNA, 19 bp, Homo sapiens
  siRNA target sequence for C14orf20 (NM_174944.1,809-827).
cgcttgcccagagatctta

SEQ ID NO: 74605 - DNA, 19 bp, Homo sapiens
  siRNA target sequence for C14orf20 (NM_174944.1,868-886).
gcatgggcgtcatccttta

SEQ ID NO: 74606 - DNA, 19 bp, Homo sapiens
  siRNA target sequence for C14orf20 (NM_174944.1,872-890).
gggcgtcatcctttacact

SEQ ID NO: 74607 - DNA, 19 bp, Homo sapiens
  siRNA target sequence for C14orf20 (NM_174944.1,949-967).
ctcagaaggaggtcacttt

SEQ ID NO: 74608 - DNA, 19 bp, Homo sapiens
  siRNA target sequence for C14orf20 (NM_174944.1,1136-1154).
gctccacaacaccactaaa

SEQ ID NO: 74609 - DNA, 19 bp, Homo sapiens
  siRNA target sequence for C14orf20 (NM_174944.1,1158-1176).
caccaatccttgcaaatta

SEQ ID NO: 74610 - DNA, 19 bp, Homo sapiens
  siRNA target sequence for C14orf20 (NM_174944.1,1161-1179).
caatccttgcaaattacga

SEQ ID NO: 74611 - DNA, 19 bp, Homo sapiens
  siRNA target sequence for C20orf23 (NM_017683.1,216-234).
cttggaggccaagttcatt

SEQ ID NO: 74612 - DNA, 19 bp, Homo sapiens
  siRNA target sequence for C20orf23 (NM_017683.1,251-269).
gcaaaacgacaatcacaaa

SEQ ID NO: 74613 - DNA, 19 bp, Homo sapiens
  siRNA target sequence for C20orf23 (NM_017683.1,257-275).
cgacaatcacaaacttaaa

SEQ ID NO: 74614 - DNA, 19 bp, Homo sapiens
  siRNA target sequence for C20orf23 (NM_017683.1,359-377).
caaaaagcccagattacgt

SEQ ID NO: 74615 - DNA, 19 bp, Homo sapiens
  siRNA target sequence for C20orf23 (NM_017683.1,366-384).
cccagattacgtttcacaa

SEQ ID NO: 74616 - DNA, 19 bp, Homo sapiens
  siRNA target sequence for C20orf23 (NM_017683.1,370-388).
gattacgtttcacaagaaa

SEQ ID NO: 74617 - DNA, 19 bp, Homo sapiens
  siRNA target sequence for C20orf23 (NM_017683.1,375-393).
cgtttcacaagaaatggtt

SEQ ID NO: 74618 - DNA, 19 bp, Homo sapiens
  siRNA target sequence for C20orf23 (NM_017683.1,478-496).
ggaaagtcatacactatga

SEQ ID NO: 74619 - DNA, 19 bp, Homo sapiens
  siRNA target sequence for C20orf23 (NM_017683.1,479-497).
gaaagtcatacactatgat

SEQ ID NO: 74620 - DNA, 19 bp, Homo sapiens
  siRNA target sequence for C20orf23 (NM_017683.1,542-560).
gactcttcagtcggataaa

SEQ ID NO: 74621 - DNA, 19 bp, Homo sapiens
  siRNA target sequence for C20orf23 (NM_017683.1,576-594).
ggatgaagcttcttttcga

SEQ ID NO: 74622 - DNA, 19 bp, Homo sapiens
  siRNA target sequence for C20orf23 (NM_017683.1,577-595).
gatgaagcttcttttcgaa

SEQ ID NO: 74623 - DNA, 19 bp, Homo sapiens
  siRNA target sequence for C20orf23 (NM_017683.1,624-642).
cgaacgtgtgagagatcta

SEQ ID NO: 74624 - DNA, 19 bp, Homo sapiens
  siRNA target sequence for C20orf23 (NM_017683.1,640-658).
ctacttcggcggaagtcat

SEQ ID NO: 74625 - DNA, 19 bp, Homo sapiens
  siRNA target sequence for C20orf23 (NM_017683.1,643-661).
cttcggcggaagtcatcta
